(19) United States
(12) Patent Application Publication
(10) Pub. No.: US 2019/0016770 A1
(43) Pub. Date: Jan. 17, 2019

(54) COMPOUNDS FOR INDUCING TISSUE FORMATION AND USES THEREOF

(71) Applicant: HISTIDE AG, Schindellegi (CH)

(72) Inventor: Omar F. ZOUANI, Einsiedeln (CH)

(21) Appl. No.: 15/744,980

(22) PCT Filed: Aug. 25, 2016
(86) PCT No.: PCT/EP2016/070130

§ 371 Date: Jan. 15, 2018

Related U.S. Application Data
(60) Provisional application No. 62/209,406, filed on Aug. 25, 2015.

(30) Foreign Application Priority Data
Dec. 23, 2015 (EP) 15307126.1

(51) Int. Cl. C07K 14/51; C07K 14/71

(52) U.S. Cl. CPC C07K 14/51; C07K 2299/00; C07K 14/71

(57) ABSTRACT

The present disclosure provides a peptide, or a variant or analog thereof, or peptidomimetic comprising between 25 and 60 amino acids, having growth factor receptor-binding capability, wherein the RMSD value of the structure coordinates of said peptide, variant or analog thereof with respect to PEPREF is 2.45 Å (Angstroms) or less.

### CROSS-REFERENCE TO RELATED APPLICATIONS

[0001] This application is a U.S. National Stage application of International Application No. PCT/EP2016/070130 filed 25 Aug. 2016, which claims priority to U.S. Provisional Application No. 62/209,406 filed 25 Aug. 2015 and European Application No. 15307126.1 filed 23 Dec. 2015, the entire disclosures of which are hereby incorporated by reference in their entireties.

### SEQUENCE LISTING

[0002] The instant application contains a Sequence Listing which has been submitted electronically in ASCII format and is hereby incorporated by reference in its entirety. Said ASCII copy, created on 24 Aug. 2016, is named SEQUENCE_LISTING.txt and is 46,429 kilobytes in size.

### FIELD OF THE INVENTION

[0003] The invention relates to compounds for inducing tissue formation, biomaterials and medical devices comprising such compounds, such compounds for use in medical methods and use of such compounds in non-medical methods.

### BACKGROUND

[0004] Tissue regeneration forms an important part of the healing process subsequent to disease, trauma, or surgery. In situations where disease or trauma produces a tissue defect, for example a bone, cartilage, skin, vascular tissue, or eye retina defect, tissue regeneration is a central goal of recovery. It is not, however, a goal that is always or easily achieved and much research has been devoted to newer and more effective ways to promote tissue repair and regeneration. Conventional techniques to achieve tissue regeneration involve the activation of tissue-specific stem cells present in adult tissues with repair and/or regenerative capabilities called mesenchymal stem cell(s) or MSC(s) using recombinant proteins called growth factors (GFs). MSCs or MSC-like cells may be found in the bone marrow, but also in tissues such as fat, umbilical cord blood, amniotic fluid, placenta, dental pulp, tendons, synovial membrane and skeletal muscle. Natural regulation of the MSCs is effected through the participation of a number of growth factors (GFs), including vascular endothelial growth factors (VEGF), which trigger angiogenesis crucial for the repair of most tissues, bone morphogenetic proteins (BMP), which induce the formation of new bone and regulate capillary stem cell activation, transforming growth factors (TGF), which induce cartilage formation, and platelet-derived growth factor-BB (PDGF-BB), which is involved in the formation of granulation tissues and the recruitment of stem cells. Naturally occurring growth factors are found within the tissues themselves and are only present in small amounts. Thus, to provide industrially useful and reproducible amounts of human growth factors, traditional techniques involve the production of GFs by genetic recombination. These recombinant molecules are typically grafted onto the surface of a biocompatible material and placed, where needed, inside or on the body of a patient.

### Bone

[0005] It is conventionally known that mature osteoblasts are the cells responsible for bone formation and are derived from osteoblast precursors. Differentiation of human bone marrow mesenchymal stem cells and osteoblast precursors is one of the important processes for bone regeneration. Osteoblasts differentiate from mesenchymal stem cells. Mature osteoblasts differentiate from osteoblast precursors and into osteocytes which are non-dividing cells. Upon cell activation osteoblasts begin to secrete some extracellular matrix around themselves. Calcification, i.e., deposition of insoluble calcium salts in the bone matrix, begins a short time after the matrix has been secreted. Upon termination of bone matrix synthesis, osteoblasts either undergo cell death by apoptosis or differentiate into osteocytes or bone lining cells. Mesenchymal stem cells are found in large numbers in the periosteum, the fibrous-like layer on the outside surface of bones, and in the bone marrow. During cellular differentiation of osteoblasts, the developing progenitor cells express the regulatory transcription factor Cbfa1/Runx2. A second important transcription factor required for osteoblastic differentiation is osterix. Osteoprogenitors differentiate under the influence of growth factors. Important growth factors in skeletal differentiation include bone morphogenetic proteins (BMPs), transforming growth factor beta (TGF-β) and fibroblast growth factors (FGFs). Differentiation of osteoblasts is also characterized by the expression of alkaline phosphatase as an early marker of pre-osteoblasts. As a result, acting on the differentiation cycle of mammal bone marrow mesenchymal stem cells and osteoblast precursors may have applications in bone tissue regeneration.

### Osteoporosis

[0006] Osteoporosis is a progressive bone disease that is characterized by a decrease in bone mass and density which can lead to an increased risk of fracture. In osteoporosis, the bone mineral density (BMD) is reduced, bone microarchitecture deteriorates, and the amount and variety of proteins in bone are altered. Osteoporosis is defined by the World Health Organization as a bone mineral density of 2.5 standard deviations or more below the mean peak bone mass (average of young, healthy adults) as measured by dual-energy X-ray absorptiometry; the term “established osteoporosis” includes the presence of a fragility fracture. The treatment of osteoporotic fractures is often hindered by reduced bone healing and higher rates of complications. Studies in osteoporotic animal models revealed delayed callus formation and enchondral ossification, resulting in impaired biomechanical properties of the bone. The cellular sources of fracture healing are mesenchymal stem cells (MSCs). MSCs migrate to the fracture site, where they proliferate and differentiate into osteoblasts upon stimulation with osteoinductive cytokines. Molecular biological alterations of MSCs, such as decreased proliferative capacity, production of collagen I deficient matrix, preferableness of adipogenic differentiation, and impaired osteogenic differentiation have been described in osteoporotic patients. With regards to the osteoinduction of MSCs, key agents are BMPs. Of these, BMP-2 is one of the most potent osteoinductive cytokines which physiologically contributes to the early phase of fracture healing. Beyond that, BMP-2 is already clinically approved for the treatment of distinct fracture entities. The predominant role of BMP-2 in osteoinduction and bone formation led to a scientific quest regarding its involvement in the pathophysiology of osteoporosis. Osteoporotic animal models revealed inconsistent data with regard to BMP-2 expression levels. BMP-2 was found to be overexpressed in the callus of mandibles and down-regulated in MSCs derived from tibial and femoral bone. In humans, genetic polymorphisms in BMP-2 have been identified as risk factors for the development of familial osteoporosis and osteoporotic fractures. All these findings directly link the BMP pathways to osteoporosis. Other studies investigated the therapeutic potential of BMP-2 in osteoporotic animal models. The systemic administration of rhBMP-2 increased the volume of trabecular bone and stimulated bone formation in osteoporotic mice. The local application of adenoviral BMP-2 at the site of injury enhanced callus formation and improved mechanical properties of the healing bone in osteoporotic sheep. Stimulating the differentiation of MSCs and/or inducing growth factor activity, in particular of BMPs, may thus lead to the development of new osteoporosis treatments.

### Cartilage

[0007] Although native chondrocytes offer little assistance to injured articular cartilage, these cells are responsible for the synthesis and turnover of the cartilage extracellular matrix (ECM), which provides an environment of nutrition diffusion for chondrocytes and provides the joint surface with biomechanical competence. Chondrogenic cells arise from pluripotential adult mesenchymal stem cells (MSCs) through a series of differentiation pathways. Subsequently, it was shown that a number of cytokines and transcription factors are involved in chondrocyte maturation and cartilage formation. Chondrogenic differentiation of MSCs is induced by various intrinsic and extrinsic factors. Growth factors play the most important role in this process. They represent a group of biologically active polypeptides produced by the body, which can stimulate cell proliferation, differentiation and maturation. In the hyaline cartilage, growth factors regulate homeostasis and integrity, as well as development. Important growth factors intervening in cartilage regeneration include TGF-β1, TGF-β3, BMP-2, BMP-4, BMP-7 and GDF-5. As a result, acting on the differentiation cycle of mammal mesenchymal stem cells and chondroblast precursors may have applications in cartilage tissue regeneration.

### Muscles

[0008] Skeletal muscle is a highly complex and heterogeneous tissue serving a multitude of functions in the organism. The process of generating muscle—myogenesis—can be divided into several distinct phases. During embryonic myogenesis, mesoderm-derived structures generate the first muscle fibers of the body proper, and in subsequent waves additional fibers are generated along these template fibers. In the perinatal phase, muscle resident myogenic progenitors initially proliferate extensively but, later on, decrease as the number of myonuclei reaches a steady state and myofibrillar protein synthesis peaks. Once the muscle has matured, these progenitors will enter quiescence and henceforth reside within it as satellite cells. Adult skeletal muscle, like all renewing organs, relies on a mechanism that compensates for the turnover of terminally differentiated cells to maintain tissue homeostasis. This type of myogenesis depends on the activation of satellite cells that have the potential to differentiate into new fibers. The most comprehensively studied form of myogenesis takes place when mature muscle is damaged and large cohorts of satellite cells expand mitotically and differentiate to repair the tissue and reestablish homeostasis. Many similarities, such as common transcription factors and signaling molecules, between embryonic myogenesis and regeneration in the mature skeletal musculature have been discovered. It is now generally accepted that satellite cells are closely related to progenitors of somitic origin. The activation of the network of transcription factors that controls skeletal muscle development depends on paracrine factors that are released by adjacent tissues, such as the neural tube, notochord, surface ectoderm and lateral mesoderm. Several secreted factors have been identified that determine the spatial and temporal onset of myogenesis. However, no consensus has been reached as to whether these molecules instruct naive cells (instructive induction), amplify a pool of committed progenitors and/or enable a default differentiation pathway (permissive induction) or primarily prevent programmed cell death of muscle progenitor cells. Sonic hedgehog (SHH) and WNT signaling have been reported to have pivotal roles in the induction of myogenesis. Likewise, other signalling molecules, such as Noggin and bone morphogenetic proteins (BMPs)—which inactivate and activate receptors of the transforming growth factor-β (TGFβ) superfamily, respectively—are known to play an important part in orchestrating the activation of myogenesis. Muscle tissue degenerative diseases or disorders include, but are not limited to, myopathies, muscular atrophy, disuse atrophy, denervation atrophy, muscular dystrophies such as the Duchenne muscular dystrophy (DMD), and the Becker muscular dystrophy (BMD), fibrosis, fibrositis, muscle weakness, fatigue, cramps, fibromyalgia, or chronic muscle pain syndrome.

### Vascular

[0009] The vasculature in the human body forms through two distinct processes: vasculogenesis and angiogenesis. Vasculogenesis is defined as the process of de novo blood vessel formation occurring when endothelial precursor cells (angioblasts) migrate and differentiate into endothelial cells which form the new vessel. These vascular trees are then extended through angiogenesis which is defined as the new vessel formation secondary to proliferation of endothelial cells from pre-existing vessels. Vasculogenesis as well as angiogenesis occur during the embryologic development of the circulatory system but also in the adult organism from circulating endothelial progenitor cells (derivatives of stem cells) able to contribute, albeit to varying degrees, to neovascularization. An example of where these processes can occur in adults is the revascularization following trauma, e.g., after cardiac ischemia. It is known that the ablation of the endothelial progenitor cells (EPCs) in the bone marrow leads to a significant decrease in the vasculature development which would place endothelial progenitor cells as a novel therapeutic target. The differentiation of the EPCs is a consequence of the interplay amongst different signaling molecules such as growth factors. These include FGF, VEGF, PDGF and others. Vascular endothelial growth factor (VEGF) is a signal protein produced by cells that stimulates vasculogenesis and angiogenesis. It is part of the system that restores the oxygen supply to tissues when blood circulation is inadequate. VEGF is a sub-family of growth factors, to be specific, the platelet-derived growth factor family of cystine-knot growth factors. VEGF causes an important signaling cascade in endothelial cells. Binding to VEGF receptor-2 (VEGFR-2) starts a tyrosine kinase signaling cascade that stimulates the production of factors that variously stimulate vessel permeability, proliferation/survival, migration and finally differentiation into mature blood vessels. Recent reports have also indicated that different somatic cells (other than the EPCs) could be reprogrammed towards distinct endothelial cell lineages. This somatic reprogramming as well as the stimulation of EPCs differentiation, both represent promising therapeutic targets in regenerative vascular medicine.

### Wound Healing

[0010] Wound healing is a complex and dynamic process of replacing devitalized and missing cellular structures and tissue layers. Upon injury to the skin, a set of complex biochemical events takes place in a closely orchestrated cascade to repair the damage and restore the protective barrier which in the normal skin is formed by the epidermis (outermost layer) and the dermis (inner or deeper layer) which exist in a steady-state equilibrium. The human adult wound healing process can be divided into 4 distinct phases: hemostasis, inflammatory, fibroblastic, and maturation (or remodeling). These phases are initiated and regulated by various secreted factors such as growth factors. In the first phase, the damaged blood vessels are sealed via different substances secreted by the platelets such as the platelet-derived growth factor (PDGF). The second phase corresponds to an inflammatory response which causes the blood vessels to become leaky thus releasing plasma and PMN's into the surrounding tissue. The neutrophils phagocytize debris and microorganisms and provide the first line of defence against infection. The cells macrophages are able to phagocytize bacteria and provide a second line of defence. They also secrete a variety of chemotactic and growth factors such as fibroblast growth factor (FGF), epidermal growth factor (EGF), transforming growth factor beta (TGF β and interleukin-1 (IL-1) which appears to direct the next stages of wound healing. The third phase involves the replacement of dermal and subdermal tissues. The fibroblasts secrete the collagen framework onto which further dermal regeneration occurs. The pericytes which regenerate the outer layers of capillaries and the endothelial cells which produce the lining are involved in the angiogenesis. The keratinocytes are responsible for the epithelialization. In the final stage of epithelializtion, contracture occurs as the keratinocytes differentiate to form the protective outer layer or stratum corneum. The last and 4th phase of wound healing involves remodeling the dermal tissues to produce greater tensile strength. The principle cells involved in this process are the fibroblasts. For a wound to heal successfully, all four phases must occur in the proper sequence and time frame. Many factors can interfere with one or more phases of this process, thus causing improper or impaired wound healing. Recent research has also shown that adult stem cells could be involved in wound healing. In particular hematopoietic progenitor cells (that give rise to mature cells in the blood) may have the ability to de-differentiate back into hematopoietic stem cells and/or trans-differentiate into non-lineage cells, such as fibroblasts. It is thought that the extent of the stem cell involvement in skin wound healing is complex as the epidermis and dermis could be reconstituted by mitotically active stem cells that reside at the apex of rete ridges (basal stem cells or BSC), the bulge of hair follicles (hair follicular stem cell or HFSC), and the papillary dermis (dermal stem cells). Moreover, the bone marrow may also contain stem cells that could play a major role in cutaneous wound healing. Therefore, activating adult stem cells as well as the different cells and growth factors intervening during the four phases of the skin wound healing process, most certainly represents a promising therapeutic target.

### Tissue Closure

[0011] Wound healing not only applies to skin tissue repair but also to the closure of all tissue layers damaged e.g. in an injury or during surgery. For instance, during bone repair surgery, the different layers of tissues incised in order for the surgeon to reach the damaged bone part and repair it would all need to be closed for the overall healing process to occur. The mediation of this complex, “multi-layered” healing process, involves the participation of many different factors such as growth factors.

### Neurons

[0012] For a long time, the human nervous system has been considered fixed and incapable or regeneration since neurons do not divide within the central nervous system (CNS). Recently in has been discovered that neural cells can be regenerated from neural stem cells (NSCs). These are self-renewing, multipotent adult stem cells that generate the main phenotype of the nervous system. They undergo asymmetric cell division into two daughter cells, one non-specialized and one specialized. NSCs primarily differentiate into neurons, astrocytes, and oligodendrocytes. NSCs are generated throughout an adult's life via the process of neurogenesis. NSCs can be differentiated to replace lost or injured neurons or in many cases even glial cells. NSCs are stimulated to begin differentiation via exogenous cues from their microenvironment, or the neural stem cell niche. This niche defines a zone in which stem cells are retained after embryonic development for the production of new cells of the nervous system. This continual supply of new neurons and glia then provides the postnatal and adult brain with an added capacity for cellular plasticity. Critical to the maintenance of the stem cell niche are microenvironmental cues and cell-cell interactions that act to balance stem cell quiescence with proliferation and to direct neurogenesis versus gliogenesis lineage decisions. Several proteins like different growth factors are involved in the mechanisms of the neural stem cell niche as well as in the maintenance and growth of the newly formed neurons. These include the BMPs, FGFs, PDGF, VEGF, TGF β, BDNF and others. Nerve growth factor (NGF) is a small secreted protein that is important for the growth, maintenance, and survival of certain target neurons (nerve cells). It also functions as a signaling molecule. While “nerve growth factor” refers to a single factor, “nerve growth factors” refers to a family of factors also known as neurotrophins. Other members of the neurotrophin family that are well recognized include Brain-Derived Neurotrophic Factor (BDNF), Neurotrophin-3 (NT-3), and Neurotrophin 4/5 (NT-4/5). NGF is critical for the survival and maintenance of sympathetic and sensory neurons. Without it, these neurons undergo apoptosis. Nerve growth factor causes axonal growth. Studies have shown that it causes also axonal branching and elongation. Several brain diseases are considered to be caused by disorders in the neural stem cell niche and especially in the precise signaling of this microenvironment. Therefore restoring correct growth factor signaling is a promising target for the treatment of brain diseases.

### Eye Retina

[0013] The vertebrate retina is a light-sensitive layer of tissue, lining the inner surface of the eye. Light striking the retina initiates a cascade of chemical and electrical events that ultimately trigger nerve impulses. These are sent to various visual centers of the brain through the fibers of the optic nerve. In vertebrate embryonic development, the retina and the optic nerve originate as outgrowths of the developing brain, so the retina is considered part of the central nervous system (CNS) and is actually brain tissue. Retinal development involves a complex progression of tissue induction, proliferation of retinal progenitor cell (RPC) populations and terminal differentiation of these cells into specific functional types. Growing evidence indicates that several extrinsic cues play a critical role in the retinal cell development. One such extrinsic molecule type, bone morphogenetic protein (BMP), is a member of the transforming growth factor (TGF)-β family of signaling molecules, which are known to regulate a variety of cell functions in the developing nervous system, including neural induction, cell fate determination, apoptosis, and proliferation. BMP-2, -4, and -7 and their receptors (BMPRs) are expressed in the eye during embryogenesis and are essential for multiple aspects of retinal development. There are many inherited and acquired diseases or disorders that may affect the retina like for example the macular degeneration. It is a degenerative disease that usually affects older adults and results in a loss of vision in the center of the visual field (the macula) because of damage to the retina. Age-related macular degeneration is the leading cause of irreversible blindness in North America. Regenerating the retina via the growth factor signaling responsible for its development is thus a significant potential therapeutic target.

### Kidneys

[0014] The kidney is a complex tissue consisting of several different cell types including glomerular podocytes, endothelial cells, mesangial cells, interstitial cells, tubular epithelial cells, and connecting duct cells. These cell types interact to establish a precise cellular environment that functions as an efficient tissue. Kidney diseases are currently a global public health problem, with an incidence that has reached epidemic proportions and continues to climb worldwide. Kidney failure can be associated with chronic kidney disease (CKD), which is a progressive loss in renal function over a period of months or years. Renal fibrosis, the common pathological feature of CKDs, is characterized by excessive accumulation of ECM (extracellular matrix). TGF-β (transforming growth factor-β) and BMP-7 (bone morphogenetic protein-7), two key members in the TGF-β superfamily, play important but diverse roles in CKDs (chronic kidney diseases). Both TGF-β and BMP-7 share similar downstream Smad signalling pathways, but counter-regulate each other to maintain the balance of their biological activities. During renal injury in CKDs, this balance is significantly altered because TGF-β signalling is up-regulated by inducing TGF-β1 and activating Smad3, whereas BMP-7 and its downstream Smad1/5/8 are down-regulated. In the context of renal fibrosis, Smad3 is pathogenic, whereas Smad2 and Smad7 are renoprotective. However, this counter-balancing mechanism is also altered because TGF-β1 induces Smurf2, an ubiquitin E3-ligase, to target Smad7 as well as Smad2 for degradation. Thus overexpression of renal Smad7 restores the balance of TGF-β/Smad signaling and has therapeutic effect on CKDs. It may this be that restoring the BMP-7 signaling is a potential therapeutic target in renal regenerative therapies.

### Ligaments and Tendons

[0015] Tendons and ligaments (T/L) are dense connective tissues of mesodermal origin. They connect and transmit force from muscle to bone and bone to bone, respectively. Both tissues are able to store elastic energy and withstand high tensile forces, on which locomotion is entirely dependent. T/L are predominantly composed of collagen type I fibrils organized in a highly hierarchical manner that is unique for the T/L. Other collagens (types III-VI, XI, XII, XIV, and XV) and various proteoglycans (decorin, cartilage oligomeric matrix protein (COMP), byglican, lumican, fibromodulin, tenascin-C, etc.) are building the remaining T/L substance. The cellular content of T/L is dominated by tendon-specific fibroblasts named tenocytes. During embryonic development, the tendon-specific cells descend from a sub-set of mesenchymal progenitors condensed in the syndetome, a dorsolateral domain of the sclerotome. Moreover, Mesenchymal stem cells (MSCs), multipotent adult cells that give rise to tissues of mesodermal origin, have been shown to generate in vitro T/L progenitor cells. Several tendon injuries result from gradual wear and tear to the tendon from overuse or aging. Tendon healing is a complex and highly-regulated process that is initiated, sustained and eventually terminated by a large number and variety of molecules. Growth factors represent one of the most important molecule families involved in regeneration. The activity of five growth factors has been best characterized during this process: insulin-like growth factor-I (IGF-I), transforming growth factor beta (TGFbeta), vascular endothelial growth factor (VEGF), platelet-derived growth factor (PDGF), and basic fibroblast growth factor (bFGF). Stimulating the differentiation of MSCs and/or inducing growth factor activity thus represent two potentially significant therapeutic targets in T/L regeneration and healing.

### Fertility and Reproduction

[0016] Reproduction (or procreation) is the biological process by which new offspring individual organisms are produced from their parents. Sexual reproduction is a biological process by which organisms create descendants that have a combination of genetic material contributed from two (usually) different members of the species. Fertility is the natural capability to produce offspring. The development and physiological functions of basic structures in the mammalian reproductive system are influenced by the tissue-specific expression of members of different growth factors families like the BMP family. The establishment of the germ line is a fundamental aspect of reproduction. Germ cell determination is induced in epiblast cells by the extraembryonic ectoderm, and is not acquired through the inheritance of preformed germ plasma. There is some strong evidence that BMP-4 and -8b play a central role in determining primordial germ cell (PGC) formation in the embryo. The genes encoding BMP-4 and -8b have overlapping expression in the extraembryonic ectoderm before gastrulation, i.e., before PGCs are seen. Thus, PGC formation requires BMP-4 expression. There is also evidence from knockout mammals that BMP-8b is required for PGC formation. Furthermore, there is increasing evidence that locally produced BMPs play a major role in the differentiation of the pituitary gonadotrope. Restoring the BMPs signaling would thus be an important factor in infertility therapies.

### Hair

[0017] Tissue homeostasis and regeneration are regulated through balancing quiescence and activation of quiescent epithelial stem cells (SCs). Hair follicles (HFs) follow this process. Throughout adult life, they undergo dynamic, synchronized cycles of degeneration (catagen), quiescence (telogen), and regeneration (anagen). During telogen, which can last for months, HFSCs are quiescent and reside within a specialized microenvironment called the bulge. Within this niche, HFSCs surround the hair shaft produced in the previous cycle. Throughout telogen, the base of the bulge, called the secondary hair germ (HG), directly abuts the underlying mesenchymal dermal papillae (DP), a key signaling center for HFSCs. The telogen/anagen transition relies upon DP-HFSC crosstalk to generate the necessary threshold of activating factors. Upon activation, HFSCs in the HG are the first to proliferate and initiate HF regeneration, whereas HFSCs within the bulge become active several days later. As the new HF emerges, the DP stimulus is pushed increasingly further from niche SCs, which return to quiescence. In contrast, throughout anagen, relatively undifferentiated bulge cell progeny along the outer root sheath (ORS) accelerate proliferation as they approach the DP. This fuels a steady production of transiently amplifying matrix cells, which undergo a few divisions while in contact with DP and then terminally differentiate to form the hair and inner root sheath (IRS). At the anagen/catagen transition, matrix cells apoptosis and the DP retracts upward along with the dying/differentiating epithelial strand. As the HF reenters telogen, growth factors from the inner layer of non-SC niche cells and from surrounding dermal tissue impose a threshold, which must be overcome to initiate the next cycle. When cells in the telogen phase are not able to reenter into the anagen phase, hair stop their growth, and conditions such as hair loss emerge. As a result, acting on the differentiation cycle of mammal hair follicle mesenchymal stem cells and precursor cells may have applications in hair follicle tissue regeneration thus preventing hair-loss and activating hair-growth, preventing/treating alopecia areata, alopecia totalis, alopecia universalis, androgenic alopecia (male pattern baldness), telogen effluvium, anagen effluvium or chemotherapy-induced alopecia, but is not limited.

### Skin

[0018] The skin constantly renews itself throughout adult life. Stem cells (SCs) residing in the epidermis ensure the maintenance of adult skin homeostasis, but they also participate in the repair of the epidermis after injuries. The skin protects the body from dehydration, injury and infection. The skin consists of an underlying dermis, separated by a basement membrane from the multilayered overlaying epidermis. The dermis is of mesodermal embryonic origin and contains as adult stem cells fibroblastic mesenchymal stem-cell-like cells. These cells have a multi-lineage differentiation potential, being also able to form adipose tissue or bones. The stratified epidermis is of ectodermal origin and composed of keratinocytes that differentiate to a water-impermeable stratum corneum. The terminally differentiated cells in the epidermis are shed from the skin, necessitating a continuous delivery of newly differentiating cells. The epidermis is completely renewed about every four weeks. Given that the differentiated cells cannot divide anymore, their replacement depends on epidermal stem cells. Skin stem cells are of special interest because they are easily accessible. In recent years, several products said to have a link with skin stem cells have found their way to the cosmetic products market such as AMATOKIN®, a face care product line commercialized by Voss Laboratories and said to stimulate stem cells in the skin, or Dior's CAPTURE® R60/80 XP product line used as anti-wrinkles whose mechanism is said to be based on the protection of the life force of stem cells. As a result, there is thus some potential in acting on the differentiation cycle of mammal skin mesenchymal stem cells and precursor cells with potential applications in skin tissue regeneration thus preventing wrinkles formation and generally improving skin appearance.

### Blood

[0019] Blood is a bodily fluid in animals that delivers necessary substances such as nutrients and oxygen to the cells and transports metabolic waste products away from those cells. When it reaches the lungs, gas exchange occurs wherein carbon dioxide is diffused out of the blood into the alveoli and oxygen is diffused into the blood. This oxygenated blood is pumped to the left hand side of the heart in the pulmonary vein and enters the left atrium. From here it passes through the bicuspid valve, through the ventricle and taken all around the body by the aorta. Blood contains antibodies, nutrients, oxygen and much more to help the body work. In vertebrates, it is composed of blood cells suspended in blood plasma. Plasma, which constitutes 55% of blood fluid, is mostly water (92% by volume), and contains dissipated proteins, glucose, mineral ions, hormones, carbon dioxide (plasma being the main medium for excretory product transportation), and blood cells themselves. Albumin is the main protein in plasma, and it functions to regulate the colloidal osmotic pressure of blood. Hematopoietic stem cells (HSCs) are the blood cells that give rise to all the other blood cells and are derived from the mesoderm. They are located in the red bone marrow, which is contained in the core of most bones. The HSCs give rise to the myeloid lineage (monocytes and macrophages, neutrophils, basophils, eosinophils, erythrocytes, megakaryocytes/platelets, dendritic cells), and to the lymphoid lineages (T-cells, B-cells, NK-cells). The most abundant cells in the vertebrate blood are red blood cells (also called RBSs or erythrocytes). These contain hemoglobin, an iron-containing protein, which facilitates oxygen transport by reversibly binding to this respiratory gas and greatly increasing its solubility in blood. Blood cell degeneration-related diseases, conditions or disorders include, but are not limited to, Anemia, Iron-deficiency anemia, Anemia of chronic disease, Pernicious anemia, Aplastic anemia, Autoimmune hemolytic anemia, Thalassemia, Sickle cell anemia, Polycythemia vera, Vitamin deficiency anemia, Hemolytic anemia, Thrombocytopenia, Idiopathic thrombocytopenic purpura, Heparin-induced thrombocytopenia, Thrombotic thrombocytopenic purpura, Essential thrombocytosis (primary thrombocythemia), Thrombosis, Hemophilia, von Willebrand disease, Hypercoaguable state (hypercoagulable state), Deep venous thrombosis, Disseminated intravascular coagulation (DIC), Thrombocytopenia, Immune Thrombocytopenia (ITP), Drug-induced thrombocytopenia (DITP), Gestational thrombocytopenia, Thrombotic microangiopathies (TMA), Drug-induced thrombotic microangiopathies, Complement-mediated thrombotic microangiopathies, Mixed cryoglobulinemia, Eosinophilia, Eosinopenia, Idiopathic hypereosinophilic syndrome, Antiphospholipid syndrome (Hughes syndrome), Glanzmann's thrombasthenia, Wiskott-Aldrich syndrome (WAS), Leishmania infection, Toxoplasmosis, Hereditary hypogammaglobulinemia, Nonfamilial hypogammaglobulinemia, Leukopenia, Agranulocytosis, Basopenia, Bernard-Soulier syndrome (BSS), Malaria, Sepsis, or Hemolytic uremic syndrome (HUS).

### Adipose Tissue

[0020] Adipose tissue is loose connective tissue composed mostly of adipocytes. In addition to adipocytes, adipose tissue contains the stromal vascular fraction (SVF) of cells including preadipocytes, fibroblasts, vascular endothelial cells and a variety of immune cells (i.e. adipose tissue macrophages (ATMs)). Adipose tissue is derived from preadipocytes. Its main role is to store energy in the form of lipids, although it also cushions and insulates the body. Pre-adipocytes are thought to be undifferentiated fibroblasts that can be stimulated to form adipocytes. The pre-adipocytes originate from mesenchymal stem cells. Areolar connective tissue is composed of adipocytes. The term “lipoblast” is used to describe the precursor of the adult cell. Adipose tissue degeneration-related diseases, conditions or disorders include, but are not limited to, Obesity, Dercum's disease (DD), Multiple symmetric lipomatosis (MSL), Familial multiple lipomatosis (FML), Lipodystrophy, Lipedema, or Atherosclerosis.

### Lung

[0021] The lung is the essential respiration organ in many air-breathing animals. In mammals the two lungs are located near the backbone on either side of the heart. Their principal function is to transport oxygen from the atmosphere into the bloodstream, and to release carbon dioxide from the bloodstream into the atmosphere. A large surface area is needed for this exchange of gases, which is accomplished by the mosaic of specialized cells that form millions of tiny, exceptionally thin-walled air sacs called alveoli. Lung cells include, but are not limited to, type I pneumocytes, type II pneumocytes, clara cells and goblet cells. Lung tissue degeneration-related diseases, conditions or disorders include, but are not limited to, Asthma, Chronic obstructive pulmonary disease (COPD), Chronic bronchitis, Emphysema, Cystic fibrosis, Pulmonary edema, Acute respiratory distress syndrome (ARDS), Pneumoconiosis, Interstitial lung disease (ILD), Sarcoidosis, Idiopathic pulmonary fibrosis, Pulmonary embolism (PE), Pulmonary hypertension, Pleural effusion, Pneumothorax, Mesothelioma, Granulomatosis with polyangiitis (GPA), Goodpasture syndrome (GPS), Pulmonary hyperplasia, Infant respiratory distress syndrome (IRDS), Chronic obstructive pulmonary disease (COPD), Silicosis, Sleep Apnea, Severe Acute Respiratory Syndrome (SARS), Pulmonary fibrosis, Primary ciliary dyskinesia (PCD), Pneumoconiosis (Black Lung Disease), Hypersensitivity Pneumonitis, Cryptogenic Organizing Pneumonia (Bronchiolitis Obliterans Organizing Pneumonia (BOOP)), Byssinosis, Bronchopulmonary Dysplasia, Bronchiolitis, Bronchiectasis, Asbestosis, Pertussis, Middle Eastern Respiratory Syndrome (MERS), Pneumonia, Tuberculosis, Bronchitis, Histoplasmosis, Coccidioidomycosis (Cocci), or Acute bronchitis.

[0022] The present invention thus provides compounds, compositions, microenvironments, functionalised bioactive carriers, medical devices, kits, methods and processes for the design, preparation, manufacture and/or formulation of such compounds, compositions, functionalised bioactive carriers, medical devices and kits, and methods and uses thereof for regenerating or recoding mammalian tissues.

### BRIEF DESCRIPTION OF THE DRAWINGS

[0023] FIG. 1 is a diagram representing a fluorescence intensity of certain embodiments of the present disclosure covalently grafted onto a titanium surface.

[0024] FIG. 2 is a diagram showing a proliferation of osteoblast precursors after 48 hours of culture on a native apatite ceramic biomaterial and on a covalently modified apatite ceramic biomaterial of the present disclosure.

[0025] FIG. 3 is a diagram representing a commitment of human Bone Marrow Mesenchymal Stem Cells towards osteoblast-like cells after 62 hours of culture on titanium biomaterials covalently modified according to the present disclosure using Runx2 and Osterix immunofluorescent stainings.

[0026] FIG. 4 is a diagram representing an Optical Profilometry micrograph showing an ECM produced by osteoblast precursors cultured for 24 h on a titanium biomaterial of the present disclosure.

[0027] FIG. 5 is a diagram representing a Quantitative Real Time PCR analysis for the expression of Runx2 for cells cultured on a non-modified PEEK biomaterial (control) and on a PEEK biomaterial covalently modified according to the present disclosure, (P<0.001).

[0028] FIG. 6 is a representation of a fluorescence intensity of non-covalently deposited osteogenic GFR-binding compounds of the present disclosure mixed with type-I collagen or with apatite ceramics substrates. The images represent surfaces non-covalently coated with osteogenic peptides-FITC.

[0029] FIG. 7 is a representation of a fluorescence intensity of osteogenic GFR-binding compounds of the present disclosure mixed with a type-I collagen substrate after 3, 7 and 10 days (a). The images represent surfaces non-covalently coated with osteogenic peptides-FITC. (b) is a fluorescence intensity of osteogenic peptides-FITC coated on apatite ceramics after incubation in cell culture medium for the given indicated times (up to 10 days).

[0030] FIG. 8 is a diagram representing a quantification of the proliferation of osteoblast precursors after 48 hours of cell culture on apatite ceramics and on collagen coated with osteogenic GFR-binding compounds of the present disclosure.

[0031] FIG. 9 is a representation of the commitment of human Bone Marrow Mesenchymal Stem Cells towards osteoblast-like cells after 48 hours of culture on collagen and on apatite ceramics coated with osteogenic GFR-binding compounds of the present disclosure using Runx2 and Osterix immunofluorescent stainings (a). (b) is an analysis for Alkaline Phosphatase Activity.

[0032] FIG. 10 is a representation of an immunofluorescent staining of F-actin (green) and Osteopontin (red) for hMSC showing their differentiation into osteoblast cells after 96 hours of culture on a type-I collagen scaffold non-covalently modified with a GFR-binding compound of the present disclosure.

[0033] FIG. 11 is a representation of a Quantitative Real Time PCR analysis of the expression of Runx2 in cells cultured on native type-I collagen and on native type-I collagen scaffold non-covalently modified with osteogenic GFR-binding compounds of the present disclosure (P<0.005).

[0034] FIG. 12 is (a) a representation of a quantification of the cell area of hMSCs cultured on a native hydrogel (control) and on a hydrogel covalently modified with chondrogenic GFR-binding compounds of the present disclosure. hMSCs committed towards chondrocyte differentiation as seen by positive Sox9 (Transcription factor) immunofluorescent staining. (b) is a representation of a Quantitative Real Time PCR analysis of the expression of the Sox9 gene and a semi-quantitative RT-PCR analysis for the expression of the Aggrecan gene.

[0035] FIG. 13 is a representation of a distribution of the endothelial cell adherens junction's size. The results were obtained from immunofluorescence staining with an antibody against CD31 (PECAM1).

[0036] FIG. 14 is confocal images of endothelial cells (ECs) cultured on native polymer and covalently modified polymer. The fluorescence intensities corresponding to CMFDA was represented in gray.

[0037] FIG. 15 is a representation of (a) a Phase-contrast Micrograph showing the progression of migrating cells after scratching and (b) a Mean epithelial cell velocity measured for cells cultured on a native polymer or on a polymer covalently modified with a GFR-binding compound of the present disclosure.

[0038] FIG. 16 is (a) a diagram representing the results of a Quantitative Real Time PCR analysis for the expression of Sox2 for cells cultured on a native hydrogel (control) and on a hydrogel covalently modified with a GFR-binding compound of the present disclosure. (b) The total BMP-6 immunofluorescence intensity in the cell culture medium was quantified for Hair Follicle Stem Cells cultured for 96 h.

[0039] FIG. 17 is (a) a quantification of the cell area of hMSCs cultured on native hydrogel (control) and on hydrogel covalently modified with a GFR-binding compound of the present disclosure. The average cell area was estimated from approximately 25 cells from 2 different passages. (b) is a Quantitative Real Time PCR analysis for the expression of the COMP gene (Cartilage Oligomeric Matrix Protein, a tendon/ligament lineage gene).

[0040] FIG. 18 is (a) Representative images of neurons cultured on a native polymer and on a covalently modified polymer coated with a GFR-binding compound of the present disclosure. Phalloidin and vinculin immunostainings are represented in green and red, respectively. The nucleus was stained with DAPI and is represented in blue. (b) is a diagram representing the results of a Quantitative Real Time PCR analysis of the expression of the Growth Associated Protein 43 (GAP43) gene for the expression of cells cultured on the native polymer (PET, control) and on a polymer (PET) covalently modified with a GFR-binding compound of the present disclosure.

[0041] FIG. 19 is diagram representing the amount of STRO-1 (a hMSC stemness marker) present in the cells expressed as an average fluorescence intensity, normalized by the number of cells.

[0042] FIG. 20 is a screen shot of the Standard Protein Blast online software used in the RMSD calculation procedure.

[0043] FIG. 21 is an overview of the experimental protocol used to demonstrate the effect of several embodiments according to the present disclosure on osteoporosis.

[0044] FIG. 22 is a Histological analysis of coronal sections of the femoral defect site for the “No implantation” condition, 3 weeks (left) and 12 weeks (right) after inducing a critical size defect. 3 types of stainings were performed on the sections: Haematoxylin and Eosin staining (HE) to qualitatively analyze tissue morphology; Tartrate-Resistant Acid Phosphatase (TRAP) staining to highlight the active osteoclasts (red) fraction inside bone tissue (light blue); Von Kossa and Van Gieson (VKVG) staining to highlight mineralized bone tissue (black), non mineralized osteoid tissue (dark pink) and fibrous tissue (light pink). The discontinuous lines on the HE staining indicate the approximate defect site area and the black arrows indicate the defect site entry.

[0045] FIG. 23 is a Histological analysis of coronal sections of the femoral defect sites for representative GFR-binding compound of the present disclosure, released as a solution from a capsule, as compared to Control 1, 3 weeks (left) and 12 weeks (right) after administration in the critical size induced defect. 3 types of stainings were performed on the sections: Haematoxylin and Eosin staining (HE) to qualitatively analyze tissue morphology; Tartrate-Resistant Acid Phosphatase (TRAP) staining to highlight the active osteoclasts (red) fraction inside bone tissue (light blue); Von Kossa and Van Gieson (VKVG) staining to highlight mineralized bone tissue (black), non mineralized osteoid tissue (dark pink) and fibrous tissue (light pink). The discontinuous lines on the HE staining indicate the approximate defect site area.

### DETAILED DESCRIPTION

[0046] Cellular differentiation is the process by which a cell type becomes specialized, and involves a highly controlled switch from one gene expression pattern to another. In each specific lineage, cells progress through various stages of differentiation and maturation. In the case of bone lineage, osteoblast progenitors are derived from adult bone marrow mesenchymal stem cells, followed by osteoblast precursors, mature osteoblasts and osteocytes.

[0047] Mesenchymal stem cells or MSCs are multipotent stromal cells that can differentiate into a variety of cell types including osteoblasts (bone cells), chondrocytes (cartilage cells), neurons, endothelial cells and adipocytes (fat cells). Growth factors generally modulate MSC activity through non-covalent binding to specific receptors called growth factor receptors (GFRs). Growth factors (GF) bind to serine-threonine kinase receptors on the cell surface, triggering specific intracellular pathways that activate and influence gene transcription, having effects in cell proliferation and/or differentiation. There are three or more receptors (types I, II and III) for GF members but only types I and II are required for binding and signalling.

[0048] After binding of signal molecule, receptors are activated which leads into induction of SMAD pathway. Type I receptors phosphorylate receptor-regulated Smads (R-Smads) which form a complex with common-partner Smad (Co-Smad). This complex is translocated into the nucleus and modulates gene transcription with other transcription factors required for chondrogenic differentiation.

[0049] Modulation of such an activity may typically be performed using recombinant growth factors. However, studies indicated that prior attempts using this technology, for instance, in the field of spinal fusion, may be harmful to the patient treated and lead in certain cases to the development of tumors and other serious side-effects. The real clinical advantage over previously employed techniques not involving the use of recombinant growth factors may also be questioned.

[0050] Other attempts to induce tissue formation involve the use of synthetic peptides reproducing parts of the natural sequences of growth factors. For example, these synthetic peptides have been studied for their potential use in improving bone repair. However, these peptides generally often lack sufficient biological activity and suffer from poor in-vitro and/or in-vivo stability. Furthermore, the tissue-induction activity of conventional synthetic peptides is not rapid. For example, in-vitro osteogenic differentiation of mesenchymal stem cells cultured on biomaterials using such conventional peptides is generally observed after 3 weeks of cell culture.

[0051] The present invention thus provides embodiments for:
[0052] Modifying and/or enhancing and/or modulating and/or promoting and/or activating tissue regeneration in mammals, preferably humans;
[0053] Modifying and/or enhancing and/or modulating and/or promoting and/or activating bone, and/or cartilage, and/or vascular, and/or neuronal, and/or retinal, and/or organs such as kidneys or lungs, and/or ligament/tendon, and/or hair follicle, and/or skin, and/or blood, and/or adipose, tissue regeneration;
[0054] Modifying and/or enhancing and/or modulating and/or promoting and/or activating embryonic patterning;
[0055] Modifying and/or enhancing and/or modulating and/or promoting and/or activating cellular migration and wound healing;
[0056] Modifying and/or enhancing and/or modulating and/or promoting and/or activating the closure of any type of living tissues;
[0057] Modifying and/or enhancing and/or modulating and/or promoting and/or activating female fertility;
[0058] Preventing and/or suppressing or avoiding or reducing tissue degeneration in mammals, preferably humans;
[0059] Preventing and/or suppressing or avoiding or reducing bone, and/or cartilage, and/or vascular, and/or neuronal, and/or retinal, and/or organs such as kidneys or lungs, and/or ligament/tendon, and/or hair follicle, and/or skin, and/or blood, and/or adipose, tissue degeneration;
[0060] Protecting a subject from a tissue degeneration disease, disorder or condition;
[0061] Protecting a subject from osteoporosis;
[0062] Preventing and/or suppressing or avoiding or reducing cellular immobilization and wound formation and/or progression;
[0063] Preventing and/or suppressing or avoiding or reducing the misclosure of any type of living tissue;
[0064] Preventing and/or suppressing or avoiding or reducing female infertility;
[0065] Preventing and/or suppressing or avoiding or reducing hair-loss;
[0066] Preventing/treating alopecia areata, alopecia totalis, alopecia universalis, androgenic alopecia (male pattern baldness), telogen effluvium, anagen effluvium or chemotherapy-induced alopecia,
[0067] Modifying and/or enhancing and/or modulating and/or promoting and/or activating the osteogenicity, and/or the chondrogenecity, and/or the endothelization and vascularization ability, and/or hair growth ability, and/or the wound healing ability, and/or the skin repair ability, and/or the tissue defect closure ability, and/or the neuroregeneration ability, and/or the ligament/tendon tissue regeneration ability, and/or the female fertility ability, of a bioactive carrier such as a biomaterial which may be useful in the manufacturing of medical devices;
[0068] Modifying and/or enhancing and/or activating anti-aging/anti-wrinkle effects/properties in cosmetic products;
[0069] Modifying and/or enhancing and/or activating hair growth effects/properties in cosmetic products;
[0070] Modifying and/or enhancing and/or modulating and/or promoting and/or inducing and/or activating stem cells, preferably adult stem cells, more preferably mesenchymal stem cells, commitment and/or differentiation in a specific lineage of cells;
[0071] Modifying and/or enhancing and/or modulating and/or promoting and/or inducing and/or activating progenitor cells differentiation and/or maturation;
[0072] Obtaining/producing functional differentiated cells;
[0073] Obtaining/producing differentiated cells with modified and/or improved functionality and/or physiological activity.

### I. Definitions

[0074] Those skilled in the art will recognize, or be able to ascertain using no more than routine experimentation, many equivalents to the specific embodiments in accordance with the invention described herein. The scope of the present invention is not intended to be limited to the present description, but rather is as set forth in the appended claims.

[0075] In the claims, articles such as “a”, “an”, and “the” may mean one or more than one unless indicated to the contrary or otherwise evident from the context. Claims or descriptions that include “or” between one or more members of a group are considered satisfied if one, more than one, or all of the group members are present in, employed in, or otherwise relevant to a given product or process unless indicated to the contrary or otherwise evident from the context. The invention includes embodiments in which exactly one member of the group is present in, employed in, or otherwise relevant to a given product or process. The invention includes embodiments in which more than one, or all of the group members are present in, employed in, or otherwise relevant to a given product or process.

[0076] It is also noted that the term “comprising” is intended to be open and permits but does not require the inclusion of additional elements or steps. When the term “comprising” is used herein, the terms “consisting of”, “consisting essentially of”, “consisting substantially of” and “consisting exclusively of” are thus also encompassed and disclosed.

[0077] As used herein, the term “approximately” or “about,” as applied to one or more values of interest, refers to a value that is similar to a stated reference value. In certain embodiments, the term “approximately” or “about” refers to a range of values that fall within 25%, 20%, 19%, 18%, 17%, 16%, 15%, 14%, 13%, 12%, 11%, 10%, 9%, 8%, 7%, 6%, 5%, 4%, 3%, 2%, 1%, or less in either direction (greater than or less than) of the stated reference value unless otherwise indicated, self-evident or contradictory in context (e.g. except where such number would exceed 100% of a possible value).

[0078] As used herein and unless otherwise indicated or contradictory in context, the term “with” followed by a specific number of amino acids, when used to define a particular peptide, variant or analog thereof, such as in “a peptide with three amino acids”, means that such peptide, variant or analog thereof, contains exclusively the specific number of amino acids specified after this term.

[0079] As used herein and unless otherwise indicated or contradictory in context, the term “Ci-alkyl” is intended to specifically and individually disclose any branched or unbranched radical, moiety or functional group having “i” carbon atom(s).

[0080] The carbon atom content of the various hydrocarbon-containing moieties herein may be indicated by a prefix designating the minimum and maximum number of carbon atoms in the moiety. For example, in certain embodiments, (Ca-Cb)alkyl indicates an alkyl moiety of the integer “a” to the integer “b” carbon atoms, inclusive.

[0081] At various places in the present specification, substituents of compounds of the present disclosure may be disclosed in groups or in ranges. It is specifically intended that the present disclosure include each and every individual sub-combination of the members of such groups and ranges. For example, in certain embodiments, the term “C1-C5 alkyl” is an abbreviation for (and thus is specifically intended to individually disclose) C1-alkyl (i.e. methyl), C2-alkyl (i.e. ethyl), C3-alkyl (i.e. 1-propyl and 2-propyl), C4-alkyl (i.e. 1-butyl, sec-butyl, iso-butyl and tert-butyl), and C5-alkyl (i.e. 1-pentyl, 2-pentyl, 3-pentyl, 2-methyl-1-butyl, 3-methyl-1-butyl, 2-methyl-2-butyl, 3-methyl-2-butyl, 2,2-dimethyl-1-propyl and 1,1-dimethyl-1-propyl).

[0082] As used herein, unless indicated otherwise or contradictory in context, the terms “alkyl” and “(Ca-Cb)alkyl” refer to monovalent hydrocarbon radicals containing the requisite number of carbon atoms as described above, having straight or branched moieties or combinations thereof. As used herein, alkyl groups may be optionally substituted with between one to four substitutes. Non-limiting examples of alkyl groups include, e.g. methyl, ethyl, n-propyl, isopropyl, n-butyl, isobutyl, sec-butyl, t-butyl, etc. Of course, other alkyl groups will be readily apparent to those of skilled in the art given the benefit of the present disclosure.

[0083] Where ranges are given, endpoints are included. Furthermore, it is to be understood that unless otherwise indicated or otherwise evident from the context and understanding of one of ordinary skill in the art, values that are expressed as ranges can assume any specific value or sub-range within the stated ranges in different embodiments of the invention, to the tenth of the unit of the lower limit of the range, unless the context clearly dictates otherwise. For example, in certain embodiments, a disclosed 0-10 range would, for example, in certain embodiments, also specifically and individually disclose the following values and ranges: 0, 1, 2, 3, 4, 5, 6, 7, 8, 9, 10, 0.1, 0.2, 0.3, 0.4, 0.5, 0.6, 0.7, 0.8, 0.9, 1, 1.1, 1.2, 1.3, 1.4, 1.5, 1.6, 1.7, 1.8, 1.9, 2, 2.1, 2.2, 2.3, 2.4, 2.5, 2.6, 2.7, 2.8, 2.9, 3, 3.1, 3.2, 3.3, 3.4, 3.5, 3.6, 3.7, 3.8, 3.9, 4, 4.1, 4.2, 4.3, 4.4, 4.5, 4.6, 4.7, 4.8, 4.9, 5, 5.1, 5.2, 5.3, 5.4, 5.5, 5.6, 5.7, 5.8, 5.9, 6, 6.1, 6.2, 6.3, 6.4, 6.5, 6.6, 6.7, 6.8, 6.9, 7, 7.1, 7.2, 7.3, 7.4, 7.5, 7.6, 7.7, 7.8, 7.9, 8, 8.1, 8.2, 8.3, 8.4, 8.5, 8.6, 8.7, 8.8, 8.9, 9, 9.1, 9.2, 9.3, 9.4, 9.5, 9.6, 9.7, 9.8, 9.9, 10, 0-1, 0-2, 0-3, 0-4, 0-5, 0-6, 0-7, 0-8, 0-9, 1-2, 1-3, 1-4, 1-5, 1-6, 1-7, 1-8, 1-9, 2-3, 2-4, 2-5, 2-6, 2-7, 2-8, 2-9, 2-10, 3-4, 3-5, 3-6, 3-7, 3-8, 3-9, 3-10, 4-5, 4-6, 4-7, 4-8, 4-9, 4-10, 5-6, 5-7, 5-8, 5-9, 5-10, 6-7, 6-8, 6-9, 6-10, 7-8, 7-9, 7-10, 8-9, 8-10, 9-10, 0-0.1, 0-0.2, 0-0.3, 0-0.4, 0-0.5, 0-0.6, 0-0.7, 0-0.8, 0-0.9, 0-1.1, 0-1.2, etc.

[0084] As used herein and unless otherwise indicated or contradictory in context, the term “substantially” refers to the qualitative condition of exhibiting total or near-total extent or degree of a characteristic or property of interest. One of ordinary skill in the biological arts will understand that biological and chemical phenomena rarely, if ever, go to completion and/or proceed to completeness or achieve or avoid an absolute result. The term “substantially” is therefore used herein to capture the potential lack of completeness inherent in many biological and chemical phenomena.

[0085] In addition, it is to be understood that any particular embodiment of the present invention that falls within the prior art may be explicitly excluded from any one or more of the claims using the appropriate disclaimer(s) or proviso(s). Since such embodiments are deemed to be known to one of ordinary skill in the art, they may be excluded even if the exclusion is not set forth explicitly herein. Any particular embodiment of the compositions of the invention (e.g., any nucleic acid or protein encoded thereby; any method of production; any method of use; etc.) can be excluded from any one or more claims, for any reason, whether or not related to the existence of prior art.

[0086] All cited sources, for example, in certain embodiments, references, publications, databases, database entries, and art cited herein, are incorporated into this application by reference in their entirety, even if not expressly stated in the citation. In case of conflicting statements of a cited source and the instant application, the statement in the instant application shall control.

[0087] As the case may be, and unless otherwise indicated or contradictory in context, macromolecules molecular weights should be understood in the present description as being number averaged molecular weights.

[0088] The peptides mentioned in the present description may not follow the usual representation conventions. For instance, the N-terminal amino acid of a peptide sequence may be the first amino acid in the sequence or the last amino acid. Likewise, the C-terminal amino acid of a peptide sequence may be the first amino acid in the sequence or the last amino acid. For example, in the peptide sequence NAIS, “N” may be N-terminal or C-terminal, and “S” may be N-terminal or C-terminal. Consequently, for the purpose of the present disclosure, e.g. NAIS also covers SIAN, SAIS also covers SIAS, SPIN also covers NIPS, etc.

[0089] In the present application, when reference is made to a certain peptide (e.g. a GFR-binding compound as provided herein) comprising one or more other peptide(s), said one or more other peptide(s) is(are) understood to be stably (in most cases, covalently) attached/bound to at least one part of said peptide. The attachment/binding may be located anywhere on the peptide unless indicated otherwise, contradictory in context or contradictory to general scientific rules. No specific attachment/binding location of said one or more other peptide(s) to said peptide shall be assumed unless specifically mentioned.

[0090] Peptide or polypeptide: As used herein, the term “peptide” or “polypeptide” are used interchangeably and refers to a polymer of less than or equal to 100 amino acids long, e.g., about 2, 3, 4, 5, 10, 15, 20, 25, 30, 35, 40, 45, 50, 55, 60, 65, 70, 75, 80, 85, 90, 95 or 100 amino acids long. The terms apply to amino acid polymers in which one or more amino acid residue is an artificial chemical mimetic of a corresponding naturally occurring amino acid, as well as to naturally occurring amino acid polymers, non-naturally occurring amino acid polymers, peptide analogs, peptide variants and peptide mimetics. Conventional techniques for synthesising peptides involve the activation of the carboxylic acid function of an amino acid or of a peptide, using a coupling agent. This activated acid is then contacted with an amino acid or a peptide in which the N-terminal amino acid is not protected, thus forming an amide bond also called peptide bond. Coupling reaction conditions together with coupling agents are well known in the art and described, for instance, in Greene, “Protective Groups in Organic Synthesis”, Wiley, New York, 2007 4th edition. In addition, suitable peptide synthesis routes are described, for instance, in Hojo H., Recent progress in the chemical synthesis of proteins, Curr Opin Struct Biol. 2014; 26C:16-23 and Saranya Chandrudu, et al., Chemical Methods for Peptide and Protein Production, Molecules, 2013, 18, 4373-4388, each of which is incorporated herein by reference in its entirety. There are two main strategies for peptide synthesis i.e. liquid-phase peptide synthesis and solid-phase peptide synthesis (SPPS) which is now most commonly used for peptide synthesis. Instead of C-terminal protection with a chemical group, the C-terminus of the first amino acid is coupled to an activated solid support, such as polystyrene or polyacrylamide. This type of approach has a two-fold function: the resin acts as the C-terminal protecting group and provides a rapid method to separate the growing peptide product from the different reaction mixtures during synthesis. As with many different biological manufacturing processes, peptide synthesizers have been developed for automation and high-throughput peptide production. SPPS allows the synthesis of natural peptides which are difficult to express in bacteria, the incorporation of unnatural amino acids, peptide/protein backbone modification, and the synthesis of D-proteins, which consist of D-amino acids. Very long peptide can be accessed by using native chemical ligation to couple two peptides together with quantitative yields.

[0091] Peptide analogs: As used herein, unless indicated otherwise or contradictory in context, the term “peptide analogs” refers to polypeptide variants which differ by one or more amino acid alterations, e.g., substitutions, additions or deletions of amino acid residues that still maintain one or more of the properties of the parent or starting peptide.

[0092] Peptide variants: As used herein, unless indicated otherwise or contradictory in context, the term “peptide variants” refers to a peptide which has a certain identity with a native or reference compound sequence. In one example, the peptide variant refers to any post-administration, application, injection modified peptide. Such post-administration, application, injection modifications include, but are not limited to, phosphorylation, acetylation, glutamylation, tyrosination, palmitoylation, glycosylation, myristoylation, palmitoylation, isoprenylation, glypiation, lipoylation, phosphopantetheinylation, acylation, alkylation, amidation, arginylation, polyglutamylation, polyglycylation, butyrylation, gamma-carboxylation, glycosylation, polysialylation, malonylation, hydroxylation, iodination, nucleotide addition, oxidation, adenylylation, propionylation, pyroglutamate formation, S-glutathionylation, S-nitrosylation, succinylation, sulfation, glycation, biotinylation, pegylation, ISGylation, SUMOylation, ubiquitination, Neddylation, Pupylation, citrullination, deamidation, eliminylation, carbamylation, and racemization.

[0093] Peptido-mimetic: As used herein, unless indicated otherwise or contradictory in context, the term “peptido-mimetic” or “peptidomimetic” refers to a synthetic chemical compound which comprises amino acids but not only and that is able to mimic the biological action of a peptide, often because the mimetic has a basic structure that mimics the basic structure of the peptide and/or has the salient biological properties of that peptide. In one particular example, a peptidomimetic is a hybrid molecule containing both, at least one peptide, and at least one of a polysaccharide, a polynucleotide or a linear or branched, saturated or unsaturated, hydrocarbon chain.

[0094] Linear peptide: As used herein, unless indicated otherwise or contradictory in context, the term “linear peptide” means a peptide in which the C-terminal and the N-terminal amino acid residues do not covalently interact with each other and none of the C-terminal or the N-terminal amino acid residues covalently interacts with another amino acid residue of the peptide chain.

[0095] Cyclic peptide: As used herein, unless indicated otherwise or contradictory in context, the term “cyclic peptide” means peptide in which the C-terminal and N-terminal amino acid residues do covalently interact with each other or the C-terminal and/or the N-terminal amino acid residues covalently interact with at least one other amino acid residue of the peptide chain so as to form a ring-like structure.

[0096] Amino acid: As used herein, unless indicated otherwise or contradictory in context, the term “amino acid” refers to naturally occurring and non-naturally occurring amino acids including amino acid analogs.

[0097] Naturally occurring amino acids are those encoded by the genetic code, as well as those amino acids that are later modified, e.g., hydroxyproline, [gamma]-carboxyglutamate, and O-phosphoserine. Naturally encoded amino acids are the 20 common amino acids glycine (Gly, G), alanine (Ala, A), valine (Val, V), leucine (Leu, L), isoleucine (Ile, I), serine (Ser, S), threonine (Thr, T), phenylalanine (Phe, F), tyrosine (Tyr, Y), tryptophane (Trp, W), cysteine (Cys, C), methionine (Met, M), proline (Pro, P), aspartic acid (Asp, D), asparagine (Asn, N), glutamine (Gln, Q), glutamic acid (Glu, E), histidine (His, H), arginine (Arg, R) et lysine (Lys, K) and pyrrolysine and selenocysteine. Non-naturally occurring amino acids include, but are not limited to, the dextrogyre (D) isomers of the above-cited naturally-occurring amino acids. Amino acid analogs refers to compounds that have the same basic chemical structure as a naturally occurring amino acid i.e., an [alpha] carbon that is bound to a hydrogen, a carboxyl group, an amino group, and an R group (i.e. side chain), and which may be used in replacement thereof without substantially affecting the overall function of the peptide to which it belongs. Amino acid analogs (or non-naturally occurring amino acids) that may be suitable for implementing embodiments of the present invention include, but are not limited to, amino acids comprising a photoactivatable cross-linker, spin-labeled amino acids, fluorescent amino acids, metal binding amino acids, metal-containing amino acids, radioactive amino acids, amino acids with novel functional groups, amino acids that covalently or noncovalently interact with other molecules, photocaged and/or photoisomerizable amino acids, amino acids comprising biotin or a biotin analogue, glycosylated amino acids such as a sugar substituted serine, other carbohydrate modified amino acids, keto-containing amino acids, amino acids comprising polyethylene glycol or polyether, heavy atom substituted amino acids, chemically cleavable and/or photocleavable amino acids, amino acids with an elongated side chains as compared to natural amino acids, including but not limited to, polyethers or long chain hydrocarbons, including but not limited to, greater than about 5 or greater than about 10 carbons, carbon-linked sugar-containing amino acids, redox-active amino acids, amino thioacid containing amino acids, and amino acids comprising one or more toxic moiety. The term “AA^{I}” (AA roman numeral one) may be used in the description and refers to an amino acid which may be any amino acid as defined above in particular any naturally occurring and non-naturally occurring amino acids.

[0098] Amino acid side chain: As used herein, unless indicated otherwise or contradictory in context, the term “amino acid side chain” means the functional group of an amino acid that differentiates it from other amino acids. All amino acid structures have a carboxyl group, an amine group and a specific side chain.

[0099] AA^{II} (AA roman numeral two): As used herein, unless indicated otherwise or contradictory in context, the terms “polar amino acid” or “AA^{II}” means amino acids having a polar, non-charged group-containing side chain. Polar amino acids are protonated at physiological pH (about 7). Examples of polar amino acids include, but are not limited to, Cys (C), Asn (N), Gin (Q), Ser (S), Thr (T), or Tyr (Y).

[0100] AA^{III} (AA roman numeral three): As used herein, unless indicated otherwise or contradictory in context, the terms “acidic amino acid” or “AA^{III}” means amino acids having an acidic group-containing side chain. Acidic amino acid deprotonated forms predominate at physiological pH (about 7). Examples of acidic amino acids include, but are not limited to, Asn (N) and Glu (E).

[0101] AA^{IV} (AA roman numeral four): As used herein, unless indicated otherwise or contradictory in context, the terms “aliphatic amino acid” or “AA^{IV}” means amino acids having an aliphatic side chain. Examples of aliphatic amino acids include, but are not limited to, Ala (A), Leu (L), lie (I), Gly (G), Val (V) and any analogs and derivatives thereof.

[0102] AA^{V} (AA roman numeral five): As used herein, unless indicated otherwise or contradictory in context, the terms “apolar amino acid” or “AA^{V}” means amino acids having an apolar side chain. Examples of apolar amino acids include, but are not limited to, Ala (A), Phe (F), Gly (G), lie (I), Leu (L), Met (M), Pro (P), Val (V) or Trp (W).

[0103] AA^{VI} (AA roman numeral six): As used herein, unless indicated otherwise or contradictory in context, the term “aromatic amino acid” or “AA^{VI}” means amino acids having an aromatic group-containing side chain. Examples of aromatic amino acids include, but are not limited to, Trp (W), Tyr (Y) or Phe (F).

[0104] AA^{VII} (AA roman numeral seven): As used herein, unless indicated otherwise or contradictory in context, the term “basic amino acid” or “AA^{VII}” means amino acids having a basic group-containing side chain. Basic amino acid protonated forms predominate at physiological pH (about 7). Examples of basic amino acids include, but are not limited to, Arg (R), His (H), or Lys (K).

[0105] AA^{VIII} (AA roman numeral eight): As used herein, unless indicated otherwise or contradictory in context, the term “AA^{VII}” means Leu (L) or lie (I) and any analogs and derivatives thereof.

[0106] AA^{IX} (AA roman numeral nine): As used herein, unless indicated otherwise or contradictory in context, the term “charged amino acid” or “AA^{IX}” means amino acids having either an acidic group-containing side chain or an basic group-containing side chain. Charged amino acid charged forms predominate at physiological pH (about 7). Examples of charged amino acids include, but are not limited to, Asn (N), Glu (E), His (H), Lys (K) or Arg (R).

[0107] AAⁿ: As used herein, unless indicated otherwise or contradictory in context, the term “AAⁿ”, in which n is a positive integer arbitrarily chosen to identify a specific position within the primary sequence of a peptide. For instance, AA¹³ means the amino acid of position 13. The terms “amino acid” and “AA” are interchangeably used in the present description.

[0108] N-terminal: As used herein, unless indicated otherwise or contradictory in context, the term “N-terminal” means the amine (—NH₂) function/group/moiety located at one (terminal) end of a protein or polypeptide. This functional group is the only amine group which is not engage in n amide peptide bond.

[0109] C-terminal: As used herein, unless indicated otherwise or contradictory in context, the term “C-terminal” means the carboxylate (—CO₂H) function/group/moiety located at one (terminal) end of a protein or polypeptide. This functional group is the only carboxylic acid group which is not engage in n amide peptide bond.

[0110] Naturally-occurring peptide: As used herein, unless indicated otherwise or contradictory in context, the terms “naturally-occurring peptide” or “natural peptide” means a peptide which may be found in nature without human direct intervention (except for its extraction and/or isolation).

[0111] Synthetic peptide: As used herein, unless indicated otherwise or contradictory in context, the terms “synthetic peptide” or “non-natural peptide” means a peptide which may not be found in nature without human direct intervention (except for its extraction and/or isolation). For example, in certain embodiments, a synthetic peptide may have the amino acid sequence of a natural peptide except for at least one amino acid deletion or substitution relative to the natural sequence. In the case of a substitution, an amino acid from the natural sequence is replaced by another, different, naturally-occurring or non-naturally occurring amino acid. For example, in certain embodiments, a synthetic peptide may not possess a post-translational modification of the natural peptide such as the attachment of an acetate group, a phosphate group, a lipid, a carbohydrate, or the formation of a disulfide bridge.

[0112] Covalent interaction: As used herein, unless indicated otherwise or contradictory in context, the term “interact covalently”, “covalent interaction” or “covalent bond” are interchangeably used and means a chemical bond or interaction that involves the sharing of electron pairs between atoms. Examples of such interactions are σ-bonding and π-bonding.

[0113] Non-covalent interaction: As used herein, unless indicated otherwise or contradictory in context, the term “interact non-covalently”, “non-covalent interaction” or “non-covalent bond” are interchangeably used and means a chemical bond or interaction that does not involve the sharing of electron pairs between atoms but rather involves more dispersed variations of electromagnetic interactions between molecules or within a molecule. Non-covalent interactions can be generally classified into four categories, electrostatic interactions, i-interactions, van der Waals forces, and hydrophobic interactions.

[0114] Electrophile: As used herein, unless indicated otherwise or contradictory in context, the term “electrophile” means an organic molecule attracted to electrons that participates in a chemical reaction by accepting an electron pair in order to bond to a nucleophile. Most electrophiles are positively charged, have an atom that carries a partial positive charge, or have an atom that does not have an octet of electrons.

[0115] Nucleophile: As used herein, unless indicated otherwise or contradictory in context, the term “nucleophile” means an organic molecule that donates an electron pair to an electrophile to form a chemical bond in relation to a reaction. All molecules or ions with a free pair of electrons or at least one pi bond can act as nucleophiles.

[0116] Polysaccharide: As used herein, unless indicated otherwise or contradictory in context, the term “polysaccharide” means polymeric carbohydrate molecules composed of long chains of monosaccharide units bound together by glycosidic linkages and which upon hydrolysis provide monosaccharides or oligosaccharides. They range in structure from linear to highly branched polymers.

[0117] Polynucleotide: As used herein, the term “polynucleotide” or “nucleic acid”, which are used interchangeably, refers to the phosphate ester polymeric form of ribonucleosides (“RNA molecules”) or deoxyribonucleosides (“DNA molecules”), or any phosphoester analogs thereof, such as phosphorothioates and thioesters, in either single stranded form, or a double-stranded helix. The term “nucleic acid” includes double-stranded DNA round, inter alia, in linear (e.g., restriction fragments) or circular DNA molecules. In particular, nucleic acids as used herein refer to nucleic acids such as RNAs encoding for agonist of growth factor receptors as defined herein.

[0118] Nucleoside: As used herein, the term “nucleoside” refers to a compound containing a sugar molecule (e.g., a pentose or ribose) or derivative thereof in combination with an organic base (e.g., a purine or pyrimidine) or a derivative thereof (also referred to herein as “nucleobase”).

[0119] Nucleotide: As used herein, the term “nucleotide” refers to a nucleoside including a phosphate group.

[0120] Dendrimer: As used herein, unless indicated otherwise or contradictory in context, the term “dendrimer” means any repetitively branched molecules. Examples of dendrimers are phosphorous dendrimers, polylysine dendrimers, polypropylenimine dendrimers and PAMAM dendrimers, such as the ones described, for instance, in Scientific World Journal. 2013; 2013:732340; Curr Opin Chem Biol. 1998; 2(6):733-42; J Pept Sci. 1999; 5(5):203-20; and J Pept Sci. 2008; 14(1):2-43, which may be used for implementing embodiments of the present invention, each of which being herein incorporated by reference in its entirety.

[0121] Synthetic molecule: As used herein, unless indicated otherwise or contradictory in context, the term “synthetic molecule” means a molecule which may not be found in nature without human direct intervention (except for its extraction and/or isolation).

[0122] Synthetic polymers: As used herein, unless indicated otherwise or contradictory in context, the term “synthetic polymer” refers to a macromolecule or polymer which may not be found in nature without human direct intervention (except for its extraction and/or isolation).

[0123] Biocompatible: As used herein, unless indicated otherwise or contradictory in context, the term “biocompatible” means compatible with living cells, tissues, organs or systems posing little to no risk of injury, toxicity or rejection by the immune system.

[0124] Biologically active: As used herein, unless indicated otherwise or contradictory in context, the term “biologically active” refers to a characteristic of any substance that has activity in a biological system and/or organism. For instance, a substance that, when administered to an organism, has a biological effect on that organism, is considered to be biologically active. In particular examples, a compound, substance or pharmaceutical composition of the present disclosure may be considered biologically active even if a portion of the compound, substance or pharmaceutical composition is biologically active or mimics an activity considered biologically relevant.

[0125] Stem cells: As used herein, unless indicated otherwise or contradictory in context, the term “stem cell” refers to the term as it is generally understood in the art. For example, in certain embodiments, stem cells, regardless of their source, are cells that are capable of dividing and renewing themselves for long periods, are at least to a degree unspecialized (undifferentiated), and can give rise to (differentiate into) specialized cell types (i.e., they are progenitor or precursor cells for a variety of different, specialized cell types).

[0126] Mesenchymal stem cells: As used herein, unless indicated otherwise or contradictory in context, the term “mesenchymal stem cells” generally means multipotent adult stromal cells that can differentiate into a variety of cell types, such as osteoblasts, chondrocytes, and adipocytes.

[0127] Stem cell-like: As used herein, unless indicated otherwise or contradictory in context, the term “Stem cell-like” refers to a cell which is not a stem cell by its origin but functions as a stem cell and presents similar characteristics such as, for example, the expression of stemness markers like Stro-1 and/or is multipotent thus has the ability to differentiate into various cell types.

[0128] Progenitor cells: As used herein, unless indicated otherwise or contradictory in context, the term “progenitor cells” generally means a biological cell that, like any stem cell, has a tendency to differentiate into a specific type of cell, but is already more specific than a stem cell and is pushed to differentiate into its “target” cell. Stem cells can generally replicate indefinitely, whereas progenitor cells can divide only a limited number of times.

[0129] Adult stem cells: As used herein, unless indicated otherwise or contradictory in context, the term “adult stem cells” means undifferentiated cells, found throughout the body after development, that multiply by cell division to replenish dying cells and regenerate damaged tissues. Also known as somatic stem cells, they can be found in juvenile as well as adult animals and human bodies.

[0130] Differentiation: As used herein, unless indicated otherwise or contradictory in context, the term “differentiation” refers to the process by which a less specialized cell becomes a more specialized cell type and involves a switch from one gene expression pattern to another.

[0131] Differentiated cells: As used herein, unless indicated otherwise or contradictory in context, the term “differentiated cells” generally means any cell of a specific lineage at the exception of cells containing stem cell specific markers.

[0132] Non-terminally differentiated: As used herein, unless indicated otherwise or contradictory in context, the term “non-terminally differentiated”, when used in relation to a cell, refers to a differentiated cell as defined herein which has not reached its final state of differentiation. For example, in certain embodiments, in the Osteoblast cell lineage, a non-terminally differentiated cell is any differentiated cell of the lineage at the exception of an osteocyte.

[0133] Terminally differentiated: As used herein, unless indicated otherwise or contradictory in context, the term “terminally differentiated”, when used in relation to a cell, refers to a differentiated cell as defined herein which has reached its final state of differentiation. For example, in certain embodiments, in the Osteoblast cell lineage, a terminally differentiated cell is an osteocyte.

[0134] Methods for obtaining stem cells: Methods for obtaining such stem cells and providing initial culture conditions, such as a liquid culture or semi-solid culture medium, are known in the art. The cells are initially expanded in vivo or in vitro, by contacting the source of the stem cells with a suitable reagent that expands or enriches such cells in the tissue source or in culture. Preferably, adult stem cells are isolated from a tissue source and then expanded or enriched in vitro by exposure to a suitable agent. Cells are obtained from an individual by any suitable method for obtaining a cell sample from an animal, including, but not limited, to, collection of bone marrow collection of a bodily fluid (e.g., blood), collection of umbilical cord blood, tissue punch, and tissue dissection, including particularly, but not limited to, any biopsies of skin, intestine, cornea, spinal cord, brain tissue, scalp, stomach, breast, lung (e.g., including lavage and bronchioschopy), fine needle aspirates of the bone marrow, amniotic fluid, placenta and yolk sac.

[0135] Osteogenesis: As used herein, unless indicated otherwise or contradictory in context, the term “osteogenesis” refers to the process by which bone is produced. An entity, molecule, compound, association, combination or composition may be said to be “osteogenic” when it has an effect on the development, growth, or repair of bone. This process involves the participation of stem cells.

[0136] Chondrogenesis: As used herein, unless indicated otherwise or contradictory in context, the term “chondrogenesis” refers to the process by which cartilage is produced. An entity, molecule, compound, association, combination or composition may be said to be “chondrogenic” when it has an effect on the development, growth, or repair of cartilage. This process involves the participation of stem cells.

[0137] Endothelialisation: As used herein, unless indicated otherwise or contradictory in context, the term “endothelialization” or “re-endothelialization” refers to the process that maintains or restores normal vascular homeostasis and regulates neointimal hyperplasia. In native tissue, the endothelium maintains vessel integrity with dynamic mechanisms that prevent thrombosis and intimal hyperplasia. The endothelial progenitor cells are an important component of the response to vascular injury, having the potential to accelerate vascular repair through rapid re-endothelialization. For example, drug-eluting stents are generally implanted during angioplasty into patients suffering from atherosclerosis and resulting in stenosis or restenosis. In drug-eluting stents, the drug is typically coated onto a metal alloy framework and is mainly employed to inhibit neointimal growth (due to proliferation of smooth muscle cells) which would cause restenosis. Because much of the neointimal hyperplasia seems to be caused by inflammation, immunosuppressive and antiproliferative drugs are conventionally used. Drugs such as sirolimus and paclitaxel are currently used. Re-endothelialization in drug-eluting stents is generally delayed which can increase the risk for late stent thrombosis which thus may also require the administration of antiplatelet drugs such as Clopidogrel and aspirin.

[0138] Vascularization/angiogenesis: As used herein, unless indicated otherwise or contradictory in context, the term “vascularization/angiogenesis” refers to a physiological process through which new blood vessels are produced from pre-existing vessels. This process involves the participation of stem cells.

[0139] Wound healing: As used herein, unless indicated otherwise or contradictory in context, the term “wound healing” refers to a process whereby the skin (or another organ-tissue) repairs itself after injury. This process involves the participation of stem cells.

[0140] Skin repair: As used herein, unless indicated otherwise or contradictory in context, the term “skin repair” means the reparation of the dermis through the participation of stem cells. These active cells produce collagenous fibers and ground substance. Blood vessels soon grow into the dermis, restoring circulation.

[0141] Neuron-regeneration: As used herein, unless indicated otherwise or contradictory in context, the term “neuron-regeneration” or “neuroregeneration” refers to the regrowth or repair of nervous tissues, cells or cell products involving the participation of stem cells. Such mechanisms may include generation of new neurons, glia, axons, myelin, or synapses.

[0142] Tissue closure: As used herein, unless indicated otherwise or contradictory in context, the term “tissue closure” refers to the closure of all tissue layers damaged e.g. in an injury or during surgery. For instance, during bone repair surgery, the different layers of tissues incised in order for the surgeon to reach the damaged bone part and repair it would all need to be closed for the overall healing process to occur.

[0143] Cell lineage: As used herein, unless indicated otherwise or contradictory in context, the term “cell lineage” refers to the developmental history of a particular cell from its primary state in the fertilized egg or embryo through to its fully differentiated state. The different steps and phases involved in the development of a cell produces many intermediate cells which may be referred to as progenitor or precursor cells in the present application and form an integral part of the cell lineage.

[0144] Osteoblast cell lineage: As used herein, unless indicated otherwise or contradictory in context, the term “osteoblast cell lineage” refers to bone cells at any stage of their development and thus include, but are not limited to, mesenchymal stem cells, osteoblasts, osteocytes or any precursors thereof.

[0145] Chondrocytic cell lineage: As used herein, unless indicated otherwise or contradictory in context, the term “chondrocytic cell lineage” refers to cartilage cells at any stage of their development and thus include, but are not limited to, mesenchymal stem cells,

[0146] Muscle cell lineage: As used herein, unless indicated otherwise or contradictory in context, the term “muscle cell lineage” refers to muscle cells at any stage of their development and thus include, but are not limited to, mesenchymal stem cells, myoblasts, myocytes or any precursors thereof.

[0147] Vascular cell lineage: As used herein, unless indicated otherwise or contradictory in context, the term “vascular cell lineage” refers to vascular cells at any stage of their development and thus include, but are not limited to, mesenchymal stem cells, angioblast, pericytes and endothelial cells or any precursors thereof.

[0148] Neuronal cell lineage: As used herein, unless indicated otherwise or contradictory in context, the term “neuron lineage” refers to brain cells at any stage of their development and thus include, but are not limited to, neural stem cells, neuroblast, neurocyte and neuroglial cells or any precursors thereof.

[0149] Retinal cell lineage: As used herein, unless indicated otherwise or contradictory in context, the term “retinal cell lineage” refers to eye retina cells at any stage of their development and thus include, but are not limited to, photoreceptor, bipolar cells, rod and cone cells or any precursors thereof.

[0150] Renal cell lineage: As used herein, unless indicated otherwise or contradictory in context, the term “renal cell lineage” refers to renal cells at any stage of their development and thus include, but are not limited to, mesenchymal stem cells, podocytes, or any precursors thereof.

[0151] Ligament and tendon cell lineage: As used herein, unless indicated otherwise or contradictory in context, the term “ligament and tendon cell lineage” or “L/T cell lineage” refers to bone or cartilage cells at any stage of their development and thus include, but are not limited to, mesenchymal stem cells, fibroblasts, fibrocytes, or any precursors thereof.

[0152] Fibroblast lineage: As used herein, unless indicated otherwise or contradictory in context, the term “fibroblast lineage” refers to skin cells at any stage of their development and thus include, but are not limited to, mesenchymal stem cells, fibroblasts, keratinocytes, Merkel cells, melanocytes, Langerhans cells, and any precursor cells thereof.

[0153] Reproduction system lineage: As used herein, unless indicated otherwise or contradictory in context, the term “reproduction system lineage” refers to Sertoli cells, Leydig cell and Germ cell at any stage of their development, in particular, mesenchymal stem cells.

[0154] Blood cell lineages (myeloid lineage and lymphoid lineage): As used herein, unless indicated otherwise or contradictory in context, the term “blood cell lineages” refers to blood cells at any stage of their development from the myeloid or from the lymphoid lineage, and thus include, but are not limited to, hematopoietic stem cells (HSC), myeloid progenitors, lymphoid progenitors, mast cells, myeloblasts, monocytes, macrophages, neutrophils, basophils, eosinophils, erythrocytes, megakaryocytes, thrombocytes, dendritic cells, small lymphocytes, T-lymphocytes (T-cells), B-lymphocytes (B-cells), natural killer (NK)-cells, and any precursor cells thereof.

[0155] Adipocyte lineage: As used herein, unless indicated otherwise or contradictory in context, the term “adipocyte cell lineage” refers to adipocyte cells at any stage of their development and thus include, but are not limited to, mesenchymal stem cells, areolar connective cells, adipocytes, pre-adipocytes/lipoblasts, and any precursor cells thereof.

[0156] Lung cell Lineages: As used herein, unless indicated otherwise or contradictory in context, the term “lung cell Lineage” refers to lung cells at any stage of their development and thus include, but are not limited to, epithelial cells, erythrocytes, alveolar cells and any precursor cells thereof.

[0157] Ratio: As used herein, unless indicated otherwise or contradictory in context, the term “ratio”, when used in relation to GFR-binding compound with respect to the bioactive carrier in the pharmaceutical association or composition disclosed herein, refers to the (molar, weight or part as specified) ratio between the quantity of GFR-binding compound and the quantity of bioactive carrier. The ratio may be a molar ratio, a weight ratio or a part ratio and will be specified as needed on a case by case basis. Quantity units may conventionally be mole, millimole, gram, milligram or parts. For example, in certain embodiments, it is convenient to express the relative quantity between GFR-binding compounds and bioactive carriers using densities. It shall be understood that this ratio may be varied according to the cell type to be treated.

[0158] Density: As used herein, unless indicated otherwise or contradictory in context, the term “density”, when used in relation to GFR-binding compound with respect to the bioactive carrier in the pharmaceutical composition disclosed herein, refers to the quantity of GFR-binding compounds, expressed in e.g. mole, millimole, gram, or milligram, with respect to one standardised surface unit e.g. squared millimetre (mm²), squared micrometre (μm²), or squared nanometre (nm²)). For example, in certain embodiments, the ratio between a GFR-binding compound and a bioactive carrier in the pharmaceutical association or composition disclosed herein may be expressed in pmol per mm² or pmol/mm².

[0159] Recoding: As used herein, unless indicated otherwise or contradictory in context, the term “recoding”, when used in relation to a cell (in particular a mesenchymal stem cell or progenitor stem cell), refers to the action of contacting (in-vitro, ex-vivo or in-vivo) a stem cell to be treated with a suitable extracellular micro-environment (e.g. containing a peptide, variant or analog thereof, peptidomimetic, a biomaterial, a medical device, or a medical or cosmetic composition as defined herein) thus providing appropriate extracellular signals so that the cell may undergo efficient differentiation into a more specialised cell type.

[0160] Recoding therapy: As used herein, unless indicated otherwise or contradictory in context, the term “recoding therapy” refers to a therapy that promotes efficient stem cell differentiation in an aim to regenerate mammalian tissues.

[0161] Extracellular micro-environment: As used herein, unless indicated otherwise or contradictory in context, the term “extracellular micro-environment” refers to the environment surrounding (in functional proximity with) a specific stem cell which is characterized by biophysical, mechanical and biochemical properties specific for each tissue and is able to regulate cell behavior. Modification of the extracellular micro-environment of a specific mesenchymal stem cell using, for instance, a peptide, variant or analog thereof, peptidomimetic, a biomaterial, a medical device, or a medical or cosmetic composition as defined herein, allows for the efficient differentiation of this cell into a more specialised cell type.

[0162] Physiologically functional cell: As used herein, unless indicated otherwise or contradictory in context, the term “physiologically functional cell” refers to a cell which is able to perform normally all of the cell functions associated with a particular cell type and necessary for the normal physiology of a cell. These functions include all of the intracellular molecular mechanisms but also all of the activities necessary for a normal communication between the cell and its microenvironment. One method which may be used to verify if a cell is physiologically functional is the grafting of the cell, after the introduction of fluorescent markers, in other mammalian model organisms such as mouse models. The cell is grafted in the tissue corresponding to its cell type. The cell characteristics and normal functions are monitored after a period of time with various methods such as in vivo microscopy or histological staining. The term “functional” when used in relation to a molecule, compound or substance refers to a biological molecule in a form in which it exhibits a property and/or activity by which it is characterized.

[0163] Shorter period of time: As used herein, unless indicated otherwise or contradictory in context, the term “shorter period of time”, when used in relation to differentiation or recoding duration, means substantially shorter to provide a substantial benefit for the treated patient in comparison with existing treatments. In certain embodiments, a shorter period of time includes at least 1.5-fold, at least 2-fold, at least 2.5-fold, at least 3-fold, at least 3.5-fold, at least 4-fold, at least 4.5-fold, at least 5-fold, at least 6-fold, at least 7-fold, at least 8-fold, at least 9-fold or at least 10-fold reduction with respect to an existing treatment.

[0164] Exogenous: As used herein, unless indicated otherwise or contradictory in context, the term “exogenous” refers to a substance coming from outside a living system such as a cell, an organ, or an individual organism. For example, in certain embodiments, exogenous factors in medicine include pathogens and therapeutics. DNA introduced into a cell via transfection or viral infection may be considered as an exogenous factor. Carcinogens are also commonly referred to as exogenous factors.

[0165] Endogenous: As used herein, unless indicated otherwise or contradictory in context, the term “endogenous” refers to substances that originate from within an organism, tissue, or cell.

[0166] Intracellular: As used herein, unless indicated otherwise or contradictory in context, the term “intracellular” generally means “inside the cell”. In vertebrates, such as animals, the cell membrane is the barrier between the inside of the cell and the outside of the cell (the extracellular milieu). Thus, treatments and therapies in which at least one substance, compound, pharmaceutical association, combination or composition penetrates the cell wall of a cell to be treated in order to produce/deliver its (effective) biological effect are considered as intracellular treatments and therapies.

[0167] Extracellular: As used herein, unless indicated otherwise or contradictory in context, the term “extracellular” means “outside the cell”. In vertebrates, such as animals, the cell membrane is the barrier between the inside of the cell (the intracellular milieu) and the outside of the cell. Thus, treatments and therapies in which no substance, compound, pharmaceutical association, combination or composition requires penetration of the cell membrane in order to produce/deliver its (effective) biological effect (e.g. by interacting with trans-membrane receptors) are considered as extracellular treatments and therapies. In other words, a therapy using a plurality of substances in order to provide the desired biological effect wherein one or more of these substances require the entry into the intracellular compartment to provide (or deliver) its biological effect is not considered as an extracellular therapy in the sense of the present disclosure.

[0168] In vitro: As used herein, unless indicated otherwise or contradictory in context, the term “in vitro” refers to events that occur in an artificial environment, e.g., in a test tube or reaction vessel, in cell culture, in a Petri dish, etc., rather than within an organism (e.g., animal, plant, or microbe).

[0169] In vivo: As used herein, unless indicated otherwise or contradictory in context, the term “in vivo” refers to events that occur within an organism (e.g., animal, plant, or microbe or cell or tissue thereof).

[0170] Ex vivo: As used herein, unless indicated otherwise or contradictory in context, the term “ex vivo” refers to events that occur in an external environment on tissues sourced from an organism (e.g., animal, plant, or microbe) in an attempt to replicate natural living conditions outside such an organism.

[0171] Patient/subject: As used herein, unless indicated otherwise or contradictory in context, the term “patient” or “subject”, which are used interchangeably, refers to any organism to which a composition in accordance with the invention may be administered, e.g., for experimental, diagnostic, prophylactic, and/or therapeutic purposes. Typical subjects include animals (e.g., mammals such as mice, rats, rabbits, non-human primates, and humans) and/or plants. As used herein, patients/subjects include those individuals who may seek or be in need of treatment, requires treatment, is receiving treatment, will receive treatment, or a subject who is under care by a trained professional for a particular disease or condition.

[0172] Purified: As used herein, unless indicated otherwise or contradictory in context, the term “purify,” “purified,” “purification” means to make substantially pure or clear from unwanted components, material defilement, admixture or imperfection.

[0173] Targeted Cells: As used herein, unless indicated otherwise or contradictory in context, the term “targeted cells” refers to any one or more cells of interest. The cells may be found in vitro, in vivo, in situ or in the tissue or organ of an organism. The organism may be an animal, preferably a mammal, more preferably a human and most preferably a patient.

[0174] Molecule length: As used herein, unless indicated otherwise or contradictory in context, the term molecule or peptide “length” or “size” means the longest 2D or 3D distance which may possibly be measured within the molecule. For cyclic molecules, “length” or “size” means the longest measurable distance across the cyclic structure. Throughout the present disclosure, when a molecule size or length is given (in general using the nanometre, nm, unit), the following procedures were used to calculate them:
[0175] The so-called «2D» procedure: a 2D chemical structure was drawn in e.g. the ChemDraw® Software. Then, size measurement was carried out via the available ChemDraw length measurement tools. The length value given herein corresponds to the longest 2D length of the molecule using the default settings 2D bond sizes and angles of the software.
[0176] Alternatively, the so-called “3D” procedure may be followed:
[0177] (1) Drawing of the chemical structure of the molecule using suitable softwares (such as ChemDraw).
[0178] (2) Creating a 3D structure model of the molecule hereby drawn using SCWRL (Protein Sci. 2003; 12(9):2001-14) or MODELLER (Current Protocols in Bioinformatics. 15:5.6:5.6.1-5.6.30), each of which is hereby incorporated by reference in its entirety.
[0179] (3) Incubating the obtained 3D structure model in a box simulation containing water for few milliseconds using AMBER (J. Computat. Chem. 2005; 26, 1668-1688), which is hereby incorporated by reference in its entirety.
[0180] (4) Measuring the size of the molecule hereby obtained using softwares such as Pymol® using available Pymol length measurement tools (DeLano Scientific LLC, http://www.pymol.org).

[0181] Root Mean Square Deviation: As used herein, unless indicated otherwise or contradictory in context, the term “Root Mean Square Deviation” or “RMSD” is well known in the art and means the square root of the arithmetic mean of the square of the distances between certain matched atoms. One can represent a molecular conformation as a vector whose components are the Cartesian coordinates of the molecule's atoms. Therefore, a conformation for a molecule with N atoms can be represented as a 3N-dimensional vector of real numbers. To calculate the RMSD of a pair of peptides or peptidomimetics (e.g. x and y), each one of them must be represented as a 3N-length (assuming N atoms) vector of coordinates. The RMSD is therefore the square root of the arithmetic mean of the square of the distances between corresponding atoms of x and y. It is a measure of the average atomic displacement between the conformations of the two structures:

$$\sqrt{\frac{1}{N} {\sum }_{i = 1}^{N} \vert xi - yi \vert {1}^{2}}$$

[0182] In other words, the RMSD is the measure of the average distance between the atoms (usually the backbone atoms) of superimposed polypeptides or peptidomimetics. In the study of globular protein conformations, one customarily measures the similarity in three-dimensional structure by the RMSD of the Ca atomic coordinates after optimal rigid body superposition.

[0183] The RMSD value of a given peptide or peptidomimetic with respect to a specifically selected reference structure (hereinafter may also be referred to as “PEPREF”) may be calculated using various methods all well know by the skilled person. However, for the purpose of the present disclosure and for the avoidance of doubts, the RMSD of a given peptide or peptidomimetic as used in the present disclosure is obtained precisely using the following procedure:

STEP 1: Creating a 3-dimensional model of (i.e. obtaining 3D structure coordinates for) a peptide or peptidomimetic for which the RMSD is to be calculated, by:
STEP 1.1: Obtaining a set of polypeptide 3D structure coordinates based on the alignment with the sequence of a peptide or peptidomometic for which the RMSD value is to be calculated, using the BLAST algorithm according to the following procedure:
[0184] 1. Open the following link to access the “Standard Protein Blast” tool: http://blast.ncbi.nlm.nih.gov/Blast.cgi?PROGRAM=blastp&PAGE_TYPE=BlastSearch&LINK_LOC=blasthome
[0185] 2. Enter the amino acid sequence of the peptide or peptidomimetic of interest in the “Enter Query Sequence” section. The alignment is performed one sequence after the other (this is not a multiple alignment tool).
[0186] 3. In the section “Choose Search Set”, choose the following database: Protein Data Bank Proteins (pdb).
[0187] 4. In the section “Choose Search Set”, do not exclude «Models (XM/XP)» and do not Exclude «Uncultured/environmental sample sequences».
[0188] 5. In the section “Program Selection”, choose the following algorithm: blastp (protein-protein BLAST)
[0189] 6. Leave other fields as shown on the screenshot in FIG. 20.
[0190] 7. Run BLAST.
[0191] 8. The results obtained from the query are presented in the form of several pdb files.
[0192] 9. From this output results, the first ten (10) PDB files corresponding to the best sequence alignments are retained. This set of 10 PDB files or structures will be used in the next step (Step 2: structural alignments with STAMP).
[0193] 10. Finally, clean up the 10 structures contained in the 10 PDB files by removing all e.g. additional small molecules, receptors or portions thereof, dimers or portions thereof, so as to retain only the polypeptide chain of interest.

[0194] The set of pdf files contains the polypeptide 3D structure coordinates of the 10 structures having the highest sequence homology with the peptide or peptidomometic for which the RMSD value is to be calculated.

STEP 1.2: Performing the structural alignment of the set of 3D structure coordinates obtained in STEP 1.1, thereby obtaining a set of aligned polypeptide 3D structure coordinates, by using STAMP (Structural Alignment of Multiple Proteins Version 4.2) according to the following procedure:
[0195] 1. Open the following link to access the “STAMP superposition” tool: http://www.russelllab.org/cgi-bin/pdc/stamp.pl
[0196] 2. In the section entitled “Structure A”, input the PDB file corresponding to the first structure from the set of ten 3D structure ccordinates obtained in STEP 1.1, which corresponds to the best sequence alignment with BLAST.
[0197] 3. In the section entitled “Structure B”, input the PDB file corresponding to the second structure from the set of ten 3D structure ccordinates obtained in STEP 1.1, which corresponds to the second best sequence alignment with BLAST.
[0198] 4. Run STAMP.
[0199] 5. Repeat steps 2 to 4 with the other eight pdb files from the set of ten 3D structure coordinates identified in STEP 1.1 by successively entering the PDB files in the field “Structure B”.
[0200] 6. As a result, the structural alignment of the 10 structures contained in the set of PDB files obtained in STEP 1.1 is obtained in the form of 9 distinct PDB files each containing a pair of aligned polypeptide 3D structure (structure 1 with structure 2, structure 1 with structure 3, structure 1 with structure 4, . . . , structure 1 with structure 10).
[0201] 7. From these 9 “pair” PDB files, 10 PDB files each containing one of structures 1 to 10 are created.
[0202] 8. 10 PDB files containing the aligned 3D structure coordinates are thus obtained from STEP 1.2, for use in the next step.
   STEP 1.3: Modelling the sequence of peptide or peptidomometic for which the RMSD value is to be calculated against the set of aligned polypeptide 3D structure coordinates obtained in STEP 1.2, thereby obtaining a set of 3D structure coordinates for the peptide or peptidomometic for which the RMSD value is to be calculated, using SCWRL (reference: “SCWRL and MolIDE: computer programs for side-chain conformation prediction and homology modeling”, Nature Protocols VOL. 3 NO. 12 2008, Qiang Wang et al.; which is hereby incorporated by reference in its entirety) according to the following procedure:
[0203] 1. Insert the input sequence of a peptide or peptidomometic for which the RMSD value is to be calculated in Fasta format.
[0204] 2. Import the first PDB file containing the aligned polypeptide 3D structure coordinates obtained in STEP 1.2.
[0205] 3. Run SCWRL by typing the following command for Unix based systems: “scwrl_path/scwrl3-i inputpdbfile -o outputpdbfile -s sequencefile 4 logfile”.
[0206] 4. As a result, a first PBD file is obtained containing the predicted 3D structure coordinates of the peptide or peptidomometic for which the RMSD value is to be calculated.
[0207] 5. Repeat steps 1 to 3 using the 9 remaining PDB files obtained in STEP 1.2.
[0208] 6. 10 PDB files are obtained from STEP 1.3 for use in the following STEP 1.4.
   STEP 1.4: Minimizing the free energy (ΔG) of the set of 3D structure coordinates for the peptide or peptidomometic for which the RMSD value is to be calculated obtained in STEP 1.3 using GROMACS (Reference: Hess B, Kutzner C, Van Der Spoel D, Lindahl E (2008). “GROMACS 4: Algorithms for Highly Efficient, Load-Balanced, and Scalable Molecular Simulation”. J Chem Theory Comput 4 (2): 435; which is hereby incorporated by reference in its entirety) according to the following procedure:
[0209] 1. Create a Gromacs topology (gmx) file from the first PDB file of the modeled peptide or peptidomometic for which the RMSD value is to be calculated obtained in STEP 1.3, by using the command «pdb2gmx -f NOMDUFICHIERPDB.pdb -water spc». “NOMDUFICHIERPDB” is the name of the input PDB file.
[0210] 2. Create a box around the imported modeled peptide or peptidomometic by using the command «editconf -f conf.gro -bt cubic d 0.7 o box.gro».
[0211] 3. Add solvent (water) molecules into the box by using the command «genbox -cp box.gro -cs spc216.gro -p topol.top - o solvated.gro».
[0212] 4. Prepare the input for the molecular dynamics (MD) run with the command «vim em.mdp». Default run is set to 1000 nsteps.
[0213] 5. Create an input for the MD run by using the command «grompp -f em.mdp -p topol.top -c solvated.gro -o em.tpr».
[0214] 6. Run the command «mdrun -v -deffnm em» to perform the actual energy minimization.
[0215] 7. Run the command «g energy -f em.edr -s em.tpr -o em.xvg» and then run option «7».
[0216] 8. As a result, a first XMG file is obtained. To view the XMG file run the command «xmgrace em.xvg».
[0217] 9. Repeat steps 1 to 8 with the 9 remaining structures obtained in STEP 1.3. 10 XMG files are thus obtained.
[0218] 10. The structure of lowest energy is obtained from each XMG file in the form of a PDB file. 10 PDB files each containing one structure of lowest energy are thus obtained from STEP 1.4 for use in the next step.
   STEP 2: Calculating the RMSD of the peptide or peptidomimetic for which the RMSD value is to be calculated by comparing the 3D structure coordinates of the peptide or peptidomimetic obtained in STEP 1.4 with the 3D structure coordinates of PEPREF to obtain the lowest possible RMSD value using FATCAT (Flexible structure AlignmenT by Chaining Aligned fragment pairs allowing Twists) according to the following procedure:
[0219] 1. Open the following link to access the “FATCAT” software: http://fatcat.burnham.org
[0220] 2. Open the “pairwise alignment” tool.
[0221] 3. Import the PDB file containing the structure coordinates of PEPREF in the “Get the 1st structure” section.
[0222] 4. Import the first PDB file of the peptide or peptidomimetic for which the RMSD value is to be calculated with minimized energy obtained in STEP 1.4.
[0223] 5. Run FATCAT.
[0224] 6. As a result, a first RMSD value of the first structure of the peptide or peptidomimetic for which the RMSD value is to be calculated as obtained in STEP 1.4 will be obtained in the output report.
[0225] 7. Repeat steps 1 to 5 with the 9 remaining structures (PDB files) obtained from STEP 1.4.
[0226] 8. The peptide or peptidomimetic structure with the lowest RMSD (out of the ten RMSD values successively obtained) is the value taken into account in the present application to select peptides or peptidomimetics having cell differentiation and tissue regeneration capabilities.

[0227] 3D structure coordinates of PEPREF: As used herein, unless indicated otherwise or contradictory in context, the 3D structure coordinates of PEPREF are as follows:

| | | | | | | | | |
|---|---|---|---|---|---|---|---|---|
| ATOM | 511 | N | LYS | A | 1 | −14.570 | 46.437 | 27.424 |
| ATOM | 512 | CA | LYS | A | 1 | −13.512 | 45.748 | 28.151 |
| ATOM | 513 | C | LYS | A | 1 | −13.655 | 44.259 | 27.884 |
| ATOM | 514 | O | LYS | A | 1 | −12.769 | 43.463 | 28.197 |
| ATOM | 515 | CB | LYS | A | 1 | −13.605 | 46.029 | 29.652 |
| ATOM | 516 | CG | LYS | A | 1 | −13.640 | 47.509 | 29.991 |
| ATOM | 517 | CD | LYS | A | 1 | −12.615 | 48.297 | 29.183 |
| ATOM | 518 | CE | LYS | A | 1 | −12.625 | 49.768 | 29.575 |
| ATOM | 519 | NZ | LYS | A | 1 | −13.994 | 50.369 | 29.497 |
| ATOM | 520 | N | ILE | A | 2 | −14.792 | 43.890 | 27.309 |
| ATOM | 521 | CA | ILE | A | 2 | −15.051 | 42.499 | 26.967 |
| ATOM | 522 | C | ILE | A | 2 | −14.911 | 42.370 | 25.444 |
| ATOM | 523 | O | ILE | A | 2 | −15.531 | 43.125 | 24.683 |
| ATOM | 524 | CB | ILE | A | 2 | −16.466 | 42.065 | 27.401 |
| ATOM | 525 | CG1 | ILE | A | 2 | −16.630 | 42.238 | 28.915 |
| ATOM | 526 | CG2 | ILE | A | 2 | −16.710 | 40.629 | 26.985 |
| ATOM | 527 | CD1 | ILE | A | 2 | −15.631 | 41.478 | 29.30 |
| ATOM | 528 | N | PRO | A | 3 | −14.085 | 41.411 | 24.989 |
| ATOM | 529 | CA | PRO | A | 3 | −13.789 | 41.109 | 23.588 |
| ATOM | 530 | C | PRO | A | 3 | −14.998 | 40.695 | 22.768 |
| ATOM | 531 | O | PRO | A | 3 | −15.969 | 40.164 | 23.305 |
| ATOM | 532 | CB | PRO | A | 3 | −12.785 | 39.968 | 23.688 |
| ATOM | 533 | CG | PRO | A | 3 | −12.156 | 40.166 | 25.007 |
| ATOM | 534 | CD | PRO | A | 3 | −13.330 | 40.506 | 25.867 |
| ATOM | 535 | N | LYS | A | 4 | −14.937 | 40.937 | 21.463 |
| ATOM | 536 | CA | LYS | A | 4 | −16.023 | 40.529 | 20.590 |
| ATOM | 537 | C | LYS | A | 4 | −15.886 | 39.015 | 20.391 |
| ATOM | 538 | O | LYS | A | 4 | −14.903 | 38.415 | 20.831 |
| ATOM | 539 | CB | LYS | A | 4 | −15.926 | 41.244 | 19.245 |
| ATOM | 540 | CG | LYS | A | 4 | −15.802 | 42.751 | 19.355 |
| ATOM | 541 | CD | LYS | A | 4 | −16.292 | 43.433 | 18.083 |
| ATOM | 542 | CE | LYS | A | 4 | −16.162 | 44.943 | 18.177 |
| ATOM | 543 | NZ | LYS | A | 4 | −16.825 | 45.628 | 17.019 |
| ATOM | 544 | N | ALA | A | 5 | −16.85 | 38.393 | 19.759 |
| ATOM | 545 | CA | ALA | A | 5 | −16.811 | 36.955 | 19.507 |
| ATOM | 546 | C | ALA | A | 5 | −15.772 | 36.771 | 18.416 |
| ATOM | 547 | O | ALA | A | 5 | −15.727 | 37.534 | 17.455 |
| ATOM | 548 | CB | ALA | A | 5 | −18.168 | 36.419 | 19.043 |
| ATOM | 549 | N | CYS | A | 6 | −14.935 | 35.756 | 18.562 |
| ATOM | 550 | CA | CYS | A | 6 | −13.887 | 35.518 | 17.584 |
| ATOM | 551 | C | CYS | A | 6 | −14.347 | 34.765 | 16.338 |
| ATOM | 552 | O | CYS | A | 6 | −15.327 | 34.018 | 16.368 |
| ATOM | 553 | CB | CYS | A | 6 | −12.743 | 34.768 | 18.241 |
| ATOM | 554 | SG | CYS | A | 6 | −11.198 | 34.959 | 17.353 |
| ATOM | 555 | N | CYS | A | 7 | −13.623 | 34.973 | 15.243 |
| ATOM | 556 | CA | CYS | A | 7 | −13.931 | 34.328 | 13.969 |
| ATOM | 557 | C | CYS | A | 7 | −13.091 | 33.071 | 13.798 |
| ATOM | 558 | O | CYS | A | 7 | −11.961 | 33.123 | 13.302 |
| ATOM | 559 | CB | CYS | A | 7 | −13.653 | 35.290 | 12.824 |
| ATOM | 560 | SG | CYS | A | 7 | −13.930 | 34.633 | 11.154 |
| ATOM | 561 | N | VAL | A | 8 | −13.654 | 31.941 | 14.209 |
| ATOM | 562 | CA | VAL | A | 8 | −12.949 | 30.684 | 14.110 |
| ATOM | 563 | C | VAL | A | 8 | −13.653 | 29.733 | 13.157 |
| ATOM | 564 | O | VAL | A | 8 | −14.759 | 30.016 | 12.687 |
| ATOM | 565 | CB | VAL | A | 8 | −12.814 | 30.038 | 15.492 |
| ATOM | 566 | CG1 | VAL | A | 8 | −11.807 | 30.825 | 16.337 |
| ATOM | 567 | CG2 | VAL | A | 8 | −14.161 | 30.006 | 16.170 |
| ATOM | 568 | N | PRO | A | 9 | −13.003 | 28.601 | 12.828 |
| ATOM | 569 | CA | PRO | A | 9 | −13.593 | 27.615 | 11.918 |
| ATOM | 570 | C | PRO | A | 9 | −14.726 | 26.886 | 12.631 |
| ATOM | 571 | O | PRO | A | 9 | −14.581 | 26.476 | 13.780 |
| ATOM | 572 | CB | PRO | A | 9 | −12.423 | 26.676 | 11.601 |
| ATOM | 573 | CG | PRO | A | 9 | −11.204 | 27.487 | 11.925 |
| ATOM | 574 | CD | PRO | A | 9 | −11.620 | 28.226 | 13.163 |
| ATOM | 575 | N | THR | A | 10 | −15.847 | 26.721 | 11.942 |
| ATOM | 576 | CA | THR | A | 10 | −16.999 | 26.060 | 12.527 |
| ATOM | 577 | C | THR | A | 10 | −17.334 | 24.767 | 11.804 |
| ATOM | 578 | O | THR | A | 10 | −18.097 | 23.943 | 12.303 |
| ATOM | 579 | CB | THR | A | 10 | −18.211 | 27.010 | 12.523 |
| ATOM | 580 | OG1 | THR | A | 10 | −18.491 | 27.445 | 11.185 |
| ATOM | 581 | CG2 | THR | A | 10 | −17.902 | 28.230 | 13.375 |
| ATOM | 582 | N | GLU | A | 11 | −16.750 | 24.586 | 10.627 |
| ATOM | 583 | CA | GLU | A | 11 | −16.980 | 23.377 | 9.848 |
| ATOM | 584 | C | GLU | A | 11 | −15.643 | 22.935 | 9.246 |
| ATOM | 585 | O | GLU | A | 11 | −15.029 | 23.666 | 8.464 |
| ATOM | 586 | CB | GLU | A | 11 | −17.981 | 23.624 | 8.715 |
| ATOM | 587 | CG | GLU | A | 11 | −19.421 | 23.807 | 9.163 |
| ATOM | 588 | CD | GLU | A | 11 | −19.686 | 25.166 | 9.770 |
| ATOM | 589 | OE1 | GLU | A | 11 | −19.478 | 26.175 | 9.073 |
| ATOM | 590 | OE2 | GLU | A | 11 | −20.111 | 25.227 | 10.939 |
| ATOM | 591 | N | LEU | A | 12 | −15.183 | 21.749 | 9.622 |
| ATOM | 592 | CA | LEU | A | 12 | −13.923 | 21.254 | 9.104 |
| ATOM | 593 | C | LEU | A | 12 | −14.062 | 19.912 | 8.386 |
| ATOM | 594 | O | LEU | A | 12 | −15.136 | 19.299 | 8.359 |
| ATOM | 595 | CB | LEU | A | 12 | −12.893 | 21.144 | 10.230 |
| ATOM | 596 | CG | LEU | A | 12 | −12.660 | 22.422 | 11.054 |
| ATOM | 597 | CD1 | LEU | A | 12 | −13.475 | 22.350 | 12.337 |
| ATOM | 598 | CD2 | LEU | A | 12 | −11.181 | 22.586 | 11.399 |
| ATOM | 599 | N | SER | A | 13 | −12.971 | 19.476 | 7.771 |
| ATOM | 600 | CA | SER | A | 13 | −12.964 | 18.218 | 7.046 |
| ATOM | 601 | C | SER | A | 13 | −11.568 | 17.628 | 7.164 |
| ATOM | 602 | O | SER | A | 13 | −10.613 | 18.320 | 7.550 |
| ATOM | 603 | CB | SER | A | 13 | −13.346 | 18.435 | 5.578 |
| ATOM | 604 | OG | SER | A | 13 | −12.404 | 19.261 | 4.923 |
| ATOM | 605 | N | ALA | A | 13 | −11.449 | 16.352 | 6.818 |
| ATOM | 606 | CA | ALA | A | 13 | −10.179 | 15.665 | 6.949 |
| ATOM | 607 | C | ALA | A | 13 | −9.421 | 15.471 | 5.652 |
| ATOM | 608 | O | ALA | A | 13 | −9.941 | 15.720 | 4.563 |
| ATOM | 609 | CB | ALA | A | 13 | −10.413 | 14.306 | 7.626 |
| ATOM | 610 | N | ILE | A | 14 | −8.171 | 15.046 | 5.783 |
| ATOM | 611 | CA | ILE | A | 14 | −7.343 | 14.746 | 4.623 |
| ATOM | 612 | C | ILE | A | 14 | −6.475 | 13.559 | 5.004 |
| ATOM | 613 | O | ILE | A | 14 | −6.212 | 13.316 | 6.183 |
| ATOM | 614 | CB | ILE | A | 14 | −6.401 | 15.916 | 4.183 |
| ATOM | 615 | CG1 | ILE | A | 14 | −5.284 | 16.106 | 5.200 |
| ATOM | 616 | CG2 | ILE | A | 14 | −7.188 | 17.211 | 3.982 |
| ATOM | 617 | CD1 | ILE | A | 14 | −4.173 | 16.973 | 4.696 |
| ATOM | 618 | N | SER | A | 15 | −6.045 | 12.806 | 3.999 |
| ATOM | 619 | CA | SER | A | 15 | −5.187 | 11.662 | 4.242 |
| ATOM | 620 | C | SER | A | 15 | −3.740 | 12.089 | 4.217 |
| ATOM | 621 | O | SER | A | 15 | −3.360 | 13.020 | 3.508 |
| ATOM | 622 | CB | SER | A | 15 | −5.416 | 10.584 | 3.185 |
| ATOM | 623 | OG | SER | A | 15 | −6.667 | 9.971 | 3.401 |
| ATOM | 624 | N | MET | A | 16 | −2.933 | 11.409 | 5.012 |
| ATOM | 625 | CA | MET | A | 16 | −1.518 | 11.700 | 5.047 |
| ATOM | 626 | C | MET | A | 16 | −0.778 | 10.414 | 5.244 |
| ATOM | 627 | O | MET | A | 16 | −1.137 | 9.594 | 6.078 |
| ATOM | 628 | CB | MET | A | 16 | −1.170 | 12.694 | 6.164 |
| ATOM | 629 | CG | MET | A | 16 | −1.848 | 14.042 | 5.974 |
| ATOM | 630 | SD | MET | A | 16 | −1.017 | 15.431 | 6.760 |
| ATOM | 631 | CE | MET | A | 16 | −0.799 | 14.823 | 8.475 |
| ATOM | 632 | N | LEU | A | 17 | 0.238 | 10.231 | 4.426 |
| ATOM | 633 | CA | LEU | A | 17 | 1.077 | 9.065 | 4.508 |
| ATOM | 634 | C | LEU | A | 17 | 2.289 | 9.610 | 5.264 |
| ATOM | 635 | O | LEU | A | 17 | 2.939 | 10.565 | 4.818 |
| ATOM | 636 | CB | LEU | A | 17 | 1.461 | 8.608 | 3.100 |
| ATOM | 637 | CG | LEU | A | 17 | 2.324 | 7.355 | 2.955 |
| ATOM | 638 | CD1 | LEU | A | 17 | 1.553 | 6.145 | 3.445 |
| ATOM | 639 | CD2 | LEU | A | 17 | 2.723 | 7.190 | 1.492 |
| ATOM | 640 | N | TYR | A | 18 | 2.581 | 9.029 | 6.418 |
| ATOM | 641 | CA | TYR | A | 18 | 3.706 | 9.501 | 7.196 |
| ATOM | 642 | C | TYR | A | 18 | 4.434 | 8.333 | 7.835 |
| ATOM | 643 | O | TYR | A | 18 | 4.081 | 7.186 | 7.603 |
| ATOM | 644 | CB | TYR | A | 18 | 3.222 | 10.458 | 8.281 |
| ATOM | 645 | CG | TYR | A | 18 | 2.386 | 9.782 | 9.346 |
| ATOM | 646 | CD1 | TYR | A | 18 | 1.029 | 9.527 | 9.147 |
| ATOM | 647 | CD2 | TYR | A | 18 | 2.961 | 9.379 | 10.550 |
| ATOM | 648 | CE1 | TYR | A | 18 | 0.273 | 8.894 | 10.128 |
| ATOM | 649 | CE2 | TYR | A | 18 | 2.218 | 8.745 | 11.526 |
| ATOM | 650 | CZ | TYR | A | 18 | 0.877 | 8.508 | 11.317 |
| ATOM | 651 | OH | TYR | A | 18 | 0.134 | 7.922 | 12.318 |
| ATOM | 652 | N | LEU | A | 19 | 5.439 | 8.651 | 8.650 |
| ATOM | 653 | CA | LEU | A | 19 | 6.255 | 7.661 | 9.347 |
| ATOM | 654 | C | LEU | A | 19 | 6.210 | 7.946 | 10.847 |
| ATOM | 655 | O | LEU | A | 19 | 6.685 | 8.992 | 11.288 |
| ATOM | 656 | CB | LEU | A | 19 | 7.701 | 7.763 | 8.871 |
| ATOM | 657 | CG | LEU | A | 19 | 7.901 | 7.850 | 7.359 |
| ATOM | 658 | CD1 | LEU | A | 19 | 9.300 | 8.379 | 7.039 |
| ATOM | 659 | CD2 | LEU | A | 19 | 7.669 | 6.482 | 6.748 |
| ATOM | 660 | N | ASP | A | 20 | 5.652 | 7.035 | 11.639 |
| ATOM | 661 | CA | ASP | A | 20 | 5.594 | 7.282 | 13.071 |
| ATOM | 662 | C | ASP | A | 20 | 7.001 | 7.289 | 13.662 |
| ATOM | 663 | O | ASP | A | 20 | 7.985 | 7.185 | 12.932 |
| ATOM | 664 | CB | ASP | A | 20 | 4.714 | 6.244 | 13.786 |
| ATOM | 665 | CG | ASP | A | 20 | 5.292 | 4.837 | 13.752 |
| ATOM | 666 | OD1 | ASP | A | 20 | 6.533 | 4.678 | 13.775 |
| ATOM | 667 | OD2 | ASP | A | 20 | 4.491 | 3.882 | 13.732 |
| ATOM | 668 | N | GLU | A | 21 | 7.089 | 7.413 | 14.981 |
| ATOM | 669 | CA | GLU | A | 21 | 8.375 | 7.451 | 15.669 |
| ATOM | 670 | C | GLU | A | 21 | 9.250 | 6.212 | 15.463 |
| ATOM | 671 | O | GLU | A | 21 | 10.459 | 6.246 | 15.738 |
| ATOM | 672 | CB | GLU | A | 21 | 8.164 | 7.699 | 17.171 |
| ATOM | 673 | CG | GLU | A | 21 | 7.220 | 6.731 | 17.868 |
| ATOM | 674 | CD | GLU | A | 21 | 5.828 | 6.726 | 17.257 |
| ATOM | 675 | OE1 | GLU | A | 21 | 5.347 | 7.810 | 16.856 |
| ATOM | 676 | OE2 | GLU | A | 21 | 5.210 | 5.640 | 17.185 |
| ATOM | 677 | N | ASN | A | 22 | 8.646 | 5.133 | 14.966 |
| ATOM | 678 | CA | ASN | A | 22 | 9.377 | 3.889 | 14.727 |
| ATOM | 679 | C | ASN | A | 22 | 9.682 | 3.647 | 13.249 |
| ATOM | 680 | O | ASN | A | 22 | 10.095 | 2.554 | 12.853 |
| ATOM | 681 | CB | ASN | A | 22 | 8.591 | 2.707 | 15.299 |
| ATOM | 682 | CG | ASN | A | 22 | 8.384 | 2.827 | 16.794 |
| ATOM | 683 | OD1 | ASN | A | 22 | 9.349 | 2.930 | 17.560 |
| ATOM | 684 | ND2 | ASN | A | 22 | 7.125 | 2.819 | 17.221 |
| ATOM | 685 | N | GLU | A | 23 | 9.485 | 4.672 | 12.435 |
| ATOM | 686 | CA | GLU | A | 23 | 9.749 | 4.558 | 11.015 |
| ATOM | 687 | C | GLU | A | 23 | 8.790 | 3.603 | 10.299 |
| ATOM | 688 | O | GLU | A | 23 | 9.145 | 2.996 | 9.292 |
| ATOM | 689 | CB | GLU | A | 23 | 11.203 | 4.129 | 10.784 |
| ATOM | 690 | CG | GLU | A | 23 | 12.232 | 5.210 | 11.082 |
| ATOM | 691 | CD | GLU | A | 23 | 12.072 | 6.410 | 10.166 |
| ATOM | 692 | OE1 | GLU | A | 23 | 12.108 | 6.218 | 8.928 |
| ATOM | 693 | OE2 | GLU | A | 23 | 11.907 | 7.541 | 10.677 |
| ATOM | 694 | N | LYS | A | 24 | 7.580 | 3.459 | 10.826 |
| ATOM | 695 | CA | LYS | A | 24 | 6.583 | 2.624 | 10.175 |
| ATOM | 696 | C | LYS | A | 24 | 5.815 | 3.540 | 9.228 |
| ATOM | 697 | O | LYS | A | 24 | 5.553 | 4.692 | 9.552 |
| ATOM | 698 | CB | LYS | A | 24 | 5.602 | 2.039 | 11.182 |
| ATOM | 699 | CG | LYS | A | 24 | 6.163 | 0.963 | 12.058 |
| ATOM | 700 | CD | LYS | A | 24 | 5.068 | 0.387 | 12.947 |
| ATOM | 701 | CE | LYS | A | 24 | 5.648 | −0.511 | 14.031 |
| ATOM | 702 | NZ | LYS | A | 24 | 4.577 | −1.091 | 14.886 |
| ATOM | 703 | N | VAL | A | 25 | 5.455 | 3.037 | 8.057 |
| ATOM | 704 | CA | VAL | A | 25 | 4.713 | 3.849 | 7.116 |
| ATOM | 705 | C | VAL | A | 25 | 3.237 | 3.737 | 7.444 |
| ATOM | 706 | O | VAL | A | 25 | 2.657 | 2.659 | 7.383 |
| ATOM | 707 | CB | VAL | A | 25 | 4.969 | 3.396 | 5.681 |
| ATOM | 708 | CG1 | VAL | A | 25 | 4.250 | 4.317 | 4.708 |
| ATOM | 709 | CG2 | VAL | A | 25 | 6.462 | 3.393 | 5.422 |
| ATOM | 710 | N | VAL | A | 25 | 2.637 | 4.864 | 7.800 |
| ATOM | 711 | CA | VAL | A | 25 | 1.231 | 4.916 | 8.170 |
| ATOM | 712 | C | VAL | A | 25 | 0.418 | 5.778 | 7.213 |
| ATOM | 713 | O | VAL | A | 25 | 0.871 | 6.841 | 6.774 |
| ATOM | 714 | CB | VAL | A | 25 | 1.062 | 5.531 | 9.577 |
| ATOM | 715 | CG1 | VAL | A | 25 | −0.341 | 5.253 | 10.115 |
| ATOM | 716 | CG2 | VAL | A | 25 | 2.128 | 5.006 | 10.506 |
| ATOM | 717 | N | LEU | A | 26 | −0.779 | 5.306 | 6.887 |
| ATOM | 718 | CA | LEU | A | 26 | −1.706 | 6.048 | 6.040 |
| ATOM | 719 | C | LEU | A | 26 | −2.862 | 6.358 | 6.992 |
| ATOM | 720 | O | LEU | A | 26 | −3.679 | 5.497 | 7.297 |
| ATOM | 721 | CB | LEU | A | 26 | −2.201 | 5.189 | 4.876 |
| ATOM | 722 | CG | LEU | A | 26 | −3.204 | 5.898 | 3.952 |
| ATOM | 723 | CD1 | LEU | A | 26 | −2.519 | 7.077 | 3.262 |
| ATOM | 724 | CD2 | LEU | A | 26 | −3.755 | 4.925 | 2.929 |
| ATOM | 725 | N | LYS | A | 27 | −2.910 | 7.584 | 7.489 |
| ATOM | 726 | CA | LYS | A | 27 | −3.952 | 7.965 | 8.430 |
| ATOM | 727 | C | LYS | A | 27 | −4.831 | 9.082 | 7.881 |
| ATOM | 728 | O | LYS | A | 27 | −4.374 | 9.924 | 7.103 |
| ATOM | 729 | CB | LYS | A | 27 | −3.305 | 8.409 | 9.738 |
| ATOM | 730 | CG | LYS | A | 27 | −4.265 | 8.720 | 10.859 |
| ATOM | 731 | CD | LYS | A | 27 | −3.509 | 9.382 | 11.994 |
| ATOM | 732 | CE | LYS | A | 27 | −4.397 | 9.654 | 13.186 |
| ATOM | 733 | NZ | LYS | A | 27 | −4.839 | 8.377 | 13.816 |
| ATOM | 734 | N | ASN | A | 28 | −6.098 | 9.078 | 8.279 |
| ATOM | 735 | CA | ASN | A | 28 | −7.045 | 10.095 | 7.843 |
| ATOM | 736 | C | ASN | A | 28 | −7.147 | 11.103 | 8.979 |
| ATOM | 737 | O | ASN | A | 28 | −7.815 | 10.842 | 9.969 |
| ATOM | 738 | CB | ASN | A | 28 | −8.408 | 9.455 | 7.560 |
| ATOM | 739 | CG | ASN | A | 28 | −9.518 | 10.485 | 7.364 |
| ATOM | 740 | OD1 | ASN | A | 28 | −9.360 | 11.444 | 6.597 |
| ATOM | 741 | ND2 | ASN | A | 28 | −10.653 | 10.288 | 8.050 |
| ATOM | 742 | N | TYR | A | 29 | −6.473 | 12.241 | 8.837 |
| ATOM | 743 | CA | TYR | A | 29 | −6.470 | 13.278 | 9.869 |
| ATOM | 744 | C | TYR | A | 29 | −7.680 | 14.204 | 9.836 |
| ATOM | 745 | O | TYR | A | 29 | −7.928 | 14.870 | 8.835 |
| ATOM | 746 | CB | TYR | A | 29 | −5.197 | 14.130 | 9.768 |
| ATOM | 747 | CG | TYR | A | 29 | −3.913 | 13.420 | 10.155 |
| ATOM | 748 | CD1 | TYR | A | 29 | −3.378 | 12.394 | 9.363 |
| ATOM | 749 | CD2 | TYR | A | 29 | −3.220 | 13.792 | 11.306 |
| ATOM | 750 | CE1 | TYR | A | 29 | −2.181 | 11.765 | 9.713 |
| ATOM | 751 | CE2 | TYR | A | 29 | −2.032 | 13.171 | 11.665 |
| ATOM | 752 | CZ | TYR | A | 29 | −1.516 | 12.167 | 10.869 |
| ATOM | 753 | OH | TYR | A | 29 | −0.319 | 11.603 | 11.231 |
| ATOM | 754 | N | GLN | A | 30 | −8.408 | 14.254 | 10.950 |
| ATOM | 755 | CA | GLN | A | 30 | −9.606 | 15.088 | 11.089 |
| ATOM | 756 | C | GLN | A | 30 | −9.287 | 16.541 | 11.431 |
| ATOM | 757 | O | GLN | A | 30 | −8.213 | 16.847 | 11.925 |
| ATOM | 758 | CB | GLN | A | 30 | −10.500 | 14.541 | 12.202 |
| ATOM | 759 | CG | GLN | A | 30 | −10.807 | 13.074 | 12.104 |
| ATOM | 760 | CD | GLN | A | 30 | −11.744 | 12.749 | 10.969 |
| ATOM | 761 | OE1 | GLN | A | 30 | −11.900 | 11.582 | 10.602 |
| ATOM | 762 | NE2 | GLN | A | 30 | −12.385 | 13.773 | 10.405 |
| ATOM | 763 | N | ASP | A | 31 | −10.238 | 17.430 | 11.173 |
| ATOM | 764 | CA | ASP | A | 31 | −10.085 | 18.851 | 11.495 |
| ATOM | 765 | C | ASP | A | 31 | −8.867 | 19.494 | 10.842 |
| ATOM | 766 | O | ASP | A | 31 | −8.195 | 20.335 | 11.442 |
| ATOM | 767 | CB | ASP | A | 31 | −10.000 | 19.025 | 13.019 |
| ATOM | 768 | CG | ASP | A | 31 | −11.247 | 18.520 | 13.742 |
| ATOM | 769 | OD1 | ASP | A | 31 | −12.349 | 18.587 | 13.155 |
| ATOM | 770 | OD2 | ASP | A | 31 | −11.130 | 18.069 | 14.908 |
| ATOM | 771 | N | MET | A | 32 | −8.582 | 19.113 | 9.606 |
| ATOM | 772 | CA | MET | A | 32 | −7.426 | 19.662 | 8.918 |
| ATOM | 773 | C | MET | A | 32 | −7.780 | 20.808 | 7.987 |
| ATOM | 774 | O | MET | A | 32 | −7.021 | 21.768 | 7.855 |
| ATOM | 775 | CB | MET | A | 32 | −6.741 | 18.559 | 8.125 |
| ATOM | 776 | CG | MET | A | 32 | −6.037 | 17.540 | 8.980 |
| ATOM | 777 | SD | MET | A | 32 | −4.559 | 18.231 | 9.714 |
| ATOM | 778 | CE | MET | A | 32 | −3.406 | 18.041 | 8.318 |
| ATOM | 779 | N | VAL | A | 33 | −8.942 | 20.707 | 7.351 |
| ATOM | 780 | CA | VAL | A | 33 | −9.381 | 21.719 | 6.401 |
| ATOM | 781 | C | VAL | A | 33 | −10.579 | 22.536 | 6.858 |
| ATOM | 782 | O | VAL | A | 33 | −11.586 | 21.988 | 7.292 |
| ATOM | 783 | CB | VAL | A | 33 | −9.701 | 21.056 | 5.027 |
| ATOM | 784 | CG1 | VAL | A | 33 | −10.388 | 22.040 | 4.087 |
| ATOM | 785 | CG2 | VAL | A | 33 | −8.423 | 20.561 | 4.412 |
| ATOM | 786 | N | VAL | A | 34 | −10.465 | 23.855 | 6.739 |
| ATOM | 787 | CA | VAL | A | 34 | −11.553 | 24.745 | 7.113 |
| ATOM | 788 | C | VAL | A | 34 | −12.610 | 24.835 | 6.016 |
| ATOM | 789 | O | VAL | A | 34 | −12.373 | 25.403 | 4.950 |
| ATOM | 790 | CB | VAL | A | 34 | −11.057 | 26.176 | 7.407 |
| ATOM | 791 | CG1 | VAL | A | 34 | −12.240 | 27.097 | 7.601 |
| ATOM | 792 | CG2 | VAL | A | 34 | −10.222 | 26.186 | 8.655 |
| ATOM | 793 | N | GLU | A | 35 | −13.779 | 24.266 | 6.282 |
| ATOM | 794 | CA | GLU | A | 35 | −14.870 | 24.311 | 5.321 |
| ATOM | 795 | C | GLU | A | 35 | −15.702 | 25.565 | 5.572 |
| ATOM | 796 | O | GLU | A | 35 | −16.011 | 26.303 | 4.645 |
| ATOM | 797 | CB | GLU | A | 35 | −15.733 | 23.054 | 5.447 |
| ATOM | 798 | CG | GLU | A | 35 | −14.969 | 21.782 | 5.128 |
| ATOM | 799 | CD | GLU | A | 35 | −14.515 | 21.732 | 3.676 |
| ATOM | 800 | OE1 | GLU | A | 35 | −15.036 | 22.519 | 2.858 |
| ATOM | 801 | OE2 | GLU | A | 35 | −13.643 | 20.902 | 3.344 |
| ATOM | 802 | N | GLY | A | 36 | −16.053 | 25.811 | 6.829 |
| ATOM | 803 | CA | GLY | A | 36 | −16.834 | 26.990 | 7.152 |
| ATOM | 804 | C | GLY | A | 36 | −16.322 | 27.785 | 8.341 |
| ATOM | 805 | O | GLY | A | 36 | −15.671 | 27.249 | 9.237 |
| ATOM | 806 | N | CYS | A | 37 | −16.616 | 29.077 | 8.360 |
| ATOM | 807 | CA | CYS | A | 37 | −16.177 | 29.917 | 9.466 |
| ATOM | 808 | C | CYS | A | 37 | −17.347 | 30.502 | 10.249 |
| ATOM | 809 | O | CYS | A | 37 | −18.467 | 30.628 | 9.741 |
| ATOM | 810 | CB | CYS | A | 37 | −15.301 | 31.058 | 8.967 |
| ATOM | 811 | SG | CYS | A | 37 | −13.785 | 30.558 | 8.098 |
| ATOM | 812 | N | GLY | A | 38 | −17.079 | 30.867 | 11.494 |
| ATOM | 813 | CA | GLY | A | 38 | −18.129 | 31.430 | 12.309 |
| ATOM | 814 | C | GLY | A | 38 | −17.622 | 32.176 | 13.518 |
| ATOM | 815 | O | GLY | A | 38 | −16.425 | 32.235 | 13.791 |
| ATOM | 816 | N | CYS | A | 39 | −18.564 | 32.753 | 14.245 |
| ATOM | 817 | CA | CYS | A | 39 | −18.253 | 33.505 | 15.439 |
| ATOM | 818 | C | CYS | A | 39 | −18.543 | 32.670 | 16.665 |
| ATOM | 819 | O | CYS | A | 39 | −19.620 | 32.084 | 16.794 |
| ATOM | 820 | CB | CYS | A | 39 | −19.068 | 34.779 | 15.442 |
| ATOM | 821 | SG | CYS | A | 39 | −18.539 | 35.799 | 14.053 |

[0228] Structure coordinates: As used herein, unless indicated otherwise or contradictory in context, the “structure coordinates” refers to Cartesian coordinates derived from mathematical equations related to the patterns obtained on diffraction of a monochromatic beam of X-rays by the atoms (scattering centers) of a protein, protein complex or peptide in crystal form. The diffraction data are used to calculate an electron density map of the repeating unit of the crystal. The electron density maps are then used to establish the positions of the individual atoms of the molecule or molecular complex.

[0229] STAMP: STAMP (Structural Alignment of Multiple Proteins) is a tool for aligning protein sequences based on a three-dimensional structure. Its algorithm minimizes the Ca distance between aligned residues of each molecule by applying globally optimal rigid-body rotations and translations. This program provides some information on the equivalence of the residues between the selected models.

[0230] SCWRL: This program predicts and optimizes the protein side-chain conformations. It is using the backbone of a support protein and a backbone-dependent rotamer library. The possible conformations are explored by minimizing the steric hindrance between the side-chains and between the side-chains and the backbone.

[0231] GROMACS: GROMACS is a molecular dynamics package. The “gmx rms” tool included in GROMACS compares two structures by computing the root mean square deviation (RMSD).

### II. Growth Factor Receptor-Binding Compounds

[0232] In one aspect, the present disclosure provides for growth factor receptor-binding compounds having the ability to induce stem cell differentiation and promote tissue regeneration.

[0233] As used herein, the term “growth factor receptor-binding compound”, “GFR-binding compound” or “GFRBC” refers to an exogenous or endogenous compound, molecule or substance having an (binding) affinity for a growth factor receptor as defined herein, and optionally comprising the ability to associate or combine with a bioactive carrier as defined herein.

[0234] There are many ways to test, measure and present the binding affinity of a given substance for a given receptor, but for the purpose of the present disclosure, and for the avoidance of any doubts, the (binding) affinity values of a given GFR-binding compound to a given GFR are provided using the method of fluorescence anisotropy. In this method, a GFR-binding compound is fluorescently labelled using techniques well established in the art. Binding of the resulting labelled compound to a growth factor receptor results in a fluctuation of fluorescence anisotropy which is used to construct an affinity binding curve from which the GFR-binding compound binding affinity value is derived. Using this technique, binding affinity values are given in the form of dissociation constants Kd. In certain embodiments, GFR-binding compounds of the present disclosure have Kd values as measured by fluorescence anisotropy of more than 1 (one) picomolar (pM). In certain embodiments, GFR-binding compounds of the present disclosure have Kd values as measured by fluorescence anisotropy of more than 1 (one) nanomolar (nM). In certain embodiments, GFR-binding compounds of the present disclosure have Kd values as measured by fluorescence anisotropy of more than 10 (ten) nanomolar (nM). In certain embodiments, GFR-binding compounds of the present disclosure have Kd values as measured by fluorescence anisotropy of more than 100 (one hundred) nanomolar (nM). In certain embodiments, GFR-binding compounds of the present disclosure have Kd values as measured by fluorescence anisotropy of more than 1 (one) micromolar (μM). In certain embodiments, GFR-binding compounds of the present disclosure have Kd values as measured by fluorescence anisotropy of more than 10 (ten) micromolar (μM). In certain embodiments, GFR-binding compounds of the present disclosure have Kd values as measured by fluorescence anisotropy of more than 100 (one hundred) micromolar (μM).

[0235] A GFR-binding compound is said to possess the ability to associate or combine with a bioactive carrier if it comprises a functional chemical element, function or group allowing for the covalent or non-covalent assembly of the GFR-binding compound and the bioactive carrier. Such a functional chemical element, function or group, also referred to as a bioactive carrier-affinity-containing group or bioactive carrier-high-affinity-containing group, include, but is not limited to, a thiol-containing compound, a cysteine-containing compound, a cysteine, or a GTPGP or a WWFWG peptide fragment.

[0236] Growth factor receptor: As used herein, unless indicated otherwise or contradictory in context, the term “growth factor receptor” or “GFR” is a receptor which binds to growth factors which are naturally occurring substances capable of stimulating, for instance, cellular growth, proliferation, healing, and cellular differentiation. Suitable as growth factor receptors for implementing embodiments of the present invention include epidermal growth factor receptors (EGFR), fibroblast growth factor receptors (FGFR), vascular endothelial growth factor receptors (VEGFR), nerve growth factor receptors (NGFR), Insulin receptor family, Trk receptor family, Eph receptor family, AXL receptor family, LTK receptor family, TIE receptor family, ROR receptor family, DDR receptor family, RET receptor family, KLG receptor family, RYK receptor family, MuSK receptor family, hepatocyte growth factor receptors (HGFR), somatomedin or insulin-like growth factor receptors (SGFR), platelet-derived growth factor receptors (PDGFR), transforming growth factor beta (TGF-3) superfamily proteins such as AMH, ARTN, BMP10, BMP15, BMP2, BMP3, BMP4, BMP5, BMP6, BMP7, BMP8A, BMP8B, GDF1, GDF10, GDF11, GDF15, GDF2, GDF3, GDF3A, GDF5, GDF6, GDF7, GDF8, GDF9, GDNF, INHA, INHBA, INHBB, INHBC, INHBE, LEFTY1, LEFTY2, MSTN, NODAL, NRTN, PSPN, TGFB1, TGFB2 and TGFB3, and any combination thereof.

[0237] Growth factor: As used herein, unless indicated otherwise or contradictory in context, the term “growth factor” refers to any substance(s) having the ability to bind to a growth factor receptor and produce (a) biological effect(s) or reaction(s), such as promoting the growth of tissues, by activating such a growth factor receptor. Exemplary growth factors include, but are not limited to, platelet-derived growth factor (PDGF), platelet-derived angiogenesis factor (PDAF), vascular endotheial growth factor (VEGF), platelet-derived epidermal growth factor (PDEGF), transforming growth factor beta (TGF-β), transforming growth factor A (TGF-A), epidermal growth factor (EGF), fibroblast growth factor (FGF), acidic fibroblast growth factor (FGF-A), basic fibroblast growth factor (FGF-B), insulin-like growth factors 1 and 2 (IGF-1 and IGF-2), keratinocyte growth factor (KGF), tumor necrosis factor (TNF), fibroblast growth factor (FGF) and interleukin-1 (IL-I), Keratinocyte Growth Factor-2 (KGF-2), and combinations thereof.

[0238] Activation of growth factor receptors: As used herein, unless indicated otherwise or contradictory in context, the term “activating” or “activation of”, when used in relation to a growth factor receptor, refers to the phosphorylation of the tyrosine kinase domain of such a growth factor receptor.

[0239] In one aspect, the present disclosure provides a GFR-binding compound having mesenchymal stem cell and progenitor cell commitment and/or differentiation and/or maturation capacities resulting in tissue regeneration.

[0240] In one example, said GFR-binding compound has a molecular weight of less than 8,000 Daltons. In one particular example, said GFR-binding compound has a molecular weight of less than 6,000 Daltons. In one particular example, said GFR-binding compound has a molecular weight comprised between 2,000 and 8,000 Daltons. In one particular example, said GFR-binding compound has a molecular weight comprised between 2,000 and 6,000 Daltons. Between 2,000 and 6,000 Daltons is particularly preferred.

[0241] In one particular example, the growth factor receptor involved in the interaction with said GFR-binding compound is an epidermal growth factor receptor. In one particular example, the growth factor receptor involved in the interaction with said GFR-binding compound is a fibroblast growth factor receptor. In one particular example, the growth factor receptor involved in the interaction with said GFR-binding compound is a vascular endothelial growth factor receptor. In one particular example, the growth factor receptor involved in the interaction with said GFR-binding compound is a nerve growth factor receptor. In one particular example, the growth factor receptor involved in the interaction with said GFR-binding compound is a hepatocyte growth factor receptor. In one particular example, the growth factor receptor involved in the interaction with said GFR-binding compound is a somatomedin or insulin-like growth factor receptor. In one particular example, the growth factor receptor involved in the interaction with said GFR-binding compound is a platelet-derived growth factor receptor. In one particular example, the growth factor receptor involved in the interaction with said GFR-binding compound is a protein from the transforming growth factor beta (TGF-β) superfamily.

[0242] In one particular example, the growth factor receptor(s) involved in the interaction with said GFR-binding compound is (are) preferably selected from epidermal growth factor receptors, fibroblast growth factor receptors, vascular endothelial growth factor receptors, nerve growth factor receptors, hepatocyte growth factor receptors, somatomedin or insulin-like growth factor receptors, platelet-derived growth factor receptors, and transforming growth factor beta (TGF-β) superfamily proteins.

[0243] In one particular example, said GFR-binding compound is a peptide, or a variant or analog thereof, having growth factor receptor-binding capability or capabilities, with (exclusively consisting of, or constituted of) between 25-60 amino acids, in particular between 25-50 amino acids, and more particularly between 25-45 amino acids; wherein the RMSD value of the three dimensional (3D) atomic coordinates of said GFR-binding compound with respect to PEPREF is 2.45 Å (Angstroms) or less, in particular is 2 Å or less, and more particularly is 1.79 Å or less, and wherein PEPREF is the set of 3D atomic coordinates already defined herein (hereinafter also referred to as “wherein the RMSD is 2.45 Å or less” for the sake of conciseness).

[0244] In one particular example, said GFR-binding compound is a peptide, or a variant or analog thereof, having growth factor receptor-binding capability or capabilities, with (exclusively consisting of, or constituted of) between 25-60 amino acids; wherein the RMSD value of the three dimensional (3D) atomic coordinates of said GFR-binding compound with respect to PEPREF is 2.45 Å (Angstroms) or less, in particular is 2 Å or less, and more particularly is 1.79 Å or less, and wherein PEPREF is the set of 3D atomic coordinates already defined herein.

[0245] In one particular example, said GFR-binding compound is a peptide, or a variant or analog thereof, having growth factor receptor-binding capability or capabilities, with (exclusively consisting of, or constituted of) between 25-50 amino acids; wherein the RMSD value of the three dimensional (3D) atomic coordinates of said GFR-binding compound with respect to PEPREF is 2.45 Å (Angstroms) or less, in particular is 2 Å or less, and more particularly is 1.79 Å or less, and wherein PEPREF is the set of 3D atomic coordinates already defined herein.

[0246] In one particular example, said GFR-binding compound is a peptide, or a variant or analog thereof, having growth factor receptor-binding capability or capabilities, with (exclusively consisting of, or constituted of) between 25-45 amino acids; wherein the RMSD value of the three dimensional (3D) atomic coordinates of said GFR-binding compound with respect to PEPREF is 2.45 Å (Angstroms) or less, in particular is 2 Å or less, and more particularly is 1.79 Å or less, and wherein PEPREF is the set of 3D atomic coordinates already defined herein.

[0247] In one particular example, said GFR-binding compound is a peptidomimetic as defined herein, having growth factor receptor-binding capability or capabilities, comprising (consecutively or non consecutively) between 20-60 amino acids, in particular between 20-50 or 20-45 amino acids, and more particularly, between 23-60, 23-50 or 23-45 amino acids; wherein said GFR-binding compound has a molecular weight comprised between 2,000 and 8,000 Daltons (in particular, between 2,000 and 6,000 Da); and wherein the RMSD is 2.45 Å or less.

[0248] In one particular example, said GFR-binding compound is a peptidomimetic as defined herein, having growth factor receptor-binding capability or capabilities, comprising (consecutively or non consecutively) between 20-60 amino acids, in particular between 20-50 or 20-45 amino acids, and more particularly, between 23-60, 23-50 or 23-45 amino acids; and containing at least one peptide portion or fragment with between 5-20 amino acids (in particular containing two peptide portions or fragments, each of which with between 5-20 amino acids); wherein said GFR-binding compound has a molecular weight comprised between 2,000 and 8,000 Daltons (in particular, between 2,000 and 6,000 Da); and wherein the RMSD is 2.45 Å or less.

[0249] In one aspect, the present disclosure provides a GFR-binding compound, wherein said GFR-binding compound is a peptide, a variant or analog thereof, or a peptidomimetic as defined herein, having growth factor receptor-binding capability or capabilities, having a molecular weight of less than 8,000 Da, in particular of between 2,000 and 8,000 Da, more particularly of between 2,000 and 6,000 Da; and wherein the RMSD is 2.45 Å or less.

[0250] In one aspect, the present disclosure provides a GFR-binding compound, wherein said GFR-binding compound is a peptide, a variant or analog thereof, or a peptidomimetic as defined herein, having growth factor receptor-binding capability or capabilities, with between 20 and 60 (in particular between 20 and 50, and more particularly, between 20 and 45) amino acids, comprising a peptide with four amino acids (PEP1) and a peptide with five amino acids (PEP2); and wherein the RMSD is 2.45 Å or less.

[0251] In one aspect, the present disclosure provides a GFR-binding compound, wherein said GFR-binding compound is a peptide, a variant or analog thereof, or a peptidomimetic as defined herein, with between 20 and 60 (in particular between 20 and 50, and more particularly, between 20 and 45) amino acids, comprising a peptide with eight amino acids (PEP12) and a peptide with five amino acids (PEP2); and wherein the RMSD is 2.45 Å or less.

[0252] In one aspect, the present disclosure provides a GFR-binding compound, wherein said GFR-binding compound is a peptide, a variant or analog thereof, or a peptidomimetic as defined herein, with between 20 and 60 (in particular between 20 and 50, and more particularly, between 20 and 45) amino acids, comprising a peptide with four amino acids (PEP1) and a peptide with five amino acids (PEP2); wherein said GFR-binding compound further comprises a peptide with three amino acids (PEP3) and a peptide with three amino acids (PEP4); and wherein the RMSD is 2.45 Å or less.

[0253] In one aspect, the present disclosure provides a GFR-binding compound, wherein said GFR-binding compound is a peptide, a variant or analog thereof, or a peptidomimetic as defined herein, with between 20 and 60 (in particular between 20 and 50, and more particularly, between 20 and 45) amino acids, comprising a peptide with eight amino acids (PEP12) and a peptide with five amino acids (PEP2); wherein said GFR-binding compound further comprises a peptide with three amino acids (PEP3) and a peptide with three amino acids (PEP4); and wherein the RMSD is 2.45 Å or less.

[0254] In one aspect, the present disclosure provides a GFR-binding compound, wherein said GFR-binding compound is a peptide, a variant or analog thereof, or a peptidomimetic as defined herein, with between 20 and 60 (in particular between 20 and 50, and more particularly, between 20 and 45) amino acids, comprising a peptide with four amino acids (PEP1) and a peptide with five amino acids (PEP2); wherein said GFR-binding compound further comprises a peptide with five amino acids (PEP5) and a peptide with between five and seven amino acids (PEP6); and wherein the RMSD is 2.45 Å or less.

[0255] In one aspect, the present disclosure provides a GFR-binding compound, wherein said GFR-binding compound is a peptide, a variant or analog thereof, or a peptidomimetic as defined herein, with between 20 and 60 (in particular between 20 and 50, and more particularly, between 20 and 45) amino acids, comprising a peptide with eight amino acids (PEP12) and a peptide with five amino acids (PEP2); wherein said GFR-binding compound further comprises a peptide with five amino acids (PEP5) and a peptide with between five and seven amino acids (PEP6); and wherein the RMSD is 2.45 Å or less.

[0256] In one aspect, the present disclosure provides a GFR-binding compound, wherein said GFR-binding compound is a peptide, a variant or analog thereof, or a peptidomimetic as defined herein, with between 20 and 60 (in particular between 20 and 50, and more particularly, between 20 and 45) amino acids, comprising a peptide with four amino acids (PEP1) and a peptide with five amino acids (PEP2); wherein said GFR-binding compound further comprises a peptide with between six and twelve amino acids (PEP9) and a peptide with between six and eleven amino acids (PEP10); and wherein the RMSD is 2.45 Å or less.

[0257] In one aspect, the present disclosure provides a GFR-binding compound, wherein said GFR-binding compound is a peptide, a variant or analog thereof, or a peptidomimetic as defined herein, with between 20 and 60 (in particular between 20 and 50, and more particularly, between 20 and 45) amino acids, comprising a peptide with eight amino acids (PEP12) and a peptide with five amino acids (PEP2); wherein said GFR-binding compound further comprises a peptide with between six and twelve amino acids (PEP9) and a peptide with between six and eleven amino acids (PEP10); and wherein the RMSD is 2.45 Å or less.

[0258] In one aspect, the present disclosure provides a GFR-binding compound, wherein said GFR-binding compound is a peptide, a variant or analog thereof, or a peptidomimetic as defined herein, with between 20 and 60 (in particular between 20 and 50, and more particularly, between 20 and 45) amino acids, comprising a peptide with four amino acids (PEP1) and a peptide with five amino acids (PEP2); wherein said GFR-binding compound further comprises a peptide with three amino acids (PEP3) and a peptide with between five and seven amino acids (PEP6); and wherein the RMSD is 2.45 Å or less.

[0259] In one aspect, the present disclosure provides a GFR-binding compound, wherein said GFR-binding compound is a peptide, a variant or analog thereof, or a peptidomimetic as defined herein, with between 20 and 60 (in particular between 20 and 50, and more particularly, between 20 and 45) amino acids, comprising a peptide with eight amino acids (PEP12) and a peptide with five amino acids (PEP2); wherein said GFR-binding compound further comprises a peptide with three amino acids (PEP3) and a peptide with between five and seven amino acids (PEP6); and wherein the RMSD is 2.45 Å or less.

[0260] In one aspect, the present disclosure provides a GFR-binding compound, wherein said GFR-binding compound is a peptide, a variant or analog thereof, or a peptidomimetic as defined herein, with between 20 and 60 (in particular between 20 and 50, and more particularly, between 20 and 45) amino acids, comprising a peptide with four amino acids (PEP1) and a peptide with five amino acids (PEP2); wherein said GFR-binding compound further comprises a peptide with three amino acids (PEP3) and a peptide with between six and eleven amino acids (PEP10); and wherein the RMSD is 2.45 Å or less.

[0261] In one aspect, the present disclosure provides a GFR-binding compound, wherein said GFR-binding compound is a peptide, a variant or analog thereof, or a peptidomimetic as defined herein, with between 20 and 60 (in particular between 20 and 50, and more particularly, between 20 and 45) amino acids, comprising a peptide with eight amino acids (PEP12) and a peptide with five amino acids (PEP2); wherein said GFR-binding compound further comprises a peptide with three amino acids (PEP3) and a peptide with between six and eleven amino acids (PEP10); and wherein the RMSD is 2.45 Å or less.

[0262] In one aspect, the present disclosure provides a GFR-binding compound, wherein said GFR-binding compound is a peptide, a variant or analog thereof, or a peptidomimetic as defined herein, with between 20 and 60 (in particular between 20 and 50, and more particularly, between 20 and 45) amino acids, comprising a peptide with four amino acids (PEP1) and a peptide with five amino acids (PEP2); wherein said GFR-binding compound further comprises a peptide with five amino acids (PEP5) and a peptide with three amino acids (PEP4); and wherein the RMSD is 2.45 Å or less.

[0263] In one aspect, the present disclosure provides a GFR-binding compound, wherein said GFR-binding compound is a peptide, a variant or analog thereof, or a peptidomimetic as defined herein, with between 20 and 60 (in particular between 20 and 50, and more particularly, between 20 and 45) amino acids, comprising a peptide with four amino acids (PEP12) and a peptide with five amino acids (PEP2); wherein said GFR-binding compound further comprises a peptide with five amino acids (PEP5) and a peptide with three amino acids (PEP4); and wherein the RMSD is 2.45 Å or less.

[0264] In one aspect, the present disclosure provides a GFR-binding compound, wherein said GFR-binding compound is a peptide, a variant or analog thereof, or a peptidomimetic as defined herein, with between 20 and 60 (in particular between 20 and 50, and more particularly, between 20 and 45) amino acids, comprising a peptide with four amino acids (PEP1) and a peptide with five amino acids (PEP2); wherein said GFR-binding compound further comprises a peptide with between six and twelve amino acids (PEP9) and a peptide with three amino acids (PEP4); and wherein the RMSD is 2.45 Å or less.

[0265] In one aspect, the present disclosure provides a GFR-binding compound, wherein said GFR-binding compound is a peptide, a variant or analog thereof, or a peptidomimetic as defined herein, with between 20 and 60 (in particular between 20 and 50, and more particularly, between 20 and 45) amino acids, comprising a peptide with four amino acids (PEP12) and a peptide with five amino acids (PEP2); wherein said GFR-binding compound further comprises a peptide with between six and twelve amino acids (PEP9) and a peptide with three amino acids (PEP4); and wherein the RMSD is 2.45 Å or less.

[0266] In one aspect, the present disclosure provides a GFR-binding compound, wherein said GFR-binding compound is a peptide, a variant or analog thereof, or a peptidomimetic as defined herein, with between 20 and 60 (in particular between 20 and 50, and more particularly, between 20 and 45) amino acids, comprising a peptide with four amino acids (PEP1) and a peptide with five amino acids (PEP2); wherein said GFR-binding compound further comprises a peptide with five amino acids (PEP5) and a peptide with between six and eleven amino acids (PEP10); and wherein the RMSD is 2.45 Å or less.

[0267] In one aspect, the present disclosure provides a GFR-binding compound, wherein said GFR-binding compound is a peptide, a variant or analog thereof, or a peptidomimetic as defined herein, with between 20 and 60 (in particular between 20 and 50, and more particularly, between 20 and 45) amino acids, comprising a peptide with four amino acids (PEP12) and a peptide with five amino acids (PEP2); wherein said GFR-binding compound further comprises a peptide with five amino acids (PEP5) and a peptide with between six and eleven amino acids (PEP10); and wherein the RMSD is 2.45 Å or less.

[0268] In one aspect, the present disclosure provides a GFR-binding compound, wherein said GFR-binding compound is a peptide, a variant or analog thereof, or a peptidomimetic as defined herein, with between 20 and 60 (in particular between 20 and 50, and more particularly, between 20 and 45) amino acids, comprising a peptide with four amino acids (PEP1) and a peptide with five amino acids (PEP2); wherein said GFR-binding compound further comprises a peptide with between six and twelve amino acids (PEP9) and a peptide with between five and seven amino acids (PEP6); and wherein the RMSD is 2.45 Å or less.

[0269] In one aspect, the present disclosure provides a GFR-binding compound, wherein said GFR-binding compound is a peptide, a variant or analog thereof, or a peptidomimetic as defined herein, with between 20 and 60 (in particular between 20 and 50, and more particularly, between 20 and 45) amino acids, comprising a peptide with four amino acids (PEP12) and a peptide with five amino acids (PEP2); wherein said GFR-binding compound further comprises a peptide with between six and twelve amino acids (PEP9) and a peptide with between five and seven amino acids (PEP6); and wherein the RMSD is 2.45 Å or less.

[0270] In one aspect, the present disclosure provides a GFR-binding compound, wherein said GFR-binding compound is a peptide, a variant or analog thereof, or a peptidomimetic as defined herein, with between 20 and 60 (in particular between 20 and 50, and more particularly, between 20 and 45) amino acids, comprising a peptide with four amino acids (PEP1) and a peptide with five amino acids (PEP2); wherein said GFR-binding compound further comprises a peptide with three amino acids (PEP3), an amino acid or a peptide with between two and seven amino acids (PEP7), and a peptide with three amino acids (PEP4); and wherein the RMSD is 2.45 Å or less.

[0271] In one aspect, the present disclosure provides a GFR-binding compound, wherein said GFR-binding compound is a peptide, a variant or analog thereof, or a peptidomimetic as defined herein, with between 20 and 60 (in particular between 20 and 50, and more particularly, between 20 and 45) amino acids, comprising a peptide with four amino acids (PEP12) and a peptide with five amino acids (PEP2); wherein said GFR-binding compound further comprises a peptide with three amino acids (PEP3), an amino acid or a peptide with between two and seven amino acids (PEP7), and a peptide with three amino acids (PEP4); and wherein the RMSD is 2.45 Å or less.

[0272] In one aspect, the present disclosure provides a GFR-binding compound, wherein said GFR-binding compound is a peptide, a variant or analog thereof, or a peptidomimetic as defined herein, with between 20 and 60 (in particular between 20 and 50, and more particularly, between 20 and 45) amino acids, comprising a peptide with four amino acids (PEP1) and a peptide with five amino acids (PEP2); wherein said GFR-binding compound further comprises a peptide with three amino acids (PEP3), an amino acid or a peptide with between two and seven amino acids (PEP7), and a peptide with between five and seven amino acids (PEP6); and wherein the RMSD is 2.45 Å or less.

[0273] In one aspect, the present disclosure provides a GFR-binding compound, wherein said GFR-binding compound is a peptide, a variant or analog thereof, or a peptidomimetic as defined herein, with between 20 and 60 (in particular between 20 and 50, and more particularly, between 20 and 45) amino acids, comprising a peptide with four amino acids (PEP12) and a peptide with five amino acids (PEP2); wherein said GFR-binding compound further comprises a peptide with three amino acids (PEP3), an amino acid or a peptide with between two and seven amino acids (PEP7), and a peptide with between five and seven amino acids (PEP6); and wherein the RMSD is 2.45 Å or less.

[0274] In one aspect, the present disclosure provides a GFR-binding compound, wherein said GFR-binding compound is a peptide, a variant or analog thereof, or a peptidomimetic as defined herein, with between 20 and 60 (in particular between 20 and 50, and more particularly, between 20 and 45) amino acids, comprising a peptide with four amino acids (PEP1) and a peptide with five amino acids (PEP2); wherein said GFR-binding compound further comprises a peptide with three amino acids (PEP3), an amino acid or a peptide with between two and seven amino acids (PEP7), and a peptide with between six and eleven amino acids (PEP10); and wherein the RMSD is 2.45 Å or less.

[0275] In one aspect, the present disclosure provides a GFR-binding compound, wherein said GFR-binding compound is a peptide, a variant or analog thereof, or a peptidomimetic as defined herein, with between 20 and 60 (in particular between 20 and 50, and more particularly, between 20 and 45) amino acids, comprising a peptide with four amino acids (PEP12) and a peptide with five amino acids (PEP2); wherein said GFR-binding compound further comprises a peptide with three amino acids (PEP3), an amino acid or a peptide with between two and seven amino acids (PEP7), and a peptide with between six and eleven amino acids (PEP10); and wherein the RMSD is 2.45 Å or less.

[0276] In one aspect, the present disclosure provides a GFR-binding compound, wherein said GFR-binding compound is a peptide, a variant or analog thereof, or a peptidomimetic as defined herein, with between 20 and 60 (in particular between 20 and 50, and more particularly, between 20 and 45) amino acids, comprising a peptide with four amino acids (PEP1) and a peptide with five amino acids (PEP2); wherein said GFR-binding compound further comprises a peptide with three amino acids (PEP3), an amino acid or a peptide with between two and seven amino acids (PEP7), a peptide with three amino acids (PEP4), and an amino acid or a peptide with between two and six amino acids (PEP8); and wherein the RMSD is 2.45 Å or less.

[0277] In one aspect, the present disclosure provides a GFR-binding compound, wherein said GFR-binding compound is a peptide, a variant or analog thereof, or a peptidomimetic as defined herein, with between 20 and 60 (in particular between 20 and 50, and more particularly, between 20 and 45) amino acids, comprising a peptide with four amino acids (PEP12) and a peptide with five amino acids (PEP2); wherein said GFR-binding compound further comprises a peptide with three amino acids (PEP3), an amino acid or a peptide with between two and seven amino acids (PEP7), a peptide with three amino acids (PEP4), and an amino acid or a peptide with between two and six amino acids (PEP8); and wherein the RMSD is 2.45 Å or less.

[0278] In one aspect, the present disclosure provides a GFR-binding compound, wherein said GFR-binding compound is a peptide, a variant or analog thereof, or a peptidomimetic as defined herein, with between 20 and 60 (in particular between 20 and 50, and more particularly, between 20 and 45) amino acids, comprising a peptide with four amino acids (PEP1) and a peptide with five amino acids (PEP2); wherein said GFR-binding compound further comprises a peptide with three amino acids (PEP3), an amino acid or a peptide with between two and seven amino acids (PEP7), a peptide with between five and seven amino acids (PEP6), and an amino acid or a peptide with between two and six amino acids (PEP8); and wherein the RMSD is 2.45 Å or less.

[0279] In one aspect, the present disclosure provides a GFR-binding compound, wherein said GFR-binding compound is a peptide, a variant or analog thereof, or a peptidomimetic as defined herein, with between 20 and 60 (in particular between 20 and 50, and more particularly, between 20 and 45) amino acids, comprising a peptide with four amino acids (PEP12) and a peptide with five amino acids (PEP2); wherein said GFR-binding compound further comprises a peptide with three amino acids (PEP3), an amino acid or a peptide with between two and seven amino acids (PEP7), a peptide with between five and seven amino acids (PEP6), and an amino acid or a peptide with between two and six amino acids (PEP8); and wherein the RMSD is 2.45 Å or less.

[0280] In one aspect, the present disclosure provides a GFR-binding compound, wherein said GFR-binding compound is a peptide, a variant or analog thereof, or a peptidomimetic as defined herein, with between 20 and 60 (in particular between 20 and 50, and more particularly, between 20 and 45) amino acids, comprising a peptide with four amino acids (PEP1) and a peptide with five amino acids (PEP2); wherein said GFR-binding compound further comprises a peptide with five amino acids (PEP5), an amino acid or a peptide with between two and seven amino acids (PEP7), and a peptide with three amino acids (PEP4); and wherein the RMSD is 2.45 Å or less.

[0281] In one aspect, the present disclosure provides a GFR-binding compound, wherein said GFR-binding compound is a peptide, a variant or analog thereof, or a peptidomimetic as defined herein, with between 20 and 60 (in particular between 20 and 50, and more particularly, between 20 and 45) amino acids, comprising a peptide with four amino acids (PEP12) and a peptide with five amino acids (PEP2); wherein said GFR-binding compound further comprises a peptide with five amino acids (PEP5), an amino acid or a peptide with between two and seven amino acids (PEP7), and a peptide with three amino acids (PEP4); and wherein the RMSD is 2.45 Å or less.

[0282] In one aspect, the present disclosure provides a GFR-binding compound, wherein said GFR-binding compound is a peptide, a variant or analog thereof, or a peptidomimetic as defined herein, with between 20 and 60 (in particular between 20 and 50, and more particularly, between 20 and 45) amino acids, comprising a peptide with four amino acids (PEP1) and a peptide with five amino acids (PEP2); wherein said GFR-binding compound further comprises a peptide with five amino acids (PEP5), an amino acid or a peptide with between two and seven amino acids (PEP7), and a peptide with between five and seven amino acids (PEP6); and wherein the RMSD is 2.45 Å or less.

[0283] In one aspect, the present disclosure provides a GFR-binding compound, wherein said GFR-binding compound is a peptide, a variant or analog thereof, or a peptidomimetic as defined herein, with between 20 and 60 (in particular between 20 and 50, and more particularly, between 20 and 45) amino acids, comprising a peptide with four amino acids (PEP12) and a peptide with five amino acids (PEP2); wherein said GFR-binding compound further comprises a peptide with five amino acids (PEP5), an amino acid or a peptide with between two and seven amino acids (PEP7), and a peptide with between five and seven amino acids (PEP6); and wherein the RMSD is 2.45 Å or less.

[0284] In one aspect, the present disclosure provides a GFR-binding compound, wherein said GFR-binding compound is a peptide, a variant or analog thereof, or a peptidomimetic as defined herein, with between 20 and 60 (in particular between 20 and 50, and more particularly, between 20 and 45) amino acids, comprising a peptide with four amino acids (PEP1) and a peptide with five amino acids (PEP2); wherein said GFR-binding compound further comprises a peptide with five amino acids (PEP5), an amino acid or a peptide with between two and seven amino acids (PEP7), and a peptide with between six and eleven amino acids (PEP10); and wherein the RMSD is 2.45 Å or less.

[0285] In one aspect, the present disclosure provides a GFR-binding compound, wherein said GFR-binding compound is a peptide, a variant or analog thereof, or a peptidomimetic as defined herein, with between 20 and 60 (in particular between 20 and 50, and more particularly, between 20 and 45) amino acids, comprising a peptide with four amino acids (PEP12) and a peptide with five amino acids (PEP2); wherein said GFR-binding compound further comprises a peptide with five amino acids (PEP5), an amino acid or a peptide with between two and seven amino acids (PEP7), and a peptide with between six and eleven amino acids (PEP10); and wherein the RMSD is 2.45 Å or less.

[0286] In one aspect, the present disclosure provides a GFR-binding compound, wherein said GFR-binding compound is a peptide, a variant or analog thereof, or a peptidomimetic as defined herein, with between 20 and 60 (in particular between 20 and 50, and more particularly, between 20 and 45) amino acids, comprising a peptide with four amino acids (PEP1) and a peptide with five amino acids (PEP2); wherein said GFR-binding compound further comprises a peptide with five amino acids (PEP5), an amino acid or a peptide with between two and seven amino acids (PEP7), a peptide with three amino acids (PEP4), and an amino acid or a peptide with between two and six amino acids (PEP8); and wherein the RMSD is 2.45 Å or less.

[0287] In one aspect, the present disclosure provides a GFR-binding compound, wherein said GFR-binding compound is a peptide, a variant or analog thereof, or a peptidomimetic as defined herein, with between 20 and 60 (in particular between 20 and 50, and more particularly, between 20 and 45) amino acids, comprising a peptide with four amino acids (PEP12) and a peptide with five amino acids (PEP2); wherein said GFR-binding compound further comprises a peptide with five amino acids (PEP5), an amino acid or a peptide with between two and seven amino acids (PEP7), a peptide with three amino acids (PEP4), and an amino acid or a peptide with between two and six amino acids (PEP8); and wherein the RMSD is 2.45 Å or less.

[0288] In one aspect, the present disclosure provides a GFR-binding compound, wherein said GFR-binding compound is a peptide, a variant or analog thereof, or a peptidomimetic as defined herein, with between 20 and 60 (in particular between 20 and 50, and more particularly, between 20 and 45) amino acids, comprising a peptide with four amino acids (PEP1) and a peptide with five amino acids (PEP2); wherein said GFR-binding compound further comprises a peptide with five amino acids (PEP5), an amino acid or a peptide with between two and seven amino acids (PEP7), a peptide with between five and seven amino acids (PEP6), and an amino acid or a peptide with between two and six amino acids (PEP8); and wherein the RMSD is 2.45 Å or less.

[0289] In one aspect, the present disclosure provides a GFR-binding compound, wherein said GFR-binding compound is a peptide, a variant or analog thereof, or a peptidomimetic as defined herein, with between 20 and 60 (in particular between 20 and 50, and more particularly, between 20 and 45) amino acids, comprising a peptide with four amino acids (PEP12) and a peptide with five amino acids (PEP2); wherein said GFR-binding compound further comprises a peptide with five amino acids (PEP5), an amino acid or a peptide with between two and seven amino acids (PEP7), a peptide with between five and seven amino acids (PEP6), and an amino acid or a peptide with between two and six amino acids (PEP8); and wherein the RMSD is 2.45 Å or less.

[0290] In one aspect, the present disclosure provides a GFR-binding compound, wherein said GFR-binding compound is a peptide, a variant or analog thereof, or a peptidomimetic as defined herein, with between 20 and 60 (in particular between 20 and 50, and more particularly, between 20 and 45) amino acids, comprising a peptide with four amino acids (PEP1) and a peptide with five amino acids (PEP2); wherein said GFR-binding compound further comprises a peptide with between six and twelve amino acids (PEP9), a peptide with three amino acids (PEP4), and an amino acid or a peptide with between two and six amino acids (PEP8); and wherein the RMSD is 2.45 Å or less.

[0291] In one aspect, the present disclosure provides a GFR-binding compound, wherein said GFR-binding compound is a peptide, a variant or analog thereof, or a peptidomimetic as defined herein, with between 20 and 60 (in particular between 20 and 50, and more particularly, between 20 and 45) amino acids, comprising a peptide with four amino acids (PEP12) and a peptide with five amino acids (PEP2); wherein said GFR-binding compound further comprises a peptide with between six and twelve amino acids (PEP9), a peptide with three amino acids (PEP4), and an amino acid or a peptide with between two and six amino acids (PEP8); and wherein the RMSD is 2.45 Å or less.

[0292] In one aspect, the present disclosure provides a GFR-binding compound, wherein said GFR-binding compound is a peptide, a variant or analog thereof, or a peptidomimetic as defined herein, with between 20 and 60 (in particular between 20 and 50, and more particularly, between 20 and 45) amino acids, comprising a peptide with four amino acids (PEP1) and a peptide with five amino acids (PEP2); wherein said GFR-binding compound further comprises a peptide with between six and twelve amino acids (PEP9), a peptide with between five and seven amino acids (PEP6), and an amino acid or a peptide with between two and six amino acids (PEP8); and wherein the RMSD is 2.45 Å or less.

[0293] In one aspect, the present disclosure provides a GFR-binding compound, wherein said GFR-binding compound is a peptide, a variant or analog thereof, or a peptidomimetic as defined herein, with between 20 and 60 (in particular between 20 and 50, and more particularly, between 20 and 45) amino acids, comprising a peptide with four amino acids (PEP12) and a peptide with five amino acids (PEP2); wherein said GFR-binding compound further comprises a peptide with between six and twelve amino acids (PEP9), a peptide with between five and seven amino acids (PEP6), and an amino acid or a peptide with between two and six amino acids (PEP8); and wherein the RMSD is 2.45 Å or less.

[0294] In one aspect, the present disclosure provides a GFR-binding compound, wherein said GFR-binding compound is a peptide, a variant or analog thereof, or a peptidomimetic as defined herein, with between 20 and 60 (in particular between 20 and 50, and more particularly, between 20 and 45) amino acids, having the following general formula (I) (hereinafter may also be referred to as compound (I) or peptide (I)):

PEP(A)-LINKER-PEP(B) (I)

wherein one end of LINKER interacts covalently with one end of PEP(A); wherein another end of LINKER interacts covalently with one end of PEP(B); wherein PEP(A) comprises PEP1; wherein PEP(B) comprises PEP2; wherein LINKER is a linear or branched organic divalent radical, moiety or compound having a molecular weight (Mw) comprised between about 28 and about 2,000 Da, in particular, between about 300 and about 1000 Da; and wherein the RMSD is 2.45 Å or less.

[0295] In the present description, the molecular weight of LINKER refer to the calculated molecular weight prior to being connected to/reacted with any of the elements it is configured to connect to or react with e.g. PEP(A), PEP(B) or any other groups defined herein.

[0296] In one aspect, the present disclosure provides a GFR-binding compound, wherein said GFR-binding compound is a peptide, a variant or analog thereof, or a peptidomimetic as defined herein, with between 20 and 60 (in particular between 20 and 50, and more particularly, between 20 and 45) amino acids, having the following general formula (I) (hereinafter may also be referred to as compound (I) or peptide (I)):

PEP(A)-LINKER-PEP(B) (I)

wherein one end of LINKER interacts covalently with one end of PEP(A); wherein another end of LINKER interacts covalently with one end of PEP(B); wherein PEP(A) comprises PEP12; wherein PEP(B) comprises PEP2; wherein LINKER is a linear or branched organic divalent radical, moiety or compound having a molecular weight (Mw) comprised between about 28 and about 2,000 Da, in particular, between about 300 and about 1000 Da; and wherein the RMSD is 2.45 Å or less.

[0297] In one aspect, the present disclosure provides a GFR-binding compound of general formula (I), wherein PEP(A) comprises PEP1; wherein PEP(B) comprises PEP2; wherein PEP(A) further comprises PEP3; wherein PEP(B) further comprises PEP4; and wherein the RMSD is 2.45 Å or less.

[0298] In one aspect, the present disclosure provides a GFR-binding compound of general formula (I), wherein PEP(A) comprises PEP12; wherein PEP(B) comprises PEP2; wherein PEP(A) further comprises PEP3; wherein PEP(B) further comprises PEP4; and wherein the RMSD is 2.45 Å or less.

[0299] In one aspect, the present disclosure provides a GFR-binding compound of general formula (I), wherein PEP(A) comprises PEP1; wherein PEP(B) comprises PEP2; wherein PEP(A) further comprises PEP5; wherein PEP(B) further comprises PEP6; and wherein the RMSD is 2.45 Å or less.

[0300] In one aspect, the present disclosure provides a GFR-binding compound of general formula (I), wherein PEP(A) comprises PEP12; wherein PEP(B) comprises PEP2; wherein PEP(A) further comprises PEP5; wherein PEP(B) further comprises PEP6; and wherein the RMSD is 2.45 Å or less.

[0301] In one aspect, the present disclosure provides a GFR-binding compound of general formula (I), wherein PEP(A) comprises PEP1; wherein PEP(B) comprises PEP2; wherein PEP(A) further comprises PEP9; wherein PEP(B) further comprises PEP10; and wherein the RMSD is 2.45 Å or less.

[0302] In one aspect, the present disclosure provides a GFR-binding compound of general formula (I), wherein PEP(A) comprises PEP12; wherein PEP(B) comprises PEP2; wherein PEP(A) further comprises PEP9; wherein PEP(B) further comprises PEP10; and wherein the RMSD is 2.45 Å or less.

[0303] In one aspect, the present disclosure provides a GFR-binding compound of general formula (I), wherein PEP(A) comprises PEP1; wherein PEP(B) comprises PEP2; wherein PEP(A) further comprises PEP3; wherein PEP(B) further comprises PEP6; and wherein the RMSD is 2.45 Å or less.

[0304] In one aspect, the present disclosure provides a GFR-binding compound of general formula (I), wherein PEP(A) comprises PEP12; wherein PEP(B) comprises PEP2; wherein PEP(A) further comprises PEP3; wherein PEP(B) further comprises PEP6; and wherein the RMSD is 2.45 Å or less.

[0305] In one aspect, the present disclosure provides a GFR-binding compound of general formula (I), wherein PEP(A) comprises PEP1; wherein PEP(B) comprises PEP2; wherein PEP(A) further comprises PEP3; wherein PEP(B) further comprises PEP10; and wherein the RMSD is 2.45 Å or less.

[0306] In one aspect, the present disclosure provides a GFR-binding compound of general formula (I), wherein PEP(A) comprises PEP12; wherein PEP(B) comprises PEP2; wherein PEP(A) further comprises PEP3; wherein PEP(B) further comprises PEP10; and wherein the RMSD is 2.45 Å or less.

[0307] In one aspect, the present disclosure provides a GFR-binding compound of general formula (I), wherein PEP(A) comprises PEP1; wherein PEP(B) comprises PEP2; wherein PEP(A) further comprises PEP5; wherein PEP(B) further comprises PEP4; and wherein the RMSD is 2.45 Å or less.

[0308] In one aspect, the present disclosure provides a GFR-binding compound of general formula (I), wherein PEP(A) comprises PEP12; wherein PEP(B) comprises PEP2; wherein PEP(A) further comprises PEP5; wherein PEP(B) further comprises PEP4; and wherein the RMSD is 2.45 Å or less. In one aspect, the present disclosure provides a GFR-binding compound of general formula (I), wherein PEP(A) comprises PEP1; wherein PEP(B) comprises PEP2; wherein PEP(A) further comprises PEP9; wherein PEP(B) further comprises PEP4; and wherein the RMSD is 2.45 Å or less.

[0309] In one aspect, the present disclosure provides a GFR-binding compound of general formula (I), wherein PEP(A) comprises PEP12; wherein PEP(B) comprises PEP2; wherein PEP(A) further comprises PEP9; wherein PEP(B) further comprises PEP4; and wherein the RMSD is 2.45 Å or less.

[0310] In one aspect, the present disclosure provides a GFR-binding compound of general formula (I), wherein PEP(A) comprises PEP1; wherein PEP(B) comprises PEP2; wherein PEP(A) further comprises PEP5; wherein PEP(B) further comprises PEP10; and wherein the RMSD is 2.45 Å or less.

[0311] In one aspect, the present disclosure provides a GFR-binding compound of general formula (I), wherein PEP(A) comprises PEP12; wherein PEP(B) comprises PEP2; wherein PEP(A) further comprises PEP5; wherein PEP(B) further comprises PEP10; and wherein the RMSD is 2.45 Å or less.

[0312] In one aspect, the present disclosure provides a GFR-binding compound of general formula (I), wherein PEP(A) comprises PEP1; wherein PEP(B) comprises PEP2; wherein PEP(A) further comprises PEP9; wherein PEP(B) further comprises PEP6; and wherein the RMSD is 2.45 Å or less.

[0313] In one aspect, the present disclosure provides a GFR-binding compound of general formula (I), wherein PEP(A) comprises PEP12; wherein PEP(B) comprises PEP2; wherein PEP(A) further comprises PEP9; wherein PEP(B) further comprises PEP6; and wherein the RMSD is 2.45 Å or less.

[0314] In one aspect, the present disclosure provides a GFR-binding compound of general formula (I), wherein PEP(A) comprises PEP1; wherein PEP(B) comprises PEP2; wherein PEP(A) further comprises PEP3 and PEP7; wherein PEP(B) further comprises PEP4; and wherein the RMSD is 2.45 Å or less.

[0315] In one aspect, the present disclosure provides a GFR-binding compound of general formula (I), wherein PEP(A) comprises PEP12; wherein PEP(B) comprises PEP2; wherein PEP(A) further comprises PEP3 and PEP7; wherein PEP(B) further comprises PEP4; and wherein the RMSD is 2.45 Å or less.

[0316] In one aspect, the present disclosure provides a GFR-binding compound of general formula (I), wherein PEP(A) comprises PEP1; wherein PEP(B) comprises PEP2; wherein PEP(A) further comprises PEP3 and PEP7; wherein PEP(B) further comprises PEP6; and wherein the RMSD is 2.45 Å or less.

[0317] In one aspect, the present disclosure provides a GFR-binding compound of general formula (I), wherein PEP(A) comprises PEP12; wherein PEP(B) comprises PEP2; wherein PEP(A) further comprises PEP3 and PEP7; wherein PEP(B) further comprises PEP6; and wherein the RMSD is 2.45 Å or less.

[0318] In one aspect, the present disclosure provides a GFR-binding compound of general formula (I), wherein PEP(A) comprises PEP1; wherein PEP(B) comprises PEP2; wherein PEP(A) further comprises PEP3 and PEP7; wherein PEP(B) further comprises PEP10; and wherein the RMSD is 2.45 Å or less.

[0319] In one aspect, the present disclosure provides a GFR-binding compound of general formula (I), wherein PEP(A) comprises PEP12; wherein PEP(B) comprises PEP2; wherein PEP(A) further comprises PEP3 and PEP7; wherein PEP(B) further comprises PEP10; and wherein the RMSD is 2.45 Å or less.

[0320] In one aspect, the present disclosure provides a GFR-binding compound of general formula (I), wherein PEP(A) comprises PEP1; wherein PEP(B) comprises PEP2; wherein PEP(A) further comprises PEP7; wherein PEP(B) further comprises PEP4 and PEP8; and wherein the RMSD is 2.45 Å or less.

[0321] In one aspect, the present disclosure provides a GFR-binding compound of general formula (I), wherein PEP(A) comprises PEP12; wherein PEP(B) comprises PEP2; wherein PEP(A) further comprises PEP7; wherein PEP(B) further comprises PEP4 and PEP8; and wherein the RMSD is 2.45 Å or less.

[0322] In one aspect, the present disclosure provides a GFR-binding compound of general formula (I), wherein PEP(A) comprises PEP1; wherein PEP(B) comprises PEP2; wherein PEP(A) further comprises PEP7; wherein PEP(B) further comprises PEP6 and PEP8; and wherein the RMSD is 2.45 Å or less.

[0323] In one aspect, the present disclosure provides a GFR-binding compound of general formula (I), wherein PEP(A) comprises PEP12; wherein PEP(B) comprises PEP2; wherein PEP(A) further comprises PEP7; wherein PEP(B) further comprises PEP6 and PEP8; and wherein the RMSD is 2.45 Å or less.

[0324] In one aspect, the present disclosure provides a GFR-binding compound of general formula (I), wherein PEP(A) comprises PEP1; wherein PEP(B) comprises PEP2; wherein PEP(A) further comprises PEP5 and PEP7; wherein PEP(B) further comprises PEP4; and wherein the RMSD is 2.45 Å or less.

[0325] In one aspect, the present disclosure provides a GFR-binding compound of general formula (I), wherein PEP(A) comprises PEP12; wherein PEP(B) comprises PEP2; wherein PEP(A) further comprises PEP5 and PEP7; wherein PEP(B) further comprises PEP4; and wherein the RMSD is 2.45 Å or less.

[0326] In one aspect, the present disclosure provides a GFR-binding compound of general formula (I), wherein PEP(A) comprises PEP1; wherein PEP(B) comprises PEP2; wherein PEP(A) further comprises PEP5 and PEP7; wherein PEP(B) further comprises PEP6; and wherein the RMSD is 2.45 Å or less.

[0327] In one aspect, the present disclosure provides a GFR-binding compound of general formula (I), wherein PEP(A) comprises PEP12; wherein PEP(B) comprises PEP2; wherein PEP(A) further comprises PEP5 and PEP7; wherein PEP(B) further comprises PEP6; and wherein the RMSD is 2.45 Å or less.

[0328] In one aspect, the present disclosure provides a GFR-binding compound of general formula (I), wherein PEP(A) comprises PEP1; wherein PEP(B) comprises PEP2; wherein PEP(A) further comprises PEP5 and PEP7; wherein PEP(B) further comprises PEP10; and wherein the RMSD is 2.45 Å or less.

[0329] In one aspect, the present disclosure provides a GFR-binding compound of general formula (I), wherein PEP(A) comprises PEP12; wherein PEP(B) comprises PEP2; wherein PEP(A) further comprises PEP5 and PEP7; wherein PEP(B) further comprises PEP10; and wherein the RMSD is 2.45 Å or less.

[0330] In one aspect, the present disclosure provides a GFR-binding compound of general formula (I), wherein PEP(A) comprises PEP1; wherein PEP(B) comprises PEP2; wherein PEP(A) further comprises PEP5 and PEP7; wherein PEP(B) further comprises PEP4 and PEP8; and wherein the RMSD is 2.45 Å or less.

[0331] In one aspect, the present disclosure provides a GFR-binding compound of general formula (I), wherein PEP(A) comprises PEP12; wherein PEP(B) comprises PEP2; wherein PEP(A) further comprises PEP5 and PEP7; wherein PEP(B) further comprises PEP4 and PEP8; and wherein the RMSD is 2.45 Å or less.

[0332] In one aspect, the present disclosure provides a GFR-binding compound of general formula (I), wherein PEP(A) comprises PEP1; wherein PEP(B) comprises PEP2; wherein PEP(A) further comprises PEP5 and PEP7; wherein PEP(B) further comprises PEP6 and PEP8; and wherein the RMSD is 2.45 Å or less.

[0333] In one aspect, the present disclosure provides a GFR-binding compound of general formula (I), wherein PEP(A) comprises PEP12; wherein PEP(B) comprises PEP2; wherein PEP(A) further comprises PEP5 and PEP7; wherein PEP(B) further comprises PEP6 and PEP8; and wherein the RMSD is 2.45 Å or less.

[0334] In one aspect, the present disclosure provides a GFR-binding compound of general formula (I), wherein PEP(A) comprises PEP1; wherein PEP(B) comprises PEP2; wherein PEP(A) further comprises PEP9; wherein PEP(B) further comprises PEP4 and PEP8; and wherein the RMSD is 2.45 Å or less.

[0335] In one aspect, the present disclosure provides a GFR-binding compound of general formula (I), wherein PEP(A) comprises PEP12; wherein PEP(B) comprises PEP2; wherein PEP(A) further comprises PEP9; wherein PEP(B) further comprises PEP4 and PEP8; and wherein the RMSD is 2.45 Å or less.

[0336] In one aspect, the present disclosure provides a GFR-binding compound of general formula (I), wherein PEP(A) comprises PEP1; wherein PEP(B) comprises PEP2; wherein PEP(A) further comprises PEP9; wherein PEP(B) further comprises PEP6 and PEP8; and wherein the RMSD is 2.45 Å or less.

[0337] In one aspect, the present disclosure provides a GFR-binding compound of general formula (I), wherein PEP(A) comprises PEP12; wherein PEP(B) comprises PEP2; wherein PEP(A) further comprises PEP9; wherein PEP(B) further comprises PEP6 and PEP8; and wherein the RMSD is 2.45 Å or less.

[0338] In one aspect, the present disclosure provides a GFR-binding compound, wherein said GFR-binding compound is a peptide, a variant or analog thereof, or a peptidomimetic as defined herein, with between 20 and 60 (in particular between 20 and 50, and more particularly, between 20 and 45) amino acids, having the following general formula (II) (hereinafter may also be referred to as compound (II) or peptide (II)):

PEP(C)-PEP12-LINKER-PEP2-PEP(D) (II)

wherein LINKER is a linear or branched organic divalent radical, moiety or compound having a molecular weight (Mw) comprised between about 28 and about 2,000 Da, in particular, between about 300 and about 1000 Da; wherein PEP12 is a peptide with 8 amino acids of formula PEP1-AA¹⁷-PEP11 as defined herein; wherein PEP2 is a peptide with five amino acids as already defined herein; wherein one end of PEP(C) interacts covalently with PEP12 via one end of PEP1; wherein one end of PEP(D) interacts covalently with one end of PEP2; wherein one end of LINKER interacts covalently with one end of PEP12 via one end of PEP11; wherein another end of LINKER interacts covalently with another end of PEP2; wherein PEP(C) is a peptide with at least 5 amino acids, in particular a peptide with between 5 and 12 amino acids; wherein PEP(D) is a peptide with at least 5 amino acids, in particular a peptide with between 5 and 11 amino acids; and wherein the RMSD is 2.45 Å or less.

[0339] In one aspect, the present disclosure provides a GFR-binding compound of general formula (II), wherein PEP(C) comprises PEP3; wherein PEP(D) comprises PEP4; and wherein the RMSD is 2.45 Å or less.

[0340] In one aspect, the present disclosure provides a GFR-binding compound of general formula (II), wherein PEP(C) comprises PEP5; wherein PEP(D) comprises PEP6; and wherein the RMSD is 2.45 Å or less. In one particular example, PEP(C) is PEP5; and PEP(D) is PEP6.

[0341] In one aspect, the present disclosure provides a GFR-binding compound of general formula (II), wherein PEP(C) comprises PEP9; wherein PEP(D) comprises PEP10; and wherein the RMSD is 2.45 Å or less. In one particular example, PEP(C) is PEP9; and PEP(D) is PEP10.

[0342] In one aspect, the present disclosure provides a GFR-binding compound of general formula (II), wherein PEP(C) comprises PEP3; wherein PEP(D) comprises PEP6; and wherein the RMSD is 2.45 Å or less. In one particular example, PEP(C) comprises PEP3 and PEP(D) is PEP6.

[0343] In one aspect, the present disclosure provides a GFR-binding compound of general formula (II), wherein PEP(C) comprises PEP3; wherein PEP(D) comprises PEP10; and wherein the RMSD is 2.45 Å or less. In one particular example, PEP(C) comprises PEP3 and PEP(D) is PEP10.

[0344] In one aspect, the present disclosure provides a GFR-binding compound of general formula (II), wherein PEP(C) comprises PEP5; wherein PEP(D) comprises PEP4; and wherein the RMSD is 2.45 Å or less. In one particular example, PEP(C) is PEP5 and PEP(D) comprises PEP4.

[0345] In one aspect, the present disclosure provides a GFR-binding compound of general formula (II), wherein PEP(C) comprises PEP9; wherein PEP(D) comprises PEP4; and wherein the RMSD is 2.45 Å or less. In one particular example, PEP(C) is PEP9 and PEP(D) comprises PEP4.

[0346] In one aspect, the present disclosure provides a GFR-binding compound of general formula (II), wherein PEP(C) comprises PEP5; wherein PEP(D) comprises PEP10; and wherein the RMSD is 2.45 Å or less. In one particular example, PEP(C) is PEP5 and PEP(D) is PEP10.

[0347] In one aspect, the present disclosure provides a GFR-binding compound of general formula (II), wherein PEP(C) comprises PEP9; wherein PEP(D) comprises PEP6; and wherein the RMSD is 2.45 Å or less. In one particular example, PEP(C) is PEP9 and PEP(D) is PEP6.

[0348] In one aspect, the present disclosure provides a GFR-binding compound of general formula (II), wherein PEP(C) comprises PEP3 and PEP7; wherein PEP(D) comprises PEP4; and wherein the RMSD is 2.45 Å or less.

[0349] In one aspect, the present disclosure provides a GFR-binding compound of general formula (II), wherein PEP(C) comprises PEP3 and PEP7; wherein PEP(D) comprises PEP6; and wherein the RMSD is 2.45 Å or less. In one particular example, PEP(C) comprises PEP3 and PEP7, and PEP(D) is PEP6.

[0350] In one aspect, the present disclosure provides a GFR-binding compound of general formula (II), wherein PEP(C) comprises PEP3 and PEP7; wherein PEP(D) comprises PEP10; and wherein the RMSD is 2.45 Å or less. In one particular example, PEP(C) comprises PEP3 and PEP7, and PEP(D) is PEP10.

[0351] In one aspect, the present disclosure provides a GFR-binding compound of general formula (II), wherein PEP(C) comprises PEP7; wherein PEP(D) comprises PEP4 and PEP8; and wherein the RMSD is 2.45 Å or less.

[0352] In one aspect, the present disclosure provides a GFR-binding compound of general formula (II), wherein PEP(C) comprises PEP7; wherein PEP(D) comprises PEP6 and PEP8; and wherein the RMSD is 2.45 Å or less.

[0353] In one aspect, the present disclosure provides a GFR-binding compound of general formula (II), wherein PEP(C) comprises PEP5 and PEP7; wherein PEP(D) comprises PEP4; and wherein the RMSD is 2.45 Å or less.

[0354] In one aspect, the present disclosure provides a GFR-binding compound of general formula (II), wherein PEP(C) comprises PEP5 and PEP7; wherein PEP(D) comprises PEP6; and wherein the RMSD is 2.45 Å or less.

[0355] In one aspect, the present disclosure provides a GFR-binding compound of general formula (II), wherein PEP(C) comprises PEP5 and PEP7; wherein PEP(D) comprises PEP10; and wherein the RMSD is 2.45 Å or less.

[0356] In one aspect, the present disclosure provides a GFR-binding compound of general formula (II), wherein PEP(C) comprises PEP5 and PEP7; wherein PEP(D) comprises PEP4 and PEP8; and wherein the RMSD is 2.45 Å or less.

[0357] In one aspect, the present disclosure provides a GFR-binding compound of general formula (II), wherein PEP(C) comprises PEP5 and PEP7; wherein PEP(D) comprises PEP6 and PEP8; and wherein the RMSD is 2.45 Å or less.

[0358] In one aspect, the present disclosure provides a GFR-binding compound of general formula (II), wherein PEP(C) comprises PEP9; wherein PEP(D) comprises PEP4 and PEP8; and wherein the RMSD is 2.45 Å or less.

[0359] In one aspect, the present disclosure provides a GFR-binding compound of general formula (II), wherein PEP(C) comprises PEP9; wherein PEP(D) comprises PEP6 and PEP8; and wherein the RMSD is 2.45 Å or less.

[0360] In one aspect, the present disclosure provides a GFR-binding compound of general formula (II), wherein PEP(C) is PEP5 or PEP9 and wherein PEP(D) is PEP6 or PEP10; and wherein the RMSD is 2.45 Å or less.

[0361] In one aspect, the present disclosure provides a GFR-binding compound, wherein said GFR-binding compound is a peptide, a variant or analog thereof, or a peptidomimetic as defined herein, with between 20 and 60 (in particular between 20 and 50, and more particularly, between 20 and 45) amino acids, having the following general formula (III) (hereinafter may also be referred to as compound (III) or peptide (III)):

PEP7-PEP5-PEP12-LINKER-PEP2-PEP6-PEP8 (III)

wherein LINKER is a linear or branched organic divalent radical, moiety or compound having a molecular weight (Mw) comprised between about 28 and about 2,000 Da, in particular, between about 300 and about 1000 Da; wherein PEP12 is a peptide with 8 amino acids of formula PEP1-AA¹⁷-PEP11 as defined herein; wherein PEP2 is a peptide with five amino acids as already defined herein; wherein PEP5 is a peptide with five amino acids as already defined herein; wherein PEP6 is a peptide with between five and seven amino acids as already defined herein; wherein PEP7 an amino acid or a peptide with between two and seven amino acids as already defined herein; wherein PEP8 an amino acid or a peptide with between two and six amino acids as already defined herein; wherein one end of LINKER interacts covalently with one end of PEP12 via AA²⁰; wherein another end of LINKER interacts covalently with one end of PEP2 via AA²¹; wherein one end of PEP5 interacts covalently with another end of PEP12 via AA¹²; wherein another end of PEP5 interacts covalently with one end of PEP7 via AA⁸; wherein one end of PEP6 interacts covalently with another end of PEP2 via AA²⁶; wherein another end of PEP6 interacts covalently with one end of PEP8 via AA³²; and wherein the RMSD is 2.45 Å or less.

[0362] In one aspect, the present disclosure provides a GFR-binding compound, wherein said GFR-binding compound is a peptide, a variant or analog thereof, or a peptidomimetic as defined herein, with between 20 and 60 (in particular between 20 and 50, and more particularly, between 20 and 45) amino acids, having the following general formula (IV) (hereinafter may also be referred to as compound (IV) or peptide (IV)):

AA¹-AA²-AA³-AA⁴-AA⁵-AA⁶-AA⁷-AA⁸-AA⁹-AA¹⁰-AA¹¹-AA¹²-AA¹³-AA¹⁴-AA¹⁵-AA¹⁶-AA¹⁷-AA¹⁸-AA¹⁹-AA²⁰-LINKER-AA²¹-AA²²-AA²³-AA²⁴-AA²⁵-AA²⁶-AA²⁷-AA²⁸-AA²⁹-AA³⁰-AA³¹-AA³²-AA³³-AA³⁴-AA³⁵-AA³⁶-AA³⁷-AA³⁸ (IV)

wherein LINKER is a linear or branched organic divalent radical, moiety or compound having a molecular weight (Mw) comprised between about 28 and about 2,000 Da, in particular, between about 300 and about 1000 Da; wherein AA¹-AA²-AA³-AA⁴-AA⁵-AA⁶-AA⁷ is PEP7 as defined herein; wherein AA¹³-AA¹⁴-AA¹⁵-AA¹⁶-AA¹⁷-AA¹⁸-AA¹⁹-AA²⁰ is PEP12 as defined herein; wherein AA²¹-AA²²-AA²³-AA²⁴-AA²⁵ is PEP2 as already defined herein; wherein AA⁸-AA⁹-AA¹⁰ is PEP3 as defined herein; wherein AA³⁰-AA³¹-AA³² is PEP4 as defined herein; wherein AA³³-AA³⁴-AA³⁵-AA³⁶-AA³⁷-AA³⁸ is PEP8 as defined herein; wherein AA¹¹, AA¹², AA²⁶, AA²⁷, AA²⁸, and AA²⁹ are as defined herein; wherein one end of LINKER interacts covalently with AA²⁰; wherein another end of LINKER interacts covalently with AA²¹; wherein AA¹ and AA²¹ may be both N-terminal amino acids or both C-terminal amino acids; wherein AA³⁸ and AA²⁰ may be both N-terminal amino acids or both C-terminal amino acids; and wherein the RMSD is 2.45 Å or less.

[0363] In certain embodiments, PEP1 is selected from the group consisting of SAIS, SSLS, NAIS, SATS, SPIS, EPIS, SPIN, KPLS, EPLP, EPLT, SNIT, RSVK and RPVQ.

[0364] In certain embodiments, PEP2 is selected from the group consisting of LKNYQ, LKVYP, LKKYR, LRKHR, LKYHY, KFKYE, YGKIP, YKQYE, DHHKD, EQLSN, IGEMS, LGEMS, KEVQV and KKATV.

[0365] In certain embodiments, the pair PEP1:PEP2 is selected from the group consisting of SAIS:LKNYQ, SSLS:LKVYP, NAIS:LKKYR, SATS:LRKHR, SPIS:LKYHY, EPIS:KFKYE, SPIN:YGKIP, SPIS:YKQYE, KPLS:DHHKD, EPLP:EQLSN, EPLT:EQLSN, SNIT:IGEMS, SNIT:LGEMS, RSVK:KEVQV and RPVQ:KKATV.

[0366] In certain embodiments, PEP3 is selected from the group consisting of VPT, VPE, APT, TPT, VPA, APV, VPQ, VSQ, SRV and TQV.

[0367] In certain embodiments, PEP4 is selected from the group consisting of VVE, TVE, VVR, VVK, VAE, AVS, VVD, VEE, VRS, VKS, QHN, EHS, EEH and EDH.

[0368] In certain embodiments, PEP5 is a peptide of general formula PEP3-AA¹¹-AA¹²; wherein PEP3 is selected from the group consisting of VPT, VPE, APT, TPT, VPA, APV, VPQ, VSQ, SRV and TQV; wherein AA¹¹ is selected from the group consisting of E, K, Q, R, A, D, G and H; and wherein AA¹² is selected from the group consisting of L, M, T, E, Q and H. In one particular example, PEP5 is selected from the group consisting of VPTEL, VPEKM, APTKL, APTQL, VPTKL, TPTKM, VPARL, VPTRL, APVKT, VPQAL, VSQDL, VPQDL, VPTEE, VPTGQ, SRVHH and TQVQL.

[0369] In certain embodiments, PEP6 is a peptide of general formula AA²⁶-AA²⁷-AA²⁸-AA²⁹-PEP4; wherein PEP4 is selected from the group consisting of VVE, TVE, VVR, VVK, VAE, AVS, VVD, VEE, VRS, VKS, QHN, EHS, EEH and EDH; wherein AA²⁶ is absent or selected from the group consisting of AA^{III} amino acids, preferably is absent or is E; wherein AA²⁷ and AA²⁸ are independently selected from the group consisting of AA^{III} and AA^{V} amino acids; and wherein AA²⁹ is absent or selected from the group consisting of AA^{II} amino acids, preferably is absent or is S. In one particular example, PEP6 is selected from the group consisting of DMVVE, NMTVE, EMVVE, NMVVR, NMVVK, EGMSVAE, GMAVS, GMVVD, MIVEE, MIVRS, MIVKS, MVVKS, FLQHN, LEEHS, RLEEH and TLEDH.

[0370] In certain embodiments, PEP7 is an amino acid or a peptide with between two and seven amino acids of general formula AA¹-AA²-AA³-AA⁴-AA⁵-AA⁶-AA⁷; wherein wherein AA¹, AA², AA³, AA⁴, and AA⁵ are independently absent or AA^{I} as defined herein; wherein AA⁶ is absent or selected from the group consisting of S, T, C, E, Q, P and R; wherein AA⁷ is absent or is selected from the group consisting of S, T, C, E, Q, P and R, and wherein at least one of AA¹, AA², AA³, AA⁴, AA⁵, AA⁶ or AA⁷ is not absent. In one particular example, PEP7 is selected from the group consisting of KIPKAXX, GIPEPXX, SIPKAXX, HVTKPTX, YVPKPXX, TVPKPXX, AVPKAXX, KVGKAXX, KASKAXX, GSAGPXX, AAPASXX, STPPTXX, HVPKPXX, RVPSTXX, ASAAPXX, ASASPXX, NDEGLEX, SSVKXQP and RNVQXRP, wherein X is C or S throughout the present description.

[0371] In certain embodiments, PEP8 is an amino acid or a peptide with between two and six amino acids of general formula AA³³-AA³⁴-AA³⁵-AA³⁶-AA³⁷-AA³⁸; wherein AA³³ is absent or is selected from the group consisting of AA^{I} amino acids at the exception of AA^{VI} amino acids; AA³⁴ is absent or is selected from the group consisting of AA^{III} and AA^{IV} amino acids; wherein AA³⁵ is absent or is selected from the group consisting of AA^{II} amino acids, preferably is S or C; wherein AA³⁶ is absent or is selected from the group consisting of AA^{III} and AA^{IV} amino acids; wherein AA³⁷ is absent or is selected from the group consisting of AA^{II} amino acids, preferably is S or C; wherein AA³⁸ is absent or is selected from the group consisting of AA^{I}; and wherein at least one of AA³³, AA³⁴, AA³⁵, AA³⁶, AA³⁷ or AA³⁸ is not absent. In one particular example, PEP8 is selected from the group consisting of GXGXR, SXAXR, SXGXH, AXGXH, XGXR, EXGXR, RXGXS, AXGXR, SXGXR, XGXL, XKXS, KXEXR, QXEXR, LEXAXA and LAXKXE.

[0372] In certain embodiments, PEP9 is a peptide of general formula PEP7-PEP5; wherein PEP5 is a peptide of formula PEP3-AA-AA¹²; wherein PEP3 is selected from the group consisting of VPT, VPE, APT, TPT, VPA, APV, VPQ, VSQ, SRV and TQV; wherein AA¹¹ is selected from the group consisting of E, K, Q, R, A, D, G and H; and wherein AA¹² is selected from the group consisting of L, M, T, E, Q and H; wherein PEP7 is an amino acid or a peptide with between two and seven amino acids of general formula AA¹-AA²-AA³-AA⁴-AA⁵-AA⁶-AA⁷; wherein AA¹, AA², AA³, AA⁴, and AA⁵ are independently absent or AA^{I} as defined herein; wherein AA⁶ is absent or selected from the group consisting of S, T, C, E, Q, P and R; wherein AA⁷ is absent or is selected from the group consisting of S, T, C, E, Q, P and R. In one particular example, PEP9 is selected from the group consisting of KIPKAXXVPTEL, GIPEPXXVPEKM, SIPKAXXVPTEL, HVTKPTXAPTKL, YVPKPXXAPTKL, TVPKPXXAPTQL, AVPKAXXAPTKL, KVGKAXXVPTKL, KASKAXXVPTKL, GSAGPXXTPTKM, AAPASXXVPARL, STPPTXXVPTRL, HVPKPXXAPTKL, RVPSTXXAPVKT, ASAAPXXVPQAL, ASASPXXVSQDL, ASASPXXVPQDL, NDEGLEXVPTEE, NDEGLEXVPTGQ, SSVKXQPSRVHH and RNVQXRPTQVQL, wherein X is C or S throughout the present description.

[0373] In certain embodiments, PEP10 is a peptide of general formula PEP6-PEP8; wherein PEP6 is a peptide of formula AA²⁶-AA²⁷-AA²⁸-AA²⁹-PEP4; wherein PEP4 is selected from the group consisting of VVE, TVE, VVR, VVK, VAE, AVS, VVD, VEE, VRS, VKS, QHN, EHS, EEH and EDH; wherein AA²⁶ is absent or selected from the group consisting of AA^{II} amino acids, preferably is absent or is E; wherein AA²⁷ and AA²⁸ are independently selected from the group consisting of AA^{III} and AA^{V} amino acids; and wherein AA²⁹ is absent or selected from the group consisting of AA^{II} amino acids, preferably is absent or is S; wherein PEP8 is an amino acid or a peptide with between two and six amino acids of general formula AA³³-AA³⁴-AA³⁵-AA³⁶-AA³⁷-AA³⁸; AA³³ is absent or is selected from the group consisting of AA^{I} amino acids at the exception of AA^{VI} amino acids; AA³⁴ is absent or is selected from the group consisting of AA^{III} and AA^{IV} amino acids; wherein AA³⁵ is absent or is selected from the group consisting of AA^{II} amino acids, preferably is S or C; wherein AA³⁶ is absent or is selected from the group consisting of AA^{III} and AA^{IV} amino acids; wherein AA³⁷ is absent or is selected from the group consisting of AA^{II} amino acids, preferably is S or C; wherein AA³⁸ is absent or is selected from the group consisting of AA^{I}. In one particular example, PEP10 is selected from the group consisting of DMVVEGXGXR, NMTVESXAXR, EMVVEGXGXR, NMVVRSXGXH, NMVVRAXGXH, NMVVKAXGXH, EGMSVAEXGXR, GMAVSEXGXR, GMVVDRXGXS, DMVVEAXGXR, DMVVESXGXR, MIVEEXGXL, MIVRSXKXS, MIVKSXKXS, MVVKSXKXS, FLQHNKXEXR, LEEHSQXEXR, RLEEHLEXAXA and TLEDHLAXKXE.

[0374] In certain embodiments, PEP12 is a peptide of general formula PEP1-AA¹⁷-PEP11; wherein AA¹⁷ is selected from the group consisting of G, A, V, L, I, P, F, M, W, T and S (in particular is selected from the group consisting of M, I, L, V and T); wherein PEP1 is selected from the group consisting of SAIS, SSLS, NAIS, SATS, SPIS, EPIS, SPIN, KPLS, EPLP, EPLT, SNIT, RSVK and RPVQ.

[0375] In certain embodiments, the pair PEP12:PEP2 is selected from the group consisting of SAIS-AA¹⁷-LYL:LKNYQ, SSLS-AA¹⁷-LFF:LKVYP, NAIS-AA¹⁷-LYF:LKKYR, SATS-AA¹⁷-LYY:LRKHR, SPIS-AA¹⁷-LYK:LKYHY, EPIS-AA¹⁷-LYL:KFKYE, SPIN-AA¹⁷-LYF:YGKIP, SPIS-AA¹⁷-LYI:YKQYE, SPIS-AA¹⁷-LFI:YKQYE, KPLS-AA¹⁷-LYV:DHHKD, EPLP-AA¹⁷-VYY:EQLSN, EPLT-AA¹⁷-LYY:EQLSN, SNIT-AA¹⁷-QIM:IGEMS, SNIT-AA¹⁷-QIM:LGEMS, RSVK-AA¹⁷-AKV:KEVQV and RPVQ-AA¹⁷-RKI:KKATV; wherein AA¹⁷ is selected from the group consisting of G, A, V, L, I, P, F, M, W, T and S (in particular is selected from the group consisting of M, I, L, V and T).

[0376] In certain embodiments, PEP11 is a peptide with 3 amino acids of general formula AA¹⁸-AA¹⁹-AA²⁰; wherein AA¹⁸ is selected from the group consisting of L, V, Q, A and R; wherein AA¹⁹ is selected from the group consisting of F, W, H, Y, I and K; wherein AA²⁰ is selected from the group consisting of L, F, Y, K, I, V and M. In one particular example, PEP11 is selected from the group consisting of LYL, LFF, LYF, LYY, LYK, LYI, LFI, LYV, VYY, QIM, AKV and RKI.

[0377] In certain embodiments, PEP3 is selected from the group consisting of VPT, VPE, APT, TPT, VPA, APV, VPQ, VSQ, SRV and TQV; PEP4 is selected from the group consisting of VVE, TVE, VVR, VVK, VAE, AVS, VVD, VEE, VRS, VKS, QHN, EHS, EEH and EDH; and wherein the pair PEP3:PEP4 is selected from the group consisting of VPT:VVE, VPE:TVE, APT:VVR, APT:VVK, VPT:VAE, VPT:AVS, TPT:VVD, VPA:VVE, APV:VEE, VPQ:VRS, VSQ:VKS, VPQ:VKS, VPT:QHN, VPT:EHS, SRV:EEH and TQV:EDH.

[0378] In certain embodiments, PEP5 is selected from the group consisting of VPT-AA¹¹-AA¹², VPE-AA¹¹-AA¹²-AA¹¹-AA¹², APT-AA¹¹-AA¹², TPT-AA¹¹-AA¹², VPA-AA¹¹-AA¹², VPT-AA¹¹-AA¹², APV-AA¹¹-AA¹², VPQ-AA¹¹-AA¹², VSQ-AA¹¹-AA¹², VPQ-AA¹¹-AA¹², SRV-AA¹¹-AA¹² and TQV-AA¹¹-AA¹²; wherein AA¹¹ is selected from the group consisting of E, K, Q, R, A, D, G and H; and wherein AA¹² is selected from the group consisting of L, M, T, E, Q and H; PEP6 is selected from the group consisting of AA²⁶-AA²⁷-AA²⁸-AA²⁹-VVE, AA²⁶-AA²⁷-AA²⁸-AA²⁹-TVE, AA²⁶-AA²⁷-AA²⁸-AA²⁹-VVR, AA²⁶-AA²⁷-AA²⁸-AA²⁹-VVK, AA²⁶-AA²⁷-AA²⁸-AA²⁹-VAE, AA²⁶-AA²⁷-AA²⁸-AA²⁹-AVS, AA²⁶-AA²⁷-AA²⁸-AA²⁹-VVD, AA²⁶-AA²⁷-AA²⁸-AA²⁹-VEE, AA²⁶-AA²⁷-AA²⁸-AA²⁹-VRS, AA²⁶-AA²⁷-AA²⁸-AA²⁹-VKS, AA²⁶-AA²⁷-AA²⁸-AA²⁹-QHN, AA²⁶-AA²⁷-AA²⁸-AA²⁹-EHS, AA²⁶-AA²⁷-AA²⁸-AA²⁹-EEH and AA²⁶-AA²⁷-AA²⁸-AA²⁹-EDH; wherein AA²⁶ is absent or selected from the group consisting of AA^{III} amino acids, preferably is absent or is E; wherein AA²⁷ and AA²⁸ are independently selected from the group consisting of AA^{III} and AA^{V} amino acids; and wherein AA²⁹ is absent or selected from the group consisting of AA^{II} amino acids, preferably is absent or is S; wherein the pair PEP5:PEP6 is selected from the group consisting of VPT-AA¹¹-AA¹²:AA²⁶-AA²⁷-AA²⁸-AA²⁹-VVE, VPE-AA¹¹-AA¹²:AA²⁶-AA²⁷-AA²⁸-AA²⁹-TVE, APT-AA¹¹-AA¹²:AA²⁶-AA²⁷-AA²⁸-AA²⁹-VVR, APT-AA¹¹l-AA¹²:AA²⁶-AA²⁷-AA²⁸-AA²⁹-VVK, VPT-AA¹¹-AA¹²:AA²⁶-AA²⁷-AA²⁸-AA²⁹-VAE, VPT-AA¹¹-AA¹²:AA²⁶-AA²⁷-AA²⁸-AA²⁹-AVS, TPT-AA¹¹-AA¹²:AA²⁶-AA²⁷-AA²⁸-AA²⁹-VVD, VPA-AA¹¹-AA¹²:AA²⁶-AA²⁷-AA²⁸-AA²⁹-VVE, APV-AA¹¹-AA¹²:AA²⁶-AA²⁷-AA²⁸-AA²⁹-VEE, VPQ-AA¹¹-AA¹²:AA²⁶-AA²⁷-AA²⁸-AA²⁹-VRS, VSQ-AA¹¹-AA¹²:AA²⁶-AA²⁷-AA²⁸-AA²⁹-VKS, VPQ-AA¹¹-AA¹²:AA²⁶-AA²⁷-AA²⁸-AA²⁹-VKS, VPT-AA¹¹-AA¹²:AA²⁶-AA²⁷-AA²⁸-AA²⁹-QHN, VPT-AA¹¹-AA¹²:AA²⁶-AA²⁷-AA²⁸-AA²⁹-EHS, SRV-AA¹¹-AA¹²:AA²⁶-AA²⁷-AA²⁸-AA²⁹-EEH and TQV-AA¹¹-AA¹²:AA²⁶-AA²⁷-AA²⁸-AA²⁹-EDH.

[0379] In certain embodiments, PEP5 is selected from the group consisting of VPTEL, VPEKM, APTKL, APTQL, VPTKL, TPTKM, VPARL, VPTRL, APVKT, VPQAL, VSQDL, VPQDL, VPTEE, VPTGQ, SRVHH and TQVQL; PEP6 is selected from the group consisting of DMVVE, NMTVE, EMVVE, NMVVR, NMVVK, EGMSVAE, GMAVS, GMVVD, MIVEE, MIVRS, MIVKS, MVVKS, FLQHN, LEEHS, RLEEH and TLEDH; and wherein the pair PEP5:PEP6 is selected from the group consisting of VPTEL:DMVVE, VPEKM:NMTVE, VPTEL:EMVVE, APTKL:NMVVR, APTQL:NMVVR, APTKL:NMVVK, VPTKL:EGMSVAE, VPTKL:GMAVS, TPTKM:GMVVD, VPARL:DMVVE, VPTRL:DMVVE, APVKT:MIVEE, VPQAL:MIVRS, VSQDL:MIVKS, VPQDL:MVVKS, VPTEE:FLQHN, VPTGQ:LEEHS, SRVHH:RLEEH and TQVQL:TLEDH.

[0380] In certain embodiments, PEP7 is selected from the group consisting of KIPKAXX, GIPEPXX, SIPKAXX, HVTKPTX, YVPKPXX, TVPKPXX, AVPKAXX, KVGKAXX, KASKAXX, GSAGPXX, AAPASXX, STPPTXX, HVPKPXX, RVPSTXX, ASAAPXX, ASASPXX, NDEGLEX, SSVKXQP and RNVQXRP; wherein PEP8 is selected from the group consisting of GXGXR, SXAXR, SXGXH, AXGXH, XGXR, EXGXR, RXGXS, AXGXR, SXGXR, XGXL, XKXS, KXEXR, QXEXR, LEXAXA and LAXKXE; and wherein the pair PEP7:PEP8 is selected from the group consisting of KIPKAXX:GXGXR, GIPEPXX:SXAXR, SIPKAXX:GXGXR, HVTKPTX:SXGXH, YVPKPXX:SXGXH, TVPKPXX:AXGXH, AVPKAXX:AXGXH, KVGKAXX:XGXR, KASKAXX:EXGXR, GSAGPXX:RXGXS, AAPASXX:AXGXR, STPPTXX:SXGXR, HVPKPXX:SXGXH, RVPSTXX:XGXL, ASAAPXX:XKXS, ASASPXX:XKXS, NDEGLEX:KXEXR, NDEGLEX:QXEXR, SSVKXQP:LEXAXA and RNVQXRP:LAXKXE.

[0381] In certain embodiments, PEP9 is selected from the group consisting of KIPKAXXVPT-AA¹¹-AA¹², GIPEPXXVPE-AA¹¹-AA¹², SIPKAXXVPT-AA¹¹-AA¹², HVTKPTXAPT-AA¹¹-AA¹², YVPKPXXAPT-AA¹¹-AA¹², TVPKPXXAPT-AA¹¹-AA¹², AVPKAXXAPT-AA¹¹-AA¹², KVGKAXXVPT-AA¹¹-AA¹², KASKAXXVPT-AA¹¹-AA¹², GSAGPXXTPT-AA¹¹-AA¹², AAPASXXVPA-AA¹¹-AA¹², STPPTXXVPT-AA¹¹-AA¹², HVPKPXXAPT-AA¹¹-AA¹², RVPSTXXAPV-AA¹¹-AA¹², ASAAPXXVPQ-AA¹¹-AA¹², ASASPXXVSQ-AA¹¹-AA¹², ASASPXXVPQ-AA¹¹-AA¹², NDEGLEXVPT-AA¹¹-AA¹², NDEGLEXVPT-AA¹¹-AA¹², SSVKXQPSRV-AA¹¹-AA¹² and RNVQXRPTQV-AA-AA¹²; wherein AA¹¹ is selected from the group consisting of E, K, Q, R, A, D, G and H; and wherein AA¹² is selected from the group consisting of L, M, T, E, Q and H; PEP10 is selected from the group consisting of AA²⁶-AA²⁷-AA²⁸-AA²⁹-VVEGXGXGXR, AA²⁶-AA²⁷-AA²⁸-AA²⁹-TVESXAXR, AA²⁶-AA²⁷-AA²⁸-AA²⁹-VVEGXGXGXR, AA²⁶-AA²⁷-AA²⁸-AA²⁹-VVRSXGXH, AA²⁶-AA²⁷-AA²⁸-AA²⁹-VVRAXGXH, AA²⁶-AA²⁷-AA²⁸-AA²⁹-VVKAXGXH, AA²⁶-AA²⁷-AA²⁸-AA²⁹-VAEXGXR, AA²⁶-AA²⁷-AA²⁸-AA²⁹-AVSEXGXR, AA²⁶-AA²⁷-AA²⁸-AA²⁹-VVDRXGXS, AA²⁶-AA²⁷-AA²⁸-AA²⁹-VVEAXGXR, AA²⁶-AA²⁷-AA²⁸-AA²⁹-VVESXGXR, AA²⁶-AA²⁷-AA²⁸-AA²⁹-VEEXGXL, AA²⁶-AA²⁷-AA²⁸-AA²⁹-VRSXKXS, AA²⁶-AA²⁷-AA²⁸-AA²⁹-VKSXKXS, AA²⁶-AA²⁷-AA²⁸-AA²⁹-VKSXKXS, AA²⁶-AA²⁷-AA²⁸-AA²⁹-QHNKXEXR, AA²⁶-AA²⁷-AA²⁸-AA²⁹-EHSQXEXR, AA²⁶-AA²⁷-AA²⁸-AA²⁹-EEHLEXAXA and AA²⁶-AA²⁷-AA²⁸-AA²⁹-EDHLAXKXE; wherein AA²⁶ is absent or selected from the group consisting of AA^{III} amino acids, preferably is absent or is E; wherein AA²⁷ and AA²⁸ are independently selected from the group consisting of AA^{III} and AA^{V} amino acids; and wherein AA²⁹ is absent or selected from the group consisting of AA^{II} amino acids, preferably is absent or is S; and wherein the pair PEP9:PEP10 is selected from the group consisting of KIPKAXXVPT-AA¹¹-AA¹²:AA²⁶-AA²⁷-AA²⁸-AA²⁹-VVEGXGXR, GIPEPXXVPE-AA¹¹-AA¹²:AA²⁶-AA²⁷-AA²⁸-AA²⁹-TVESXAXR, SIPKAXXVPT-AA¹¹-AA¹²:AA²⁶-AA²⁷-AA²⁸-AA²⁹-VVEGXGXGXR, HVTKPTXAPT-AA¹¹-AA¹²:AA²⁶-AA²⁷-AA²⁸-AA²⁹-VVRSXGXH, YVPKPXXAPT-AA¹¹-AA¹²:AA²⁶-AA²⁷-AA²⁸-AA²⁹-VVRSXGXH, TVPKPXXAPT-AA¹¹-AA¹²:AA²⁶-AA²⁷-AA²⁸-AA²⁹-VVRAXGXH, AVPKAXXAPT-AA¹¹-AA¹²:AA²⁶-AA²⁷-AA²⁸-AA²⁹-VVKAXGXH, KVGKAXXVPT-AA¹¹-AA¹²:AA²⁶-AA²⁷-AA²⁸-AA²⁹-VAEXGXR, KASKAXXVPT-AA¹¹-AA¹²-AA¹¹-AA¹²:AA²⁶-AA²⁷-AA²⁸-AA²⁹-AVSEXGXR, GSAGPXXTPT-AA¹¹-AA¹²:AA²⁶-AA²⁷-AA²⁸-AA²⁹-VVDRXGXS, AAPASXXVPA-AA¹¹-AA¹²:AA²⁶-AA²⁷-AA²⁸-AA²⁹-VVEAXGXR, STPPTXXVPT-AA¹¹-AA¹²-AA¹¹-AA¹²:AA²⁶-AA²⁷-AA²⁸-AA²⁹-VVESXGXR, HVPKPXXAPT-AA¹¹-AA¹²:AA²⁶-AA²⁷-AA²⁸-AA²⁹-VVRSXGXH, RVPSTXXAPV-AA¹¹-AA¹²:AA²⁶-AA²⁷-AA²⁸-AA²⁹-VEEXGXL, ASAAPXXVPQ-AA¹¹-AA¹²:AA²⁶-AA²⁷-AA²⁸-AA²⁹-VRSXKXS, ASASPXXVSQ-AA¹¹-AA¹²:AA²⁶-AA²⁷-AA²⁸-AA²⁹-VKSXKXS, ASASPXXVPQ-AA¹¹-AA¹²:AA²⁶-AA²⁷-AA²⁸-AA²⁹-VKSXKXS, NDEGLEXVPT-AA¹¹-AA¹²:AA²⁶-AA²⁷-AA²⁸-AA²⁹-QHNKXEXR, NDEGLEXVPT-AA¹¹-AA¹²:AA²⁶-AA²⁷-AA²⁸-AA²⁹-EHSQXEXR, SSVKXQPSRV-AA¹¹-AA¹²:AA²⁶-AA²⁷-AA²⁸-AA²⁹-EEHLEXAXA and RNVQXRPTQV-AA¹¹-AA¹²:AA²⁶-AA²⁷-AA²⁸-AA²⁹-EDHLAXKXE.

[0382] In certain embodiments, PEP9 is selected from the group consisting of KIPKAXXVPTEL, GIPEPXXVPEKM, SIPKAXXVPTEL, HVTKPTXAPTKL, YVPKPXXAPTKL, TVPKPXXAPTQL, AVPKAXXAPTKL, KVGKAXXVPTKL, KASKAXXVPTKL, GSAGPXXTPTKM, AAPASXXVPARL, STPPTXXVPTRL, HVPKPXXAPTKL, RVPSTXXAPVKT, ASAAPXXVPQAL, ASASPXXVSQDL, ASASPXXVPQDL, NDEGLEXVPTEE, NDEGLEXVPTGQ, SSVKXQPSRVHH and RNVQXRPTQVQL; PEP10 is selected from the group consisting of DMVVEGXGXR, NMTVESXAXR, EMVVEGXGXR, NMVVRSXGXH, NMVVRAXGXH, NMVVKAXGXH, EGMSVAEXGXR, GMAVSEXGXR, GMVVDRXGXS, DMVVEAXGXR, DMVVESXGXR, MIVEEXGXL, MIVRSXKXS, MIVKSXKXS, MVVKSXKXS, FLQHNKXEXR, LEEHSQXEXR, RLEEHLEXAXA and TLEDHLAXKXE; and wherein the pair PEP9:PEP10 is selected from the group consisting of KIPKAXXVPTEL:DMVVEGXGXR, GIPEPXXVPEKM:NMTVESXAXR, SIPKAXXVPTEL:EMVVEGXGXR, HVTKPTXAPTKL:NMVVRSXGXH, YVPKPXXAPTKL:NMVVRSXGXH, TVPKPXXAPTQL:NMVVRAXGXH, AVPKAXXAPTKL:NMVVKAXGXH, KVGKAXXVPTKL:EGMSVAEXGXR, KASKAXXVPTKL:GMAVSEXGXR, GSAGPXXTPTKM:GMVVDRXGXS, AAPASXXVPARL:DMVVEAXGXR, STPPTXXVPTRL:DMVVESXGXR, HVPKPXXAPTKL:NMVVRSXGXH, RVPSTXXAPVKT:MIVEEXGXL, ASAAPXXVPQAL:MIVRSXKXS, ASASPXXVSQDL:MIVKSXKXS, ASASPXXVPQDL:MVVKSXKXS, NDEGLEXVPTEE:FLQHNKXEXR, NDEGLEXVPTGQ:LEEHSQXEXR, NDEGLEXVPTEE:FLQHNKXEXR, NDEGLEXVPTEE:FLQHNKXEXR, SSVKXQPSRVHH:RLEEHLEXAXA and RNVQXRPTQVQL:TLEDHLAXKXE.

[0383] In certain embodiments, PEP5 is selected from the group consisting of VPTEL, VPEKM, APTKL, APTQL, VPTKL, TPTKM, VPARL, VPTRL, APVKT, VPQAL, VSQDL, VPQDL, VPTEE, VPTGQ, SRVHH and TQVQL; PEP6 is selected from the group consisting of DMVVE, NMTVE, EMVVE, NMVVR, NMVVK, EGMSVAE, GMAVS, GMVVD, MIVEE, MIVRS, MIVKS, MVVKS, FLQHN, LEEHS, RLEEH and TLEDH; wherein the pair PEP5:PEP6 is selected from the group consisting of VPTEL:DMVVE, VPEKM:NMTVE, VPTEL:EMVVE, APTKL:NMVVR, APTQL:NMVVR, APTKL:NMVVK, VPTKL:EGMSVAE, VPTKL:GMAVS, TPTKM:GMVVD, VPARL:DMVVE, VPTRL:DMVVE, APVKT:MIVEE, VPQAL:MIVRS, VSQDL:MIVKS, VPQDL:MVVKS, VPTEE:FLQHN, VPTGQ:LEEHS, SRVHH:RLEEH and TQVQL:TLEDH; and wherein the pair PEP5:PEP6 is not VPTEL:DMVVE when PEP1 is SAIS and PEP2 is LKNYQ; wherein the pair PEP5:PEP6 is not VPEKM:NMTVE when PEP1 is SSLS and PEP2 is LKVYP; wherein the pair PEP5:PEP6 is not VPTEL:EMVVE when PEP1 is SAIS and PEP2 is LKNYQ; wherein the pair PEP5:PEP6 is not APTKL:NMVVR when PEP1 is NAIS and PEP2 is LKKYR; wherein the pair PEP5:PEP6 is not APTQL:NMVVR when PEP1 is NAIS and PEP2 is LKKYR; wherein the pair PEP5:PEP6 is not APTKL:NMVVK when PEP1 is SATS and PEP2 is LRKHR; wherein the pair PEP5:PEP6 is not VPTKL:EGMSVAE when PEP1 is SPIS and PEP2 is LKYHY; wherein the pair PEP5:PEP6 is not VPTKL:GMAVS when PEP1 is EPIS and PEP2 is KFKYE; wherein the pair PEP5:PEP6 is not TPTKM:GMVVD when PEP1 is SPIN and PEP2 is YGKIP; wherein the pair PEP5:PEP6 is not VPARL:DMVVE when PEP1 is SPIS and PEP2 is YKQYE; wherein the pair PEP5:PEP6 is not VPTRL:DMVVE when PEP1 is SPIS and PEP2 is YKQYE; wherein the pair PEP5:PEP6 is not APVKT:MIVEE when PEP1 is KPLS and PEP2 is DHHKD; wherein the pair PEP5:PEP6 is not VPQAL:MIVRS when PEP1 is EPLP and PEP2 is EQLSN; wherein the pair PEP5:PEP6 is not VSQDL:MIVKS when PEP1 is EPLT and PEP2 is EQLSN; wherein the pair PEP5:PEP6 is not VPQDL:MVVKS when PEP1 is EPLT and PEP2 is EQLSN; wherein the pair PEP5:PEP6 is not VPTEE:FLQHN when PEP1 is SNIT and PEP2 is IGEMS; wherein the pair PEP5:PEP6 is not VPTGQ:LEEHS when PEP1 is SNIT and PEP2 is LGEMS; wherein the pair PEP5:PEP6 is not SRVHH:RLEEH when PEP1 is RSVK and PEP2 is KEVQV; and wherein the pair PEP5:PEP6 is not TQVQL:TLEDH when PEP1 is RPVQ and PEP2 is KKATV.

[0384] In certain embodiments, PEP9 is selected from the group consisting of KIPKAXXVPT-AA¹¹-AA¹², GIPEPXXVPE-AA¹¹-AA¹², SIPKAXXVPT-AA¹¹-AA¹², HVTKPTXAPT-AA¹¹-AA¹², YVPKPXXAPT-AA¹¹-AA¹², TVPKPXXAPT-AA¹¹-AA¹², AVPKAXXAPT-AA¹¹-AA¹², KVGKAXXVPT-AA¹¹-AA¹², KASKAXXVPT-AA¹¹-AA¹², GSAGPXXTPT-AA¹¹-AA¹², AAPASXXVPA-AA¹¹-AA¹², STPPTXXVPT-AA¹¹-AA¹², HVPKPXXAPT-AA¹¹-AA¹², RVPSTXXAPV-AA¹¹-AA¹², ASAAPXXVPQ-AA¹¹-AA¹², ASASPXXVSQ-AA¹¹-AA¹², ASASPXXVPQ-AA¹¹-AA¹², NDEGLEXVPT-AA¹¹-AA¹², NDEGLEXVPT-AA¹¹-AA¹², SSVKXQPSRV-AA¹¹-AA¹² and RNVQXRPTQV-AA-AA¹²; wherein AA¹¹ is selected from the group consisting of E, K, Q, R, A, D, G and H; and wherein AA¹² is selected from the group consisting of L, M, T, E, Q and H; PEP10 is selected from the group consisting of AA²⁶-AA²⁷-AA²⁸-AA²⁹-VVEGXGXGXR, AA²⁶-AA²⁷-AA²⁸-AA²⁹-TVESXAXR, AA²⁶-AA²⁷-AA²⁸-AA²⁹-VVEGXGXGXR, AA²⁶-AA²⁷-AA²⁸-AA²⁹-VVRSXGXH, AA²⁶-AA²⁷-AA²⁸-AA²⁹-VVRAXGXH, AA²⁶-AA²⁷-AA²⁸-AA²⁹-VVKAXGXH, AA²⁶-AA²⁷-AA²⁸-AA²⁹-VAEXGXR, AA²⁶-AA²⁷-AA²⁸-AA²⁹-AVSEXGXR, AA²⁶-AA²⁷-AA²⁸-AA²⁹-VVDRXGXS, AA²⁶-AA²⁷-AA²⁸-AA²⁹-VVEAXGXR, AA²⁶-AA²⁷-AA²⁸-AA²⁹-VVESXGXR, AA²⁶-AA²⁷-AA²⁸-AA²⁹-VEEXGXL, AA²⁶-AA²⁷-AA²⁸-AA²⁹-VRSXKXS, AA²⁶-AA²⁷-AA²⁸-AA²⁹-VKSXKXS, AA²⁶-AA²⁷-AA²⁸-AA²⁹-VKSXKXS, AA²⁶-AA²⁷-AA²⁸-AA²⁹-QHNKXEXR, AA²⁶-AA²⁷-AA²⁸-AA²⁹-EHSQXEXR, AA²⁶-AA²⁷-AA²⁸-AA²⁹-EEHLEXAXA and AA²⁶-AA²⁷-AA²⁸-AA²⁹-EDHLAXKXE; wherein AA²⁶ is absent or selected from the group consisting of AA^{III} amino acids, preferably is absent or is E; wherein AA²⁷ and AA²⁸ are independently selected from the group consisting of AA^{III} and AA^{V} amino acids; and wherein AA²⁹ is absent or selected from the group consisting of AA^{II} amino acids, preferably is absent or is S; and wherein the pair PEP9:PEP10 is selected from the group consisting of KIPKAXXVPT-AA¹¹-AA¹²:AA²⁶-AA²⁷-AA²⁸-AA²⁹-VVEGXGXR, GIPEPXXVPE-AA¹¹-AA¹²:AA²⁶-AA²⁷-AA²⁸-AA²⁹-TVESXAXR, SIPKAXXVPT-AA¹¹-AA¹²:AA²⁶-AA²⁷-AA²⁸-AA²⁹-VVEGXGXGXR, HVTKPTXAPT-AA¹¹-AA¹²:AA²⁶-AA²⁷-AA²⁸-AA²⁹-VVRSXGXH, YVPKPXXAPT-AA¹¹-AA¹²:AA²⁶-AA²⁷-AA²⁸-AA²⁹-VVRSXGXH, TVPKPXXAPT-AA¹¹-AA¹²:AA²⁶-AA²⁷-AA²⁸-AA²⁹-VVRAXGXH, AVPKAXXAPT-AA¹¹-AA¹²:AA²⁶-AA²⁷-AA²⁸-AA²⁹-VVKAXGXH, KVGKAXXVPT-AA¹¹-AA¹²:AA²⁶-AA²⁷-AA²⁸-AA²⁹-VAEXGXR, KASKAXXVPT-AA¹¹-AA¹²-AA¹¹-AA¹²:AA²⁶-AA²⁷-AA²⁸-AA²⁹-AVSEXGXR, GSAGPXXTPT-AA¹¹-AA¹²:AA²⁶-AA²⁷-AA²⁸-AA²⁹-VVDRXGXS, AAPASXXVPA-AA¹¹-AA¹²:AA²⁶-AA²⁷-AA²⁸-AA²⁹-VVEAXGXR, STPPTXXVPT-AA¹¹-AA¹²-AA¹¹-AA¹²:AA²⁶-AA²⁷-AA²⁸-AA²⁹-VVESXGXR, HVPKPXXAPT-AA¹¹-AA¹²:AA²⁶-AA²⁷-AA²⁸-AA²⁹-VVRSXGXH, RVPSTXXAPV-AA¹¹-AA¹²:AA²⁶-AA²⁷-AA²⁸-AA²⁹-VEEXGXL, ASAAPXXVPQ-AA¹¹-AA¹²:AA²⁶-AA²⁷-AA²⁸-AA²⁹-VRSXKXS, ASASPXXVSQ-AA¹¹-AA¹²:AA²⁶-AA²⁷-AA²⁸-AA²⁹-VKSXKXS, ASASPXXVPQ-AA¹¹-AA¹²:AA²⁶-AA²⁷-AA²⁸-AA²⁹-VKSXKXS, NDEGLEXVPT-AA¹¹-AA¹²:AA²⁶-AA²⁷-AA²⁸-AA²⁹-QHNKXEXR, NDEGLEXVPT-AA¹¹-AA¹²:AA²⁶-AA²⁷-AA²⁸-AA²⁹-EHSQXEXR, SSVKXQPSRV-AA¹¹-AA¹²:AA²⁶-AA²⁷-AA²⁸-AA²⁹-EEHLEXAXA and RNVQXRPTQV-AA¹¹-AA¹²:AA²⁶-AA²⁷-AA²⁸-AA²⁹-EDHLAXKXE; and wherein PEP9:PEP10 is not KIPKAXXVPT-AA¹¹-AA¹²:AA²⁶-AA²⁷-AA²⁸-AA²⁹-VVEGXGXR when PEP1 is SAIS and PEP2 is LKNYQ; wherein PEP9:PEP10 is not GIPEPXXVPE-AA¹¹-AA¹²:AA²⁶-AA²⁷-AA²⁸-AA²⁹-TVESXAXR when PEP1 is SSLS and PEP2 is LKVYP; wherein PEP9:PEP10 is not SIPKAXXVPT-AA¹¹-AA¹²:AA²⁶-AA²⁷-AA²⁸-AA²⁹-VVEGXGXR when PEP1 is SAIS and PEP2 is LKNYQ; wherein PEP9:PEP10 is not HVTKPTXAPT-AA¹¹-AA¹²:AA²⁶-AA²⁷-AA²⁸-AA²⁹-VVRSXGXH when PEP1 is NAIS and PEP2 is LKKYR; wherein PEP9:PEP10 is not YVPKPXXAPT-AA¹¹-AA¹²:AA²⁶-AA²⁷-AA²⁸-AA²⁹-VVRSXGXH when PEP1 is NAIS and PEP2 is LKKYR; wherein PEP9:PEP10 is not TVPKPXXAPT-AA¹¹-AA¹²:AA²⁶-AA²⁷-AA²⁸-AA²⁹-VVRAXGXH when PEP1 is NAIS and PEP2 is LKKYR; wherein PEP9:PEP10 is not AVPKAXXAPT-AA¹¹-AA¹²:AA²⁶-AA²⁷-AA²⁸-AA²⁹-VVKAXGXH when PEP1 is SATS and PEP2 is LRKHR; wherein PEP9:PEP10 is not KVGKAXXVPT-AA¹¹-AA¹²:AA²⁶-AA²⁷-AA²⁸-AA²⁹-VAEXGXR when PEP1 is SPIS and PEP2 is LKYHY; wherein PEP9:PEP10 is not KASKAXXVPT-AA¹¹-AA¹²-AA¹¹-AA¹²:AA²⁶-AA²⁷-AA²⁸-AA²⁹-AVSEXGXR when PEP1 is EPIS and PEP2 is KFKYE; wherein PEP9:PEP10 is not GSAGPXXTPT-AA¹¹-AA¹²:AA²⁶-AA²⁷-AA²⁸-AA²⁹-VVDRXGXS when PEP1 is SPIN and PEP2 is YGKIP; wherein PEP9:PEP10 is not AAPASXXVPA-AA¹¹-AA¹²:AA²⁶-AA²⁷-AA²⁸-AA²⁹-VVEAXGXR when PEP1 is SPIS and PEP2 is YKQYE; wherein PEP9:PEP10 is not STPPTXXVPT-AA¹¹-AA¹²-AA¹¹-AA¹²:AA²⁶-AA²⁷-AA²⁸-AA²⁹-VVESXGXR when PEP1 is SPIS and PEP2 is YKQYE; wherein PEP9:PEP10 is not HVPKPXXAPT-AA¹¹-AA¹²:AA²⁶-AA²⁷-AA²⁸-AA²⁹-VVRSXGXH when PEP1 is NAIS and PEP2 is LKKYR; wherein PEP9:PEP10 is not RVPSTXXAPV-AA¹¹-AA¹²:AA²⁶-AA²⁷-AA²⁸-AA²⁹-VEEXGXL when PEP1 is KPLS and PEP2 is DHHKD; wherein PEP9:PEP10 is not ASAAPXXVPQ-AA¹¹-AA¹²:AA²⁶-AA²⁷-AA²⁸-AA²⁹-VRSXKXS when PEP1 is EPLP and PEP2 is EQLSN; ASASPXXVSQ-AA¹¹-AA¹²:AA²⁶-AA²⁷-AA²⁸-AA²⁹-VKSXKXS when PEP1 is EPLT and PEP2 is EQLSN; wherein PEP9:PEP10 is not ASASPXXVPQ-AA¹¹-AA¹²:AA²⁶-AA²⁷-AA²⁸-AA²⁹-VKSXKXS when PEP1 is EPLT and PEP2 is EQLSN; wherein PEP9:PEP10 is not NDEGLEXVPT-AA¹¹-AA¹²:AA²⁶-AA²⁷-AA²⁸-AA²⁹-QHNKXEXR when PEP1 is SNIT and PEP2 is IGEMS; wherein PEP9:PEP10 is not NDEGLEXVPT-AA¹¹-AA¹²:AA²⁶-AA²⁷-AA²⁸-AA²⁹-EHSQXEXR when PEP1 is SNIT and PEP2 is LGEMS; wherein PEP9:PEP10 is not SSVKXQPSRV-A^{A}-AA¹²:AA²⁶-AA²⁷-AA²⁸-AA²⁹-EEHLEXAXA when PEP1 is RSVK and PEP2 is KEVQV; and wherein PEP9:PEP10 is not RNVQXRPTQV-AA¹¹-AA¹²:AA²⁶-AA²⁷-AA²⁸-AA²⁹-EDHLAXKXE when PEP1 is RPVQ and PEP2 is KKATV.

[0385] In certain embodiments, PEP9 is selected from the group consisting of KIPKAXXVPTEL, GIPEPXXVPEKM, SIPKAXXVPTEL, HVTKPTXAPTKL, YVPKPXXAPTKL, TVPKPXXAPTQL, AVPKAXXAPTKL, KVGKAXXVPTKL, KASKAXXVPTKL, GSAGPXXTPTKM, AAPASXXVPARL, STPPTXXVPTRL, HVPKPXXAPTKL, RVPSTXXAPVKT, ASAAPXXVPQAL, ASASPXXVSQDL, ASASPXXVPQDL, NDEGLEXVPTEE, NDEGLEXVPTGQ, SSVKXQPSRVHH and RNVQXRPTQVQL; PEP10 is selected from the group consisting of DMVVEGXGXR, NMTVESXAXR, EMVVEGXGXR, NMVVRSXGXH, NMVVRAXGXH, NMVVKAXGXH, EGMSVAEXGXR, GMAVSEXGXR, GMVVDRXGXS, DMVVEAXGXR, DMVVESXGXR, MIVEEXGXL, MIVRSXKXS, MIVKSXKXS, MVVKSXKXS, FLQHNKXEXR, LEEHSQXEXR, RLEEHLEXAXA and TLEDHLAXKXE; and wherein the pair PEP9:PEP10 is selected from the group consisting of KIPKAXXVPTEL:DMVVEGXGXR, GIPEPXXVPEKM:NMTVESXAXR, SIPKAXXVPTEL:EMVVEGXGXR, HVTKPTXAPTKL:NMVVRSXGXH, YVPKPXXAPTKL:NMVVRSXGXH, TVPKPXXAPTQL:NMVVRAXGXH, AVPKAXXAPTKL:NMVVKAXGXH, KVGKAXXVPTKL:EGMSVAEXGXR, KASKAXXVPTKL:GMAVSEXGXR, GSAGPXXTPTKM:GMVVDRXGXS, AAPASXXVPARL:DMVVEAXGXR, STPPTXXVPTRL:DMVVESXGXR, HVPKPXXAPTKL:NMVVRSXGXH, RVPSTXXAPVKT:MIVEEXGXL, ASAAPXXVPQAL:MIVRSXKXS, ASASPXXVSQDL:MIVKSXKXS, ASASPXXVPQDL:MVVKSXKXS, NDEGLEXVPTEE:FLQHNKXEXR, NDEGLEXVPTGQ:LEEHSQXEXR, NDEGLEXVPTEE:FLQHNKXEXR, NDEGLEXVPTEE:FLQHNKXEXR, SSVKXQPSRVHH:RLEEHLEXAXA and RNVQXRPTQVQL:TLEDHLAXKXE; and wherein PEP9:PEP10 is not KIPKAXXVPTEL:DMVVEGXGXR when PEP1 is SAIS and PEP2 is LKNYQ; wherein PEP9:PEP10 is not GIPEPXXVPEKM:NMTVESXAXR when PEP1 is SSLS and PEP2 is LKVYP; wherein PEP9:PEP10 is not SIPKAXXVPTEL:EMVVEGXGXR when PEP1 is SAIS and PEP2 is LKNYQ; wherein PEP9:PEP10 is not HVTKPTXAPTKL:NMVVRSXGXH when PEP1 is NAIS and PEP2 is LKKYR; wherein PEP9:PEP10 is not YVPKPXXAPTKL:NMVVRSXGXH when PEP1 is NAIS and PEP2 is LKKYR; wherein PEP9:PEP10 is not TVPKPXXAPTQL:NMVVRAXGXH when PEP1 is NAIS and PEP2 is LKKYR; wherein PEP9:PEP10 is not AVPKAXXAPTKL:NMVVKAXGXH when PEP1 is SATS and PEP2 is LRKHR; wherein PEP9:PEP10 is not KVGKAXXVPTKL:EGMSVAEXGXR when PEP1 is SPIS and PEP2 is LKYHY; wherein PEP9:PEP10 is not KASKAXXVPTKL:GMAVSEXGXR when PEP1 is EPIS and PEP2 is KFKYE; wherein PEP9:PEP10 is not GSAGPXXTPTKM:GMVVDRXGXS when PEP1 is SPIN and PEP2 is YGKIP; wherein PEP9:PEP10 is not AAPASXXVPARL:DMVVEAXGXR when PEP1 is SPIS and PEP2 is YKQYE; wherein PEP9:PEP10 is not STPPTXXVPTRL:DMVVESXGXR when PEP1 is SPIS and PEP2 is YKQYE; wherein PEP9:PEP10 is not HVPKPXXAPTKL:NMVVRSXGXH when PEP1 is NAIS and PEP2 is LKKYR; wherein PEP9:PEP10 is not RVPSTXXAPVKT:MIVEEXGXL when PEP1 is KPLS and PEP2 is DHHKD; wherein PEP9:PEP10 is not ASAAPXXVPQAL:MIVRSXKXS when PEP1 is EPLP and PEP2 is EQLSN; ASASPXXVSQDL:MIVKSXKXS when PEP1 is EPLT and PEP2 is EQLSN; wherein PEP9:PEP10 is not ASASPXXVPQDL:MVVKSXKXS when PEP1 is EPLT and PEP2 is EQLSN; wherein PEP9:PEP10 is not NDEGLEXVPTEE:FLQHNKXEXR when PEP1 is SNIT and PEP2 is IGEMS; wherein PEP9:PEP10 is not NDEGLEXVPTGQ:LEEHSQXEXR when PEP1 is SNIT and PEP2 is LGEMS; wherein PEP9:PEP10 is not NDEGLEXVPTEE:FLQHNKXEXR when PEP1 is SNIT and PEP2 is IGEMS; wherein PEP9:PEP10 is not NDEGLEXVPTEE:FLQHNKXEXR when PEP1 is SNIT and PEP2 is IGEMS; wherein PEP9:PEP10 is not SSVKXQPSRVHH:RLEEHLEXAXA when PEP1 is RSVK and PEP2 is KEVQV; and wherein PEP9:PEP10 is not RNVQXRPTQVQL:TLEDHLAXKXE when PEP1 is RPVQ and PEP2 is KKATV.

[0386] In certain embodiments, PEP1 is selected from the group consisting of SAIS, SSLS, NAIS, SATS, SPIS, EPIS, SPIN, KPLS, EPLP, EPLT, SNIT, RSVK and RPVQ; PEP11 is selected from the group consisting of LYL, LFF, LYF, LYY, LYK, LYI, LFI, LYV, VYY, QIM, AKV and RKI; and the pair PEP1:PEP11 is selected from the group consisting of SAIS:LYL, SSLS:LFF, NAIS:LYF, SATS:LYY, SPIS:LYK, SPIS:LYI, SPIS:LFI, EPIS:LYL, SPIN:LYF, KPLS:LYV, EPLP:VYY, EPLT:LYY, SNIT:QIM, RSVK:AKV and RPVQ:RKI.

[0387] In one aspect, the present disclosure provides a GFR-binding compound, wherein said GFR-binding compound is a peptide, a variant or analog thereof, or a peptidomimetic as defined herein, with between 20 and 60 (in particular between 20 and 50, and more particularly, between 20 and 45) amino acids, comprising a peptide with four amino acids (PEP1) or a peptide with eight amino acids (PEP12), a peptide with five amino acids (PEP2), and optionally a pair of peptides selected form the group consisting of PEP3:PEP4, PEP3:PEP6, PEP3:PEP10, PEP5:PEP4, PEP9:PEP4, PEP5:PEP6, PEP5:PEP10, PEP9:PEP6 and PEP9:PEP10; wherein said GFR-binding compound does not comprise the pair of peptides VPTEL:DMVVE when PEP1 is SAIS and PEP2 is LKNYQ; wherein said GFR-binding compound does not comprise the pair of peptides VPEKM:NMTVE when PEP1 is SSLS and PEP2 is LKVYP; wherein said GFR-binding compound does not comprise the pair of peptides VPTEL:EMVVE when PEP1 is SAIS and PEP2 is LKNYQ; wherein said GFR-binding compound does not comprise the pair of peptides APTKL:NMVVR when PEP1 is NAIS and PEP2 is LKKYR; wherein said GFR-binding compound does not comprise the pair of peptides APTQL:NMVVR when PEP1 is NAIS and PEP2 is LKKYR; wherein said GFR-binding compound does not comprise the pair of peptides APTKL:NMVVK when PEP1 is SATS and PEP2 is LRKHR; wherein said GFR-binding compound does not comprise the pair of peptides VPTKL:EGMSVAE when PEP1 is SPIS and PEP2 is LKYHY; wherein said GFR-binding compound does not comprise the pair of peptides VPTKL:GMAVS when PEP1 is EPIS and PEP2 is KFKYE; wherein said GFR-binding compound does not comprise the pair of peptides TPTKM:GMVVD when PEP1 is SPIN and PEP2 is YGKIP; wherein said GFR-binding compound does not comprise the pair of peptides VPARL:DMVVE when PEP1 is SPIS and PEP2 is YKQYE; wherein said GFR-binding compound does not comprise the pair of peptides VPTRL:DMVVE when PEP1 is SPIS and PEP2 is YKQYE; wherein said GFR-binding compound does not comprise the pair of peptides APVKT:MIVEE when PEP1 is KPLS and PEP2 is DHHKD; wherein said GFR-binding compound does not comprise the pair of peptides VPQAL:MIVRS when PEP1 is EPLP and PEP2 is EQLSN; wherein said GFR-binding compound does not comprise the pair of peptides VSQDL:MIVKS when PEP1 is EPLT and PEP2 is EQLSN; wherein said GFR-binding compound does not comprise the pair of peptides VPQDL:MVVKS when PEP1 is EPLT and PEP2 is EQLSN; wherein said GFR-binding compound does not comprise the pair of peptides VPTEE:FLQHN when PEP1 is SNIT and PEP2 is IGEMS; wherein said GFR-binding compound does not comprise the pair of peptides VPTGQ:LEEHS when PEP1 is SNIT and PEP2 is LGEMS; wherein said GFR-binding compound does not comprise the pair of peptides SRVHH:RLEEH when PEP1 is RSVK and PEP2 is KEVQV; and wherein said GFR-binding compound does not comprise the pair of peptides TQVQL:TLEDH when PEP1 is RPVQ and PEP2 is KKATV; and wherein the RMSD is 2.45 Å or less.

[0388] In one aspect, the present disclosure provides a GFR-binding compound, wherein said GFR-binding compound is a peptide, a variant or analog thereof, or a peptidomimetic as defined herein, with between 20 and 60 (in particular between 20 and 50, and more particularly, between 20 and 45) amino acids, comprising a peptide with four amino acids (PEP1) or a peptide with eight amino acids (PEP12), a peptide with five amino acids (PEP2), and optionally a pair of peptides selected form the group consisting of PEP3:PEP4, PEP3:PEP6, PEP3:PEP10, PEP5:PEP4, PEP9:PEP4, PEP5:PEP6, PEP5:PEP10, PEP9:PEP6 and PEP9:PEP10; wherein said GFR-binding compound does not comprise the pair of peptides KIPKAXXVPTEL:DMVVEGXGXR when PEP1 is SAIS and PEP2 is LKNYQ; wherein said GFR-binding compound does not comprise the pair of peptides GIPEPXXVPEKM:NMTVESXAXR when PEP1 is SSLS and PEP2 is LKVYP; wherein said GFR-binding compound does not comprise the pair of peptides SIPKAXXVPTEL:EMVVEGXGXR when PEP1 is SAIS and PEP2 is LKNYQ; wherein said GFR-binding compound does not comprise the pair of peptides HVTKPTXAPTKL:NMVVRSXGXH when PEP1 is NAIS and PEP2 is LKKYR; wherein said GFR-binding compound does not comprise the pair of peptides YVPKPXXAPTKL:NMVVRSXGXH when PEP1 is NAIS and PEP2 is LKKYR; wherein said GFR-binding compound does not comprise the pair of peptides TVPKPXXAPTQL:NMVVRAXGXH when PEP1 is NAIS and PEP2 is LKKYR; wherein said GFR-binding compound does not comprise the pair of peptides AVPKAXXAPTKL:NMVVKAXGXH when PEP1 is SATS and PEP2 is LRKHR; wherein said GFR-binding compound does not comprise the pair of peptides KVGKAXXVPTKL:EGMSVAEXGXR when PEP1 is SPIS and PEP2 is LKYHY; wherein said GFR-binding compound does not comprise the pair of peptides KASKAXXVPTKL:GMAVSEXGXR when PEP1 is EPIS and PEP2 is KFKYE; wherein said GFR-binding compound does not comprise the pair of peptides GSAGPXXTPTKM:GMVVDRXGXS when PEP1 is SPIN and PEP2 is YGKIP; wherein said GFR-binding compound does not comprise the pair of peptides AAPASXXVPARL:DMVVEAXGXR when PEP1 is SPIS and PEP2 is YKQYE; wherein said GFR-binding compound does not comprise the pair of peptides STPPTXXVPTRL:DMVVESXGXR when PEP1 is SPIS and PEP2 is YKQYE; wherein said GFR-binding compound does not comprise the pair of peptides HVPKPXXAPTKL:NMVVRSXGXH when PEP1 is NAIS and PEP2 is LKKYR; wherein said GFR-binding compound does not comprise the pair of peptides RVPSTXXAPVKT:MIVEEXGXL when PEP1 is KPLS and PEP2 is DHHKD; wherein said GFR-binding compound does not comprise the pair of peptides ASAAPXXVPQAL:MIVRSXKXS when PEP1 is EPLP and PEP2 is EQLSN; ASASPXXVSQDL:MIVKSXKXS when PEP1 is EPLT and PEP2 is EQLSN; wherein said GFR-binding compound does not comprise the pair of peptides ASASPXXVPQDL:MVVKSXKXS when PEP1 is EPLT and PEP2 is EQLSN; wherein said GFR-binding compound does not comprise the pair of peptides NDEGLEXVPTEE:FLQHNKXEXR when PEP1 is SNIT and PEP2 is IGEMS; wherein said GFR-binding compound does not comprise the pair of peptides NDEGLEXVPTGQ:LEEHSQXEXR when PEP1 is SNIT and PEP2 is LGEMS; wherein said GFR-binding compound does not comprise the pair of peptides NDEGLEXVPTEE:FLQHNKXEXR when PEP1 is SNIT and PEP2 is IGEMS; wherein said GFR-binding compound does not comprise the pair of peptides NDEGLEXVPTEE:FLQHNKXEXR when PEP1 is SNIT and PEP2 is IGEMS; wherein said GFR-binding compound does not comprise the pair of peptides SSVKXQPSRVHH:RLEEHLEXAXA when PEP1 is RSVK and PEP2 is KEVQV; wherein said GFR-binding compound does not comprise the pair of peptides RNVQXRPTQVQL:TLEDHLAXKXE when PEP1 is RPVQ and PEP2 is KKATV; and wherein the RMSD is 2.45 Å or less.

[0389] In particular, in certain embodiments, the quadruplet PEP3:PEP1:PEP2:PEP4 is selected from the group consisting of VPT:SAIS:LKNYQ:VVE, VPE:SAIS:LKNYQ:TVE, APT:SAIS:LKNYQ:VVR, APT:SAIS:LKNYQ:VVK, VPT:SAIS:LKNYQ:VAE, VPT:SAIS:LKNYQ:AVS, TPT:SAIS:LKNYQ:VVD, VPA:SAIS:LKNYQ:VVE, APV:SAIS:LKNYQ:VEE, VPQ:SAIS:LKNYQ:VRS, VSQ:SAIS:LKNYQ:VKS, VPQ:SAIS:LKNYQ:VKS, VPT:SAIS:LKNYQ:QHN, VPT:SAIS:LKNYQ:EHS, SRV:SAIS:LKNYQ:EEH, TQV:SAIS:LKNYQ:EDH, VPE:SSLS:LKVYP:TVE, VPT:SSLS:LKVYP:VVE, APT:SSLS:LKVYP:VVR, APT:SSLS:LKVYP:VVK, VPT:SSLS:LKVYP:VAE, VPT:SSLS:LKVYP:AVS, TPT:SSLS:LKVYP:VVD, VPA:SSLS:LKVYP:VVE, APV:SSLS:LKVYP:VEE, VPQ:SSLS:LKVYP:VRS, VSQ:SSLS:LKVYP:VKS, VPQ:SSLS:LKVYP:VKS, VPT:SSLS:LKVYP:QHN, VPT:SSLS:LKVYP:EHS, SRV:SSLS:LKVYP:EEH, TQV:SSLS:LKVYP:EDH, APT:NAIS:LKKYR:VVR, VPT:NAIS:LKKYR:VVE, VPE:NAIS:LKKYR:TVE, APT:NAIS:LKKYR:VVK, VPT:NAIS:LKKYR:VAE, VPT:NAIS:LKKYR:AVS, TPT:NAIS:LKKYR:VVD, VPA:NAIS:LKKYR:VVE, APV:NAIS:LKKYR:VEE, VPQ:NAIS:LKKYR:VRS, VSQ:NAIS:LKKYR:VKS, VPQ:NAIS:LKKYR:VKS, VPT:NAIS:LKKYR:QHN, VPT:NAIS:LKKYR:EHS, SRV:NAIS:LKKYR:EEH, TQV:NAIS:LKKYR:EDH, APT:SATS:LRKHR:VVK, VPT:SATS:LRKHR:VVE, VPE:SATS:LRKHR:TVE, APT:SATS:LRKHR:VVR, VPT:SATS:LRKHR:VAE, VPT:SATS:LRKHR:AVS, TPT:SATS:LRKHR:VVD, VPA:SATS:LRKHR:VVE, APV:SATS:LRKHR:VEE, VPQ:SATS:LRKHR:VRS, VSQ:SATS:LRKHR:VKS, VPQ:SATS:LRKHR:VKS, VPT:SATS:LRKHR:QHN, VPT:SATS:LRKHR:EHS, SRV:SATS:LRKHR:EEH, TQV:SATS:LRKHR:EDH, VPT:SPIS:LKYHY:VAE, VPT:SPIS:LKYHY:VVE, VPE:SPIS:LKYHY:TVE, APT:SPIS:LKYHY:VVR, APT:SPIS:LKYHY:VVK, VPT:SPIS:LKYHY:AVS, TPT:SPIS:LKYHY:VVD, VPA:SPIS:LKYHY:VVE, APV:SPIS:LKYHY:VEE, VPQ:SPIS:LKYHY:VRS, VSQ:SPIS:LKYHY:VKS, VPQ:SPIS:LKYHY:VKS, VPT:SPIS:LKYHY:QHN, VPT:SPIS:LKYHY:EHS, SRV:SPIS:LKYHY:EEH, TQV:SPIS:LKYHY:EDH, VPT:EPIS:KFKYE:AVS, VPT:EPIS:KFKYE:VVE, VPE:EPIS:KFKYE:TVE, APT:EPIS:KFKYE:VVR, APT:EPIS:KFKYE:VVK, VPT:EPIS:KFKYE:VAE, TPT:EPIS:KFKYE:VVD, VPA:EPIS:KFKYE:VVE, APV:EPIS:KFKYE:VEE, VPQ:EPIS:KFKYE:VRS, VSQ:EPIS:KFKYE:VKS, VPQ:EPIS:KFKYE:VKS, VPT:EPIS:KFKYE:QHN, VPT:EPIS:KFKYE:EHS, SRV:EPIS:KFKYE:EEH, TQV:EPIS:KFKYE:EDH, TPT:SPIN:YGKIP:VVD, VPT:SPIN:YGKIP:VVE, VPE:SPIN:YGKIP:TVE, APT:SPIN:YGKIP:VVR, APT:SPIN:YGKIP:VVK, VPT:SPIN:YGKIP:VAE, VPT:SPIN:YGKIP:AVS, VPA:SPIN:YGKIP:VVE, APV:SPIN:YGKIP:VEE, VPQ:SPIN:YGKIP:VRS, VSQ:SPIN:YGKIP:VKS, VPQ:SPIN:YGKIP:VKS, VPT:SPIN:YGKIP:QHN, VPT:SPIN:YGKIP:EHS, SRV:SPIN:YGKIP:EEH, TQV:SPIN:YGKIP:EDH, VPA:SPIS:YKQYE:VVE, VPT:SPIS:YKQYE:VVE, VPE:SPIS:YKQYE:TVE, APT:SPIS:YKQYE:VVR, APT:SPIS:YKQYE:VVK, VPT:SPIS:YKQYE:VAE, VPT:SPIS:YKQYE:AVS, TPT:SPIS:YKQYE:VVD, APV:SPIS:YKQYE:VEE, VPQ:SPIS:YKQYE:VRS, VSQ:SPIS:YKQYE:VKS, VPQ:SPIS:YKQYE:VKS, VPT:SPIS:YKQYE:QHN, VPT:SPIS:YKQYE:EHS, SRV:SPIS:YKQYE:EEH, TQV:SPIS:YKQYE:EDH, APV:KPLS:DHHKD:VEE, VPT:KPLS:DHHKD:VVE, VPE:KPLS:DHHKD:TVE, APT:KPLS:DHHKD:VVR, APT:KPLS:DHHKD:VVK, VPT:KPLS:DHHKD:VAE, VPT:KPLS:DHHKD:AVS, TPT:KPLS:DHHKD:VVD, VPA:KPLS:DHHKD:VVE, VPQ:KPLS:DHHKD:VRS, VSQ:KPLS:DHHKD:VKS, VPQ:KPLS:DHHKD:VKS, VPT:KPLS:DHHKD:QHN, VPT:KPLS:DHHKD:EHS, SRV:KPLS:DHHKD:EEH, TQV:KPLS:DHHKD:EDH, VPQ:EPLP:EQLSN:VRS, VPT:EPLP:EQLSN:VVE, VPE:EPLP:EQLSN:TVE, APT:EPLP:EQLSN:VVR, APT:EPLP:EQLSN:VVK, VPT:EPLP:EQLSN:VAE, VPT:EPLP:EQLSN:AVS, TPT:EPLP:EQLSN:VVD, VPA:EPLP:EQLSN:VVE, APV:EPLP:EQLSN:VEE, VSQ:EPLP:EQLSN:VKS, VPQ:EPLP:EQLSN:VKS, VPT:EPLP:EQLSN:QHN, VPT:EPLP:EQLSN:EHS, SRV:EPLP:EQLSN:EEH, TQV:EPLP:EQLSN:EDH, VSQ:EPLT:EQLSN:VKS, VPT:EPLT:EQLSN:VVE, VPE:EPLT:EQLSN:TVE, APT:EPLT:EQLSN:VVR, APT:EPLT:EQLSN:VVK, VPT:EPLT:EQLSN:VAE, VPT:EPLT:EQLSN:AVS, TPT:EPLT:EQLSN:VVD, VPA:EPLT:EQLSN:VVE, APV:EPLT:EQLSN:VEE, VPQ:EPLT:EQLSN:VRS, VPQ:EPLT:EQLSN:VKS, VPT:EPLT:EQLSN:QHN, VPT:EPLT:EQLSN:EHS, SRV:EPLT:EQLSN:EEH, TQV:EPLT:EQLSN:EDH, VPT:SNIT:IGEMS:QHN, VPT:SNIT:IGEMS:VVE, VPE:SNIT:IGEMS:TVE, APT:SNIT:IGEMS:VVR, APT:SNIT:IGEMS:VVK, VPT:SNIT:IGEMS:VAE, VPT:SNIT:IGEMS:AVS, TPT:SNIT:IGEMS:VVD, VPA:SNIT:IGEMS:VVE, APV:SNIT:IGEMS:VEE, VPQ:SNIT:IGEMS:VRS, VSQ:SNIT:IGEMS:VKS, VPQ:SNIT:IGEMS:VKS, VPT:SNIT:IGEMS:EHS, SRV:SNIT:IGEMS:EEH, TQV:SNIT:IGEMS:EDH, VPT:SNIT:LGEMS:EHS, VPT:SNIT:LGEMS:VVE, VPE:SNIT:LGEMS:TVE, APT:SNIT:LGEMS:VVR, APT:SNIT:LGEMS:VVK, VPT:SNIT:LGEMS:VAE, VPT:SNIT:LGEMS:AVS, TPT:SNIT:LGEMS:VVD, VPA:SNIT:LGEMS:VVE, APV:SNIT:LGEMS:VEE, VPQ:SNIT:LGEMS:VRS, VSQ:SNIT:LGEMS:VKS, VPQ:SNIT:LGEMS:VKS, VPT:SNIT:LGEMS:QHN, SRV:SNIT:LGEMS:EEH, TQV:SNIT:LGEMS:EDH, SRV:RSVK:KEVQV:EEH, VPT:RSVK:KEVQV:VVE, VPE:RSVK:KEVQV:TVE, APT:RSVK:KEVQV:VVR, APT:RSVK:KEVQV:VVK, VPT:RSVK:KEVQV:VAE, VPT:RSVK:KEVQV:AVS, TPT:RSVK:KEVQV:VVD, VPA:RSVK:KEVQV:VVE, APV:RSVK:KEVQV:VEE, VPQ:RSVK:KEVQV:VRS, VSQ:RSVK:KEVQV:VKS, VPQ:RSVK:KEVQV:VKS, VPT:RSVK:KEVQV:QHN, VPT:RSVK:KEVQV:EHS, TQV:RSVK:KEVQV:EDH, TQV:RPVQ:KKATV:EDH, VPT:RPVQ:KKATV:VVE, VPE:RPVQ:KKATV:TVE, APT:RPVQ:KKATV:VVR, APT:RPVQ:KKATV:VVK, VPT:RPVQ:KKATV:VAE, VPT:RPVQ:KKATV:AVS, TPT:RPVQ:KKATV:VVD, VPA:RPVQ:KKATV:VVE, APV:RPVQ:KKATV:VEE, VPQ:RPVQ:KKATV:VRS, VSQ:RPVQ:KKATV:VKS, VPQ:RPVQ:KKATV:VKS, VPT:RPVQ:KKATV:QHN, VPT:RPVQ:KKATV:EHS and SRV:RPVQ:KKATV:EEH.

[0390] In particular, in certain embodiments, the quadruplet PEP3:PEP12:PEP2:PEP4 is selected from the group consisting of VPT:SAIS-AA¹⁷-LYL:LKNYQ:VVE, VPE:SAIS-AA¹⁷-LYL:LKNYQ:TVE, APT:SAIS-AA¹⁷-LYL:LKNYQ:VVR, APT:SAIS-AA¹⁷-LYL:LKNYQ:VVK, VPT:SAIS-AA¹⁷-LYL:LKNYQ:VAE, VPT:SAIS-AA¹⁷-LYL:LKNYQ:AVS, TPT:SAIS-AA¹⁷-LYL:LKNYQ:VVD, VPA:SAIS-AA¹⁷-LYL:LKNYQ:VVE, APV:SAIS-AA¹⁷-LYL:LKNYQ:VEE, VPQ:SAIS-AA¹⁷-LYL:LKNYQ:VRS, VSQ:SAIS-AA¹⁷-LYL:LKNYQ:VKS, VPQ:SAIS-AA¹⁷-LYL:LKNYQ:VKS, VPT:SAIS-AA¹⁷-LYL:LKNYQ:QHN, VPT:SAIS-AA¹⁷-LYL:LKNYQ:EHS, SRV:SAIS-AA¹⁷-LYL:LKNYQ:EEH, TQV:SAIS-AA¹⁷-LYL:LKNYQ:EDH, VPE:SSLS-AA¹⁷-LFF:LKVYP:TVE, VPT:SSLS-AA¹⁷-LFF:LKVYP:VVE, APT:SSLS-AA¹⁷-LFF:LKVYP:VVR, APT:SSLS-AA¹⁷-LFF:LKVYP:VVK, VPT:SSLS-AA¹⁷-LFF:LKVYP:VAE, VPT:SSLS-AA¹⁷-LFF:LKVYP:AVS, TPT:SSLS-AA¹⁷-LFF:LKVYP:VVD, VPA:SSLS-AA¹⁷-LFF:LKVYP:VVE, APV:SSLS-AA¹⁷-LFF:LKVYP:VEE, VPQ:SSLS-AA¹⁷-LFF:LKVYP:VRS, VSQ:SSLS-AA¹⁷-LFF:LKVYP:VKS, VPQ:SSLS-AA¹⁷-LFF:LKVYP:VKS, VPT:SSLS-AA¹⁷-LFF:LKVYP:QHN, VPT:SSLS-AA¹⁷-LFF:LKVYP:EHS, SRV:SSLS-AA¹⁷-LFF:LKVYP:EEH, TQV:SSLS-AA¹⁷-LFF:LKVYP:EDH, APT:NAIS-AA¹⁷-LYF:LKKYR:VVR, VPT:NAIS-AA¹⁷-LYF:LKKYR:VVE, VPE:NAIS-AA¹⁷-LYF:LKKYR:TVE, APT:NAIS-AA¹⁷-LYF:LKKYR:VVK, VPT:NAIS-AA¹⁷-LYF:LKKYR:VAE, VPT:NAIS-AA¹⁷-LYF:LKKYR:AVS, TPT:NAIS-AA¹⁷-LYF:LKKYR:VVD, VPA:NAIS-AA¹⁷-LYF:LKKYR:VVE, APV:NAIS-AA¹⁷-LYF:LKKYR:VEE, VPQ:NAIS-AA¹⁷-LYF:LKKYR:VRS, VSQ:NAIS-AA¹⁷-LYF:LKKYR:VKS, VPQ:NAIS-AA¹⁷-LYF:LKKYR:VKS, VPT:NAIS-AA¹⁷-LYF:LKKYR:QHN, VPT:NAIS-AA¹⁷-LYF:LKKYR:EHS, SRV:NAIS-AA¹⁷-LYF:LKKYR:EEH, TQV:NAIS-AA¹⁷-LYF:LKKYR:EDH, APT:SATS-AA¹⁷-LYY:LRKHR:VVK, VPT:SATS-AA¹⁷-LYY:LRKHR:VVE, VPE:SATS-AA¹⁷-LYY:LRKHR:TVE, APT:SATS-AA¹⁷-LYY:LRKHR:VVR, VPT:SATS-AA¹⁷-LYY:LRKHR:VAE, VPT:SATS-AA¹⁷-LYY:LRKHR:AVS, TPT:SATS-AA¹⁷-LYY:LRKHR:VVD, VPA:SATS-AA¹⁷-LYY:LRKHR:VVE, APV:SATS-AA¹⁷-LYY:LRKHR:VEE, VPQ:SATS-AA¹⁷-LYY:LRKHR:VRS, VSQ:SATS-AA¹⁷-LYY:LRKHR:VKS, VPQ:SATS-AA¹⁷-LYY:LRKHR:VKS, VPT:SATS-AA¹⁷-LYY:LRKHR:QHN, VPT:SATS-AA¹⁷-LYY:LRKHR:EHS, SRV:SATS-AA¹⁷-LYY:LRKHR:EEH, TQV:SATS-AA¹⁷-LYY:LRKHR:EDH, VPT:SPIS-AA¹⁷-LYK:LKYHY:VAE, VPT:SPIS-AA¹⁷-LYK:LKYHY:VVE, VPE:SPIS-AA¹⁷-LYK:LKYHY:TVE, APT:SPIS-AA¹⁷-LYK:LKYHY:VVR, APT:SPIS-AA¹⁷-LYK:LKYHY:VVK, VPT:SPIS-AA¹⁷-LYK:LKYHY:AVS, TPT:SPIS-AA¹⁷-LYK:LKYHY:VVD, VPA:SPIS-AA¹⁷-LYK:LKYHY:VVE, APV:SPIS-AA¹⁷-LYK:LKYHY:VEE, VPQ:SPIS-AA¹⁷-LYK:LKYHY:VRS, VSQ:SPIS-AA¹⁷-LYK:LKYHY:VKS, VPQ:SPIS-AA¹⁷-LYK:LKYHY:VKS, VPT:SPIS-AA¹⁷-LYK:LKYHY:QHN, VPT:SPIS-AA¹⁷-LYK:LKYHY:EHS, SRV:SPIS-AA¹⁷-LYK:LKYHY:EEH, TQV:SPIS-AA¹⁷-LYK:LKYHY:EDH, VPT:EPIS-AA¹⁷-LYL:KFKYE:AVS, VPT:EPIS-AA¹⁷-LYL:KFKYE:VVE, VPE:EPIS-AA¹⁷-LYL:KFKYE:TVE, APT:EPIS-AA¹⁷-LYL:KFKYE:VVR, APT:EPIS-AA¹⁷-LYL:KFKYE:VVK, VPT:EPIS-AA¹⁷-LYL:KFKYE:VAE, TPT:EPIS-AA¹⁷-LYL:KFKYE:VVD, VPA:EPIS-AA¹⁷-LYL:KFKYE:VVE, APV:EPIS-AA¹⁷-LYL:KFKYE:VEE, VPQ:EPIS-AA¹⁷-LYL:KFKYE:VRS, VSQ:EPIS-AA¹⁷-LYL:KFKYE:VKS, VPQ:EPIS-AA¹⁷-LYL:KFKYE:VKS, VPT:EPIS-AA¹⁷-LYL:KFKYE:QHN, VPT:EPIS-AA¹⁷-LYL:KFKYE:EHS, SRV:EPIS-AA¹⁷-LYL:KFKYE:EEH, TQV:EPIS-AA¹⁷-LYL:KFKYE:EDH, TPT:SPIN-AA¹⁷-LYF:YGKIP:VVD, VPT:SPIN-AA¹⁷-LYF:YGKIP:VVE, VPE:SPIN-AA¹⁷-LYF:YGKIP:TVE, APT:SPIN-AA¹⁷-LYF:YGKIP:VVR, APT:SPIN-AA¹⁷-LYF:YGKIP:VVK, VPT:SPIN-AA¹⁷-LYF:YGKIP:VAE, VPT:SPIN-AA¹⁷-LYF:YGKIP:AVS, VPA:SPIN-AA¹⁷-LYF:YGKIP:VVE, APV:SPIN-AA¹⁷-LYF:YGKIP:VEE, VPQ:SPIN-AA¹⁷-LYF:YGKIP:VRS, VSQ:SPIN-AA¹⁷-LYF:YGKIP:VKS, VPQ:SPIN-AA¹⁷-LYF:YGKIP:VKS, VPT:SPIN-AA¹⁷-LYF:YGKIP:QHN, VPT:SPIN-AA¹⁷-LYF:YGKIP:EHS, SRV:SPIN-AA¹⁷-LYF:YGKIP:EEH, TQV:SPIN-AA¹⁷-LYF:YGKIP:EDH, VPA:SPIS-AA¹⁷-LYI:YKQYE:VVE, VPT:SPIS-AA¹⁷-LYI:YKQYE:VVE, VPE:SPIS-AA¹⁷-LYI:YKQYE:TVE, APT:SPIS-AA¹⁷-LYI:YKQYE:VVR, APT:SPIS-AA¹⁷-LYI:YKQYE:VVK, VPT:SPIS-AA¹⁷-LYI:YKQYE:VAE, VPT:SPIS-AA¹⁷-LYI:YKQYE:AVS, TPT:SPIS-AA¹⁷-LYI:YKQYE:VVD, APV:SPIS-AA¹⁷-LYI:YKQYE:VEE, VPQ:SPIS-AA¹⁷-LYI:YKQYE:VRS, VSQ:SPIS-AA¹⁷-LYI:YKQYE:VKS, VPQ:SPIS-AA¹⁷-LYI:YKQYE:VKS, VPT:SPIS-AA¹⁷-LYI:YKQYE:QHN, VPT:SPIS-AA¹⁷-LYI:YKQYE:EHS, SRV:SPIS-AA¹⁷-LYI:YKQYE:EEH, TQV:SPIS-AA¹⁷-LYI:YKQYE:EDH, VPT:SPIS-AA¹⁷-LFI:YKQYE:VVE, VPE:SPIS-AA¹⁷-LFI:YKQYE:TVE, APT:SPIS-AA¹⁷-LFI:YKQYE:VVR, APT:SPIS-AA¹⁷-LFI:YKQYE:VVK, VPT:SPIS-AA¹⁷-LFI:YKQYE:VAE, VPT:SPIS-AA¹⁷-LFI:YKQYE:AVS, TPT:SPIS-AA¹⁷-LFI:YKQYE:VVD, VPA:SPIS-AA¹⁷-LFI:YKQYE:VVE, APV:SPIS-AA¹⁷-LFI:YKQYE:VEE, VPQ:SPIS-AA¹⁷-LFI:YKQYE:VRS, VSQ:SPIS-AA¹⁷-LFI:YKQYE:VKS, VPQ:SPIS-AA¹⁷-LFI:YKQYE:VKS, VPT:SPIS-AA¹⁷-LFI:YKQYE:QHN, VPT:SPIS-AA¹⁷-LFI:YKQYE:EHS, SRV:SPIS-AA¹⁷-LFI:YKQYE:EEH, TQV:SPIS-AA¹⁷-LFI:YKQYE:EDH, APV:KPLS-AA¹⁷-LYV:DHHKD:VEE, VPT:KPLS-AA¹⁷-LYV:DHHKD:VVE, VPE:KPLS-AA¹⁷-LYV:DHHKD:TVE, APT:KPLS-AA¹⁷-LYV:DHHKD:VVR, APT:KPLS-AA¹⁷-LYV:DHHKD:VVK, VPT:KPLS-AA¹⁷-LYV:DHHKD:VAE, VPT:KPLS-AA¹⁷-LYV:DHHKD:AVS, TPT:KPLS-AA¹⁷-LYV:DHHKD:VVD, VPA:KPLS-AA¹⁷-LYV:DHHKD:VVE, VPQ:KPLS-AA¹⁷-LYV:DHHKD:VRS, VSQ:KPLS-AA¹⁷-LYV:DHHKD:VKS, VPQ:KPLS-AA¹⁷-LYV:DHHKD:VKS, VPT:KPLS-AA¹⁷-LYV:DHHKD:QHN, VPT:KPLS-AA¹⁷-LYV:DHHKD:EHS, SRV:KPLS-AA¹⁷-LYV:DHHKD:EEH, TQV:KPLS-AA¹⁷-LYV:DHHKD:EDH, VPQ:EPLP-AA¹⁷-VYY:EQLSN:VRS, VPT:EPLP-AA¹⁷-VYY:EQLSN:VVE, VPE:EPLP-AA¹⁷-VYY:EQLSN:TVE, APT:EPLP-AA¹⁷-VYY:EQLSN:VVR, APT:EPLP-AA¹⁷-VYY:EQLSN:VVK, VPT:EPLP-AA¹⁷-VYY:EQLSN:VAE, VPT:EPLP-AA¹⁷-VYY:EQLSN:AVS, TPT:EPLP-AA¹⁷-VYY:EQLSN:VVD, VPA:EPLP-AA¹⁷-VYY:EQLSN:VVE, APV:EPLP-AA¹⁷-VYY:EQLSN:VEE, VSQ:EPLP-AA¹⁷-VYY:EQLSN:VKS, VPQ:EPLP-AA¹⁷-VYY:EQLSN:VKS, VPT:EPLP-AA¹⁷-VYY:EQLSN:QHN, VPT:EPLP-AA¹⁷-VYY:EQLSN:EHS, SRV:EPLP-AA¹⁷-VYY:EQLSN:EEH, TQV:EPLP-AA¹⁷-VYY:EQLSN:EDH, VSQ:EPLT-AA¹⁷-LYY:EQLSN:VKS, VPT:EPLT-AA¹⁷-LYY:EQLSN:VVE, VPE:EPLT-AA¹⁷-LYY:EQLSN:TVE, APT:EPLT-AA¹⁷-LYY:EQLSN:VVR, APT:EPLT-AA¹⁷-LYY:EQLSN:VVK, VPT:EPLT-AA¹⁷-LYY:EQLSN:VAE, VPT:EPLT-AA¹⁷-LYY:EQLSN:AVS, TPT:EPLT-AA¹⁷-LYY:EQLSN:VVD, VPA:EPLT-AA¹⁷-LYY:EQLSN:VVE, APV:EPLT-AA¹⁷-LYY:EQLSN:VEE, VPQ:EPLT-AA¹⁷-LYY:EQLSN:VRS, VPQ:EPLT-AA¹⁷-LYY:EQLSN:VKS, VPT:EPLT-AA¹⁷-LYY:EQLSN:QHN, VPT:EPLT-AA¹⁷-LYY:EQLSN:EHS, SRV:EPLT-AA¹⁷-LYY:EQLSN:EEH, TQV:EPLT-AA¹⁷-LYY:EQLSN:EDH, VPT:SNIT-AA¹⁷-QIM:IGEMS:QHN, VPT:SNIT-AA¹⁷-QIM:IGEMS:VVE, VPE:SNIT-AA¹⁷-QIM:IGEMS:TVE, APT:SNIT-AA¹⁷-QIM:IGEMS:VVR, APT:SNIT-AA¹⁷-QIM:IGEMS:VVK, VPT:SNIT-AA¹⁷-QIM:IGEMS:VAE, VPT:SNIT-AA¹⁷-QIM:IGEMS:AVS, TPT:SNIT-AA¹⁷-QIM:IGEMS:VVD, VPA:SNIT-AA¹⁷-QIM:IGEMS:VVE, APV:SNIT-AA¹⁷-QIM:IGEMS:VEE, VPQ:SNIT-AA¹⁷-QIM:IGEMS:VRS, VSQ:SNIT-AA¹⁷-QIM:IGEMS:VKS, VPQ:SNIT-AA¹⁷-QIM:IGEMS:VKS, VPT:SNIT-AA¹⁷-QIM:IGEMS:EHS, SRV:SNIT-AA¹⁷-QIM:IGEMS:EEH, TQV:SNIT-AA¹⁷-QIM:IGEMS:EDH, VPT:SNIT-AA¹⁷-QIM:LGEMS:EHS, VPT:SNIT-AA¹⁷-QIM:LGEMS:VVE, VPE:SNIT-AA¹⁷-QIM:LGEMS:TVE, APT:SNIT-AA¹⁷-QIM:LGEMS:VVR, APT:SNIT-AA¹⁷-QIM:LGEMS:VVK, VPT:SNIT-AA¹⁷-QIM:LGEMS:VAE, VPT:SNIT-AA¹⁷-QIM:LGEMS:AVS, TPT:SNIT-AA¹⁷-QIM:LGEMS:VVD, VPA:SNIT-AA¹⁷-QIM:LGEMS:VVE, APV:SNIT-AA¹⁷-QIM:LGEMS:VEE, VPQ:SNIT-AA¹⁷-QIM:LGEMS:VRS, VSQ:SNIT-AA¹⁷-QIM:LGEMS:VKS, VPQ:SNIT-AA¹⁷-QIM:LGEMS:VKS, VPT:SNIT-AA¹⁷-QIM:LGEMS:QHN, SRV:SNIT-AA¹⁷-QIM:LGEMS:EEH, TQV:SNIT-AA¹⁷-QIM:LGEMS:EDH, SRV:RSVK-AA¹⁷-AKV:KEVQV:EEH, VPT:RSVK-AA¹⁷-AKV:KEVQV:VVE, VPE:RSVK-AA¹⁷-AKV:KEVQV:TVE, APT:RSVK-AA¹⁷-AKV:KEVQV:VVR, APT:RSVK-AA¹⁷-AKV:KEVQV:VVK, VPT:RSVK-AA¹⁷-AKV:KEVQV:VAE, VPT:RSVK-AA¹⁷-AKV:KEVQV:AVS, TPT:RSVK-AA¹⁷-AKV:KEVQV:VVD, VPA:RSVK-AA¹⁷-AKV:KEVQV:VVE, APV:RSVK-AA¹⁷-AKV:KEVQV:VEE, VPQ:RSVK-AA¹⁷-AKV:KEVQV:VRS, VSQ:RSVK-AA¹⁷-AKV:KEVQV:VKS, VPQ:RSVK-AA¹⁷-AKV:KEVQV:VKS, VPT:RSVK-AA¹⁷-AKV:KEVQV:QHN, VPT:RSVK-AA¹⁷-AKV:KEVQV:EHS, TQV:RSVK-AA¹⁷-AKV:KEVQV:EDH, TQV:RPVQ-AA¹⁷-RKI:KKATV:EDH, VPT:RPVQ-AA¹⁷-RKI:KKATV:VVE, VPE:RPVQ-AA¹⁷-RKI:KKATV:TVE, APT:RPVQ-AA¹⁷-RKI:KKATV:VVR, APT:RPVQ-AA¹⁷-RKI:KKATV:VVK, VPT:RPVQ-AA¹⁷-RKI:KKATV:VAE, VPT:RPVQ-AA¹⁷-RKI:KKATV:AVS, TPT:RPVQ-AA¹⁷-RKI:KKATV:VVD, VPA:RPVQ-AA¹⁷-RKI:KKATV:VVE, APV:RPVQ-AA¹⁷-RKI:KKATV:VEE, VPQ:RPVQ-AA¹⁷-RKI:KKATV:VRS, VSQ:RPVQ-AA¹⁷-RKI:KKATV:VKS, VPQ:RPVQ-AA¹⁷-RKI:KKATV:VKS, VPT:RPVQ-AA¹⁷-RKI:KKATV:QHN, VPT:RPVQ-AA¹⁷-RKI:KKATV:EHS and SRV:RPVQ-AA¹⁷-RKI:KKATV:EEH; and wherein AA¹⁷ is selected from the group consisting of G, A, V, L, I, P, F, M, W, T and S (in particular is selected from the group consisting of M, I, L, V and T).

[0391] In particular, in certain embodiments, the quadruplet PEP5:PEP1:PEP2:PEP6 is selected from the group consisting of VPTKM:SAIS:LKNYQ:NMVVE, VPTEL:SAIS:LKNYQ:EMVVE, VPTKL:SAIS:LKNYQ:NMVVE, VPTQL:SAIS:LKNYQ:NMVVE, VPTKL:SAIS:LKNYQ:EGMSVVE, VPTKL:SAIS:LKNYQ:GMVVE, VPTKM:SAIS:LKNYQ:GMVVE, VPTRL:SAIS:LKNYQ:DMVVE, VPTKT:SAIS:LKNYQ:MIVVE, VPTAL:SAIS:LKNYQ:MIVVE, VPTDL:SAIS:LKNYQ:MIVVE, VPTDL:SAIS:LKNYQ:MVVVE, VPTEE:SAIS:LKNYQ:FLVVE, VPTGQ:SAIS:LKNYQ:LEVVE, VPTHH:SAIS:LKNYQ:RLVVE, VPTQL:SAIS:LKNYQ:TLVVE, VPEKM:SAIS:LKNYQ:NMTVE, APTKL:SAIS:LKNYQ:NMVVR, APTQL:SAIS:LKNYQ:NMVVR, APTKL:SAIS:LKNYQ:NMVVK, VPTKL:SAIS:LKNYQ:EGMSVAE, VPTKL:SAIS:LKNYQ:GMAVS, TPTKM:SAIS:LKNYQ:GMVVD, VPARL:SAIS:LKNYQ:DMVVE, APVKT:SAIS:LKNYQ:MIVEE, VPQAL:SAIS:LKNYQ:MIVRS, VSQDL:SAIS:LKNYQ:MIVKS, VPQDL:SAIS:LKNYQ:MVVKS, VPTEE:SAIS:LKNYQ:FLQHN, VPTGQ:SAIS:LKNYQ:LEEHS, SRVHH:SAIS:LKNYQ:RLEEH, TQVQL:SAIS:LKNYQ:TLEDH, VPEEL:SSLS:LKVYP:DMTVE, VPEEL:SSLS:LKVYP:EMTVE, VPEKL:SSLS:LKVYP:NMTVE, VPEQL:SSLS:LKVYP:NMTVE, VPEKL:SSLS:LKVYP:EGMSTVE, VPEKL:SSLS:LKVYP:GMTVE, VPEKM:SSLS:LKVYP:GMTVE, VPERL:SSLS:LKVYP:DMTVE, VPEKT:SSLS:LKVYP:MITVE, VPEAL:SSLS:LKVYP:MITVE, VPEDL:SSLS:LKVYP:MITVE, VPEDL:SSLS:LKVYP:MVTVE, VPEEE:SSLS:LKVYP:FLTVE, VPEGQ:SSLS:LKVYP:LETVE, VPEHH:SSLS:LKVYP:RLTVE, VPEQL:SSLS:LKVYP:TLTVE, VPTEL:SSLS:LKVYP:DMVVE, VPTEL:SSLS:LKVYP:EMVVE, APTKL:SSLS:LKVYP:NMVVR, APTQL:SSLS:LKVYP:NMVVR, APTKL:SSLS:LKVYP:NMVVK, VPTKL:SSLS:LKVYP:EGMSVAE, VPTKL:SSLS:LKVYP:GMAVS, TPTKM:SSLS:LKVYP:GMVVD, VPARL:SSLS:LKVYP:DMVVE, VPTRL:SSLS:LKVYP:DMVVE, APVKT:SSLS:LKVYP:MIVEE, VPQAL:SSLS:LKVYP:MIVRS, VSQDL:SSLS:LKVYP:MIVKS, VPQDL:SSLS:LKVYP:MVVKS, VPTEE:SSLS:LKVYP:FLQHN, VPTGQ:SSLS:LKVYP:LEEHS, SRVHH:SSLS:LKVYP:RLEEH, TQVQL:SSLS:LKVYP:TLEDH, VPTEL:SAIS:LKNYQ:DMVVE, APTEL:NAIS:LKKYR:DMVVR, APTKM:NAIS:LKKYR:NMVVR, APTEL:NAIS:LKKYR:EMVVR, APTKL:NAIS:LKKYR:NMVVR, APTQL:NAIS:LKKYR:NMVVR, APTKL:NAIS:LKKYR:EGMSVVR, APTKL:NAIS:LKKYR:GMVVR, APTKM:NAIS:LKKYR:GMVVR, APTRL:NAIS:LKKYR:DMVVR, APTKT:NAIS:LKKYR:MIVVR, APTAL:NAIS:LKKYR:MIVVR, APTDL:NAIS:LKKYR:MIVVR, APTDL:NAIS:LKKYR:MVVVR, APTEE:NAIS:LKKYR:FLVVR, APTGQ:NAIS:LKKYR:LEVVR, APTHH:NAIS:LKKYR:RLVVR, APTQL:NAIS:LKKYR:TLVVR, VPTEL:NAIS:LKKYR:DMVVE, VPEKM:NAIS:LKKYR:NMTVE, VPTEL:NAIS:LKKYR:EMVVE, APTKL:NAIS:LKKYR:NMVVK, VPTKL:NAIS:LKKYR:EGMSVAE, VPTKL:NAIS:LKKYR:GMAVS, TPTKM:NAIS:LKKYR:GMVVD, VPARL:NAIS:LKKYR:DMVVE, VPTRL:NAIS:LKKYR:DMVVE, APVKT:NAIS:LKKYR:MIVEE, VPQAL:NAIS:LKKYR:MIVRS, VSQDL:NAIS:LKKYR:MIVKS, VPQDL:NAIS:LKKYR:MVVKS, VPTEE:NAIS:LKKYR:FLQHN, VPTGQ:NAIS:LKKYR:LEEHS, SRVHH:NAIS:LKKYR:RLEEH, TQVQL:NAIS:LKKYR:TLEDH, APTEL:SATS:LRKHR:DMVVK, APTKM:SATS:LRKHR:NMVVK, APTEL:SATS:LRKHR:EMVVK, APTKL:SATS:LRKHR:NMVVK, APTQL:SATS:LRKHR:NMVVK, APTKL:SATS:LRKHR:EGMSVVK, APTKL:SATS:LRKHR:GMVVK, APTKM:SATS:LRKHR:GMVVK, APTRL:SATS:LRKHR:DMVVK, APTKT:SATS:LRKHR:MIVVK, APTAL:SATS:LRKHR:MIVVK, APTDL:SATS:LRKHR:MIVVK, APTDL:SATS:LRKHR:MVVVK, APTEE:SATS:LRKHR:FLVVK, APTGQ:SATS:LRKHR:LEVVK, APTHH:SATS:LRKHR:RLVVK, APTQL:SATS:LRKHR:TLVVK, VPTEL:SATS:LRKHR:DMVVE, VPEKM:SATS:LRKHR:NMTVE, VPTEL:SATS:LRKHR:EMVVE, APTKL:SATS:LRKHR:NMVVR, APTQL:SATS:LRKHR:NMVVR, VPTKL:SATS:LRKHR:EGMSVAE, VPTKL:SATS:LRKHR:GMAVS, TPTKM:SATS:LRKHR:GMVVD, VPARL:SATS:LRKHR:DMVVE, VPTRL:SATS:LRKHR:DMVVE, APVKT:SATS:LRKHR:MIVEE, VPQAL:SATS:LRKHR:MIVRS, VSQDL:SATS:LRKHR:MIVKS, VPQDL:SATS:LRKHR:MVVKS, VPTEE:SATS:LRKHR:FLQHN, VPTGQ:SATS:LRKHR:LEEHS, SRVHH:SATS:LRKHR:RLEEH, TQVQL:SATS:LRKHR:TLEDH, VPTEL:SPIS:LKYHY:DMVAE, VPTKM:SPIS:LKYHY:NMVAE, VPTEL:SPIS:LKYHY:EMVAE, VPTKL:SPIS:LKYHY:NMVAE, VPTQL:SPIS:LKYHY:NMVAE, VPTKL:SPIS:LKYHY:GMVAE, VPTKM:SPIS:LKYHY:GMVAE, VPTRL:SPIS:LKYHY:DMVAE, VPTKT:SPIS:LKYHY:MIVAE, VPTAL:SPIS:LKYHY:MIVAE, VPTDL:SPIS:LKYHY:MIVAE, VPTDL:SPIS:LKYHY:MVVAE, VPTEE:SPIS:LKYHY:FLVAE, VPTGQ:SPIS:LKYHY:LEVAE, VPTHH:SPIS:LKYHY:RLVAE, VPTQL:SPIS:LKYHY:TLVAE, VPTEL:SPIS:LKYHY:DMVVE, VPEKM:SPIS:LKYHY:NMTVE, VPTEL:SPIS:LKYHY:EMVVE, APTKL:SPIS:LKYHY:NMVVR, APTQL:SPIS:LKYHY:NMVVR, APTKL:SPIS:LKYHY:NMVVK, VPTKL:SPIS:LKYHY:GMAVS, TPTKM:SPIS:LKYHY:GMVVD, VPARL:SPIS:LKYHY:DMVVE, VPTRL:SPIS:LKYHY:DMVVE, APVKT:SPIS:LKYHY:MIVEE, VPQAL:SPIS:LKYHY:MIVRS, VSQDL:SPIS:LKYHY:MIVKS, VPQDL:SPIS:LKYHY:MVVKS, VPTEE:SPIS:LKYHY:FLQHN, VPTGQ:SPIS:LKYHY:LEEHS, SRVHH:SPIS:LKYHY:RLEEH, TQVQL:SPIS:LKYHY:TLEDH, VPTEL:EPIS:KFKYE:DMAVS, VPTKM:EPIS:KFKYE:NMAVS, VPTEL:EPIS:KFKYE:EMAVS, VPTKL:EPIS:KFKYE:NMAVS, VPTQL:EPIS:KFKYE:NMAVS, VPTKL:EPIS:KFKYE:EGMSAVS, VPTKM:EPIS:KFKYE:GMAVS, VPTRL:EPIS:KFKYE:DMAVS, VPTKT:EPIS:KFKYE:MIAVS, VPTAL:EPIS:KFKYE:MIAVS, VPTDL:EPIS:KFKYE:MIAVS, VPTDL:EPIS:KFKYE:MVAVS, VPTEE:EPIS:KFKYE:FLAVS, VPTGQ:EPIS:KFKYE:LEAVS, VPTHH:EPIS:KFKYE:RLAVS, VPTQL:EPIS:KFKYE:TLAVS, VPTEL:EPIS:KFKYE:DMVVE, VPEKM:EPIS:KFKYE:NMTVE, VPTEL:EPIS:KFKYE:EMVVE, APTKL:EPIS:KFKYE:NMVVR, APTQL:EPIS:KFKYE:NMVVR, APTKL:EPIS:KFKYE:NMVVK, VPTKL:EPIS:KFKYE:EGMSVAE, TPTKM:EPIS:KFKYE:GMVVD, VPARL:EPIS:KFKYE:DMVVE, VPTRL:EPIS:KFKYE:DMVVE, APVKT:EPIS:KFKYE:MIVEE, VPQAL:EPIS:KFKYE:MIVRS, VSQDL:EPIS:KFKYE:MIVKS, VPQDL:EPIS:KFKYE:MVVKS, VPTEE:EPIS:KFKYE:FLQHN, VPTGQ:EPIS:KFKYE:LEEHS, SRVHH:EPIS:KFKYE:RLEEH, TQVQL:EPIS:KFKYE:TLEDH, TPTEL:SPIN:YGKIP:DMVVD, TPTKM:SPIN:YGKIP:NMVVD, TPTEL:SPIN:YGKIP:EMVVD, TPTKL:SPIN:YGKIP:NMVVD, TPTQL:SPIN:YGKIP:NMVVD, TPTKL:SPIN:YGKIP:EGMSVVD, TPTKL:SPIN:YGKIP:GMVVD, TPTRL:SPIN:YGKIP:DMVVD, TPTKT:SPIN:YGKIP:MIVVD, TPTAL:SPIN:YGKIP:MIVVD, TPTDL:SPIN:YGKIP:MIVVD, TPTDL:SPIN:YGKIP:MVVVD, TPTEE:SPIN:YGKIP:FLVVD, TPTGQ:SPIN:YGKIP:LEVVD, TPTHH:SPIN:YGKIP:RLVVD, TPTQL:SPIN:YGKIP:TLVVD, VPTEL:SPIN:YGKIP:DMVVE, VPEKM:SPIN:YGKIP:NMTVE, VPTEL:SPIN:YGKIP:EMVVE, APTKL:SPIN:YGKIP:NMVVR, APTQL:SPIN:YGKIP:NMVVR, APTKL:SPIN:YGKIP:NMVVK, VPTKL:SPIN:YGKIP:EGMSVAE, VPTKL:SPIN:YGKIP:GMAVS, VPARL:SPIN:YGKIP:DMVVE, VPTRL:SPIN:YGKIP:DMVVE, APVKT:SPIN:YGKIP:MIVEE, VPQAL:SPIN:YGKIP:MIVRS, VSQDL:SPIN:YGKIP:MIVKS, VPQDL:SPIN:YGKIP:MVVKS, VPTEE:SPIN:YGKIP:FLQHN, VPTGQ:SPIN:YGKIP:LEEHS, SRVHH:SPIN:YGKIP:RLEEH, TQVQL:SPIN:YGKIP:TLEDH, VPAEL:SPIS:YKQYE:DMVVE, VPAKM:SPIS:YKQYE:NMVVE, VPAEL:SPIS:YKQYE:EMVVE, VPAKL:SPIS:YKQYE:NMVVE, VPAQL:SPIS:YKQYE:NMVVE, VPAKL:SPIS:YKQYE:EGMSVVE, VPAKL:SPIS:YKQYE:GMVVE, VPAKM:SPIS:YKQYE:GMVVE, VPARL:SPIS:YKQYE:DMVVE, VPAKT:SPIS:YKQYE:MIVVE, VPAAL:SPIS:YKQYE:MIVVE, VPADL:SPIS:YKQYE:MIVVE, VPADL:SPIS:YKQYE:MVVVE, VPAEE:SPIS:YKQYE:FLVVE, VPAGQ:SPIS:YKQYE:LEVVE, VPAHH:SPIS:YKQYE:RLVVE, VPAQL:SPIS:YKQYE:TLVVE, VPTEL:SPIS:YKQYE:DMVVE, VPEKM:SPIS:YKQYE:NMTVE, VPTEL:SPIS:YKQYE:EMVVE, APTKL:SPIS:YKQYE:NMVVR, APTQL:SPIS:YKQYE:NMVVR, APTKL:SPIS:YKQYE:NMVVK, VPTKL:SPIS:YKQYE:EGMSVAE, VPTKL:SPIS:YKQYE:GMAVS, TPTKM:SPIS:YKQYE:GMVVD, VPTRL:SPIS:YKQYE:DMVVE, APVKT:SPIS:YKQYE:MIVEE, VPQAL:SPIS:YKQYE:MIVRS, VSQDL:SPIS:YKQYE:MIVKS, VPQDL:SPIS:YKQYE:MVVKS, VPTEE:SPIS:YKQYE:FLQHN, VPTGQ:SPIS:YKQYE:LEEHS, SRVHH:SPIS:YKQYE:RLEEH, TQVQL:SPIS:YKQYE:TLEDH, VPTKM:SPIS:YKQYE:NMVVE, VPTKL:SPIS:YKQYE:NMVVE, VPTQL:SPIS:YKQYE:NMVVE, VPTKL:SPIS:YKQYE:EGMSVVE, VPTKL:SPIS:YKQYE:GMVVE, VPTKM:SPIS:YKQYE:GMVVE, VPTKT:SPIS:YKQYE:MIVVE, VPTAL:SPIS:YKQYE:MIVVE, VPTDL:SPIS:YKQYE:MIVVE, VPTDL:SPIS:YKQYE:MVVVE, VPTEE:SPIS:YKQYE:FLVVE, VPTGQ:SPIS:YKQYE:LEVVE, VPTHH:SPIS:YKQYE:RLVVE, VPTQL:SPIS:YKQYE:TLVVE, APVEL:KPLS:DHHKD:DMVEE, APVKM:KPLS:DHHKD:NMVEE, APVEL:KPLS:DHHKD:EMVEE, APVKL:KPLS:DHHKD:NMVEE, APVQL:KPLS:DHHKD:NMVEE, APVKL:KPLS:DHHKD:EGMSVEE, APVKL:KPLS:DHHKD:GMVEE, APVKM:KPLS:DHHKD:GMVEE, APVRL:KPLS:DHHKD:DMVEE, APVAL:KPLS:DHHKD:MIVEE, APVDL:KPLS:DHHKD:MIVEE, APVDL:KPLS:DHHKD:MVVEE, APVEE:KPLS:DHHKD:FLVEE, APVGQ:KPLS:DHHKD:LEVEE, APVHH:KPLS:DHHKD:RLVEE, APVQL:KPLS:DHHKD:TLVEE, VPTEL:KPLS:DHHKD:DMVVE, VPEKM:KPLS:DHHKD:NMTVE, VPTEL:KPLS:DHHKD:EMVVE, APTKL:KPLS:DHHKD:NMVVR, APTQL:KPLS:DHHKD:NMVVR, APTKL:KPLS:DHHKD:NMVVK, VPTKL:KPLS:DHHKD:EGMSVAE, VPTKL:KPLS:DHHKD:GMAVS, TPTKM:KPLS:DHHKD:GMVVD, VPARL:KPLS:DHHKD:DMVVE, VPTRL:KPLS:DHHKD:DMVVE, VPQAL:KPLS:DHHKD:MIVRS, VSQDL:KPLS:DHHKD:MIVKS, VPQDL:KPLS:DHHKD:MVVKS, VPTEE:KPLS:DHHKD:FLQHN, VPTGQ:KPLS:DHHKD:LEEHS, SRVHH:KPLS:DHHKD:RLEEH, TQVQL:KPLS:DHHKD:TLEDH, VPQEL:EPLP:EQLSN:DMVRS, VPQKM:EPLP:EQLSN:NMVRS, VPQEL:EPLP:EQLSN:EMVRS, VPQKL:EPLP:EQLSN:NMVRS, VPQQL:EPLP:EQLSN:NMVRS, VPQKL:EPLP:EQLSN:EGMSVRS, VPQKL:EPLP:EQLSN:GMVRS, VPQKM:EPLP:EQLSN:GMVRS, VPQRL:EPLP:EQLSN:DMVRS, VPQKT:EPLP:EQLSN:MIVRS, VPQDL:EPLP:EQLSN:MIVRS, VPQDL:EPLP:EQLSN:MVVRS, VPQEE:EPLP:EQLSN:FLVRS, VPQGQ:EPLP:EQLSN:LEVRS, VPQHH:EPLP:EQLSN:RLVRS, VPQQL:EPLP:EQLSN:TLVRS, VPTEL:EPLP:EQLSN:DMVVE, VPEKM:EPLP:EQLSN:NMTVE, VPTEL:EPLP:EQLSN:EMVVE, APTKL:EPLP:EQLSN:NMVVR, APTQL:EPLP:EQLSN:NMVVR, APTKL:EPLP:EQLSN:NMVVK, VPTKL:EPLP:EQLSN:EGMSVAE, VPTKL:EPLP:EQLSN:GMAVS, TPTKM:EPLP:EQLSN:GMVVD, VPARL:EPLP:EQLSN:DMVVE, VPTRL:EPLP:EQLSN:DMVVE, APVKT:EPLP:EQLSN:MIVEE, VSQDL:EPLP:EQLSN:MIVKS, VPQDL:EPLP:EQLSN:MVVKS, VPTEE:EPLP:EQLSN:FLQHN, VPTGQ:EPLP:EQLSN:LEEHS, SRVHH:EPLP:EQLSN:RLEEH, TQVQL:EPLP:EQLSN:TLEDH, VSQEL:EPLT:EQLSN:DMVKS, VSQKM:EPLT:EQLSN:NMVKS, VSQEL:EPLT:EQLSN:EMVKS, VSQKL:EPLT:EQLSN:NMVKS, VSQQL:EPLT:EQLSN:NMVKS, VSQKL:EPLT:EQLSN:EGMSVKS, VSQKL:EPLT:EQLSN:GMVKS, VSQKM:EPLT:EQLSN:GMVKS, VSQRL:EPLT:EQLSN:DMVKS, VSQKT:EPLT:EQLSN:MIVKS, VSQAL:EPLT:EQLSN:MIVKS, VSQDL:EPLT:EQLSN:MVVKS, VSQEE:EPLT:EQLSN:FLVKS, VSQGQ:EPLT:EQLSN:LEVKS, VSQHH:EPLT:EQLSN:RLVKS, VSQQL:EPLT:EQLSN:TLVKS, VPTEL:EPLT:EQLSN:DMVVE, VPEKM:EPLT:EQLSN:NMTVE, VPTEL:EPLT:EQLSN:EMVVE, APTKL:EPLT:EQLSN:NMVVR, APTQL:EPLT:EQLSN:NMVVR, APTKL:EPLT:EQLSN:NMVVK, VPTKL:EPLT:EQLSN:EGMSVAE, VPTKL:EPLT:EQLSN:GMAVS, TPTKM:EPLT:EQLSN:GMVVD, VPARL:EPLT:EQLSN:DMVVE, VPTRL:EPLT:EQLSN:DMVVE, APVKT:EPLT:EQLSN:MIVEE, VPQAL:EPLT:EQLSN:MIVRS, VPQDL:EPLT:EQLSN:MVVKS, VPTEE:EPLT:EQLSN:FLQHN, VPTGQ:EPLT:EQLSN:LEEHS, SRVHH:EPLT:EQLSN:RLEEH, TQVQL:EPLT:EQLSN:TLEDH, VPQEL:EPLT:EQLSN:DMVKS, VPQKM:EPLT:EQLSN:NMVKS, VPQEL:EPLT:EQLSN:EMVKS, VPQKL:EPLT:EQLSN:NMVKS, VPQQL:EPLT:EQLSN:NMVKS, VPQKL:EPLT:EQLSN:EGMSVKS, VPQKL:EPLT:EQLSN:GMVKS, VPQKM:EPLT:EQLSN:GMVKS, VPQRL:EPLT:EQLSN:DMVKS, VPQKT:EPLT:EQLSN:MIVKS, VPQAL:EPLT:EQLSN:MIVKS, VPQDL:EPLT:EQLSN:MIVKS, VPQEE:EPLT:EQLSN:FLVKS, VPQGQ:EPLT:EQLSN:LEVKS, VPQHH:EPLT:EQLSN:RLVKS, VPQQL:EPLT:EQLSN:TLVKS, VSQDL:EPLT:EQLSN:MIVKS, VPTEL:SNIT:IGEMS:DMQHN, VPTKM:SNIT:IGEMS:NMQHN, VPTEL:SNIT:IGEMS:EMQHN, VPTKL:SNIT:IGEMS:NMQHN, VPTQL:SNIT:IGEMS:NMQHN, VPTKL:SNIT:IGEMS:EGMSQHN, VPTKL:SNIT:IGEMS:GMQHN, VPTKM:SNIT:IGEMS:GMQHN, VPTRL:SNIT:IGEMS:DMQHN, VPTKT:SNIT:IGEMS:MIQHN, VPTAL:SNIT:IGEMS:MIQHN, VPTDL:SNIT:IGEMS:MIQHN, VPTDL:SNIT:IGEMS:MVQHN, VPTGQ:SNIT:IGEMS:LEQHN, VPTEE:SNIT:IGEMS:FLQHN, VPTHH:SNIT:IGEMS:RLQHN, VPTQL:SNIT:IGEMS:TLQHN, VPTEL:SNIT:IGEMS:DMVVE, VPEKM:SNIT:IGEMS:NMTVE, VPTEL:SNIT:IGEMS:EMVVE, APTKL:SNIT:IGEMS:NMVVR, APTQL:SNIT:IGEMS:NMVVR, APTKL:SNIT:IGEMS:NMVVK, VPTKL:SNIT:IGEMS:EGMSVAE, VPTKL:SNIT:IGEMS:GMAVS, TPTKM:SNIT:IGEMS:GMVVD, VPARL:SNIT:IGEMS:DMVVE, VPTRL:SNIT:IGEMS:DMVVE, APVKT:SNIT:IGEMS:MIVEE, VPQAL:SNIT:IGEMS:MIVRS, VSQDL:SNIT:IGEMS:MIVKS, VPQDL:SNIT:IGEMS:MVVKS, VPTGQ:SNIT:IGEMS:LEEHS, SRVHH:SNIT:IGEMS:RLEEH, TQVQL:SNIT:IGEMS:TLEDH, VPTEL:SNIT:LGEMS:DMEHS, VPTKM:SNIT:LGEMS:NMEHS, VPTEL:SNIT:LGEMS:EMEHS, VPTKL:SNIT:LGEMS:NMEHS, VPTQL:SNIT:LGEMS:NMEHS, VPTKL:SNIT:LGEMS:EGMSEHS, VPTKL:SNIT:LGEMS:GMEHS, VPTKM:SNIT:LGEMS:GMEHS, VPTRL:SNIT:LGEMS:DMEHS, VPTKT:SNIT:LGEMS:MIEHS, VPTAL:SNIT:LGEMS:MIEHS, VPTDL:SNIT:LGEMS:MIEHS, VPTDL:SNIT:LGEMS:MVEHS, VPTEE:SNIT:LGEMS:FLEHS, VPTHH:SNIT:LGEMS:RLEHS, VPTQL:SNIT:LGEMS:TLEHS, VPTEL:SNIT:LGEMS:DMVVE, VPEKM:SNIT:LGEMS:NMTVE, VPTEL:SNIT:LGEMS:EMVVE, APTKL:SNIT:LGEMS:NMVVR, APTQL:SNIT:LGEMS:NMVVR, APTKL:SNIT:LGEMS:NMVVK, VPTKL:SNIT:LGEMS:EGMSVAE, VPTKL:SNIT:LGEMS:GMAVS, TPTKM:SNIT:LGEMS:GMVVD, VPARL:SNIT:LGEMS:DMVVE, VPTRL:SNIT:LGEMS:DMVVE, APVKT:SNIT:LGEMS:MIVEE, VPQAL:SNIT:LGEMS:MIVRS, VSQDL:SNIT:LGEMS:MIVKS, VPQDL:SNIT:LGEMS:MVVKS, VPTEE:SNIT:LGEMS:FLQHN, SRVHH:SNIT:LGEMS:RLEEH, TQVQL:SNIT:LGEMS:TLEDH, SRVEL:RSVK:KEVQV:DMEEH, SRVKM:RSVK:KEVQV:NMEEH, SRVEL:RSVK:KEVQV:EMEEH, SRVKL:RSVK:KEVQV:NMEEH, SRVQL:RSVK:KEVQV:NMEEH, SRVKL:RSVK:KEVQV:EGMSEEH, SRVKL:RSVK:KEVQV:GMEEH, SRVKM:RSVK:KEVQV:GMEEH, SRVRL:RSVK:KEVQV:DMEEH, SRVKT:RSVK:KEVQV:MIEEH, SRVAL:RSVK:KEVQV:MIEEH, SRVDL:RSVK:KEVQV:MIEEH, SRVDL:RSVK:KEVQV:MVEEH, SRVEE:RSVK:KEVQV:FLEEH, SRVGQ:RSVK:KEVQV:LEEEH, SRVQL:RSVK:KEVQV:TLEEH, VPTEL:RSVK:KEVQV:DMVVE, VPEKM:RSVK:KEVQV:NMTVE, VPTEL:RSVK:KEVQV:EMVVE, APTKL:RSVK:KEVQV:NMVVR, APTQL:RSVK:KEVQV:NMVVR, APTKL:RSVK:KEVQV:NMVVK, VPTKL:RSVK:KEVQV:EGMSVAE, VPTKL:RSVK:KEVQV:GMAVS, TPTKM:RSVK:KEVQV:GMVVD, VPARL:RSVK:KEVQV:DMVVE, VPTRL:RSVK:KEVQV:DMVVE, APVKT:RSVK:KEVQV:MIVEE, VPQAL:RSVK:KEVQV:MIVRS, VSQDL:RSVK:KEVQV:MIVKS, VPQDL:RSVK:KEVQV:MVVKS, VPTEE:RSVK:KEVQV:FLQHN, VPTGQ:RSVK:KEVQV:LEEHS, TQVQL:RSVK:KEVQV:TLEDH, TQVEL:RPVQ:KKATV:DMEDH, TQVKM:RPVQ:KKATV:NMEDH, TQVEL:RPVQ:KKATV:EMEDH, TQVKL:RPVQ:KKATV:NMEDH, TQVQL:RPVQ:KKATV:NMEDH, TQVKL:RPVQ:KKATV:EGMSEDH, TQVKL:RPVQ:KKATV:GMEDH, TQVKM:RPVQ:KKATV:GMEDH, TQVRL:RPVQ:KKATV:DMEDH, TQVKT:RPVQ:KKATV:MIEDH, TQVAL:RPVQ:KKATV:MIEDH, TQVDL:RPVQ:KKATV:MIEDH, TQVDL:RPVQ:KKATV:MVEDH, TQVEE:RPVQ:KKATV:FLEDH, TQVGQ:RPVQ:KKATV:LEEDH, TQVHH:RPVQ:KKATV:RLEDH, VPTEL:RPVQ:KKATV:DMVVE, VPEKM:RPVQ:KKATV:NMTVE, VPTEL:RPVQ:KKATV:EMVVE, APTKL:RPVQ:KKATV:NMVVR, APTQL:RPVQ:KKATV:NMVVR, APTKL:RPVQ:KKATV:NMVVK, VPTKL:RPVQ:KKATV:EGMSVAE, VPTKL:RPVQ:KKATV:GMAVS, TPTKM:RPVQ:KKATV:GMVVD, VPARL:RPVQ:KKATV:DMVVE, VPTRL:RPVQ:KKATV:DMVVE, APVKT:RPVQ:KKATV:MIVEE, VPQAL:RPVQ:KKATV:MIVRS, VSQDL:RPVQ:KKATV:MIVKS, VPQDL:RPVQ:KKATV:MVVKS, VPTEE:RPVQ:KKATV:FLQHN, VPTGQ:RPVQ:KKATV:LEEHS and SRVHH:RPVQ:KKATV:RLEEH. More particularly, the quadruplet PEP5:PEP1:PEP2:PEP6 is selected from the group consisting of VPTKM:SAIS:LKNYQ:NMVVE, VPTKL:SAIS:LKNYQ:NMVVE, VPTQL:SAIS:LKNYQ:NMVVE, VPTKL:SAIS:LKNYQ:EGMSVVE, VPTKL:SAIS:LKNYQ:GMVVE, VPTKM:SAIS:LKNYQ:GMVVE, VPTRL:SAIS:LKNYQ:DMVVE, VPTKT:SAIS:LKNYQ:MIVVE, VPTAL:SAIS:LKNYQ:MIVVE, VPTDL:SAIS:LKNYQ:MIVVE, VPTDL:SAIS:LKNYQ:MVVVE, VPEKM:SAIS:LKNYQ:NMTVE, APTKL:SAIS:LKNYQ:NMVVR, APTQL:SAIS:LKNYQ:NMVVR, APTKL:SAIS:LKNYQ:NMVVK, VPTKL:SAIS:LKNYQ:EGMSVAE, VPTKL:SAIS:LKNYQ:GMAVS, TPTKM:SAIS:LKNYQ:GMVVD, VPARL:SAIS:LKNYQ:DMVVE, APVKT:SAIS:LKNYQ:MIVEE, VPQAL:SAIS:LKNYQ:MIVRS, VSQDL:SAIS:LKNYQ:MIVKS, VPQDL:SAIS:LKNYQ:MVVKS, VPTEE:SAIS:LKNYQ:FLQHN, VPTGQ:SAIS:LKNYQ:LEEHS, SRVHH:SAIS:LKNYQ:RLEEH, TQVQL:SAIS:LKNYQ:TLEDH, VPEEL:SSLS:LKVYP:DMTVE, VPEEL:SSLS:LKVYP:EMTVE, VPEKL:SSLS:LKVYP:NMTVE, VPEQL:SSLS:LKVYP:NMTVE, VPEKL:SSLS:LKVYP:EGMSTVE, VPEKL:SSLS:LKVYP:GMTVE, VPEKM:SSLS:LKVYP:GMTVE, VPERL:SSLS:LKVYP:DMTVE, VPEKT:SSLS:LKVYP:MITVE, VPEAL:SSLS:LKVYP:MITVE, VPEDL:SSLS:LKVYP:MITVE, VPEDL:SSLS:LKVYP:MVTVE, VPTEL:SSLS:LKVYP:DMVVE, VPTEL:SSLS:LKVYP:EMVVE, APTKL:SSLS:LKVYP:NMVVR, APTQL:SSLS:LKVYP:NMVVR, APTKL:SSLS:LKVYP:NMVVK, VPTKL:SSLS:LKVYP:EGMSVAE, VPTKL:SSLS:LKVYP:GMAVS, TPTKM:SSLS:LKVYP:GMVVD, VPARL:SSLS:LKVYP:DMVVE, VPTRL:SSLS:LKVYP:DMVVE, APVKT:SSLS:LKVYP:MIVEE, VPQAL:SSLS:LKVYP:MIVRS, VSQDL:SSLS:LKVYP:MIVKS, VPQDL:SSLS:LKVYP:MVVKS, VPTEE:SSLS:LKVYP:FLQHN, VPTGQ:SSLS:LKVYP:LEEHS, SRVHH:SSLS:LKVYP:RLEEH, TQVQL:SSLS:LKVYP:TLEDH, APTEL:NAIS:LKKYR:DMVVR, APTKM:NAIS:LKKYR:NMVVR, APTEL:NAIS:LKKYR:EMVVR, APTKL:NAIS:LKKYR:NMVVR, APTKL:NAIS:LKKYR:EGMSVVR, APTKL:NAIS:LKKYR:GMVVR, APTKM:NAIS:LKKYR:GMVVR, APTRL:NAIS:LKKYR:DMVVR, APTKT:NAIS:LKKYR:MIVVR, APTAL:NAIS:LKKYR:MIVVR, APTDL:NAIS:LKKYR:MIVVR, APTDL:NAIS:LKKYR:MVVVR, VPTEL:NAIS:LKKYR:DMVVE, VPEKM:NAIS:LKKYR:NMTVE, VPTEL:NAIS:LKKYR:EMVVE, APTKL:NAIS:LKKYR:NMVVK, VPTKL:NAIS:LKKYR:EGMSVAE, VPTKL:NAIS:LKKYR:GMAVS, TPTKM:NAIS:LKKYR:GMVVD, VPARL:NAIS:LKKYR:DMVVE, VPTRL:NAIS:LKKYR:DMVVE, APVKT:NAIS:LKKYR:MIVEE, VPQAL:NAIS:LKKYR:MIVRS, VSQDL:NAIS:LKKYR:MIVKS, VPQDL:NAIS:LKKYR:MVVKS, VPTEE:NAIS:LKKYR:FLQHN, VPTGQ:NAIS:LKKYR:LEEHS, SRVHH:NAIS:LKKYR:RLEEH, TQVQL:NAIS:LKKYR:TLEDH, APTEL:SATS:LRKHR:DMVVK, APTKM:SATS:LRKHR:NMVVK, APTEL:SATS:LRKHR:EMVVK, APTKL:SATS:LRKHR:NMVVK, APTQL:SATS:LRKHR:NMVVK, APTKL:SATS:LRKHR:EGMSVVK, APTKL:SATS:LRKHR:GMVVK, APTKM:SATS:LRKHR:GMVVK, APTRL:SATS:LRKHR:DMVVK, APTKT:SATS:LRKHR:MIVVK, APTAL:SATS:LRKHR:MIVVK, APTDL:SATS:LRKHR:MIVVK, APTDL:SATS:LRKHR:MVVVK, VPTEL:SATS:LRKHR:DMVVE, VPEKM:SATS:LRKHR:NMTVE, VPTEL:SATS:LRKHR:EMVVE, APTKL:SATS:LRKHR:NMVVR, APTQL:SATS:LRKHR:NMVVR, VPTKL:SATS:LRKHR:EGMSVAE, VPTKL:SATS:LRKHR:GMAVS, TPTKM:SATS:LRKHR:GMVVD, VPARL:SATS:LRKHR:DMVVE, VPTRL:SATS:LRKHR:DMVVE, APVKT:SATS:LRKHR:MIVEE, VPQAL:SATS:LRKHR:MIVRS, VSQDL:SATS:LRKHR:MIVKS, VPQDL:SATS:LRKHR:MVVKS, VPTEE:SATS:LRKHR:FLQHN, VPTGQ:SATS:LRKHR:LEEHS, SRVHH:SATS:LRKHR:RLEEH, TQVQL:SATS:LRKHR:TLEDH, VPTEL:SPIS:LKYHY:DMVAE, VPTKM:SPIS:LKYHY:NMVAE, VPTEL:SPIS:LKYHY:EMVAE, VPTKL:SPIS:LKYHY:NMVAE, VPTQL:SPIS:LKYHY:NMVAE, VPTKL:SPIS:LKYHY:GMVAE, VPTKM:SPIS:LKYHY:GMVAE, VPTRL:SPIS:LKYHY:DMVAE, VPTKT:SPIS:LKYHY:MIVAE, VPTAL:SPIS:LKYHY:MIVAE, VPTDL:SPIS:LKYHY:MIVAE, VPTDL:SPIS:LKYHY:MVVAE, VPTEL:SPIS:LKYHY:DMVVE, VPEKM:SPIS:LKYHY:NMTVE, VPTEL:SPIS:LKYHY:EMVVE, APTKL:SPIS:LKYHY:NMVVR, APTQL:SPIS:LKYHY:NMVVR, APTKL:SPIS:LKYHY:NMVVK, VPTKL:SPIS:LKYHY:GMAVS, TPTKM:SPIS:LKYHY:GMVVD, VPARL:SPIS:LKYHY:DMVVE, VPTRL:SPIS:LKYHY:DMVVE, APVKT:SPIS:LKYHY:MIVEE, VPQAL:SPIS:LKYHY:MIVRS, VSQDL:SPIS:LKYHY:MIVKS, VPQDL:SPIS:LKYHY:MVVKS, VPTEE:SPIS:LKYHY:FLQHN, VPTGQ:SPIS:LKYHY:LEEHS, SRVHH:SPIS:LKYHY:RLEEH, TQVQL:SPIS:LKYHY:TLEDH, VPTEL:EPIS:KFKYE:DMAVS, VPTKM:EPIS:KFKYE:NMAVS, VPTEL:EPIS:KFKYE:EMAVS, VPTKL:EPIS:KFKYE:NMAVS, VPTQL:EPIS:KFKYE:NMAVS, VPTKL:EPIS:KFKYE:EGMSAVS, VPTKM:EPIS:KFKYE:GMAVS, VPTRL:EPIS:KFKYE:DMAVS, VPTKT:EPIS:KFKYE:MIAVS, VPTAL:EPIS:KFKYE:MIAVS, VPTDL:EPIS:KFKYE:MIAVS, VPTDL:EPIS:KFKYE:MVAVS, VPTEL:EPIS:KFKYE:DMVVE, VPEKM:EPIS:KFKYE:NMTVE, VPTEL:EPIS:KFKYE:EMVVE, APTKL:EPIS:KFKYE:NMVVR, APTQL:EPIS:KFKYE:NMVVR, APTKL:EPIS:KFKYE:NMVVK, VPTKL:EPIS:KFKYE:EGMSVAE, TPTKM:EPIS:KFKYE:GMVVD, VPARL:EPIS:KFKYE:DMVVE, VPTRL:EPIS:KFKYE:DMVVE, APVKT:EPIS:KFKYE:MIVEE, VPQAL:EPIS:KFKYE:MIVRS, VSQDL:EPIS:KFKYE:MIVKS, VPQDL:EPIS:KFKYE:MVVKS, VPTEE:EPIS:KFKYE:FLQHN, VPTGQ:EPIS:KFKYE:LEEHS, SRVHH:EPIS:KFKYE:RLEEH, TQVQL:EPIS:KFKYE:TLEDH, TPTEL:SPIN:YGKIP:DMVVD, TPTKM:SPIN:YGKIP:NMVVD, TPTEL:SPIN:YGKIP:EMVVD, TPTKL:SPIN:YGKIP:NMVVD, TPTQL:SPIN:YGKIP:NMVVD, TPTKL:SPIN:YGKIP:EGMSVVD, TPTKL:SPIN:YGKIP:GMVVD, TPTRL:SPIN:YGKIP:DMVVD, TPTKT:SPIN:YGKIP:MIVVD, TPTAL:SPIN:YGKIP:MIVVD, TPTDL:SPIN:YGKIP:MIVVD, TPTDL:SPIN:YGKIP:MVVVD, VPTEL:SPIN:YGKIP:DMVVE, VPEKM:SPIN:YGKIP:NMTVE, VPTEL:SPIN:YGKIP:EMVVE, APTKL:SPIN:YGKIP:NMVVR, APTQL:SPIN:YGKIP:NMVVR, APTKL:SPIN:YGKIP:NMVVK, VPTKL:SPIN:YGKIP:EGMSVAE, VPTKL:SPIN:YGKIP:GMAVS, VPARL:SPIN:YGKIP:DMVVE, VPTRL:SPIN:YGKIP:DMVVE, APVKT:SPIN:YGKIP:MIVEE, VPQAL:SPIN:YGKIP:MIVRS, VSQDL:SPIN:YGKIP:MIVKS, VPQDL:SPIN:YGKIP:MVVKS, VPTEE:SPIN:YGKIP:FLQHN, VPTGQ:SPIN:YGKIP:LEEHS, SRVHH:SPIN:YGKIP:RLEEH, TQVQL:SPIN:YGKIP:TLEDH, VPAEL:SPIS:YKQYE:DMVVE, VPAKM:SPIS:YKQYE:NMVVE, VPAEL:SPIS:YKQYE:EMVVE, VPAKL:SPIS:YKQYE:NMVVE, VPAQL:SPIS:YKQYE:NMVVE, VPAKL:SPIS:YKQYE:EGMSVVE, VPAKL:SPIS:YKQYE:GMVVE, VPAKM:SPIS:YKQYE:GMVVE, VPARL:SPIS:YKQYE:DMVVE, VPAKT:SPIS:YKQYE:MIVVE, VPAAL:SPIS:YKQYE:MIVVE, VPADL:SPIS:YKQYE:MIVVE, VPADL:SPIS:YKQYE:MVVVE, VPTEL:SPIS:YKQYE:DMVVE, VPEKM:SPIS:YKQYE:NMTVE, VPTEL:SPIS:YKQYE:EMVVE, APTKL:SPIS:YKQYE:NMVVR, APTQL:SPIS:YKQYE:NMVVR, APTKL:SPIS:YKQYE:NMVVK, VPTKL:SPIS:YKQYE:EGMSVAE, VPTKL:SPIS:YKQYE:GMAVS, TPTKM:SPIS:YKQYE:GMVVD, VPTRL:SPIS:YKQYE:DMVVE, APVKT:SPIS:YKQYE:MIVEE, VPQAL:SPIS:YKQYE:MIVRS, VSQDL:SPIS:YKQYE:MIVKS, VPQDL:SPIS:YKQYE:MVVKS, VPTEE:SPIS:YKQYE:FLQHN, VPTGQ:SPIS:YKQYE:LEEHS, SRVHH:SPIS:YKQYE:RLEEH, TQVQL:SPIS:YKQYE:TLEDH, VPTKM:SPIS:YKQYE:NMVVE, VPTKL:SPIS:YKQYE:NMVVE, VPTQL:SPIS:YKQYE:NMVVE, VPTKL:SPIS:YKQYE:EGMSVVE, VPTKL:SPIS:YKQYE:GMVVE, VPTKM:SPIS:YKQYE:GMVVE, VPTKT:SPIS:YKQYE:MIVVE, VPTAL:SPIS:YKQYE:MIVVE, VPTDL:SPIS:YKQYE:MIVVE, VPTDL:SPIS:YKQYE:MVVVE, APVEL:KPLS:DHHKD:DMVEE, APVKM:KPLS:DHHKD:NMVEE, APVEL:KPLS:DHHKD:EMVEE, APVKL:KPLS:DHHKD:NMVEE, APVQL:KPLS:DHHKD:NMVEE, APVKL:KPLS:DHHKD:EGMSVEE, APVKL:KPLS:DHHKD:GMVEE, APVKM:KPLS:DHHKD:GMVEE, APVRL:KPLS:DHHKD:DMVEE, APVAL:KPLS:DHHKD:MIVEE, APVDL:KPLS:DHHKD:MIVEE, APVDL:KPLS:DHHKD:MVVEE, VPTEL:KPLS:DHHKD:DMVVE, VPEKM:KPLS:DHHKD:NMTVE, VPTEL:KPLS:DHHKD:EMVVE, APTKL:KPLS:DHHKD:NMVVR, APTQL:KPLS:DHHKD:NMVVR, APTKL:KPLS:DHHKD:NMVVK, VPTKL:KPLS:DHHKD:EGMSVAE, VPTKL:KPLS:DHHKD:GMAVS, TPTKM:KPLS:DHHKD:GMVVD, VPARL:KPLS:DHHKD:DMVVE, VPTRL:KPLS:DHHKD:DMVVE, VPQAL:KPLS:DHHKD:MIVRS, VSQDL:KPLS:DHHKD:MIVKS, VPQDL:KPLS:DHHKD:MVVKS, VPTEE:KPLS:DHHKD:FLQHN, VPTGQ:KPLS:DHHKD:LEEHS, SRVHH:KPLS:DHHKD:RLEEH, TQVQL:KPLS:DHHKD:TLEDH, VPQEL:EPLP:EQLSN:DMVRS, VPQKM:EPLP:EQLSN:NMVRS, VPQEL:EPLP:EQLSN:EMVRS, VPQKL:EPLP:EQLSN:NMVRS, VPQQL:EPLP:EQLSN:NMVRS, VPQKL:EPLP:EQLSN:EGMSVRS, VPQKL:EPLP:EQLSN:GMVRS, VPQKM:EPLP:EQLSN:GMVRS, VPQRL:EPLP:EQLSN:DMVRS, VPQKT:EPLP:EQLSN:MIVRS, VPQDL:EPLP:EQLSN:MIVRS, VPQDL:EPLP:EQLSN:MVVRS, VPTEL:EPLP:EQLSN:DMVVE, VPEKM:EPLP:EQLSN:NMTVE, VPTEL:EPLP:EQLSN:EMVVE, APTKL:EPLP:EQLSN:NMVVR, APTQL:EPLP:EQLSN:NMVVR, APTKL:EPLP:EQLSN:NMVVK, VPTKL:EPLP:EQLSN:EGMSVAE, VPTKL:EPLP:EQLSN:GMAVS, TPTKM:EPLP:EQLSN:GMVVD, VPARL:EPLP:EQLSN:DMVVE, VPTRL:EPLP:EQLSN:DMVVE, APVKT:EPLP:EQLSN:MIVEE, VSQDL:EPLP:EQLSN:MIVKS, VPQDL:EPLP:EQLSN:MVVKS, VPTEE:EPLP:EQLSN:FLQHN, VPTGQ:EPLP:EQLSN:LEEHS, SRVHH:EPLP:EQLSN:RLEEH, TQVQL:EPLP:EQLSN:TLEDH, VSQEL:EPLT:EQLSN:DMVKS, VSQKM:EPLT:EQLSN:NMVKS, VSQEL:EPLT:EQLSN:EMVKS, VSQKL:EPLT:EQLSN:NMVKS, VSQQL:EPLT:EQLSN:NMVKS, VSQKL:EPLT:EQLSN:EGMSVKS, VSQKL:EPLT:EQLSN:GMVKS, VSQKM:EPLT:EQLSN:GMVKS, VSQRL:EPLT:EQLSN:DMVKS, VSQKT:EPLT:EQLSN:MIVKS, VSQAL:EPLT:EQLSN:MIVKS, VSQDL:EPLT:EQLSN:MVVKS, VPTEL:EPLT:EQLSN:DMVVE, VPEKM:EPLT:EQLSN:NMTVE, VPTEL:EPLT:EQLSN:EMVVE, APTKL:EPLT:EQLSN:NMVVR, APTQL:EPLT:EQLSN:NMVVR, APTKL:EPLT:EQLSN:NMVVK, VPTKL:EPLT:EQLSN:EGMSVAE, VPTKL:EPLT:EQLSN:GMAVS, TPTKM:EPLT:EQLSN:GMVVD, VPARL:EPLT:EQLSN:DMVVE, VPTRL:EPLT:EQLSN:DMVVE, APVKT:EPLT:EQLSN:MIVEE, VPQAL:EPLT:EQLSN:MIVRS, VPTEE:EPLT:EQLSN:FLQHN, VPTGQ:EPLT:EQLSN:LEEHS, SRVHH:EPLT:EQLSN:RLEEH, TQVQL:EPLT:EQLSN:TLEDH, VPQEL:EPLT:EQLSN:DMVKS, VPQKM:EPLT:EQLSN:NMVKS, VPQEL:EPLT:EQLSN:EMVKS, VPQKL:EPLT:EQLSN:NMVKS, VPQQL:EPLT:EQLSN:NMVKS, VPQKL:EPLT:EQLSN:EGMSVKS, VPQKL:EPLT:EQLSN:GMVKS, VPQKM:EPLT:EQLSN:GMVKS, VPQRL:EPLT:EQLSN:DMVKS, VPQKT:EPLT:EQLSN:MIVKS, VPQAL:EPLT:EQLSN:MIVKS, VPQDL:EPLT:EQLSN:MIVKS, VPTGQ:SNIT:IGEMS:LEQHN, VPTEL:SNIT:IGEMS:DMVVE, VPEKM:SNIT:IGEMS:NMTVE, VPTEL:SNIT:IGEMS:EMVVE, APTKL:SNIT:IGEMS:NMVVR, APTQL:SNIT:IGEMS:NMVVR, APTKL:SNIT:IGEMS:NMVVK, VPTKL:SNIT:IGEMS:EGMSVAE, VPTKL:SNIT:IGEMS:GMAVS, TPTKM:SNIT:IGEMS:GMVVD, VPARL:SNIT:IGEMS:DMVVE, VPTRL:SNIT:IGEMS:DMVVE, APVKT:SNIT:IGEMS:MIVEE, VPQAL:SNIT:IGEMS:MIVRS, VSQDL:SNIT:IGEMS:MIVKS, VPQDL:SNIT:IGEMS:MVVKS, VPTGQ:SNIT:IGEMS:LEEHS, SRVHH:SNIT:IGEMS:RLEEH, TQVQL:SNIT:IGEMS:TLEDH, VPTEE:SNIT:LGEMS:FLEHS, VPTEL:SNIT:LGEMS:DMVVE, VPEKM:SNIT:LGEMS:NMTVE, VPTEL:SNIT:LGEMS:EMVVE, APTKL:SNIT:LGEMS:NMVVR, APTQL:SNIT:LGEMS:NMVVR, APTKL:SNIT:LGEMS:NMVVK, VPTKL:SNIT:LGEMS:EGMSVAE, VPTKL:SNIT:LGEMS:GMAVS, TPTKM:SNIT:LGEMS:GMVVD, VPARL:SNIT:LGEMS:DMVVE, VPTRL:SNIT:LGEMS:DMVVE, APVKT:SNIT:LGEMS:MIVEE, VPQAL:SNIT:LGEMS:MIVRS, VSQDL:SNIT:LGEMS:MIVKS, VPQDL:SNIT:LGEMS:MVVKS, VPTEE:SNIT:LGEMS:FLQHN, SRVHH:SNIT:LGEMS:RLEEH, TQVQL:SNIT:LGEMS:TLEDH, SRVQL:RSVK:KEVQV:TLEEH, VPTEL:RSVK:KEVQV:DMVVE, VPEKM:RSVK:KEVQV:NMTVE, VPTEL:RSVK:KEVQV:EMVVE, APTKL:RSVK:KEVQV:NMVVR, APTQL:RSVK:KEVQV:NMVVR, APTKL:RSVK:KEVQV:NMVVK, VPTKL:RSVK:KEVQV:EGMSVAE, VPTKL:RSVK:KEVQV:GMAVS, TPTKM:RSVK:KEVQV:GMVVD, VPARL:RSVK:KEVQV:DMVVE, VPTRL:RSVK:KEVQV:DMVVE, APVKT:RSVK:KEVQV:MIVEE, VPQAL:RSVK:KEVQV:MIVRS, VSQDL:RSVK:KEVQV:MIVKS, VPQDL:RSVK:KEVQV:MVVKS, VPTEE:RSVK:KEVQV:FLQHN, VPTGQ:RSVK:KEVQV:LEEHS, TQVQL:RSVK:KEVQV:TLEDH, TQVHH:RPVQ:KKATV:RLEDH, VPTEL:RPVQ:KKATV:DMVVE, VPEKM:RPVQ:KKATV:NMTVE, VPTEL:RPVQ:KKATV:EMVVE, APTKL:RPVQ:KKATV:NMVVR, APTQL:RPVQ:KKATV:NMVVR, APTKL:RPVQ:KKATV:NMVVK, VPTKL:RPVQ:KKATV:EGMSVAE, VPTKL:RPVQ:KKATV:GMAVS, TPTKM:RPVQ:KKATV:GMVVD, VPARL:RPVQ:KKATV:DMVVE, VPTRL:RPVQ:KKATV:DMVVE, APVKT:RPVQ:KKATV:MIVEE, VPQAL:RPVQ:KKATV:MIVRS, VSQDL:RPVQ:KKATV:MIVKS, VPQDL:RPVQ:KKATV:MVVKS, VPTEE:RPVQ:KKATV:FLQHN, VPTGQ:RPVQ:KKATV:LEEHS and SRVHH:RPVQ:KKATV:RLEEH.

[0392] In particular, in certain embodiments, the quadruplet PEP5:PEP12:PEP2:PEP6 is selected from the group consisting of VPTKM:SAIS-AA¹⁷-LYL:LKNYQ:NMVVE, VPTEL:SAIS-AA¹⁷-LYL:LKNYQ:EMVVE, VPTKL:SAIS-AA¹⁷-LYL:LKNYQ:NMVVE, VPTQL:SAIS-AA¹⁷-LYL:LKNYQ:NMVVE, VPTKL:SAIS-AA¹⁷-LYL:LKNYQ:EGMSVVE, VPTKL:SAIS-AA¹⁷-LYL:LKNYQ:GMVVE, VPTKM:SAIS-AA¹⁷-LYL:LKNYQ:GMVVE, VPTRL:SAIS-AA¹⁷-LYL:LKNYQ:DMVVE, VPTKT:SAIS-AA¹⁷-LYL:LKNYQ:MIVVE, VPTAL:SAIS-AA¹⁷-LYL:LKNYQ:MIVVE, VPTDL:SAIS-AA¹⁷-LYL:LKNYQ:MIVVE, VPTDL:SAIS-AA¹⁷-LYL:LKNYQ:MVVVE, VPTEE:SAIS-AA¹⁷-LYL:LKNYQ:FLVVE, VPTGQ:SAIS-AA¹⁷-LYL:LKNYQ:LEVVE, VPTHH:SAIS-AA¹⁷-LYL:LKNYQ:RLVVE, VPTQL:SAIS-AA¹⁷-LYL:LKNYQ:TLVVE, VPEKM:SAIS-AA¹⁷-LYL:LKNYQ:NMTVE, APTKL:SAIS-AA¹⁷-LYL:LKNYQ:NMVVR, APTQL:SAIS-AA¹⁷-LYL:LKNYQ:NMVVR, APTKL:SAIS-AA¹⁷-LYL:LKNYQ:NMVVK, VPTKL:SAIS-AA¹⁷-LYL:LKNYQ:EGMSVAE, VPTKL:SAIS-AA¹⁷-LYL:LKNYQ:GMAVS, TPTKM:SAIS-AA¹⁷-LYL:LKNYQ:GMVVD, VPARL:SAIS-AA¹⁷-LYL:LKNYQ:DMVVE, APVKT:SAIS-AA¹⁷-LYL:LKNYQ:MIVEE, VPQAL:SAIS-AA¹⁷-LYL:LKNYQ:MIVRS, VSQDL:SAIS-AA¹⁷-LYL:LKNYQ:MIVKS, VPQDL:SAIS-AA¹⁷-LYL:LKNYQ:MVVKS, VPTEE:SAIS-AA¹⁷-LYL:LKNYQ:FLQHN, VPTGQ:SAIS-AA¹⁷-LYL:LKNYQ:LEEHS, SRVHH:SAIS-AA¹⁷-LYL:LKNYQ:RLEEH, TQVQL:SAIS-AA¹⁷-LYL:LKNYQ:TLEDH, VPEEL:SSLS-AA¹⁷-LFF:LKVYP:DMTVE, VPEEL:SSLS-AA¹⁷-LFF:LKVYP:EMTVE, VPEKL:SSLS-AA¹⁷-LFF:LKVYP:NMTVE, VPEQL:SSLS-AA¹⁷-LFF:LKVYP:NMTVE, VPEKL:SSLS-AA¹⁷-LFF:LKVYP:EGMSTVE, VPEKL:SSLS-AA¹⁷-LFF:LKVYP:GMTVE, VPEKM:SSLS-AA¹⁷-LFF:LKVYP:GMTVE, VPERL:SSLS-AA¹⁷-LFF:LKVYP:DMTVE, VPEKT:SSLS-AA¹⁷-LFF:LKVYP:MITVE, VPEAL:SSLS-AA¹⁷-LFF:LKVYP:MITVE, VPEDL:SSLS-AA¹⁷-LFF:LKVYP:MITVE, VPEDL:SSLS-AA¹⁷-LFF:LKVYP:MVTVE, VPEEE:SSLS-AA¹⁷-LFF:LKVYP:FLTVE, VPEGQ:SSLS-AA¹⁷-LFF:LKVYP:LETVE, VPEHH:SSLS-AA¹⁷-LFF:LKVYP:RLTVE, VPEQL:SSLS-AA¹⁷-LFF:LKVYP:TLTVE, VPTEL:SSLS-AA¹⁷-LFF:LKVYP:DMVVE, VPTEL:SSLS-AA¹⁷-LFF:LKVYP:EMVVE, APTKL:SSLS-AA¹⁷-LFF:LKVYP:NMVVR, APTQL:SSLS-AA¹⁷-LFF:LKVYP:NMVVR, APTKL:SSLS-AA¹⁷-LFF:LKVYP:NMVVK, VPTKL:SSLS-AA¹⁷-LFF:LKVYP:EGMSVAE, VPTKL:SSLS-AA¹⁷-LFF:LKVYP:GMAVS, TPTKM:SSLS-AA¹⁷-LFF:LKVYP:GMVVD, VPARL:SSLS-AA¹⁷-LFF:LKVYP:DMVVE, VPTRL:SSLS-AA¹⁷-LFF:LKVYP:DMVVE, APVKT:SSLS-AA¹⁷-LFF:LKVYP:MIVEE, VPQAL:SSLS-AA¹⁷-LFF:LKVYP:MIVRS, VSQDL:SSLS-AA¹⁷-LFF:LKVYP:MIVKS, VPQDL:SSLS-AA¹⁷-LFF:LKVYP:MVVKS, VPTEE:SSLS-AA¹⁷-LFF:LKVYP:FLQHN, VPTGQ:SSLS-AA¹⁷-LFF:LKVYP:LEEHS, SRVHH:SSLS-AA¹⁷-LFF:LKVYP:RLEEH, TQVQL:SSLS-AA¹⁷-LFF:LKVYP:TLEDH, VPTEL:SAIS-AA¹⁷-LYL:LKNYQ:DMVVE, APTEL:NAIS-AA¹⁷-LYF:LKKYR:DMVVR, APTKM:NAIS-AA¹⁷-LYF:LKKYR:NMVVR, APTEL:NAIS-AA¹⁷-LYF:LKKYR:EMVVR, APTKL:NAIS-AA¹⁷-LYF:LKKYR:NMVVR, APTQL:NAIS-AA¹⁷-LYF:LKKYR:NMVVR, APTKL:NAIS-AA¹⁷-LYF:LKKYR:EGMSVVR, APTKL:NAIS-AA¹⁷-LYF:LKKYR:GMVVR, APTKM:NAIS-AA¹⁷-LYF:LKKYR:GMVVR, APTRL:NAIS-AA¹⁷-LYF:LKKYR:DMVVR, APTKT:NAIS-AA¹⁷-LYF:LKKYR:MIVVR, APTAL:NAIS-AA¹⁷-LYF:LKKYR:MIVVR, APTDL:NAIS-AA¹⁷-LYF:LKKYR:MIVVR, APTDL:NAIS-AA¹⁷-LYF:LKKYR:MVVVR, APTEE:NAIS-AA¹⁷-LYF:LKKYR:FLVVR, APTGQ:NAIS-AA¹⁷-LYF:LKKYR:LEVVR, APTHH:NAIS-AA¹⁷-LYF:LKKYR:RLVVR, APTQL:NAIS-AA¹⁷-LYF:LKKYR:TLVVR, VPTEL:NAIS-AA¹⁷-LYF:LKKYR:DMVVE, VPEKM:NAIS-AA¹⁷-LYF:LKKYR:NMTVE, VPTEL:NAIS-AA¹⁷-LYF:LKKYR:EMVVE, APTKL:NAIS-AA¹⁷-LYF:LKKYR:NMVVK, VPTKL:NAIS-AA¹⁷-LYF:LKKYR:EGMSVAE, VPTKL:NAIS-AA¹⁷-LYF:LKKYR:GMAVS, TPTKM:NAIS-AA¹⁷-LYF:LKKYR:GMVVD, VPARL:NAIS-AA¹⁷-LYF:LKKYR:DMVVE, VPTRL:NAIS-AA¹⁷-LYF:LKKYR:DMVVE, APVKT:NAIS-AA¹⁷-LYF:LKKYR:MIVEE, VPQAL:NAIS-AA¹⁷-LYF:LKKYR:MIVRS, VSQDL:NAIS-AA¹⁷-LYF:LKKYR:MIVKS, VPQDL:NAIS-AA¹⁷-LYF:LKKYR:MVVKS, VPTEE:NAIS-AA¹⁷-LYF:LKKYR:FLQHN, VPTGQ:NAIS-AA¹⁷-LYF:LKKYR:LEEHS, SRVHH:NAIS-AA¹⁷-LYF:LKKYR:RLEEH, TQVQL:NAIS-AA¹⁷-LYF:LKKYR:TLEDH, APTEL:SATS-AA¹⁷-LYY:LRKHR:DMVVK, APTKM:SATS-AA¹⁷-LYY:LRKHR:NMVVK, APTEL:SATS-AA¹⁷-LYY:LRKHR:EMVVK, APTKL:SATS-AA¹⁷-LYY:LRKHR:NMVVK, APTQL:SATS-AA¹⁷-LYY:LRKHR:NMVVK, APTKL:SATS-AA¹⁷-LYY:LRKHR:EGMSVVK, APTKL:SATS-AA¹⁷-LYY:LRKHR:GMVVK, APTKM:SATS-AA¹⁷-LYY:LRKHR:GMVVK, APTRL:SATS-AA¹⁷-LYY:LRKHR:DMVVK, APTKT:SATS-AA¹⁷-LYY:LRKHR:MIVVK, APTAL:SATS-AA¹⁷-LYY:LRKHR:MIVVK, APTDL:SATS-AA¹⁷-LYY:LRKHR:MIVVK, APTDL:SATS-AA¹⁷-LYY:LRKHR:MVVVK, APTEE:SATS-AA¹⁷-LYY:LRKHR:FLVVK, APTGQ:SATS-AA¹⁷-LYY:LRKHR:LEVVK, APTHH:SATS-AA¹⁷-LYY:LRKHR:RLVVK, APTQL:SATS-AA¹⁷-LYY:LRKHR:TLVVK, VPTEL:SATS-AA¹⁷-LYY:LRKHR:DMVVE, VPEKM:SATS-AA¹⁷-LYY:LRKHR:NMTVE, VPTEL:SATS-AA¹⁷-LYY:LRKHR:EMVVE, APTKL:SATS-AA¹⁷-LYY:LRKHR:NMVVR, APTQL:SATS-AA¹⁷-LYY:LRKHR:NMVVR, VPTKL:SATS-AA¹⁷-LYY:LRKHR:EGMSVAE, VPTKL:SATS-AA¹⁷-LYY:LRKHR:GMAVS, TPTKM:SATS-AA¹⁷-LYY:LRKHR:GMVVD, VPARL:SATS-AA¹⁷-LYY:LRKHR:DMVVE, VPTRL:SATS-AA¹⁷-LYY:LRKHR:DMVVE, APVKT:SATS-AA¹⁷-LYY:LRKHR:MIVEE, VPQAL:SATS-AA¹⁷-LYY:LRKHR:MIVRS, VSQDL:SATS-AA¹⁷-LYY:LRKHR:MIVKS, VPQDL:SATS-AA¹⁷-LYY:LRKHR:MVVKS, VPTEE:SATS-AA¹⁷-LYY:LRKHR:FLQHN, VPTGQ:SATS-AA¹⁷-LYY:LRKHR:LEEHS, SRVHH:SATS-AA¹⁷-LYY:LRKHR:RLEEH, TQVQL:SATS-AA¹⁷-LYY:LRKHR:TLEDH, VPTEL:SPIS-AA¹⁷-LYK:LKYHY:DMVAE, VPTKM:SPIS-AA¹⁷-LYK:LKYHY:NMVAE, VPTEL:SPIS-AA¹⁷-LYK:LKYHY:EMVAE, VPTKL:SPIS-AA¹⁷-LYK:LKYHY:NMVAE, VPTQL:SPIS-AA¹⁷-LYK:LKYHY:NMVAE, VPTKL:SPIS-AA¹⁷-LYK:LKYHY:GMVAE, VPTKM:SPIS-AA¹⁷-LYK:LKYHY:GMVAE, VPTRL:SPIS-AA¹⁷-LYK:LKYHY:DMVAE, VPTKT:SPIS-AA¹⁷-LYK:LKYHY:MIVAE, VPTAL:SPIS-AA¹⁷-LYK:LKYHY:MIVAE, VPTDL:SPIS-AA¹⁷-LYK:LKYHY:MIVAE, VPTDL:SPIS-AA¹⁷-LYK:LKYHY:MVVAE, VPTEE:SPIS-AA¹⁷-LYK:LKYHY:FLVAE, VPTGQ:SPIS-AA¹⁷-LYK:LKYHY:LEVAE, VPTHH:SPIS-AA¹⁷-LYK:LKYHY:RLVAE, VPTQL:SPIS-AA¹⁷-LYK:LKYHY:TLVAE, VPTEL:SPIS-AA¹⁷-LYK:LKYHY:DMVVE, VPEKM:SPIS-AA¹⁷-LYK:LKYHY:NMTVE, VPTEL:SPIS-AA¹⁷-LYK:LKYHY:EMVVE, APTKL:SPIS-AA¹⁷-LYK:LKYHY:NMVVR, APTQL:SPIS-AA¹⁷-LYK:LKYHY:NMVVR, APTKL:SPIS-AA¹⁷-LYK:LKYHY:NMVVK, VPTKL:SPIS-AA¹⁷-LYK:LKYHY:GMAVS, TPTKM:SPIS-AA¹⁷-LYK:LKYHY:GMVVD, VPARL:SPIS-AA¹⁷-LYK:LKYHY:DMVVE, VPTRL:SPIS-AA¹⁷-LYK:LKYHY:DMVVE, APVKT:SPIS-AA¹⁷-LYK:LKYHY:MIVEE, VPQAL:SPIS-AA¹⁷-LYK:LKYHY:MIVRS, VSQDL:SPIS-AA¹⁷-LYK:LKYHY:MIVKS, VPQDL:SPIS-AA¹⁷-LYK:LKYHY:MVVKS, VPTEE:SPIS-AA¹⁷-LYK:LKYHY:FLQHN, VPTGQ:SPIS-AA¹⁷-LYK:LKYHY:LEEHS, SRVHH:SPIS-AA¹⁷-LYK:LKYHY:RLEEH, TQVQL:SPIS-AA¹⁷-LYK:LKYHY:TLEDH, VPTEL:EPIS-AA¹⁷-LYL:KFKYE:DMAVS, VPTKM:EPIS-AA¹⁷-LYL:KFKYE:NMAVS, VPTEL:EPIS-AA¹⁷-LYL:KFKYE:EMAVS, VPTKL:EPIS-AA¹⁷-LYL:KFKYE:NMAVS, VPTQL:EPIS-AA¹⁷-LYL:KFKYE:NMAVS, VPTKL:EPIS-AA¹⁷-LYL:KFKYE:EGMSAVS, VPTKM:EPIS-AA¹⁷-LYL:KFKYE:GMAVS, VPTRL:EPIS-AA¹⁷-LYL:KFKYE:DMAVS, VPTKT:EPIS-AA¹⁷-LYL:KFKYE:MIAVS, VPTAL:EPIS-AA¹⁷-LYL:KFKYE:MIAVS, VPTDL:EPIS-AA¹⁷-LYL:KFKYE:MIAVS, VPTDL:EPIS-AA¹⁷-LYL:KFKYE:MVAVS, VPTEE:EPIS-AA¹⁷-LYL:KFKYE:FLAVS, VPTGQ:EPIS-AA¹⁷-LYL:KFKYE:LEAVS, VPTHH:EPIS-AA¹⁷-LYL:KFKYE:RLAVS, VPTQL:EPIS-AA¹⁷-LYL:KFKYE:TLAVS, VPTEL:EPIS-AA¹⁷-LYL:KFKYE:DMVVE, VPEKM:EPIS-AA¹⁷-LYL:KFKYE:NMTVE, VPTEL:EPIS-AA¹⁷-LYL:KFKYE:EMVVE, APTKL:EPIS-AA¹⁷-LYL:KFKYE:NMVVR, APTQL:EPIS-AA¹⁷-LYL:KFKYE:NMVVR, APTKL:EPIS-AA¹⁷-LYL:KFKYE:NMVVK, VPTKL:EPIS-AA¹⁷-LYL:KFKYE:EGMSVAE, TPTKM:EPIS-AA¹⁷-LYL:KFKYE:GMVVD, VPARL:EPIS-AA¹⁷-LYL:KFKYE:DMVVE, VPTRL:EPIS-AA¹⁷-LYL:KFKYE:DMVVE, APVKT:EPIS-AA¹⁷-LYL:KFKYE:MIVEE, VPQAL:EPIS-AA¹⁷-LYL:KFKYE:MIVRS, VSQDL:EPIS-AA¹⁷-LYL:KFKYE:MIVKS, VPQDL:EPIS-AA¹⁷-LYL:KFKYE:MVVKS, VPTEE:EPIS-AA¹⁷-LYL:KFKYE:FLQHN, VPTGQ:EPIS-AA¹⁷-LYL:KFKYE:LEEHS, SRVHH:EPIS-AA¹⁷-LYL:KFKYE:RLEEH, TQVQL:EPIS-AA¹⁷-LYL:KFKYE:TLEDH, TPTEL:SPIN-AA¹⁷-LYF:YGKIP:DMVVD, TPTKM:SPIN-AA¹⁷-LYF:YGKIP:NMVVD, TPTEL:SPIN-AA¹⁷-LYF:YGKIP:EMVVD, TPTKL:SPIN-AA¹⁷-LYF:YGKIP:NMVVD, TPTQL:SPIN-AA¹⁷-LYF:YGKIP:NMVVD, TPTKL:SPIN-AA¹⁷-LYF:YGKIP:EGMSVVD, TPTKL:SPIN-AA¹⁷-LYF:YGKIP:GMVVD, TPTRL:SPIN-AA¹⁷-LYF:YGKIP:DMVVD, TPTKT:SPIN-AA¹⁷-LYF:YGKIP:MIVVD, TPTAL:SPIN-AA¹⁷-LYF:YGKIP:MIVVD, TPTDL:SPIN-AA¹⁷-LYF:YGKIP:MIVVD, TPTDL:SPIN-AA¹⁷-LYF:YGKIP:MVVVD, TPTEE:SPIN-AA¹⁷-LYF:YGKIP:FLVVD, TPTGQ:SPIN-AA¹⁷-LYF:YGKIP:LEVVD, TPTHH:SPIN-AA¹⁷-LYF:YGKIP:RLVVD, TPTQL:SPIN-AA¹⁷-LYF:YGKIP:TLVVD, VPTEL:SPIN-AA¹⁷-LYF:YGKIP:DMVVE, VPEKM:SPIN-AA¹⁷-LYF:YGKIP:NMTVE, VPTEL:SPIN-AA¹⁷-LYF:YGKIP:EMVVE, APTKL:SPIN-AA¹⁷-LYF:YGKIP:NMVVR, APTQL:SPIN-AA¹⁷-LYF:YGKIP:NMVVR, APTKL:SPIN-AA¹⁷-LYF:YGKIP:NMVVK, VPTKL:SPIN-AA¹⁷-LYF:YGKIP:EGMSVAE, VPTKL:SPIN-AA¹⁷-LYF:YGKIP:GMAVS, VPARL:SPIN-AA¹⁷-LYF:YGKIP:DMVVE, VPTRL:SPIN-AA¹⁷-LYF:YGKIP:DMVVE, APVKT:SPIN-AA¹⁷-LYF:YGKIP:MIVEE, VPQAL:SPIN-AA¹⁷-LYF:YGKIP:MIVRS, VSQDL:SPIN-AA¹⁷-LYF:YGKIP:MIVKS, VPQDL:SPIN-AA¹⁷-LYF:YGKIP:MVVKS, VPTEE:SPIN-AA¹⁷-LYF:YGKIP:FLQHN, VPTGQ:SPIN-AA¹⁷-LYF:YGKIP:LEEHS, SRVHH:SPIN-AA¹⁷-LYF:YGKIP:RLEEH, TQVQL:SPIN-AA¹⁷-LYF:YGKIP:TLEDH, VPAEL:SPIS-AA¹⁷-LYI:YKQYE:DMVVE, VPAKM:SPIS-AA¹⁷-LYI:YKQYE:NMVVE, VPAEL:SPIS-AA¹⁷-LYI:YKQYE:EMVVE, VPAKL:SPIS-AA¹⁷-LYI:YKQYE:NMVVE, VPAQL:SPIS-AA¹⁷-LYI:YKQYE:NMVVE, VPAKL:SPIS-AA¹⁷-LYI:YKQYE:EGMSVVE, VPAKL:SPIS-AA¹⁷-LYI:YKQYE:GMVVE, VPAKM:SPIS-AA¹⁷-LYI:YKQYE:GMVVE, VPARL:SPIS-AA¹⁷-LYI:YKQYE:DMVVE, VPAKT:SPIS-AA¹⁷-LYI:YKQYE:MIVVE, VPAAL:SPIS-AA¹⁷-LYI:YKQYE:MIVVE, VPADL:SPIS-AA¹⁷-LYI:YKQYE:MIVVE, VPADL:SPIS-AA¹⁷-LYI:YKQYE:MVVVE, VPAEE:SPIS-AA¹⁷-LYI:YKQYE:FLVVE, VPAGQ:SPIS-AA¹⁷-LYI:YKQYE:LEVVE, VPAHH:SPIS-AA¹⁷-LYI:YKQYE:RLVVE, VPAQL:SPIS-AA¹⁷-LYI:YKQYE:TLVVE, VPTEL:SPIS-AA¹⁷-LYI:YKQYE:DMVVE, VPEKM:SPIS-AA¹⁷-LYI:YKQYE:NMTVE, VPTEL:SPIS-AA¹⁷-LYI:YKQYE:EMVVE, APTKL:SPIS-AA¹⁷-LYI:YKQYE:NMVVR, APTQL:SPIS-AA¹⁷-LYI:YKQYE:NMVVR, APTKL:SPIS-AA¹⁷-LYI:YKQYE:NMVVK, VPTKL:SPIS-AA¹⁷-LYI:YKQYE:EGMSVAE, VPTKL:SPIS-AA¹⁷-LYI:YKQYE:GMAVS, TPTKM:SPIS-AA¹⁷-LYI:YKQYE:GMVVD, VPTRL:SPIS-AA¹⁷-LYI:YKQYE:DMVVE, APVKT:SPIS-AA¹⁷-LYI:YKQYE:MIVEE, VPQAL:SPIS-AA¹⁷-LYI:YKQYE:MIVRS, VSQDL:SPIS-AA¹⁷-LYI:YKQYE:MIVKS, VPQDL:SPIS-AA¹⁷-LYI:YKQYE:MVVKS, VPTEE:SPIS-AA¹⁷-LYI:YKQYE:FLQHN, VPTGQ:SPIS-AA¹⁷-LYI:YKQYE:LEEHS, SRVHH:SPIS-AA¹⁷-LYI:YKQYE:RLEEH, TQVQL:SPIS-AA¹⁷-LYI:YKQYE:TLEDH, VPTEL:SPIS-AA¹⁷-LFI:YKQYE:DMVVE, VPTKM:SPIS-AA¹⁷-LFI:YKQYE:NMVVE, VPTEL:SPIS-AA¹⁷-LFI:YKQYE:EMVVE, VPTKL:SPIS-AA¹⁷-LFI:YKQYE:NMVVE, VPTQL:SPIS-AA¹⁷-LFI:YKQYE:NMVVE, VPTKL:SPIS-AA¹⁷-LFI:YKQYE:EGMSVVE, VPTKL:SPIS-AA¹⁷-LFI:YKQYE:GMVVE, VPTKM:SPIS-AA¹⁷-LFI:YKQYE:GMVVE, VPTRL:SPIS-AA¹⁷-LFI:YKQYE:DMVVE, VPTKT:SPIS-AA¹⁷-LFI:YKQYE:MIVVE, VPTAL:SPIS-AA¹⁷-LFI:YKQYE:MIVVE, VPTDL:SPIS-AA¹⁷-LFI:YKQYE:MIVVE, VPTDL:SPIS-AA¹⁷-LFI:YKQYE:MVVVE, VPTEE:SPIS-AA¹⁷-LFI:YKQYE:FLVVE, VPTGQ:SPIS-AA¹⁷-LFI:YKQYE:LEVVE, VPTHH:SPIS-AA¹⁷-LFI:YKQYE:RLVVE, VPTQL:SPIS-AA¹⁷-LFI:YKQYE:TLVVE, VPEKM:SPIS-AA¹⁷-LFI:YKQYE:NMTVE, APTKL:SPIS-AA¹⁷-LFI:YKQYE:NMVVR, APTQL:SPIS-AA¹⁷-LFI:YKQYE:NMVVR, APTKL:SPIS-AA¹⁷-LFI:YKQYE:NMVVK, VPTKL:SPIS-AA¹⁷-LFI:YKQYE:EGMSVAE, VPTKL:SPIS-AA¹⁷-LFI:YKQYE:GMAVS, TPTKM:SPIS-AA¹⁷-LFI:YKQYE:GMVVD, VPARL:SPIS-AA¹⁷-LFI:YKQYE:DMVVE, APVKT:SPIS-AA¹⁷-LFI:YKQYE:MIVEE, VPQAL:SPIS-AA¹⁷-LFI:YKQYE:MIVRS, VSQDL:SPIS-AA¹⁷-LFI:YKQYE:MIVKS, VPQDL:SPIS-AA¹⁷-LFI:YKQYE:MVVKS, VPTEE:SPIS-AA¹⁷-LFI:YKQYE:FLQHN, VPTGQ:SPIS-AA¹⁷-LFI:YKQYE:LEEHS, SRVHH:SPIS-AA¹⁷-LFI:YKQYE:RLEEH, TQVQL:SPIS-AA¹⁷-LFI:YKQYE:TLEDH, APVEL:KPLS-AA¹⁷-LYV:DHHKD:DMVEE, APVKM:KPLS-AA¹⁷-LYV:DHHKD:NMVEE, APVEL:KPLS-AA¹⁷-LYV:DHHKD:EMVEE, APVKL:KPLS-AA¹⁷-LYV:DHHKD:NMVEE, APVQL:KPLS-AA¹⁷-LYV:DHHKD:NMVEE, APVKL:KPLS-AA¹⁷-LYV:DHHKD:EGMSVEE, APVKL:KPLS-AA¹⁷-LYV:DHHKD:GMVEE, APVKM:KPLS-AA¹⁷-LYV:DHHKD:GMVEE, APVRL:KPLS-AA¹⁷-LYV:DHHKD:DMVEE, APVAL:KPLS-AA¹⁷-LYV:DHHKD:MIVEE, APVDL:KPLS-AA¹⁷-LYV:DHHKD:MIVEE, APVDL:KPLS-AA¹⁷-LYV:DHHKD:MVVEE, APVEE:KPLS-AA¹⁷-LYV:DHHKD:FLVEE, APVGQ:KPLS-AA¹⁷-LYV:DHHKD:LEVEE, APVHH:KPLS-AA¹⁷-LYV:DHHKD:RLVEE, APVQL:KPLS-AA¹⁷-LYV:DHHKD:TLVEE, VPTEL:KPLS-AA¹⁷-LYV:DHHKD:DMVVE, VPEKM:KPLS-AA¹⁷-LYV:DHHKD:NMTVE, VPTEL:KPLS-AA¹⁷-LYV:DHHKD:EMVVE, APTKL:KPLS-AA¹⁷-LYV:DHHKD:NMVVR, APTQL:KPLS-AA¹⁷-LYV:DHHKD:NMVVR, APTKL:KPLS-AA¹⁷-LYV:DHHKD:NMVVK, VPTKL:KPLS-AA¹⁷-LYV:DHHKD:EGMSVAE, VPTKL:KPLS-AA¹⁷-LYV:DHHKD:GMAVS, TPTKM:KPLS-AA¹⁷-LYV:DHHKD:GMVVD, VPARL:KPLS-AA¹⁷-LYV:DHHKD:DMVVE, VPTRL:KPLS-AA¹⁷-LYV:DHHKD:DMVVE, VPQAL:KPLS-AA¹⁷-LYV:DHHKD:MIVRS, VSQDL:KPLS-AA¹⁷-LYV:DHHKD:MIVKS, VPQDL:KPLS-AA¹⁷-LYV:DHHKD:MVVKS, VPTEE:KPLS-AA¹⁷-LYV:DHHKD:FLQHN, VPTGQ:KPLS-AA¹⁷-LYV:DHHKD:LEEHS, SRVHH:KPLS-AA¹⁷-LYV:DHHKD:RLEEH, TQVQL:KPLS-AA¹⁷-LYV:DHHKD:TLEDH, VPQEL:EPLP-AA¹⁷-VYY:EQLSN:DMVRS, VPQKM:EPLP-AA¹⁷-VYY:EQLSN:NMVRS, VPQEL:EPLP-AA¹⁷-VYY:EQLSN:EMVRS, VPQKL:EPLP-AA¹⁷-VYY:EQLSN:NMVRS, VPQQL:EPLP-AA¹⁷-VYY:EQLSN:NMVRS, VPQKL:EPLP-AA¹⁷-VYY:EQLSN:EGMSVRS, VPQKL:EPLP-AA¹⁷-VYY:EQLSN:GMVRS, VPQKM:EPLP-AA¹⁷-VYY:EQLSN:GMVRS, VPQRL:EPLP-AA¹⁷-VYY:EQLSN:DMVRS, VPQKT:EPLP-AA¹⁷-VYY:EQLSN:MIVRS, VPQDL:EPLP-AA¹⁷-VYY:EQLSN:MIVRS, VPQDL:EPLP-AA¹⁷-VYY:EQLSN:MVVRS, VPQEE:EPLP-AA¹⁷-VYY:EQLSN:FLVRS, VPQGQ:EPLP-AA¹⁷-VYY:EQLSN:LEVRS, VPQHH:EPLP-AA¹⁷-VYY:EQLSN:RLVRS, VPQQL:EPLP-AA¹⁷-VYY:EQLSN:TLVRS, VPTEL:EPLP-AA¹⁷-VYY:EQLSN:DMVVE, VPEKM:EPLP-AA¹⁷-VYY:EQLSN:NMTVE, VPTEL:EPLP-AA¹⁷-VYY:EQLSN:EMVVE, APTKL:EPLP-AA¹⁷-VYY:EQLSN:NMVVR, APTQL:EPLP-AA¹⁷-VYY:EQLSN:NMVVR, APTKL:EPLP-AA¹⁷-VYY:EQLSN:NMVVK, VPTKL:EPLP-AA¹⁷-VYY:EQLSN:EGMSVAE, VPTKL:EPLP-AA¹⁷-VYY:EQLSN:GMAVS, TPTKM:EPLP-AA¹⁷-VYY:EQLSN:GMVVD, VPARL:EPLP-AA¹⁷-VYY:EQLSN:DMVVE, VPTRL:EPLP-AA¹⁷-VYY:EQLSN:DMVVE, APVKT:EPLP-AA¹⁷-VYY:EQLSN:MIVEE, VSQDL:EPLP-AA¹⁷-VYY:EQLSN:MIVKS, VPQDL:EPLP-AA¹⁷-VYY:EQLSN:MVVKS, VPTEE:EPLP-AA¹⁷-VYY:EQLSN:FLQHN, VPTGQ:EPLP-AA¹⁷-VYY:EQLSN:LEEHS, SRVHH:EPLP-AA¹⁷-VYY:EQLSN:RLEEH, TQVQL:EPLP-AA¹⁷-VYY:EQLSN:TLEDH, VSQEL:EPLT-AA¹⁷-LYY:EQLSN:DMVKS, VSQKM:EPLT-AA¹⁷-LYY:EQLSN:NMVKS, VSQEL:EPLT-AA¹⁷-LYY:EQLSN:EMVKS, VSQKL:EPLT-AA¹⁷-LYY:EQLSN:NMVKS, VSQQL:EPLT-AA¹⁷-LYY:EQLSN:NMVKS, VSQKL:EPLT-AA¹⁷-LYY:EQLSN:EGMSVKS, VSQKL:EPLT-AA¹⁷-LYY:EQLSN:GMVKS, VSQKM:EPLT-AA¹⁷-LYY:EQLSN:GMVKS, VSQRL:EPLT-AA¹⁷-LYY:EQLSN:DMVKS, VSQKT:EPLT-AA¹⁷-LYY:EQLSN:MIVKS, VSQAL:EPLT-AA¹⁷-LYY:EQLSN:MIVKS, VSQDL:EPLT-AA¹⁷-LYY:EQLSN:MVVKS, VSQEE:EPLT-AA¹⁷-LYY:EQLSN:FLVKS, VSQGQ:EPLT-AA¹⁷-LYY:EQLSN:LEVKS, VSQHH:EPLT-AA¹⁷-LYY:EQLSN:RLVKS, VSQQL:EPLT-AA¹⁷-LYY:EQLSN:TLVKS, VPTEL:EPLT-AA¹⁷-LYY:EQLSN:DMVVE, VPEKM:EPLT-AA¹⁷-LYY:EQLSN:NMTVE, VPTEL:EPLT-AA¹⁷-LYY:EQLSN:EMVVE, APTKL:EPLT-AA¹⁷-LYY:EQLSN:NMVVR, APTQL:EPLT-AA¹⁷-LYY:EQLSN:NMVVR, APTKL:EPLT-AA¹⁷-LYY:EQLSN:NMVVK, VPTKL:EPLT-AA¹⁷-LYY:EQLSN:EGMSVAE, VPTKL:EPLT-AA¹⁷-LYY:EQLSN:GMAVS, TPTKM:EPLT-AA¹⁷-LYY:EQLSN:GMVVD, VPARL:EPLT-AA¹⁷-LYY:EQLSN:DMVVE, VPTRL:EPLT-AA¹⁷-LYY:EQLSN:DMVVE, APVKT:EPLT-AA¹⁷-LYY:EQLSN:MIVEE, VPQAL:EPLT-AA¹⁷-LYY:EQLSN:MIVRS, VPQDL:EPLT-AA¹⁷-LYY:EQLSN:MVVKS, VPTEE:EPLT-AA¹⁷-LYY:EQLSN:FLQHN, VPTGQ:EPLT-AA¹⁷-LYY:EQLSN:LEEHS, SRVHH:EPLT-AA¹⁷-LYY:EQLSN:RLEEH, TQVQL:EPLT-AA¹⁷-LYY:EQLSN:TLEDH, VPQEL:EPLT-AA¹⁷-LYY:EQLSN:DMVKS, VPQKM:EPLT-AA¹⁷-LYY:EQLSN:NMVKS, VPQEL:EPLT-AA¹⁷-LYY:EQLSN:EMVKS, VPQKL:EPLT-AA¹⁷-LYY:EQLSN:NMVKS, VPQQL:EPLT-AA¹⁷-LYY:EQLSN:NMVKS, VPQKL:EPLT-AA¹⁷-LYY:EQLSN:EGMSVKS, VPQKL:EPLT-AA¹⁷-LYY:EQLSN:GMVKS, VPQKM:EPLT-AA¹⁷-LYY:EQLSN:GMVKS, VPQRL:EPLT-AA¹⁷-LYY:EQLSN:DMVKS, VPQKT:EPLT-AA¹⁷-LYY:EQLSN:MIVKS, VPQAL:EPLT-AA¹⁷-LYY:EQLSN:MIVKS, VPQDL:EPLT-AA¹⁷-LYY:EQLSN:MIVKS, VPQEE:EPLT-AA¹⁷-LYY:EQLSN:FLVKS, VPQGQ:EPLT-AA¹⁷-LYY:EQLSN:LEVKS, VPQHH:EPLT-AA¹⁷-LYY:EQLSN:RLVKS, VPQQL:EPLT-AA¹⁷-LYY:EQLSN:TLVKS, VSQDL:EPLT-AA¹⁷-LYY:EQLSN:MIVKS, VPTEL:SNIT-AA¹⁷-QIM:IGEMS:DMQHN, VPTKM:SNIT-AA¹⁷-QIM:IGEMS:NMQHN, VPTEL:SNIT-AA¹⁷-QIM:IGEMS:EMQHN, VPTKL:SNIT-AA¹⁷-QIM:IGEMS:NMQHN, VPTQL:SNIT-AA¹⁷-QIM:IGEMS:NMQHN, VPTKL:SNIT-AA¹⁷-QIM:IGEMS:EGMSQHN, VPTKL:SNIT-AA¹⁷-QIM:IGEMS:GMQHN, VPTKM:SNIT-AA¹⁷-QIM:IGEMS:GMQHN, VPTRL:SNIT-AA¹⁷-QIM:IGEMS:DMQHN, VPTKT:SNIT-AA¹⁷-QIM:IGEMS:MIQHN, VPTAL:SNIT-AA¹⁷-QIM:IGEMS:MIQHN, VPTDL:SNIT-AA¹⁷-QIM:IGEMS:MIQHN, VPTDL:SNIT-AA¹⁷-QIM:IGEMS:MVQHN, VPTGQ:SNIT-AA¹⁷-QIM:IGEMS:LEQHN, VPTEE:SNIT-AA¹⁷-QIM:IGEMS:FLQHN, VPTHH:SNIT-AA¹⁷-QIM:IGEMS:RLQHN, VPTQL:SNIT-AA¹⁷-QIM:IGEMS:TLQHN, VPTEL:SNIT-AA¹⁷-QIM:IGEMS:DMVVE, VPEKM:SNIT-AA¹⁷-QIM:IGEMS:NMTVE, VPTEL:SNIT-AA¹⁷-QIM:IGEMS:EMVVE, APTKL:SNIT-AA¹⁷-QIM:IGEMS:NMVVR, APTQL:SNIT-AA¹⁷-QIM:IGEMS:NMVVR, APTKL:SNIT-AA¹⁷-QIM:IGEMS:NMVVK, VPTKL:SNIT-AA¹⁷-QIM:IGEMS:EGMSVAE, VPTKL:SNIT-AA¹⁷-QIM:IGEMS:GMAVS, TPTKM:SNIT-AA¹⁷-QIM:IGEMS:GMVVD, VPARL:SNIT-AA¹⁷-QIM:IGEMS:DMVVE, VPTRL:SNIT-AA¹⁷-QIM:IGEMS:DMVVE, APVKT:SNIT-AA¹⁷-QIM:IGEMS:MIVEE, VPQAL:SNIT-AA¹⁷-QIM:IGEMS:MIVRS, VSQDL:SNIT-AA¹⁷-QIM:IGEMS:MIVKS, VPQDL:SNIT-AA¹⁷-QIM:IGEMS:MVVKS, VPTGQ:SNIT-AA¹⁷-QIM:IGEMS:LEEHS, SRVHH:SNIT-AA¹⁷-QIM:IGEMS:RLEEH, TQVQL:SNIT-AA¹⁷-QIM:IGEMS:TLEDH, VPTEL:SNIT-AA¹⁷-QIM:LGEMS:DMEHS, VPTKM:SNIT-AA¹⁷-QIM:LGEMS:NMEHS, VPTEL:SNIT-AA¹⁷-QIM:LGEMS:EMEHS, VPTKL:SNIT-AA¹⁷-QIM:LGEMS:NMEHS, VPTQL:SNIT-AA¹⁷-QIM:LGEMS:NMEHS, VPTKL:SNIT-AA¹⁷-QIM:LGEMS: EGMSEHS, VPTKL:SNIT-AA¹⁷-QIM:LGEMS:GMEHS, VPTKM:SNIT-AA¹⁷-QIM:LGEMS:GMEHS, VPTRL:SNIT-AA¹⁷-QIM:LGEMS:DMEHS, VPTKT:SNIT-AA¹⁷-QIM:LGEMS:MIEHS, VPTAL:SNIT-AA¹⁷-QIM:LGEMS:MIEHS, VPTDL:SNIT-AA¹⁷-QIM:LGEMS:MIEHS, VPTDL:SNIT-AA¹⁷-QIM:LGEMS:MVEHS, VPTEE:SNIT-AA¹⁷-QIM:LGEMS:FLEHS, VPTHH:SNIT-AA¹⁷-QIM:LGEMS:RLEHS, VPTQL:SNIT-AA¹⁷-QIM:LGEMS:TLEHS, VPTEL:SNIT-AA¹⁷-QIM:LGEMS:DMVVE, VPEKM:SNIT-AA¹⁷-QIM:LGEMS:NMTVE, VPTEL:SNIT-AA¹⁷-QIM:LGEMS:EMVVE, APTKL:SNIT-AA¹⁷-QIM:LGEMS:NMVVR, APTQL:SNIT-AA¹⁷-QIM:LGEMS:NMVVR, APTKL:SNIT-AA¹⁷-QIM:LGEMS:NMVVK, VPTKL:SNIT-AA¹⁷-QIM:LGEMS:EGMSVAE, VPTKL:SNIT-AA¹⁷-QIM:LGEMS:GMAVS, TPTKM:SNIT-AA¹⁷-QIM:LGEMS:GMVVD, VPARL:SNIT-AA¹⁷-QIM:LGEMS:DMVVE, VPTRL:SNIT-AA¹⁷-QIM:LGEMS:DMVVE, APVKT:SNIT-AA¹⁷-QIM:LGEMS:MIVEE, VPQAL:SNIT-AA¹⁷-QIM:LGEMS:MIVRS, VSQDL:SNIT-AA¹⁷-QIM:LGEMS:MIVKS, VPQDL:SNIT-AA¹⁷-QIM:LGEMS:MVVKS, VPTEE:SNIT-AA¹⁷-QIM:LGEMS:FLQHN, SRVHH:SNIT-AA¹⁷-QIM:LGEMS:RLEEH, TQVQL:SNIT-AA¹⁷-QIM:LGEMS:TLEDH, SRVEL:RSVK-AA¹⁷-AKV:KEVQV:DMEEH, SRVKM:RSVK-AA¹⁷-AKV:KEVQV:NMEEH, SRVEL:RSVK-AA¹⁷-AKV:KEVQV:EMEEH, SRVKL:RSVK-AA¹⁷-AKV:KEVQV:NMEEH, SRVQL:RSVK-AA¹⁷-AKV:KEVQV:NMEEH, SRVKL:RSVK-AA¹⁷-AKV:KEVQV:EGMSEEH, SRVKL:RSVK-AA¹⁷-AKV:KEVQV:GMEEH, SRVKM:RSVK-AA¹⁷-AKV:KEVQV:GMEEH, SRVRL:RSVK-AA¹⁷-AKV:KEVQV:DMEEH, SRVKT:RSVK-AA¹⁷-AKV:KEVQV:MIEEH, SRVAL:RSVK-AA¹⁷-AKV:KEVQV:MIEEH, SRVDL:RSVK-AA¹⁷-AKV:KEVQV:MIEEH, SRVDL:RSVK-AA¹⁷-AKV:KEVQV:MVEEH, SRVEE:RSVK-AA¹⁷-AKV:KEVQV:FLEEH, SRVGQ:RSVK-AA¹⁷-AKV:KEVQV:LEEEH, SRVQL:RSVK-AA¹⁷-AKV:KEVQV:TLEEH, VPTEL:RSVK-AA¹⁷-AKV:KEVQV:DMVVE, VPEKM:RSVK-AA¹⁷-AKV:KEVQV:NMTVE, VPTEL:RSVK-AA¹⁷-AKV:KEVQV:EMVVE, APTKL:RSVK-AA¹⁷-AKV:KEVQV:NMVVR, APTQL:RSVK-AA¹⁷-AKV:KEVQV:NMVVR, APTKL:RSVK-AA¹⁷-AKV:KEVQV:NMVVK, VPTKL:RSVK-AA¹⁷-AKV:KEVQV:EGMSVAE, VPTKL:RSVK-AA¹⁷-AKV:KEVQV:GMAVS, TPTKM:RSVK-AA¹⁷-AKV:KEVQV:GMVVD, VPARL:RSVK-AA¹⁷-AKV:KEVQV:DMVVE, VPTRL:RSVK-AA¹⁷-AKV:KEVQV:DMVVE, APVKT:RSVK-AA¹⁷-AKV:KEVQV:MIVEE, VPQAL:RSVK-AA¹⁷-AKV:KEVQV:MIVRS, VSQDL:RSVK-AA¹⁷-AKV:KEVQV:MIVKS, VPQDL:RSVK-AA¹⁷-AKV:KEVQV: MVVKS, VPTEE:RSVK-AA¹⁷-AKV:KEVQV:FLQHN, VPTGQ:RSVK-AA¹⁷-AKV:KEVQV:LEEHS, TQVQL:RSVK-AA¹⁷-AKV:KEVQV:TLEDH, TQVEL:RPVQ-AA¹⁷-RKI:KKATV:DMEDH, TQVKM:RPVQ-AA¹⁷-RKI:KKATV:NMEDH, TQVEL:RPVQ-AA¹⁷-RKI:KKATV:EMEDH, TQVKL:RPVQ-AA¹⁷-RKI:KKATV:NMEDH, TQVQL:RPVQ-AA¹⁷-RKI:KKATV:NMEDH, TQVKL:RPVQ-AA¹⁷-RKI:KKATV:EGMSEDH, TQVKL:RPVQ-AA¹⁷-RKI:KKATV:GMEDH, TQVKM:RPVQ-AA¹⁷-RKI:KKATV:GMEDH, TQVRL:RPVQ-AA¹⁷-RKI:KKATV:DMEDH, TQVKT:RPVQ-AA¹⁷-RKI:KKATV:MIEDH, TQVAL:RPVQ-AA¹⁷-RKI:KKATV:MIEDH, TQVDL:RPVQ-AA¹⁷-RKI:KKATV:MIEDH, TQVDL:RPVQ-AA¹⁷-RKI:KKATV:MVEDH, TQVEE:RPVQ-AA¹⁷-RKI:KKATV:FLEDH, TQVGQ:RPVQ-AA¹⁷-RKI:KKATV:LEEDH, TQVHH:RPVQ-AA¹⁷-RKI:KKATV:RLEDH, VPTEL:RPVQ-AA¹⁷-RKI:KKATV:DMVVE, VPEKM:RPVQ-AA¹⁷-RKI:KKATV:NMTVE, VPTEL:RPVQ-AA¹⁷-RKI:KKATV:EMVVE, APTKL:RPVQ-AA¹⁷-RKI:KKATV:NMVVR, APTQL:RPVQ-AA¹⁷-RKI:KKATV:NMVVR, APTKL:RPVQ-AA¹⁷-RKI:KKATV:NMVVK, VPTKL:RPVQ-AA¹⁷-RKI:KKATV:EGMSVAE, VPTKL:RPVQ-AA¹⁷-RKI:KKATV:GMAVS, TPTKM:RPVQ-AA¹⁷-RKI:KKATV:GMVVD, VPARL:RPVQ-AA¹⁷-RKI:KKATV:DMVVE, VPTRL:RPVQ-AA¹⁷-RKI:KKATV:DMVVE, APVKT:RPVQ-AA¹⁷-RKI:KKATV:MIVEE, VPQAL:RPVQ-AA¹⁷-RKI:KKATV:MIVRS, VSQDL:RPVQ-AA¹⁷-RKI:KKATV:MIVKS, VPQDL:RPVQ-AA¹⁷-RKI:KKATV:MVVKS, VPTEE:RPVQ-AA¹⁷-RKI:KKATV:FLQHN, VPTGQ:RPVQ-AA¹⁷-RKI:KKATV:LEEHS and SRVHH:RPVQ-AA¹⁷-RKI:KKATV:RLEEH; and wherein AA¹⁷ is selected from the group consisting of G, A, V, L, I, P, F, M, W, T and S (in particular is selected from the group consisting of M, I, L, V and T). More particularly, the quadruplet PEP5:PEP12:PEP2:PEP6 is selected from the group consisting of VPTKM:SAIS-AA¹⁷-LYL:LKNYQ:NMVVE, VPTKL:SAIS-AA¹⁷-LYL:LKNYQ:NMVVE, VPTQL:SAIS-AA¹⁷-LYL:LKNYQ:NMVVE, VPTKL:SAIS-AA¹⁷-LYL:LKNYQ:EGMSVVE, VPTKL:SAIS-AA¹⁷-LYL:LKNYQ:GMVVE, VPTKM:SAIS-AA¹⁷-LYL:LKNYQ:GMVVE, VPTRL:SAIS-AA¹⁷-LYL:LKNYQ:DMVVE, VPTKT:SAIS-AA¹⁷-LYL:LKNYQ:MIVVE, VPTAL:SAIS-AA¹⁷-LYL:LKNYQ:MIVVE, VPTDL:SAIS-AA¹⁷-LYL:LKNYQ:MIVVE, VPTDL:SAIS-AA¹⁷-LYL:LKNYQ:MVVVE, VPEKM:SAIS-AA¹⁷-LYL:LKNYQ:NMTVE, APTKL:SAIS-AA¹⁷-LYL:LKNYQ:NMVVR, APTQL:SAIS-AA¹⁷-LYL:LKNYQ:NMVVR, APTKL:SAIS-AA¹⁷-LYL:LKNYQ:NMVVK, VPTKL:SAIS-AA¹⁷-LYL:LKNYQ:EGMSVAE, VPTKL:SAIS-AA¹⁷-LYL:LKNYQ:GMAVS, TPTKM:SAIS-AA¹⁷-LYL:LKNYQ:GMVVD, VPARL:SAIS-AA¹⁷-LYL:LKNYQ:DMVVE, APVKT:SAIS-AA¹⁷-LYL:LKNYQ:MIVEE, VPQAL:SAIS-AA¹⁷-LYL:LKNYQ:MIVRS, VSQDL:SAIS-AA¹⁷-LYL:LKNYQ:MIVKS, VPQDL:SAIS-AA¹⁷-LYL:LKNYQ:MVVKS, VPTEE:SAIS-AA¹⁷-LYL:LKNYQ:FLQHN, VPTGQ:SAIS-AA¹⁷-LYL:LKNYQ:LEEHS, SRVHH:SAIS-AA¹⁷-LYL:LKNYQ:RLEEH, TQVQL:SAIS-AA¹⁷-LYL:LKNYQ:TLEDH, VPEEL:SSLS-AA¹⁷-LFF:LKVYP:DMTVE, VPEEL:SSLS-AA¹⁷-LFF:LKVYP:EMTVE, VPEKL:SSLS-AA¹⁷-LFF:LKVYP:NMTVE, VPEQL:SSLS-AA¹⁷-LFF:LKVYP:NMTVE, VPEKL:SSLS-AA¹⁷-LFF:LKVYP:EGMSTVE, VPEKL:SSLS-AA¹⁷-LFF:LKVYP:GMTVE, VPEKM:SSLS-AA¹⁷-LFF:LKVYP:GMTVE, VPERL:SSLS-AA¹⁷-LFF:LKVYP:DMTVE, VPEKT:SSLS-AA¹⁷-LFF:LKVYP:MITVE, VPEAL:SSLS-AA¹⁷-LFF:LKVYP:MITVE, VPEDL:SSLS-AA¹⁷-LFF:LKVYP:MITVE, VPEDL:SSLS-AA¹⁷-LFF:LKVYP:MVTVE, VPTEL:SSLS-AA¹⁷-LFF:LKVYP:DMVVE, VPTEL:SSLS-AA¹⁷-LFF:LKVYP:EMVVE, APTKL:SSLS-AA¹⁷-LFF:LKVYP:NMVVR, APTQL:SSLS-AA¹⁷-LFF:LKVYP:NMVVR, APTKL:SSLS-AA¹⁷-LFF:LKVYP:NMVVK, VPTKL:SSLS-AA¹⁷-LFF:LKVYP:EGMSVAE, VPTKL:SSLS-AA¹⁷-LFF:LKVYP:GMAVS, TPTKM:SSLS-AA¹⁷-LFF:LKVYP:GMVVD, VPARL:SSLS-AA¹⁷-LFF:LKVYP:DMVVE, VPTRL:SSLS-AA¹⁷-LFF:LKVYP:DMVVE, APVKT:SSLS-AA¹⁷-LFF:LKVYP:MIVEE, VPQAL:SSLS-AA¹⁷-LFF:LKVYP:MIVRS, VSQDL:SSLS-AA¹⁷-LFF:LKVYP:MIVKS, VPQDL:SSLS-AA¹⁷-LFF:LKVYP:MVVKS, VPTEE:SSLS-AA¹⁷-LFF:LKVYP:FLQHN, VPTGQ:SSLS-AA¹⁷-LFF:LKVYP:LEEHS, SRVHH:SSLS-AA¹⁷-LFF:LKVYP:RLEEH, TQVQL:SSLS-AA¹⁷-LFF:LKVYP:TLEDH, APTEL:NAIS-AA¹⁷-LYF:LKKYR:DMVVR, APTKM:NAIS-AA¹⁷-LYF:LKKYR:NMVVR, APTEL:NAIS-AA¹⁷-LYF:LKKYR:EMVVR, APTKL:NAIS-AA¹⁷-LYF:LKKYR:NMVVR, APTKL:NAIS-AA¹⁷-LYF:LKKYR:EGMSVVR, APTKL:NAIS-AA¹⁷-LYF:LKKYR:GMVVR, APTKM:NAIS-AA¹⁷-LYF:LKKYR:GMVVR, APTRL:NAIS-AA¹⁷-LYF:LKKYR:DMVVR, APTKT:NAIS-AA¹⁷-LYF:LKKYR:MIVVR, APTAL:NAIS-AA¹⁷-LYF:LKKYR:MIVVR, APTDL:NAIS-AA¹⁷-LYF:LKKYR:MIVVR, APTDL:NAIS-AA¹⁷-LYF:LKKYR:MVVVR, VPTEL:NAIS-AA¹⁷-LYF:LKKYR:DMVVE, VPEKM:NAIS-AA¹⁷-LYF:LKKYR:NMTVE, VPTEL:NAIS-AA¹⁷-LYF:LKKYR:EMVVE, APTKL:NAIS-AA¹⁷-LYF:LKKYR:NMVVK, VPTKL:NAIS-AA¹⁷-LYF:LKKYR:EGMSVAE, VPTKL:NAIS-AA¹⁷-LYF:LKKYR:GMAVS, TPTKM:NAIS-AA¹⁷-LYF:LKKYR:GMVVD, VPARL:NAIS-AA¹⁷-LYF:LKKYR:DMVVE, VPTRL:NAIS-AA¹⁷-LYF:LKKYR:DMVVE, APVKT:NAIS-AA¹⁷-LYF:LKKYR:MIVEE, VPQAL:NAIS-AA¹⁷-LYF:LKKYR:MIVRS, VSQDL:NAIS-AA¹⁷-LYF:LKKYR:MIVKS, VPQDL:NAIS-AA¹⁷-LYF:LKKYR:MVVKS, VPTEE:NAIS-AA¹⁷-LYF:LKKYR:FLQHN, VPTGQ:NAIS-AA¹⁷-LYF:LKKYR:LEEHS, SRVHH:NAIS-AA¹⁷-LYF:LKKYR:RLEEH, TQVQL:NAIS-AA¹⁷-LYF:LKKYR:TLEDH, APTEL:SATS-AA¹⁷-LYY:LRKHR:DMVVK, APTKM:SATS-AA¹⁷-LYY:LRKHR:NMVVK, APTEL:SATS-AA¹⁷-LYY:LRKHR:EMVVK, APTKL:SATS-AA¹⁷-LYY:LRKHR:NMVVK, APTQL:SATS-AA¹⁷-LYY:LRKHR:NMVVK, APTKL:SATS-AA¹⁷-LYY:LRKHR:EGMSVVK, APTKL:SATS-AA¹⁷-LYY:LRKHR:GMVVK, APTKM:SATS-AA¹⁷-LYY:LRKHR:GMVVK, APTRL:SATS-AA¹⁷-LYY:LRKHR:DMVVK, APTKT:SATS-AA¹⁷-LYY:LRKHR:MIVVK, APTAL:SATS-AA¹⁷-LYY:LRKHR:MIVVK, APTDL:SATS-AA¹⁷-LYY:LRKHR:MIVVK, APTDL:SATS-AA¹⁷-LYY:LRKHR:MVVVK, VPTEL:SATS-AA¹⁷-LYY:LRKHR:DMVVE, VPEKM:SATS-AA¹⁷-LYY:LRKHR:NMTVE, VPTEL:SATS-AA¹⁷-LYY:LRKHR:EMVVE, APTKL:SATS-AA¹⁷-LYY:LRKHR:NMVVR, APTQL:SATS-AA¹⁷-LYY:LRKHR:NMVVR, VPTKL:SATS-AA¹⁷-LYY:LRKHR:EGMSVAE, VPTKL:SATS-AA¹⁷-LYY:LRKHR:GMAVS, TPTKM:SATS-AA¹⁷-LYY:LRKHR:GMVVD, VPARL:SATS-AA¹⁷-LYY:LRKHR:DMVVE, VPTRL:SATS-AA¹⁷-LYY:LRKHR:DMVVE, APVKT:SATS-AA¹⁷-LYY:LRKHR:MIVEE, VPQAL:SATS-AA¹⁷-LYY:LRKHR:MIVRS, VSQDL:SATS-AA¹⁷-LYY:LRKHR:MIVKS, VPQDL:SATS-AA¹⁷-LYY:LRKHR:MVVKS, VPTEE:SATS-AA¹⁷-LYY:LRKHR:FLQHN, VPTGQ:SATS-AA¹⁷-LYY:LRKHR:LEEHS, SRVHH:SATS-AA¹⁷-LYY:LRKHR:RLEEH, TQVQL:SATS-AA¹⁷-LYY:LRKHR:TLEDH, VPTEL:SPIS-AA¹⁷-LYK:LKYHY:DMVAE, VPTKM:SPIS-AA¹⁷-LYK:LKYHY:NMVAE, VPTEL:SPIS-AA¹⁷-LYK:LKYHY:EMVAE, VPTKL:SPIS-AA¹⁷-LYK:LKYHY:NMVAE, VPTQL:SPIS-AA¹⁷-LYK:LKYHY:NMVAE, VPTKL:SPIS-AA¹⁷-LYK:LKYHY:GMVAE, VPTKM:SPIS-AA¹⁷-LYK:LKYHY:GMVAE, VPTRL:SPIS-AA¹⁷-LYK:LKYHY:DMVAE, VPTKT:SPIS-AA¹⁷-LYK:LKYHY:MIVAE, VPTAL:SPIS-AA¹⁷-LYK:LKYHY:MIVAE, VPTDL:SPIS-AA¹⁷-LYK:LKYHY:MIVAE, VPTDL:SPIS-AA¹⁷-LYK:LKYHY:MVVAE, VPTEL:SPIS-AA¹⁷-LYK:LKYHY:DMVVE, VPEKM:SPIS-AA¹⁷-LYK:LKYHY:NMTVE, VPTEL:SPIS-AA¹⁷-LYK:LKYHY:EMVVE, APTKL:SPIS-AA¹⁷-LYK:LKYHY:NMVVR, APTQL:SPIS-AA¹⁷-LYK:LKYHY:NMVVR, APTKL:SPIS-AA¹⁷-LYK:LKYHY:NMVVK, VPTKL:SPIS-AA¹⁷-LYK:LKYHY:GMAVS, TPTKM:SPIS-AA¹⁷-LYK:LKYHY:GMVVD, VPARL:SPIS-AA¹⁷-LYK:LKYHY:DMVVE, VPTRL:SPIS-AA¹⁷-LYK:LKYHY:DMVVE, APVKT:SPIS-AA¹⁷-LYK:LKYHY:MIVEE, VPQAL:SPIS-AA¹⁷-LYK:LKYHY:MIVRS, VSQDL:SPIS-AA¹⁷-LYK:LKYHY:MIVKS, VPQDL:SPIS-AA¹⁷-LYK:LKYHY:MVVKS, VPTEE:SPIS-AA¹⁷-LYK:LKYHY:FLQHN, VPTGQ:SPIS-AA¹⁷-LYK:LKYHY:LEEHS, SRVHH:SPIS-AA¹⁷-LYK:LKYHY:RLEEH, TQVQL:SPIS-AA¹⁷-LYK:LKYHY:TLEDH, VPTEL:EPIS-AA¹⁷-LYL:KFKYE:DMAVS, VPTKM:EPIS-AA¹⁷-LYL:KFKYE:NMAVS, VPTEL:EPIS-AA¹⁷-LYL:KFKYE:EMAVS, VPTKL:EPIS-AA¹⁷-LYL:KFKYE:NMAVS, VPTQL:EPIS-AA¹⁷-LYL:KFKYE:NMAVS, VPTKL:EPIS-AA¹⁷-LYL:KFKYE:EGMSAVS, VPTKM:EPIS-AA¹⁷-LYL:KFKYE:GMAVS, VPTRL:EPIS-AA¹⁷-LYL:KFKYE:DMAVS, VPTKT:EPIS-AA¹⁷-LYL:KFKYE:MIAVS, VPTAL:EPIS-AA¹⁷-LYL:KFKYE:MIAVS, VPTDL:EPIS-AA¹⁷-LYL:KFKYE:MIAVS, VPTDL:EPIS-AA¹⁷-LYL:KFKYE:MVAVS, VPTEL:EPIS-AA¹⁷-LYL:KFKYE:DMVVE, VPEKM:EPIS-AA¹⁷-LYL:KFKYE:NMTVE, VPTEL:EPIS-AA¹⁷-LYL:KFKYE:EMVVE, APTKL:EPIS-AA¹⁷-LYL:KFKYE:NMVVR, APTQL:EPIS-AA¹⁷-LYL:KFKYE:NMVVR, APTKL:EPIS-AA¹⁷-LYL:KFKYE:NMVVK, VPTKL:EPIS-AA¹⁷-LYL:KFKYE:EGMSVAE, TPTKM:EPIS-AA¹⁷-LYL:KFKYE:GMVVD, VPARL:EPIS-AA¹⁷-LYL:KFKYE:DMVVE, VPTRL:EPIS-AA¹⁷-LYL:KFKYE:DMVVE, APVKT:EPIS-AA¹⁷-LYL:KFKYE:MIVEE, VPQAL:EPIS-AA¹⁷-LYL:KFKYE:MIVRS, VSQDL:EPIS-AA¹⁷-LYL:KFKYE:MIVKS, VPQDL:EPIS-AA¹⁷-LYL:KFKYE:MVVKS, VPTEE:EPIS-AA¹⁷-LYL:KFKYE:FLQHN, VPTGQ:EPIS-AA¹⁷-LYL:KFKYE:LEEHS, SRVHH:EPIS-AA¹⁷-LYL:KFKYE:RLEEH, TQVQL:EPIS-AA¹⁷-LYL:KFKYE:TLEDH, TPTEL:SPIN-AA¹⁷-LYF:YGKIP:DMVVD, TPTKM:SPIN-AA¹⁷-LYF:YGKIP:NMVVD, TPTEL:SPIN-AA¹⁷-LYF:YGKIP:EMVVD, TPTKL:SPIN-AA¹⁷-LYF:YGKIP:NMVVD, TPTQL:SPIN-AA¹⁷-LYF:YGKIP:NMVVD, TPTKL:SPIN-AA¹⁷-LYF:YGKIP:EGMSVVD, TPTKL:SPIN-AA¹⁷-LYF:YGKIP:GMVVD, TPTRL:SPIN-AA¹⁷-LYF:YGKIP:DMVVD, TPTKT:SPIN-AA¹⁷-LYF:YGKIP:MIVVD, TPTAL:SPIN-AA¹⁷-LYF:YGKIP:MIVVD, TPTDL:SPIN-AA¹⁷-LYF:YGKIP:MIVVD, TPTDL:SPIN-AA¹⁷-LYF:YGKIP:MVVVD, VPTEL:SPIN-AA¹⁷-LYF:YGKIP:DMVVE, VPEKM:SPIN-AA¹⁷-LYF:YGKIP:NMTVE, VPTEL:SPIN-AA¹⁷-LYF:YGKIP:EMVVE, APTKL:SPIN-AA¹⁷-LYF:YGKIP:NMVVR, APTQL:SPIN-AA¹⁷-LYF:YGKIP:NMVVR, APTKL:SPIN-AA¹⁷-LYF:YGKIP:NMVVK, VPTKL:SPIN-AA¹⁷-LYF:YGKIP:EGMSVAE, VPTKL:SPIN-AA¹⁷-LYF:YGKIP:GMAVS, VPARL:SPIN-AA¹⁷-LYF:YGKIP:DMVVE, VPTRL:SPIN-AA¹⁷-LYF:YGKIP:DMVVE, APVKT:SPIN-AA¹⁷-LYF:YGKIP:MIVEE, VPQAL:SPIN-AA¹⁷-LYF:YGKIP:MIVRS, VSQDL:SPIN-AA¹⁷-LYF:YGKIP:MIVKS, VPQDL:SPIN-AA¹⁷-LYF:YGKIP:MVVKS, VPTEE:SPIN-AA¹⁷-LYF:YGKIP:FLQHN, VPTGQ:SPIN-AA¹⁷-LYF:YGKIP:LEEHS, SRVHH:SPIN-AA¹⁷-LYF:YGKIP:RLEEH, TQVQL:SPIN-AA¹⁷-LYF:YGKIP:TLEDH, VPAEL:SPIS-AA¹⁷-LYI:YKQYE:DMVVE, VPAKM:SPIS-AA¹⁷-LYI:YKQYE:NMVVE, VPAEL:SPIS-AA¹⁷-LYI:YKQYE:EMVVE, VPAKL:SPIS-AA¹⁷-LYI:YKQYE:NMVVE, VPAQL:SPIS-AA¹⁷-LYI:YKQYE:NMVVE, VPAKL:SPIS-AA¹⁷-LYI:YKQYE:EGMSVVE, VPAKL:SPIS-AA¹⁷-LYI:YKQYE:GMVVE, VPAKM:SPIS-AA¹⁷-LYI:YKQYE:GMVVE, VPARL:SPIS-AA¹⁷-LYI:YKQYE:DMVVE, VPAKT:SPIS-AA¹⁷-LYI:YKQYE:MIVVE, VPAAL:SPIS-AA¹⁷-LYI:YKQYE:MIVVE, VPADL:SPIS-AA¹⁷-LYI:YKQYE:MIVVE, VPADL:SPIS-AA¹⁷-LYI:YKQYE:MVVVE, VPTEL:SPIS-AA¹⁷-LYI:YKQYE:DMVVE, VPEKM:SPIS-AA¹⁷-LYI:YKQYE:NMTVE, VPTEL:SPIS-AA¹⁷-LYI:YKQYE:EMVVE, APTKL:SPIS-AA¹⁷-LYI:YKQYE:NMVVR, APTQL:SPIS-AA¹⁷-LYI:YKQYE:NMVVR, APTKL:SPIS-AA¹⁷-LYI:YKQYE:NMVVK, VPTKL:SPIS-AA¹⁷-LYI:YKQYE:EGMSVAE, VPTKL:SPIS-AA¹⁷-LYI:YKQYE:GMAVS, TPTKM:SPIS-AA¹⁷-LYI:YKQYE:GMVVD, VPTRL:SPIS-AA¹⁷-LYI:YKQYE:DMVVE, APVKT:SPIS-AA¹⁷-LYI:YKQYE:MIVEE, VPQAL:SPIS-AA¹⁷-LYI:YKQYE:MIVRS, VSQDL:SPIS-AA¹⁷-LYI:YKQYE:MIVKS, VPQDL:SPIS-AA¹⁷-LYI:YKQYE:MVVKS, VPTEE:SPIS-AA¹⁷-LYI:YKQYE:FLQHN, VPTGQ:SPIS-AA¹⁷-LYI:YKQYE:LEEHS, SRVHH:SPIS-AA¹⁷-LYI:YKQYE:RLEEH, TQVQL:SPIS-AA¹⁷-LYI:YKQYE:TLEDH, VPTEL:SPIS-AA¹⁷-LFI:YKQYE:DMVVE, VPTKM:SPIS-AA¹⁷-LFI:YKQYE:NMVVE, VPTEL:SPIS-AA¹⁷-LFI:YKQYE:EMVVE, VPTKL:SPIS-AA¹⁷-LFI:YKQYE:NMVVE, VPTQL:SPIS-AA¹⁷-LFI:YKQYE:NMVVE, VPTKL:SPIS-AA¹⁷-LFI:YKQYE:EGMSVVE, VPTKL:SPIS-AA¹⁷-LFI:YKQYE:GMVVE, VPTKM:SPIS-AA¹⁷-LFI:YKQYE:GMVVE, VPTRL:SPIS-AA¹⁷-LFI:YKQYE:DMVVE, VPTKT:SPIS-AA¹⁷-LFI:YKQYE:MIVVE, VPTAL:SPIS-AA¹⁷-LFI:YKQYE:MIVVE, VPTDL:SPIS-AA¹⁷-LFI:YKQYE:MIVVE, VPTDL:SPIS-AA¹⁷-LFI:YKQYE:MVVVE, VPEKM:SPIS-AA¹⁷-LFI:YKQYE:NMTVE, APTKL:SPIS-AA¹⁷-LFI:YKQYE:NMVVR, APTQL:SPIS-AA¹⁷-LFI:YKQYE:NMVVR, APTKL:SPIS-AA¹⁷-LFI:YKQYE:NMVVK, VPTKL:SPIS-AA¹⁷-LFI:YKQYE:EGMSVAE, VPTKL:SPIS-AA¹⁷-LFI:YKQYE:GMAVS, TPTKM:SPIS-AA¹⁷-LFI:YKQYE:GMVVD, VPARL:SPIS-AA¹⁷-LFI:YKQYE:DMVVE, APVKT:SPIS-AA¹⁷-LFI:YKQYE:MIVEE, VPQAL:SPIS-AA¹⁷-LFI:YKQYE:MIVRS, VSQDL:SPIS-AA¹⁷-LFI:YKQYE:MIVKS, VPQDL:SPIS-AA¹⁷-LFI:YKQYE:MVVKS, VPTEE:SPIS-AA¹⁷-LFI:YKQYE:FLQHN, VPTGQ:SPIS-AA¹⁷-LFI:YKQYE:LEEHS, SRVHH:SPIS-AA¹⁷-LFI:YKQYE:RLEEH, TQVQL:SPIS-AA¹⁷-LFI:YKQYE:TLEDH, APVEL:KPLS-AA¹⁷-LYV:DHHKD:DMVEE, APVKM:KPLS-AA¹⁷-LYV:DHHKD:NMVEE, APVEL:KPLS-AA¹⁷-LYV:DHHKD:EMVEE, APVKL:KPLS-AA¹⁷-LYV:DHHKD:NMVEE, APVQL:KPLS-AA¹⁷-LYV:DHHKD:NMVEE, APVKL:KPLS-AA¹⁷-LYV:DHHKD:EGMSVEE, APVKL:KPLS-AA¹⁷-LYV:DHHKD:GMVEE, APVKM:KPLS-AA¹⁷-LYV:DHHKD:GMVEE, APVRL:KPLS-AA¹⁷-LYV:DHHKD:DMVEE, APVAL:KPLS-AA¹⁷-LYV:DHHKD:MIVEE, APVDL:KPLS-AA¹⁷-LYV:DHHKD:MIVEE, APVDL:KPLS-AA¹⁷-LYV:DHHKD:MVVEE, VPTEL:KPLS-AA¹⁷-LYV:DHHKD:DMVVE, VPEKM:KPLS-AA¹⁷-LYV:DHHKD:NMTVE, VPTEL:KPLS-AA¹⁷-LYV:DHHKD:EMVVE, APTKL:KPLS-AA¹⁷-LYV:DHHKD:NMVVR, APTQL:KPLS-AA¹⁷-LYV:DHHKD:NMVVR, APTKL:KPLS-AA¹⁷-LYV:DHHKD:NMVVK, VPTKL:KPLS-AA¹⁷-LYV:DHHKD:EGMSVAE, VPTKL:KPLS-AA¹⁷-LYV:DHHKD:GMAVS, TPTKM:KPLS-AA¹⁷-LYV:DHHKD:GMVVD, VPARL:KPLS-AA¹⁷-LYV:DHHKD:DMVVE, VPTRL:KPLS-AA¹⁷-LYV:DHHKD:DMVVE, VPQAL:KPLS-AA¹⁷-LYV:DHHKD:MIVRS, VSQDL:KPLS-AA¹⁷-LYV:DHHKD:MIVKS, VPQDL:KPLS-AA¹⁷-LYV:DHHKD:MVVKS, VPTEE:KPLS-AA¹⁷-LYV:DHHKD:FLQHN, VPTGQ:KPLS-AA¹⁷-LYV:DHHKD:LEEHS, SRVHH:KPLS-AA¹⁷-LYV:DHHKD:RLEEH, TQVQL:KPLS-AA¹⁷-LYV:DHHKD:TLEDH, VPQEL:EPLP-AA¹⁷-VYY:EQLSN:DMVRS, VPQKM:EPLP-AA¹⁷-VYY:EQLSN:NMVRS, VPQEL:EPLP-AA¹⁷-VYY:EQLSN:EMVRS, VPQKL:EPLP-AA¹⁷-VYY:EQLSN:NMVRS, VPQQL:EPLP-AA¹⁷-VYY:EQLSN:NMVRS, VPQKL:EPLP-AA¹⁷-VYY:EQLSN:EGMSVRS, VPQKL:EPLP-AA¹⁷-VYY:EQLSN:GMVRS, VPQKM:EPLP-AA¹⁷-VYY:EQLSN:GMVRS, VPQRL:EPLP-AA¹⁷-VYY:EQLSN:DMVRS, VPQKT:EPLP-AA¹⁷-VYY:EQLSN:MIVRS, VPQDL:EPLP-AA¹⁷-VYY:EQLSN:MIVRS, VPQDL:EPLP-AA¹⁷-VYY:EQLSN:MVVRS, VPTEL:EPLP-AA¹⁷-VYY:EQLSN:DMVVE, VPEKM:EPLP-AA¹⁷-VYY:EQLSN:NMTVE, VPTEL:EPLP-AA¹⁷-VYY:EQLSN:EMVVE, APTKL:EPLP-AA¹⁷-VYY:EQLSN:NMVVR, APTQL:EPLP-AA¹⁷-VYY:EQLSN:NMVVR, APTKL:EPLP-AA¹⁷-VYY:EQLSN:NMVVK, VPTKL:EPLP-AA¹⁷-VYY:EQLSN:EGMSVAE, VPTKL:EPLP-AA¹⁷-VYY:EQLSN:GMAVS, TPTKM:EPLP-AA¹⁷-VYY:EQLSN:GMVVD, VPARL:EPLP-AA¹⁷-VYY:EQLSN:DMVVE, VPTRL:EPLP-AA¹⁷-VYY:EQLSN:DMVVE, APVKT:EPLP-AA¹⁷-VYY:EQLSN:MIVEE, VSQDL:EPLP-AA¹⁷-VYY:EQLSN:MIVKS, VPQDL:EPLP-AA¹⁷-VYY:EQLSN:MVVKS, VPTEE:EPLP-AA¹⁷-VYY:EQLSN:FLQHN, VPTGQ:EPLP-AA¹⁷-VYY:EQLSN:LEEHS, SRVHH:EPLP-AA¹⁷-VYY:EQLSN:RLEEH, TQVQL:EPLP-AA¹⁷-VYY:EQLSN:TLEDH, VSQEL:EPLT-AA¹⁷-LYY:EQLSN:DMVKS, VSQKM:EPLT-AA¹⁷-LYY:EQLSN:NMVKS, VSQEL:EPLT-AA¹⁷-LYY:EQLSN:EMVKS, VSQKL:EPLT-AA¹⁷-LYY:EQLSN:NMVKS, VSQQL:EPLT-AA¹⁷-LYY:EQLSN:NMVKS, VSQKL:EPLT-AA¹⁷-LYY:EQLSN:EGMSVKS, VSQKL:EPLT-AA¹⁷-LYY:EQLSN:GMVKS, VSQKM:EPLT-AA¹⁷-LYY:EQLSN:GMVKS, VSQRL:EPLT-AA¹⁷-LYY:EQLSN:DMVKS, VSQKT:EPLT-AA¹⁷-LYY:EQLSN:MIVKS, VSQAL:EPLT-AA¹⁷-LYY:EQLSN:MIVKS, VSQDL:EPLT-AA¹⁷-LYY:EQLSN:MVVKS, VPTEL:EPLT-AA¹⁷-LYY:EQLSN:DMVVE, VPEKM:EPLT-AA¹⁷-LYY:EQLSN:NMTVE, VPTEL:EPLT-AA¹⁷-LYY:EQLSN:EMVVE, APTKL:EPLT-AA¹⁷-LYY:EQLSN:NMVVR, APTQL:EPLT-AA¹⁷-LYY:EQLSN:NMVVR, APTKL:EPLT-AA¹⁷-LYY:EQLSN:NMVVK, VPTKL:EPLT-AA¹⁷-LYY:EQLSN:EGMSVAE, VPTKL:EPLT-AA¹⁷-LYY:EQLSN:GMAVS, TPTKM:EPLT-AA¹⁷-LYY:EQLSN:GMVVD, VPARL:EPLT-AA¹⁷-LYY:EQLSN:DMVVE, VPTRL:EPLT-AA¹⁷-LYY:EQLSN:DMVVE, APVKT:EPLT-AA¹⁷-LYY:EQLSN:MIVEE, VPQAL:EPLT-AA¹⁷-LYY:EQLSN:MIVRS, VPTEE:EPLT-AA¹⁷-LYY:EQLSN:FLQHN, VPTGQ:EPLT-AA¹⁷-LYY:EQLSN:LEEHS, SRVHH:EPLT-AA¹⁷-LYY:EQLSN:RLEEH, TQVQL:EPLT-AA¹⁷-LYY:EQLSN:TLEDH, VPQEL:EPLT-AA¹⁷-LYY:EQLSN:DMVKS, VPQKM:EPLT-AA¹⁷-LYY:EQLSN:NMVKS, VPQEL:EPLT-AA¹⁷-LYY:EQLSN:EMVKS, VPQKL:EPLT-AA¹⁷-LYY:EQLSN:NMVKS, VPQQL:EPLT-AA¹⁷-LYY:EQLSN:NMVKS, VPQKL:EPLT-AA¹⁷-LYY:EQLSN:EGMSVKS, VPQKL:EPLT-AA¹⁷-LYY:EQLSN:GMVKS, VPQKM:EPLT-AA¹⁷-LYY:EQLSN:GMVKS, VPQRL:EPLT-AA¹⁷-LYY:EQLSN:DMVKS, VPQKT:EPLT-AA¹⁷-LYY:EQLSN:MIVKS, VPQAL:EPLT-AA¹⁷-LYY:EQLSN:MIVKS, VPQDL:EPLT-AA¹⁷-LYY:EQLSN:MIVKS, VPTGQ:SNIT-AA¹⁷-QIM:IGEMS:LEQHN, VPTEL:SNIT-AA¹⁷-QIM:IGEMS:DMVVE, VPEKM:SNIT-AA¹⁷-QIM:IGEMS:NMTVE, VPTEL:SNIT-AA¹⁷-QIM:IGEMS:EMVVE, APTKL:SNIT-AA¹⁷-QIM:IGEMS:NMVVR, APTQL:SNIT-AA¹⁷-QIM:IGEMS:NMVVR, APTKL:SNIT-AA¹⁷-QIM:IGEMS:NMVVK, VPTKL:SNIT-AA¹⁷-QIM:IGEMS:EGMSVAE, VPTKL:SNIT-AA¹⁷-QIM:IGEMS:GMAVS, TPTKM:SNIT-AA¹⁷-QIM:IGEMS:GMVVD, VPARL:SNIT-AA¹⁷-QIM:IGEMS:DMVVE, VPTRL:SNIT-AA¹⁷-QIM:IGEMS:DMVVE, APVKT:SNIT-AA¹⁷-QIM:IGEMS:MIVEE, VPQAL:SNIT-AA¹⁷-QIM:IGEMS:MIVRS, VSQDL:SNIT-AA¹⁷-QIM:IGEMS:MIVKS, VPQDL:SNIT-AA¹⁷-QIM:IGEMS:MVVKS, VPTGQ:SNIT-AA¹⁷-QIM:IGEMS:LEEHS, SRVHH:SNIT-AA¹⁷-QIM:IGEMS:RLEEH, TQVQL:SNIT-AA¹⁷-QIM:IGEMS:TLEDH, VPTEE:SNIT-AA¹⁷-QIM:LGEMS:FLEHS, VPTEL:SNIT-AA¹⁷-QIM:LGEMS:DMVVE, VPEKM:SNIT-AA¹⁷-QIM:LGEMS:NMTVE, VPTEL:SNIT-AA¹⁷-QIM:LGEMS:EMVVE, APTKL:SNIT-AA¹⁷-QIM:LGEMS:NMVVR, APTQL:SNIT-AA¹⁷-QIM:LGEMS:NMVVR, APTKL:SNIT-AA¹⁷-QIM:LGEMS:NMVVK, VPTKL:SNIT-AA¹⁷-QIM:LGEMS:EGMSVAE, VPTKL:SNIT-AA¹⁷-QIM:LGEMS:GMAVS, TPTKM:SNIT-AA¹⁷-QIM:LGEMS:GMVVD, VPARL:SNIT-AA¹⁷-QIM:LGEMS:DMVVE, VPTRL:SNIT-AA¹⁷-QIM:LGEMS:DMVVE, APVKT:SNIT-AA¹⁷-QIM:LGEMS:MIVEE, VPQAL:SNIT-AA¹⁷-QIM:LGEMS:MIVRS, VSQDL:SNIT-AA¹⁷-QIM:LGEMS:MIVKS, VPQDL:SNIT-AA¹⁷-QIM:LGEMS:MVVKS, VPTEE:SNIT-AA¹⁷-QIM:LGEMS:FLQHN, SRVHH:SNIT-AA¹⁷-QIM:LGEMS:RLEEH, TQVQL:SNIT-AA¹⁷-QIM:LGEMS:TLEDH, SRVQL:RSVK-AA¹⁷-AKV:KEVQV:TLEEH, VPTEL:RSVK-AA¹⁷-AKV:KEVQV:DMVVE, VPEKM:RSVK-AA¹⁷-AKV:KEVQV:NMTVE, VPTEL:RSVK-AA¹⁷-AKV:KEVQV:EMVVE, APTKL:RSVK-AA¹⁷-AKV:KEVQV:NMVVR, APTQL:RSVK-AA¹⁷-AKV:KEVQV:NMVVR, APTKL:RSVK-AA¹⁷-AKV:KEVQV:NMVVK, VPTKL:RSVK-AA¹⁷-AKV:KEVQV:EGMSVAE, VPTKL:RSVK-AA¹⁷-AKV:KEVQV:GMAVS, TPTKM:RSVK-AA¹⁷-AKV:KEVQV:GMVVD, VPARL:RSVK-AA¹⁷-AKV:KEVQV:DMVVE, VPTRL:RSVK-AA¹⁷-AKV:KEVQV:DMVVE, APVKT:RSVK-AA¹⁷-AKV:KEVQV:MIVEE, VPQAL:RSVK-AA¹⁷-AKV:KEVQV:MIVRS, VSQDL:RSVK-AA¹⁷-AKV:KEVQV:MIVKS, VPQDL:RSVK-AA¹⁷-AKV:KEVQV:MVVKS, VPTEE:RSVK-AA¹⁷-AKV:KEVQV:FLQHN, VPTGQ:RSVK-AA¹⁷-AKV:KEVQV:LEEHS, TQVQL:RSVK-AA¹⁷-AKV:KEVQV:TLEDH, TQVHH:RPVQ-AA¹⁷-RKI:KKATV:RLEDH, VPTEL:RPVQ-AA¹⁷-RKI:KKATV:DMVVE, VPEKM:RPVQ-AA¹⁷-RKI:KKATV:NMTVE, VPTEL:RPVQ-AA¹⁷-RKI:KKATV:EMVVE, APTKL:RPVQ-AA¹⁷-RKI:KKATV:NMVVR, APTQL:RPVQ-AA¹⁷-RKI:KKATV:NMVVR, APTKL:RPVQ-AA¹⁷-RKI:KKATV:NMVVK, VPTKL:RPVQ-AA¹⁷-RKI:KKATV:EGMSVAE, VPTKL:RPVQ-AA¹⁷-RKI:KKATV:GMAVS, TPTKM:RPVQ-AA¹⁷-RKI:KKATV:GMVVD, VPARL:RPVQ-AA¹⁷-RKI:KKATV:DMVVE, VPTRL:RPVQ-AA¹⁷-RKI:KKATV:DMVVE, APVKT:RPVQ-AA¹⁷-RKI:KKATV:MIVEE, VPQAL:RPVQ-AA¹⁷-RKI:KKATV:MIVRS, VSQDL:RPVQ-AA¹⁷-RKI:KKATV:MIVKS, VPQDL:RPVQ-AA¹⁷-RKI:KKATV:MVVKS, VPTEE:RPVQ-AA¹⁷-RKI:KKATV:FLQHN, VPTGQ:RPVQ-AA¹⁷-RKI:KKATV:LEEHS and SRVHH:RPVQ-AA¹⁷-RKI:KKATV:RLEEH; and wherein AA¹⁷ is selected from the group consisting of G, A, V, L, I, P, F, M, W, T and S (in particular is selected from the group consisting of M, I, L, V and T).

[0393] In particular, in certain embodiments, the quadruplet PEP9:PEP1:PEP2:PEP10 is selected from the group consisting of GIPEPXXVPTKM:SAIS:LKNYQ:NMVVESXAXR, SIPKAXXVPTEL:SAIS:LKNYQ:EMVVEGXGXR, HVTKPTXVPTKL:SAIS:LKNYQ:NMVVESXGXH, YVPKPXXVPTKL:SAIS:LKNYQ:NMVVESXGXH, TVPKPXXVPTQL:SAIS:LKNYQ:NMVVEAXGXH, AVPKAXXVPTKL:SAIS:LKNYQ:NMVVEAXGXH, KVGKAXXVPTKL:SAIS:LKNYQ:EGMSVVEXGXR, KASKAXXVPTKL:SAIS:LKNYQ:GMVVEEXGXR, GSAGPXXVPTKM:SAIS:LKNYQ:GMVVERXGXS, AAPASXXVPTRL:SAIS:LKNYQ:DMVVEAXGXR, STPPTXXVPTRL:SAIS:LKNYQ:DMVVESXGXR, HVPKPXXVPTKL:SAIS:LKNYQ:NMVVESXGXH, RVPSTXXVPTKT:SAIS:LKNYQ:MIVVEXGXL, ASAAPXXVPTAL:SAIS:LKNYQ:MIVVEXKXS, ASASPXXVPTDL:SAIS:LKNYQ:MIVVEXKXS, ASASPXXVPTDL:SAIS:LKNYQ:MVVVEXKXS, NDEGLEXVPTEE:SAIS:LKNYQ:FLVVEKXEXR, NDEGLEXVPTGQ:SAIS:LKNYQ:LEVVEQXEXR, SSVKXQPVPTHH:SAIS:LKNYQ:RLVVELEXAXA RNVQXRPVPTQL:SAIS:LKNYQ:TLVVELAXKXE, GIPEPXXVPEKM:SAIS:LKNYQ:NMTVESXAXR, HVTKPTXAPTKL:SAIS:LKNYQ:NMVVRSXGXH, YVPKPXXAPTKL:SAIS:LKNYQ:NMVVRSXGXH, TVPKPXXAPTQL:SAIS:LKNYQ:NMVVRAXGXH, AVPKAXXAPTKL:SAIS:LKNYQ:NMVVKAXGXH, KVGKAXXVPTKL:SAIS:LKNYQ:EGMSVAEXGXR, KASKAXXVPTKL:SAIS:LKNYQ:GMAVSEXGXR, GSAGPXXTPTKM:SAIS:LKNYQ:GMVVDRXGXS, AAPASXXVPARL:SAIS:LKNYQ:DMVVEAXGXR, HVPKPXXAPTKL:SAIS:LKNYQ:NMVVRSXGXH, RVPSTXXAPVKT:SAIS:LKNYQ:MIVEEXGXL, ASAAPXXVPQAL:SAIS:LKNYQ:MIVRSXKXS, ASASPXXVSQDL:SAIS:LKNYQ:MIVKSXKXS, ASASPXXVPQDL:SAIS:LKNYQ:MVVKSXKXS, NDEGLEXVPTEE:SAIS:LKNYQ:FLQHNKXEXR, NDEGLEXVPTGQ:SAIS:LKNYQ:LEEHSQXEXR, SSVKXQPSRVHH:SAIS:LKNYQ:RLEEHLEXAXA RNVQXRPTQVQL:SAIS:LKNYQ:TLEDHLAXKXE, KIPKAXXVPEEL:SSLS:LKVYP:DMTVEGXGXR, SIPKAXXVPEEL:SSLS:LKVYP:EMTVEGXGXR, HVTKPTXVPEKL:SSLS:LKVYP:NMTVESXGXH, YVPKPXXVPEKL:SSLS:LKVYP:NMTVESXGXH, TVPKPXXVPEQL:SSLS:LKVYP:NMTVEAXGXH, AVPKAXXVPEKL:SSLS:LKVYP:NMTVEAXGXH, KVGKAXXVPEKL:SSLS:LKVYP:EGMSTVEXGXR, KASKAXXVPEKL:SSLS:LKVYP:GMTVEEXGXR, GSAGPXXVPEKM:SSLS:LKVYP:GMTVERXGXS, AAPASXXVPERL:SSLS:LKVYP:DMTVEAXGXR, STPPTXXVPERL:SSLS:LKVYP:DMTVESXGXR, HVPKPXXVPEKL:SSLS:LKVYP:NMTVESXGXH, RVPSTXXVPEKT:SSLS:LKVYP:MITVEXGXL, ASAAPXXVPEAL:SSLS:LKVYP:MITVEXKXS, ASASPXXVPEDL:SSLS:LKVYP:MITVEXKXS, ASASPXXVPEDL:SSLS:LKVYP:MVTVEXKXS, NDEGLEXVPEEE:SSLS:LKVYP:FLTVEKXEXR, NDEGLEXVPEGQ:SSLS:LKVYP:LETVEQXEXR, SSVKXQPVPEHH:SSLS:LKVYP:RLTVELEXAXA, RNVQXRPVPEQL:SSLS:LKVYP:TLTVELAXKXE, KIPKAXXVPTEL:SSLS:LKVYP:DMVVEGXGXR, SIPKAXXVPTEL:SSLS:LKVYP:EMVVEGXGXR, HVTKPTXAPTKL:SSLS:LKVYP:NMVVRSXGXH, YVPKPXXAPTKL:SSLS:LKVYP:NMVVRSXGXH, TVPKPXXAPTQL:SSLS:LKVYP:NMVVRAXGXH, AVPKAXXAPTKL:SSLS:LKVYP:NMVVKAXGXH, KVGKAXXVPTKL:SSLS:LKVYP:EGMSVAEXGXR, KASKAXXVPTKL:SSLS:LKVYP:GMAVSEXGXR, GSAGPXXTPTKM:SSLS:LKVYP:GMVVDRXGXS, AAPASXXVPARL:SSLS:LKVYP:DMVVEAXGXR, STPPTXXVPTRL:SSLS:LKVYP:DMVVESXGXR, HVPKPXXAPTKL:SSLS:LKVYP:NMVVRSXGXH, RVPSTXXAPVKT:SSLS:LKVYP:MIVEEXGXL, ASAAPXXVPQAL:SSLS:LKVYP:MIVRSXKXS, ASASPXXVSQDL:SSLS:LKVYP:MIVKSXKXS, ASASPXXVPQDL:SSLS:LKVYP:MVVKSXKXS, NDEGLEXVPTEE:SSLS:LKVYP:FLQHNKXEXR, NDEGLEXVPTGQ:SSLS:LKVYP:LEEHSQXEXR, SSVKXQPSRVHH:SSLS:LKVYP:RLEEHLEXAXA, RNVQXRPTQVQL:SSLS:LKVYP:TLEDHLAXKXE, KIPKAXXVPTEL:SAIS:LKNYQ:DMVVEGXGXR, KIPKAXXAPTEL:NAIS:LKKYR:DMVVRGXGXR, GIPEPXXAPTKM:NAIS:LKKYR:NMVVRSXAXR, SIPKAXXAPTEL:NAIS:LKKYR:EMVVRGXGXR, YVPKPXXAPTKL:NAIS:LKKYR:NMVVRSXGXH, TVPKPXXAPTQL:NAIS:LKKYR:NMVVRAXGXH, AVPKAXXAPTKL:NAIS:LKKYR:NMVVRAXGXH, KVGKAXXAPTKL:NAIS:LKKYR:EGMSVVRXGXR, KASKAXXAPTKL:NAIS:LKKYR:GMVVREXGXR, GSAGPXXAPTKM:NAIS:LKKYR:GMVVRRXGXS, AAPASXXAPTRL:NAIS:LKKYR:DMVVRAXGXR, STPPTXXAPTRL:NAIS:LKKYR:DMVVRSXGXR, HVPKPXXAPTKL:NAIS:LKKYR:NMVVRSXGXH, RVPSTXXAPTKT:NAIS:LKKYR:MIVVRXGXL, ASAAPXXAPTAL:NAIS:LKKYR:MIVVRXKXS, ASASPXXAPTDL:NAIS:LKKYR:MIVVRXKXS, ASASPXXAPTDL:NAIS:LKKYR:MVVVRXKXS, NDEGLESAPTEE:NAIS:LKKYR:FLVVRKXEXR, NDEGLESAPTGQ:NAIS:LKKYR:LEVVRQXEXR, SSVKXQPAPTHH:NAIS:LKKYR:RLVVRLEXAXA, RNVQXRPAPTQL:NAIS:LKKYR:TLVVRLAXKXE, KIPKAXXVPTEL:NAIS:LKKYR:DMVVEGXGXR, GIPEPXXVPEKM:NAIS:LKKYR:NMTVESXAXR, SIPKAXXVPTEL:NAIS:LKKYR:EMVVEGXGXR, AVPKAXXAPTKL:NAIS:LKKYR:NMVVKAXGXH, KVGKAXXVPTKL:NAIS:LKKYR:EGMSVAEXGXR, KASKAXXVPTKL:NAIS:LKKYR:GMAVSEXGXR, GSAGPXXTPTKM:NAIS:LKKYR:GMVVDRXGXS, AAPASXXVPARL:NAIS:LKKYR:DMVVEAXGXR, STPPTXXVPTRL:NAIS:LKKYR:DMVVESXGXR, RVPSTXXAPVKT:NAIS:LKKYR:MIVEEXGXL, ASAAPXXVPQAL:NAIS:LKKYR:MIVRSXKXS, ASASPXXVSQDL:NAIS:LKKYR:MIVKSXKXS, ASASPXXVPQDL:NAIS:LKKYR:MVVKSXKXS, NDEGLEXVPTEE:NAIS:LKKYR:FLQHNKXEXR, NDEGLEXVPTGQ:NAIS:LKKYR:LEEHSQXEXR, SSVKXQPSRVHH:NAIS:LKKYR:RLEEHLEXAXA, RNVQXRPTQVQL:NAIS:LKKYR:TLEDHLAXKXE, HVTKPTXAPTKL:NAIS:LKKYR:NMVVRSXGXH, KIPKAXXAPTEL:SATS:LRKHR:DMVVKGXGXR, GIPEPXXAPTKM:SATS:LRKHR:NMVVKSXAXR, SIPKAXXAPTEL:SATS:LRKHR:EMVVKGXGXR, HVTKPTXAPTKL:SATS:LRKHR:NMVVKSXGXH, YVPKPXXAPTKL:SATS:LRKHR:NMVVKSXGXH, TVPKPXXAPTQL:SATS:LRKHR:NMVVKAXGXH, KVGKAXXAPTKL:SATS:LRKHR:EGMSVVKXGXR, KASKAXXAPTKL:SATS:LRKHR:GMVVKEXGXR, GSAGPXXAPTKM:SATS:LRKHR:GMVVKRXGXS, AAPASXXAPTRL:SATS:LRKHR:DMVVKAXGXR, STPPTXXAPTRL:SATS:LRKHR:DMVVKSXGXR, HVPKPXXAPTKL:SATS:LRKHR:NMVVKSXGXH, RVPSTXXAPTKT:SATS:LRKHR:MIVVKXGXL, ASAAPXXAPTAL:SATS:LRKHR:MIVVKXKXS, ASASPXXAPTDL:SATS:LRKHR:MIVVKXKXS, ASASPXXAPTDL:SATS:LRKHR:MVVVKXKXS, NDEGLESAPTEE:SATS:LRKHR:FLVVKKXEXR, NDEGLESAPTGQ:SATS:LRKHR:LEVVKQXEXR, SSVKXQPAPTHH:SATS:LRKHR:RLVVKLEXAXA, RNVQXRPAPTQL:SATS:LRKHR:TLVVKLAXKXE, KIPKAXXVPTEL:SATS:LRKHR:DMVVEGXGXR, GIPEPXXVPEKM:SATS:LRKHR:NMTVESXAXR, SIPKAXXVPTEL:SATS:LRKHR:EMVVEGXGXR, HVTKPTXAPTKL:SATS:LRKHR:NMVVRSXGXH, YVPKPXXAPTKL:SATS:LRKHR:NMVVRSXGXH, TVPKPXXAPTQL:SATS:LRKHR:NMVVRAXGXH, KVGKAXXVPTKL:SATS:LRKHR:EGMSVAEXGXR, KASKAXXVPTKL:SATS:LRKHR:GMAVSEXGXR, GSAGPXXTPTKM:SATS:LRKHR:GMVVDRXGXS, AAPASXXVPARL:SATS:LRKHR:DMVVEAXGXR, STPPTXXVPTRL:SATS:LRKHR:DMVVESXGXR, HVPKPXXAPTKL:SATS:LRKHR:NMVVRSXGXH, RVPSTXXAPVKT:SATS:LRKHR:MIVEEXGXL, ASAAPXXVPQAL:SATS:LRKHR:MIVRSXKXS, ASASPXXVSQDL:SATS:LRKHR:MIVKSXKXS, ASASPXXVPQDL:SATS:LRKHR:MVVKSXKXS, NDEGLEXVPTEE:SATS:LRKHR:FLQHNKXEXR, NDEGLEXVPTGQ:SATS:LRKHR:LEEHSQXEXR, SSVKXQPSRVHH:SATS:LRKHR:RLEEHLEXAXA, RNVQXRPTQVQL:SATS:LRKHR:TLEDHLAXKXE, KIPKAXXVPTEL:SPIS:LKYHY:DMVAEGXGXR, GIPEPXXVPTKM:SPIS:LKYHY:NMVAESXAXR, SIPKAXXVPTEL:SPIS:LKYHY:EMVAEGXGXR, HVTKPTXVPTKL:SPIS:LKYHY:NMVAESXGXH, YVPKPXXVPTKL:SPIS:LKYHY:NMVAESXGXH, TVPKPXXVPTQL:SPIS:LKYHY:NMVAEAXGXH, AVPKAXXVPTKL:SPIS:LKYHY:NMVAEAXGXH, KASKAXXVPTKL:SPIS:LKYHY:GMVAEEXGXR, GSAGPXXVPTKM:SPIS:LKYHY:GMVAERXGXS, AAPASXXVPTRL:SPIS:LKYHY:DMVAEAXGXR, STPPTXXVPTRL:SPIS:LKYHY:DMVAESXGXR, HVPKPXXVPTKL:SPIS:LKYHY:NMVAESXGXH, RVPSTXXVPTKT:SPIS:LKYHY:MIVAEXGXL, ASAAPXXVPTAL:SPIS:LKYHY:MIVAEXKXS, ASASPXXVPTDL:SPIS:LKYHY:MIVAEXKXS, ASASPXXVPTDL:SPIS:LKYHY:MVVAEXKXS, NDEGLEXVPTEE:SPIS:LKYHY:FLVAEKXEXR, NDEGLEXVPTGQ:SPIS:LKYHY:LEVAEQXEXR, SSVKXQPVPTHH:SPIS:LKYHY:RLVAELEXAXA, RNVQXRPVPTQL:SPIS:LKYHY:TLVAELAXKXE, KIPKAXXVPTEL:SPIS:LKYHY:DMVVEGXGXR, GIPEPXXVPEKM:SPIS:LKYHY:NMTVESXAXR, SIPKAXXVPTEL:SPIS:LKYHY:EMVVEGXGXR, HVTKPTXAPTKL:SPIS:LKYHY:NMVVRSXGXH, YVPKPXXAPTKL:SPIS:LKYHY:NMVVRSXGXH, TVPKPXXAPTQL:SPIS:LKYHY:NMVVRAXGXH, AVPKAXXAPTKL:SPIS:LKYHY:NMVVKAXGXH, KASKAXXVPTKL:SPIS:LKYHY:GMAVSEXGXR, GSAGPXXTPTKM:SPIS:LKYHY:GMVVDRXGXS, AAPASXXVPARL:SPIS:LKYHY:DMVVEAXGXR, STPPTXXVPTRL:SPIS:LKYHY:DMVVESXGXR, HVPKPXXAPTKL:SPIS:LKYHY:NMVVRSXGXH, RVPSTXXAPVKT:SPIS:LKYHY:MIVEEXGXL, ASAAPXXVPQAL:SPIS:LKYHY:MIVRSXKXS, ASASPXXVSQDL:SPIS:LKYHY:MIVKSXKXS, ASASPXXVPQDL:SPIS:LKYHY:MVVKSXKXS, NDEGLEXVPTEE:SPIS:LKYHY:FLQHNKXEXR, NDEGLEXVPTGQ:SPIS:LKYHY:LEEHSQXEXR, SSVKXQPSRVHH:SPIS:LKYHY:RLEEHLEXAXA, RNVQXRPTQVQL:SPIS:LKYHY:TLEDHLAXKXE, KIPKAXXVPTEL:EPIS:KFKYE:DMAVXGXGSR, GIPEPXXVPTKM:EPIS:KFKYE:NMAVSSXAXR, SIPKAXXVPTEL:EPIS:KFKYE:EMAVXGXGSR, HVTKPTXVPTKL:EPIS:KFKYE:NMAVSSXGXH, YVPKPXXVPTKL:EPIS:KFKYE:NMAVSSXGXH, TVPKPXXVPTQL:EPIS:KFKYE:NMAVSAXGXH, AVPKAXXVPTKL:EPIS:KFKYE:NMAVSAXGXH, KVGKAXXVPTKL:EPIS:KFKYE:EGMSAVSXGXR, GSAGPXXVPTKM:EPIS:KFKYE:GMAVSRXGXS, AAPASXXVPTRL:EPIS:KFKYE:DMAVSAXGXR, STPPTXXVPTRL:EPIS:KFKYE:DMAVSSXGXR, HVPKPXXVPTKL:EPIS:KFKYE:NMAVSSXGXH, RVPSTXXVPTKT:EPIS:KFKYE:MIAVSXGXL, ASAAPXXVPTAL:EPIS:KFKYE:MIAVSXKXS, ASASPXXVPTDL:EPIS:KFKYE:MIAVSXKXS, ASASPXXVPTDL:EPIS:KFKYE:MVAVSXKXS, NDEGLEXVPTEE:EPIS:KFKYE:FLAVXKXESR, NDEGLEXVPTGQ:EPIS:KFKYE:LEAVSQXEXR, SSVKXQPVPTHH:EPIS:KFKYE:RLAVSLEXAXA, RNVQXRPVPTQL:EPIS:KFKYE:TLAVSLAXKXE, KIPKAXXVPTEL:EPIS:KFKYE:DMVVEGXGXR, GIPEPXXVPEKM:EPIS:KFKYE:NMTVESXAXR, SIPKAXXVPTEL:EPIS:KFKYE:EMVVEGXGXR, HVTKPTXAPTKL:EPIS:KFKYE:NMVVRSXGXH, YVPKPXXAPTKL:EPIS:KFKYE:NMVVRSXGXH, TVPKPXXAPTQL:EPIS:KFKYE:NMVVRAXGXH, AVPKAXXAPTKL:EPIS:KFKYE:NMVVKAXGXH, KVGKAXXVPTKL:EPIS:KFKYE:EGMSVAEXGXR, GSAGPXXTPTKM:EPIS:KFKYE:GMVVDRXGXS, AAPASXXVPARL:EPIS:KFKYE:DMVVEAXGXR, STPPTXXVPTRL:EPIS:KFKYE:DMVVESXGXR, HVPKPXXAPTKL:EPIS:KFKYE:NMVVRSXGXH, RVPSTXXAPVKT:EPIS:KFKYE:MIVEEXGXL, ASAAPXXVPQAL:EPIS:KFKYE:MIVRSXKXS, ASASPXXVSQDL:EPIS:KFKYE:MIVKSXKXS, ASASPXXVPQDL:EPIS:KFKYE:MVVKSXKXS, NDEGLEXVPTEE:EPIS:KFKYE:FLQHNKXEXR, NDEGLEXVPTGQ:EPIS:KFKYE:LEEHSQXEXR, SSVKXQPSRVHH:EPIS:KFKYE:RLEEHLEXAXA, RNVQXRPTQVQL:EPIS:KFKYE:TLEDHLAXKXE, KIPKAXXTPTEL:SPIN:YGKIP:DMVVDGXGXR, GIPEPXXTPTKM:SPIN:YGKIP:NMVVDSXAXR, SIPKAXXTPTEL:SPIN:YGKIP:EMVVDGXGXR, HVTKPTXTPTKL:SPIN:YGKIP:NMVVDSXGXH, YVPKPXXTPTKL:SPIN:YGKIP:NMVVDSXGXH, TVPKPXXTPTQL:SPIN:YGKIP:NMVVDAXGXH, AVPKAXXTPTKL:SPIN:YGKIP:NMVVDAXGXH, KVGKAXXTPTKL:SPIN:YGKIP:EGMSVVDXGXR, KASKAXXTPTKL:SPIN:YGKIP:GMVVDEXGXR, AAPASXXTPTRL:SPIN:YGKIP:DMVVDAXGXR, STPPTXXTPTRL:SPIN:YGKIP:DMVVDSXGXR, HVPKPXXTPTKL:SPIN:YGKIP:NMVVDSXGXH, RVPSTXXTPTKT:SPIN:YGKIP:MIVVDXGXL, ASAAPXXTPTAL:SPIN:YGKIP:MIVVDXKXS, ASASPXXTPTDL:SPIN:YGKIP:MIVVDXKXS, ASASPXXTPTDL:SPIN:YGKIP:MVVVDXKXS, NDEGLESTPTEE:SPIN:YGKIP:FLVVDKXEXR, NDEGLESTPTGQ:SPIN:YGKIP:LEVVDQXEXR, SSVKXQPTPTHH:SPIN:YGKIP:RLVVDLEXAXA, RNVQXRPTPTQL:SPIN:YGKIP:TLVVDLAXKXE, KIPKAXXVPTEL:SPIN:YGKIP:DMVVEGXGXR, GIPEPXXVPEKM:SPIN:YGKIP:NMTVESXAXR, SIPKAXXVPTEL:SPIN:YGKIP:EMVVEGXGXR, HVTKPTXAPTKL:SPIN:YGKIP:NMVVRSXGXH, YVPKPXXAPTKL:SPIN:YGKIP:NMVVRSXGXH, TVPKPXXAPTQL:SPIN:YGKIP:NMVVRAXGXH, AVPKAXXAPTKL:SPIN:YGKIP:NMVVKAXGXH, KVGKAXXVPTKL:SPIN:YGKIP:EGMSVAEXGXR, KASKAXXVPTKL:SPIN:YGKIP:GMAVSEXGXR, AAPASXXVPARL:SPIN:YGKIP:DMVVEAXGXR, STPPTXXVPTRL:SPIN:YGKIP:DMVVESXGXR, HVPKPXXAPTKL:SPIN:YGKIP:NMVVRSXGXH, RVPSTXXAPVKT:SPIN:YGKIP:MIVEEXGXL, ASAAPXXVPQAL:SPIN:YGKIP:MIVRSXKXS, ASASPXXVSQDL:SPIN:YGKIP:MIVKSXKXS, ASASPXXVPQDL:SPIN:YGKIP:MVVKSXKXS, NDEGLEXVPTEE:SPIN:YGKIP:FLQHNKXEXR, NDEGLEXVPTGQ:SPIN:YGKIP:LEEHSQXEXR, SSVKXQPSRVHH:SPIN:YGKIP:RLEEHLEXAXA, RNVQXRPTQVQL:SPIN:YGKIP:TLEDHLAXKXE, KIPKAXXVPAEL:SPIS:YKQYE:DMVVEGXGXR, GIPEPXXVPAKM:SPIS:YKQYE:NMVVESXAXR, SIPKAXXVPAEL:SPIS:YKQYE:EMVVEGXGXR, HVTKPTXVPAKL:SPIS:YKQYE:NMVVESXGXH, YVPKPXXVPAKL:SPIS:YKQYE:NMVVESXGXH, TVPKPXXVPAQL:SPIS:YKQYE:NMVVEAXGXH, AVPKAXXVPAKL:SPIS:YKQYE:NMVVEAXGXH, KVGKAXXVPAKL:SPIS:YKQYE:EGMSVVEXGXR, KASKAXXVPAKL:SPIS:YKQYE:GMVVEEXGXR, GSAGPXXVPAKM:SPIS:YKQYE:GMVVERXGXS, STPPTXXVPARL:SPIS:YKQYE:DMVVESXGXR, HVPKPXXVPAKL:SPIS:YKQYE:NMVVESXGXH, RVPSTXXVPAKT:SPIS:YKQYE:MIVVEXGXL, ASAAPXXVPAAL:SPIS:YKQYE:MIVVEXKXS, ASASPXXVPADL:SPIS:YKQYE:MIVVEXKXS, ASASPXXVPADL:SPIS:YKQYE:MVVVEXKXS, NDEGLEXVPAEE:SPIS:YKQYE:FLVVEKXEXR, NDEGLEXVPAGQ:SPIS:YKQYE:LEVVEQXEXR, SSVKXQPVPAHH:SPIS:YKQYE:RLVVELEXAXA, RNVQXRPVPAQL:SPIS:YKQYE:TLVVELAXKXE, KIPKAXXVPTEL:SPIS:YKQYE:DMVVEGXGXR, GIPEPXXVPEKM:SPIS:YKQYE:NMTVESXAXR, SIPKAXXVPTEL:SPIS:YKQYE:EMVVEGXGXR, HVTKPTXAPTKL:SPIS:YKQYE:NMVVRSXGXH, YVPKPXXAPTKL:SPIS:YKQYE:NMVVRSXGXH, TVPKPXXAPTQL:SPIS:YKQYE:NMVVRAXGXH, AVPKAXXAPTKL:SPIS:YKQYE:NMVVKAXGXH, KVGKAXXVPTKL:SPIS:YKQYE:EGMSVAEXGXR, KASKAXXVPTKL:SPIS:YKQYE:GMAVSEXGXR, GSAGPXXTPTKM:SPIS:YKQYE:GMVVDRXGXS, STPPTXXVPTRL:SPIS:YKQYE:DMVVESXGXR, HVPKPXXAPTKL:SPIS:YKQYE:NMVVRSXGXH, RVPSTXXAPVKT:SPIS:YKQYE:MIVEEXGXL, ASAAPXXVPQAL:SPIS:YKQYE:MIVRSXKXS, ASASPXXVSQDL:SPIS:YKQYE:MIVKSXKXS, ASASPXXVPQDL:SPIS:YKQYE:MVVKSXKXS, NDEGLEXVPTEE:SPIS:YKQYE:FLQHNKXEXR, NDEGLEXVPTGQ:SPIS:YKQYE:LEEHSQXEXR, SSVKXQPSRVHH:SPIS:YKQYE:RLEEHLEXAXA, RNVQXRPTQVQL:SPIS:YKQYE:TLEDHLAXKXE, GIPEPXXVPTKM:SPIS:YKQYE:NMVVESXAXR, HVTKPTXVPTKL:SPIS:YKQYE:NMVVESXGXH, YVPKPXXVPTKL:SPIS:YKQYE:NMVVESXGXH, TVPKPXXVPTQL:SPIS:YKQYE:NMVVEAXGXH, AVPKAXXVPTKL:SPIS:YKQYE:NMVVEAXGXH, KVGKAXXVPTKL:SPIS:YKQYE:EGMSVVEXGXR, KASKAXXVPTKL:SPIS:YKQYE:GMVVEEXGXR, GSAGPXXVPTKM:SPIS:YKQYE:GMVVERXGXS, AAPASXXVPTRL:SPIS:YKQYE:DMVVEAXGXR, HVPKPXXVPTKL:SPIS:YKQYE:NMVVESXGXH, RVPSTXXVPTKT:SPIS:YKQYE:MIVVEXGXL, ASAAPXXVPTAL:SPIS:YKQYE:MIVVEXKXS, ASASPXXVPTDL:SPIS:YKQYE:MIVVEXKXS, ASASPXXVPTDL:SPIS:YKQYE:MVVVEXKXS, NDEGLEXVPTEE:SPIS:YKQYE:FLVVEKXEXR, NDEGLEXVPTGQ:SPIS:YKQYE:LEVVEQXEXR, SSVKXQPVPTHH:SPIS:YKQYE:RLVVELEXAXA, RNVQXRPVPTQL:SPIS:YKQYE:TLVVELAXKXE, AAPASXXVPARL:SPIS:YKQYE:DMVVEAXGXR, KIPKAXXAPVEL:KPLS:DHHKD:DMVEEGXGXR, GIPEPXXAPVKM:KPLS:DHHKD:NMVEESXAXR, SIPKAXXAPVEL:KPLS:DHHKD:EMVEEGXGXR, HVTKPTXAPVKL:KPLS:DHHKD:NMVEESXGXH, YVPKPXXAPVKL:KPLS:DHHKD:NMVEESXGXH, TVPKPXXAPVQL:KPLS:DHHKD:NMVEEAXGXH, AVPKAXXAPVKL:KPLS:DHHKD:NMVEEAXGXH, KVGKAXXAPVKL:KPLS:DHHKD:EGMSVEEXGXR, KASKAXXAPVKL:KPLS:DHHKD:GMVEEEXGXR, GSAGPXXAPVKM:KPLS:DHHKD:GMVEERXGXS, AAPASXXAPVRL:KPLS:DHHKD:DMVEEAXGXR, STPPTXXAPVRL:KPLS:DHHKD:DMVEESXGXR, HVPKPXXAPVKL:KPLS:DHHKD:NMVEESXGXH, ASAAPXXAPVAL:KPLS:DHHKD:MIVEEXKXS, ASASPXXAPVDL:KPLS:DHHKD:MIVEEXKXS, ASASPXXAPVDL:KPLS:DHHKD:MVVEEXKXS, NDEGLESAPVEE:KPLS:DHHKD:FLVEEKXEXR, NDEGLESAPVGQ:KPLS:DHHKD:LEVEEQXEXR, SSVKXQPAPVHH:KPLS:DHHKD:RLVEELEXAXA, RNVQXRPAPVQL:KPLS:DHHKD:TLVEELAXKXE, KIPKAXXVPTEL:KPLS:DHHKD:DMVVEGXGXR, GIPEPXXVPEKM:KPLS:DHHKD:NMTVESXAXR, SIPKAXXVPTEL:KPLS:DHHKD:EMVVEGXGXR, HVTKPTXAPTKL:KPLS:DHHKD:NMVVRSXGXH, YVPKPXXAPTKL:KPLS:DHHKD:NMVVRSXGXH, TVPKPXXAPTQL:KPLS:DHHKD:NMVVRAXGXH, AVPKAXXAPTKL:KPLS:DHHKD:NMVVKAXGXH, KVGKAXXVPTKL:KPLS:DHHKD:EGMSVAEXGXR, KASKAXXVPTKL:KPLS:DHHKD:GMAVSEXGXR, GSAGPXXTPTKM:KPLS:DHHKD:GMVVDRXGXS, AAPASXXVPARL:KPLS:DHHKD:DMVVEAXGXR, STPPTXXVPTRL:KPLS:DHHKD:DMVVESXGXR, HVPKPXXAPTKL:KPLS:DHHKD:NMVVRSXGXH, ASAAPXXVPQAL:KPLS:DHHKD:MIVRSXKXS, ASASPXXVSQDL:KPLS:DHHKD:MIVKSXKXS, ASASPXXVPQDL:KPLS:DHHKD:MVVKSXKXS, NDEGLEXVPTEE:KPLS:DHHKD:FLQHNKXEXR, NDEGLEXVPTGQ:KPLS:DHHKD:LEEHSQXEXR, SSVKXQPSRVHH:KPLS:DHHKD:RLEEHLEXAXA, RNVQXRPTQVQL:KPLS:DHHKD:TLEDHLAXKXE, KIPKAXXVPQEL:EPLP:EQLSN:DMVRXGXGSR, GIPEPXXVPQKM:EPLP:EQLSN:NMVRSSXAXR, SIPKAXXVPQEL:EPLP:EQLSN:EMVRXGXGSR, HVTKPTXVPQKL:EPLP:EQLSN:NMVRSSXGXH, YVPKPXXVPQKL:EPLP:EQLSN:NMVRSSXGXH, TVPKPXXVPQQL:EPLP:EQLSN:NMVRSAXGXH, AVPKAXXVPQKL:EPLP:EQLSN:NMVRSAXGXH, KVGKAXXVPQKL:EPLP:EQLSN:EGMSVRSXGXR, KASKAXXVPQKL:EPLP:EQLSN:GMVRSEXGXR, GSAGPXXVPQKM:EPLP:EQLSN:GMVRSRXGXS, AAPASXXVPQRL:EPLP:EQLSN:DMVRSAXGXR, STPPTXXVPQRL:EPLP:EQLSN:DMVRSSXGXR, HVPKPXXVPQKL:EPLP:EQLSN:NMVRSSXGXH, RVPSTXXVPQKT:EPLP:EQLSN:MIVRSXGXL, ASASPXXVPQDL:EPLP:EQLSN:MIVRSXKXS, ASASPXXVPQDL:EPLP:EQLSN:MVVRSXKXS, NDEGLEXVPQEE:EPLP:EQLSN:FLVRXKXESR, NDEGLEXVPQGQ:EPLP:EQLSN:LEVRSQXEXR, SSVKXQPVPQHH:EPLP:EQLSN:RLVRSLEXAXA, RNVQXRPVPQQL:EPLP:EQLSN:TLVRSLAXKXE, KIPKAXXVPTEL:EPLP:EQLSN:DMVVEGXGXR, GIPEPXXVPEKM:EPLP:EQLSN:NMTVESXAXR, SIPKAXXVPTEL:EPLP:EQLSN:EMVVEGXGXR, HVTKPTXAPTKL:EPLP:EQLSN:NMVVRSXGXH, YVPKPXXAPTKL:EPLP:EQLSN:NMVVRSXGXH, TVPKPXXAPTQL:EPLP:EQLSN:NMVVRAXGXH, AVPKAXXAPTKL:EPLP:EQLSN:NMVVKAXGXH, KVGKAXXVPTKL:EPLP:EQLSN:EGMSVAEXGXR, KASKAXXVPTKL:EPLP:EQLSN:GMAVSEXGXR, GSAGPXXTPTKM:EPLP:EQLSN:GMVVDRXGXS, AAPASXXVPARL:EPLP:EQLSN:DMVVEAXGXR, STPPTXXVPTRL:EPLP:EQLSN:DMVVESXGXR, HVPKPXXAPTKL:EPLP:EQLSN:NMVVRSXGXH, RVPSTXXAPVKT:EPLP:EQLSN:MIVEEXGXL, ASASPXXVSQDL:EPLP:EQLSN:MIVKSXKXS, ASASPXXVPQDL:EPLP:EQLSN:MVVKSXKXS, NDEGLEXVPTEE:EPLP:EQLSN:FLQHNKXEXR, NDEGLEXVPTGQ:EPLP:EQLSN:LEEHSQXEXR, SSVKXQPSRVHH:EPLP:EQLSN:RLEEHLEXAXA, RNVQXRPTQVQL:EPLP:EQLSN:TLEDHLAXKXE, KIPKAXXVSQEL:EPLT:EQLSN:DMVKXGXGSR, GIPEPXXVSQKM:EPLT:EQLSN:NMVKSSXAXR, SIPKAXXVSQEL:EPLT:EQLSN:EMVKXGXGSR, HVTKPTXVSQKL:EPLT:EQLSN:NMVKSSXGXH, YVPKPXXVSQKL:EPLT:EQLSN:NMVKSSXGXH, TVPKPXXVSQQL:EPLT:EQLSN:NMVKSAXGXH, AVPKAXXVSQKL:EPLT:EQLSN:NMVKSAXGXH, KVGKAXXVSQKL:EPLT:EQLSN:EGMSVKSXGXR, KASKAXXVSQKL:EPLT:EQLSN:GMVKSEXGXR, GSAGPXXVSQKM:EPLT:EQLSN:GMVKSRXGXS, AAPASXXVSQRL:EPLT:EQLSN:DMVKSAXGXR, STPPTXXVSQRL:EPLT:EQLSN:DMVKSSXGXR, HVPKPXXVSQKL:EPLT:EQLSN:NMVKSSXGXH, RVPSTXXVSQKT:EPLT:EQLSN:MIVKSXGXL, ASAAPXXVSQAL:EPLT:EQLSN:MIVKSXKXS, ASASPXXVSQDL:EPLT:EQLSN:MVVKSXKXS, NDEGLEXVSQEE:EPLT:EQLSN:FLVKXKXESR, NDEGLEXVSQGQ:EPLT:EQLSN:LEVKSQXEXR, SSVKXQPVSQHH:EPLT:EQLSN:RLVKSLEXAXA, RNVQXRPVSQQL:EPLT:EQLSN:TLVKSLAXKXE, KIPKAXXVPTEL:EPLT:EQLSN:DMVVEGXGXR, GIPEPXXVPEKM:EPLT:EQLSN:NMTVESXAXR, SIPKAXXVPTEL:EPLT:EQLSN:EMVVEGXGXR, HVTKPTXAPTKL:EPLT:EQLSN:NMVVRSXGXH, YVPKPXXAPTKL:EPLT:EQLSN:NMVVRSXGXH, TVPKPXXAPTQL:EPLT:EQLSN:NMVVRAXGXH, AVPKAXXAPTKL:EPLT:EQLSN:NMVVKAXGXH, KVGKAXXVPTKL:EPLT:EQLSN:EGMSVAEXGXR, KASKAXXVPTKL:EPLT:EQLSN:GMAVSEXGXR, GSAGPXXTPTKM:EPLT:EQLSN:GMVVDRXGXS, AAPASXXVPARL:EPLT:EQLSN:DMVVEAXGXR, STPPTXXVPTRL:EPLT:EQLSN:DMVVESXGXR, HVPKPXXAPTKL:EPLT:EQLSN:NMVVRSXGXH, RVPSTXXAPVKT:EPLT:EQLSN:MIVEEXGXL, ASAAPXXVPQAL:EPLT:EQLSN:MIVRSXKXS, ASASPXXVPQDL:EPLT:EQLSN:MVVKSXKXS, NDEGLEXVPTEE:EPLT:EQLSN:FLQHNKXEXR, NDEGLEXVPTGQ:EPLT:EQLSN:LEEHSQXEXR, SSVKXQPSRVHH:EPLT:EQLSN:RLEEHLEXAXA, RNVQXRPTQVQL:EPLT:EQLSN:TLEDHLAXKXE, KIPKAXXVPQEL:EPLT:EQLSN:DMVKXGXGSR, GIPEPXXVPQKM:EPLT:EQLSN:NMVKSSXAXR, SIPKAXXVPQEL:EPLT:EQLSN:EMVKXGXGSR, HVTKPTXVPQKL:EPLT:EQLSN:NMVKSSXGXH, YVPKPXXVPQKL:EPLT:EQLSN:NMVKSSXGXH, TVPKPXXVPQQL:EPLT:EQLSN:NMVKSAXGXH, AVPKAXXVPQKL:EPLT:EQLSN:NMVKSAXGXH, KVGKAXXVPQKL:EPLT:EQLSN:EGMSVKSXGXR, KASKAXXVPQKL:EPLT:EQLSN:GMVKSEXGXR, GSAGPXXVPQKM:EPLT:EQLSN:GMVKSRXGXS, AAPASXXVPQRL:EPLT:EQLSN:DMVKSAXGXR, STPPTXXVPQRL:EPLT:EQLSN:DMVKSSXGXR, HVPKPXXVPQKL:EPLT:EQLSN:NMVKSSXGXH, RVPSTXXVPQKT:EPLT:EQLSN:MIVKSXGXL, ASAAPXXVPQAL:EPLT:EQLSN:MIVKSXKXS, ASASPXXVPQDL:EPLT:EQLSN:MIVKSXKXS, NDEGLEXVPQEE:EPLT:EQLSN:FLVKXKXESR, NDEGLEXVPQGQ:EPLT:EQLSN:LEVKSQXEXR, SSVKXQPVPQHH:EPLT:EQLSN:RLVKSLEXAXA, RNVQXRPVPQQL:EPLT:EQLSN:TLVKSLAXKXE, ASASPXXVSQDL:EPLT:EQLSN:MIVKSXKXS, KIPKAXXVPTEL:SNIT:IGEMS:DMQHNGXGXR, GIPEPXXVPTKM:SNIT:IGEMS:NMQHNSXAXR, SIPKAXXVPTEL:SNIT:IGEMS:EMQHNGXGXR, HVTKPTXVPTKL:SNIT:IGEMS:NMQHNSXGXH, YVPKPXXVPTKL:SNIT:IGEMS:NMQHNSXGXH, TVPKPXXVPTQL:SNIT:IGEMS:NMQHNAXGXH, AVPKAXXVPTKL:SNIT:IGEMS:NMQHNAXGXH, KVGKAXXVPTKL:SNIT:IGEMS:EGMSQHNXGXR, KASKAXXVPTKL:SNIT:IGEMS:GMQHNEXGXR, GSAGPXXVPTKM:SNIT:IGEMS:GMQHNRXGXS, AAPASXXVPTRL:SNIT:IGEMS:DMQHNAXGXR, STPPTXXVPTRL:SNIT:IGEMS:DMQHNSXGXR, HVPKPXXVPTKL:SNIT:IGEMS:NMQHNSXGXH, RVPSTXXVPTKT:SNIT:IGEMS:MIQHNXGXL, ASAAPXXVPTAL:SNIT:IGEMS:MIQHNXKXS, ASASPXXVPTDL:SNIT:IGEMS:MIQHNXKXS, ASASPXXVPTDL:SNIT:IGEMS:MVQHNXKXS, NDEGLEXVPTGQ:SNIT:IGEMS:LEQHNQXEXR, NDEGLEXVPTEE:SNIT:IGEMS:FLQHNKXEXR, SSVKXQPVPTHH:SNIT:IGEMS:RLQHNLEXAXA, RNVQXRPVPTQL:SNIT:IGEMS:TLQHNLAXKXE, KIPKAXXVPTEL:SNIT:IGEMS:DMVVEGXGXR, GIPEPXXVPEKM:SNIT:IGEMS:NMTVESXAXR, SIPKAXXVPTEL:SNIT:IGEMS:EMVVEGXGXR, HVTKPTXAPTKL:SNIT:IGEMS:NMVVRSXGXH, YVPKPXXAPTKL:SNIT:IGEMS:NMVVRSXGXH, TVPKPXXAPTQL:SNIT:IGEMS:NMVVRAXGXH, AVPKAXXAPTKL:SNIT:IGEMS:NMVVKAXGXH, KVGKAXXVPTKL:SNIT:IGEMS:EGMSVAEXGXR, KASKAXXVPTKL:SNIT:IGEMS:GMAVSEXGXR, GSAGPXXTPTKM:SNIT:IGEMS:GMVVDRXGXS, AAPASXXVPARL:SNIT:IGEMS:DMVVEAXGXR, STPPTXXVPTRL:SNIT:IGEMS:DMVVESXGXR, HVPKPXXAPTKL:SNIT:IGEMS:NMVVRSXGXH, RVPSTXXAPVKT:SNIT:IGEMS:MIVEEXGXL, ASAAPXXVPQAL:SNIT:IGEMS:MIVRSXKXS, ASASPXXVSQDL:SNIT:IGEMS:MIVKSXKXS, ASASPXXVPQDL:SNIT:IGEMS:MVVKSXKXS, NDEGLEXVPTGQ:SNIT:IGEMS:LEEHSQXEXR, SSVKXQPSRVHH:SNIT:IGEMS:RLEEHLEXAXA, RNVQXRPTQVQL:SNIT:IGEMS:TLEDHLAXKXE, KIPKAXXVPTEL:SNIT:LGEMS:DMEHXGXGSR, GIPEPXXVPTKM:SNIT:LGEMS:NMEHSSXAXR, SIPKAXXVPTEL:SNIT:LGEMS:EMEHXGXGSR, HVTKPTXVPTKL:SNIT:LGEMS:NMEHSSXGXH, YVPKPXXVPTKL:SNIT:LGEMS:NMEHSSXGXH, TVPKPXXVPTQL:SNIT:LGEMS:NMEHSAXGXH, AVPKAXXVPTKL:SNIT:LGEMS:NMEHSAXGXH, KVGKAXXVPTKL:SNIT:LGEMS:EGMSEHSXGXR, KASKAXXVPTKL:SNIT:LGEMS:GMEHSEXGXR, GSAGPXXVPTKM:SNIT:LGEMS:GMEHSRXGXS, AAPASXXVPTRL:SNIT:LGEMS:DMEHSAXGXR, STPPTXXVPTRL:SNIT:LGEMS:DMEHSSXGXR, HVPKPXXVPTKL:SNIT:LGEMS:NMEHSSXGXH, RVPSTXXVPTKT:SNIT:LGEMS:MIEHSXGXL, ASAAPXXVPTAL:SNIT:LGEMS:MIEHSXKXS, ASASPXXVPTDL:SNIT:LGEMS:MIEHSXKXS, ASASPXXVPTDL:SNIT:LGEMS:MVEHSXKXS, NDEGLEXVPTEE:SNIT:LGEMS:FLEHXKXESR, SSVKXQPVPTHH:SNIT:LGEMS:RLEHSLEXAXA, RNVQXRPVPTQL:SNIT:LGEMS:TLEHSLAXKXE, KIPKAXXVPTEL:SNIT:LGEMS:DMVVEGXGXR, GIPEPXXVPEKM:SNIT:LGEMS:NMTVESXAXR, SIPKAXXVPTEL:SNIT:LGEMS:EMVVEGXGXR, HVTKPTXAPTKL:SNIT:LGEMS:NMVVRSXGXH, YVPKPXXAPTKL:SNIT:LGEMS:NMVVRSXGXH, TVPKPXXAPTQL:SNIT:LGEMS:NMVVRAXGXH, AVPKAXXAPTKL:SNIT:LGEMS:NMVVKAXGXH, KVGKAXXVPTKL:SNIT:LGEMS:EGMSVAEXGXR, KASKAXXVPTKL:SNIT:LGEMS:GMAVSEXGXR, GSAGPXXTPTKM:SNIT:LGEMS:GMVVDRXGXS, AAPASXXVPARL:SNIT:LGEMS:DMVVEAXGXR, STPPTXXVPTRL:SNIT:LGEMS:DMVVESXGXR, HVPKPXXAPTKL:SNIT:LGEMS:NMVVRSXGXH, RVPSTXXAPVKT:SNIT:LGEMS:MIVEEXGXL, ASAAPXXVPQAL:SNIT:LGEMS:MIVRSXKXS, ASASPXXVSQDL:SNIT:LGEMS:MIVKSXKXS, ASASPXXVPQDL:SNIT:LGEMS:MVVKSXKXS, NDEGLEXVPTEE:SNIT:LGEMS:FLQHNKXEXR, SSVKXQPSRVHH:SNIT:LGEMS:RLEEHLEXAXA, RNVQXRPTQVQL:SNIT:LGEMS:TLEDHLAXKXE, KIPKASSSRVEL:RSVK:KEVQV:DMEEHGXGXR, GIPEPSSSRVKM:RSVK:KEVQV:NMEEHSXAXR, SIPKASSSRVEL:RSVK:KEVQV:EMEEHGXGXR, HVTKPTXSRVKL:RSVK:KEVQV:NMEEHSXGXH, YVPKPSSSRVKL:RSVK:KEVQV:NMEEHSXGXH, TVPKPSSSRVQL:RSVK:KEVQV:NMEEHAXGXH, AVPKASSSRVKL:RSVK:KEVQV:NMEEHAXGXH, KVGKASSSRVKL:RSVK:KEVQV:EGMSEEHXGXR, KASKASSSRVKL:RSVK:KEVQV:GMEEHEXGXR, GSAGPSSSRVKM:RSVK:KEVQV:GMEEHRXGXS, AAPASSSSRVRL:RSVK:KEVQV:DMEEHAXGXR, STPPTSSSRVRL:RSVK:KEVQV:DMEEHSXGXR, HVPKPSSSRVKL:RSVK:KEVQV:NMEEHSXGXH, RVPSTSSSRVKT:RSVK:KEVQV:MIEEHXGXL, ASAAPSSSRVAL:RSVK:KEVQV:MIEEHXKXS, ASASPSSSRVDL:RSVK:KEVQV:MIEEHXKXS, ASASPSSSRVDL:RSVK:KEVQV:MVEEHXKXS, NDEGLESSRVEE:RSVK:KEVQV:FLEEHKXEXR, NDEGLESSRVGQ:RSVK:KEVQV:LEEEHQXEXR, RNVQXRPSRVQL:RSVK:KEVQV:TLEEHLAXKXE, KIPKAXXVPTEL:RSVK:KEVQV:DMVVEGXGXR, GIPEPXXVPEKM:RSVK:KEVQV:NMTVESXAXR, SIPKAXXVPTEL:RSVK:KEVQV:EMVVEGXGXR, HVTKPTXAPTKL:RSVK:KEVQV:NMVVRSXGXH, YVPKPXXAPTKL:RSVK:KEVQV:NMVVRSXGXH, TVPKPXXAPTQL:RSVK:KEVQV:NMVVRAXGXH, AVPKAXXAPTKL:RSVK:KEVQV:NMVVKAXGXH, KVGKAXXVPTKL:RSVK:KEVQV:EGMSVAEXGXR, KASKAXXVPTKL:RSVK:KEVQV:GMAVSEXGXR, GSAGPXXTPTKM:RSVK:KEVQV:GMVVDRXGXS, AAPASXXVPARL:RSVK:KEVQV:DMVVEAXGXR, STPPTXXVPTRL:RSVK:KEVQV:DMVVESXGXR, HVPKPXXAPTKL:RSVK:KEVQV:NMVVRSXGXH, RVPSTXXAPVKT:RSVK:KEVQV:MIVEEXGXL, ASAAPXXVPQAL:RSVK:KEVQV:MIVRSXKXS, ASASPXXVSQDL:RSVK:KEVQV:MIVKSXKXS, ASASPXXVPQDL:RSVK:KEVQV:MVVKSXKXS, NDEGLEXVPTEE:RSVK:KEVQV:FLQHNKXEXR, NDEGLEXVPTGQ:RSVK:KEVQV:LEEHSQXEXR, RNVQXRPTQVQL:RSVK:KEVQV:TLEDHLAXKXE, KIPKASSTQVEL:RPVQ:KKATV:DMEDHGXGXR, GIPEPSSTQVKM:RPVQ:KKATV:NMEDHSXAXR, SIPKASSTQVEL:RPVQ:KKATV:EMEDHGXGXR, HVTKPTXTQVKL:RPVQ:KKATV:NMEDHSXGXH, YVPKPSSTQVKL:RPVQ:KKATV:NMEDHSXGXH, TVPKPSSTQVQL:RPVQ:KKATV:NMEDHAXGXH, AVPKASSTQVKL:RPVQ:KKATV:NMEDHAXGXH, KVGKASSTQVKL:RPVQ:KKATV:EGMSEDHXGXR, KASKASSTQVKL:RPVQ:KKATV:GMEDHEXGXR, GSAGPSSTQVKM:RPVQ:KKATV:GMEDHRXGXS, AAPASSSTQVRL:RPVQ:KKATV:DMEDHAXGXR, STPPTSSTQVRL:RPVQ:KKATV:DMEDHSXGXR, HVPKPSSTQVKL:RPVQ:KKATV:NMEDHSXGXH, RVPSTSSTQVKT:RPVQ:KKATV:MIEDHXGXL, ASAAPSSTQVAL:RPVQ:KKATV:MIEDHXKXS, ASASPSSTQVDL:RPVQ:KKATV:MIEDHXKXS, ASASPSSTQVDL:RPVQ:KKATV:MVEDHXKXS, NDEGLESTQVEE:RPVQ:KKATV:FLEDHKXEXR, NDEGLESTQVGQ:RPVQ:KKATV:LEEDHQXEXR, SSVKXQPTQVHH:RPVQ:KKATV:RLEDHLEXAXA, KIPKAXXVPTEL:RPVQ:KKATV:DMVVEGXGXR, GIPEPXXVPEKM:RPVQ:KKATV:NMTVESXAXR, SIPKAXXVPTEL:RPVQ:KKATV:EMVVEGXGXR, HVTKPTXAPTKL:RPVQ:KKATV:NMVVRSXGXH, YVPKPXXAPTKL:RPVQ:KKATV:NMVVRSXGXH, TVPKPXXAPTQL:RPVQ:KKATV:NMVVRAXGXH, AVPKAXXAPTKL:RPVQ:KKATV:NMVVKAXGXH, KVGKAXXVPTKL:RPVQ:KKATV:EGMSVAEXGXR, KASKAXXVPTKL:RPVQ:KKATV:GMAVSEXGXR, GSAGPXXTPTKM:RPVQ:KKATV:GMVVDRXGXS, AAPASXXVPARL:RPVQ:KKATV:DMVVEAXGXR, STPPTXXVPTRL:RPVQ:KKATV:DMVVESXGXR, HVPKPXXAPTKL:RPVQ:KKATV:NMVVRSXGXH, RVPSTXXAPVKT:RPVQ:KKATV:MIVEEXGXL, ASAAPXXVPQAL:RPVQ:KKATV:MIVRSXKXS, ASASPXXVSQDL:RPVQ:KKATV:MIVKSXKXS, ASASPXXVPQDL:RPVQ:KKATV:MVVKSXKXS, NDEGLEXVPTEE:RPVQ:KKATV:FLQHNKXEXR, NDEGLEXVPTGQ:RPVQ:KKATV:LEEHSQXEXR and SSVKXQPSRVHH:RPVQ:KKATV:RLEEHLEXAXA. More particularly, the quadruplet PEP9:PEP1:PEP2:PEP10 is selected from the group consisting of GIPEPXXVPTKM:SAIS:LKNYQ:NMVVESXAXR, HVTKPTXVPTKL:SAIS:LKNYQ:NMVVESXGXH, YVPKPXXVPTKL:SAIS:LKNYQ:NMVVESXGXH, TVPKPXXVPTQL:SAIS:LKNYQ:NMVVEAXGXH, AVPKAXXVPTKL:SAIS:LKNYQ:NMVVEAXGXH, KVGKAXXVPTKL:SAIS:LKNYQ:EGMSVVEXGXR, KASKAXXVPTKL:SAIS:LKNYQ:GMVVEEXGXR, GSAGPXXVPTKM:SAIS:LKNYQ:GMVVERXGXS, AAPASXXVPTRL:SAIS:LKNYQ:DMVVEAXGXR, STPPTXXVPTRL:SAIS:LKNYQ:DMVVESXGXR, HVPKPXXVPTKL:SAIS:LKNYQ:NMVVESXGXH, RVPSTXXVPTKT:SAIS:LKNYQ:MIVVEXGXL, ASAAPXXVPTAL:SAIS:LKNYQ:MIVVEXKXS, ASASPXXVPTDL:SAIS:LKNYQ:MIVVEXKXS, ASASPXXVPTDL:SAIS:LKNYQ:MVVVEXKXS, GIPEPXXVPEKM:SAIS:LKNYQ:NMTVESXAXR, HVTKPTXAPTKL:SAIS:LKNYQ:NMVVRSXGXH, YVPKPXXAPTKL:SAIS:LKNYQ:NMVVRSXGXH, TVPKPXXAPTQL:SAIS:LKNYQ:NMVVRAXGXH, AVPKAXXAPTKL:SAIS:LKNYQ:NMVVKAXGXH, KVGKAXXVPTKL:SAIS:LKNYQ:EGMSVAEXGXR, KASKAXXVPTKL:SAIS:LKNYQ:GMAVSEXGXR, GSAGPXXTPTKM:SAIS:LKNYQ:GMVVDRXGXS, AAPASXXVPARL:SAIS:LKNYQ:DMVVEAXGXR, HVPKPXXAPTKL:SAIS:LKNYQ:NMVVRSXGXH, RVPSTXXAPVKT:SAIS:LKNYQ:MIVEEXGXL, ASAAPXXVPQAL:SAIS:LKNYQ:MIVRSXKXS, ASASPSSVSQDL:SAIS:LKNYQ:MIVKSXKXS, ASASPXXVPQDL:SAIS:LKNYQ:MVVKSXKXS, NDEGLEXVPTEE:SAIS:LKNYQ:FLQHNKXEXR, NDEGLEXVPTGQ:SAIS:LKNYQ:LEEHSQXEXR, SSVKXQPSRVHH:SAIS:LKNYQ:RLEEHLEXAXA, RNVQXRPTQVQL:SAIS:LKNYQ:TLEDHLAXKXE, KIPKAXXVPEEL:SSLS:LKVYP:DMTVEGXGXR, SIPKAXXVPEEL:SSLS:LKVYP:EMTVEGXGXR, HVTKPTXVPEKL:SSLS:LKVYP:NMTVESXGXH, YVPKPXXVPEKL:SSLS:LKVYP:NMTVESXGXH, TVPKPXXVPEQL:SSLS:LKVYP:NMTVEAXGXH, AVPKAXXVPEKL:SSLS:LKVYP:NMTVEAXGXH, KVGKAXXVPEKL:SSLS:LKVYP:EGMSTVEXGXR, KASKAXXVPEKL:SSLS:LKVYP:GMTVEEXGXR, GSAGPXXVPEKM:SSLS:LKVYP:GMTVERXGXS, AAPASXXVPERL:SSLS:LKVYP:DMTVEAXGXR, STPPTXXVPERL:SSLS:LKVYP:DMTVESXGXR, HVPKPXXVPEKL:SSLS:LKVYP:NMTVESXGXH, RVPSTXXVPEKT:SSLS:LKVYP:MITVEXGXL, ASAAPXXVPEAL:SSLS:LKVYP:MITVEXKXS, ASASPXXVPEDL:SSLS:LKVYP:MITVEXKXS, ASASPXXVPEDL:SSLS:LKVYP:MVTVEXKXS, KIPKAXXVPTEL:SSLS:LKVYP:DMVVEGXGXR, SIPKAXXVPTEL:SSLS:LKVYP:EMVVEGXGXR, HVTKPTXAPTKL:SSLS:LKVYP:NMVVRSXGXH, YVPKPXXAPTKL:SSLS:LKVYP:NMVVRSXGXH, TVPKPXXAPTQL:SSLS:LKVYP:NMVVRAXGXH, AVPKAXXAPTKL:SSLS:LKVYP:NMVVKAXGXH, KVGKAXXVPTKL:SSLS:LKVYP:EGMSVAEXGXR, KASKAXXVPTKL:SSLS:LKVYP:GMAVSEXGXR, GSAGPXXTPTKM:SSLS:LKVYP:GMVVDRXGXS, AAPASXXVPARL:SSLS:LKVYP:DMVVEAXGXR, STPPTXXVPTRL:SSLS:LKVYP:DMVVESXGXR, HVPKPXXAPTKL:SSLS:LKVYP:NMVVRSXGXH, RVPSTXXAPVKT:SSLS:LKVYP:MIVEEXGXL, ASAAPXXVPQAL:SSLS:LKVYP:MIVRSXKXS, ASASPSSVSQDL:SSLS:LKVYP:MIVKSXKXS, ASASPXXVPQDL:SSLS:LKVYP:MVVKSXKXS, NDEGLEXVPTEE:SSLS:LKVYP:FLQHNKXEXR, NDEGLEXVPTGQ:SSLS:LKVYP:LEEHSQXEXR, SSVKXQPSRVHH:SSLS:LKVYP:RLEEHLEXAXA, RNVQXRPTQVQL:SSLS:LKVYP:TLEDHLAXKXE, KIPKAXXAPTEL:NAIS:LKKYR:DMVVRGXGXR, GIPEPXXAPTKM:NAIS:LKKYR:NMVVRSXAXR, SIPKAXXAPTEL:NAIS:LKKYR:EMVVRGXGXR, AVPKAXXAPTKL:NAIS:LKKYR:NMVVRAXGXH, KVGKAXXAPTKL:NAIS:LKKYR:EGMSVVRXGXR, KASKAXXAPTKL:NAIS:LKKYR:GMVVREXGXR, GSAGPXXAPTKM:NAIS:LKKYR:GMVVRRXGXS, AAPASXXAPTRL:NAIS:LKKYR:DMVVRAXGXR, STPPTXXAPTRL:NAIS:LKKYR:DMVVRSXGXR, RVPSTXXAPTKT:NAIS:LKKYR:MIVVRXGXL, ASAAPXXAPTAL:NAIS:LKKYR:MIVVRXKXS, ASASPXXAPTDL:NAIS:LKKYR:MIVVRXKXS, ASASPXXAPTDL:NAIS:LKKYR:MVVVRXKXS, KIPKAXXVPTEL:NAIS:LKKYR:DMVVEGXGXR, GIPEPXXVPEKM:NAIS:LKKYR:NMTVESXAXR, SIPKAXXVPTEL:NAIS:LKKYR:EMVVEGXGXR, AVPKAXXAPTKL:NAIS:LKKYR:NMVVKAXGXH, KVGKAXXVPTKL:NAIS:LKKYR:EGMSVAEXGXR, KASKAXXVPTKL:NAIS:LKKYR:GMAVSEXGXR, GSAGPXXTPTKM:NAIS:LKKYR:GMVVDRXGXS, AAPASXXVPARL:NAIS:LKKYR:DMVVEAXGXR, STPPTXXVPTRL:NAIS:LKKYR:DMVVESXGXR, RVPSTXXAPVKT:NAIS:LKKYR:MIVEEXGXL, ASAAPXXVPQAL:NAIS:LKKYR:MIVRSXKXS, ASASPSSVSQDL:NAIS:LKKYR:MIVKSXKXS, ASASPXXVPQDL:NAIS:LKKYR:MVVKSXKXS, NDEGLEXVPTEE:NAIS:LKKYR:FLQHNKXEXR, NDEGLEXVPTGQ:NAIS:LKKYR:LEEHSQXEXR, SSVKXQPSRVHH:NAIS:LKKYR:RLEEHLEXAXA, RNVQXRPTQVQL:NAIS:LKKYR:TLEDHLAXKXE, KIPKAXXAPTEL:SATS:LRKHR:DMVVKGXGXR, GIPEPXXAPTKM:SATS:LRKHR:NMVVKSXAXR, SIPKAXXAPTEL:SATS:LRKHR:EMVVKGXGXR, HVTKPTXAPTKL:SATS:LRKHR:NMVVKSXGXH, YVPKPXXAPTKL:SATS:LRKHR:NMVVKSXGXH, TVPKPXXAPTQL:SATS:LRKHR:NMVVKAXGXH, KVGKAXXAPTKL:SATS:LRKHR:EGMSVVKXGXR, KASKAXXAPTKL:SATS:LRKHR:GMVVKEXGXR, GSAGPXXAPTKM:SATS:LRKHR:GMVVKRXGXS, AAPASXXAPTRL:SATS:LRKHR:DMVVKAXGXR, STPPTXXAPTRL:SATS:LRKHR:DMVVKSXGXR, HVPKPXXAPTKL:SATS:LRKHR:NMVVKSXGXH, RVPSTXXAPTKT:SATS:LRKHR:MIVVKXGXL, ASAAPXXAPTAL:SATS:LRKHR:MIVVKXKXS, ASASPXXAPTDL:SATS:LRKHR:MIVVKXKXS, ASASPXXAPTDL:SATS:LRKHR:MVVVKXKXS, KIPKAXXVPTEL:SATS:LRKHR:DMVVEGXGXR, GIPEPXXVPEKM:SATS:LRKHR:NMTVESXAXR, SIPKAXXVPTEL:SATS:LRKHR:EMVVEGXGXR, HVTKPTXAPTKL:SATS:LRKHR:NMVVRSXGXH, YVPKPXXAPTKL:SATS:LRKHR:NMVVRSXGXH, TVPKPXXAPTQL:SATS:LRKHR:NMVVRAXGXH, KVGKAXXVPTKL:SATS:LRKHR:EGMSVAEXGXR, KASKAXXVPTKL:SATS:LRKHR:GMAVSEXGXR, GSAGPXXTPTKM:SATS:LRKHR:GMVVDRXGXS, AAPASXXVPARL:SATS:LRKHR:DMVVEAXGXR, STPPTXXVPTRL:SATS:LRKHR:DMVVESXGXR, HVPKPXXAPTKL:SATS:LRKHR:NMVVRSXGXH, RVPSTXXAPVKT:SATS:LRKHR:MIVEEXGXL, ASAAPXXVPQAL:SATS:LRKHR:MIVRSXKXS, ASASPSSVSQDL:SATS:LRKHR:MIVKSXKXS, ASASPXXVPQDL:SATS:LRKHR:MVVKSXKXS, NDEGLEXVPTEE:SATS:LRKHR:FLQHNKXEXR, NDEGLEXVPTGQ:SATS:LRKHR:LEEHSQXEXR, SSVKXQPSRVHH:SATS:LRKHR:RLEEHLEXAXA, RNVQXRPTQVQL:SATS:LRKHR:TLEDHLAXKXE, KIPKAXXVPTEL:SPIS:LKYHY:DMVAEGXGXR, GIPEPXXVPTKM:SPIS:LKYHY:NMVAESXAXR, SIPKAXXVPTEL:SPIS:LKYHY:EMVAEGXGXR, HVTKPTXVPTKL:SPIS:LKYHY:NMVAESXGXH, YVPKPXXVPTKL:SPIS:LKYHY:NMVAESXGXH, TVPKPXXVPTQL:SPIS:LKYHY:NMVAEAXGXH, AVPKAXXVPTKL:SPIS:LKYHY:NMVAEAXGXH, KASKAXXVPTKL:SPIS:LKYHY:GMVAEEXGXR, GSAGPXXVPTKM:SPIS:LKYHY:GMVAERXGXS, AAPASXXVPTRL:SPIS:LKYHY:DMVAEAXGXR, STPPTXXVPTRL:SPIS:LKYHY:DMVAESXGXR, HVPKPXXVPTKL:SPIS:LKYHY:NMVAESXGXH, RVPSTXXVPTKT:SPIS:LKYHY:MIVAEXGXL, ASAAPXXVPTAL:SPIS:LKYHY:MIVAEXKXS, ASASPXXVPTDL:SPIS:LKYHY:MIVAEXKXS, ASASPXXVPTDL:SPIS:LKYHY:MVVAEXKXS, KIPKAXXVPTEL:SPIS:LKYHY:DMVVEGXGXR, GIPEPXXVPEKM:SPIS:LKYHY:NMTVESXAXR, SIPKAXXVPTEL:SPIS:LKYHY:EMVVEGXGXR, HVTKPTXAPTKL:SPIS:LKYHY:NMVVRSXGXH, YVPKPXXAPTKL:SPIS:LKYHY:NMVVRSXGXH, TVPKPXXAPTQL:SPIS:LKYHY:NMVVRAXGXH, AVPKAXXAPTKL:SPIS:LKYHY:NMVVKAXGXH, KASKAXXVPTKL:SPIS:LKYHY:GMAVSEXGXR, GSAGPXXTPTKM:SPIS:LKYHY:GMVVDRXGXS, AAPASXXVPARL:SPIS:LKYHY:DMVVEAXGXR, STPPTXXVPTRL:SPIS:LKYHY:DMVVESXGXR, HVPKPXXAPTKL:SPIS:LKYHY:NMVVRSXGXH, RVPSTXXAPVKT:SPIS:LKYHY:MIVEEXGXL, ASAAPXXVPQAL:SPIS:LKYHY:MIVRSXKXS, ASASPSSVSQDL:SPIS:LKYHY:MIVKSXKXS, ASASPXXVPQDL:SPIS:LKYHY:MVVKSXKXS, NDEGLEXVPTEE:SPIS:LKYHY:FLQHNKXEXR, NDEGLEXVPTGQ:SPIS:LKYHY:LEEHSQXEXR, SSVKXQPSRVHH:SPIS:LKYHY:RLEEHLEXAXA, RNVQXRPTQVQL:SPIS:LKYHY:TLEDHLAXKXE, KIPKAXXVPTEL:EPIS:KFKYE:DMAVXGXGSR, GIPEPXXVPTKM:EPIS:KFKYE:NMAVSSXAXR, SIPKAXXVPTEL:EPIS:KFKYE:EMAVXGXGSR, HVTKPTXVPTKL:EPIS:KFKYE:NMAVSSXGXH, YVPKPXXVPTKL:EPIS:KFKYE:NMAVSSXGXH, TVPKPXXVPTQL:EPIS:KFKYE:NMAVSAXGXH, AVPKAXXVPTKL:EPIS:KFKYE:NMAVSAXGXH, KVGKAXXVPTKL:EPIS:KFKYE:EGMSAVSXGXR, GSAGPXXVPTKM:EPIS:KFKYE:GMAVSRXGXS, AAPASXXVPTRL:EPIS:KFKYE:DMAVSAXGXR, STPPTXXVPTRL:EPIS:KFKYE:DMAVSSXGXR, HVPKPXXVPTKL:EPIS:KFKYE:NMAVSSXGXH, RVPSTXXVPTKT:EPIS:KFKYE:MIAVSXGXL, ASAAPXXVPTAL:EPIS:KFKYE:MIAVSXKXS, ASASPXXVPTDL:EPIS:KFKYE:MIAVSXKXS, ASASPXXVPTDL:EPIS:KFKYE:MVAVSXKXS, KIPKAXXVPTEL:EPIS:KFKYE:DMVVEGXGXR, GIPEPXXVPEKM:EPIS:KFKYE:NMTVESXAXR, SIPKAXXVPTEL:EPIS:KFKYE:EMVVEGXGXR, HVTKPTXAPTKL:EPIS:KFKYE:NMVVRSXGXH, YVPKPXXAPTKL:EPIS:KFKYE:NMVVRSXGXH, TVPKPXXAPTQL:EPIS:KFKYE:NMVVRAXGXH, AVPKAXXAPTKL:EPIS:KFKYE:NMVVKAXGXH, KVGKAXXVPTKL:EPIS:KFKYE:EGMSVAEXGXR, GSAGPXXTPTKM:EPIS:KFKYE:GMVVDRXGXS, AAPASXXVPARL:EPIS:KFKYE:DMVVEAXGXR, STPPTXXVPTRL:EPIS:KFKYE:DMVVESXGXR, HVPKPXXAPTKL:EPIS:KFKYE:NMVVRSXGXH, RVPSTXXAPVKT:EPIS:KFKYE:MIVEEXGXL, ASAAPXXVPQAL:EPIS:KFKYE:MIVRSXKXS, ASASPSSVSQDL:EPIS:KFKYE:MIVKSXKXS, ASASPXXVPQDL:EPIS:KFKYE:MVVKSXKXS, NDEGLEXVPTEE:EPIS:KFKYE:FLQHNKXEXR, NDEGLEXVPTGQ:EPIS:KFKYE:LEEHSQXEXR, SSVKXQPSRVHH:EPIS:KFKYE:RLEEHLEXAXA, RNVQXRPTQVQL:EPIS:KFKYE:TLEDHLAXKXE, KIPKAXXTPTEL:SPIN:YGKIP:DMVVDGXGXR, GIPEPXXTPTKM:SPIN:YGKIP:NMVVDSXAXR, SIPKAXXTPTEL:SPIN:YGKIP:EMVVDGXGXR, HVTKPTXTPTKL:SPIN:YGKIP:NMVVDSXGXH, YVPKPXXTPTKL:SPIN:YGKIP:NMVVDSXGXH, TVPKPXXTPTQL:SPIN:YGKIP:NMVVDAXGXH, AVPKAXXTPTKL:SPIN:YGKIP:NMVVDAXGXH, KVGKAXXTPTKL:SPIN:YGKIP:EGMSVVDXGXR, KASKAXXTPTKL:SPIN:YGKIP:GMVVDEXGXR, AAPASXXTPTRL:SPIN:YGKIP:DMVVDAXGXR, STPPTXXTPTRL:SPIN:YGKIP:DMVVDSXGXR, HVPKPXXTPTKL:SPIN:YGKIP:NMVVDSXGXH, RVPSTXXTPTKT:SPIN:YGKIP:MIVVDXGXL, ASAAPXXTPTAL:SPIN:YGKIP:MIVVDXKXS, ASASPXXTPTDL:SPIN:YGKIP:MIVVDXKXS, ASASPXXTPTDL:SPIN:YGKIP:MVVVDXKXS, KIPKAXXVPTEL:SPIN:YGKIP:DMVVEGXGXR, GIPEPXXVPEKM:SPIN:YGKIP:NMTVESXAXR, SIPKAXXVPTEL:SPIN:YGKIP:EMVVEGXGXR, HVTKPTXAPTKL:SPIN:YGKIP:NMVVRSXGXH, YVPKPXXAPTKL:SPIN:YGKIP:NMVVRSXGXH, TVPKPXXAPTQL:SPIN:YGKIP:NMVVRAXGXH, AVPKAXXAPTKL:SPIN:YGKIP:NMVVKAXGXH, KVGKAXXVPTKL:SPIN:YGKIP:EGMSVAEXGXR, KASKAXXVPTKL:SPIN:YGKIP:GMAVSEXGXR, AAPASXXVPARL:SPIN:YGKIP:DMVVEAXGXR, STPPTXXVPTRL:SPIN:YGKIP:DMVVESXGXR, HVPKPXXAPTKL:SPIN:YGKIP:NMVVRSXGXH, RVPSTXXAPVKT:SPIN:YGKIP:MIVEEXGXL, ASAAPXXVPQAL:SPIN:YGKIP:MIVRSXKXS, ASASPSSVSQDL:SPIN:YGKIP:MIVKSXKXS, ASASPXXVPQDL:SPIN:YGKIP:MVVKSXKXS, NDEGLEXVPTEE:SPIN:YGKIP:FLQHNKXEXR, NDEGLEXVPTGQ:SPIN:YGKIP:LEEHSQXEXR, SSVKXQPSRVHH:SPIN:YGKIP:RLEEHLEXAXA, RNVQXRPTQVQL:SPIN:YGKIP:TLEDHLAXKXE, KIPKAXXVPAEL:SPIS:YKQYE:DMVVEGXGXR, GIPEPXXVPAKM:SPIS:YKQYE:NMVVESXAXR, SIPKAXXVPAEL:SPIS:YKQYE:EMVVEGXGXR, HVTKPTXVPAKL:SPIS:YKQYE:NMVVESXGXH, YVPKPXXVPAKL:SPIS:YKQYE:NMVVESXGXH, TVPKPXXVPAQL:SPIS:YKQYE:NMVVEAXGXH, AVPKAXXVPAKL:SPIS:YKQYE:NMVVEAXGXH, KVGKAXXVPAKL:SPIS:YKQYE:EGMSVVEXGXR, KASKAXXVPAKL:SPIS:YKQYE:GMVVEEXGXR, GSAGPXXVPAKM:SPIS:YKQYE:GMVVERXGXS, STPPTXXVPARL:SPIS:YKQYE:DMVVESXGXR, HVPKPXXVPAKL:SPIS:YKQYE:NMVVESXGXH, RVPSTXXVPAKT:SPIS:YKQYE:MIVVEXGXL, ASAAPXXVPAAL:SPIS:YKQYE:MIVVEXKXS, ASASPXXVPADL:SPIS:YKQYE:MIVVEXKXS, ASASPXXVPADL:SPIS:YKQYE:MVVVEXKXS, KIPKAXXVPTEL:SPIS:YKQYE:DMVVEGXGXR, GIPEPXXVPEKM:SPIS:YKQYE:NMTVESXAXR, SIPKAXXVPTEL:SPIS:YKQYE:EMVVEGXGXR, HVTKPTXAPTKL:SPIS:YKQYE:NMVVRSXGXH, YVPKPXXAPTKL:SPIS:YKQYE:NMVVRSXGXH, TVPKPXXAPTQL:SPIS:YKQYE:NMVVRAXGXH, AVPKAXXAPTKL:SPIS:YKQYE:NMVVKAXGXH, KVGKAXXVPTKL:SPIS:YKQYE:EGMSVAEXGXR, KASKAXXVPTKL:SPIS:YKQYE:GMAVSEXGXR, GSAGPXXTPTKM:SPIS:YKQYE:GMVVDRXGXS, STPPTXXVPTRL:SPIS:YKQYE:DMVVESXGXR, HVPKPXXAPTKL:SPIS:YKQYE:NMVVRSXGXH, RVPSTXXAPVKT:SPIS:YKQYE:MIVEEXGXL, ASAAPXXVPQAL:SPIS:YKQYE:MIVRSXKXS, ASASPSSVSQDL:SPIS:YKQYE:MIVKSXKXS, ASASPXXVPQDL:SPIS:YKQYE:MVVKSXKXS, NDEGLEXVPTEE:SPIS:YKQYE:FLQHNKXEXR, NDEGLEXVPTGQ:SPIS:YKQYE:LEEHSQXEXR, SSVKXQPSRVHH:SPIS:YKQYE:RLEEHLEXAXA, RNVQXRPTQVQL:SPIS:YKQYE:TLEDHLAXKXE, GIPEPXXVPTKM:SPIS:YKQYE:NMVVESXAXR, HVTKPTXVPTKL:SPIS:YKQYE:NMVVESXGXH, YVPKPXXVPTKL:SPIS:YKQYE:NMVVESXGXH, TVPKPXXVPTQL:SPIS:YKQYE:NMVVEAXGXH, AVPKAXXVPTKL:SPIS:YKQYE:NMVVEAXGXH, KVGKAXXVPTKL:SPIS:YKQYE:EGMSVVEXGXR, KASKAXXVPTKL:SPIS:YKQYE:GMVVEEXGXR, GSAGPXXVPTKM:SPIS:YKQYE:GMVVERXGXS, AAPASXXVPTRL:SPIS:YKQYE:DMVVEAXGXR, HVPKPXXVPTKL:SPIS:YKQYE:NMVVESXGXH, RVPSTXXVPTKT:SPIS:YKQYE:MIVVEXGXL, ASAAPXXVPTAL:SPIS:YKQYE:MIVVEXKXS, ASASPXXVPTDL:SPIS:YKQYE:MIVVEXKXS, ASASPXXVPTDL:SPIS:YKQYE:MVVVEXKXS, AAPASXXVPARL:SPIS:YKQYE:DMVVEAXGXR, KIPKAXXAPVEL:KPLS:DHHKD:DMVEEGXGXR, GIPEPXXAPVKM:KPLS:DHHKD:NMVEESXAXR, SIPKAXXAPVEL:KPLS:DHHKD:EMVEEGXGXR, HVTKPTXAPVKL:KPLS:DHHKD:NMVEESXGXH, YVPKPXXAPVKL:KPLS:DHHKD:NMVEESXGXH, TVPKPXXAPVQL:KPLS:DHHKD:NMVEEAXGXH, AVPKAXXAPVKL:KPLS:DHHKD:NMVEEAXGXH, KVGKAXXAPVKL:KPLS:DHHKD:EGMSVEEXGXR, KASKAXXAPVKL:KPLS:DHHKD:GMVEEEXGXR, GSAGPXXAPVKM:KPLS:DHHKD:GMVEERXGXS, AAPASXXAPVRL:KPLS:DHHKD:DMVEEAXGXR, STPPTXXAPVRL:KPLS:DHHKD:DMVEESXGXR, HVPKPXXAPVKL:KPLS:DHHKD:NMVEESXGXH, ASAAPXXAPVAL:KPLS:DHHKD:MIVEEXKXS, ASASPXXAPVDL:KPLS:DHHKD:MIVEEXKXS, ASASPXXAPVDL:KPLS:DHHKD:MVVEEXKXS, KIPKAXXVPTEL:KPLS:DHHKD:DMVVEGXGXR, GIPEPXXVPEKM:KPLS:DHHKD:NMTVESXAXR, SIPKAXXVPTEL:KPLS:DHHKD:EMVVEGXGXR, HVTKPTXAPTKL:KPLS:DHHKD:NMVVRSXGXH, YVPKPXXAPTKL:KPLS:DHHKD:NMVVRSXGXH, TVPKPXXAPTQL:KPLS:DHHKD:NMVVRAXGXH, AVPKAXXAPTKL:KPLS:DHHKD:NMVVKAXGXH, KVGKAXXVPTKL:KPLS:DHHKD:EGMSVAEXGXR, KASKAXXVPTKL:KPLS:DHHKD:GMAVSEXGXR, GSAGPXXTPTKM:KPLS:DHHKD:GMVVDRXGXS, AAPASXXVPARL:KPLS:DHHKD:DMVVEAXGXR, STPPTXXVPTRL:KPLS:DHHKD:DMVVESXGXR, HVPKPXXAPTKL:KPLS:DHHKD:NMVVRSXGXH, ASAAPXXVPQAL:KPLS:DHHKD:MIVRSXKXS, ASASPSSVSQDL:KPLS:DHHKD:MIVKSXKXS, ASASPXXVPQDL:KPLS:DHHKD:MVVKSXKXS, NDEGLEXVPTEE:KPLS:DHHKD:FLQHNKXEXR, NDEGLEXVPTGQ:KPLS:DHHKD:LEEHSQXEXR, SSVKXQPSRVHH:KPLS:DHHKD:RLEEHLEXAXA, RNVQXRPTQVQL:KPLS:DHHKD:TLEDHLAXKXE, KIPKAXXVPQEL:EPLP:EQLSN:DMVRXGXGSR, GIPEPXXVPQKM:EPLP:EQLSN:NMVRSSXAXR, SIPKAXXVPQEL:EPLP:EQLSN:EMVRXGXGSR, HVTKPTXVPQKL:EPLP:EQLSN:NMVRSSXGXH, YVPKPXXVPQKL:EPLP:EQLSN:NMVRSSXGXH, TVPKPXXVPQQL:EPLP:EQLSN:NMVRSAXGXH, AVPKAXXVPQKL:EPLP:EQLSN:NMVRSAXGXH, KVGKAXXVPQKL:EPLP:EQLSN:EGMSVRSXGXR, KASKAXXVPQKL:EPLP:EQLSN:GMVRSEXGXR, GSAGPXXVPQKM:EPLP:EQLSN:GMVRSRXGXS, AAPASXXVPQRL:EPLP:EQLSN:DMVRSAXGXR, STPPTXXVPQRL:EPLP:EQLSN:DMVRSSXGXR, HVPKPXXVPQKL:EPLP:EQLSN:NMVRSSXGXH, RVPSTXXVPQKT:EPLP:EQLSN:MIVRSXGXL, ASASPXXVPQDL:EPLP:EQLSN:MIVRSXKXS, ASASPXXVPQDL:EPLP:EQLSN:MVVRSXKXS, KIPKAXXVPTEL:EPLP:EQLSN:DMVVEGXGXR, GIPEPXXVPEKM:EPLP:EQLSN:NMTVESXAXR, SIPKAXXVPTEL:EPLP:EQLSN:EMVVEGXGXR, HVTKPTXAPTKL:EPLP:EQLSN:NMVVRSXGXH, YVPKPXXAPTKL:EPLP:EQLSN:NMVVRSXGXH, TVPKPXXAPTQL:EPLP:EQLSN:NMVVRAXGXH, AVPKAXXAPTKL:EPLP:EQLSN:NMVVKAXGXH, KVGKAXXVPTKL:EPLP:EQLSN:EGMSVAEXGXR, KASKAXXVPTKL:EPLP:EQLSN:GMAVSEXGXR, GSAGPXXTPTKM:EPLP:EQLSN:GMVVDRXGXS, AAPASXXVPARL:EPLP:EQLSN:DMVVEAXGXR, STPPTXXVPTRL:EPLP:EQLSN:DMVVESXGXR, HVPKPXXAPTKL:EPLP:EQLSN:NMVVRSXGXH, RVPSTXXAPVKT:EPLP:EQLSN:MIVEEXGXL, ASASPSSVSQDL:EPLP:EQLSN:MIVKSXKXS, ASASPXXVPQDL:EPLP:EQLSN:MVVKSXKXS, NDEGLEXVPTEE:EPLP:EQLSN:FLQHNKXEXR, NDEGLEXVPTGQ:EPLP:EQLSN:LEEHSQXEXR, SSVKXQPSRVHH:EPLP:EQLSN:RLEEHLEXAXA, RNVQXRPTQVQL:EPLP:EQLSN:TLEDHLAXKXE, KIPKASSVSQEL:EPLT:EQLSN:DMVKXGXGSR, GIPEPSSVSQKM:EPLT:EQLSN:NMVKSSXAXR, SIPKASSVSQEL:EPLT:EQLSN:EMVKXGXGSR, HVTKPTXVSQKL:EPLT:EQLSN:NMVKSSXGXH, YVPKPSSVSQKL:EPLT:EQLSN:NMVKSSXGXH, TVPKPSSVSQQL:EPLT:EQLSN:NMVKSAXGXH, AVPKASSVSQKL:EPLT:EQLSN:NMVKSAXGXH, KVGKASSVSQKL:EPLT:EQLSN:EGMSVKSXGXR, KASKASSVSQKL:EPLT:EQLSN:GMVKSEXGXR, GSAGPSSVSQKM:EPLT:EQLSN:GMVKSRXGXS, AAPASSSVSQRL:EPLT:EQLSN:DMVKSAXGXR, STPPTSSVSQRL:EPLT:EQLSN:DMVKSSXGXR, HVPKPSSVSQKL:EPLT:EQLSN:NMVKSSXGXH, RVPSTSSVSQKT:EPLT:EQLSN:MIVKSXGXL, ASAAPSSVSQAL:EPLT:EQLSN:MIVKSXKXS, ASASPSSVSQDL:EPLT:EQLSN:MVVKSXKXS, KIPKAXXVPTEL:EPLT:EQLSN:DMVVEGXGXR, GIPEPXXVPEKM:EPLT:EQLSN:NMTVESXAXR, SIPKAXXVPTEL:EPLT:EQLSN:EMVVEGXGXR, HVTKPTXAPTKL:EPLT:EQLSN:NMVVRSXGXH, YVPKPXXAPTKL:EPLT:EQLSN:NMVVRSXGXH, TVPKPXXAPTQL:EPLT:EQLSN:NMVVRAXGXH, AVPKAXXAPTKL:EPLT:EQLSN:NMVVKAXGXH, KVGKAXXVPTKL:EPLT:EQLSN:EGMSVAEXGXR, KASKAXXVPTKL:EPLT:EQLSN:GMAVSEXGXR, GSAGPXXTPTKM:EPLT:EQLSN:GMVVDRXGXS, AAPASXXVPARL:EPLT:EQLSN:DMVVEAXGXR, STPPTXXVPTRL:EPLT:EQLSN:DMVVESXGXR, HVPKPXXAPTKL:EPLT:EQLSN:NMVVRSXGXH, RVPSTXXAPVKT:EPLT:EQLSN:MIVEEXGXL, ASAAPXXVPQAL:EPLT:EQLSN:MIVRSXKXS, NDEGLEXVPTEE:EPLT:EQLSN:FLQHNKXEXR, NDEGLEXVPTGQ:EPLT:EQLSN:LEEHSQXEXR, SSVKXQPSRVHH:EPLT:EQLSN:RLEEHLEXAXA, RNVQXRPTQVQL:EPLT:EQLSN:TLEDHLAXKXE, KIPKAXXVPQEL:EPLT:EQLSN:DMVKXGXGSR, GIPEPXXVPQKM:EPLT:EQLSN:NMVKSSXAXR, SIPKAXXVPQEL:EPLT:EQLSN:EMVKXGXGSR, HVTKPTXVPQKL:EPLT:EQLSN:NMVKSSXGXH, YVPKPXXVPQKL:EPLT:EQLSN:NMVKSSXGXH, TVPKPXXVPQQL:EPLT:EQLSN:NMVKSAXGXH, AVPKAXXVPQKL:EPLT:EQLSN:NMVKSAXGXH, KVGKAXXVPQKL:EPLT:EQLSN:EGMSVKSXGXR, KASKAXXVPQKL:EPLT:EQLSN:GMVKSEXGXR, GSAGPXXVPQKM:EPLT:EQLSN:GMVKSRXGXS, AAPASXXVPQRL:EPLT:EQLSN:DMVKSAXGXR, STPPTXXVPQRL:EPLT:EQLSN:DMVKSSXGXR, HVPKPXXVPQKL:EPLT:EQLSN:NMVKSSXGXH, RVPSTXXVPQKT:EPLT:EQLSN:MIVKSXGXL, ASAAPXXVPQAL:EPLT:EQLSN:MIVKSXKXS, ASASPXXVPQDL:EPLT:EQLSN:MIVKSXKXS, NDEGLEXVPTGQ:SNIT:IGEMS:LEQHNQXEXR, KIPKAXXVPTEL:SNIT:IGEMS:DMVVEGXGXR, GIPEPXXVPEKM:SNIT:IGEMS:NMTVESXAXR, SIPKAXXVPTEL:SNIT:IGEMS:EMVVEGXGXR, HVTKPTXAPTKL:SNIT:IGEMS:NMVVRSXGXH, YVPKPXXAPTKL:SNIT:IGEMS:NMVVRSXGXH, TVPKPXXAPTQL:SNIT:IGEMS:NMVVRAXGXH, AVPKAXXAPTKL:SNIT:IGEMS:NMVVKAXGXH, KVGKAXXVPTKL:SNIT:IGEMS:EGMSVAEXGXR, KASKAXXVPTKL:SNIT:IGEMS:GMAVSEXGXR, GSAGPXXTPTKM:SNIT:IGEMS:GMVVDRXGXS, AAPASXXVPARL:SNIT:IGEMS:DMVVEAXGXR, STPPTXXVPTRL:SNIT:IGEMS:DMVVESXGXR, HVPKPXXAPTKL:SNIT:IGEMS:NMVVRSXGXH, RVPSTXXAPVKT:SNIT:IGEMS:MIVEEXGXL, ASAAPXXVPQAL:SNIT:IGEMS:MIVRSXKXS, ASASPSSVSQDL:SNIT:IGEMS:MIVKSXKXS, ASASPXXVPQDL:SNIT:IGEMS:MVVKSXKXS, NDEGLEXVPTGQ:SNIT:IGEMS:LEEHSQXEXR, SSVKXQPSRVHH:SNIT:IGEMS:RLEEHLEXAXA, RNVQXRPTQVQL:SNIT:IGEMS:TLEDHLAXKXE, NDEGLEXVPTEE:SNIT:LGEMS:FLEHXKXESR, KIPKAXXVPTEL:SNIT:LGEMS:DMVVEGXGXR, GIPEPXXVPEKM:SNIT:LGEMS:NMTVESXAXR, SIPKAXXVPTEL:SNIT:LGEMS:EMVVEGXGXR, HVTKPTXAPTKL:SNIT:LGEMS:NMVVRSXGXH, YVPKPXXAPTKL:SNIT:LGEMS:NMVVRSXGXH, TVPKPXXAPTQL:SNIT:LGEMS:NMVVRAXGXH, AVPKAXXAPTKL:SNIT:LGEMS:NMVVKAXGXH, KVGKAXXVPTKL:SNIT:LGEMS:EGMSVAEXGXR, KASKAXXVPTKL:SNIT:LGEMS:GMAVSEXGXR, GSAGPXXTPTKM:SNIT:LGEMS:GMVVDRXGXS, AAPASXXVPARL:SNIT:LGEMS:DMVVEAXGXR, STPPTXXVPTRL:SNIT:LGEMS:DMVVESXGXR, HVPKPXXAPTKL:SNIT:LGEMS:NMVVRSXGXH, RVPSTXXAPVKT:SNIT:LGEMS:MIVEEXGXL, ASAAPXXVPQAL:SNIT:LGEMS:MIVRSXKXS, ASASPSSVSQDL:SNIT:LGEMS:MIVKSXKXS, ASASPXXVPQDL:SNIT:LGEMS:MVVKSXKXS, NDEGLEXVPTEE:SNIT:LGEMS:FLQHNKXEXR, SSVKXQPSRVHH:SNIT:LGEMS:RLEEHLEXAXA, RNVQXRPTQVQL:SNIT:LGEMS:TLEDHLAXKXE, RNVQXRPSRVQL:RSVK:KEVQV:TLEEHLAXKXE, KIPKAXXVPTEL:RSVK:KEVQV:DMVVEGXGXR, GIPEPXXVPEKM:RSVK:KEVQV:NMTVESXAXR, SIPKAXXVPTEL:RSVK:KEVQV:EMVVEGXGXR, HVTKPTXAPTKL:RSVK:KEVQV:NMVVRSXGXH, YVPKPXXAPTKL:RSVK:KEVQV:NMVVRSXGXH, TVPKPXXAPTQL:RSVK:KEVQV:NMVVRAXGXH, AVPKAXXAPTKL:RSVK:KEVQV:NMVVKAXGXH, KVGKAXXVPTKL:RSVK:KEVQV:EGMSVAEXGXR, KASKAXXVPTKL:RSVK:KEVQV:GMAVSEXGXR, GSAGPXXTPTKM:RSVK:KEVQV:GMVVDRXGXS, AAPASXXVPARL:RSVK:KEVQV:DMVVEAXGXR, STPPTXXVPTRL:RSVK:KEVQV:DMVVESXGXR, HVPKPXXAPTKL:RSVK:KEVQV:NMVVRSXGXH, RVPSTXXAPVKT:RSVK:KEVQV:MIVEEXGXL, ASAAPXXVPQAL:RSVK:KEVQV:MIVRSXKXS, ASASPSSVSQDL:RSVK:KEVQV:MIVKSXKXS, ASASPXXVPQDL:RSVK:KEVQV:MVVKSXKXS, NDEGLEXVPTEE:RSVK:KEVQV:FLQHNKXEXR, NDEGLEXVPTGQ:RSVK:KEVQV:LEEHSQXEXR, RNVQXRPTQVQL:RSVK:KEVQV:TLEDHLAXKXE, SSVKXQPTQVHH:RPVQ:KKATV:RLEDHLEXAXA, KIPKAXXVPTEL:RPVQ:KKATV:DMVVEGXGXR, GIPEPXXVPEKM:RPVQ:KKATV:NMTVESXAXR, SIPKAXXVPTEL:RPVQ:KKATV:EMVVEGXGXR, HVTKPTXAPTKL:RPVQ:KKATV:NMVVRSXGXH, YVPKPXXAPTKL:RPVQ:KKATV:NMVVRSXGXH, TVPKPXXAPTQL:RPVQ:KKATV:NMVVRAXGXH, AVPKAXXAPTKL:RPVQ:KKATV:NMVVKAXGXH, KVGKAXXVPTKL:RPVQ:KKATV:EGMSVAEXGXR, KASKAXXVPTKL:RPVQ:KKATV:GMAVSEXGXR, GSAGPXXTPTKM:RPVQ:KKATV:GMVVDRXGXS, AAPASXXVPARL:RPVQ:KKATV:DMVVEAXGXR, STPPTXXVPTRL:RPVQ:KKATV:DMVVESXGXR, HVPKPXXAPTKL:RPVQ:KKATV:NMVVRSXGXH, RVPSTXXAPVKT:RPVQ:KKATV:MIVEEXGXL, ASAAPXXVPQAL:RPVQ:KKATV:MIVRSXKXS, ASASPSSVSQDL:RPVQ:KKATV:MIVKSXKXS, ASASPXXVPQDL:RPVQ:KKATV:MVVKSXKXS, NDEGLEXVPTEE:RPVQ:KKATV:FLQHNKXEXR, NDEGLEXVPTGQ:RPVQ:KKATV:LEEHSQXEXR and SSVKXQPSRVHH:RPVQ:KKATV:RLEEHLEXAXA.

[0394] In particular, in certain embodiments, the quadruplet PEP9:PEP12:PEP2:PEP10 is selected from the group consisting of GIPEPXXVPTKM:SAIS-AA¹⁷-LYL:LKNYQ:NMVVESXAXR, SIPKAXXVPTEL:SAIS-AA¹⁷-LYL:LKNYQ:EMVVEGXGXR, HVTKPTXVPTKL:SAIS-AA¹⁷-LYL:LKNYQ:NMVVESXGXH, YVPKPXXVPTKL:SAIS-AA¹⁷-LYL:LKNYQ:NMVVESXGXH, TVPKPXXVPTQL:SAIS-AA¹⁷-LYL:LKNYQ:NMVVEAXGXH, AVPKAXXVPTKL:SAIS-AA¹⁷-LYL:LKNYQ:NMVVEAXGXH, KVGKAXXVPTKL:SAIS-AA¹⁷-LYL:LKNYQ:EGMSVVEXGXR, KASKAXXVPTKL:SAIS-AA¹⁷-LYL:LKNYQ:GMVVEEXGXR, GSAGPXXVPTKM:SAIS-AA¹⁷-LYL:LKNYQ:GMVVERXGXS, AAPASXXVPTRL:SAIS-AA¹⁷-LYL:LKNYQ:DMVVEAXGXR, STPPTXXVPTRL:SAIS-AA¹⁷-LYL:LKNYQ:DMVVESXGXR, HVPKPXXVPTKL:SAIS-AA¹⁷-LYL:LKNYQ:NMVVESXGXH, RVPSTXXVPTKT:SAIS-AA¹⁷-LYL:LKNYQ:MIVVEXGXL, ASAAPXXVPTAL:SAIS-AA¹⁷-LYL:LKNYQ:MIVVEXKXS, ASASPXXVPTDL:SAIS-AA¹⁷-LYL:LKNYQ:MIVVEXKXS, ASASPXXVPTDL:SAIS-AA¹⁷-LYL:LKNYQ:MVVVEXKXS, NDEGLEXVPTEE:SAIS-AA¹⁷-LYL:LKNYQ:FLVVEKXEXR, NDEGLEXVPTGQ:SAIS-AA¹⁷-LYL:LKNYQ:LEVVEQXEXR, SSVKXQPVPTHH:SAIS-AA¹⁷-LYL:LKNYQ:RLVVELEXAXA, RNVQXRPVPTQL:SAIS-AA¹⁷-LYL:LKNYQ:TLVVELAXKXE, GIPEPXXVPEKM:SAIS-AA¹⁷-LYL:LKNYQ:NMTVESXAXR, HVTKPTXAPTKL:SAIS-AA¹⁷-LYL:LKNYQ:NMVVRSXGXH, YVPKPXXAPTKL:SAIS-AA¹⁷-LYL:LKNYQ:NMVVRSXGXH, TVPKPXXAPTQL:SAIS-AA¹⁷-LYL:LKNYQ:NMVVRAXGXH, AVPKAXXAPTKL:SAIS-AA¹⁷-LYL:LKNYQ:NMVVKAXGXH, KVGKAXXVPTKL:SAIS-AA¹⁷-LYL:LKNYQ:EGMSVAEXGXR, KASKAXXVPTKL:SAIS-AA¹⁷-LYL:LKNYQ:GMAVSEXGXR, GSAGPXXTPTKM:SAIS-AA¹⁷-LYL:LKNYQ:GMVVDRXGXS, AAPASXXVPARL:SAIS-AA¹⁷-LYL:LKNYQ:DMVVEAXGXR, HVPKPXXAPTKL:SAIS-AA¹⁷-LYL:LKNYQ:NMVVRSXGXH, RVPSTXXAPVKT:SAIS-AA¹⁷-LYL:LKNYQ:MIVEEXGXL, ASAAPXXVPQAL:SAIS-AA¹⁷-LYL:LKNYQ:MIVRSXKXS, ASASPXXVSQDL:SAIS-AA¹⁷-LYL:LKNYQ:MIVKSXKXS, ASASPXXVPQDL:SAIS-AA¹⁷-LYL:LKNYQ:MVVKSXKXS, NDEGLEXVPTEE:SAIS-AA¹⁷-LYL:LKNYQ:FLQHNKXEXR, NDEGLEXVPTGQ:SAIS-AA¹⁷-LYL:LKNYQ:LEEHSQXEXR, SSVKXQPSRVHH:SAIS-AA¹⁷-LYL:LKNYQ:RLEEHLEXAXA, RNVQXRPTQVQL:SAIS-AA¹⁷-LYL:LKNYQ:TLEDHLAXKXE, KIPKAXXVPEEL:SSLS-AA¹⁷-LFF:LKVYP:DMTVEGXGXR, SIPKAXXVPEEL:SSLS-AA¹⁷-LFF:LKVYP:EMTVEGXGXR, HVTKPTXVPEKL:SSLS-AA¹⁷-LFF:LKVYP:NMTVESXGXH, YVPKPXXVPEKL:SSLS-AA¹⁷-LFF:LKVYP:NMTVESXGXH, TVPKPXXVPEQL:SSLS-AA¹⁷-LFF:LKVYP:NMTVEAXGXH, AVPKAXXVPEKL:SSLS-AA¹⁷-LFF:LKVYP:NMTVEAXGXH, KVGKAXXVPEKL:SSLS-AA¹⁷-LFF:LKVYP:EGMSTVEXGXR, KASKAXXVPEKL:SSLS-AA¹⁷-LFF:LKVYP:GMTVEEXGXR, GSAGPXXVPEKM:SSLS-AA¹⁷-LFF:LKVYP:GMTVERXGXS, AAPASXXVPERL:SSLS-AA¹⁷-LFF:LKVYP:DMTVEAXGXR, STPPTXXVPERL:SSLS-AA¹⁷-LFF:LKVYP:DMTVESXGXR, HVPKPXXVPEKL:SSLS-AA¹⁷-LFF:LKVYP:NMTVESXGXH, RVPSTXXVPEKT:SSLS-AA¹⁷-LFF:LKVYP:MITVEXGXL, ASAAPXXVPEAL:SSLS-AA¹⁷-LFF:LKVYP:MITVEXKXS, ASASPXXVPEDL:SSLS-AA¹⁷-LFF:LKVYP:MITVEXKXS, ASASPXXVPEDL:SSLS-AA¹⁷-LFF:LKVYP:MVTVEXKXS, NDEGLEXVPEEE:SSLS-AA¹⁷-LFF:LKVYP:FLTVEKXEXR, NDEGLEXVPEGQ:SSLS-AA¹⁷-LFF:LKVYP:LETVEQXEXR, SSVKXQPVPEHH:SSLS-AA¹⁷-LFF:LKVYP:RLTVELEXAXA, RNVQXRPVPEQL:SSLS-AA¹⁷-LFF:LKVYP:TLTVELAXKXE, KIPKAXXVPTEL:SSLS-AA¹⁷-LFF:LKVYP:DMVVEGXGXR, SIPKAXXVPTEL:SSLS-AA¹⁷-LFF:LKVYP:EMVVEGXGXR, HVTKPTXAPTKL:SSLS-AA¹⁷-LFF:LKVYP:NMVVRSXGXH, YVPKPXXAPTKL:SSLS-AA¹⁷-LFF:LKVYP:NMVVRSXGXH, TVPKPXXAPTQL:SSLS-AA¹⁷-LFF:LKVYP:NMVVRAXGXH, AVPKAXXAPTKL:SSLS-AA¹⁷-LFF:LKVYP:NMVVKAXGXH, KVGKAXXVPTKL:SSLS-AA¹⁷-LFF:LKVYP:EGMSVAEXGXR, KASKAXXVPTKL:SSLS-AA¹⁷-LFF:LKVYP:GMAVSEXGXR, GSAGPXXTPTKM:SSLS-AA¹⁷-LFF:LKVYP:GMVVDRXGXS, AAPASXXVPARL:SSLS-AA¹⁷-LFF:LKVYP:DMVVEAXGXR, STPPTXXVPTRL:SSLS-AA¹⁷-LFF:LKVYP:DMVVESXGXR, HVPKPXXAPTKL:SSLS-AA¹⁷-LFF:LKVYP:NMVVRSXGXH, RVPSTXXAPVKT:SSLS-AA¹⁷-LFF:LKVYP:MIVEEXGXL, ASAAPXXVPQAL:SSLS-AA¹⁷-LFF:LKVYP:MIVRSXKXS, ASASPXXVSQDL:SSLS-AA¹⁷-LFF:LKVYP:MIVKSXKXS, ASASPXXVPQDL:SSLS-AA¹⁷-LFF:LKVYP:MVVKSXKXS, NDEGLEXVPTEE:SSLS-AA¹⁷-LFF:LKVYP:FLQHNKXEXR, NDEGLEXVPTGQ:SSLS-AA¹⁷-LFF:LKVYP:LEEHSQXEXR, SSVKXQPSRVHH:SSLS-AA¹⁷-LFF:LKVYP:RLEEHLEXAXA, RNVQXRPTQVQL:SSLS-AA¹⁷-LFF:LKVYP:TLEDHLAXKXE, KIPKAXXVPTEL:SAIS-AA¹⁷-LYL:LKNYQ:DMVVEGXGXR, KIPKAXXAPTEL:NAIS-AA¹⁷-LYF:LKKYR:DMVVRGXGXR, GIPEPXXAPTKM:NAIS-AA¹⁷-LYF:LKKYR:NMVVRSXAXR, SIPKAXXAPTEL:NAIS-AA¹⁷-LYF:LKKYR:EMVVRGXGXR, YVPKPXXAPTKL:NAIS-AA¹⁷-LYF:LKKYR:NMVVRSXGXH, TVPKPXXAPTQL:NAIS-AA¹⁷-LYF:LKKYR:NMVVRAXGXH, AVPKAXXAPTKL:NAIS-AA¹⁷-LYF:LKKYR:NMVVRAXGXH, KVGKAXXAPTKL:NAIS-AA¹⁷-LYF:LKKYR:EGMSVVRXGXR, KASKAXXAPTKL:NAIS-AA¹⁷-LYF:LKKYR:GMVVREXGXR, GSAGPXXAPTKM:NAIS-AA¹⁷-LYF:LKKYR:GMVVRRXGXS, AAPASXXAPTRL:NAIS-AA¹⁷-LYF:LKKYR:DMVVRAXGXR, STPPTXXAPTRL:NAIS-AA¹⁷-LYF:LKKYR:DMVVRSXGXR, HVPKPXXAPTKL:NAIS-AA¹⁷-LYF:LKKYR:NMVVRSXGXH, RVPSTXXAPTKT:NAIS-AA¹⁷-LYF:LKKYR:MIVVRXGXL, ASAAPXXAPTAL:NAIS-AA¹⁷-LYF:LKKYR:MIVVRXKXS, ASASPXXAPTDL:NAIS-AA¹⁷-LYF:LKKYR:MIVVRXKXS, ASASPXXAPTDL:NAIS-AA¹⁷-LYF:LKKYR:MVVVRXKXS, NDEGLESAPTEE:NAIS-AA¹⁷-LYF:LKKYR:FLVVRKXEXR, NDEGLESAPTGQ:NAIS-AA¹⁷-LYF:LKKYR:LEVVRQXEXR, SSVKXQPAPTHH:NAIS-AA¹⁷-LYF:LKKYR:RLVVRLEXAXA, RNVQXRPAPTQL:NAIS-AA¹⁷-LYF:LKKYR:TLVVRLAXKXE, KIPKAXXVPTEL:NAIS-AA¹⁷-LYF:LKKYR:DMVVEGXGXR, GIPEPXXVPEKM:NAIS-AA¹⁷-LYF:LKKYR:NMTVESXAXR, SIPKAXXVPTEL:NAIS-AA¹⁷-LYF:LKKYR:EMVVEGXGXR, AVPKAXXAPTKL:NAIS-AA¹⁷-LYF:LKKYR:NMVVKAXGXH, KVGKAXXVPTKL:NAIS-AA¹⁷-LYF:LKKYR:EGMSVAEXGXR, KASKAXXVPTKL:NAIS-AA¹⁷-LYF:LKKYR:GMAVSEXGXR, GSAGPXXTPTKM:NAIS-AA¹⁷-LYF:LKKYR:GMVVDRXGXS, AAPASXXVPARL:NAIS-AA¹⁷-LYF:LKKYR:DMVVEAXGXR, STPPTXXVPTRL:NAIS-AA¹⁷-LYF:LKKYR:DMVVESXGXR, RVPSTXXAPVKT:NAIS-AA¹⁷-LYF:LKKYR:MIVEEXGXL, ASAAPXXVPQAL:NAIS-AA¹⁷-LYF:LKKYR:MIVRSXKXS, ASASPXXVSQDL:NAIS-AA¹⁷-LYF:LKKYR:MIVKSXKXS, ASASPXXVPQDL:NAIS-AA¹⁷-LYF:LKKYR:MVVKSXKXS, NDEGLEXVPTEE:NAIS-AA¹⁷-LYF:LKKYR:FLQHNKXEXR, NDEGLEXVPTGQ:NAIS-AA¹⁷-LYF:LKKYR:LEEHSQXEXR, SSVKXQPSRVHH:NAIS-AA¹⁷-LYF:LKKYR:RLEEHLEXAXA, RNVQXRPTQVQL:NAIS-AA¹⁷-LYF:LKKYR:TLEDH LAXKXE, HVTKPTXAPTKL:NAIS-AA¹⁷-LYF:LKKYR:NMVVRSXGXH, KIPKAXXAPTEL:SATS-AA¹⁷-LYY:LRKHR:DMVVKGXGXR, GIPEPXXAPTKM:SATS-AA¹⁷-LYY:LRKHR:NMVVKSXAXR, SIPKAXXAPTEL:SATS-AA¹⁷-LYY:LRKHR:EMVVKGXGXR, HVTKPTXAPTKL:SATS-AA¹⁷-LYY:LRKHR:NMVVKSXGXH, YVPKPXXAPTKL:SATS-AA¹⁷-LYY:LRKHR:NMVVKSXGXH, TVPKPXXAPTQL:SATS-AA¹⁷-LYY:LRKHR:NMVVKAXGXH, KVGKAXXAPTKL:SATS-AA¹⁷-LYY:LRKHR:EGMSVVKXGXR, KASKAXXAPTKL:SATS-AA¹⁷-LYY:LRKHR:GMVVKEXGXR, GSAGPXXAPTKM:SATS-AA¹⁷-LYY:LRKHR:GMVVKRXGXS, AAPASXXAPTRL:SATS-AA¹⁷-LYY:LRKHR:DMVVKAXGXR, STPPTXXAPTRL:SATS-AA¹⁷-LYY:LRKHR:DMVVKSXGXR, HVPKPXXAPTKL:SATS-AA¹⁷-LYY:LRKHR:NMVVKSXGXH, RVPSTXXAPTKT:SATS-AA¹⁷-LYY:LRKHR:MIVVKXGXL, ASAAPXXAPTAL:SATS-AA¹⁷-LYY:LRKHR:MIVVKXKXS, ASASPXXAPTDL:SATS-AA¹⁷-LYY:LRKHR:MIVVKXKXS, ASASPXXAPTDL:SATS-AA¹⁷-LYY:LRKHR:MVVVKXKXS, NDEGLESAPTEE:SATS-AA¹⁷-LYY:LRKHR:FLVVKKXEXR, NDEGLESAPTGQ:SATS-AA¹⁷-LYY:LRKHR:LEVVKQXEXR, SSVKXQPAPTHH:SATS-AA¹⁷-LYY:LRKHR: RLVVKLEXAXA, RNVQXRPAPTQL:SATS-AA¹⁷-LYY:LRKHR:TLVVKLAXKXE, KIPKAXXVPTEL:SATS-AA¹⁷-LYY:LRKHR:DMVVEGXGXR, GIPEPXXVPEKM:SATS-AA¹⁷-LYY:LRKHR:NMTVESXAXR, SIPKAXXVPTEL:SATS-AA¹⁷-LYY:LRKHR:EMVVEGXGXR, HVTKPTXAPTKL:SATS-AA¹⁷-LYY:LRKHR:NMVVRSXGXH, YVPKPXXAPTKL:SATS-AA¹⁷-LYY:LRKHR:NMVVRSXGXH, TVPKPXXAPTQL:SATS-AA¹⁷-LYY:LRKHR:NMVVRAXGXH, KVGKAXXVPTKL:SATS-AA¹⁷-LYY:LRKHR:EGMSVAEXGXR, KASKAXXVPTKL:SATS-AA¹⁷-LYY:LRKHR:GMAVSEXGXR, GSAGPXXTPTKM:SATS-AA¹⁷-LYY:LRKHR:GMVVDRXGXS, AAPASXXVPARL:SATS-AA¹⁷-LYY:LRKHR:DMVVEAXGXR, STPPTXXVPTRL:SATS-AA¹⁷-LYY:LRKHR:DMVVESXGXR, HVPKPXXAPTKL:SATS-AA¹⁷-LYY:LRKHR:NMVVRSXGXH, RVPSTXXAPVKT:SATS-AA¹⁷-LYY:LRKHR:MIVEEXGXL, ASAAPXXVPQAL:SATS-AA¹⁷-LYY:LRKHR:MIVRSXKXS, ASASPXXVSQDL:SATS-AA¹⁷-LYY:LRKHR:MIVKSXKXS, ASASPXXVPQDL:SATS-AA¹⁷-LYY:LRKHR:MVVKSXKXS, NDEGLEXVPTEE:SATS-AA¹⁷-LYY:LRKHR:FLQHNKXEXR, NDEGLEXVPTGQ:SATS-AA¹⁷-LYY:LRKHR:LEEHSQXEXR, SSVKXQPSRVHH:SATS-AA¹⁷-LYY:LRKHR:RLEEHLEXAXA, RNVQXRPTQVQL:SATS-AA¹⁷-LYY:LRKHR:TLEDHLAXKXE, KIPKAXXVPTEL:SPIS-AA¹⁷-LYK:LKYHY:DMVAEGXGXR, GIPEPXXVPTKM:SPIS-AA¹⁷-LYK:LKYHY:NMVAESXAXR, SIPKAXXVPTEL:SPIS-AA¹⁷-LYK:LKYHY: EMVAEGXGXR, HVTKPTXVPTKL:SPIS-AA¹⁷-LYK:LKYHY:NMVAESXGXH, YVPKPXXVPTKL:SPIS-AA¹⁷-LYK:LKYHY:NMVAESXGXH, TVPKPXXVPTQL:SPIS-AA¹⁷-LYK:LKYHY:NMVAEAXGXH, AVPKAXXVPTKL:SPIS-AA¹⁷-LYK:LKYHY:NMVAEAXGXH, KASKAXXVPTKL:SPIS-AA¹⁷-LYK:LKYHY:GMVAEEXGXR, GSAGPXXVPTKM:SPIS-AA¹⁷-LYK: LKYHY:GMVAERXGXS, AAPASXXVPTRL:SPIS-AA¹⁷-LYK:LKYHY:DMVAEAXGXR, STPPTXXVPTRL:SPIS-AA¹⁷-LYK:LKYHY:DMVAESXGXR, HVPKPXXVPTKL:SPIS-AA¹⁷-LYK:LKYHY:NMVAESXGXH, RVPSTXXVPTKT:SPIS-AA¹⁷-LYK:LKYHY:MIVAEXGXL, ASAAPXXVPTAL:SPIS-AA¹⁷-LYK:LKYHY:MIVAEXKXS, ASASPXXVPTDL:SPIS-AA¹⁷-LYK:LKYHY:MIVAEXKXS, ASASPXXVPTDL:SPIS-AA¹⁷-LYK:LKYHY:MVVAEXKXS, NDEGLEXVPTEE:SPIS-AA¹⁷-LYK:LKYHY:FLVAEKXEXR, NDEGLEXVPTGQ:SPIS-AA¹⁷-LYK:LKYHY:LEVAEQXEXR, SSVKXQPVPTHH:SPIS-AA¹⁷-LYK:LKYHY: RLVAELEXAXA, RNVQXR PVPTQL:SPIS-AA¹⁷-LYK:LKYHY:TLVAELAXKXE, KIPKAXXVPTEL:SPIS-AA¹⁷-LYK:LKYHY:DMVVEGXGXR, GIPEPXXVPEKM:SPIS-AA¹⁷-LYK:LKYHY:NMTVESXAXR, SIPKAXXVPTEL:SPIS-AA¹⁷-LYK:LKYHY:EMVVEGXGXR, HVTKPTXAPTKL:SPIS-AA¹⁷-LYK:LKYHY:NMVVRSXGXH, YVPKPXXAPTKL:SPIS-AA¹⁷-LYK:LKYHY:NMVVRSXGXH, TVPKPXXAPTQL:SPIS-AA¹⁷-LYK:LKYHY:NMVVRAXGXH, AVPKAXXAPTKL:SPIS-AA¹⁷-LYK:LKYHY:NMVVKAXGXH, KASKAXXVPTKL:SPIS-AA¹⁷-LYK:LKYHY:GMAVSEXGXR, GSAGPXXTPTKM:SPIS-AA¹⁷-LYK:LKYHY:GMVVDRXGXS, AAPASXXVPARL:SPIS-AA¹⁷-LYK:LKYHY:DMVVEAXGXR, STPPTXXVPTRL:SPIS-AA¹⁷-LYK:LKYHY:DMVVESXGXR, HVPKPXXAPTKL:SPIS-AA¹⁷-LYK:LKYHY:NMVVRSXGXH, RVPSTXXAPVKT:SPIS-AA¹⁷-LYK:LKYHY:MIVEEXGXL, ASAAPXXVPQAL:SPIS-AA¹⁷-LYK:LKYHY:MIVRSXKXS, ASASPXXVSQDL:SPIS-AA¹⁷-LYK:LKYHY:MIVKSXKXS, ASASPXXVPQDL:SPIS-AA¹⁷-LYK:LKYHY:MVVKSXKXS, NDEGLEXVPTEE:SPIS-AA¹⁷-LYK:LKYHY:FLQHNKXEXR, NDEGLEXVPTGQ:SPIS-AA¹⁷-LYK:LKYHY:LEEHSQXEXR, SSVKXQPSRVHH:SPIS-AA¹⁷-LYK:LKYHY:RLEEHLEXAXA, RNVQXRPTQVQL:SPIS-AA¹⁷-LYK:LKYHY:TLEDHLAXKXE, KIPKAXXVPTEL:EPIS-AA¹⁷-LYL:KFKYE:DMAVXGXGSR, GIPEPXXVPTKM:EPIS-AA¹⁷-LYL:KFKYE:NMAVSSXAXR, SIPKAXXVPTEL:EPIS-AA¹⁷-LYL:KFKYE:EMAVXGXGSR, HVTKPTXVPTKL:EPIS-AA¹⁷-LYL:KFKYE:NMAVSSXGXH, YVPKPXXVPTKL:EPIS-AA¹⁷-LYL:KFKYE:NMAVSSXGXH, TVPKPXXVPTQL:EPIS-AA¹⁷-LYL:KFKYE:NMAVSAXGXH, AVPKAXXVPTKL:EPIS-AA¹⁷-LYL:KFKYE:NMAVSAXGXH, KVGKAXXVPTKL:EPIS-AA¹⁷-LYL:KFKYE:EGMSAVSXGXR, GSAGPXXVPTKM:EPIS-AA¹⁷-LYL:KFKYE:GMAVSRXGXS, AAPASXXVPTRL:EPIS-AA¹⁷-LYL:KFKYE:DMAVSAXGXR, STPPTXXVPTRL:EPIS-AA¹⁷-LYL:KFKYE:DMAVSSXGXR, HVPKPXXVPTKL:EPIS-AA¹⁷-LYL:KFKYE:NMAVSSXGXH, RVPSTXXVPTKT:EPIS-AA¹⁷-LYL:KFKYE:MIAVSXGXL, ASAAPXXVPTAL:EPIS-AA¹⁷-LYL:KFKYE:MIAVSXKXS, ASASPXXVPTDL:EPIS-AA¹⁷-LYL:KFKYE:MIAVSXKXS, ASASPXXVPTDL:EPIS-AA¹⁷-LYL:KFKYE:MVAVSXKXS, NDEGLEXVPTEE:EPIS-AA¹⁷-LYL:KFKYE:FLAVXKXESR, NDEGLEXVPTGQ:EPIS-AA¹⁷-LYL:KFKYE:LEAVSQXEXR, SSVKXQPVPTHH:EPIS-AA¹⁷-LYL:KFKYE:RLAVSLEXAXA, RNVQXRPVPTQL:EPIS-AA¹⁷-LYL:KFKYE:TLAVSLAXKXE, KIPKAXXVPTEL:EPIS-AA¹⁷-LYL:KFKYE:DMVVEGXGXR, GIPEPXXVPEKM:EPIS-AA¹⁷-LYL:KFKYE:NMTVESXAXR, SIPKAXXVPTEL:EPIS-AA¹⁷-LYL:KFKYE:EMVVEGXGXR, HVTKPTXAPTKL:EPIS-AA¹⁷-LYL:KFKYE:NMVVRSXGXH, YVPKPXXAPTKL:EPIS-AA¹⁷-LYL:KFKYE:NMVVRSXGXH, TVPKPXXAPTQL:EPIS-AA¹⁷-LYL:KFKYE:NMVVRAXGXH, AVPKAXXAPTKL:EPIS-AA¹⁷-LYL:KFKYE:NMVVKAXGXH, KVGKAXXVPTKL:EPIS-AA¹⁷-LYL:KFKYE:EGMSVAEXGXR, GSAGPXXTPTKM:EPIS-AA¹⁷-LYL:KFKYE:GMVVDRXGXS, AAPASXXVPARL:EPIS-AA¹⁷-LYL:KFKYE:DMVVEAXGXR, STPPTXXVPTRL:EPIS-AA¹⁷-LYL:KFKYE:DMVVESXGXR, HVPKPXXAPTKL:EPIS-AA¹⁷-LYL:KFKYE:NMVVRSXGXH, RVPSTXXAPVKT:EPIS-AA¹⁷-LYL:KFKYE:MIVEEXGXL, ASAAPXXVPQAL:EPIS-AA¹⁷-LYL:KFKYE:MIVRSXKXS, ASASPXXVSQDL:EPIS-AA¹⁷-LYL:KFKYE:MIVKSXKXS, ASASPXXVPQDL:EPIS-AA¹⁷-LYL:KFKYE:MVVKSXKXS, NDEGLEXVPTEE:EPIS-AA¹⁷-LYL:KFKYE:FLQHNKXEXR, NDEGLEXVPTGQ:EPIS-AA¹⁷-LYL:KFKYE:LEEHSQXEXR, SSVKXQPSRVHH:EPIS-AA¹⁷-LYL:KFKYE:RLEEHLEXAXA, RNVQXRPTQVQL:EPIS-AA¹⁷-LYL:KFKYE:TLEDHLAXKXE, KIPKASSTPTEL:SPIN-AA¹⁷-LYF:YGKIP:DMVVDGXGXR, GIPEPXXTPTKM:SPIN-AA¹⁷-LYF:YGKIP:NMVVDSXAXR, SIPKASSTPTEL:SPIN-AA¹⁷-LYF:YGKIP:EMVVDGXGXR, HVTKPTSTPTKL:SPIN-AA¹⁷-LYF:YGKIP:NMVVDSXGXH, YVPKPXXTPTKL:SPIN-AA¹⁷-LYF:YGKIP:NMVVDSXGXH, TVPKPXXTPTQL:SPIN-AA¹⁷-LYF:YGKIP:NMVVDAXGXH, AVPKASSTPTKL:SPIN-AA¹⁷-LYF:YGKIP:NMVVDAXGXH, KVGKASSTPTKL:SPIN-AA¹⁷-LYF:YGKIP:EGMSVVDXGXR, KASKASSTPTKL:SPIN-AA¹⁷-LYF:YGKIP:GMVVDEXGXR, AAPASSSTPTRL:SPIN-AA¹⁷-LYF:YGKIP:DMVVDAXGXR, STPPTSSTPTRL:SPIN-AA¹⁷-LYF:YGKIP:DMVVDSXGXR, HVPKPXXTPTKL:SPIN-AA¹⁷-LYF:YGKIP:NMVVDSXGXH, RVPSTSSTPTKT:SPIN-AA¹⁷-LYF:YGKIP:MIVVDXGXL, ASAAPXXTPTAL:SPIN-AA¹⁷-LYF:YGKIP:MIVVDXKXS, ASASPXXTPTDL:SPI N-AA¹⁷-LYF:YGKIP:MIVVDXKXS, ASASPXXTPTDL:SPIN-AA¹⁷-LYF:YGKIP:MVVVDXKXS, NDEGLESTPTEE:SPIN-AA¹⁷-LYF:YGKIP:FLVVDKXEXR, NDEGLESTPTGQ:SPIN-AA¹⁷-LYF:YGKIP:LEVVDQXEXR, SSVKXQPTPTHH:SPIN-AA¹⁷-LYF:YGKIP:RLVVDLEXAXA, RNVQXRPTPTQL:SPIN-AA¹⁷-LYF:YGKIP:TLVVDLAXKXE, KIPKAXXVPTEL:SPIN-AA¹⁷-LYF:YGKIP:DMVVEGXGXR, GIPEPXXVPEKM:SPIN-AA¹⁷-LYF:YGKIP:NMTVESXAXR, SIPKAXXVPTEL:SPIN-AA¹⁷-LYF:YGKIP:EMVVEGXGXR, HVTKPTXAPTKL:SPIN-AA¹⁷-LYF:YGKIP:NMVVRSXGXH, YVPKPXXAPTKL:SPIN-AA¹⁷-LYF:YGKIP:NMVVRSXGXH, TVPKPXXAPTQL:SPIN-AA¹⁷-LYF:YGKIP:NMVVRAXGXH, AVPKAXXAPTKL:SPIN-AA¹⁷-LYF:YGKIP:NMVVKAXGXH, KVGKAXXVPTKL:SPIN-AA¹⁷-LYF:YGKIP:EGMSVAEXGXR, KASKAXXVPTKL:SPIN-AA¹⁷-LYF:YGKIP:GMAVSEXGXR, AAPASXXVPARL:SPIN-AA¹⁷-LYF:YGKIP:DMVVEAXGXR, STPPTXXVPTRL:SPIN-AA¹⁷-LYF:YGKIP:DMVVESXGXR, HVPKPXXAPTKL:SPIN-AA¹⁷-LYF:YGKIP:NMVVRSXGXH, RVPSTXXAPVKT:SPIN-AA¹⁷-LYF:YGKIP:MIVEEXGXL, ASAAPXXVPQAL:SPIN-AA¹⁷-LYF:YGKIP:MIVRSXKXS, ASASPXXVSQDL:SPIN-AA¹⁷-LYF:YGKIP:MIVKSXKXS, ASASPXXVPQDL:SPIN-AA¹⁷-LYF:YGKIP:MVVKSXKXS, NDEGLEXVPTEE:SPIN-AA¹⁷-LYF:YGKIP:FLQHNKXEXR, NDEGLEXVPTGQ:SPIN-AA¹⁷-LYF:YGKIP:LEEHSQXEXR, SSVKXQPSRVHH:SPIN-AA¹⁷-LYF:YGKIP:RLEEHLEXAXA, RNVQXRPTQVQL:SPIN-AA¹⁷-LYF:YGKIP:TLEDHLAXKXE, KIPKAXXVPAEL:SPIS-AA¹⁷-LYI:YKQYE:DMVVEGXGXR, GIPEPXXVPAKM:SPIS-AA¹⁷-LYI:YKQYE:NMVVESXAXR, SIPKAXXVPAEL:SPIS-AA¹⁷-LYI:YKQYE:EMVVEGXGXR, HVTKPTXVPAKL:SPIS-AA¹⁷-LYI:YKQYE:NMVVESXGXH, YVPKPXXVPAKL:SPIS-AA¹⁷-LYI:YKQYE:NMVVESXGXH, TVPKPXXVPAQL:SPIS-AA¹⁷-LYI:YKQYE:NMVVEAXGXH, AVPKAXXVPAKL:SPIS-AA¹⁷-LYI:YKQYE:NMVVEAXGXH, KVGKAXXVPAKL:SPIS-AA¹⁷-LYI:YKQYE:EGMSVVEXGXR, KASKAXXVPAKL:SPIS-AA¹⁷-LYI:YKQYE:GMVVEEXGXR, GSAGPXXVPAKM:SPIS-AA¹⁷-LYI:YKQYE:GMVVERXGXS, STPPTXXVPARL:SPIS-AA¹⁷-LYI:YKQYE:DMVVESXGXR, HVPKPXXVPAKL:SPIS-AA¹⁷-LYI:YKQYE:NMVVESXGXH, RVPSTXXVPAKT:SPIS-AA¹⁷-LYI:YKQYE:MIVVEXGXL, ASAAPXXVPAAL:SPIS-AA¹⁷-LYI:YKQYE:MIVVEXKXS, ASASPXXVPADL:SPIS-AA¹⁷-LYI:YKQYE:MIVVEXKXS, ASASPXXVPADL:SPIS-AA¹⁷-LYI:YKQYE:MVVVEXKXS, NDEGLEXVPAEE:SPIS-AA¹⁷-LYI:YKQYE:FLVVEKXEXR, NDEGLEXVPAGQ:SPIS-AA¹⁷-LYI:YKQYE:LEVVEQXEXR, SSVKXQPVPAHH:SPIS-AA¹⁷-LYI:YKQYE:RLVVELEXAXA, RNVQXRPVPAQL:SPIS-AA¹⁷-LYI:YKQYE:TLVVELAXKXE, KIPKAXXVPTEL:SPIS-AA¹⁷-LYI:YKQYE:DMVVEGXGXR, GIPEPXXVPEKM:SPIS-AA¹⁷-LYI:YKQYE:NMTVESXAXR, SIPKAXXVPTEL:SPIS-AA¹⁷-LYI:YKQYE:EMVVEGXGXR, HVTKPTXAPTKL:SPIS-AA¹⁷-LYI:YKQYE:NMVVRSXGXH, YVPKPXXAPTKL:SPIS-AA¹⁷-LYI:YKQYE:NMVVRSXGXH, TVPKPXXAPTQL:SPIS-AA¹⁷-LYI:YKQYE:NMVVRAXGXH, AVPKAXXAPTKL:SPIS-AA¹⁷-LYI:YKQYE:NMVVKAXGXH, KVGKAXXVPTKL:SPIS-AA¹⁷-LYI:YKQYE:EGMSVAEXGXR, KASKAXXVPTKL:SPIS-AA¹⁷-LYI:YKQYE:GMAVSEXGXR, GSAGPXXTPTKM:SPIS-AA¹⁷-LYI:YKQYE:GMVVDRXGXS, STPPTXXVPTRL:SPIS-AA¹⁷-LYI:YKQYE:DMVVESXGXR, HVPKPXXAPTKL:SPIS-AA¹⁷-LYI:YKQYE:NMVVRSXGXH, RVPSTXXAPVKT:SPIS-AA¹⁷-LYI:YKQYE:MIVEEXGXL, ASAAPXXVPQAL:SPIS-AA¹⁷-LYI:YKQYE:MIVRSXKXS, ASASPXXVSQDL:SPIS-AA¹⁷-LYI:YKQYE:MIVKSXKXS, ASASPXXVPQDL:SPIS-AA¹⁷-LYI:YKQYE:MVVKSXKXS, NDEGLEXVPTEE:SPIS-AA¹⁷-LYI:YKQYE:FLQHNKXEXR, NDEGLEXVPTGQ:SPIS-AA¹⁷-LYI:YKQYE:LEEHSQXEXR, SSVKXQPSRVHH:SPIS-AA¹⁷-LYI:YKQYE:RLEEHLEXAXA, RNVQXRPTQVQL:SPIS-AA¹⁷-LYI:YKQYE:TLEDHLAXKXE, KIPKAXXVPTEL:SPIS-AA¹⁷-LFI:YKQYE:DMVVEGXGXR, GIPEPXXVPTKM:SPIS-AA¹⁷-LFI:YKQYE:NMVVESXAXR, SIPKAXXVPTEL:SPIS-AA¹⁷-LFI:YKQYE:EMVVEGXGXR, HVTKPTXVPTKL:SPIS-AA¹⁷-LFI:YKQYE:NMVVESXGXH, YVPKPXXVPTKL:SPIS-AA¹⁷-LFI:YKQYE:NMVVESXGXH, TVPKPXXVPTQL:SPIS-AA¹⁷-LFI:YKQYE:NMVVEAXGXH, AVPKAXXVPTKL:SPIS-AA¹⁷-LFI:YKQYE:NMVVEAXGXH, KVGKAXXVPTKL:SPIS-AA¹⁷-LFI:YKQYE:EGMSVVEXGXR, KASKAXXVPTKL:SPIS-AA¹⁷-LFI:YKQYE:GMVVEEXGXR, GSAGPXXVPTKM:SPIS-AA¹⁷-LFI:YKQYE:GMVVERXGXS, AAPASXXVPTRL:SPIS-AA¹⁷-LFI:YKQYE:DMVVEAXGXR, HVPKPXXVPTKL:SPIS-AA¹⁷-LFI:YKQYE:NMVVESXGXH, RVPSTXXVPTKT:SPIS-AA¹⁷-LFI:YKQYE:MIVVEXGXL, ASAAPXXVPTAL:SPIS-AA¹⁷-LFI:YKQYE:MIVVEXKXS, ASASPXXVPTDL:SPIS-AA¹⁷-LFI:YKQYE:MIVVEXKXS, ASASPXXVPTDL:SPIS-AA¹⁷-LFI:YKQYE:MVVVEXKXS, NDEGLEXVPTEE:SPIS-AA¹⁷-LFI:YKQYE:FLVVEKXEXR, NDEGLEXVPTGQ:SPIS-AA¹⁷-LFI:YKQYE:LEVVEQXEXR, SSVKXQPVPTHH:SPIS-AA¹⁷-LFI:YKQYE:RLVVELEXAXA, RNVQXRPVPTQL:SPIS-AA¹⁷-LFI:YKQYE:TLVVELAXKXE, GIPEPXXVPEKM:SPIS-AA¹⁷-LFI:YKQYE:NMTVESXAXR, HVTKPTXAPTKL:SPIS-AA¹⁷-LFI:YKQYE:NMVVRSXGXH, YVPKPXXAPTKL:SPIS-AA¹⁷-LFI:YKQYE:NMVVRSXGXH, TVPKPXXAPTQL:SPIS-AA¹⁷-LFI:YKQYE:NMVVRAXGXH, AVPKAXXAPTKL:SPIS-AA¹⁷-LFI:YKQYE:NMVVKAXGXH, KVGKAXXVPTKL:SPIS-AA¹⁷-LFI:YKQYE:EGMSVAEXGXR, KASKAXXVPTKL:SPIS-AA¹⁷-LFI:YKQYE:GMAVSEXGXR, GSAGPXXTPTKM:SPIS-AA¹⁷-LFI:YKQYE:GMVVDRXGXS, AAPASXXVPARL:SPIS-AA¹⁷-LFI:YKQYE:DMVVEAXGXR, HVPKPXXAPTKL:SPIS-AA¹⁷-LFI:YKQYE:NMVVRSXGXH, RVPSTXXAPVKT:SPIS-AA¹⁷-LFI:YKQYE:MIVEEXGXL, ASAAPXXVPQAL:SPIS-AA¹⁷-LFI:YKQYE:MIVRSXKXS, ASASPXXVSQDL:SPIS-AA¹⁷-LFI:YKQYE:MIVKSXKXS, ASASPXXVPQDL:SPIS-AA¹⁷-LFI:YKQYE:MVVKSXKXS, NDEGLEXVPTEE:SPIS-AA¹⁷-LFI:YKQYE:FLQHNKXEXR, NDEGLEXVPTGQ:SPIS-AA¹⁷-LFI:YKQYE:LEEHSQXEXR, SSVKXQPSRVHH:SPIS-AA¹⁷-LFI:YKQYE:RLEEHLEXAXA, RNVQXRPTQVQL:SPIS-AA¹⁷-LFI:YKQYE:TLEDHLAXKXE, KIPKAXXAPVEL:KPLS-AA¹⁷-LYV:DHHKD:DMVEEGXGXR, GIPEPXXAPVKM:KPLS-AA¹⁷-LYV:DHHKD:NMVEESXAXR, SIPKAXXAPVEL:KPLS-AA¹⁷-LYV:DHHKD:EMVEEGXGXR, HVTKPTXAPVKL:KPLS-AA¹⁷-LYV:DHHKD:NMVEESXGXH, YVPKPXXAPVKL:KPLS-AA¹⁷-LYV:DHHKD:NMVEESXGXH, TVPKPXXAPVQL:KPLS-AA¹⁷-LYV:DHHKD:NMVEEAXGXH, AVPKAXXAPVKL:KPLS-AA¹⁷-LYV:DHHKD:NMVEEAXGXH, KVGKAXXAPVKL:KPLS-AA¹⁷-LYV:DHHKD:EGMSVEEXGXR, KASKAXXAPVKL:KPLS-AA¹⁷-LYV:DHHKD:GMVEEEXGXR, GSAGPXXAPVKM:KPLS-AA¹⁷-LYV:DHHKD:GMVEERXGXS, AAPASXXAPVRL:KPLS-AA¹⁷-LYV:DHHKD:DMVEEAXGXR, STPPTXXAPVRL:KPLS-AA¹⁷-LYV:DHHKD:DMVEESXGXR, HVPKPXXAPVKL:KPLS-AA¹⁷-LYV:DHHKD:NMVEESXGXH, ASAAPXXAPVAL:KPLS-AA¹⁷-LYV:DHHKD:MIVEEXKXS, ASASPXXAPVDL:KPLS-AA¹⁷-LYV:DHHKD:MIVEEXKXS, ASASPXXAPVDL:KPLS-AA¹⁷-LYV:DHHKD:MVVEEXKXS, NDEGLESAPVEE:KPLS-AA¹⁷-LYV:DHHKD:FLVEEKXEXR, NDEGLESAPVGQ:KPLS-AA¹⁷-LYV:DHHKD:LEVEEQXEXR, SSVKXQPAPVHH:KPLS-AA¹⁷-LYV:DHHKD:RLVEELEXAXA, RNVQXRPAPVQL:KPLS-AA¹⁷-LYV:DHHKD:TLVEELAXKXE, KIPKAXXVPTEL:KPLS-AA¹⁷-LYV:DHHKD:DMVVEGXGXR, GIPEPXXVPEKM:KPLS-AA¹⁷-LYV:DHHKD:NMTVESXAXR, SIPKAXXVPTEL:KPLS-AA¹⁷-LYV:DHHKD:EMVVEGXGXR, HVTKPTXAPTKL:KPLS-AA¹⁷-LYV:DHHKD:NMVVRSXGXH, YVPKPXXAPTKL:KPLS-AA¹⁷-LYV:DHHKD:NMVVRSXGXH, TVPKPXXAPTQL:KPLS-AA¹⁷-LYV:DHHKD:NMVVRAXGXH, AVPKAXXAPTKL:KPLS-AA¹⁷-LYV:DHHKD:NMVVKAXGXH, KVGKAXXVPTKL:KPLS-AA¹⁷-LYV:DHHKD:EGMSVAEXGXR, KASKAXXVPTKL:KPLS-AA¹⁷-LYV:DHHKD:GMAVSEXGXR, GSAGPXXTPTKM:KPLS-AA¹⁷-LYV:DHHKD:GMVVDRXGXS, AAPASXXVPARL:KPLS-AA¹⁷-LYV:DHHKD:DMVVEAXGXR, STPPTXXVPTRL:KPLS-AA¹⁷-LYV:DHHKD:DMVVESXGXR, HVPKPXXAPTKL:KPLS-AA¹⁷-LYV:DHHKD:NMVVRSXGXH, ASAAPXXVPQAL:KPLS-AA¹⁷-LYV:DHHKD:MIVRSXKXS, ASASPXXVSQDL:KPLS-AA¹⁷-LYV:DHHKD:MIVKSXKXS, ASASPXXVPQDL:KPLS-AA¹⁷-LYV:DHHKD:MVVKSXKXS, NDEGLEXVPTEE:KPLS-AA¹⁷-LYV:DHHKD:FLQHNKXEXR, NDEGLEXVPTGQ:KPLS-AA¹⁷-LYV:DHHKD:LEEHSQXEXR, SSVKXQPSRVHH:KPLS-AA¹⁷-LYV:DHHKD:RLEEHLEXAXA, RNVQXRPTQVQL:KPLS-AA¹⁷-LYV:DHHKD:TLEDHLAXKXE, KIPKAXXVPQEL:EPLP-AA¹⁷-VYY:EQLSN:DMVRXGXGSR, GIPEPXXVPQKM:EPLP-AA¹⁷-VYY:EQLSN:NMVRSSXAXR, SIPKAXXVPQEL:EPLP-AA¹⁷-VYY:EQLSN:EMVRXGXGSR, HVTKPTXVPQKL:EPLP-AA¹⁷-VYY:EQLSN:NMVRSSXGXH, YVPKPXXVPQKL:EPLP-AA¹⁷-VYY:EQLSN:NMVRSSXGXH, TVPKPXXVPQQL:EPLP-AA¹⁷-VYY:EQLSN:NMVRSAXGXH, AVPKAXXVPQKL:EPLP-AA¹⁷-VYY:EQLSN:NMVRSAXGXH, KVGKAXXVPQKL:EPLP-AA¹⁷-VYY:EQLSN:EGMSVRSXGXR, KASKAXXVPQKL:EPLP-AA¹⁷-VYY:EQLSN:GMVRSEXGXR, GSAGPXXVPQKM:EPLP-AA¹⁷-VYY:EQLSN:GMVRSRXGXS, AAPASXXVPQRL:EPLP-AA¹⁷-VYY:EQLSN:DMVRSAXGXR, STPPTXXVPQRL:EPLP-AA¹⁷-VYY:EQLSN:DMVRSSXGXR, HVPKPXXVPQKL:EPLP-AA¹⁷-VYY:EQLSN:NMVRSSXGXH, RVPSTXXVPQKT:EPLP-AA¹⁷-VYY:EQLSN:MIVRSXGXL, ASASPXXVPQDL:EPLP-AA¹⁷-VYY:EQLSN:MIVRSXKXS, ASASPXXVPQDL:EPLP-AA¹⁷-VYY:EQLSN:MVVRSXKXS, NDEGLEXVPQEE:EPLP-AA¹⁷-VYY:EQLSN:FLVRXKXESR, NDEGLEXVPQGQ:EPLP-AA¹⁷-VYY:EQLSN:LEVRSQXEXR, SSVKXQPVPQHH:EPLP-AA¹⁷-VYY:EQLSN:RLVRSLEXAXA, RNVQXRPVPQQL:EPLP-AA¹⁷-VYY:EQLSN:TLVRSLAXKXE, KIPKAXXVPTEL:EPLP-AA¹⁷-VYY:EQLSN:DMVVEGXGXR, GIPEPXXVPEKM:EPLP-AA¹⁷-VYY:EQLSN:NMTVESXAXR, SIPKAXXVPTEL:EPLP-AA¹⁷-VYY:EQLSN:EMVVEGXGXR, HVTKPTXAPTKL:EPLP-AA¹⁷-VYY:EQLSN:NMVVRSXGXH, YVPKPXXAPTKL:EPLP-AA¹⁷-VYY:EQLSN:NMVVRSXGXH, TVPKPXXAPTQL:EPLP-AA¹⁷-VYY:EQLSN:NMVVRAXGXH, AVPKAXXAPTKL:EPLP-AA¹⁷-VYY:EQLSN:NMVVKAXGXH, KVGKAXXVPTKL:EPLP-AA¹⁷-VYY:EQLSN:EGMSVAEXGXR, KASKAXXVPTKL:EPLP-AA¹⁷-VYY:EQLSN:GMAVSEXGXR, GSAGPXXTPTKM:EPLP-AA¹⁷-VYY:EQLSN:GMVVDRXGXS, AAPASXXVPARL:EPLP-AA¹⁷-VYY:EQLSN:DMVVEAXGXR, STPPTXXVPTRL:EPLP-AA¹⁷-VYY:EQLSN:DMVVESXGXR, HVPKPXXAPTKL:EPLP-AA¹⁷-VYY:EQLSN:NMVVRSXGXH, RVPSTXXAPVKT:EPLP-AA¹⁷-VYY:EQLSN:MIVEEXGXL, ASASPXXVSQDL:EPLP-AA¹⁷-VYY:EQLSN:MIVKSXKXS, ASASPXXVPQDL:EPLP-AA¹⁷-VYY:EQLSN:MVVKSXKXS, NDEGLEXVPTEE:EPLP-AA¹⁷-VYY:EQLSN:FLQHNKXEXR, NDEGLEXVPTGQ:EPLP-AA¹⁷-VYY:EQLSN:LE EHSQXEXR, SSVKXQPSRVHH:EPLP-AA¹⁷-VYY:EQLSN:RLEEHLEXAXA, RNVQXRPTQVQL:EPLP-AA¹⁷-VYY:EQLSN:TLEDHLAXKXE, KIPKASSVSQEL:EPLT-AA¹⁷-LYY:EQLSN:DMVKXGXGSR, GIPEPXXVSQKM:EPLT-AA¹⁷-LYY:EQLSN:NMVKSSXAXR, SIPKASSVSQEL:EPLT-AA¹⁷-LYY:EQLSN:EMVKXGXGSR, HVTKPTXVSQKL:EPLT-AA¹⁷-LYY:EQLSN:NMVKSSXGXH, YVPKPXXVSQKL:EPLT-AA¹⁷-LYY:EQLSN:NMVKSSXGXH, TVPKPXXVSQQL:EPLT-AA¹⁷-LYY:EQLSN:NMVKSAXGXH, AVPKASSVSQKL:EPLT-AA¹⁷-LYY:EQLSN:NMVKSAXGXH, KVGKASSVSQKL:EPLT-AA¹⁷-LYY:EQLSN:EGMSVKSXGXR, KASKASSVSQKL:EPLT-AA¹⁷-LYY:EQLSN:GMVKSEXGXR, GSAGPXXVSQKM:EPLT-AA¹⁷-LYY:EQLSN:GMVKSRXGXS, AAPASSSVSQRL:EPLT-AA¹⁷-LYY:EQLSN:DMVKSAXGXR, STPPTSSVSQRL:EPLT-AA¹⁷-LYY:EQLSN:DMVKSSXGXR, HVPKPXXVSQKL:EPLT-AA¹⁷-LYY:EQLSN:NMVKSSXGXH, RVPSTSSVSQKT:EPLT-AA¹⁷-LYY:EQLSN:MIVKSXGXL, ASAAPXXVSQAL:EPLT-AA¹⁷-LYY:EQLSN:MIVKSXKXS, ASASPXXVSQDL:EPLT-AA¹⁷-LYY:EQLSN:MVVKSXKXS, NDEGLEXVSQEE:EPLT-AA¹⁷-LYY:EQLSN:FLVKXKXESR, NDEGLEXVSQGQ:EPLT-AA¹⁷-LYY:EQLSN:LEVKSQXEXR, SSVKXQPVSQHH:EPLT-AA¹⁷-LYY:EQLSN:RLVKSLEXAXA, RNVQXRPVSQQL:EPLT-AA¹⁷-LYY:EQLSN:TLVKSLAXKXE, KIPKAXXVPTEL:EPLT-AA¹⁷-LYY:EQLSN:DMVVEGXGXR, GIPEPXXVPEKM:EPLT-AA¹⁷-LYY:EQLSN:NMTVESXAXR, SIPKAXXVPTEL:EPLT-AA¹⁷-LYY:EQLSN:EMVVEGXGXR, HVTKPTXAPTKL:EPLT-AA¹⁷-LYY:EQLSN:NMVVRSXGXH, YVPKPXXAPTKL:EPLT-AA¹⁷-LYY:EQLSN:NMVVRSXGXH, TVPKPXXAPTQL:EPLT-AA¹⁷-LYY:EQLSN:NMVVRAXGXH, AVPKAXXAPTKL:EPLT-AA¹⁷-LYY:EQLSN:NMVVKAXGXH, KVGKAXXVPTKL:EPLT-AA¹⁷-LYY:EQLSN:EGMSVAEXGXR, KASKAXXVPTKL:EPLT-AA¹⁷-LYY:EQLSN:GMAVSEXGXR, GSAGPXXTPTKM:EPLT-AA¹⁷-LYY:EQLSN:GMVVDRXGXS, AAPASXXVPARL:EPLT-AA¹⁷-LYY:EQLSN:DMVVEAXGXR, STPPTXXVPTRL:EPLT-AA¹⁷-LYY:EQLSN:DMVVESXGXR, HVPKPXXAPTKL:EPLT-AA¹⁷-LYY:EQLSN:NMVVRSXGXH, RVPSTXXAPVKT:EPLT-AA¹⁷-LYY:EQLSN:MIVEEXGXL, ASAAPXXVPQAL:EPLT-AA¹⁷-LYY:EQLSN:MIVRSXKXS, ASASPXXVPQDL:EPLT-AA¹⁷-LYY:EQLSN:MVVKSXKXS, NDEGLEXVPTEE:EPLT-AA¹⁷-LYY:EQLSN:FLQHNKXEXR, NDEGLEXVPTGQ:EPLT-AA¹⁷-LYY:EQLSN:LEEHSQXEXR, SSVKXQPSRVHH:EPLT-AA¹⁷-LYY:EQLSN:RLEEHLEXAXA, RNVQXRPTQVQL:EPLT-AA¹⁷-LYY:EQLSN:TLEDH LAXKXE, KIPKAXXVPQEL:EPLT-AA¹⁷-LYY:EQLSN:DMVKXGXGSR, GIPEPXXVPQKM:EPLT-AA¹⁷-LYY:EQLSN:NMVKSSXAXR, SIPKAXXVPQEL:EPLT-AA¹⁷-LYY:EQLSN: EMVKXGXGSR, HVTKPTXVPQKL:EPLT-AA¹⁷-LYY:EQLSN:NMVKSSXGXH, YVPKPXXVPQKL:EPLT-AA¹⁷-LYY:EQLSN:NMVKSSXGXH, TVPKPXXVPQQL:EPLT-AA¹⁷-LYY:EQLSN:NMVKSAXGXH, AVPKAXXVPQKL:EPLT-AA¹⁷-LYY:EQLSN:NMVKSAXGXH, KVGKAXXVPQKL:EPLT-AA¹⁷-LYY:EQLSN:EGMSVKSXGXR, KASKAXXVPQKL:EPLT-AA¹⁷-LYY:EQLSN:GMVKSEXGXR, GSAGPXXVPQKM:EPLT-AA¹⁷-LYY:EQLSN:GMVKSRXGXS, AAPASXXVPQRL:EPLT-AA¹⁷-LYY:EQLSN:DMVKSAXGXR, STPPTXXVPQRL:EPLT-AA¹⁷-LYY:EQLSN:DMVKSSXGXR, HVPKPXXVPQKL:EPLT-AA¹⁷-LYY:EQLSN:NMVKSSXGXH, RVPSTXXVPQKT:EPLT-AA¹⁷-LYY:EQLSN:MIVKSXGXL, ASAAPXXVPQAL:EPLT-AA¹⁷-LYY:EQLSN:MIVKSXKXS, ASASPXXVPQDL:EPLT-AA¹⁷-LYY:EQLSN:MIVKSXKXS, NDEGLEXVPQEE:EPLT-AA¹⁷-LYY:EQLSN:FLVKXKXESR, NDEGLEXVPQGQ:EPLT-AA¹⁷-LYY:EQLSN:LEVKSQXEXR, SSVKXQPVPQHH:EPLT-AA¹⁷-LYY:EQLSN:RLVKSLEXAXA, RNVQXRPVPQQL:EPLT-AA¹⁷-LYY:EQLSN:TLVKSLAXKXE, ASASPXXVSQDL:EPLT-AA¹⁷-LYY:EQLSN:MIVKSXKXS, KIPKAXXVPTEL:SNIT-AA¹⁷-QIM:IGEMS:DMQHNGXGXR, GIPEPXXVPTKM:SNIT-AA¹⁷-QIM:IGEMS:NMQHNSXAXR, SIPKAXXVPTEL:SNIT-AA¹⁷-QIM:IGEMS:EMQHNGXGXR, HVTKPTXVPTKL:SNIT-AA¹⁷-QIM:IGEMS:NMQHNSXGXH, YVPKPXXVPTKL:SNIT-AA¹⁷-QIM:IGEMS:NMQHNSXGXH, TVPKPXXVPTQL:SNIT-AA¹⁷-QIM:IGEMS:NMQHNAXGXH, AVPKAXXVPTKL:SNIT-AA¹⁷-QIM:IGEMS:NMQHNAXGXH, KVGKAXXVPTKL:SNIT-AA¹⁷-QIM:IGEMS: EGMSQHNXGXR, KASKAXXVPTKL:SNIT-AA¹⁷-QIM:IGEMS:GMQHNEXGXR, GSAGPXXVPTKM:SNIT-AA¹⁷-QIM:IGEMS:GMQHNRXGXS, AAPASXXVPTRL:SNIT-AA¹⁷-QIM:IGEMS:DMQHNAXGXR, STPPTXXVPTRL:SNIT-AA¹⁷-QIM:IGEMS:DMQHNGXGXR, HVPKPXXVPTKL:SNIT-AA¹⁷-QIM:IGEMS:NMQHNSXGXH, RVPSTXXVPTKT:SNIT-AA¹⁷-QIM:IGEMS:MIQHNXGXL, ASAAPXXVPTAL:SNIT-AA¹⁷-QIM:IGEMS:MIQHNXKXS, ASASPXXVPTDL:SNIT-AA¹⁷-QIM:IGEMS:MIQHNXKXS, ASASPXXVPTDL:SNIT-AA¹⁷-QIM:IGEMS:MVQHNXKXS, NDEGLEXVPTGQ:SNIT-AA¹⁷-QIM:IGEMS:LEQHNQXEXR, NDEGLEXVPTEE:SNIT-AA¹⁷-QIM:IGEMS:FLQHNKXEXR, SSVKXQPVPTHH:SNIT-AA¹⁷-QIM:IGEMS:RLQHNLEXAXA, RNVQXRPVPTQL:SNIT-AA¹⁷-QIM:IGEMS:TLQHNLAXKXE, KIPKAXXVPTEL:SNIT-AA¹⁷-QIM:IGEMS:DMVVEGXGXR, GIPEPXXVPEKM:SNIT-AA¹⁷-QIM:IGEMS:NMTVESXAXR, SIPKAXXVPTEL:SNIT-AA¹⁷-QIM:IGEMS:EMVVEGXGXR, HVTKPTXAPTKL:SNIT-AA¹⁷-QIM:IGEMS:NMVVRSXGXH, YVPKPXXAPTKL:SNIT-AA¹⁷-QIM:IGEMS:NMVVRSXGXH, TVPKPXXAPTQL:SNIT-AA¹⁷-QIM:IGEMS:NMVVRAXGXH, AVPKAXXAPTKL:SNIT-AA¹⁷-QIM:IGEMS:NMVVKAXGXH, KVGKAXXVPTKL:SNIT-AA¹⁷-QIM:IGEMS:EGMSVAEXGXR, KASKAXXVPTKL:SNIT-AA¹⁷-QIM:IGEMS:GMAVSEXGXR, GSAGPXXTPTKM:SNIT-AA¹⁷-QIM:IGEMS:GMVVDRXGXS, AAPASXXVPARL:SNIT-AA¹⁷-QIM:IGEMS:DMVVEAXGXR, STPPTXXVPTRL:SNIT-AA¹⁷-QIM:IGEMS:DMVVESXGXR, HVPKPXXAPTKL:SNIT-AA¹⁷-QIM:IGEMS:NMVVRSXGXH, RVPSTXXAPVKT:SNIT-AA¹⁷-QIM:IGEMS:MIVEEXGXL, ASAAPXXVPQAL:SNIT-AA¹⁷-QIM:IGEMS:MIVRSXKXS, ASASPXXVSQDL:SNIT-AA¹⁷-QIM:IGEMS:MIVKSXKXS, ASASPXXVPQDL:SNIT-AA¹⁷-QIM:IGEMS: MVVKSXKXS, NDEGLEXVPTGQ:SNIT-AA¹⁷-QIM:IGEMS:LEEHSQXEXR, SSVKXQPSRVHH:SNIT-AA¹⁷-QIM:IGEMS:RLEEHLEXAXA, RNVQXRPTQVQL:SNIT-AA¹⁷-QIM:IGEMS:TLEDHLAXKXE, KIPKAXXVPTEL:SNIT-AA¹⁷-QIM:LGEMS:DMEHXGXGSR, GIPEPXXVPTKM:SNIT-AA¹⁷-QIM:LGEMS:NMEHSSXAXR, SIPKAXXVPTEL:SNIT-AA¹⁷-QIM:LGEMS:EMEHXGXGSR, HVTKPTXVPTKL:SNIT-AA¹⁷-QIM:LGEMS:NMEHSSXGXH, YVPKPXXVPTKL:SNIT-AA¹⁷-QIM:LGEMS:NMEHSSXGXH, TVPKPXXVPTQL:SNIT-AA¹⁷-QIM:LGEMS:NMEHSAXGXH, AVPKAXXVPTKL:SNIT-AA¹⁷-QIM:LGEMS:NMEHSAXGXH, KVGKAXXVPTKL:SNIT-AA¹⁷-QIM:LGEMS:EGMSEHSXGXR, KASKAXXVPTKL:SNIT-AA¹⁷-QIM:LGEMS:GMEHSEXGXR, GSAGPXXVPTKM:SNIT-AA¹⁷-QIM:LGEMS:GMEHSRXGXS, AAPASXXVPTRL:SNIT-AA¹⁷-QIM:LGEMS:DMEHSAXGXR, STPPTXXVPTRL:SNIT-AA¹⁷-QIM:LGEMS:DMEHSSXGXR, HVPKPXXVPTKL:SNIT-AA¹⁷-QIM:LGEMS:NMEHSSXGXH, RVPSTXXVPTKT:SNIT-AA¹⁷-QIM:LGEMS:MIEHSXGXL, ASAAPXXVPTAL:SNIT-AA¹⁷-QIM:LGEMS:MIEHSXKXS, ASASPXXVPTDL:SNIT-AA¹⁷-QIM:LGEMS:MIEHSXKXS, ASASPXXVPTDL:SNIT-AA¹⁷-QIM:LGEMS:MVEHSXKXS, NDEGLEXVPTEE:SNIT-AA¹⁷-QIM:LGEMS:FLEHXKXESR, SSVKXQPVPTHH:SNIT-AA¹⁷-QIM:LGEMS:RLEHSLEXAXA, RNVQXRPVPTQL:SNIT-AA¹⁷-QIM:LGEMS:TLEHSLAXKXE, KIPKAXXVPTEL:SNIT-AA¹⁷-QIM:LGEMS:DMVVEGXGXR, GIPEPXXVPEKM:SNIT-AA¹⁷-QIM:LGEMS:NMTVESXAXR, SIPKAXXVPTEL:SNIT-AA¹⁷-QIM:LGEMS:EMVVEGXGXR, HVTKPTXAPTKL:SNIT-AA¹⁷-QIM:LGEMS:NMVVRSXGXH, YVPKPXXAPTKL:SNIT-AA¹⁷-QIM:LGEMS:NMVVRSXGXH, TVPKPXXAPTQL:SNIT-AA¹⁷-QIM:LGEMS:NMVVRAXGXH, AVPKAXXAPTKL:SNIT-AA¹⁷-QIM:LGEMS:NMVVKAXGXH, KVGKAXXVPTKL:SNIT-AA¹⁷-QIM:LGEMS:EGMSVAEXGXR, KASKAXXVPTKL:SNIT-AA¹⁷-QIM:LGEMS:GMAVSEXGXR, GSAGPXXTPTKM:SNIT-AA¹⁷-QIM:LGEMS:GMVVDRXGXS, AAPASXXVPARL:SNIT-AA¹⁷-QIM:LGEMS:DMVVEAXGXR, STPPTXXVPTRL:SNIT-AA¹⁷-QIM:LGEMS:DMVVESXGXR, HVPKPXXAPTKL:SNIT-AA¹⁷-QIM:LGEMS:NMVVRSXGXH, RVPSTXXAPVKT:SNIT-AA¹⁷-QIM:LGEMS:MIVEEXGXL, ASAAPXXVPQAL:SNIT-AA¹⁷-QIM:LGEMS:MIVRSXKXS, ASASPXXVSQDL:SNIT-AA¹⁷-QIM:LGEMS:MIVKSXKXS, ASASPXXVPQDL:SNIT-AA¹⁷-QIM:LGEMS:MVVKSXKXS, NDEGLEXVPTEE:SNIT-AA¹⁷-QIM:LGEMS:FLQHNKXEXR, SSVKXQPSRVHH:SNIT-AA¹⁷-QIM:LGEMS:RLEEHLEXAXA, RNVQXRPTQVQL:SNIT-AA¹⁷-QIM:LGEMS:TLEDHLAXKXE, KIPKASSSRVEL:RSVK-AA¹⁷-AKV:KEVQV:DMEEHGXGXR, GIPEPXXSRVKM:RSVK-AA¹⁷-AKV:KEVQV:NMEEHSXAXR, SIPKASSSRVEL:RSVK-AA¹⁷-AKV:KEVQV:EMEEHGXGXR, HVTKPTSSRVKL:RSVK-AA¹⁷-AKV:KEVQV:NMEEHSXGXH, YVPKPXXSRVKL:RSVK-AA¹⁷-AKV:KEVQV:NMEEHSXGXH, TVPKPXXSRVQL:RSVK-AA¹⁷-AKV:KEVQV:NMEEHAXGXH, AVPKASSSRVKL:RSVK-AA¹⁷-AKV:KEVQV:NMEEHAXGXH, KVGKASSSRVKL:RSVK-AA¹⁷-AKV:KEVQV:EGMSEEHXGXR, KASKASSSRVKL:RSVK-AA¹⁷-AKV:KEVQV:GMEEHEXGXR, GSAGPXXSRVKM:RSVK-AA¹⁷-AKV:KEVQV:GMEEHRXGXS, AAPASSSSRVRL:RSVK-AA¹⁷-AKV:KEVQV:DMEEHAXGXR, STPPTSSSRVRL:RSVK-AA¹⁷-AKV:KEVQV:DMEEHSXGXR, HVPKPXXSRVKL:RSVK-AA¹⁷-AKV:KEVQV:NMEEHSXGXH, RVPSTSSSRVKT:RSVK-AA¹⁷-AKV:KEVQV:MIEEHXGXL, ASAAPXXSRVAL:RSVK-AA¹⁷-AKV:KEVQV:MIEEHXKXS, ASASPXXSRVDL:RSVK-AA¹⁷-AKV:KEVQV:MIEEHXKXS, ASASPXXSRVDL:RSVK-AA¹⁷-AKV:KEVQV:MVEEHXKXS, NDEGLESSRVEE:RSVK-AA¹⁷-AKV:KEVQV:FLEEHKXEXR, NDEGLESSRVGQ:RSVK-AA¹⁷-AKV:KEVQV:LEEEHQXEXR, RNVQXRPSRVQL:RSVK-AA¹⁷-AKV:KEVQV:TLEEHLAXKXE, KIPKAXXVPTEL:RSVK-AA¹⁷-AKV:KEVQV:DMVVEGXGXR, GIPEPXXVPEKM:RSVK-AA¹⁷-AKV:KEVQV:NMTVESXAXR, SIPKAXXVPTEL:RSVK-AA¹⁷-AKV:KEVQV:EMVVEGXGXR, HVTKPTXAPTKL:RSVK-AA¹⁷-AKV:KEVQV:NMVVRSXGXH, YVPKPXXAPTKL:RSVK-AA¹⁷-AKV:KEVQV:NMVVRSXGXH, TVPKPXXAPTQL:RSVK-AA¹⁷-AKV:KEVQV:NMVVRAXGXH, AVPKAXXAPTKL:RSVK-AA¹⁷-AKV:KEVQV:NMVVKAXGXH, KVGKAXXVPTKL:RSVK-AA¹⁷-AKV:KEVQV:EGMSVAEXGXR, KASKAXXVPTKL:RSVK-AA¹⁷-AKV:KEVQV:GMAVSEXGXR, GSAGPXXTPTKM:RSVK-AA¹⁷-AKV:KEVQV:GMVVDRXGXS, AAPASXXVPARL:RSVK-AA¹⁷-AKV:KEVQV:DMVVEAXGXR, STPPTXXVPTRL:RSVK-AA¹⁷-AKV:KEVQV:DMVVESXGXR, HVPKPXXAPTKL:RSVK-AA¹⁷-AKV:KEVQV:NMVVRSXGXH, RVPSTXXAPVKT:RSVK-AA¹⁷-AKV:KEVQV:MIVEEXGXL, ASAAPXXVPQAL:RSVK-AA¹⁷-AKV:KEVQV:MIVRSXKXS, ASASPXXVSQDL:RSVK-AA¹⁷-AKV:KEVQV:MIVKSXKXS, ASASPXXVPQDL:RSVK-AA¹⁷-AKV:KEVQV:MVVKSXKXS, NDEGLEXVPTEE:RSVK-AA¹⁷-AKV:KEVQV:FLQHNKXEXR, NDEGLEXVPTGQ:RSVK-AA¹⁷-AKV:KEVQV:LEEHSQXEXR, RNVQXRPTQVQL:RSVK-AA¹⁷-AKV:KEVQV:TLEDHLAXKXE, KIPKASSTQVEL:RPVQ-AA¹⁷-RKI:KKATV:DMEDHGXGXR, GIPEPXXTQVKM:RPVQ-AA¹⁷-RKI:KKATV:NMEDHSXAXR, SIPKASSTQVEL:RPVQ-AA¹⁷-RKI:KKATV:EMEDHGXGXR, HVTKPTSTQVKL:RPVQ-AA¹⁷-RKI:KKATV:NMEDHSXGXH, YVPKPXXTQVKL:RPVQ-AA¹⁷-RKI:KKATV:NMEDHSXGXH, TVPKPXXTQVQL:RPVQ-AA¹⁷-RKI:KKATV:NMEDHAXGXH, AVPKASSTQVKL:RPVQ-AA¹⁷-RKI:KKATV:NMEDHAXGXH, KVGKASSTQVKL:RPVQ-AA¹⁷-RKI:KKATV:EGMSEDHXGXR, KASKASSTQVKL:RPVQ-AA¹⁷-RKI:KKATV:GMEDHEXGXR, GSAGPXXTQVKM:RPVQ-AA¹⁷-RKI:KKATV:GMEDHRXGXS, AAPASSSTQVRL:RPVQ-AA¹⁷-RKI:KKATV:DMEDHAXGXR, STPPTSSTQVRL:RPVQ-AA¹⁷-RKI:KKATV:DMEDHSXGXR, HVPKPXXTQVKL:RPVQ-AA¹⁷-RKI:KKATV:NMEDHSXGXH, RVPSTSSTQVKT:RPVQ-AA¹⁷-RKI:KKATV:MIEDHXGXL, ASAAPXXTQVAL:RPVQ-AA¹⁷-RKI:KKATV:MIEDHXKXS, ASASPXXTQVDL:RPVQ-AA¹⁷-RKI:KKATV:MIEDHXKXS, ASASPXXTQVDL:RPVQ-AA¹⁷-RKI:KKATV:MVEDHXKXS, NDEGLESTQVEE:RPVQ-AA¹⁷-RKI:KKATV:FLEDHKXEXR, NDEGLESTQVGQ:RPVQ-AA¹⁷-RKI:KKATV:LEEDHQXEXR, SSVKXQPTQVHH:RPVQ-AA¹⁷-RKI:KKATV:RLEDHLEXAXA, KIPKAXXVPTEL:RPVQ-AA¹⁷-RKI:KKATV:DMVVEGXGXR, GIPEPXXVPEKM:RPVQ-AA¹⁷-RKI:KKATV:NMTVESXAXR, SIPKAXXVPTEL:RPVQ-AA¹⁷-RKI:KKATV:EMVVEGXGXR, HVTKPTXAPTKL:RPVQ-AA¹⁷-RKI:KKATV:NMVVRSXGXH, YVPKPXXAPTKL:RPVQ-AA¹⁷-RKI:KKATV:NMVVRSXGXH, TVPKPXXAPTQL:RPVQ-AA¹⁷-RKI:KKATV:NMVVRAXGXH, AVPKAXXAPTKL:RPVQ-AA¹⁷-RKI:KKATV:NMVVKAXGXH, KVGKAXXVPTKL:RPVQ-AA¹⁷-RKI:KKATV:EGMSVAEXGXR, KASKAXXVPTKL:RPVQ-AA¹⁷-RKI:KKATV:GMAVSEXGXR, GSAGPXXTPTKM:RPVQ-AA¹⁷-RKI:KKATV:GMVVDRXGXS, AAPASXXVPARL:RPVQ-AA¹⁷-RKI:KKATV:DMVVEAXGXR, STPPTXXVPTRL:RPVQ-AA¹⁷-RKI:KKATV:DMVVESXGXR, HVPKPXXAPTKL:RPVQ-AA¹⁷-RKI:KKATV:NMVVRSXGXH, RVPSTXXAPVKT:RPVQ-AA¹⁷-RKI:KKATV:MIVEEXGXL, ASAAPXXVPQAL:RPVQ-AA¹⁷-RKI:KKATV:MIVRSXKXS, ASASPXXVSQDL:RPVQ-AA¹⁷-RKI:KKATV:MIVKSXKXS, ASASPXXVPQDL:RPVQ-AA¹⁷-RKI:KKATV:MVVKSXKXS, NDEGLEXVPTEE:RPVQ-AA¹⁷-RKI:KKATV:FLQHNKXEXR, NDEGLEXVPTGQ:RPVQ-AA¹⁷-RKI:KKATV:LEEHSQXEXR and SSVKXQPSRVHH:RPVQ-AA¹⁷-RKI:KKATV:RLEEHLEXAXA; and wherein AA¹⁷ is selected from the group consisting of G, A, V, L, I, P, F, M, W, T and S (in particular is selected from the group consisting of M, I, L, V and T). More particularly, the quadruplet PEP9:PEP12:PEP2:PEP10 is selected from the group consisting of GIPEPXXVPTKM:SAIS-AA¹⁷-LYL:LKNYQ:NMVVESXAXR, HVTKPTXVPTKL:SAIS-AA¹⁷-LYL:LKNYQ:NMVVESXGXH, YVPKPXXVPTKL:SAIS-AA¹⁷-LYL:LKNYQ:NMVVESXGXH, TVPKPXXVPTQL:SAIS-AA¹⁷-LYL:LKNYQ:NMVVEAXGXH, AVPKAXXVPTKL:SAIS-AA¹⁷-LYL:LKNYQ:NMVVEAXGXH, KVGKAXXVPTKL:SAIS-AA¹⁷-LYL:LKNYQ:EGMSVVEXGXR, KASKAXXVPTKL:SAIS-AA¹⁷-LYL:LKNYQ:GMVVEEXGXR, GSAGPXXVPTKM:SAIS-AA¹⁷-LYL:LKNYQ:GMVVERXGXS, AAPASXXVPTRL:SAIS-AA¹⁷-LYL:LKNYQ:DMVVEAXGXR, STPPTXXVPTRL:SAIS-AA¹⁷-LYL:LKNYQ:DMVVESXGXR, HVPKPXXVPTKL:SAIS-AA¹⁷-LYL:LKNYQ:NMVVESXGXH, RVPSTXXVPTKT:SAIS-AA¹⁷-LYL:LKNYQ:MIVVEXGXL, ASAAPXXVPTAL:SAIS-AA¹⁷-LYL:LKNYQ:MIVVEXKXS, ASASPXXVPTDL:SAIS-AA¹⁷-LYL:LKNYQ:MIVVEXKXS, ASASPXXVPTDL:SAIS-AA¹⁷-LYL:LKNYQ:MVVVEXKXS, GIPEPXXVPEKM:SAIS-AA¹⁷-LYL:LKNYQ:NMTVESXAXR, HVTKPTXAPTKL:SAIS-AA¹⁷-LYL:LKNYQ:NMVVRSXGXH, YVPKPXXAPTKL:SAIS-AA¹⁷-LYL:LKNYQ:NMVVRSXGXH, TVPKPXXAPTQL:SAIS-AA¹⁷-LYL:LKNYQ:NMVVRAXGXH, AVPKAXXAPTKL:SAIS-AA¹⁷-LYL:LKNYQ:NMVVKAXGXH, KVGKAXXVPTKL:SAIS-AA¹⁷-LYL:LKNYQ:EGMSVAEXGXR, KASKAXXVPTKL:SAIS-AA¹⁷-LYL:LKNYQ:GMAVSEXGXR, GSAGPXXTPTKM:SAIS-AA¹⁷-LYL:LKNYQ:GMVVDRXGXS, AAPASXXVPARL:SAIS-AA¹⁷-LYL:LKNYQ:DMVVEAXGXR, HVPKPXXAPTKL:SAIS-AA¹⁷-LYL:LKNYQ:NMVVRSXGXH, RVPSTXXAPVKT:SAIS-AA¹⁷-LYL:LKNYQ:MIVEEXGXL, ASAAPXXVPQAL:SAIS-AA¹⁷-LYL:LKNYQ:MIVRSXKXS, ASASPXXVSQDL:SAIS-AA¹⁷-LYL:LKNYQ:MIVKSXKXS, ASASPXXVPQDL:SAIS-AA¹⁷-LYL:LKNYQ:MVVKSXKXS, NDEGLEXVPTEE:SAIS-AA¹⁷-LYL:LKNYQ:FLQHNKXEXR, NDEGLEXVPTGQ:SAIS-AA¹⁷-LYL:LKNYQ:LEEHSQXEXR, SSVKXQPSRVHH:SAIS-AA¹⁷-LYL:LKNYQ:RLEEHLEXAXA, RNVQXRPTQVQL:SAIS-AA¹⁷-LYL:LKNYQ:TLEDHLAXKXE, KIPKAXXVPEEL:SSLS-AA¹⁷-LFF:LKVYP:DMTVEGXGXR, SIPKAXXVPEEL:SSLS-AA¹⁷-LFF:LKVYP:EMTVEGXGXR, HVTKPTXVPEKL:SSLS-AA¹⁷-LFF:LKVYP:NMTVESXGXH, YVPKPXXVPEKL:SSLS-AA¹⁷-LFF:LKVYP:NMTVESXGXH, TVPKPXXVPEQL:SSLS-AA¹⁷-LFF:LKVYP:NMTVEAXGXH, AVPKAXXVPEKL:SSLS-AA¹⁷-LFF:LKVYP:NMTVEAXGXH, KVGKAXXVPEKL:SSLS-AA¹⁷-LFF:LKVYP:EGMSTVEXGXR, KASKAXXVPEKL:SSLS-AA¹⁷-LFF:LKVYP:GMTVEEXGXR, GSAGPXXVPEKM:SSLS-AA¹⁷-LFF:LKVYP:GMTVERXGXS, AAPASXXVPERL:SSLS-AA¹⁷-LFF:LKVYP:DMTVEAXGXR, STPPTXXVPERL:SSLS-AA¹⁷-LFF:LKVYP:DMTVESXGXR, HVPKPXXVPEKL:SSLS-AA¹⁷-LFF:LKVYP:NMTVESXGXH, RVPSTXXVPEKT:SSLS-AA¹⁷-LFF:LKVYP:MITVEXGXL, ASAAPXXVPEAL:SSLS-AA¹⁷-LFF:LKVYP:MITVEXKXS, ASASPXXVPEDL:SSLS-AA¹⁷-LFF:LKVYP:MITVEXKXS, ASASPXXVPEDL:SSLS-AA¹⁷-LFF:LKVYP:MVTVEXKXS, KIPKAXXVPTEL:SSLS-AA¹⁷-LFF:LKVYP:DMVVEGXGXR, SIPKAXXVPTEL:SSLS-AA¹⁷-LFF:LKVYP:EMVVEGXGXR, HVTKPTXAPTKL:SSLS-AA¹⁷-LFF:LKVYP:NMVVRSXGXH, YVPKPXXAPTKL:SSLS-AA¹⁷-LFF:LKVYP:NMVVRSXGXH, TVPKPXXAPTQL:SSLS-AA¹⁷-LFF:LKVYP:NMVVRAXGXH, AVPKAXXAPTKL:SSLS-AA¹⁷-LFF:LKVYP:NMVVKAXGXH, KVGKAXXVPTKL:SSLS-AA¹⁷-LFF:LKVYP:EGMSVAEXGXR, KASKAXXVPTKL:SSLS-AA¹⁷-LFF:LKVYP:GMAVSEXGXR, GSAGPXXTPTKM:SSLS-AA¹⁷-LFF:LKVYP:GMVVDRXGXS, AAPASXXVPARL:SSLS-AA¹⁷-LFF:LKVYP:DMVVEAXGXR, STPPTXXVPTRL:SSLS-AA¹⁷-LFF:LKVYP:DMVVESXGXR, HVPKPXXAPTKL:SSLS-AA¹⁷-LFF:LKVYP:NMVVRSXGXH, RVPSTXXAPVKT:SSLS-AA¹⁷-LFF:LKVYP:MIVEEXGXL, ASAAPXXVPQAL:SSLS-AA¹⁷-LFF:LKVYP:MIVRSXKXS, ASASPXXVSQDL:SSLS-AA¹⁷-LFF:LKVYP:MIVKSXKXS, ASASPXXVPQDL:SSLS-AA¹⁷-LFF:LKVYP:MVVKSXKXS, NDEGLEXVPTEE:SSLS-AA¹⁷-LFF:LKVYP:FLQHNKXEXR, NDEGLEXVPTGQ:SSLS-AA¹⁷-LFF:LKVYP:LEEHSQXEXR, SSVKXQPSRVHH:SSLS-AA¹⁷-LFF:LKVYP:RLEEHLEXAXA, RNVQXRPTQVQL:SSLS-AA¹⁷-LFF:LKVYP:TLEDHLAXKXE, KIPKAXXAPTEL:NAIS-AA¹⁷-LYF:LKKYR:DMVVRGXGXR, GIPEPXXAPTKM:NAIS-AA¹⁷-LYF:LKKYR:NMVVRSXAXR, SIPKAXXAPTEL:NAIS-AA¹⁷-LYF:LKKYR:EMVVRGXGXR, AVPKAXXAPTKL:NAIS-AA¹⁷-LYF:LKKYR:NMVVRAXGXH, KVGKAXXAPTKL:NAIS-AA¹⁷-LYF:LKKYR:EGMSVVRXGXR, KASKAXXAPTKL:NAIS-AA¹⁷-LYF:LKKYR:GMVVREXGXR, GSAGPXXAPTKM:NAIS-AA¹⁷-LYF:LKKYR:GMVVRRXGXS, AAPASXXAPTRL:NAIS-AA¹⁷-LYF:LKKYR:DMVVRAXGXR, STPPTXXAPTRL:NAIS-AA¹⁷-LYF:LKKYR:DMVVRSXGXR, RVPSTXXAPTKT:NAIS-AA¹⁷-LYF:LKKYR:MIVVRXGXL, ASAAPXXAPTAL:NAIS-AA¹⁷-LYF:LKKYR:MIVVRXKXS, ASASPXXAPTDL:NAIS-AA¹⁷-LYF:LKKYR:MIVVRXKXS, ASASPXXAPTDL:NAIS-AA¹⁷-LYF:LKKYR:MVVVRXKXS, KIPKAXXVPTEL:NAIS-AA¹⁷-LYF:LKKYR:DMVVEGXGXR, GIPEPXXVPEKM:NAIS-AA¹⁷-LYF:LKKYR:NMTVESXAXR, SIPKAXXVPTEL:NAIS-AA¹⁷-LYF:LKKYR:EMVVEGXGXR, AVPKAXXAPTKL:NAIS-AA¹⁷-LYF:LKKYR:NMVVKAXGXH, KVGKAXXVPTKL:NAIS-AA¹⁷-LYF:LKKYR:EGMSVAEXGXR, KASKAXXVPTKL:NAIS-AA¹⁷-LYF:LKKYR:GMAVSEXGXR, GSAGPXXTPTKM:NAIS-AA¹⁷-LYF:LKKYR:GMVVDRXGXS, AAPASXXVPARL:NAIS-AA¹⁷-LYF:LKKYR:DMVVEAXGXR, STPPTXXVPTRL:NAIS-AA¹⁷-LYF:LKKYR:DMVVESXGXR, RVPSTXXAPVKT:NAIS-AA¹⁷-LYF:LKKYR:MIVEEXGXL, ASAAPXXVPQAL:NAIS-AA¹⁷-LYF:LKKYR:MIVRSXKXS, ASASPXXVSQDL:NAIS-AA¹⁷-LYF:LKKYR:MIVKSXKXS, ASASPXXVPQDL:NAIS-AA¹⁷-LYF:LKKYR:MVVKSXKXS, NDEGLEXVPTEE:NAIS-AA¹⁷-LYF:LKKYR:FLQHNKXEXR, NDEGLEXVPTGQ:NAIS-AA¹⁷-LYF:LKKYR:LEEHSQXEXR, SSVKXQPSRVHH:NAIS-AA¹⁷-LYF:LKKYR:RLEEHLEXAXA, RNVQXRPTQVQL:NAIS-AA¹⁷-LYF:LKKYR:TLEDHLAXKXE, KIPKAXXAPTEL:SATS-AA¹⁷-LYY:LRKHR:DMVVKGXGXR, GIPEPXXAPTKM:SATS-AA¹⁷-LYY:LRKHR:NMVVKSXAXR, SIPKAXXAPTEL:SATS-AA¹⁷-LYY:LRKHR:EMVVKGXGXR, HVTKPTXAPTKL:SATS-AA¹⁷-LYY:LRKHR:NMVVKSXGXH, YVPKPXXAPTKL:SATS-AA¹⁷-LYY:LRKHR:NMVVKSXGXH, TVPKPXXAPTQL:SATS-AA¹⁷-LYY:LRKHR:NMVVKAXGXH, KVGKAXXAPTKL:SATS-AA¹⁷-LYY:LRKHR:EGMSVVKXGXR, KASKAXXAPTKL:SATS-AA¹⁷-LYY:LRKHR:GMVVKEXGXR, GSAGPXXAPTKM:SATS-AA¹⁷-LYY:LRKHR:GMVVKRXGXS, AAPASXXAPTRL:SATS-AA¹⁷-LYY:LRKHR:DMVVKAXGXR, STPPTXXAPTRL:SATS-AA¹⁷-LYY:LRKHR:DMVVKSXGXR, HVPKPXXAPTKL:SATS-AA¹⁷-LYY:LRKHR:NMVVKSXGXH, RVPSTXXAPTKT:SATS-AA¹⁷-LYY:LRKHR:MIVVKXGXL, ASAAPXXAPTAL:SATS-AA¹⁷-LYY:LRKHR:MIVVKXKXS, ASASPXXAPTDL:SATS-AA¹⁷-LYY:LRKHR:MIVVKXKXS, ASASPXXAPTDL:SATS-AA¹⁷-LYY:LRKHR:MVVVKXKXS, KIPKAXXVPTEL:SATS-AA¹⁷-LYY:LRKHR:DMVVEGXGXR, GIPEPXXVPEKM:SATS-AA¹⁷-LYY:LRKHR:NMTVESXAXR, SIPKAXXVPTEL:SATS-AA¹⁷-LYY:LRKHR:EMVVEGXGXR, HVTKPTXAPTKL:SATS-AA¹⁷-LYY:LRKHR:NMVVRSXGXH, YVPKPXXAPTKL:SATS-AA¹⁷-LYY:LRKHR:NMVVRSXGXH, TVPKPXXAPTQL:SATS-AA¹⁷-LYY:LRKHR:NMVVRAXGXH, KVGKAXXVPTKL:SATS-AA¹⁷-LYY:LRKHR:EGMSVAEXGXR, KASKAXXVPTKL:SATS-AA¹⁷-LYY:LRKHR:GMAVSEXGXR, GSAGPXXTPTKM:SATS-AA¹⁷-LYY:LRKHR:GMVVDRXGXS, AAPASXXVPARL:SATS-AA¹⁷-LYY:LRKHR:DMVVEAXGXR, STPPTXXVPTRL:SATS-AA¹⁷-LYY:LRKHR:DMVVESXGXR, HVPKPXXAPTKL:SATS-AA¹⁷-LYY:LRKHR:NMVVRSXGXH, RVPSTXXAPVKT:SATS-AA¹⁷-LYY:LRKHR:MIVEEXGXL, ASAAPXXVPQAL:SATS-AA¹⁷-LYY:LRKHR:MIVRSXKXS, ASASPXXVSQDL:SATS-AA¹⁷-LYY:LRKHR:MIVKSXKXS, ASASPXXVPQDL:SATS-AA¹⁷-LYY:LRKHR:MVVKSXKXS, NDEGLEXVPTEE:SATS-AA¹⁷-LYY:LRKHR:FLQHNKXEXR, NDEGLEXVPTGQ:SATS-AA¹⁷-LYY:LRKHR:LEEHSQXEXR, SSVKXQPSRVHH:SATS-AA¹⁷-LYY:LRKHR:RLEEHLEXAXA, RNVQXRPTQVQL:SATS-AA¹⁷-LYY:LRKHR:TLEDHLAXKXE, KIPKAXXVPTEL:SPIS-AA¹⁷-LYK:LKYHY:DMVAEGXGXR, GIPEPXXVPTKM:SPIS-AA¹⁷-LYK:LKYHY:NMVAESXAXR, SIPKAXXVPTEL:SPIS-AA¹⁷-LYK:LKYHY: EMVAEGXGXR, HVTKPTXVPTKL:SPIS-AA¹⁷-LYK:LKYHY:NMVAESXGXH, YVPKPXXVPTKL:SPIS-AA¹⁷-LYK:LKYHY:NMVAESXGXH, TVPKPXXVPTQL:SPIS-AA¹⁷-LYK:LKYHY:NMVAEAXGXH, AVPKAXXVPTKL:SPIS-AA¹⁷-LYK:LKYHY:NMVAEAXGXH, KASKAXXVPTKL:SPIS-AA¹⁷-LYK:LKYHY:GMVAEEXGXR, GSAGPXXVPTKM:SPIS-AA¹⁷-LYK: LKYHY:GMVAERXGXS, AAPASXXVPTRL:SPIS-AA¹⁷-LYK:LKYHY:DMVAEAXGXR, STPPTXXVPTRL:SPIS-AA¹⁷-LYK:LKYHY:DMVAESXGXR, HVPKPXXVPTKL:SPIS-AA¹⁷-LYK:LKYHY:NMVAESXGXH, RVPSTXXVPTKT:SPIS-AA¹⁷-LYK:LKYHY:MIVAEXGXL, ASAAPXXVPTAL:SPIS-AA¹⁷-LYK:LKYHY:MIVAEXKXS, ASASPXXVPTDL:SPIS-AA¹⁷-LYK:LKYHY:MIVAEXKXS, ASASPXXVPTDL:SPIS-AA¹⁷-LYK:LKYHY:MVVAEXKXS, KIPKAXXVPTEL:SPIS-AA¹⁷-LYK:LKYHY:DMVVEGXGXR, GIPEPXXVPEKM:SPIS-AA¹⁷-LYK:LKYHY:NMTVESXAXR, SIPKAXXVPTEL:SPIS-AA¹⁷-LYK:LKYHY:EMVVEGXGXR, HVTKPTXAPTKL:SPIS-AA¹⁷-LYK:LKYHY:NMVVRSXGXH, YVPKPXXAPTKL:SPIS-AA¹⁷-LYK:LKYHY:NMVVRSXGXH, TVPKPXXAPTQL:SPIS-AA¹⁷-LYK:LKYHY:NMVVRAXGXH, AVPKAXXAPTKL:SPIS-AA¹⁷-LYK:LKYHY:NMVVKAXGXH, KASKAXXVPTKL:SPIS-AA¹⁷-LYK:LKYHY:GMAVSEXGXR, GSAGPXXTPTKM:SPIS-AA¹⁷-LYK:LKYHY:GMVVDRXGXS, AAPASXXVPARL:SPIS-AA¹⁷-LYK:LKYHY:DMVVEAXGXR, STPPTXXVPTRL:SPIS-AA¹⁷-LYK:LKYHY:DMVVESXGXR, HVPKPXXAPTKL:SPIS-AA¹⁷-LYK:LKYHY:NMVVRSXGXH, RVPSTXXAPVKT:SPIS-AA¹⁷-LYK:LKYHY:MIVEEXGXL, ASAAPXXVPQAL:SPIS-AA¹⁷-LYK:LKYHY:MIVRSXKXS, ASASPXXVSQDL:SPIS-AA¹⁷-LYK:LKYHY:MIVKSXKXS, ASASPXXVPQDL:SPIS-AA¹⁷-LYK:LKYHY:MVVKSXKXS, NDEGLEXVPTEE:SPIS-AA¹⁷-LYK:LKYHY:FLQHNKXEXR, NDEGLEXVPTGQ:SPIS-AA¹⁷-LYK:LKYHY:LEEHSQXEXR, SSVKXQPSRVHH:SPIS-AA¹⁷-LYK:LKYHY:RLEEHLEXAXA, RNVQXRPTQVQL:SPIS-AA¹⁷-LYK:LKYHY:TLEDHLAXKXE, KIPKAXXVPTEL:EPIS-AA¹⁷-LYL:KFKYE:DMAVXGXGSR, GIPEPXXVPTKM:EPIS-AA¹⁷-LYL:KFKYE:NMAVSSXAXR, SIPKAXXVPTEL:EPIS-AA¹⁷-LYL:KFKYE:EMAVXGXGSR, HVTKPTXVPTKL:EPIS-AA¹⁷-LYL:KFKYE:NMAVSSXGXH, YVPKPXXVPTKL:EPIS-AA¹⁷-LYL:KFKYE:NMAVSSXGXH, TVPKPXXVPTQL:EPIS-AA¹⁷-LYL:KFKYE:NMAVSAXGXH, AVPKAXXVPTKL:EPIS-AA¹⁷-LYL:KFKYE:NMAVSAXGXH, KVGKAXXVPTKL:EPIS-AA¹⁷-LYL:KFKYE:EGMSAVSXGXR, GSAGPXXVPTKM:EPIS-AA¹⁷-LYL:KFKYE:GMAVSRXGXS, AAPASXXVPTRL:EPIS-AA¹⁷-LYL:KFKYE:DMAVSAXGXR, STPPTXXVPTRL:EPIS-AA¹⁷-LYL:KFKYE:DMAVSSXGXR, HVPKPXXVPTKL:EPIS-AA¹⁷-LYL:KFKYE:NMAVSSXGXH, RVPSTXXVPTKT:EPIS-AA¹⁷-LYL:KFKYE:MIAVSXGXL, ASAAPXXVPTAL:EPIS-AA¹⁷-LYL:KFKYE:MIAVSXKXS, ASASPXXVPTDL:EPIS-AA¹⁷-LYL:KFKYE:MIAVSXKXS, ASASPXXVPTDL:EPIS-AA¹⁷-LYL:KFKYE:MVAVSXKXS, KIPKAXXVPTEL:EPIS-AA¹⁷-LYL:KFKYE:DMVVEGXGXR, GIPEPXXVPEKM:EPIS-AA¹⁷-LYL:KFKYE:NMTVESXAXR, SIPKAXXVPTEL:EPIS-AA¹⁷-LYL:KFKYE:EMVVEGXGXR, HVTKPTXAPTKL:EPIS-AA¹⁷-LYL:KFKYE:NMVVRSXGXH, YVPKPXXAPTKL:EPIS-AA¹⁷-LYL:KFKYE:NMVVRSXGXH, TVPKPXXAPTQL:EPIS-AA¹⁷-LYL:KFKYE:NMVVRAXGXH, AVPKAXXAPTKL:EPIS-AA¹⁷-LYL:KFKYE:NMVVKAXGXH, KVGKAXXVPTKL:EPIS-AA¹⁷-LYL:KFKYE:EGMSVAEXGXR, GSAGPXXTPTKM:EPIS-AA¹⁷-LYL:KFKYE:GMVVDRXGXS, AAPASXXVPARL:EPIS-AA¹⁷-LYL:KFKYE:DMVVEAXGXR, STPPTXXVPTRL:EPIS-AA¹⁷-LYL:KFKYE:DMVVESXGXR, HVPKPXXAPTKL:EPIS-AA¹⁷-LYL:KFKYE:NMVVRSXGXH, RVPSTXXAPVKT:EPIS-AA¹⁷-LYL:KFKYE:MIVEEXGXL, ASAAPXXVPQAL:EPIS-AA¹⁷-LYL:KFKYE:MIVRSXKXS, ASASPXXVSQDL:EPIS-AA¹⁷-LYL:KFKYE:MIVKSXKXS, ASASPXXVPQDL:EPIS-AA¹⁷-LYL:KFKYE:MVVKSXKXS, NDEGLEXVPTEE:EPIS-AA¹⁷-LYL:KFKYE:FLQHNKXEXR, NDEGLEXVPTGQ:EPIS-AA¹⁷-LYL:KFKYE:LEEHSQXEXR, SSVKXQPSRVHH:EPIS-AA¹⁷-LYL:KFKYE:RLEEHLEXAXA, RNVQXRPTQVQL:EPIS-AA¹⁷-LYL:KFKYE:TLEDHLAXKXE, KIPKAXXTPTEL:SPIN-AA¹⁷-LYF:YGKIP:DMVVDGXGXR, GIPEPXXTPTKM:SPIN-AA¹⁷-LYF:YGKIP:NMVVDSXAXR, SIPKAXXTPTEL:SPIN-AA¹⁷-LYF:YGKIP:EMVVDGXGXR, HVTKPTSTPTKL:SPIN-AA¹⁷-LYF:YGKIP:NMVVDSXGXH, YVPKPXXTPTKL:SPIN-AA¹⁷-LYF:YGKIP:NMVVDSXGXH, TVPKPXXTPTQL:SPIN-AA¹⁷-LYF:YGKIP:NMVVDAXGXH, AVPKAXXTPTKL:SPIN-AA¹⁷-LYF:YGKIP:NMVVDAXGXH, KVGKAXXTPTKL:SPIN-AA¹⁷-LYF:YGKIP:EGMSVVDXGXR, KASKAXXTPTKL:SPIN-AA¹⁷-LYF:YGKIP:GMVVDEXGXR, AAPASXXTPTRL:SPIN-AA¹⁷-LYF:YGKIP:DMVVDAXGXR, STPPTXXTPTRL:SPIN-AA¹⁷-LYF:YGKIP:DMVVDSXGXR, HVPKPXXTPTKL:SPIN-AA¹⁷-LYF:YGKIP:NMVVDSXGXH, RVPSTXXTPTKT:SPIN-AA¹⁷-LYF:YGKIP:MIVVDXGXL, ASAAPXXTPTAL:SPIN-AA¹⁷-LYF:YGKIP:MIVVDXKXS, ASASPXXTPTDL:SPIN-AA¹⁷-LYF:YGKIP:MIVVDXKXS, ASASPXXTPTDL:SPIN-AA¹⁷-LYF:YGKIP:MVVVDXKXS, KIPKAXXVPTEL:SPIN-AA¹⁷-LYF:YGKIP:DMVVEGXGXR, GIPEPXXVPEKM:SPIN-AA¹⁷-LYF:YGKIP:NMTVESXAXR, SIPKAXXVPTEL:SPIN-AA¹⁷-LYF:YGKIP:EMVVEGXGXR, HVTKPTXAPTKL:SPIN-AA¹⁷-LYF:YGKIP:NMVVRSXGXH, YVPKPXXAPTKL:SPIN-AA¹⁷-LYF:YGKIP:NMVVRSXGXH, TVPKPXXAPTQL:SPIN-AA¹⁷-LYF:YGKIP:NMVVRAXGXH, AVPKAXXAPTKL:SPIN-AA¹⁷-LYF:YGKIP:NMVVKAXGXH, KVGKAXXVPTKL:SPIN-AA¹⁷-LYF:YGKIP:EGMSVAEXGXR, KASKAXXVPTKL:SPIN-AA¹⁷-LYF:YGKIP:GMAVSEXGXR, AAPASXXVPARL:SPIN-AA¹⁷-LYF:YGKIP:DMVVEAXGXR, STPPTXXVPTRL:SPIN-AA¹⁷-LYF:YGKIP:DMVVESXGXR, HVPKPXXAPTKL:SPIN-AA¹⁷-LYF:YGKIP:NMVVRSXGXH, RVPSTXXAPVKT:SPIN-AA¹⁷-LYF:YGKIP:MIVEEXGXL, ASAAPXXVPQAL:SPIN-AA¹⁷-LYF:YGKIP:MIVRSXKXS, ASASPXXVSQDL:SPIN-AA¹⁷-LYF:YGKIP:MIVKSXKXS, ASASPXXVPQDL:SPIN-AA¹⁷-LYF:YGKIP:MVVKSXKXS, NDEGLEXVPTEE:SPIN-AA¹⁷-LYF:YGKIP:FLQHNKXEXR, NDEGLEXVPTGQ:SPIN-AA¹⁷-LYF:YGKIP:LEEHSQXEXR, SSVKXQPSRVHH:SPIN-AA¹⁷-LYF:YGKIP:RLEEHLEXAXA, RNVQXRPTQVQL:SPIN-AA¹⁷-LYF:YGKIP:TLEDHLAXKXE, KIPKAXXVPAEL:SPIS-AA¹⁷-LYI:YKQYE:DMVVEGXGXR, GIPEPXXVPAKM:SPIS-AA¹⁷-LYI:YKQYE:NMVVESXAXR, SIPKAXXVPAEL:SPIS-AA¹⁷-LYI:YKQYE:EMVVEGXGXR, HVTKPTXVPAKL:SPIS-AA¹⁷-LYI:YKQYE:NMVVESXGXH, YVPKPXXVPAKL:SPIS-AA¹⁷-LYI:YKQYE:NMVVESXGXH, TVPKPXXVPAQL:SPIS-AA¹⁷-LYI:YKQYE:NMVVEAXGXH, AVPKAXXVPAKL:SPIS-AA¹⁷-LYI:YKQYE:NMVVEAXGXH, KVGKAXXVPAKL:SPIS-AA¹⁷-LYI:YKQYE:EGMSVVEXGXR, KASKAXXVPAKL:SPIS-AA¹⁷-LYI:YKQYE:GMVVEEXGXR, GSAGPXXVPAKM:SPIS-AA¹⁷-LYI:YKQYE:GMVVERXGXS, STPPTXXVPARL:SPIS-AA¹⁷-LYI:YKQYE:DMVVESXGXR, HVPKPXXVPAKL:SPIS-AA¹⁷-LYI:YKQYE:NMVVESXGXH, RVPSTXXVPAKT:SPIS-AA¹⁷-LYI:YKQYE:MIVVEXGXL, ASAAPXXVPAAL:SPIS-AA¹⁷-LYI:YKQYE:MIVVEXKXS, ASASPXXVPADL:SPIS-AA¹⁷-LYI:YKQYE:MIVVEXKXS, ASASPXXVPADL:SPIS-AA¹⁷-LYI:YKQYE:MVVVEXKXS, KIPKAXXVPTEL:SPIS-AA¹⁷-LYI:YKQYE:DMVVEGXGXR, GIPEPXXVPEKM:SPIS-AA¹⁷-LYI:YKQYE:NMTVESXAXR, SIPKAXXVPTEL:SPIS-AA¹⁷-LYI:YKQYE:EMVVEGXGXR, HVTKPTXAPTKL:SPIS-AA¹⁷-LYI:YKQYE:NMVVRSXGXH, YVPKPXXAPTKL:SPIS-AA¹⁷-LYI:YKQYE:NMVVRSXGXH, TVPKPXXAPTQL:SPIS-AA¹⁷-LYI:YKQYE:NMVVRAXGXH, AVPKAXXAPTKL:SPIS-AA¹⁷-LYI:YKQYE:NMVVKAXGXH, KVGKAXXVPTKL:SPIS-AA¹⁷-LYI:YKQYE:EGMSVAEXGXR, KASKAXXVPTKL:SPIS-AA¹⁷-LYI:YKQYE:GMAVSEXGXR, GSAGPXXTPTKM:SPIS-AA¹⁷-LYI:YKQYE:GMVVDRXGXS, STPPTXXVPTRL:SPIS-AA¹⁷-LYI:YKQYE:DMVVESXGXR, HVPKPXXAPTKL:SPIS-AA¹⁷-LYI:YKQYE:NMVVRSXGXH, RVPSTXXAPVKT:SPIS-AA¹⁷-LYI:YKQYE:MIVEEXGXL, ASAAPXXVPQAL:SPIS-AA¹⁷-LYI:YKQYE:MIVRSXKXS, ASASPXXVSQDL:SPIS-AA¹⁷-LYI:YKQYE:MIVKSXKXS, ASASPXXVPQDL:SPIS-AA¹⁷-LYI:YKQYE: MVVKSXKXS, NDEGLEXVPTEE:SPIS-AA¹⁷-LYI:YKQYE:FLQHNKXEXR, NDEGLEXVPTGQ:SPIS-AA¹⁷-LYI:YKQYE:LEEHSQXEXR, SSVKXQPSRVHH:SPIS-AA¹⁷-LYI:YKQYE:RLEEHLEXAXA, RNVQXRPTQVQL:SPIS-AA¹⁷-LYI:YKQYE:TLEDHLAXKXE, KIPKAXXVPTEL:SPIS-AA¹⁷-LFI:YKQYE:DMVVEGXGXR, GIPEPXXVPTKM:SPIS-AA¹⁷-LFI:YKQYE:NMVVESXAXR, SIPKAXXVPTEL:SPIS-AA¹⁷-LFI:YKQYE:EMVVEGXGXR, HVTKPTXVPTKL:SPIS-AA¹⁷-LFI:YKQYE:NMVVESXGXH, YVPKPXXVPTKL:SPIS-AA¹⁷-LFI:YKQYE:NMVVESXGXH, TVPKPXXVPTQL:SPIS-AA¹⁷-LFI:YKQYE:NMVVEAXGXH, AVPKAXXVPTKL:SPIS-AA¹⁷-LFI:YKQYE:NMVVEAXGXH, KVGKAXXVPTKL:SPIS-AA¹⁷-LFI:YKQYE:EGMSVVEXGXR, KASKAXXVPTKL:SPIS-AA¹⁷-LFI:YKQYE:GMVVEEXGXR, GSAGPXXVPTKM:SPIS-AA¹⁷-LFI:YKQYE:GMVVERXGXS, AAPASXXVPTRL:SPIS-AA¹⁷-LFI:YKQYE:DMVVEAXGXR, HVPKPXXVPTKL:SPIS-AA¹⁷-LFI:YKQYE:NMVVESXGXH, RVPSTXXVPTKT:SPIS-AA¹⁷-LFI:YKQYE:MIVVEXGXL, ASAAPXXVPTAL:SPIS-AA¹⁷-LFI:YKQYE:MIVVEXKXS, ASASPXXVPTDL:SPIS-AA¹⁷-LFI:YKQYE:MIVVEXKXS, ASASPXXVPTDL:SPIS-AA¹⁷-LFI:YKQYE:MVVVEXKXS, GIPEPXXVPEKM:SPIS-AA¹⁷-LFI:YKQYE:NMTVESXAXR, HVTKPTXAPTKL:SPIS-AA¹⁷-LFI:YKQYE:NMVVRSXGXH, YVPKPXXAPTKL:SPIS-AA¹⁷-LFI:YKQYE:NMVVRSXGXH, TVPKPXXAPTQL:SPIS-AA¹⁷-LFI:YKQYE:NMVVRAXGXH, AVPKAXXAPTKL:SPIS-AA¹⁷-LFI:YKQYE:NMVVKAXGXH, KVGKAXXVPTKL:SPIS-AA¹⁷-LFI:YKQYE:EGMSVAEXGXR, KASKAXXVPTKL:SPIS-AA¹⁷-LFI:YKQYE:GMAVSEXGXR, GSAGPXXTPTKM:SPIS-AA¹⁷-LFI:YKQYE:GMVVDRXGXS, AAPASXXVPARL:SPIS-AA¹⁷-LFI:YKQYE:DMVVEAXGXR, HVPKPXXAPTKL:SPIS-AA¹⁷-LFI:YKQYE:NMVVRSXGXH, RVPSTXXAPVKT:SPIS-AA¹⁷-LFI:YKQYE:MIVEEXGXL, ASAAPXXVPQAL:SPIS-AA¹⁷-LFI:YKQYE:MIVRSXKXS, ASASPXXVSQDL:SPIS-AA¹⁷-LFI:YKQYE:MIVKSXKXS, ASASPXXVPQDL:SPIS-AA¹⁷-LFI:YKQYE:MVVKSXKXS, NDEGLEXVPTEE:SPIS-AA¹⁷-LFI:YKQYE:FLQHNKXEXR, NDEGLEXVPTGQ:SPIS-AA¹⁷-LFI:YKQYE:LEEHSQXEXR, SSVKXQPSRVHH:SPIS-AA¹⁷-LFI:YKQYE:RLEEHLEXAXA, RNVQXRPTQVQL:SPIS-AA¹⁷-LFI:YKQYE:TLEDHLAXKXE, KIPKAXXAPVEL:KPLS-AA¹⁷-LYV:DHHKD:DMVEEGXGXR, GIPEPXXAPVKM:KPLS-AA¹⁷-LYV:DHHKD:NMVEESXAXR, SIPKAXXAPVEL:KPLS-AA¹⁷-LYV:DHHKD:EMVEEGXGXR, HVTKPTXAPVKL:KPLS-AA¹⁷-LYV:DHHKD:NMVEESXGXH, YVPKPXXAPVKL:KPLS-AA¹⁷-LYV:DHHKD:NMVEESXGXH, TVPKPXXAPVQL:KPLS-AA¹⁷-LYV:DHHKD:NMVEEAXGXH, AVPKAXXAPVKL:KPLS-AA¹⁷-LYV:DHHKD:NMVEEAXGXH, KVGKAXXAPVKL:KPLS-AA¹⁷-LYV:DHHKD:EGMSVEEXGXR, KASKAXXAPVKL:KPLS-AA¹⁷-LYV:DHHKD:GMVEEEXGXR, GSAGPXXAPVKM:KPLS-AA¹⁷-LYV:DHHKD:GMVEERXGXS, AAPASXXAPVRL:KPLS-AA¹⁷-LYV:DHHKD:DMVEEAXGXR, STPPTXXAPVRL:KPLS-AA¹⁷-LYV:DHHKD:DMVEESXGXR, HVPKPXXAPVKL:KPLS-AA¹⁷-LYV:DHHKD:NMVEESXGXH, ASAAPXXAPVAL:KPLS-AA¹⁷-LYV:DHHKD:MIVEEXKXS, ASASPXXAPVDL:KPLS-AA¹⁷-LYV:DHHKD:MIVEEXKXS, ASASPXXAPVDL:KPLS-AA¹⁷-LYV:DHHKD:MVVEEXKXS, KIPKAXXVPTEL:KPLS-AA¹⁷-LYV:DHHKD:DMVVEGXGXR, GIPEPXXVPEKM:KPLS-AA¹⁷-LYV:DHHKD:NMTVESXAXR, SIPKAXXVPTEL:KPLS-AA¹⁷-LYV:DHHKD:EMVVEGXGXR, HVTKPTXAPTKL:KPLS-AA¹⁷-LYV:DHHKD:NMVVRSXGXH, YVPKPXXAPTKL:KPLS-AA¹⁷-LYV:DHHKD:NMVVRSXGXH, TVPKPXXAPTQL:KPLS-AA¹⁷-LYV:DHHKD:NMVVRAXGXH, AVPKAXXAPTKL:KPLS-AA¹⁷-LYV:DHHKD:NMVVKAXGXH, KVGKAXXVPTKL:KPLS-AA¹⁷-LYV:DHHKD:EGMSVAEXGXR, KASKAXXVPTKL:KPLS-AA¹⁷-LYV:DHHKD:GMAVSEXGXR, GSAGPXXTPTKM:KPLS-AA¹⁷-LYV:DHHKD:GMVVDRXGXS, AAPASXXVPARL:KPLS-AA¹⁷-LYV:DHHKD:DMVVEAXGXR, STPPTXXVPTRL:KPLS-AA¹⁷-LYV:DHHKD:DMVVESXGXR, HVPKPXXAPTKL:KPLS-AA¹⁷-LYV:DHHKD:NMVVRSXGXH, ASAAPXXVPQAL:KPLS-AA¹⁷-LYV:DHHKD:MIVRSXKXS, ASASPXXVSQDL:KPLS-AA¹⁷-LYV:DHHKD:MIVKSXKXS, ASASPXXVPQDL:KPLS-AA¹⁷-LYV:DHHKD:MVVKSXKXS, NDEGLEXVPTEE:KPLS-AA¹⁷-LYV:DHHKD:FLQHNKXEXR, NDEGLEXVPTGQ:KPLS-AA¹⁷-LYV:DHHKD:LEEHSQXEXR, SSVKXQPSRVHH:KPLS-AA¹⁷-LYV:DHHKD:RLEEHLEXAXA, RNVQXRPTQVQL:KPLS-AA¹⁷-LYV:DHHKD:TLEDHLAXKXE, KIPKAXXVPQEL:EPLP-AA¹⁷-VYY:EQLSN:DMVRXGXGSR, GIPEPXXVPQKM:EPLP-AA¹⁷-VYY:EQLSN:NMVRSSXAXR, SIPKAXXVPQEL:EPLP-AA¹⁷-VYY:EQLSN:EMVRXGXGSR, HVTKPTXVPQKL:EPLP-AA¹⁷-VYY:EQLSN:NMVRSSXGXH, YVPKPXXVPQKL:EPLP-AA¹⁷-VYY:EQLSN:NMVRSSXGXH, TVPKPXXVPQQL:EPLP-AA¹⁷-VYY:EQLSN:NMVRSAXGXH, AVPKAXXVPQKL:EPLP-AA¹⁷-VYY:EQLSN:NMVRSAXGXH, KVGKAXXVPQKL:EPLP-AA¹⁷-VYY:EQLSN:EGMSVRSXGXR, KASKAXXVPQKL:EPLP-AA¹⁷-VYY:EQLSN:GMVRSEXGXR, GSAGPXXVPQKM:EPLP-AA¹⁷-VYY:EQLSN:GMVRSRXGXS, AAPASXXVPQRL:EPLP-AA¹⁷-VYY:EQLSN:DMVRSAXGXR, STPPTXXVPQRL:EPLP-AA¹⁷-VYY:EQLSN:DMVRSSXGXR, HVPKPXXVPQKL:EPLP-AA¹⁷-VYY:EQLSN:NMVRSSXGXH, RVPSTXXVPQKT:EPLP-AA¹⁷-VYY:EQLSN:MIVRSXGXL, ASASPXXVPQDL:EPLP-AA¹⁷-VYY:EQLSN:MIVRSXKXS, ASASPXXVPQDL:EPLP-AA¹⁷-VYY:EQLSN:MVVRSXKXS, KIPKAXXVPTEL:EPLP-AA¹⁷-VYY:EQLSN:DMVVEGXGXR, GIPEPXXVPEKM:EPLP-AA¹⁷-VYY:EQLSN:NMTVESXAXR, SIPKAXXVPTEL:EPLP-AA¹⁷-VYY:EQLSN:EMVVEGXGXR, HVTKPTXAPTKL:EPLP-AA¹⁷-VYY:EQLSN:NMVVSXGXH, YVPKPXXAPTKL:EPLP-AA¹⁷-VYY:EQLSN:NMVVRSXGXH, TVPKPXXAPTQL:EPLP-AA¹⁷-VYY:EQLSN:NMVVRAXGXH, AVPKAXXAPTKL:EPLP-AA¹⁷-VYY:EQLSN:NMVVKAXGXH, KVGKAXXVPTKL:EPLP-AA¹⁷-VYY:EQLSN:EGMSVAEXGXR, KASKAXXVPTKL:EPLP-AA¹⁷-VYY:EQLSN:GMAVSEXGXR, GSAGPXXTPTKM:EPLP-AA¹⁷-VYY:EQLSN:GMVVDRXGXS, AAPASXXVPARL:EPLP-AA¹⁷-VYY:EQLSN:DMVVEAXGXR, STPPTXXVPTRL:EPLP-AA¹⁷-VYY:EQLSN:DMVVESXGXR, HVPKPXXAPTKL:EPLP-AA¹⁷-VYY:EQLSN:NMVVRSXGXH, RVPSTXXAPVKT:EPLP-AA¹⁷-VYY:EQLSN:MIVEEXGXL, ASASPXXVSQDL:EPLP-AA¹⁷-VYY:EQLSN:MIVKSXKXS, ASASPXXVPQDL:EPLP-AA¹⁷-VYY:EQLSN:MVVKSXKXS, NDEGLEXVPTEE:EPLP-AA¹⁷-VYY:EQLSN:FLQHNKXEXR, NDEGLEXVPTGQ:EPLP-AA¹⁷-VYY:EQLSN:LEEHSQXEXR, SSVKXQPSRVHH:EPLP-AA¹⁷-VYY:EQLSN:RLEEHLEXAXA, RNVQXRPTQVQL:EPLP-AA¹⁷-VYY:EQLSN:TLEDHLAXKXE, KIPKAXXVSQEL:EPLT-AA¹⁷-LYY:EQLSN:DMVKXGXGSR, GIPEPXXVSQKM:EPLT-AA¹⁷-LYY:EQLSN:NMVKSSXAXR, SIPKAXXVSQEL:EPLT-AA¹⁷-LYY:EQLSN:EMVKXGXGSR, HVTKPTXVSQKL:EPLT-AA¹⁷-LYY:EQLSN:NMVKSSXGXH, YVPKPXXVSQKL:EPLT-AA¹⁷-LYY:EQLSN:NMVKSSXGXH, TVPKPXXVSQQL:EPLT-AA¹⁷-LYY:EQLSN:NMVKSAXGXH, AVPKAXXVSQKL:EPLT-AA¹⁷-LYY:EQLSN:NMVKSAXGXH, KVGKAXXVSQKL:EPLT-AA¹⁷-LYY:EQLSN:EGMSVKSXGXR, KASKAXXVSQKL:EPLT-AA¹⁷-LYY:EQLSN:GMVKSEXGXR, GSAGPXXVSQKM:EPLT-AA¹⁷-LYY:EQLSN:GMVKSRXGXS, AAPASXXVSQRL:EPLT-AA¹⁷-LYY:EQLSN:DMVKSAXGXR, STPPTXXVSQRL:EPLT-AA¹⁷-LYY:EQLSN:DMVKSSXGXR, HVPKPXXVSQKL:EPLT-AA¹⁷-LYY:EQLSN:NMVKSSXGXH, RVPSTXXVSQKT:EPLT-AA¹⁷-LYY:EQLSN:MIVKSXGXL, ASAAPXXVSQAL:EPLT-AA¹⁷-LYY:EQLSN:MIVKSXKXS, ASASPXXVSQDL:EPLT-AA¹⁷-LYY:EQLSN:MVVKSXKXS, KIPKAXXVPTEL:EPLT-AA¹⁷-LYY:EQLSN:DMVVEGXGXR, GIPEPXXVPEKM:EPLT-AA¹⁷-LYY:EQLSN:NMTVESXAXR, SIPKAXXVPTEL:EPLT-AA¹⁷-LYY:EQLSN:EMVVEGXGXR, HVTKPTXAPTKL:EPLT-AA¹⁷-LYY:EQLSN:NMVVRSXGXH, YVPKPXXAPTKL:EPLT-AA¹⁷-LYY:EQLSN:NMVVRSXGXH, TVPKPXXAPTQL:EPLT-AA¹⁷-LYY:EQLSN:NMVVRAXGXH, AVPKAXXAPTKL:EPLT-AA¹⁷-LYY:EQLSN:NMVVKAXGXH, KVGKAXXVPTKL:EPLT-AA¹⁷-LYY:EQLSN:EGMSVAEXGXR, KASKAXXVPTKL:EPLT-AA¹⁷-LYY:EQLSN:GMAVSEXGXR, GSAGPXXTPTKM:EPLT-AA¹⁷-LYY:EQLSN:GMVVDRXGXS, AAPASXXVPARL:EPLT-AA¹⁷-LYY:EQLSN:DMVVEAXGXR, STPPTXXVPTRL:EPLT-AA¹⁷-LYY:EQLSN:DMVVESXGXR, HVPKPXXAPTKL:EPLT-AA¹⁷-LYY:EQLSN:NMVVRSXGXH, RVPSTXXAPVKT:EPLT-AA¹⁷-LYY:EQLSN:MIVEEXGXL, ASAAPXXVPQAL:EPLT-AA¹⁷-LYY:EQLSN:MIVRSXKXS, NDEGLEXVPTEE:EPLT-AA¹⁷-LYY:EQLSN:FLQHNKXEXR, NDEGLEXVPTGQ:EPLT-AA¹⁷-LYY:EQLSN:LEEHSQXEXR, SSVKXQPSRVHH:EPLT-AA¹⁷-LYY:EQLSN:RLEEHLEXAXA, RNVQXRPTQVQL:EPLT-AA¹⁷-LYY:EQLSN:TLEDH LAXKXE, KIPKAXXVPQEL:EPLT-AA¹⁷-LYY:EQLSN:DMVKXGXGSR, GIPEPXXVPQKM:EPLT-AA¹⁷-LYY:EQLSN:NMVKSSXAXR, SIPKAXXVPQEL:EPLT-AA¹⁷-LYY:EQLSN: EMVKXGXGSR, HVTKPTXVPQKL:EPLT-AA¹⁷-LYY:EQLSN:NMVKSSXGXH, YVPKPXXVPQKL:EPLT-AA¹⁷-LYY:EQLSN:NMVKSSXGXH, TVPKPXXVPQQL:EPLT-AA¹⁷-LYY:EQLSN:NMVKSAXGXH, AVPKAXXVPQKL:EPLT-AA¹⁷-LYY:EQLSN:NMVKSAXGXH, KVGKAXXVPQKL:EPLT-AA¹⁷-LYY:EQLSN:EGMSVKSXGXR, KASKAXXVPQKL:EPLT-AA¹⁷-LYY:EQLSN:GMVKSEXGXR, GSAGPXXVPQKM:EPLT-AA¹⁷-LYY:EQLSN:GMVKSRXGXS, AAPASXXVPQRL:EPLT-AA¹⁷-LYY:EQLSN:DMVKSAXGXR, STPPTXXVPQRL:EPLT-AA¹⁷-LYY:EQLSN:DMVKSSXGXR, HVPKPXXVPQKL:EPLT-AA¹⁷-LYY:EQLSN:NMVKSSXGXH, RVPSTXXVPQKT:EPLT-AA¹⁷-LYY:EQLSN:MIVKSXGXL, ASAAPXXVPQAL:EPLT-AA¹⁷-LYY:EQLSN:MIVKSXKXS, ASASPXXVPQDL:EPLT-AA¹⁷-LYY:EQLSN:MIVKSXKXS, NDEGLEXVPTGQ:SNIT-AA¹⁷-QIM:IGEMS:LEQHNQXEXR, KIPKAXXVPTEL:SNIT-AA¹⁷-QIM:IGEMS:DMVVEGXGXR, GIPEPXXVPEKM:SNIT-AA¹⁷-QIM:IGEMS:NMTVESXAXR, SIPKAXXVPTEL:SNIT-AA¹⁷-QIM:IGEMS:EMVVEGXGXR, HVTKPTXAPTKL:SNIT-AA¹⁷-QIM:IGEMS:NMVVRSXGXH, YVPKPXXAPTKL:SNIT-AA¹⁷-QIM:IGEMS:NMVVRSXGXH, TVPKPXXAPTQL:SNIT-AA¹⁷-QIM:IGEMS:NMVVRAXGXH, AVPKAXXAPTKL:SNIT-AA¹⁷-QIM:IGEMS:NMVVKAXGXH, KVGKAXXVPTKL:SNIT-AA¹⁷-QIM:IGEMS:EGMSVAEXGXR, KASKAXXVPTKL:SNIT-AA¹⁷-QIM:IGEMS:GMAVSEXGXR, GSAGPXXTPTKM:SNIT-AA¹⁷-QIM:IGEMS:GMVVDRXGXS, AAPASXXVPARL:SNIT-AA¹⁷-QIM:IGEMS:DMVVEAXGXR, STPPTXXVPTRL:SNIT-AA¹⁷-QIM:IGEMS:DMVVESXGXR, HVPKPXXAPTKL:SNIT-AA¹⁷-QIM:IGEMS:NMVVRSXGXH, RVPSTXXAPVKT:SNIT-AA¹⁷-QIM:IGEMS:MIVEEXGXL, ASAAPXXVPQAL:SNIT-AA¹⁷-QIM:IGEMS:MIVRSXKXS, ASASPXXVSQDL:SNIT-AA¹⁷-QIM:IGEMS:MIVKSXKXS, ASASPXXVPQDL:SNIT-AA¹⁷-QIM:IGEMS:MVVKSXKXS, NDEGLEXVPTGQ:SNIT-AA¹⁷-QIM:IGEMS:LEEHSQXEXR, SSVKXQPSRVHH:SNIT-AA¹⁷-QIM:IGEMS:RLEEHLEXAXA, RNVQXRPTQVQL:SNIT-AA¹⁷-QIM:IGEMS:TLEDHLAXKXE, NDEGLEXVPTEE:SNIT-AA¹⁷-QIM:LGEMS:FLEHXKXESR, KIPKAXXVPTEL:SNIT-AA¹⁷-QIM:LGEMS:DMVVEGXGXR, GIPEPXXVPEKM:SNIT-AA¹⁷-QIM:LGEMS:NMTVESXAXR, SIPKAXXVPTEL:SNIT-AA¹⁷-QIM:LGEMS:EMVVEGXGXR, HVTKPTXAPTKL:SNIT-AA¹⁷-QIM:LGEMS:NMVVRSXGXH, YVPKPXXAPTKL:SNIT-AA¹⁷-QIM:LGEMS:NMVVRSXGXH, TVPKPXXAPTQL:SNIT-AA¹⁷-QIM:LGEMS:NMVVRAXGXH, AVPKAXXAPTKL:SNIT-AA¹⁷-QIM:LGEMS:NMVVKAXGXH, KVGKAXXVPTKL:SNIT-AA¹⁷-QIM:LGEMS:EGMSVAEXGXR, KASKAXXVPTKL:SNIT-AA¹⁷-QIM:LGEMS:GMAVSEXGXR, GSAGPXXTPTKM:SNIT-AA¹⁷-QIM:LGEMS:GMVVDRXGXS, AAPASXXVPARL:SNIT-AA¹⁷-QIM:LGEMS:DMVVEAXGXR, STPPTXXVPTRL:SNIT-AA¹⁷-QIM:LGEMS:DMVVESXGXR, HVPKPXXAPTKL:SNIT-AA¹⁷-QIM:LGEMS:NMVVRSXGXH, RVPSTXXAPVKT:SNIT-AA¹⁷-QIM:LGEMS:MIVEEXGXL, ASAAPXXVPQAL:SNIT-AA¹⁷-QIM:LGEMS:MIVRSXKXS, ASASPXXVSQDL:SNIT-AA¹⁷-QIM:LGEMS:MIVKSXKXS, ASASPXXVPQDL:SNIT-AA¹⁷-QIM:LGEMS:MVVKSXKXS, NDEGLEXVPTEE:SNIT-AA¹⁷-QIM:LGEMS:FLQHNKXEXR, SSVKXQPSRVHH:SNIT-AA¹⁷-QIM:LGEMS:RLEEHLEXAXA, RNVQXRPTQVQL:SNIT-AA¹⁷-QIM:LGEMS:TLEDHLAXKXE, RNVQXRPSRVQL:RSVK-AA¹⁷-AKV:KEVQV:TLEEHLAXKXE, KIPKAXXVPTEL:RSVK-AA¹⁷-AKV:KEVQV:DMVVEGXGXR, GIPEPXXVPEKM:RSVK-AA¹⁷-AKV:KEVQV:NMTVESXAXR, SIPKAXXVPTEL:RSVK-AA¹⁷-AKV:KEVQV:EMVVEGXGXR, HVTKPTXAPTKL:RSVK-AA¹⁷-AKV:KEVQV:NMVVRSXGXH, YVPKPXXAPTKL:RSVK-AA¹⁷-AKV:KEVQV:NMVVRSXGXH, TVPKPXXAPTQL:RSVK-AA¹⁷-AKV:KEVQV:NMVVRAXGXH, AVPKAXXAPTKL:RSVK-AA¹⁷-AKV:KEVQV:NMVVKAXGXH, KVGKAXXVPTKL:RSVK-AA¹⁷-AKV:KEVQV:EGMSVAEXGXR, KASKAXXVPTKL:RSVK-AA¹⁷-AKV:KEVQV:GMAVSEXGXR, GSAGPXXTPTKM:RSVK-AA¹⁷-AKV:KEVQV:GMVVDRXGXS, AAPASXXVPARL:RSVK-AA¹⁷-AKV:KEVQV:DMVVEAXGXR, STPPTXXVPTRL:RSVK-AA¹⁷-AKV:KEVQV:DMVVESXGXR, HVPKPXXAPTKL:RSVK-AA¹⁷-AKV:KEVQV:NMVVRSXGXH, RVPSTXXAPVKT:RSVK-AA¹⁷-AKV:KEVQV:MIVEEXGXL, ASAAPXXVPQAL:RSVK-AA¹⁷-AKV:KEVQV:MIVRSXKXS, ASASPXXVSQDL:RSVK-AA¹⁷-AKV:KEVQV:MIVKSXKXS, ASASPXXVPQDL:RSVK-AA¹⁷-AKV:KEVQV:MVVKSXKXS, NDEGLEXVPTEE:RSVK-AA¹⁷-AKV:KEVQV:FLQHNKXEXR, NDEGLEXVPTGQ:RSVK-AA¹⁷-AKV:KEVQV:LEEHSQXEXR, RNVQXRPTQVQL:RSVK-AA¹⁷-AKV:KEVQV:TLEDHLAXKXE, SSVKXQPTQVHH:RPVQ-AA¹⁷-RKI:KKATV:RLEDHLEXAXA, KIPKAXXVPTEL:RPVQ-AA¹⁷-RKI:KKATV:DMVVEGXGXR, GIPEPXXVPEKM:RPVQ-AA¹⁷-RKI:KKATV:NMTVESXAXR, SIPKAXXVPTEL:RPVQ-AA¹⁷-RKI:KKATV:EMVVEGXGXR, HVTKPTXAPTKL:RPVQ-AA¹⁷-RKI:KKATV:NMVVRSXGXH, YVPKPXXAPTKL:RPVQ-AA¹⁷-RKI:KKATV:NMVVRSXGXH, TVPKPXXAPTQL:RPVQ-AA¹⁷-RKI:KKATV:NMVVRAXGXH, AVPKAXXAPTKL:RPVQ-AA¹⁷-RKI:KKATV:NMVVKAXGXH, KVGKAXXVPTKL:RPVQ-AA¹⁷-RKI:KKATV:EGMSVAEXGXR, KASKAXXVPTKL:RPVQ-AA¹⁷-RKI:KKATV:GMAVSEXGXR, GSAGPXXTPTKM:RPVQ-AA¹⁷-RKI:KKATV:GMVVDRXGXS, AAPASXXVPARL:RPVQ-AA¹⁷-RKI:KKATV:DMVVEAXGXR, STPPTXXVPTRL:RPVQ-AA¹⁷-RKI:KKATV:DMVVESXGXR, HVPKPXXAPTKL:RPVQ-AA¹⁷-RKI:KKATV:NMVVRSXGXH, RVPSTXXAPVKT:RPVQ-AA¹⁷-RKI:KKATV:MIVEEXGXL, ASAAPXXVPQAL:RPVQ-AA¹⁷-RKI:KKATV:MIVRSXKXS, ASASPXXVSQDL:RPVQ-AA¹⁷-RKI:KKATV:MIVKSXKXS, ASASPXXVPQDL:RPVQ-AA¹⁷-RKI:KKATV:MVVKSXKXS, NDEGLEXVPTEE:RPVQ-AA¹⁷-RKI:KKATV:FLQHNKXEXR, NDEGLEXVPTGQ:RPVQ-AA¹⁷-RKI:KKATV:LEEHSQXEXR and SSVKXQPSRVHH:RPVQ-AA¹⁷-RKI:KKATV:RLEEHLEXAXA; and wherein AA¹⁷ is selected from the group consisting of G, A, V, L, I, P, F, M, W, T and S (in particular is selected from the group consisting of M, I, L, V and T).

[0395] In particular, in certain embodiments, the hexaplet PEP7:PEP3:PEP1:PEP2:PEP4:PEP8 is selected from the group consisting of GIPEPXX:VPT:SAIS:LKNYQ:VVE:SXAXR, SIPKAXX:VPT:SAIS:LKNYQ:VVE:GXGXR, HVTKPTX:VPT:SAIS:LKNYQ:VVE:SXGXH, YVPKPXX:VPT:SAIS:LKNYQ:VVE:SXGXH, TVPKPXX:VPT:SAIS:LKNYQ:VVE:AXGXH, AVPKAXX:VPT:SAIS:LKNYQ:VVE:AXGXH, KVGKAXX:VPT:SAIS:LKNYQ:VVE:XGXR, KASKAXX:VPT:SAIS:LKNYQ:VVE:EXGXR, GSAGPXX:VPT:SAIS:LKNYQ:VVE:RXGXS, AAPASXX:VPT:SAIS:LKNYQ:VVE:AXGXR, STPPTXX:VPT:SAIS:LKNYQ:VVE:SXGXR, HVPKPXX:VPT:SAIS:LKNYQ:VVE:SXGXH, RVPSTXX:VPT:SAIS:LKNYQ:VVE:XGXL, ASAAPXX:VPT:SAIS:LKNYQ:VVE:XKXS, ASASPXX:VPT:SAIS:LKNYQ:VVE:XKXS, NDEGLEX:VPT:SAIS:LKNYQ:VVE:KXEXR, NDEGLEX:VPT:SAIS:LKNYQ:VVE:QXEXR, SSVKXQP:VPT:SAIS:LKNYQ:VVE:LEXAXA, RNVQXRP:VPT:SAIS:LKNYQ:VVE:LAXKXE, GIPEPXX:VPE:SAIS:LKNYQ:TVE:SXAXR, HVTKPTX:APT:SAIS:LKNYQ:VVR:SXGXH, YVPKPXX:APT:SAIS:LKNYQ:VVR:SXGXH, TVPKPXX:APT:SAIS:LKNYQ:VVR:AXGXH, AVPKAXX:APT:SAIS:LKNYQ:VVK:AXGXH, KVGKAXX:VPT:SAIS:LKNYQ:VAE:XGXR, KASKAXX:VPT:SAIS:LKNYQ:AVS:EXGXR, GSAGPXX:TPT:SAIS:LKNYQ:VVD:RXGXS, AAPASXX:VPA:SAIS:LKNYQ:VVE:AXGXR, HVPKPXX:APT:SAIS:LKNYQ:VVR:SXGXH, RVPSTXX:APV:SAIS:LKNYQ:VEE:XGXL, ASAAPXX:VPQ:SAIS:LKNYQ:VRS:XKXS, ASASPXX:VSQ:SAIS:LKNYQ:VKS:XKXS, ASASPXX:VPQ:SAIS:LKNYQ:VKS:XKXS, NDEGLEX:VPT:SAIS:LKNYQ:QHN:KXEXR, NDEGLEX:VPT:SAIS:LKNYQ:EHS:QXEXR, SSVKXQP:SRV:SAIS:LKNYQ:EEH:LEXAXA, RNVQXRP:TQV:SAIS:LKNYQ:EDH:LAXKXE, KIPKAXX:VPE:SSLS:LKVYP:TVE:GXGXR, SIPKAXX:VPE:SSLS:LKVYP:TVE:GXGXR, HVTKPTX:VPE:SSLS:LKVYP:TVE:SXGXH, YVPKPXX:VPE:SSLS:LKVYP:TVE:SXGXH, TVPKPXX:VPE:SSLS:LKVYP:TVE:AXGXH, AVPKAXX:VPE:SSLS:LKVYP:TVE:AXGXH, KVGKAXX:VPE:SSLS:LKVYP:TVE:XGXR, KASKAXX:VPE:SSLS:LKVYP:TVE:EXGXR, GSAGPXX:VPE:SSLS:LKVYP:TVE:RXGXS, AAPASXX:VPE:SSLS:LKVYP:TVE:AXGXR, STPPTXX:VPE:SSLS:LKVYP:TVE:SXGXR, HVPKPXX:VPE:SSLS:LKVYP:TVE:SXGXH, RVPSTXX:VPE:SSLS:LKVYP:TVE:XGXL, ASAAPXX:VPE:SSLS:LKVYP:TVE:XKXS, ASASPXX:VPE:SSLS:LKVYP:TVE:XKXS, NDEGLEX:VPE:SSLS:LKVYP:TVE:KXEXR, NDEGLEX:VPE:SSLS:LKVYP:TVE:QXEXR, SSVKXQP:VPE:SSLS:LKVYP:TVE:LEXAXA, RNVQXRP:VPE:SSLS:LKVYP:TVE:LAXKXE, KIPKAXX:VPT:SSLS:LKVYP:VVE:GXGXR, SIPKAXX:VPT:SSLS:LKVYP:VVE:GXGXR, HVTKPTX:APT:SSLS:LKVYP:VVR:SXGXH, YVPKPXX:APT:SSLS:LKVYP:VVR:SXGXH, TVPKPXX:APT:SSLS:LKVYP:VVR:AXGXH, AVPKAXX:APT:SSLS:LKVYP:VVK:AXGXH, KVGKAXX:VPT:SSLS:LKVYP:VAE:XGXR, KASKAXX:VPT:SSLS:LKVYP:AVS:EXGXR, GSAGPXX:TPT:SSLS:LKVYP:VVD:RXGXS, AAPASXX:VPA:SSLS:LKVYP:VVE:AXGXR, STPPTXX:VPT:SSLS:LKVYP:VVE:SXGXR, HVPKPXX:APT:SSLS:LKVYP:VVR:SXGXH, RVPSTXX:APV:SSLS:LKVYP:VEE:XGXL, ASAAPXX:VPQ:SSLS:LKVYP:VRS:XKXS, ASASPXX:VSQ:SSLS:LKVYP:VKS:XKXS, ASASPXX:VPQ:SSLS:LKVYP:VKS:XKXS, NDEGLEX:VPT:SSLS:LKVYP:QHN:KXEXR, NDEGLEX:VPT:SSLS:LKVYP:EHS:QXEXR, SSVKXQP:SRV:SSLS:LKVYP:EEH:LEXAXA, RNVQXRP:TQV:SSLS:LKVYP:EDH:LAXKXE, KIPKAXX:VPT:SAIS:LKNYQ:VVE:GXGXR, KIPKAXX:APT:NAIS:LKKYR:VVR:GXGXR, GIPEPXX:APT:NAIS:LKKYR:VVR:SXAXR, SIPKAXX:APT:NAIS:LKKYR:VVR:GXGXR, YVPKPXX:APT:NAIS:LKKYR:VVR:SXGXH, TVPKPXX:APT:NAIS:LKKYR:VVR:AXGXH, AVPKAXX:APT:NAIS:LKKYR:VVR:AXGXH, KVGKAXX:APT:NAIS:LKKYR:VVR:XGXR, KASKAXX:APT:NAIS:LKKYR:VVR:EXGXR, GSAGPXX:APT:NAIS:LKKYR:VVR:RXGXS, AAPASXX:APT:NAIS:LKKYR:VVR:AXGXR, STPPTXX:APT:NAIS:LKKYR:VVR:SXGXR, HVPKPXX:APT:NAIS:LKKYR:VVR:SXGXH, RVPSTXX:APT:NAIS:LKKYR:VVR:XGXL, ASAAPXX:APT:NAIS:LKKYR:VVR:XKXS, ASASPXX:APT:NAIS:LKKYR:VVR:XKXS, NDEGLEX:APT:NAIS:LKKYR:VVR:KXEXR, NDEGLEX:APT:NAIS:LKKYR:VVR:QXEXR, SSVKXQP:APT:NAIS:LKKYR:VVR:LEXAXA, RNVQXRP:APT:NAIS:LKKYR:VVR:LAXKXE, KIPKAXX:VPT:NAIS:LKKYR:VVE:GXGXR, GIPEPXX:VPE:NAIS:LKKYR:TVE:SXAXR, SIPKAXX:VPT:NAIS:LKKYR:VVE:GXGXR, AVPKAXX:APT:NAIS:LKKYR:VVK:AXGXH, KVGKAXX:VPT:NAIS:LKKYR:VAE:XGXR, KASKAXX:VPT:NAIS:LKKYR:AVS:EXGXR, GSAGPXX:TPT:NAIS:LKKYR:VVD:RXGXS, AAPASXX:VPA:NAIS:LKKYR:VVE:AXGXR, STPPTXX:VPT:NAIS:LKKYR:VVE:SXGXR, RVPSTXX:APV:NAIS:LKKYR:VEE:XGXL, ASAAPXX:VPQ:NAIS:LKKYR:VRS:XKXS, ASASPXX:VSQ:NAIS:LKKYR:VKS:XKXS, ASASPXX:VPQ:NAIS:LKKYR:VKS:XKXS, NDEGLEX:VPT:NAIS:LKKYR:QHN:KXEXR, NDEGLEX:VPT:NAIS:LKKYR:EHS:QXEXR, SSVKXQP:SRV:NAIS:LKKYR:EEH:LEXAXA, RNVQXR P:TQV:NAIS:LKKYR:EDH:LAXKXE, HVTKPTX:APT:NAIS:LKKYR:VVR:SXGXH, KIPKAXX:APT:SATS:LRKHR:VVK:GXGXR, GIPEPXX:APT:SATS:LRKHR:VVK:SXAXR, SIPKAXX:APT:SATS:LRKHR:VVK:GXGXR, HVTKPTX:APT:SATS:LRKHR:VVK:SXGXH, YVPKPXX:APT:SATS:LRKHR:VVK:SXGXH, TVPKPXX:APT:SATS:LRKHR:VVK:AXGXH, KVGKAXX:APT:SATS:LRKHR:VVK:XGXR, KASKAXX:APT:SATS:LRKHR:VVK:EXGXR, GSAGPXX:APT:SATS:LRKHR:VVK:RXGXS, AAPASXX:APT:SATS:LRKHR:VVK:AXGXR, STPPTXX:APT:SATS:LRKHR:VVK:SXGXR, HVPKPXX:APT:SATS:LRKHR:VVK:SXGXH, RVPSTXX:APT:SATS:LRKHR:VVK:XGXL, ASAAPXX:APT:SATS:LRKHR:VVK:XKXS, ASASPXX:APT:SATS:LRKHR:VVK:XKXS, NDEGLEX:APT:SATS:LRKHR:VVK:KXEXR, NDEGLEX:APT:SATS:LRKHR:VVK:QXEXR, SSVKXQP:APT:SATS:LRKHR:VVK:LEXAXA, RNVQXRP:APT:SATS:LRKHR:VVK:LAXKXE, KIPKAXX:VPT:SATS:LRKHR:VVE:GXGXR, GIPEPXX:VPE:SATS:LRKHR:TVE:SXAXR, SIPKAXX:VPT:SATS:LRKHR:VVE:GXGXR, HVTKPTX:APT:SATS:LRKHR:VVR:SXGXH, YVPKPXX:APT:SATS:LRKHR:VVR:SXGXH, TVPKPXX:APT:SATS:LRKHR:VVR:AXGXH, KVGKAXX:VPT:SATS:LRKHR:VAE:XGXR, KASKAXX:VPT:SATS:LRKHR:AVS:EXGXR, GSAGPXX:TPT:SATS:LRKHR:VVD:RXGXS, AAPASXX:VPA:SATS:LRKHR:VVE:AXGXR, STPPTXX:VPT:SATS:LRKHR:VVE:SXGXR, HVPKPXX:APT:SATS:LRKHR:VVR:SXGXH, RVPSTXX:APV:SATS:LRKHR:VEE:XGXL, ASAAPXX:VPQ:SATS:LRKHR:VRS:XKXS, ASASPXX:VSQ:SATS:LRKHR:VKS:XKXS, ASASPXX:VPQ:SATS:LRKHR:VKS:XKXS, NDEGLEX:VPT:SATS:LRKHR:QHN:KXEXR, NDEGLEX:VPT:SATS:LRKHR:EHS:QXEXR, SSVKXQP:SRV:SATS:LRKHR:EEH:LEXAXA, RNVQXRP:TQV:SATS:LRKHR:EDH:LAXKXE, KIPKAXX:VPT:SPIS:LKYHY:VAE:GXGXR, GIPEPXX:VPT:SPIS:LKYHY:VAE:SXAXR, SIPKAXX:VPT:SPIS:LKYHY:VAE:GXGXR, HVTKPTX:VPT:SPIS:LKYHY:VAE:SXGXH, YVPKPXX:VPT:SPIS:LKYHY:VAE:SXGXH, TVPKPXX:VPT:SPIS:LKYHY:VAE:AXGXH, AVPKAXX:VPT:SPIS:LKYHY:VAE:AXGXH, KASKAXX:VPT:SPIS:LKYHY:VAE:EXGXR, GSAGPXX:VPT:SPIS:LKYHY:VAE:RXGXS, AAPASXX:VPT:SPIS:LKYHY:VAE:AXGXR, STPPTXX:VPT:SPIS:LKYHY:VAE:SXGXR, HVPKPXX:VPT:SPIS:LKYHY:VAE:SXGXH, RVPSTXX:VPT:SPIS:LKYHY:VAE:XGXL, ASAAPXX:VPT:SPIS:LKYHY:VAE:XKXS, ASASPXX:VPT:SPIS:LKYHY:VAE:XKXS, NDEGLEX:VPT:SPIS:LKYHY:VAE:KXEXR, NDEGLEX:VPT:SPIS:LKYHY:VAE:QXEXR, SSVKXQP:VPT:SPIS:LKYHY:VAE:LEXAXA, RNVQXRP:VPT:SPIS:LKYHY:VAE:LAXKXE, KIPKAXX:VPT:SPIS:LKYHY:VVE:GXGXR, GIPEPXX:VPE:SPIS:LKYHY:TVE:SXAXR, SIPKAXX:VPT:SPIS:LKYHY:VVE:GXGXR, HVTKPTX:APT:SPIS:LKYHY:VVR:SXGXH, YVPKPXX:APT:SPIS:LKYHY:VVR:SXGXH, TVPKPXX:APT:SPIS:LKYHY:VVR:AXGXH, AVPKAXX:APT:SPIS:LKYHY:VVK:AXGXH, KASKAXX:VPT:SPIS:LKYHY:AVS:EXGXR, GSAGPXX:TPT:SPIS:LKYHY:VVD:RXGXS, AAPASXX:VPA:SPIS:LKYHY:VVE:AXGXR, STPPTXX:VPT:SPIS:LKYHY:VVE:SXGXR, HVPKPXX:APT:SPIS:LKYHY:VVR:SXGXH, RVPSTXX:APV:SPIS:LKYHY:VEE:XGXL, ASAAPXX:VPQ:SPIS:LKYHY:VRS:XKXS, ASASPXX:VSQ:SPIS:LKYHY:VKS:XKXS, ASASPXX:VPQ:SPIS:LKYHY:VKS:XKXS, NDEGLEX:VPT:SPIS:LKYHY:QHN:KXEXR, NDEGLEX:VPT:SPIS:LKYHY:EHS:QXEXR, SSVKXQP:SRV:SPIS:LKYHY:EEH:LEXAXA, RNVQXRP:TQV:SPIS:LKYHY:EDH:LAXKXE, KIPKAXX:VPT:EPIS:KFKYE:AVS:GXGXR, GIPEPXX:VPT:EPIS:KFKYE:AVS:SXAXR, SIPKAXX:VPT:EPIS:KFKYE:AVS:GXGXR, HVTKPTX:VPT:EPIS:KFKYE:AVS:SXGXH, YVPKPXX:VPT:EPIS:KFKYE:AVS:SXGXH, TVPKPXX:VPT:EPIS:KFKYE:AVS:AXGXH, AVPKAXX:VPT:EPIS:KFKYE:AVS:AXGXH, KVGKAXX:VPT:EPIS:KFKYE:AVS:XGXR, GSAGPXX:VPT:EPIS:KFKYE:AVS:RXGXS, AAPASXX:VPT:EPIS:KFKYE:AVS:AXGXR, STPPTXX:VPT:EPIS:KFKYE:AVS:SXGXR, HVPKPXX:VPT:EPIS:KFKYE:AVS:SXGXH, RVPSTXX:VPT:EPIS:KFKYE:AVS:XGXL, ASAAPXX:VPT:EPIS:KFKYE:AVS:XKXS, ASASPXX:VPT:EPIS:KFKYE:AVS:XKXS, NDEGLEX:VPT:EPIS:KFKYE:AVS:KXEXR, NDEGLEX:VPT:EPIS:KFKYE:AVS:QXEXR, SSVKXQP:VPT:EPIS:KFKYE:AVS:LEXAXA, RNVQXRP:VPT:EPIS:KFKYE:AVS:LAXKXE, KIPKAXX:VPT:EPIS:KFKYE:VVE:GXGXR, GIPEPXX:VPE:EPIS:KFKYE:TVE:SXAXR, SIPKAXX:VPT:EPIS:KFKYE:VVE:GXGXR, HVTKPTX:APT:EPIS:KFKYE:VVR:SXGXH, YVPKPXX:APT:EPIS:KFKYE:VVR:SXGXH, TVPKPXX:APT:EPIS:KFKYE:VVR:AXGXH, AVPKAXX:APT:EPIS:KFKYE:VVK:AXGXH, KVGKAXX:VPT:EPIS:KFKYE:VAE:XGXR, GSAGPXX:TPT:EPIS:KFKYE:VVD:RXGXS, AAPASXX:VPA:EPIS:KFKYE:VVE:AXGXR, STPPTXX:VPT:EPIS:KFKYE:VVE:SXGXR, HVPKPXX:APT:EPIS:KFKYE:VVR:SXGXH, RVPSTXX:APV:EPIS:KFKYE:VEE:XGXL, ASAAPXX:VPQ:EPIS:KFKYE:VRS:XKXS, ASASPXX:VSQ:EPIS:KFKYE:VKS:XKXS, ASASPXX:VPQ:EPIS:KFKYE:VKS:XKXS, NDEGLEX:VPT:EPIS:KFKYE:QHN:KXEXR, NDEGLEX:VPT:EPIS:KFKYE:EHS:QXEXR, SSVKXQP:SRV:EPIS:KFKYE:EEH:LEXAXA, RNVQXRP:TQV:EPIS:KFKYE:EDH:LAXKXE, KIPKAXX:TPT:SPIN:YGKIP:VVD:GXGXR, GIPEPXX:TPT:SPIN:YGKIP:VVD:SXAXR, SIPKAXX:TPT:SPIN:YGKIP:VVD:GXGXR, HVTKPTX:TPT:SPIN:YGKIP:VVD:SXGXH, YVPKPXX:TPT:SPIN:YGKIP:VVD:SXGXH, TVPKPXX:TPT:SPIN:YGKIP:VVD:AXGXH, AVPKAXX:TPT:SPIN:YGKIP:VVD:AXGXH, KVGKAXX:TPT:SPIN:YGKIP:VVD:XGXR, KASKAXX:TPT:SPIN:YGKIP:VVD:EXGXR, AAPASXX:TPT:SPIN:YGKIP:VVD:AXGXR, STPPTXX:TPT:SPIN:YGKIP:VVD:SXGXR, HVPKPXX:TPT:SPIN:YGKIP:VVD:SXGXH, RVPSTXX:TPT:SPIN:YGKIP:VVD:XGXL, ASAAPXX:TPT:SPIN:YGKIP:VVD:XKXS, ASASPXX:TPT:SPIN:YGKIP:VVD:XKXS, NDEGLEX:TPT:SPIN:YGKIP:VVD:KXEXR, NDEGLEX:TPT:SPIN:YGKIP:VVD:QXEXR, SSVKXQP:TPT:SPIN:YGKIP:VVD:LEXAXA, RNVQXRP:TPT:SPIN:YGKIP:VVD:LAXKXE, KIPKAXX:VPT:SPIN:YGKIP:VVE:GXGXR, GIPEPXX:VPE:SPIN:YGKIP:TVE:SXAXR, SIPKAXX:VPT:SPIN:YGKIP:VVE:GXGXR, HVTKPTX:APT:SPIN:YGKIP:VVR:SXGXH, YVPKPXX:APT:SPIN:YGKIP:VVR:SXGXH, TVPKPXX:APT:SPIN:YGKIP:VVR:AXGXH, AVPKAXX:APT:SPIN:YGKIP:VVK:AXGXH, KVGKAXX:VPT:SPIN:YGKIP:VAE:XGXR, KASKAXX:VPT:SPIN:YGKIP:AVS:EXGXR, AAPASXX:VPA:SPIN:YGKIP:VVE:AXGXR, STPPTXX:VPT:SPIN:YGKIP:VVE:SXGXR, HVPKPXX:APT:SPIN:YGKIP:VVR:SXGXH, RVPSTXX:APV:SPIN:YGKIP:VEE:XGXL, ASAAPXX:VPQ:SPIN:YGKIP:VRS:XKXS, ASASPXX:VSQ:SPIN:YGKIP:VKS:XKXS, ASASPXX:VPQ:SPIN:YGKIP:VKS:XKXS, NDEGLEX:VPT:SPIN:YGKIP:QHN:KXEXR, NDEGLEX:VPT:SPIN:YGKIP:EHS:QXEXR, SSVKXQP:SRV:SPIN:YGKIP:EEH:LEXAXA, RNVQXRP:TQV:SPIN:YGKIP:EDH:LAXKXE, KIPKAXX:VPA:SPIS:YKQYE:VVE:GXGXR, GIPEPXX:VPA:SPIS:YKQYE:VVE:SXAXR, SIPKAXX:VPA:SPIS:YKQYE:VVE:GXGXR, HVTKPTX:VPA:SPIS:YKQYE:VVE:SXGXH, YVPKPXX:VPA:SPIS:YKQYE:VVE:SXGXH, TVPKPXX:VPA:SPIS:YKQYE:VVE:AXGXH, AVPKAXX:VPA:SPIS:YKQYE:VVE:AXGXH, KVGKAXX:VPA:SPIS:YKQYE:VVE:XGXR, KASKAXX:VPA:SPIS:YKQYE:VVE:EXGXR, GSAGPXX:VPA:SPIS:YKQYE:VVE:RXGXS, STPPTXX:VPA:SPIS:YKQYE:VVE:SXGXR, HVPKPXX:VPA:SPIS:YKQYE:VVE:SXGXH, RVPSTXX:VPA:SPIS:YKQYE:VVE:XGXL, ASAAPXX:VPA:SPIS:YKQYE:VVE:XKXS, ASASPXX:VPA:SPIS:YKQYE:VVE:XKXS, NDEGLEX:VPA:SPIS:YKQYE:VVE:KXEXR, NDEGLEX:VPA:SPIS:YKQYE:VVE:QXEXR, SSVKXQP:VPA:SPIS:YKQYE:VVE:LEXAXA, RNVQXRP:VPA:SPIS:YKQYE:VVE:LAXKXE, KIPKAXX:VPT:SPIS:YKQYE:VVE:GXGXR, GIPEPXX:VPE:SPIS:YKQYE:TVE:SXAXR, SIPKAXX:VPT:SPIS:YKQYE:VVE:GXGXR, HVTKPTX:APT:SPIS:YKQYE:VVR:SXGXH, YVPKPXX:APT:SPIS:YKQYE:VVR:SXGXH, TVPKPXX:APT:SPIS:YKQYE:VVR:AXGXH, AVPKAXX:APT:SPIS:YKQYE:VVK:AXGXH, KVGKAXX:VPT:SPIS:YKQYE:VAE:XGXR, KASKAXX:VPT:SPIS:YKQYE:AVS:EXGXR, GSAGPXX:TPT:SPIS:YKQYE:VVD:RXGXS, STPPTXX:VPT:SPIS:YKQYE:VVE:SXGXR, HVPKPXX:APT:SPIS:YKQYE:VVR:SXGXH, RVPSTXX:APV:SPIS:YKQYE:VEE:XGXL, ASAAPXX:VPQ:SPIS:YKQYE:VRS:XKXS, ASASPXX:VSQ:SPIS:YKQYE:VKS:XKXS, ASASPXX:VPQ:SPIS:YKQYE:VKS:XKXS, NDEGLEX:VPT:SPIS:YKQYE:QHN:KXEXR, NDEGLEX:VPT:SPIS:YKQYE:EHS:QXEXR, SSVKXQP:SRV:SPIS:YKQYE:EEH:LEXAXA, RNVQXRP:TQV:SPIS:YKQYE:EDH:LAXKXE, GIPEPXX:VPT:SPIS:YKQYE:VVE:SXAXR, HVTKPTX:VPT:SPIS:YKQYE:VVE:SXGXH, YVPKPXX:VPT:SPIS:YKQYE:VVE:SXGXH, TVPKPXX:VPT:SPIS:YKQYE:VVE:AXGXH, AVPKAXX:VPT:SPIS:YKQYE:VVE:AXGXH, KVGKAXX:VPT:SPIS:YKQYE:VVE:XGXR, KASKAXX:VPT:SPIS:YKQYE:VVE:EXGXR, GSAGPXX:VPT:SPIS:YKQYE:VVE:RXGXS, AAPASXX:VPT:SPIS:YKQYE:VVE:AXGXR, HVPKPXX:VPT:SPIS:YKQYE:VVE:SXGXH, RVPSTXX:VPT:SPIS:YKQYE:VVE:XGXL, ASAAPXX:VPT:SPIS:YKQYE:VVE:XKXS, ASASPXX:VPT:SPIS:YKQYE:VVE:XKXS, NDEGLEX:VPT:SPIS:YKQYE:VVE:KXEXR, NDEGLEX:VPT:SPIS:YKQYE:VVE:QXEXR, SSVKXQP:VPT:SPIS:YKQYE:VVE:LEXAXA, RNVQXRP:VPT:SPIS:YKQYE:VVE:LAXKXE, AAPASXX:VPA:SPIS:YKQYE:VVE:AXGXR, KIPKAXX:APV:KPLS:DHHKD:VEE:GXGXR, GIPEPXX:APV:KPLS:DHHKD:VEE:SXAXR, SIPKAXX:APV:KPLS:DHHKD:VEE:GXGXR, HVTKPTX:APV:KPLS:DHHKD:VEE:SXGXH, YVPKPXX:APV:KPLS:DHHKD:VEE:SXGXH, TVPKPXX:APV:KPLS:DHHKD:VEE:AXGXH, AVPKAXX:APV:KPLS:DHHKD:VEE:AXGXH, KVGKAXX:APV:KPLS:DHHKD:VEE:XGXR, KASKAXX:APV:KPLS:DHHKD:VEE:EXGXR, GSAGPXX:APV:KPLS:DHHKD:VEE:RXGXS, AAPASXX:APV:KPLS:DHHKD:VEE:AXGXR, STPPTXX:APV:KPLS:DHHKD:VEE:SXGXR, HVPKPXX:APV:KPLS:DHHKD:VEE:SXGXH, ASAAPXX:APV:KPLS:DHHKD:VEE:XKXS, ASASPXX:APV:KPLS:DHHKD:VEE:XKXS, NDEGLEX:APV:KPLS:DHHKD:VEE:KXEXR, NDEGLEX:APV:KPLS:DHHKD:VEE:QXEXR, SSVKXQP:APV:KPLS:DHHKD:VEE:LEXAXA, RNVQXRP:APV:KPLS:DHHKD:VEE:LAXKXE, KIPKAXX:VPT:KPLS:DHHKD:VVE:GXGXR, GIPEPXX:VPE:KPLS:DHHKD:TVE:SXAXR, SIPKAXX:VPT:KPLS:DHHKD:VVE:GXGXR, HVTKPTX:APT:KPLS:DHHKD:VVR:SXGXH, YVPKPXX:APT:KPLS:DHHKD:VVR:SXGXH, TVPKPXX:APT:KPLS:DHHKD:VVR:AXGXH, AVPKAXX:APT:KPLS:DHHKD:VVK:AXGXH, KVGKAXX:VPT:KPLS:DHHKD:VAE:XGXR, KASKAXX:VPT:KPLS:DHHKD:AVS:EXGXR, GSAGPXX:TPT:KPLS:DHHKD:VVD:RXGXS, AAPASXX:VPA:KPLS:DHHKD:VVE:AXGXR, STPPTXX:VPT:KPLS:DHHKD:VVE:SXGXR, HVPKPXX:APT:KPLS:DHHKD:VVR:SXGXH, ASAAPXX:VPQ:KPLS:DHHKD:VRS:XKXS, ASASPXX:VSQ:KPLS:DHHKD:VKS:XKXS, ASASPXX:VPQ:KPLS:DHHKD:VKS:XKXS, NDEGLEX:VPT:KPLS:DHHKD:QHN:KXEXR, NDEGLEX:VPT:KPLS:DHHKD:EHS:QXEXR, SSVKXQP:SRV:KPLS:DHHKD:EEH:LEXAXA, RNVQXRP:TQV:KPLS:DHHKD:EDH:LAXKXE, KIPKAXX:VPQ:EPLP:EQLSN:VRS:GXGXR, GIPEPXX:VPQ:EPLP:EQLSN:VRS:SXAXR, SIPKAXX:VPQ:EPLP:EQLSN:VRS:GXGXR, HVTKPTX:VPQ:EPLP:EQLSN:VRS:SXGXH, YVPKPXX:VPQ:EPLP:EQLSN:VRS:SXGXH, TVPKPXX:VPQ:EPLP:EQLSN:VRS:AXGXH, AVPKAXX:VPQ:EPLP:EQLSN:VRS:AXGXH, KVGKAXX:VPQ:EPLP:EQLSN:VRS:XGXR, KASKAXX:VPQ:EPLP:EQLSN:VRS:EXGXR, GSAGPXX:VPQ:EPLP:EQLSN:VRS:RXGXS, AAPASXX:VPQ:EPLP:EQLSN:VRS:AXGXR, STPPTXX:VPQ:EPLP:EQLSN:VRS:SXGXR, HVPKPXX:VPQ:EPLP:EQLSN:VRS:SXGXH, RVPSTXX:VPQ:EPLP:EQLSN:VRS:XGXL, ASASPXX:VPQ:EPLP:EQLSN:VRS:XKXS, NDEGLEX:VPQ:EPLP:EQLSN:VRS:KXEXR, NDEGLEX:VPQ:EPLP:EQLSN:VRS:QXEXR, SSVKXQP:VPQ:EPLP:EQLSN:VRS:LEXAXA, RNVQXRP:VPQ:EPLP:EQLSN:VRS:LAXKXE, KIPKAXX:VPT:EPLP:EQLSN:VVE:GXGXR, GIPEPXX:VPE:EPLP:EQLSN:TVE:SXAXR, SIPKAXX:VPT:EPLP:EQLSN:VVE:GXGXR, HVTKPTX:APT:EPLP:EQLSN:VVR:SXGXH, YVPKPXX:APT:EPLP:EQLSN:VVR:SXGXH, TVPKPXX:APT:EPLP:EQLSN:VVR:AXGXH, AVPKAXX:APT:EPLP:EQLSN:VVK:AXGXH, KVGKAXX:VPT:EPLP:EQLSN:VAE:XGXR, KASKAXX:VPT:EPLP:EQLSN:AVS:EXGXR, GSAGPXX:TPT:EPLP:EQLSN:VVD:RXGXS, AAPASXX:VPA:EPLP:EQLSN:VVE:AXGXR, STPPTXX:VPT:EPLP:EQLSN:VVE:SXGXR, HVPKPXX:APT:EPLP:EQLSN:VVR:SXGXH, RVPSTXX:APV:EPLP:EQLSN:VEE:XGXL, ASASPXX:VSQ:EPLP:EQLSN:VKS:XKXS, ASASPXX:VPQ:EPLP:EQLSN:VKS:XKXS, NDEGLEX:VPT:EPLP:EQLSN:QHN:KXEXR, NDEGLEX:VPT:EPLP:EQLSN:EHS:QXEXR, SSVKXQP:SRV:EPLP:EQLSN:EEH:LEXAXA, RNVQXRP:TQV:EPLP:EQLSN:EDH:LAXKXE, KIPKAXX:VSQ:EPLT:EQLSN:VKS:GXGXR, GIPEPXX:VSQ:EPLT:EQLSN:VKS:SXAXR, SIPKAXX:VSQ:EPLT:EQLSN:VKS:GXGXR, HVTKPTX:VSQ:EPLT:EQLSN:VKS:SXGXH, YVPKPXX:VSQ:EPLT:EQLSN:VKS:SXGXH, TVPKPXX:VSQ:EPLT:EQLSN:VKS:AXGXH, AVPKAXX:VSQ:EPLT:EQLSN:VKS:AXGXH, KVGKAXX:VSQ:EPLT:EQLSN:VKS:XGXR, KASKAXX:VSQ:EPLT:EQLSN:VKS:EXGXR, GSAGPXX:VSQ:EPLT:EQLSN:VKS:RXGXS, AAPASXX:VSQ:EPLT:EQLSN:VKS:AXGXR, STPPTXX:VSQ:EPLT:EQLSN:VKS:SXGXR, HVPKPXX:VSQ:EPLT:EQLSN:VKS:SXGXH, RVPSTXX:VSQ:EPLT:EQLSN:VKS:XGXL, ASAAPXX:VSQ:EPLT:EQLSN:VKS:XKXS, ASASPXX:VSQ:EPLT:EQLSN:VKS:XKXS, NDEGLEX:VSQ:EPLT:EQLSN:VKS:KXEXR, NDEGLEX:VSQ:EPLT:EQLSN:VKS:QXEXR, SSVKXQP:VSQ:EPLT:EQLSN:VKS:LEXAXA, RNVQXRP:VSQ:EPLT:EQLSN:VKS:LAXKXE, KIPKAXX:VPT:EPLT:EQLSN:VVE:GXGXR, GIPEPXX:VPE:EPLT:EQLSN:TVE:SXAXR, SIPKAXX:VPT:EPLT:EQLSN:VVE:GXGXR, HVTKPTX:APT:EPLT:EQLSN:VVR:SXGXH, YVPKPXX:APT:EPLT:EQLSN:VVR:SXGXH, TVPKPXX:APT:EPLT:EQLSN:VVR:AXGXH, AVPKAXX:APT:EPLT:EQLSN:VVK:AXGXH, KVGKAXX:VPT:EPLT:EQLSN:VAE:XGXR, KASKAXX:VPT:EPLT:EQLSN:AVS:EXGXR, GSAGPXX:TPT:EPLT:EQLSN:VVD:RXGXS, AAPASXX:VPA:EPLT:EQLSN:VVE:AXGXR, STPPTXX:VPT:EPLT:EQLSN:VVE:SXGXR, HVPKPXX:APT:EPLT:EQLSN:VVR:SXGXH, RVPSTXX:APV:EPLT:EQLSN:VEE:XGXL, ASAAPXX:VPQ:EPLT:EQLSN:VRS:XKXS, ASASPXX:VPQ:EPLT:EQLSN:VKS:XKXS, NDEGLEX:VPT:EPLT:EQLSN:QHN:KXEXR, NDEGLEX:VPT:EPLT:EQLSN:EHS:QXEXR, SSVKXQP:SRV:EPLT:EQLSN:EEH:LEXAXA, RNVQXRP:TQV:EPLT:EQLSN:EDH:LAXKXE, KIPKAXX:VPQ:EPLT:EQLSN:VKS:GXGXR, GIPEPXX:VPQ:EPLT:EQLSN:VKS:SXAXR, SIPKAXX:VPQ:EPLT:EQLSN:VKS:GXGXR, HVTKPTX:VPQ:EPLT:EQLSN:VKS:SXGXH, YVPKPXX:VPQ:EPLT:EQLSN:VKS:SXGXH, TVPKPXX:VPQ:EPLT:EQLSN:VKS:AXGXH, AVPKAXX:VPQ:EPLT:EQLSN:VKS:AXGXH, KVGKAXX:VPQ:EPLT:EQLSN:VKS:XGXR, KASKAXX:VPQ:EPLT:EQLSN:VKS:EXGXR, GSAGPXX:VPQ:EPLT:EQLSN:VKS:RXGXS, AAPASXX:VPQ:EPLT:EQLSN:VKS:AXGXR, STPPTXX:VPQ:EPLT:EQLSN:VKS:SXGXR, HVPKPXX:VPQ:EPLT:EQLSN:VKS:SXGXH, RVPSTXX:VPQ:EPLT:EQLSN:VKS:XGXL, ASAAPXX:VPQ:EPLT:EQLSN:VKS:XKXS, NDEGLEX:VPQ:EPLT:EQLSN:VKS:KXEXR, NDEGLEX:VPQ:EPLT:EQLSN:VKS:QXEXR, SSVKXQP:VPQ:EPLT:EQLSN:VKS:LEXAXA, RNVQXRP:VPQ:EPLT:EQLSN:VKS:LAXKXE, KIPKAXX:VPT:SNIT:IGEMS:QHN:GXGXR, GIPEPXX:VPT:SNIT:IGEMS:QHN:SXAXR, SIPKAXX:VPT:SNIT:IGEMS:QHN:GXGXR, HVTKPTX:VPT:SNIT:IGEMS:QHN:SXGXH, YVPKPXX:VPT:SNIT:IGEMS:QHN:SXGXH, TVPKPXX:VPT:SNIT:IGEMS:QHN:AXGXH, AVPKAXX:VPT:SNIT:IGEMS:QHN:AXGXH, KVGKAXX:VPT:SNIT:IGEMS:QHN:XGXR, KASKAXX:VPT:SNIT:IGEMS:QHN:EXGXR, GSAGPXX:VPT:SNIT:IGEMS:QHN:RXGXS, AAPASXX:VPT:SNIT:IGEMS:QHN:AXGXR, STPPTXX:VPT:SNIT:IGEMS:QHN:SXGXR, HVPKPXX:VPT:SNIT:IGEMS:QHN:SXGXH, RVPSTXX:VPT:SNIT:IGEMS:QHN:XGXL, ASAAPXX:VPT:SNIT:IGEMS:QHN:XKXS, ASASPXX:VPT:SNIT:IGEMS:QHN:XKXS, NDEGLEX:VPT:SNIT:IGEMS:QHN:QXEXR, NDEGLEX:VPT:SNIT:IGEMS:QHN:KXEXR, SSVKXQP:VPT:SNIT:IGEMS:QHN:LEXAXA, RNVQXRP:VPT:SNIT:IGEMS:QHN:LAXKXE, KIPKAXX:VPT:SNIT:IGEMS:VVE:GXGXR, GIPEPXX:VPE:SNIT:IGEMS:TVE:SXAXR, SIPKAXX:VPT:SNIT:IGEMS:VVE:GXGXR, HVTKPTX:APT:SNIT:IGEMS:VVR:SXGXH, YVPKPXX:APT:SNIT:IGEMS:VVR:SXGXH, TVPKPXX:APT:SNIT:IGEMS:VVR:AXGXH, AVPKAXX:APT:SNIT:IGEMS:VVK:AXGXH, KVGKAXX:VPT:SNIT:IGEMS:VAE:XGXR, KASKAXX:VPT:SNIT:IGEMS:AVS:EXGXR, GSAGPXX:TPT:SNIT:IGEMS:VVD:RXGXS, AAPASXX:VPA:SNIT:IGEMS:VVE:AXGXR, STPPTXX:VPT:SNIT:IGEMS:VVE:SXGXR, HVPKPXX:APT:SNIT:IGEMS:VVR:SXGXH, RVPSTXX:APV:SNIT:IGEMS:VEE:XGXL, ASAAPXX:VPQ:SNIT:IGEMS:VRS:XKXS, ASASPXX:VSQ:SNIT:IGEMS:VKS:XKXS, ASASPXX:VPQ:SNIT:IGEMS:VKS:XKXS, NDEGLEX:VPT:SNIT:IGEMS:EHS:QXEXR, SSVKXQP:SRV:SNIT:IGEMS:EEH:LEXAXA, RNVQXRP:TQV:SNIT:IGEMS:EDH:LAXKXE, KIPKAXX:VPT:SNIT:LGEMS:EHS:GXGXR, GIPEPXX:VPT:SNIT:LGEMS:EHS:SXAXR, SIPKAXX:VPT:SNIT:LGEMS:EHS:GXGXR, HVTKPTX:VPT:SNIT:LGEMS:EHS:SXGXH, YVPKPXX:VPT:SNIT:LGEMS:EHS:SXGXH, TVPKPXX:VPT:SNIT:LGEMS:EHS:AXGXH, AVPKAXX:VPT:SNIT:LGEMS:EHS:AXGXH, KVGKAXX:VPT:SNIT:LGEMS:EHS:XGXR, KASKAXX:VPT:SNIT:LGEMS:EHS:EXGXR, GSAGPXX:VPT:SNIT:LGEMS:EHS:RXGXS, AAPASXX:VPT:SNIT:LGEMS:EHS:AXGXR, STPPTXX:VPT:SNIT:LGEMS:EHS:SXGXR, HVPKPXX:VPT:SNIT:LGEMS:EHS:SXGXH, RVPSTXX:VPT:SNIT:LGEMS:EHS:XGXL, ASAAPXX:VPT:SNIT:LGEMS:EHS:XKXS, ASASPXX:VPT:SNIT:LGEMS:EHS:XKXS, NDEGLEX:VPT:SNIT:LGEMS:EHS:KXEXR, SSVKXQP:VPT:SNIT:LGEMS:EHS:LEXAXA, RNVQXRP:VPT:SNIT:LGEMS:EHS:LAXKXE, KIPKAXX:VPT:SNIT:LGEMS:VVE:GXGXR, GIPEPXX:VPE:SNIT:LGEMS:TVE:SXAXR, SIPKAXX:VPT:SNIT:LGEMS:VVE:GXGXR, HVTKPTX:APT:SNIT:LGEMS:VVR:SXGXH, YVPKPXX:APT:SNIT:LGEMS:VVR:SXGXH, TVPKPXX:APT:SNIT:LGEMS:VVR:AXGXH, AVPKAXX:APT:SNIT:LGEMS:VVK:AXGXH, KVGKAXX:VPT:SNIT:LGEMS:VAE:XGXR, KASKAXX:VPT:SNIT:LGEMS:AVS:EXGXR, GSAGPXX:TPT:SNIT:LGEMS:VVD:RXGXS, AAPASXX:VPA:SNIT:LGEMS:VVE:AXGXR, STPPTXX:VPT:SNIT:LGEMS:VVE:SXGXR, HVPKPXX:APT:SNIT:LGEMS:VVR:SXGXH, RVPSTXX:APV:SNIT:LGEMS:VEE:XGXL, ASAAPXX:VPQ:SNIT:LGEMS:VRS:XKXS, ASASPXX:VSQ:SNIT:LGEMS:VKS:XKXS, ASASPXX:VPQ:SNIT:LGEMS:VKS:XKXS, NDEGLEX:VPT:SNIT:LGEMS:QHN:KXEXR, SSVKXQP:SRV:SNIT:LGEMS:EEH:LEXAXA, RNVQXRP:TQV:SNIT:LGEMS:EDH:LAXKXE, KIPKAXX:SRV:RSVK:KEVQV:EEH:GXGXR, GIPEPXX:SRV:RSVK:KEVQV:EEH:SXAXR, SIPKAXX:SRV:RSVK:KEVQV:EEH:GXGXR, HVTKPTX:SRV:RSVK:KEVQV:EEH:SXGXH, YVPKPXX:SRV:RSVK:KEVQV:EEH:SXGXH, TVPKPXX:SRV:RSVK:KEVQV:EEH:AXGXH, AVPKAXX:SRV:RSVK:KEVQV:EEH:AXGXH, KVGKAXX:SRV:RSVK:KEVQV:EEH:XGXR, KASKAXX:SRV:RSVK:KEVQV:EEH:EXGXR, GSAGPXX:SRV:RSVK:KEVQV:EEH:RXGXS, AAPASXX:SRV:RSVK:KEVQV:EEH:AXGXR, STPPTXX:SRV:RSVK:KEVQV:EEH:SXGXR, HVPKPXX:SRV:RSVK:KEVQV:EEH:SXGXH, RVPSTXX:SRV:RSVK:KEVQV:EEH:XGXL, ASAAPXX:SRV:RSVK:KEVQV:EEH:XKXS, ASASPXX:SRV:RSVK:KEVQV:EEH:XKXS, NDEGLEX:SRV:RSVK:KEVQV:EEH:KXEXR, NDEGLEX:SRV:RSVK:KEVQV:EEH:QXEXR, RNVQXRP:SRV:RSVK:KEVQV:EEH:LAXKXE, KIPKAXX:VPT:RSVK:KEVQV:VVE:GXGXR, GIPEPXX:VPE:RSVK:KEVQV:TVE:SXAXR, SIPKAXX:VPT:RSVK:KEVQV:VVE:GXGXR, HVTKPTX:APT:RSVK:KEVQV:VVR:SXGXH, YVPKPXX:APT:RSVK:KEVQV:VVR:SXGXH, TVPKPXX:APT:RSVK:KEVQV:VVR:AXGXH, AVPKAXX:APT:RSVK:KEVQV:VVK:AXGXH, KVGKAXX:VPT:RSVK:KEVQV:VAE:XGXR, KASKAXX:VPT:RSVK:KEVQV:AVS:EXGXR, GSAGPXX:TPT:RSVK:KEVQV:VVD:RXGXS, AAPASXX:VPA:RSVK:KEVQV:VVE:AXGXR, STPPTXX:VPT:RSVK:KEVQV:VVE:SXGXR, HVPKPXX:APT:RSVK:KEVQV:VVR:SXGXH, RVPSTXX:APV:RSVK:KEVQV:VEE:XGXL, ASAAPXX:VPQ:RSVK:KEVQV:VRS:XKXS, ASASPXX:VSQ:RSVK:KEVQV:VKS:XKXS, ASASPXX:VPQ:RSVK:KEVQV:VKS:XKXS, NDEGLEX:VPT:RSVK:KEVQV:QHN:KXEXR, NDEGLEX:VPT:RSVK:KEVQV:EHS:QXEXR, RNVQXRP:TQV:RSVK:KEVQV:EDH:LAXKXE, KIPKAXX:TQV:RPVQ:KKATV:EDH:GXGXR, GIPEPXX:TQV:RPVQ:KKATV:EDH:SXAXR, SIPKAXX:TQV:RPVQ:KKATV:EDH:GXGXR, HVTKPTX:TQV:RPVQ:KKATV:EDH:SXGXH, YVPKPXX:TQV:RPVQ:KKATV:EDH:SXGXH, TVPKPXX:TQV:RPVQ:KKATV:EDH:AXGXH, AVPKAXX:TQV:RPVQ:KKATV:EDH:AXGXH, KVGKAXX:TQV:RPVQ:KKATV:EDH:XGXR, KASKAXX:TQV:RPVQ:KKATV:EDH:EXGXR, GSAGPXX:TQV:RPVQ:KKATV:EDH:RXGXS, AAPASXX:TQV:RPVQ:KKATV:EDH:AXGXR, STPPTXX:TQV:RPVQ:KKATV:EDH:SXGXR, HVPKPXX:TQV:RPVQ:KKATV:EDH:SXGXH, RVPSTXX:TQV:RPVQ:KKATV:EDH:XGXL, ASAAPXX:TQV:RPVQ:KKATV:EDH:XKXS, ASASPXX:TQV:RPVQ:KKATV:EDH:XKXS, NDEGLEX:TQV:RPVQ:KKATV:EDH:KXEXR, NDEGLEX:TQV:RPVQ:KKATV:EDH:QXEXR, SSVKXQP:TQV:RPVQ:KKATV:EDH:LEXAXA, KIPKAXX:VPT:RPVQ:KKATV:VVE:GXGXR, GIPEPXX:VPE:RPVQ:KKATV:TVE:SXAXR, SIPKAXX:VPT:RPVQ:KKATV:VVE:GXGXR, HVTKPTX:APT:RPVQ:KKATV:VVR:SXGXH, YVPKPXX:APT:RPVQ:KKATV:VVR:SXGXH, TVPKPXX:APT:RPVQ:KKATV:VVR:AXGXH, AVPKAXX:APT:RPVQ:KKATV:VVK:AXGXH, KVGKAXX:VPT:RPVQ:KKATV:VAE:XGXR, KASKAXX:VPT:RPVQ:KKATV:AVS:EXGXR, GSAGPXX:TPT:RPVQ:KKATV:VVD:RXGXS, AAPASXX:VPA:RPVQ:KKATV:VVE:AXGXR, STPPTXX:VPT:RPVQ:KKATV:VVE:SXGXR, HVPKPXX:APT:RPVQ:KKATV:VVR:SXGXH, RVPSTXX:APV:RPVQ:KKATV:VEE:XGXL, ASAAPXX:VPQ:RPVQ:KKATV:VRS:XKXS, ASASPXX:VSQ:RPVQ:KKATV:VKS:XKXS, ASASPXX:VPQ:RPVQ:KKATV:VKS:XKXS, NDEGLEX:VPT:RPVQ:KKATV:QHN:KXEXR, NDEGLEX:VPT:RPVQ:KKATV:EHS:QXEXR and SSVKXQP:SRV:RPVQ:KKATV:EEH:LEXAXA. More particularly, the hexaplet PEP7:PEP3:PEP1:PEP2:PEP4:PEP8 is selected from the group consisting of GIPEPXX:VPT:SAIS:LKNYQ:VVE:SXAXR, HVTKPTX:VPT:SAIS:LKNYQ:VVE:SXGXH, YVPKPXX:VPT:SAIS:LKNYQ:VVE:SXGXH, TVPKPXX:VPT:SAIS:LKNYQ:VVE:AXGXH, AVPKAXX:VPT:SAIS:LKNYQ:VVE:AXGXH, KVGKAXX:VPT:SAIS:LKNYQ:VVE:XGXR, KASKAXX:VPT:SAIS:LKNYQ:VVE:EXGXR, GSAGPXX:VPT:SAIS:LKNYQ:VVE:RXGXS, AAPASXX:VPT:SAIS:LKNYQ:VVE:AXGXR, STPPTXX:VPT:SAIS:LKNYQ:VVE:SXGXR, HVPKPXX:VPT:SAIS:LKNYQ:VVE:SXGXH, RVPSTXX:VPT:SAIS:LKNYQ:VVE:XGXL, ASAAPXX:VPT:SAIS:LKNYQ:VVE:XKXS, ASASPXX:VPT:SAIS:LKNYQ:VVE:XKXS, GIPEPXX:VPE:SAIS:LKNYQ:TVE:SXAXR, HVTKPTX:APT:SAIS:LKNYQ:VVR:SXGXH, YVPKPXX:APT:SAIS:LKNYQ:VVR:SXGXH, TVPKPXX:APT:SAIS:LKNYQ:VVR:AXGXH, AVPKAXX:APT:SAIS:LKNYQ:VVK:AXGXH, KVGKAXX:VPT:SAIS:LKNYQ:VAE:XGXR, KASKAXX:VPT:SAIS:LKNYQ:AVS:EXGXR, GSAGPXX:TPT:SAIS:LKNYQ:VVD:RXGXS, AAPASXX:VPA:SAIS:LKNYQ:VVE:AXGXR, HVPKPXX:APT:SAIS:LKNYQ:VVR:SXGXH, RVPSTXX:APV:SAIS:LKNYQ:VEE:XGXL, ASAAPXX:VPQ:SAIS:LKNYQ:VRS:XKXS, ASASPXX:VSQ:SAIS:LKNYQ:VKS:XKXS, ASASPXX:VPQ:SAIS:LKNYQ:VKS:XKXS, NDEGLEX:VPT:SAIS:LKNYQ:QHN:KXEXR, NDEGLEX:VPT:SAIS:LKNYQ:EHS:QXEXR, SSVKXQP:SRV:SAIS:LKNYQ:EEH:LEXAXA, RNVQXRP:TQV:SAIS:LKNYQ:EDH:LAXKXE, KIPKAXX:VPE:SSLS:LKVYP:TVE:GXGXR, SIPKAXX:VPE:SSLS:LKVYP:TVE:GXGXR, HVTKPTX:VPE:SSLS:LKVYP:TVE:SXGXH, YVPKPXX:VPE:SSLS:LKVYP:TVE:SXGXH, TVPKPXX:VPE:SSLS:LKVYP:TVE:AXGXH, AVPKAXX:VPE:SSLS:LKVYP:TVE:AXGXH, KVGKAXX:VPE:SSLS:LKVYP:TVE:XGXR, KASKAXX:VPE:SSLS:LKVYP:TVE:EXGXR, GSAGPXX:VPE:SSLS:LKVYP:TVE:RXGXS, AAPASXX:VPE:SSLS:LKVYP:TVE:AXGXR, STPPTXX:VPE:SSLS:LKVYP:TVE:SXGXR, HVPKPXX:VPE:SSLS:LKVYP:TVE:SXGXH, RVPSTXX:VPE:SSLS:LKVYP:TVE:XGXL, ASAAPXX:VPE:SSLS:LKVYP:TVE:XKXS, ASASPXX:VPE:SSLS:LKVYP:TVE:XKXS, KIPKAXX:VPT:SSLS:LKVYP:VVE:GXGXR, SIPKAXX:VPT:SSLS:LKVYP:VVE:GXGXR, HVTKPTX:APT:SSLS:LKVYP:VVR:SXGXH, YVPKPXX:APT:SSLS:LKVYP:VVR:SXGXH, TVPKPXX:APT:SSLS:LKVYP:VVR:AXGXH, AVPKAXX:APT:SSLS:LKVYP:VVK:AXGXH, KVGKAXX:VPT:SSLS:LKVYP:VAE:XGXR, KASKAXX:VPT:SSLS:LKVYP:AVS:EXGXR, GSAGPXX:TPT:SSLS:LKVYP:VVD:RXGXS, AAPASXX:VPA:SSLS:LKVYP:VVE:AXGXR, STPPTXX:VPT:SSLS:LKVYP:VVE:SXGXR, HVPKPXX:APT:SSLS:LKVYP:VVR:SXGXH, RVPSTXX:APV:SSLS:LKVYP:VEE:XGXL, ASAAPXX:VPQ:SSLS:LKVYP:VRS:XKXS, ASASPXX:VSQ:SSLS:LKVYP:VKS:XKXS, ASASPXX:VPQ:SSLS:LKVYP:VKS:XKXS, NDEGLEX:VPT:SSLS:LKVYP:QHN:KXEXR, NDEGLEX:VPT:SSLS:LKVYP:EHS:QXEXR, SSVKXQP:SRV:SSLS:LKVYP:EEH:LEXAXA, RNVQXRP:TQV:SSLS:LKVYP:EDH:LAXKXE, KIPKAXX:APT:NAIS:LKKYR:VVR:GXGXR, GIPEPXX:APT:NAIS:LKKYR:VVR:SXAXR, SIPKAXX:APT:NAIS:LKKYR:VVR:GXGXR, AVPKAXX:APT:NAIS:LKKYR:VVR:AXGXH, KVGKAXX:APT:NAIS:LKKYR:VVR:XGXR, KASKAXX:APT:NAIS:LKKYR:VVR:EXGXR, GSAGPXX:APT:NAIS:LKKYR:VVR:RXGXS, AAPASXX:APT:NAIS:LKKYR:VVR:AXGXR, STPPTXX:APT:NAIS:LKKYR:VVR:SXGXR, RVPSTXX:APT:NAIS:LKKYR:VVR:XGXL, ASAAPXX:APT:NAIS:LKKYR:VVR:XKXS, ASASPXX:APT:NAIS:LKKYR:VVR:XKXS, KIPKAXX:VPT:NAIS:LKKYR:VVE:GXGXR, GIPEPXX:VPE:NAIS:LKKYR:TVE:SXAXR, SIPKAXX:VPT:NAIS:LKKYR:VVE:GXGXR, AVPKAXX:APT:NAIS:LKKYR:VVK:AXGXH, KVGKAXX:VPT:NAIS:LKKYR:VAE:XGXR, KASKAXX:VPT:NAIS:LKKYR:AVS:EXGXR, GSAGPXX:TPT:NAIS:LKKYR:VVD:RXGXS, AAPASXX:VPA:NAIS:LKKYR:VVE:AXGXR, STPPTXX:VPT:NAIS:LKKYR:VVE:SXGXR, RVPSTXX:APV:NAIS:LKKYR:VEE:XGXL, ASAAPXX:VPQ:NAIS:LKKYR:VRS:XKXS, ASASPXX:VSQ:NAIS:LKKYR:VKS:XKXS, ASASPXX:VPQ:NAIS:LKKYR:VKS:XKXS, NDEGLEX:VPT:NAIS:LKKYR:QHN:KXEXR, NDEGLEX:VPT:NAIS:LKKYR:EHS:QXEXR, SSVKXQP:SRV:NAIS:LKKYR:EEH:LEXAXA, RNVQXRP:TQV:NAIS:LKKYR:EDH:LAXKXE, KIPKAXX:APT:SATS:LRKHR:VVK:GXGXR, GIPEPXX:APT:SATS:LRKHR:VVK:SXAXR, SIPKAXX:APT:SATS:LRKHR:VVK:GXGXR, HVTKPTX:APT:SATS:LRKHR:VVK:SXGXH, YVPKPXX:APT:SATS:LRKHR:VVK:SXGXH, TVPKPXX:APT:SATS:LRKHR:VVK:AXGXH, KVGKAXX:APT:SATS:LRKHR:VVK:XGXR, KASKAXX:APT:SATS:LRKHR:VVK:EXGXR, GSAGPXX:APT:SATS:LRKHR:VVK:RXGXS, AAPASXX:APT:SATS:LRKHR:VVK:AXGXR, STPPTXX:APT:SATS:LRKHR:VVK:SXGXR, HVPKPXX:APT:SATS:LRKHR:VVK:SXGXH, RVPSTXX:APT:SATS:LRKHR:VVK:XGXL, ASAAPXX:APT:SATS:LRKHR:VVK:XKXS, ASASPXX:APT:SATS:LRKHR:VVK:XKXS, KIPKAXX:VPT:SATS:LRKHR:VVE:GXGXR, GIPEPXX:VPE:SATS:LRKHR:TVE:SXAXR, SIPKAXX:VPT:SATS:LRKHR:VVE:GXGXR, HVTKPTX:APT:SATS:LRKHR:VVR:SXGXH, YVPKPXX:APT:SATS:LRKHR:VVR:SXGXH, TVPKPXX:APT:SATS:LRKHR:VVR:AXGXH, KVGKAXX:VPT:SATS:LRKHR:VAE:XGXR, KASKAXX:VPT:SATS:LRKHR:AVS:EXGXR, GSAGPXX:TPT:SATS:LRKHR:VVD:RXGXS, AAPASXX:VPA:SATS:LRKHR:VVE:AXGXR, STPPTXX:VPT:SATS:LRKHR:VVE:SXGXR, HVPKPXX:APT:SATS:LRKHR:VVR:SXGXH, RVPSTXX:APV:SATS:LRKHR:VEE:XGXL, ASAAPXX:VPQ:SATS:LRKHR:VRS:XKXS, ASASPXX:VSQ:SATS:LRKHR:VKS:XKXS, ASASPXX:VPQ:SATS:LRKHR:VKS:XKXS, NDEGLEX:VPT:SATS:LRKHR:QHN:KXEXR, NDEGLEX:VPT:SATS:LRKHR:EHS:QXEXR, SSVKXQP:SRV:SATS:LRKHR:EEH:LEXAXA, RNVQXRP:TQV:SATS:LRKHR:EDH:LAXKXE, KIPKAXX:VPT:SPIS:LKYHY:VAE:GXGXR, GIPEPXX:VPT:SPIS:LKYHY:VAE:SXAXR, SIPKAXX:VPT:SPIS:LKYHY:VAE:GXGXR, HVTKPTX:VPT:SPIS:LKYHY:VAE:SXGXH, YVPKPXX:VPT:SPIS:LKYHY:VAE:SXGXH, TVPKPXX:VPT:SPIS:LKYHY:VAE:AXGXH, AVPKAXX:VPT:SPIS:LKYHY:VAE:AXGXH, KASKAXX:VPT:SPIS:LKYHY:VAE:EXGXR, GSAGPXX:VPT:SPIS:LKYHY:VAE:RXGXS, AAPASXX:VPT:SPIS:LKYHY:VAE:AXGXR, STPPTXX:VPT:SPIS:LKYHY:VAE:SXGXR, HVPKPXX:VPT:SPIS:LKYHY:VAE:SXGXH, RVPSTXX:VPT:SPIS:LKYHY:VAE:XGXL, ASAAPXX:VPT:SPIS:LKYHY:VAE:XKXS, ASASPXX:VPT:SPIS:LKYHY:VAE:XKXS, KIPKAXX:VPT:SPIS:LKYHY:VVE:GXGXR, GIPEPXX:VPE:SPIS:LKYHY:TVE:SXAXR, SIPKAXX:VPT:SPIS:LKYHY:VVE:GXGXR, HVTKPTX:APT:SPIS:LKYHY:VVR:SXGXH, YVPKPXX:APT:SPIS:LKYHY:VVR:SXGXH, TVPKPXX:APT:SPIS:LKYHY:VVR:AXGXH, AVPKAXX:APT:SPIS:LKYHY:VVK:AXGXH, KASKAXX:VPT:SPIS:LKYHY:AVS:EXGXR, GSAGPXX:TPT:SPIS:LKYHY:VVD:RXGXS, AAPASXX:VPA:SPIS:LKYHY:VVE:AXGXR, STPPTXX:VPT:SPIS:LKYHY:VVE:SXGXR, HVPKPXX:APT:SPIS:LKYHY:VVR:SXGXH, RVPSTXX:APV:SPIS:LKYHY:VEE:XGXL, ASAAPXX:VPQ:SPIS:LKYHY:VRS:XKXS, ASASPXX:VSQ:SPIS:LKYHY:VKS:XKXS, ASASPXX:VPQ:SPIS:LKYHY:VKS:XKXS, NDEGLEX:VPT:SPIS:LKYHY:QHN:KXEXR, NDEGLEX:VPT:SPIS:LKYHY:EHS:QXEXR, SSVKXQP:SRV:SPIS:LKYHY:EEH:LEXAXA, RNVQXRP:TQV:SPIS:LKYHY:EDH:LAXKXE, KIPKAXX:VPT:EPIS:KFKYE:AVS:GXGXR, GIPEPXX:VPT:EPIS:KFKYE:AVS:SXAXR, SIPKAXX:VPT:EPIS:KFKYE:AVS:GXGXR, HVTKPTX:VPT:EPIS:KFKYE:AVS:SXGXH, YVPKPXX:VPT:EPIS:KFKYE:AVS:SXGXH, TVPKPXX:VPT:EPIS:KFKYE:AVS:AXGXH, AVPKAXX:VPT:EPIS:KFKYE:AVS:AXGXH, KVGKAXX:VPT:EPIS:KFKYE:AVS:XGXR, GSAGPXX:VPT:EPIS:KFKYE:AVS:RXGXS, AAPASXX:VPT:EPIS:KFKYE:AVS:AXGXR, STPPTXX:VPT:EPIS:KFKYE:AVS:SXGXR, HVPKPXX:VPT:EPIS:KFKYE:AVS:SXGXH, RVPSTXX:VPT:EPIS:KFKYE:AVS:XGXL, ASAAPXX:VPT:EPIS:KFKYE:AVS:XKXS, ASASPXX:VPT:EPIS:KFKYE:AVS:XKXS, KIPKAXX:VPT:EPIS:KFKYE:VVE:GXGXR, GIPEPXX:VPE:EPIS:KFKYE:TVE:SXAXR, SIPKAXX:VPT:EPIS:KFKYE:VVE:GXGXR, HVTKPTX:APT:EPIS:KFKYE:VVR:SXGXH, YVPKPXX:APT:EPIS:KFKYE:VVR:SXGXH, TVPKPXX:APT:EPIS:KFKYE:VVR:AXGXH, AVPKAXX:APT:EPIS:KFKYE:VVK:AXGXH, KVGKAXX:VPT:EPIS:KFKYE:VAE:XGXR, GSAGPXX:TPT:EPIS:KFKYE:VVD:RXGXS, AAPASXX:VPA:EPIS:KFKYE:VVE:AXGXR, STPPTXX:VPT:EPIS:KFKYE:VVE:SXGXR, HVPKPXX:APT:EPIS:KFKYE:VVR:SXGXH, RVPSTXX:APV:EPIS:KFKYE:VEE:XGXL, ASAAPXX:VPQ:EPIS:KFKYE:VRS:XKXS, ASASPXX:VSQ:EPIS:KFKYE:VKS:XKXS, ASASPXX:VPQ:EPIS:KFKYE:VKS:XKXS, NDEGLEX:VPT:EPIS:KFKYE:QHN:KXEXR, NDEGLEX:VPT:EPIS:KFKYE:EHS:QXEXR, SSVKXQP:SRV:EPIS:KFKYE:EEH:LEXAXA, RNVQXRP:TQV:EPIS:KFKYE:EDH:LAXKXE, KIPKAXX:TPT:SPIN:YGKIP:VVD:GXGXR, GIPEPXX:TPT:SPIN:YGKIP:VVD:SXAXR, SIPKAXX:TPT:SPIN:YGKIP:VVD:GXGXR, HVTKPTX:TPT:SPIN:YGKIP:VVD:SXGXH, YVPKPXX:TPT:SPIN:YGKIP:VVD:SXGXH, TVPKPXX:TPT:SPIN:YGKIP:VVD:AXGXH, AVPKAXX:TPT:SPIN:YGKIP:VVD:AXGXH, KVGKAXX:TPT:SPIN:YGKIP:VVD:XGXR, KASKAXX:TPT:SPIN:YGKIP:VVD:EXGXR, AAPASXX:TPT:SPIN:YGKIP:VVD:AXGXR, STPPTXX:TPT:SPIN:YGKIP:VVD:SXGXR, HVPKPXX:TPT:SPIN:YGKIP:VVD:SXGXH, RVPSTXX:TPT:SPIN:YGKIP:VVD:XGXL, ASAAPXX:TPT:SPIN:YGKIP:VVD:XKXS, ASASPXX:TPT:SPIN:YGKIP:VVD:XKXS, KIPKAXX:VPT:SPIN:YGKIP:VVE:GXGXR, GIPEPXX:VPE:SPIN:YGKIP:TVE:SXAXR, SIPKAXX:VPT:SPIN:YGKIP:VVE:GXGXR, HVTKPTX:APT:SPIN:YGKIP:VVR:SXGXH, YVPKPXX:APT:SPIN:YGKIP:VVR:SXGXH, TVPKPXX:APT:SPIN:YGKIP:VVR:AXGXH, AVPKAXX:APT:SPIN:YGKIP:VVK:AXGXH, KVGKAXX:VPT:SPIN:YGKIP:VAE:XGXR, KASKAXX:VPT:SPIN:YGKIP:AVS:EXGXR, AAPASXX:VPA:SPIN:YGKIP:VVE:AXGXR, STPPTXX:VPT:SPIN:YGKIP:VVE:SXGXR, HVPKPXX:APT:SPIN:YGKIP:VVR:SXGXH, RVPSTXX:APV:SPIN:YGKIP:VEE:XGXL, ASAAPXX:VPQ:SPIN:YGKIP:VRS:XKXS, ASASPXX:VSQ:SPIN:YGKIP:VKS:XKXS, ASASPXX:VPQ:SPIN:YGKIP:VKS:XKXS, NDEGLEX:VPT:SPIN:YGKIP:QHN:KXEXR, NDEGLEX:VPT:SPIN:YGKIP:EHS:QXEXR, SSVKXQP:SRV:SPIN:YGKIP:EEH:LEXAXA, RNVQXRP:TQV:SPIN:YGKIP:EDH:LAXKXE, KIPKAXX:VPA:SPIS:YKQYE:VVE:GXGXR, GIPEPXX:VPA:SPIS:YKQYE:VVE:SXAXR, SIPKAXX:VPA:SPIS:YKQYE:VVE:GXGXR, HVTKPTX:VPA:SPIS:YKQYE:VVE:SXGXH, YVPKPXX:VPA:SPIS:YKQYE:VVE:SXGXH, TVPKPXX:VPA:SPIS:YKQYE:VVE:AXGXH, AVPKAXX:VPA:SPIS:YKQYE:VVE:AXGXH, KVGKAXX:VPA:SPIS:YKQYE:VVE:XGXR, KASKAXX:VPA:SPIS:YKQYE:VVE:EXGXR, GSAGPXX:VPA:SPIS:YKQYE:VVE:RXGXS, STPPTXX:VPA:SPIS:YKQYE:VVE:SXGXR, HVPKPXX:VPA:SPIS:YKQYE:VVE:SXGXH, RVPSTXX:VPA:SPIS:YKQYE:VVE:XGXL, ASAAPXX:VPA:SPIS:YKQYE:VVE:XKXS, ASASPXX:VPA:SPIS:YKQYE:VVE:XKXS, KIPKAXX:VPT:SPIS:YKQYE:VVE:GXGXR, GIPEPXX:VPE:SPIS:YKQYE:TVE:SXAXR, SIPKAXX:VPT:SPIS:YKQYE:VVE:GXGXR, HVTKPTX:APT:SPIS:YKQYE:VVR:SXGXH, YVPKPXX:APT:SPIS:YKQYE:VVR:SXGXH, TVPKPXX:APT:SPIS:YKQYE:VVR:AXGXH, AVPKAXX:APT:SPIS:YKQYE:VVK:AXGXH, KVGKAXX:VPT:SPIS:YKQYE:VAE:XGXR, KASKAXX:VPT:SPIS:YKQYE:AVS:EXGXR, GSAGPXX:TPT:SPIS:YKQYE:VVD:RXGXS, STPPTXX:VPT:SPIS:YKQYE:VVE:SXGXR, HVPKPXX:APT:SPIS:YKQYE:VVR:SXGXH, RVPSTXX:APV:SPIS:YKQYE:VEE:XGXL, ASAAPXX:VPQ:SPIS:YKQYE:VRS:XKXS, ASASPXX:VSQ:SPIS:YKQYE:VKS:XKXS, ASASPXX:VPQ:SPIS:YKQYE:VKS:XKXS, NDEGLEX:VPT:SPIS:YKQYE:QHN:KXEXR, NDEGLEX:VPT:SPIS:YKQYE:EHS:QXEXR, SSVKXQP:SRV:SPIS:YKQYE:EEH:LEXAXA, RNVQXRP:TQV:SPIS:YKQYE:EDH:LAXKXE, GIPEPXX:VPT:SPIS:YKQYE:VVE:SXAXR, HVTKPTX:VPT:SPIS:YKQYE:VVE:SXGXH, YVPKPXX:VPT:SPIS:YKQYE:VVE:SXGXH, TVPKPXX:VPT:SPIS:YKQYE:VVE:AXGXH, AVPKAXX:VPT:SPIS:YKQYE:VVE:AXGXH, KVGKAXX:VPT:SPIS:YKQYE:VVE:XGXR, KASKAXX:VPT:SPIS:YKQYE:VVE:EXGXR, GSAGPXX:VPT:SPIS:YKQYE:VVE:RXGXS, AAPASXX:VPT:SPIS:YKQYE:VVE:AXGXR, HVPKPXX:VPT:SPIS:YKQYE:VVE:SXGXH, RVPSTXX:VPT:SPIS:YKQYE:VVE:XGXL, ASAAPXX:VPT:SPIS:YKQYE:VVE:XKXS, ASASPXX:VPT:SPIS:YKQYE:VVE:XKXS, AAPASXX:VPA:SPIS:YKQYE:VVE:AXGXR, KIPKAXX:APV:KPLS:DHHKD:VEE:GXGXR, GIPEPXX:APV:KPLS:DHHKD:VEE:SXAXR, SIPKAXX:APV:KPLS:DHHKD:VEE:GXGXR, HVTKPTX:APV:KPLS:DHHKD:VEE:SXGXH, YVPKPXX:APV:KPLS:DHHKD:VEE:SXGXH, TVPKPXX:APV:KPLS:DHHKD:VEE:AXGXH, AVPKAXX:APV:KPLS:DHHKD:VEE:AXGXH, KVGKAXX:APV:KPLS:DHHKD:VEE:XGXR, KASKAXX:APV:KPLS:DHHKD:VEE:EXGXR, GSAGPXX:APV:KPLS:DHHKD:VEE:RXGXS, AAPASXX:APV:KPLS:DHHKD:VEE:AXGXR, STPPTXX:APV:KPLS:DHHKD:VEE:SXGXR, HVPKPXX:APV:KPLS:DHHKD:VEE:SXGXH, ASAAPXX:APV:KPLS:DHHKD:VEE:XKXS, ASASPXX:APV:KPLS:DHHKD:VEE:XKXS, KIPKAXX:VPT:KPLS:DHHKD:VVE:GXGXR, GIPEPXX:VPE:KPLS:DHHKD:TVE:SXAXR, SIPKAXX:VPT:KPLS:DHHKD:VVE:GXGXR, HVTKPTX:APT:KPLS:DHHKD:VVR:SXGXH, YVPKPXX:APT:KPLS:DHHKD:VVR:SXGXH, TVPKPXX:APT:KPLS:DHHKD:VVR:AXGXH, AVPKAXX:APT:KPLS:DHHKD:VVK:AXGXH, KVGKAXX:VPT:KPLS:DHHKD:VAE:XGXR, KASKAXX:VPT:KPLS:DHHKD:AVS:EXGXR, GSAGPXX:TPT:KPLS:DHHKD:VVD:RXGXS, AAPASXX:VPA:KPLS:DHHKD:VVE:AXGXR, STPPTXX:VPT:KPLS:DHHKD:VVE:SXGXR, HVPKPXX:APT:KPLS:DHHKD:VVR:SXGXH, ASAAPXX:VPQ:KPLS:DHHKD:VRS:XKXS, ASASPXX:VSQ:KPLS:DHHKD:VKS:XKXS, ASASPXX:VPQ:KPLS:DHHKD:VKS:XKXS, NDEGLEX:VPT:KPLS:DHHKD:QHN:KXEXR, NDEGLEX:VPT:KPLS:DHHKD:EHS:QXEXR, SSVKXQP:SRV:KPLS:DHHKD:EEH:LEXAXA, RNVQXRP:TQV:KPLS:DHHKD:EDH:LAXKXE, KIPKAXX:VPQ:EPLP:EQLSN:VRS:GXGXR, GIPEPXX:VPQ:EPLP:EQLSN:VRS:SXAXR, SIPKAXX:VPQ:EPLP:EQLSN:VRS:GXGXR, HVTKPTX:VPQ:EPLP:EQLSN:VRS:SXGXH, YVPKPXX:VPQ:EPLP:EQLSN:VRS:SXGXH, TVPKPXX:VPQ:EPLP:EQLSN:VRS:AXGXH, AVPKAXX:VPQ:EPLP:EQLSN:VRS:AXGXH, KVGKAXX:VPQ:EPLP:EQLSN:VRS:XGXR, KASKAXX:VPQ:EPLP:EQLSN:VRS:EXGXR, GSAGPXX:VPQ:EPLP:EQLSN:VRS:RXGXS, AAPASXX:VPQ:EPLP:EQLSN:VRS:AXGXR, STPPTXX:VPQ:EPLP:EQLSN:VRS:SXGXR, HVPKPXX:VPQ:EPLP:EQLSN:VRS:SXGXH, RVPSTXX:VPQ:EPLP:EQLSN:VRS:XGXL, ASASPXX:VPQ:EPLP:EQLSN:VRS:XKXS, KIPKAXX:VPT:EPLP:EQLSN:VVE:GXGXR, GIPEPXX:VPE:EPLP:EQLSN:TVE:SXAXR, SIPKAXX:VPT:EPLP:EQLSN:VVE:GXGXR, HVTKPTX:APT:EPLP:EQLSN:VVR:SXGXH, YVPKPXX:APT:EPLP:EQLSN:VVR:SXGXH, TVPKPXX:APT:EPLP:EQLSN:VVR:AXGXH, AVPKAXX:APT:EPLP:EQLSN:VVK:AXGXH, KVGKAXX:VPT:EPLP:EQLSN:VAE:XGXR, KASKAXX:VPT:EPLP:EQLSN:AVS:EXGXR, GSAGPXX:TPT:EPLP:EQLSN:VVD:RXGXS, AAPASXX:VPA:EPLP:EQLSN:VVE:AXGXR, STPPTXX:VPT:EPLP:EQLSN:VVE:SXGXR, HVPKPXX:APT:EPLP:EQLSN:VVR:SXGXH, RVPSTXX:APV:EPLP:EQLSN:VEE:XGXL, ASASPXX:VSQ:EPLP:EQLSN:VKS:XKXS, ASASPXX:VPQ:EPLP:EQLSN:VKS:XKXS, NDEGLEX:VPT:EPLP:EQLSN:QHN:KXEXR, NDEGLEX:VPT:EPLP:EQLSN:EHS:QXEXR, SSVKXQP:SRV:EPLP:EQLSN:EEH:LEXAXA, RNVQXRP:TQV:EPLP:EQLSN:EDH:LAXKXE, KIPKAXX:VSQ:EPLT:EQLSN:VKS:GXGXR, GIPEPXX:VSQ:EPLT:EQLSN:VKS:SXAXR, SIPKAXX:VSQ:EPLT:EQLSN:VKS:GXGXR, HVTKPTX:VSQ:EPLT:EQLSN:VKS:SXGXH, YVPKPXX:VSQ:EPLT:EQLSN:VKS:SXGXH, TVPKPXX:VSQ:EPLT:EQLSN:VKS:AXGXH, AVPKAXX:VSQ:EPLT:EQLSN:VKS:AXGXH, KVGKAXX:VSQ:EPLT:EQLSN:VKS:XGXR, KASKAXX:VSQ:EPLT:EQLSN:VKS:EXGXR, GSAGPXX:VSQ:EPLT:EQLSN:VKS:RXGXS, AAPASXX:VSQ:EPLT:EQLSN:VKS:AXGXR, STPPTXX:VSQ:EPLT:EQLSN:VKS:SXGXR, HVPKPXX:VSQ:EPLT:EQLSN:VKS:SXGXH, RVPSTXX:VSQ:EPLT:EQLSN:VKS:XGXL, ASAAPXX:VSQ:EPLT:EQLSN:VKS:XKXS, ASASPXX:VSQ:EPLT:EQLSN:VKS:XKXS, KIPKAXX:VPT:EPLT:EQLSN:VVE:GXGXR, GIPEPXX:VPE:EPLT:EQLSN:TVE:SXAXR, SIPKAXX:VPT:EPLT:EQLSN:VVE:GXGXR, HVTKPTX:APT:EPLT:EQLSN:VVR:SXGXH, YVPKPXX:APT:EPLT:EQLSN:VVR:SXGXH, TVPKPXX:APT:EPLT:EQLSN:VVR:AXGXH, AVPKAXX:APT:EPLT:EQLSN:VVK:AXGXH, KVGKAXX:VPT:EPLT:EQLSN:VAE:XGXR, KASKAXX:VPT:EPLT:EQLSN:AVS:EXGXR, GSAGPXX:TPT:EPLT:EQLSN:VVD:RXGXS, AAPASXX:VPA:EPLT:EQLSN:VVE:AXGXR, STPPTXX:VPT:EPLT:EQLSN:VVE:SXGXR, HVPKPXX:APT:EPLT:EQLSN:VVR:SXGXH, RVPSTXX:APV:EPLT:EQLSN:VEE:XGXL, ASAAPXX:VPQ:EPLT:EQLSN:VRS:XKXS, NDEGLEX:VPT:EPLT:EQLSN:QHN:KXEXR, NDEGLEX:VPT:EPLT:EQLSN:EHS:QXEXR, SSVKXQP:SRV:EPLT:EQLSN:EEH:LEXAXA, RNVQXRP:TQV:EPLT:EQLSN:EDH:LAXKXE, KIPKAXX:VPQ:EPLT:EQLSN:VKS:GXGXR, GIPEPXX:VPQ:EPLT:EQLSN:VKS:SXAXR, SIPKAXX:VPQ:EPLT:EQLSN:VKS:GXGXR, HVTKPTX:VPQ:EPLT:EQLSN:VKS:SXGXH, YVPKPXX:VPQ:EPLT:EQLSN:VKS:SXGXH, TVPKPXX:VPQ:EPLT:EQLSN:VKS:AXGXH, AVPKAXX:VPQ:EPLT:EQLSN:VKS:AXGXH, KVGKAXX:VPQ:EPLT:EQLSN:VKS:XGXR, KASKAXX:VPQ:EPLT:EQLSN:VKS:EXGXR, GSAGPXX:VPQ:EPLT:EQLSN:VKS:RXGXS, AAPASXX:VPQ:EPLT:EQLSN:VKS:AXGXR, STPPTXX:VPQ:EPLT:EQLSN:VKS:SXGXR, HVPKPXX:VPQ:EPLT:EQLSN:VKS:SXGXH, RVPSTXX:VPQ:EPLT:EQLSN:VKS:XGXL, ASAAPXX:VPQ:EPLT:EQLSN:VKS:XKXS, ASASPXX:VPQ:EPLT:EQLSN:VKS:XKXS, NDEGLEX:VPT:SNIT:IGEMS:QHN:QXEXR, KIPKAXX:VPT:SNIT:IGEMS:VVE:GXGXR, GIPEPXX:VPE:SNIT:IGEMS:TVE:SXAXR, SIPKAXX:VPT:SNIT:IGEMS:VVE:GXGXR, HVTKPTX:APT:SNIT:IGEMS:VVR:SXGXH, YVPKPXX:APT:SNIT:IGEMS:VVR:SXGXH, TVPKPXX:APT:SNIT:IGEMS:VVR:AXGXH, AVPKAXX:APT:SNIT:IGEMS:VVK:AXGXH, KVGKAXX:VPT:SNIT:IGEMS:VAE:XGXR, KASKAXX:VPT:SNIT:IGEMS:AVS:EXGXR, GSAGPXX:TPT:SNIT:IGEMS:VVD:RXGXS, AAPASXX:VPA:SNIT:IGEMS:VVE:AXGXR, STPPTXX:VPT:SNIT:IGEMS:VVE:SXGXR, HVPKPXX:APT:SNIT:IGEMS:VVR:SXGXH, RVPSTXX:APV:SNIT:IGEMS:VEE:XGXL, ASAAPXX:VPQ:SNIT:IGEMS:VRS:XKXS, ASASPXX:VSQ:SNIT:IGEMS:VKS:XKXS, ASASPXX:VPQ:SNIT:IGEMS:VKS:XKXS, NDEGLEX:VPT:SNIT:IGEMS:EHS:QXEXR, SSVKXQP:SRV:SNIT:IGEMS:EEH:LEXAXA, RNVQXRP:TQV:SNIT:IGEMS:EDH:LAXKXE, NDEGLEX:VPT:SNIT:LGEMS:EHS:KXEXR, KIPKAXX:VPT:SNIT:LGEMS:VVE:GXGXR, GIPEPXX:VPE:SNIT:LGEMS:TVE:SXAXR, SIPKAXX:VPT:SNIT:LGEMS:VVE:GXGXR, HVTKPTX:APT:SNIT:LGEMS:VVR:SXGXH, YVPKPXX:APT:SNIT:LGEMS:VVR:SXGXH, TVPKPXX:APT:SNIT:LGEMS:VVR:AXGXH, AVPKAXX:APT:SNIT:LGEMS:VVK:AXGXH, KVGKAXX:VPT:SNIT:LGEMS:VAE:XGXR, KASKAXX:VPT:SNIT:LGEMS:AVS:EXGXR, GSAGPXX:TPT:SNIT:LGEMS:VVD:RXGXS, AAPASXX:VPA:SNIT:LGEMS:VVE:AXGXR, STPPTXX:VPT:SNIT:LGEMS:VVE:SXGXR, HVPKPXX:APT:SNIT:LGEMS:VVR:SXGXH, RVPSTXX:APV:SNIT:LGEMS:VEE:XGXL, ASAAPXX:VPQ:SNIT:LGEMS:VRS:XKXS, ASASPXX:VSQ:SNIT:LGEMS:VKS:XKXS, ASASPXX:VPQ:SNIT:LGEMS:VKS:XKXS, NDEGLEX:VPT:SNIT:LGEMS:QHN:KXEXR, SSVKXQP:SRV:SNIT:LGEMS:EEH:LEXAXA, RNVQXRP:TQV:SNIT:LGEMS:EDH:LAXKXE, RNVQXRP:SRV:RSVK:KEVQV:EEH:LAXKXE, KIPKAXX:VPT:RSVK:KEVQV:VVE:GXGXR, GIPEPXX:VPE:RSVK:KEVQV:TVE:SXAXR, SIPKAXX:VPT:RSVK:KEVQV:VVE:GXGXR, HVTKPTX:APT:RSVK:KEVQV:VVR:SXGXH, YVPKPXX:APT:RSVK:KEVQV:VVR:SXGXH, TVPKPXX:APT:RSVK:KEVQV:VVR:AXGXH, AVPKAXX:APT:RSVK:KEVQV:VVK:AXGXH, KVGKAXX:VPT:RSVK:KEVQV:VAE:XGXR, KASKAXX:VPT:RSVK:KEVQV:AVS:EXGXR, GSAGPXX:TPT:RSVK:KEVQV:VVD:RXGXS, AAPASXX:VPA:RSVK:KEVQV:VVE:AXGXR, STPPTXX:VPT:RSVK:KEVQV:VVE:SXGXR, HVPKPXX:APT:RSVK:KEVQV:VVR:SXGXH, RVPSTXX:APV:RSVK:KEVQV:VEE:XGXL, ASAAPXX:VPQ:RSVK:KEVQV:VRS:XKXS, ASASPXX:VSQ:RSVK:KEVQV:VKS:XKXS, ASASPXX:VPQ:RSVK:KEVQV:VKS:XKXS, NDEGLEX:VPT:RSVK:KEVQV:QHN:KXEXR, NDEGLEX:VPT:RSVK:KEVQV:EHS:QXEXR, RNVQXRP:TQV:RSVK:KEVQV:EDH:LAXKXE, SSVKXQP:TQV:RPVQ:KKATV:EDH:LEXAXA, KIPKAXX:VPT:RPVQ:KKATV:VVE:GXGXR, GIPEPXX:VPE:RPVQ:KKATV:TVE:SXAXR, SIPKAXX:VPT:RPVQ:KKATV:VVE:GXGXR, HVTKPTX:APT:RPVQ:KKATV:VVR:SXGXH, YVPKPXX:APT:RPVQ:KKATV:VVR:SXGXH, TVPKPXX:APT:RPVQ:KKATV:VVR:AXGXH, AVPKAXX:APT:RPVQ:KKATV:VVK:AXGXH, KVGKAXX:VPT:RPVQ:KKATV:VAE:XGXR, KASKAXX:VPT:RPVQ:KKATV:AVS:EXGXR, GSAGPXX:TPT:RPVQ:KKATV:VVD:RXGXS, AAPASXX:VPA:RPVQ:KKATV:VVE:AXGXR, STPPTXX:VPT:RPVQ:KKATV:VVE:SXGXR, HVPKPXX:APT:RPVQ:KKATV:VVR:SXGXH, RVPSTXX:APV:RPVQ:KKATV:VEE:XGXL, ASAAPXX:VPQ:RPVQ:KKATV:VRS:XKXS, ASASPXX:VSQ:RPVQ:KKATV:VKS:XKXS, ASASPXX:VPQ:RPVQ:KKATV:VKS:XKXS, NDEGLEX:VPT:RPVQ:KKATV:QHN:KXEXR, NDEGLEX:VPT:RPVQ:KKATV:EHS:QXEXR and SSVKXQP:SRV:RPVQ:KKATV:EEH:LEXAXA.

[0396] In particular, in certain embodiments, the hexaplet PEP7:PEP3:PEP12:PEP2:PEP4:PEP8 is selected from the group consisting of GIPEPXX:VPT:SAIS-AA¹⁷-LYL:LKNYQ:VVE:SXAXR, SIPKAXX:VPT:SAIS-AA¹⁷-LYL:LKNYQ:VVE:GXGXR, HVTKPTX:VPT:SAIS-AA¹⁷-LYL:LKNYQ:VVE:SXGXH, YVPKPXX:VPT:SAIS-AA¹⁷-LYL:LKNYQ:VVE:SXGXH, TVPKPXX:VPT:SAIS-AA¹⁷-LYL:LKNYQ:VVE:AXGXH, AVPKAXX:VPT:SAIS-AA¹⁷-LYL:LKNYQ:VVE:AXGXH, KVGKAXX:VPT:SAIS-AA¹⁷-LYL:LKNYQ:VVE:XGXR, KASKAXX:VPT:SAIS-AA¹⁷-LYL:LKNYQ:VVE:EXGXR, GSAGPXX:VPT:SAIS-AA¹⁷-LYL:LKNYQ:VVE:RXGXS, AAPASXX:VPT:SAIS-AA¹⁷-LYL:LKNYQ:VVE:AXGXR, STPPTXX:VPT:SAIS-AA¹⁷-LYL:LKNYQ:VVE:SXGXR, HVPKPXX:VPT:SAIS-AA¹⁷-LYL:LKNYQ:VVE:SXGXH, RVPSTXX:VPT:SAIS-AA¹⁷-LYL:LKNYQ:VVE:XGXL, ASAAPXX:VPT:SAIS-AA¹⁷-LYL:LKNYQ:VVE:XKXS, ASASPXX:VPT:SAIS-AA¹⁷-LYL:LKNYQ:VVE:XKXS, NDEGLEX:VPT:SAIS-AA¹⁷-LYL:LKNYQ:VVE:KXEXR, NDEGLEX:VPT:SAIS-AA¹⁷-LYL:LKNYQ:VVE:QXEXR, SSVKXQP:VPT:SAIS-AA¹⁷-LYL:LKNYQ:VVE:LEXAXA, RNVQXRP:VPT:SAIS-AA¹⁷-LYL:LKNYQ:VVE:LAXKXE, GIPEPXX:VPE:SAIS-AA¹⁷-LYL:LKNYQ:TVE:SXAXR, HVTKPTX:APT:SAIS-AA¹⁷-LYL:LKNYQ:VVR:SXGXH, YVPKPXX:APT:SAIS-AA¹⁷-LYL:LKNYQ:VVR:SXGXH, TVPKPXX:APT:SAIS-AA¹⁷-LYL:LKNYQ:VVR:AXGXH, AVPKAXX:APT:SAIS-AA¹⁷-LYL:LKNYQ:VVK:AXGXH, KVGKAXX:VPT:SAIS-AA¹⁷-LYL:LKNYQ:VAE:XGXR, KASKAXX:VPT:SAIS-AA¹⁷-LYL:LKNYQ:AVS:EXGXR, GSAGPXX:TPT:SAIS-AA¹⁷-LYL:LKNYQ:VVD:RXGXS, AAPASXX:VPA:SAIS-AA¹⁷-LYL:LKNYQ:VVE:AXGXR, HVPKPXX:APT:SAIS-AA¹⁷-LYL:LKNYQ:VVR:SXGXH, RVPSTXX:APV:SAIS-AA¹⁷-LYL:LKNYQ:VEE:XGXL, ASAAPXX:VPQ:SAIS-AA¹⁷-LYL:LKNYQ:VRS:XKXS, ASASPXX:VSQ:SAIS-AA¹⁷-LYL:LKNYQ:VKS:XKXS, ASASPXX:VPQ:SAIS-AA¹⁷-LYL:LKNYQ:VKS:XKXS, NDEGLEX:VPT:SAIS-AA¹⁷-LYL:LKNYQ:QHN:KXEXR, NDEGLEX:VPT:SAIS-AA¹⁷-LYL:LKNYQ:EHS:QXEXR, SSVKXQP:SRV:SAIS-AA¹⁷-LYL:LKNYQ:EEH:LEXAXA, RNVQXRP:TQV:SAIS-AA¹⁷-LYL:LKNYQ:EDH:LAXKXE, KIPKAXX:VPE:SSLS-AA¹⁷-LFF:LKVYP:TVE:GXGXR, SIPKAXX:VPE:SSLS-AA¹⁷-LFF:LKVYP:TVE:GXGXR, HVTKPTX:VPE:SSLS-AA¹⁷-LFF:LKVYP:TVE:SXGXH, YVPKPXX:VPE:SSLS-AA¹⁷-LFF:LKVYP:TVE:SXGXH, TVPKPXX:VPE:SSLS-AA¹⁷-LFF:LKVYP:TVE:AXGXH, AVPKAXX:VPE:SSLS-AA¹⁷-LFF:LKVYP:TVE:AXGXH, KVGKAXX:VPE:SSLS-AA¹⁷-LFF:LKVYP:TVE:XGXR, KASKAXX:VPE:SSLS-AA¹⁷-LFF:LKVYP:TVE:EXGXR, GSAGPXX:VPE:SSLS-AA¹⁷-LFF:LKVYP:TVE:RXGXS, AAPASXX:VPE:SSLS-AA¹⁷-LFF:LKVYP:TVE:AXGXR, STPPTXX:VPE:SSLS-AA¹⁷-LFF:LKVYP:TVE:SXGXR, HVPKPXX:VPE:SSLS-AA¹⁷-LFF:LKVYP:TVE:SXGXH, RVPSTXX:VPE:SSLS-AA¹⁷-LFF:LKVYP:TVE:XGXL, ASAAPXX:VPE:SSLS-AA¹⁷-LFF:LKVYP:TVE:XKXS, ASASPXX:VPE:SSLS-AA¹⁷-LFF:LKVYP:TVE:XKXS, NDEGLEX:VPE:SSLS-AA¹⁷-LFF:LKVYP:TVE:KXEXR, NDEGLEX:VPE:SSLS-AA¹⁷-LFF:LKVYP:TVE:QXEXR, SSVKXQP:VPE:SSLS-AA¹⁷-LFF:LKVYP:TVE:LEXAXA, RNVQXRP:VPE:SSLS-AA¹⁷-LFF:LKVYP:TVE:LAXKXE, KIPKAXX:VPT:SSLS-AA¹⁷-LFF:LKVYP:VVE:GXGXR, SIPKAXX:VPT:SSLS-AA¹⁷-LFF:LKVYP:VVE:GXGXR, HVTKPTX:APT:SSLS-AA¹⁷-LFF:LKVYP:VVR:SXGXH, YVPKPXX:APT:SSLS-AA¹⁷-LFF:LKVYP:VVR:SXGXH, TVPKPXX:APT:SSLS-AA¹⁷-LFF:LKVYP:VVR:AXGXH, AVPKAXX:APT:SSLS-AA¹⁷-LFF:LKVYP:VVK:AXGXH, KVGKAXX:VPT:SSLS-AA¹⁷-LFF:LKVYP:VAE:XGXR, KASKAXX:VPT:SSLS-AA¹⁷-LFF:LKVYP:AVS:EXGXR, GSAGPXX:TPT:SSLS-AA¹⁷-LFF:LKVYP:VVD:RXGXS, AAPASXX:VPA:SSLS-AA¹⁷-LFF:LKVYP:VVE:AXGXR, STP PTXX:VPT:SSLS-AA¹⁷-LFF:LKVYP:VVE:SXGXR, HVPKPXX:APT:SSLS-AA¹⁷-LFF:LKVYP:VVR:SXGXH, RVPSTXX:APV:SSLS-AA¹⁷-LFF:LKVYP:VEE:XGXL, ASAAPXX:VPQ:SSLS-AA¹⁷-LFF:LKVYP:VRS:XKXS, ASASPXX:VSQ:SSLS-AA¹⁷-LFF:LKVYP:VKS:XKXS, ASASPXX:VPQ:SSLS-AA¹⁷-LFF:LKVYP:VKS:XKXS, NDEGLEX:VPT:SSLS-AA¹⁷-LFF:LKVYP:QHN:KXEXR, NDEGLEX:VPT:SSLS-AA¹⁷-LFF:LKVYP:EHS:QXEXR, SSVKXQP:SRV:SSLS-AA¹⁷-LFF:LKVYP:EEH:LEXAXA, RNVQXRP:TQV:SSLS-AA¹⁷-LFF:LKVYP:EDH:LAXKXE, KIPKAXX:VPT:SAIS-AA¹⁷-LYL:LKNYQ:VVE:GXGXR, KIPKAXX:APT:NAIS-AA¹⁷-LYF:LKKYR:VVR:GXGXR, GIPEPXX:APT:NAIS-AA¹⁷-LYF:LKKYR:VVR:SXAXR, SIPKAXX:APT:NAIS-AA¹⁷-LYF:LKKYR:VVR:GXGXR, YVPKPXX:APT:NAIS-AA¹⁷-LYF:LKKYR:VVR:SXGXH, TVPKPXX:APT:NAIS-AA¹⁷-LYF:LKKYR:VVR:AXGXH, AVPKAXX:APT:NAIS-AA¹⁷-LYF:LKKYR:VVR:AXGXH, KVGKAXX:APT:NAIS-AA¹⁷-LYF:LKKYR:VVR:XGXR, KASKAXX:APT:NAIS-AA¹⁷-LYF:LKKYR:VVR:EXGXR, GSAGPXX:APT:NAIS-AA¹⁷-LYF:LKKYR:VVR:RXGXS, AAPASXX:APT:NAIS-AA¹⁷-LYF:LKKYR:VVR:AXGXR, STPPTXX:APT:NAIS-AA¹⁷-LYF:LKKYR:VVR:SXGXR, HVPKPXX:APT:NAIS-AA¹⁷-LYF:LKKYR:VVR:SXGXH, RVPSTXX:APT:NAIS-AA¹⁷-LYF:LKKYR:VVR:XGXL, ASAAPXX:APT:NAIS-AA¹⁷-LYF:LKKYR:VVR:XKXS, ASASPXX:APT:NAIS-AA¹⁷-LYF:LKKYR:VVR:XKXS, NDEGLEX:APT:NAIS-AA¹⁷-LYF:LKKYR:VVR:KXEXR, NDEGLEX:APT:NAIS-AA¹⁷-LYF:LKKYR:VVR:QXEXR, SSVKXQP:APT:NAIS-AA¹⁷-LYF:LKKYR:VVR:LEXAXA, RNVQXRP:APT:NAIS-AA¹⁷-LYF:LKKYR:VVR:LAXKXE, KIPKAXX:VPT:NAIS-AA¹⁷-LYF:LKKYR:VVE:GXGXR, GIPEPXX:VPE:NAIS-AA¹⁷-LYF:LKKYR:TVE:SXAXR, SIPKAXX:VPT:NAIS-AA¹⁷-LYF:LKKYR:VVE:GXGXR, AVPKAXX:APT:NAIS-AA¹⁷-LYF:LKKYR:VVK:AXGXH, KVGKAXX:VPT:NAIS-AA¹⁷-LYF:LKKYR:VAE:XGXR, KASKAXX:VPT:NAIS-AA¹⁷-LYF:LKKYR:AVS:EXGXR, GSAGPXX:TPT:NAIS-AA¹⁷-LYF:LKKYR:VVD:RXGXS, AAPASXX:VPA:NAIS-AA¹⁷-LYF:LKKYR:VVE:AXGXR, STPPTXX:VPT:NAIS-AA¹⁷-LYF:LKKYR:VVE:SXGXR, RVPSTXX:APV:NAIS-AA¹⁷-LYF:LKKYR:VEE:XGXL, ASAAPXX:VPQ:NAIS-AA¹⁷-LYF:LKKYR:VRS:XKXS, ASASPXX:VSQ:NAIS-AA¹⁷-LYF:LKKYR:VKS:XKXS, ASASPXX:VPQ:NAIS-AA¹⁷-LYF:LKKYR:VKS:XKXS, NDEGLEX:VPT:NAIS-AA¹⁷-LYF:LKKYR:QHN:KXEXR, NDEGLEX:VPT:NAIS-AA¹⁷-LYF:LKKYR:EHS:QXEXR, SSVKXQP:SRV:NAIS-AA¹⁷-LYF:LKKYR:EEH:LEXAXA, RNVQXRP:TQV:NAIS-AA¹⁷-LYF:LKKYR:EDH:LAXKXE, HVTKPTX:APT:NAIS-AA¹⁷-LYF:LKKYR:VVR:SXGXH, KIPKAXX:APT:SATS-AA¹⁷-LYY:LRKHR:VVK:GXGXR, GIPEPXX:APT:SATS-AA¹⁷-LYY:LRKHR:VVK:SXAXR, SIPKAXX:APT:SATS-AA¹⁷-LYY:LRKHR:VVK:GXGXR, HVTKPTX:APT:SATS-AA¹⁷-LYY:LRKHR:VVK:SXGXH, YVPKPXX:APT:SATS-AA¹⁷-LYY:LRKHR:VVK:SXGXH, TVPKPXX:APT:SATS-AA¹⁷-LYY:LRKHR:VVK:AXGXH, KVGKAXX:APT:SATS-AA¹⁷-LYY:LRKHR:VVK:XGXR, KASKAXX:APT:SATS-AA¹⁷-LYY:LRKHR:VVK:EXGXR, GSAGPXX:APT:SATS-AA¹⁷-LYY:LRKHR:VVK:RXGXS, AAPASXX:APT:SATS-AA¹⁷-LYY:LRKHR:VVK:AXGXR, STPPTXX:APT:SATS-AA¹⁷-LYY:LRKHR:VVK:SXGXR, HVPKPXX:APT:SATS-AA¹⁷-LYY:LRKHR:VVK:SXGXH, RVPSTXX:APT: SATS-AA¹⁷-LYY:LRKHR:VVK:XGXL, ASAAPXX:APT:SATS-AA¹⁷-LYY:LRKHR:VVK:XKXS, ASASPXX:APT:SATS-AA¹⁷-LYY:LRKHR:VVK:XKXS, NDEGLEX:APT:SATS-AA¹⁷-LYY:LRKHR:VVK:KXEXR, NDEGLEX:APT:SATS-AA¹⁷-LYY:LRKHR:VVK:QXEXR, SSVKXQP:APT:SATS-AA¹⁷-LYY:LRKHR:VVK: LEXAXA, RNVQXRP:APT:SATS-AA¹⁷-LYY:LRKHR:VVK:LAXKXE, KIPKAXX:VPT:SATS-AA¹⁷-LYY:LRKHR:VVE:GXGXR, GIPEPXX:VPE:SATS-AA¹⁷-LYY:LRKHR:TVE:SXAXR, SIPKAXX:VPT:SATS-AA¹⁷-LYY:LRKHR:VVE:GXGXR, HVTKPTX:APT:SATS-AA¹⁷-LYY:LRKHR:VVR:SXGXH, YVPKPXX:APT:SATS-AA¹⁷-LYY:LRKHR:VVR:SXGXH, TVPKPXX:APT:SATS-AA¹⁷-LYY:LRKHR:VVR:AXGXH, KVGKAXX:VPT:SATS-AA¹⁷-LYY:LRKHR:VAE:XGXR, KASKAXX:VPT:SATS-AA¹⁷-LYY:LRKHR:AVS:EXGXR, GSAGPXX:TPT:SATS-AA¹⁷-LYY:LRKHR:VVD:RXGXS, AAPASXX:VPA:SATS-AA¹⁷-LYY:LRKHR:VVE:AXGXR, STP PTXX:VPT:SATS-AA¹⁷-LYY:LRKHR:VVE:SXGXR, HVPKPXX:APT:SATS-AA¹⁷-LYY:LRKHR:VVR:SXGXH, RVPSTXX:APV:SATS-AA¹⁷-LYY:LRKHR:VEE:XGXL, ASAAPXX:VPQ:SATS-AA¹⁷-LYY:LRKHR:VRS:XKXS, ASASPXX:VSQ:SATS-AA¹⁷-LYY:LRKHR:VKS:XKXS, ASASPXX:VPQ:SATS-AA¹⁷-LYY:LRKHR:VKS:XKXS, NDEGLEX:VPT:SATS-AA¹⁷-LYY:LRKHR:QHN:KXEXR, NDEGLEX:VPT:SATS-AA¹⁷-LYY:LRKHR:EHS:QXEXR, SSVKXQP:SRV:SATS-AA¹⁷-LYY:LRKHR:EEH:LEXAXA, RNVQXRP:TQV:SATS-AA¹⁷-LYY:LRKHR:EDH:LAXKXE, KIPKAXX:VPT:SPIS-AA¹⁷-LYK:LKYHY:VAE:GXGXR, GIPEPXX:VPT:SPIS-AA¹⁷-LYK:LKYHY:VAE:SXAXR, SIPKAXX:VPT:SPIS-AA¹⁷-LYK:LKYHY:VAE:GXGXR, HVTKPTX:VPT:SPIS-AA¹⁷-LYK:LKYHY:VAE:SXGXH, YVPKPXX:VPT:SPIS-AA¹⁷-LYK:LKYHY:VAE:SXGXH, TVPKPXX:VPT:SPIS-AA¹⁷-LYK:LKYHY:VAE:AXGXH, AVPKAXX:VPT:SPIS-AA¹⁷-LYK:LKYHY:VAE:AXGXH, KASKAXX:VPT:SPIS-AA¹⁷-LYK:LKYHY:VAE:EXGXR, GSAGPXX:VPT:SPIS-AA¹⁷-LYK:LKYHY:VAE:RXGXS, AAPASXX:VPT:SPIS-AA¹⁷-LYK:LKYHY:VAE:AXGXR, STPPTXX:VPT:SPIS-AA¹⁷-LYK:LKYHY:VAE:SXGXR, HVPKPXX:VPT:SPIS-AA¹⁷-LYK:LKYHY:VAE:SXGXH, RVPSTXX:VPT:SPIS-AA¹⁷-LYK:LKYHY:VAE:XGXL, ASAAPXX:VPT:SPIS-AA¹⁷-LYK:LKYHY:VAE:XKXS, ASASPXX:VPT:SPIS-AA¹⁷-LYK:LKYHY:VAE:XKXS, NDEGLEX:VPT:SPIS-AA¹⁷-LYK:LKYHY:VAE:KXEXR, NDEGLEX:VPT:SPIS-AA¹⁷-LYK:LKYHY:VAE:QXEXR, SSVKXQP:VPT:SPIS-AA¹⁷-LYK:LKYHY:VAE:LEXAXA, RNVQXRP:VPT:SPIS-AA¹⁷-LYK:LKYHY:VAE:LAXKXE, KIPKAXX:VPT:SPIS-AA¹⁷-LYK:LKYHY:VVE:GXGXR, GIPEPXX:VPE:SPIS-AA¹⁷-LYK:LKYHY:TVE:SXAXR, SIPKAXX:VPT:SPIS-AA¹⁷-LYK:LKYHY:VVE:GXGXR, HVTKPTX:APT:SPIS-AA¹⁷-LYK:LKYHY:VVR:SXGXH, YVPKPXX:APT:SPIS-AA¹⁷-LYK:LKYHY:VVR:SXGXH, TVPKPXX:APT:SPIS-AA¹⁷-LYK:LKYHY:VVR:AXGXH, AVPKAXX:APT:SPIS-AA¹⁷-LYK:LKYHY:VVK:AXGXH, KASKAXX:VPT:SPIS-AA¹⁷-LYK: LKYHY:AVS:EXGXR, GSAGPXX:TPT:SPIS-AA¹⁷-LYK:LKYHY:VVD:RXGXS, AAPASXX:VPA:SPIS-AA¹⁷-LYK:LKYHY:VVE:AXGXR, STPPTXX:VPT:SPIS-AA¹⁷-LYK:LKYHY:VVE:SXGXR, HVPKPXX:APT:SPIS-AA¹⁷-LYK:LKYHY:VVR:SXGXH, RVPSTXX:APV:SPIS-AA¹⁷-LYK:LKYHY:VEE:XGXL, ASAAPXX:VPQ:SPIS-AA¹⁷-LYK: LKYHY:VRS:XKXS, ASASPXX:VSQ:SPIS-AA¹⁷-LYK: LKYHY:VKS:XKXS, ASASPXX:VPQ:SPIS-AA¹⁷-LYK:LKYHY:VKS:XKXS, NDEGLEX:VPT:SPIS-AA¹⁷-LYK:LKYHY:QHN:KXEXR, NDEGLEX:VPT:SPIS-AA¹⁷-LYK:LKYHY:EHS:QXEXR, SSVKXQP:SRV:SPIS-AA¹⁷-LYK:LKYHY:EEH:LEXAXA, RNVQXRP:TQV:SPIS-AA¹⁷-LYK:LKYHY:EDH:LAXKXE, KIPKAXX:VPT:EPIS-AA¹⁷-LYL:KFKYE:AVS:GXGXR, GIPEPXX:VPT:EPIS-AA¹⁷-LYL:KFKYE:AVS:SXAXR, SIPKAXX:VPT:EPIS-AA¹⁷-LYL:KFKYE:AVS:GXGXR, HVTKPTX:VPT:EPIS-AA¹⁷-LYL:KFKYE:AVS:SXGXH, YVPKPXX:VPT:EPIS-AA¹⁷-LYL:KFKYE:AVS:SXGXH, TVPKPXX:VPT:EPIS-AA¹⁷-LYL:KFKYE:AVS:AXGXH, AVPKAXX:VPT:EPIS-AA¹⁷-LYL:KFKYE:AVS:AXGXH, KVGKAXX:VPT:EPIS-AA¹⁷-LYL:KFKYE:AVS:XGXR, GSAGPXX:VPT:EPIS-AA¹⁷-LYL:KFKYE:AVS:RXGXS, AAPASXX:VPT:EPIS-AA¹⁷-LYL:KFKYE:AVS:AXGXR, STPPTXX:VPT:EPIS-AA¹⁷-LYL:KFKYE:AVS:SXGXR, HVPKPXX:VPT:EPIS-AA¹⁷-LYL:KFKYE:AVS:SXGXH, RVPSTXX:VPT:EPIS-AA¹⁷-LYL:KFKYE:AVS:XGXL, ASAAPXX:VPT:EPIS-AA¹⁷-LYL:KFKYE:AVS:XKXS, ASASPXX:VPT:EPIS-AA¹⁷-LYL:KFKYE:AVS:XKXS, NDEGLEX:VPT:EPIS-AA¹⁷-LYL:KFKYE:AVS:KXEXR, NDEGLEX:VPT:EPIS-AA¹⁷-LYL:KFKYE:AVS:QXEXR, SSVKXQP:VPT:EPIS-AA¹⁷-LYL:KFKYE:AVS:LEXAXA, RNVQXRP:VPT:EPIS-AA¹⁷-LYL:KFKYE:AVS:LAXKXE, KIPKAXX:VPT:EPIS-AA¹⁷-LYL:KFKYE:VVE:GXGXR, GIPEPXX:VPE:EPIS-AA¹⁷-LYL:KFKYE:TVE:SXAXR, SIPKAXX:VPT:EPIS-AA¹⁷-LYL:KFKYE:VVE:GXGXR, HVTKPTX:APT:EPIS-AA¹⁷-LYL:KFKYE:VVR:SXGXH, YVPKPXX:APT:EPIS-AA¹⁷-LYL:KFKYE:VVR:SXGXH, TVPKPXX:APT:EPIS-AA¹⁷-LYL:KFKYE:VVR:AXGXH, AVPKAXX:APT:EPIS-AA¹⁷-LYL:KFKYE:VVK:AXGXH, KVGKAXX:VPT:EPIS-AA¹⁷-LYL:KFKYE:VAE:XGXR, GSAGPXX:TPT:EPIS-AA¹⁷-LYL:KFKYE:VVD:RXGXS, AAPASXX:VPA:EPIS-AA¹⁷-LYL:KFKYE:VVE:AXGXR, STPPTXX:VPT:EPIS-AA¹⁷-LYL:KFKYE:VVE:SXGXR, HVPKPXX:APT:EPIS-AA¹⁷-LYL:KFKYE:VVR:SXGXH, RVPSTXX:APV:EPIS-AA¹⁷-LYL:KFKYE:VEE:XGXL, ASAAPXX:VPQ:EPIS-AA¹⁷-LYL:KFKYE:VRS:XKXS, ASASPXX:VSQ:EPIS-AA¹⁷-LYL:KFKYE:VKS:XKXS, ASASPXX:VPQ:EPIS-AA¹⁷-LYL:KFKYE:VKS:XKXS, NDEGLEX:VPT:EPIS-AA¹⁷-LYL:KFKYE:QHN:KXEXR, NDEGLEX:VPT:EPIS-AA¹⁷-LYL:KFKYE:EHS:QXEXR, SSVKXQP:SRV:EPIS-AA¹⁷-LYL:KFKYE:EEH:LEXAXA, RNVQXRP:TQV:EPIS-AA¹⁷-LYL:KFKYE:EDH:LAXKXE, KIPKAXX:TPT:SPIN-AA¹⁷-LYF:YGKIP:VVD:GXGXR, GIPEPXX:TPT:SPIN-AA¹⁷-LYF:YGKIP:VVD:SXAXR, SIPKAXX:TPT:SPIN-AA¹⁷-LYF:YGKIP:VVD:GXGXR, HVTKPTX:TPT:SPIN-AA¹⁷-LYF:YGKIP:VVD:SXGXH, YVPKPXX:TPT:SPIN-AA¹⁷-LYF:YGKIP:VVD:SXGXH, TVPKPXX:TPT:SPIN-AA¹⁷-LYF:YGKIP:VVD:AXGXH, AVPKAXX:TPT:SPIN-AA¹⁷-LYF:YGKIP:VVD:AXGXH, KVGKAXX:TPT:SPIN-AA¹⁷-LYF:YGKIP:VVD:XGXR, KASKAXX:TPT:SPIN-AA¹⁷-LYF:YGKIP:VVD:EXGXR, AAPASXX:TPT:SPIN-AA¹⁷-LYF:YGKIP:VVD:AXGXR, STPPTXX:TPT:SPIN-AA¹⁷-LYF:YGKIP:VVD:SXGXR, HVPKPXX:TPT:SPIN-AA¹⁷-LYF:YGKIP:VVD:SXGXH, RVPSTXX:TPT:SPIN-AA¹⁷-LYF:YGKIP:VVD:XGXL, ASAAPXX:TPT:SPIN-AA¹⁷-LYF:YGKIP:VVD:XKXS, ASASPXX:TPT:SPIN-AA¹⁷-LYF:YGKIP:VVD:XKXS, NDEGLEX:TPT:SPIN-AA¹⁷-LYF:YGKIP:VVD:KXEXR, NDEGLEX:TPT:SPIN-AA¹⁷-LYF:YGKIP:VVD:QXEXR, SSVKXQP:TPT:SPIN-AA¹⁷-LYF:YGKIP:VVD:LEXAXA, RNVQXRP:TPT:SPIN-AA¹⁷-LYF:YGKIP:VVD:LAXKXE, KIPKAXX:VPT:SPIN-AA¹⁷-LYF:YGKIP:VVE:GXGXR, GIPEPXX:VPE:SPIN-AA¹⁷-LYF:YGKIP:TVE:SXAXR, SIPKAXX:VPT:SPIN-AA¹⁷-LYF:YGKIP:VVE:GXGXR, HVTKPTX:APT:SPIN-AA¹⁷-LYF:YGKIP:VVR:SXGXH, YVPKPXX:APT:SPIN-AA¹⁷-LYF:YGKIP:VVR:SXGXH, TVPKPXX:APT:SPIN-AA¹⁷-LYF:YGKIP:VVR:AXGXH, AVPKAXX:APT:SPIN-AA¹⁷-LYF:YGKIP:VVK:AXGXH, KVGKAXX:VPT:SPIN-AA¹⁷-LYF:YGKIP:VAE:XGXR, KASKAXX:VPT:SPIN-AA¹⁷-LYF:YGKIP:AVS:EXGXR, AAPASXX:VPA:SPIN-AA¹⁷-LYF:YGKIP:VVE:AXGXR, STPPTXX:VPT:SPIN-AA¹⁷-LYF:YGKIP:VVE:SXGXR, HVPKPXX:APT:SPIN-AA¹⁷-LYF:YGKIP:VVR:SXGXH, RVPSTXX:APV:SPIN-AA¹⁷-LYF:YGKIP:VEE:XGXL, ASAAPXX:VPQ:SPIN-AA¹⁷-LYF:YGKIP:VRS:XKXS, ASASPXX:VSQ:SPIN-AA¹⁷-LYF:YGKIP:VKS:XKXS, ASASPXX:VPQ:SPIN-AA¹⁷-LYF:YGKIP:VKS:XKXS, NDEGLEX:VPT:SPIN-AA¹⁷-LYF:YGKIP:QHN:KXEXR, NDEGLEX:VPT:SPIN-AA¹⁷-LYF:YGKIP:EHS:QXEXR, SSVKXQP:SRV:SPIN-AA¹⁷-LYF:YGKIP:EEH:LEXAXA, RNVQXRP:TQV:SPIN-AA¹⁷-LYF:YGKIP:EDH:LAXKXE, KIPKAXX:VPA:SPIS-AA¹⁷-LYI:YKQYE:VVE:GXGXR, GIPEPXX:VPA:SPIS-AA¹⁷-LYI:YKQYE:VVE:SXAXR, SIPKAXX:VPA:SPIS-AA¹⁷-LYI:YKQYE:VVE:GXGXR, HVTKPTX:VPA:SPIS-AA¹⁷-LYI:YKQYE:VVE:SXGXH, YVPKPXX:VPA:SPIS-AA¹⁷-LYI:YKQYE:VVE:SXGXH, TVPKPXX:VPA:SPIS-AA¹⁷-LYI:YKQYE:VVE:AXGXH, AVPKAXX:VPA:SPIS-AA¹⁷-LYI:YKQYE:VVE:AXGXH, KVGKAXX:VPA:SPIS-AA¹⁷-LYI:YKQYE:VVE:XGXR, KASKAXX:VPA:SPIS-AA¹⁷-LYI:YKQYE:VVE:EXGXR, GSAGPXX:VPA:SPIS-AA¹⁷-LYI:YKQYE:VVE:RXGXS, STPPTXX:VPA:SPIS-AA¹⁷-LYI:YKQYE:VVE:SXGXR, HVPKPXX:VPA:SPIS-AA¹⁷-LYI:YKQYE:VVE:SXGXH, RVPSTXX:VPA:SPIS-AA¹⁷-LYI:YKQYE:VVE:XGXL, ASAAPXX:VPA:SPIS-AA¹⁷-LYI:YKQYE:VVE:XKXS, ASASPXX:VPA:SPIS-AA¹⁷-LYI:YKQYE:VVE:XKXS, NDEGLEX:VPA:SPIS-AA¹⁷-LYI:YKQYE:VVE:KXEXR, NDEGLEX:VPA:SPIS-AA¹⁷-LYI:YKQYE:VVE:QXEXR, SSVKXQP:VPA:SPIS-AA¹⁷-LYI:YKQYE:VVE:LEXAXA, RNVQXRP:VPA:SPIS-AA¹⁷-LYI:YKQYE:VVE:LAXKXE, KIPKAXX:VPT:SPIS-AA¹⁷-LYI:YKQYE:VVE:GXGXR, GIPEPXX:VPE:SPIS-AA¹⁷-LYI:YKQYE:TVE:SXAXR, SIPKAXX:VPT:SPIS-AA¹⁷-LYI:YKQYE:VVE:GXGXR, HVTKPTX:APT:SPIS-AA¹⁷-LYI:YKQYE:VVR:SXGXH, YVPKPXX:APT:SPIS-AA¹⁷-LYI:YKQYE:VVR:SXGXH, TVPKPXX:APT:SPIS-AA¹⁷-LYI:YKQYE:VVR:AXGXH, AVPKAXX:APT:SPIS-AA¹⁷-LYI:YKQYE:VVK:AXGXH, KVGKAXX:VPT:SPIS-AA¹⁷-LYI:YKQYE:VAE:XGXR, KASKAXX:VPT:SPIS-AA¹⁷-LYI:YKQYE:AVS:EXGXR, GSAGPXX:TPT:SPIS-AA¹⁷-LYI:YKQYE:VVD:RXGXS, STPPTXX:VPT:SPIS-AA¹⁷-LYI:YKQYE:VVE:SXGXR, HVPKPXX:APT:SPIS-AA¹⁷-LYI:YKQYE:VVR:SXGXH, RVPSTXX:APV:SPIS-AA¹⁷-LYI:YKQYE:VEE:XGXL, ASAAPXX:VPQ:SPIS-AA¹⁷-LYI:YKQYE:VRS:XKXS, ASASPXX:VSQ:SPIS-AA¹⁷-LYI:YKQYE:VKS:XKXS, ASASPXX:VPQ:SPIS-AA¹⁷-LYI:YKQYE:VKS:XKXS, NDEGLEX:VPT:SPIS-AA¹⁷-LYI:YKQYE:QHN:KXEXR, NDEGLEX:VPT:SPIS-AA¹⁷-LYI:YKQYE:EHS:QXEXR, SSVKXQP:SRV:SPIS-AA¹⁷-LYI:YKQYE:EEH:LEXAXA, RNVQXRP:TQV:SPIS-AA¹⁷-LYI:YKQYE:EDH:LAXKXE, KIPKAXX:VPT:SPIS-AA¹⁷-LFI:YKQYE:VVE:GXGXR, GIPEPXX:VPT:SPIS-AA¹⁷-LFI:YKQYE:VVE:SXAXR, SIPKAXX:VPT:SPIS-AA¹⁷-LFI:YKQYE:VVE:GXGXR, HVTKPTX:VPT:SPIS-AA¹⁷-LFI:YKQYE:VVE:SXGXH, YVPKPXX:VPT:SPIS-AA¹⁷-LFI:YKQYE:VVE:SXGXH, TVPKPXX:VPT:SPIS-AA¹⁷-LFI:YKQYE:VVE:AXGXH, AVPKAXX:VPT:SPIS-AA¹⁷-LFI:YKQYE:VVE:AXGXH, KVGKAXX:VPT:SPIS-AA¹⁷-LFI:YKQYE:VVE:XGXR, KASKAXX:VPT:SPIS-AA¹⁷-LFI:YKQYE:VVE:EXGXR, GSAGPXX:VPT:SPIS-AA¹⁷-LFI:YKQYE:VVE:RXGXS, AAPASXX:VPT:SPIS-AA¹⁷-LFI:YKQYE:VVE:AXGXR, HVPKPXX:VPT:SPIS-AA¹⁷-LFI:YKQYE:VVE:SXGXH, RVPSTXX:VPT:SPIS-AA¹⁷-LFI:YKQYE:VVE:XGXL, ASAAPXX:VPT:SPIS-AA¹⁷-LFI:YKQYE:VVE:XKXS, ASASPXX:VPT:SPIS-AA¹⁷-LFI:YKQYE:VVE:XKXS, NDEGLEX:VPT:SPIS-AA¹⁷-LFI:YKQYE:VVE:KXEXR, NDEGLEX:VPT:SPIS-AA¹⁷-LFI:YKQYE:VVE:QXEXR, SSVKXQP:VPT:SPIS-AA¹⁷-LFI:YKQYE:VVE:LEXAXA, RNVQXRP:VPT:SPIS-AA¹⁷-LFI:YKQYE:VVE:LAXKXE, GIPEPXX:VPE:SPIS-AA¹⁷-LFI:YKQYE:TVE:SXAXR, HVTKPTX:APT:SPIS-AA¹⁷-LFI:YKQYE:VVR:SXGXH, YVPKPXX:APT:SPIS-AA¹⁷-LFI:YKQYE:VVR:SXGXH, TVPKPXX:APT:SPIS-AA¹⁷-LFI:YKQYE:VVR:AXGXH, AVPKAXX:APT:SPIS-AA¹⁷-LFI:YKQYE:VVK:AXGXH, KVGKAXX:VPT:SPIS-AA¹⁷-LFI:YKQYE:VAE:XGXR, KASKAXX:VPT:SPIS-AA¹⁷-LFI:YKQYE:AVS:EXGXR, GSAGPXX:TPT:SPIS-AA¹⁷-LFI:YKQYE:VVD:RXGXS, AAPASXX:VPA:SPIS-AA¹⁷-LFI:YKQYE:VVE:AXGXR, HVPKPXX:APT:SPIS-AA¹⁷-LFI:YKQYE:VVR:SXGXH, RVPSTXX:APV:SPIS-AA¹⁷-LFI:YKQYE:VEE:XGXL, ASAAPXX:VPQ:SPIS-AA¹⁷-LFI:YKQYE:VRS:XKXS, ASASPXX:VSQ:SPIS-AA¹⁷-LFI:YKQYE:VKS:XKXS, ASASPXX:VPQ:SPIS-AA¹⁷-LFI:YKQYE:VKS:XKXS, NDEGLEX:VPT:SPIS-AA¹⁷-LFI:YKQYE:QHN:KXEXR, NDEGLEX:VPT:SPIS-AA¹⁷-LFI:YKQYE:EHS:QXEXR, SSVKXQP:SRV:SPIS-AA¹⁷-LFI:YKQYE:EEH:LEXAXA, RNVQXRP:TQV:SPIS-AA¹⁷-LFI:YKQYE:EDH:LAXKXE, KIPKAXX:APV:KPLS-AA¹⁷-LYV:DHHKD:VEE:GXGXR, GIPEPXX:APV:KPLS-AA¹⁷-LYV:DHHKD:VEE:SXAXR, SIPKAXX:APV:KPLS-AA¹⁷-LYV:DHHKD:VEE:GXGXR, HVTKPTX:APV:KPLS-AA¹⁷-LYV:DHHKD:VEE:SXGXH, YVPKPXX:APV:KPLS-AA¹⁷-LYV:DHHKD:VEE:SXGXH, TVPKPXX:APV:KPLS-AA¹⁷-LYV:DHHKD:VEE:AXGXH, AVPKAXX:APV:KPLS-AA¹⁷-LYV:DHHKD:VEE:AXGXH, KVGKAXX:APV:KPLS-AA¹⁷-LYV:DHHKD:VEE:XGXR, KASKAXX:APV:KPLS-AA¹⁷-LYV:DHHKD:VEE:EXGXR, GSAGPXX:APV:KPLS-AA¹⁷-LYV:DHHKD:VEE:RXGXS, AAPASXX:APV:KPLS-AA¹⁷-LYV:DHHKD:VEE:AXGXR, STPPTXX:APV:KPLS-AA¹⁷-LYV:DHHKD:VEE:SXGXR, HVPKPXX:APV:KPLS-AA¹⁷-LYV:DHHKD:VEE:SXGXH, ASAAPXX:APV:KPLS-AA¹⁷-LYV:DHHKD:VEE:XKXS, ASASPXX:APV:KPLS-AA¹⁷-LYV:DHHKD:VEE:XKXS, NDEGLEX:APV:KPLS-AA¹⁷-LYV:DHHKD:VEE:KXEXR, NDEGLEX:APV:KPLS-AA¹⁷-LYV:DHHKD:VEE:QXEXR, SSVKXQP:APV:KPLS-AA¹⁷-LYV:DHHKD:VEE:LEXAXA, RNVQXRP:APV:KPLS-AA¹⁷-LYV:DHHKD:VEE:LAXKXE, KIPKAXX:VPT:KPLS-AA¹⁷-LYV:DHHKD:VVE:GXGXR, GIPEPXX:VPE:KPLS-AA¹⁷-LYV:DHHKD:TVE:SXAXR, SIPKAXX:VPT:KPLS-AA¹⁷-LYV:DHHKD:VVE:GXGXR, HVTKPTX:APT:KPLS-AA¹⁷-LYV:DHHKD:VVR:SXGXH, YVPKPXX:APT:KPLS-AA¹⁷-LYV:DHHKD:VVR:SXGXH, TVPKPXX:APT:KPLS-AA¹⁷-LYV:DHHKD:VVR:AXGXH, AVPKAXX:APT:KPLS-AA¹⁷-LYV:DHHKD:VVK:AXGXH, KVGKAXX:VPT:KPLS-AA¹⁷-LYV:DHHKD:VAE:XGXR, KASKAXX:VPT:KPLS-AA¹⁷-LYV:DHHKD:AVS:EXGXR, GSAGPXX:TPT:KPLS-AA¹⁷-LYV:DHHKD:VVD:RXGXS, AAPASXX:VPA:KPLS-AA¹⁷-LYV:DHHKD:VVE:AXGXR, STPPTXX:VPT:KPLS-AA¹⁷-LYV:DHHKD:VVE:SXGXR, HVPKPXX:APT:KPLS-AA¹⁷-LYV:DHHKD:VVR:SXGXH, ASAAPXX:VPQ:KPLS-AA¹⁷-LYV:DHHKD:VRS:XKXS, ASASPXX:VSQ:KPLS-AA¹⁷-LYV:DHHKD:VKS:XKXS, ASASPXX:VPQ:KPLS-AA¹⁷-LYV:DHHKD:VKS:XKXS, NDEGLEX:VPT:KPLS-AA¹⁷-LYV:DHHKD:QHN:KXEXR, NDEGLEX:VPT:KPLS-AA¹⁷-LYV:DHHKD:EHS:QXEXR, SSVKXQP:SRV:KPLS-AA¹⁷-LYV:DHHKD:EEH:LEXAXA, RNVQXRP:TQV:KPLS-AA¹⁷-LYV:DHHKD:EDH:LAXKXE, KIPKAXX:VPQ:EPLP-AA¹⁷-VYY:EQLSN:VRS:GXGXR, GIPEPXX:VPQ:EPLP-AA¹⁷-VYY:EQLSN:VRS:SXAXR, SIPKAXX:VPQ:EPLP-AA¹⁷-VYY:EQLSN:VRS:GXGXR, HVTKPTX:VPQ:EPLP-AA¹⁷-VYY:EQLSN:VRS:SXGXH, YVPKPXX:VPQ:EPLP-AA¹⁷-VYY:EQLSN:VRS:SXGXH, TVPKPXX:VPQ:EPLP-AA¹⁷-VYY:EQLSN:VRS:AXGXH, AVPKAXX:VPQ:EPLP-AA¹⁷-VYY:EQLSN:VRS:AXGXH, KVGKAXX:VPQ:EPLP-AA¹⁷-VYY:EQLSN:VRS:XGXR, KASKAXX:VPQ:EPLP-AA¹⁷-VYY:EQLSN:VRS:EXGXR, GSAGPXX:VPQ:EPLP-AA¹⁷-VYY:EQLSN:VRS:RXGXS, AAPASXX:VPQ:EPLP-AA¹⁷-VYY:EQLSN:VRS:AXGXR, STPPTXX:VPQ:EPLP-AA¹⁷-VYY:EQLSN:VRS:SXGXR, HVPKPXX:VPQ:EPLP-AA¹⁷-VYY:EQLSN:VRS:SXGXH, RVPSTXX:VPQ:EPLP-AA¹⁷-VYY:EQLSN:VRS:XGXL, ASASPXX:VPQ:EPLP-AA¹⁷-VYY:EQLSN:VRS:XKXS, NDEGLEX:VPQ:EPLP-AA¹⁷-VYY:EQLSN:VRS:KXEXR, NDEGLEX:VPQ:EPLP-AA¹⁷-VYY:EQLSN:VRS:QXEXR, SSVKXQP:VPQ:EPLP-AA¹⁷-VYY:EQLSN:VRS: LEXAXA, RNVQXRP:VPQ:EPLP-AA¹⁷-VYY:EQLSN:VRS:LAXKXE, KIPKAXX:VPT:EPLP-AA¹⁷-VYY:EQLSN:VVE:GXGXR, GIPEPXX:VPE:EPLP-AA¹⁷-VYY:EQLSN:TVE:SXAXR, SIPKAXX:VPT:EPLP-AA¹⁷-VYY:EQLSN:VVE:GXGXR, HVTKPTX:APT:EPLP-AA¹⁷-VYY:EQLSN:VVR:SXGXH, YVPKPXX:APT:EPLP-AA¹⁷-VYY:EQLSN:VVR:SXGXH, TVPKPXX:APT:EPLP-AA¹⁷-VYY:EQLSN:VVR:AXGXH, AVPKAXX:APT:EPLP-AA¹⁷-VYY:EQLSN:VVK:AXGXH, KVGKAXX:VPT:EPLP-AA¹⁷-VYY:EQLSN:VAE:XGXR, KASKAXX:VPT:EPLP-AA¹⁷-VYY:EQLSN:AVS:EXGXR, GSAGPXX:TPT:EPLP-AA¹⁷-VYY:EQLSN:VVD:RXGXS, AAPASXX:VPA:EPLP-AA¹⁷-VYY:EQLSN:VVE:AXGXR, STP PTXX:VPT:EPLP-AA¹⁷-VYY:EQLSN:VVE:SXGXR, HVPKPXX:APT:EPLP-AA¹⁷-VYY:EQLSN:VVR:SXGXH, RVPSTXX:APV:EPLP-AA¹⁷-VYY:EQLSN:VEE:XGXL, ASASPXX:VSQ:EPLP-AA¹⁷-VYY:EQLSN:VKS:XKXS, ASASPXX:VPQ:EPLP-AA¹⁷-VYY:EQLSN:VKS:XKXS, NDEGLEX:VPT:EPLP-AA¹⁷-VYY:EQLSN:QHN:KXEXR, NDEGLEX:VPT:EPLP-AA¹⁷-VYY:EQLSN:EHS:QXEXR, SSVKXQP:SRV:EPLP-AA¹⁷-VYY:EQLSN:EEH:LEXAXA, RNVQXRP:TQV:EPLP-AA¹⁷-VYY:EQLSN:EDH:LAXKXE, KIPKAXX:VSQ:EPLT-AA¹⁷-LYY:EQLSN:VKS:GXGXR, GIPEPXX:VSQ:EPLT-AA¹⁷-LYY:EQLSN:VKS:SXAXR, SIPKAXX:VSQ:EPLT-AA¹⁷-LYY:EQLSN:VKS:GXGXR, HVTKPTX:VSQ:EPLT-AA¹⁷-LYY:EQLSN:VKS:SXGXH, YVPKPXX:VSQ:EPLT-AA¹⁷-LYY:EQLSN:VKS:SXGXH, TVPKPXX:VSQ:EPLT-AA¹⁷-LYY:EQLSN:VKS:AXGXH, AVPKAXX:VSQ:EPLT-AA¹⁷-LYY:EQLSN:VKS:AXGXH, KVGKAXX:VSQ:EPLT-AA¹⁷-LYY:EQLSN:VKS:XGXR, KASKAXX:VSQ:EPLT-AA¹⁷-LYY:EQLSN:VKS:EXGXR, GSAGPXX:VSQ:EPLT-AA¹⁷-LYY:EQLSN:VKS:SRXGXS, AAPASXX:VSQ:EPLT-AA¹⁷-LYY:EQLSN:VKS:AXGXR, STPPTXX:VSQ:EPLT-AA¹⁷-LYY:EQLSN:VKS:SXGXR, HVPKPXX:VSQ:EPLT-AA¹⁷-LYY:EQLSN:VKS:SXGXH, RVPSTXX:VSQ:EPLT-AA¹⁷-LYY:EQLSN:VKS:XGXL, ASAAPXX:VSQ:EPLT-AA¹⁷-LYY:EQLSN:VKS:XKXS, ASASPXX:VSQ:EPLT-AA¹⁷-LYY:EQLSN:VKS:XKXS, NDEGLEX:VSQ:EPLT-AA¹⁷-LYY:EQLSN:VKS:KXEXR, NDEGLEX:VSQ:EPLT-AA¹⁷-LYY:EQLSN:VKS:QXEXR, SSVKXQP:VSQ:EPLT-AA¹⁷-LYY:EQLSN:VKS: LEXAXA, RNVQXRP:VSQ:EPLT-AA¹⁷-LYY:EQLSN:VKS:LAXKXE, KIPKAXX:VPT:EPLT-AA¹⁷-LYY:EQLSN:VVE:GXGXR, GIPEPXX:VPE:EPLT-AA¹⁷-LYY:EQLSN:TVE:SXAXR, SIPKAXX:VPT:EPLT-AA¹⁷-LYY:EQLSN:VVE:GXGXR, HVTKPTX:APT:EPLT-AA¹⁷-LYY:EQLSN:VVR:SXGXH, YVPKPXX:APT:EPLT-AA¹⁷-LYY:EQLSN:VVR:SXGXH, TVPKPXX:APT:EPLT-AA¹⁷-LYY:EQLSN:VVR:AXGXH, AVPKAXX:APT:EPLT-AA¹⁷-LYY:EQLSN:VVK:AXGXH, KVGKAXX:VPT:EPLT-AA¹⁷-LYY:EQLSN:VAE:XGXR, KASKAXX:VPT:EPLT-AA¹⁷-LYY:EQLSN:AVS:EXGXR, GSAGPXX:TPT:EPLT-AA¹⁷-LYY:EQLSN:VVD:RXGXS, AAPASXX:VPA:EPLT-AA¹⁷-LYY:EQLSN:VVE:AXGXR, STPPTXX:VPT:EPLT-AA¹⁷-LYY:EQLSN:VVE:SXGXR, HVPKPXX:APT:EPLT-AA¹⁷-LYY:EQLSN:VVR:SXGXH, RVPSTXX:APV:EPLT-AA¹⁷-LYY:EQLSN:VEE:XGXL, ASAAPXX:VPQ:EPLT-AA¹⁷-LYY:EQLSN:VRS:XKXS, ASASPXX:VPQ:EPLT-AA¹⁷-LYY:EQLSN:VKS:XKXS, NDEGLEX:VPT:EPLT-AA¹⁷-LYY:EQLSN:QHN:KXEXR, NDEGLEX:VPT:EPLT-AA¹⁷-LYY:EQLSN:EHS:QXEXR, SSVKXQP:SRV:EPLT-AA¹⁷-LYY:EQLSN:EEH:LEXAXA, RNVQXRP:TQV:EPLT-AA¹⁷-LYY:EQLSN:EDH:LAXKXE, KIPKAXX:VPQ:EPLT-AA¹⁷-LYY:EQLSN:VKS:GXGXR, GIPEPXX:VPQ:EPLT-AA¹⁷-LYY:EQLSN:VKS:SXAXR, SIPKAXX:VPQ:EPLT-AA¹⁷-LYY:EQLSN:VKS:GXGXR, HVTKPTX:VPQ:EPLT-AA¹⁷-LYY:EQLSN:VKS:SXGXH, YVPKPXX:VPQ:EPLT-AA¹⁷-LYY:EQLSN:VKS:SXGXH, TVPKPXX:VPQ:EPLT-AA¹⁷-LYY:EQLSN:VKS:AXGXH, AVPKAXX:VPQ:EPLT-AA¹⁷-LYY:EQLSN:VKS:AXGXH, KVGKAXX:VPQ:EPLT-AA¹⁷-LYY:EQLSN:VKS:XGXR, KASKAXX:VPQ:EPLT-AA¹⁷-LYY:EQLSN:VKS:EXGXR, GSAGPXX:VPQ:EPLT-AA¹⁷-LYY:EQLSN:VKS:RXGXS, AAPASXX:VPQ:EPLT-AA¹⁷-LYY:EQLSN:VKS:AXGXR, STPPTXX:VPQ:EPLT-AA¹⁷-LYY:EQLSN:VKS:SXGXR, HVPKPXX:VPQ:EPLT-AA¹⁷-LYY:EQLSN:VKS:SXGXH, RVPSTXX:VPQ:EPLT-AA¹⁷-LYY:EQLSN:VKS:XGXL, ASAAPXX:VPQ:EPLT-AA¹⁷-LYY:EQLSN:VKS:XKXS, NDEGLEX:VPQ:EPLT-AA¹⁷-LYY:EQLSN:VKS:KXEXR, NDEGLEX:VPQ:EPLT-AA¹⁷-LYY:EQLSN:VKS:QXEXR, SSVKXQP:VPQ:EPLT-AA¹⁷-LYY:EQLSN:VKS:LEXAXA, RNVQXRP:VPQ:EPLT-AA¹⁷-LYY:EQLSN:VKS:LAXKXE, KIPKAXX:VPT:SNIT-AA¹⁷-QIM:IGEMS:QHN:GXGXR, GIPEPXX:VPT:SNIT-AA¹⁷-QIM:IGEMS:QHN:SXAXR, SIPKAXX:VPT:SNIT-AA¹⁷-QIM:IGEMS:QHN:GXGXR, HVTKPTX:VPT:SNIT-AA¹⁷-QIM:IGEMS:QHN:SXGXH, YVPKPXX:VPT:SNIT-AA¹⁷-QIM:IGEMS:QHN:SXGXH, TVPKPXX:VPT:SNIT-AA¹⁷-QIM:IGEMS:QHN:AXGXH, AVPKAXX:VPT:SNIT-AA¹⁷-QIM:IGEMS:QHN:AXGXH, KVGKAXX:VPT:SNIT-AA¹⁷-QIM:IGEMS:QHN:XGXR, KASKAXX:VPT:SNIT-AA¹⁷-QIM:IGEMS:QHN:EXGXR, GSAGPXX:VPT:SNIT-AA¹⁷-QIM:IGEMS:QHN:RXGXS, AAPASXX:VPT:SNIT-AA¹⁷-QIM:IGEMS:QHN:AXGXR, STPPTXX:VPT:SNIT-AA¹⁷-QIM:IGEMS:QHN:SXGXR, HVPKPXX:VPT:SNIT-AA¹⁷-QIM:IGEMS:QHN:SXGXH, RVPSTXX:VPT:SNIT-AA¹⁷-QIM:IGEMS:QHN:XGXL, ASAAPXX:VPT:SNIT-AA¹⁷-QIM:IGEMS:QHN:XKXS, ASASPXX:VPT:SNIT-AA¹⁷-QIM:IGEMS:QHN:XKXS, NDEGLEX:VPT:SNIT-AA¹⁷-QIM:IGEMS:QHN:QXEXR, NDEGLEX:VPT:SNIT-AA¹⁷-QIM:IGEMS:QHN:KXEXR, SSVKXQP:VPT:SNIT-AA¹⁷-QIM:IGEMS:QHN:LEXAXA, RNVQXRP:VPT:SNIT-AA¹⁷-QIM:IGEMS:QHN:LAXKXE, KIPKAXX:VPT:SNIT-AA¹⁷-QIM:IGEMS:VVE:GXGXR, GIPEPXX:VPE:SNIT-AA¹⁷-QIM:IGEMS:TVE:SXAXR, SIPKAXX:VPT:SNIT-AA¹⁷-QIM:IGEMS:VVE:GXGXR, HVTKPTX:APT:SNIT-AA¹⁷-QIM:IGEMS:VVR:SXGXH, YVPKPXX:APT:SNIT-AA¹⁷-QIM:IGEMS:VVR:SXGXH, TVPKPXX:APT:SNIT-AA¹⁷-QIM:IGEMS:VVR:AXGXH, AVPKAXX:APT:SNIT-AA¹⁷-QIM:IGEMS:VVK:AXGXH, KVGKAXX:VPT:SNIT-AA¹⁷-QIM:IGEMS:VAE:XGXR, KASKAXX:VPT:SNIT-AA¹⁷-QIM:IGEMS:AVS:EXGXR, GSAGPXX:TPT:SNIT-AA¹⁷-QIM:IGEMS:VVD:RXGXS, AAPASXX:VPA:SNIT-AA¹⁷-QIM:IGEMS:VVE:AXGXR, STPPTXX:VPT:SNIT-AA¹⁷-QIM:IGEMS:VVE:SXGXR, HVPKPXX:APT:SNIT-AA¹⁷-QIM:IGEMS:VVR:SXGXH, RVPSTXX:APV:SNIT-AA¹⁷-QIM:IGEMS:VEE:XGXL, ASAAPXX:VPQ:SNIT-AA¹⁷-QIM:IGEMS:VRS:XKXS, ASASPXX:VSQ:SNIT-AA¹⁷-QIM:IGEMS:VKS:XKXS, ASASPXX:VPQ:SNIT-AA¹⁷-QIM:IGEMS:VKS:XKXS, NDEGLEX:VPT:SNIT-AA¹⁷-QIM:IGEMS:EHS:QXEXR, SSVKXQP:SRV:SNIT-AA¹⁷-QIM:IGEMS:EEH:LEXAXA, RNVQXRP:TQV:SNIT-AA¹⁷-QIM:IGEMS:EDH:LAXKXE, KIPKAXX:VPT:SNIT-AA¹⁷-QIM:LGEMS:EHS:GXGXR, GIPEPXX:VPT:SNIT-AA¹⁷-QIM:LGEMS:EHS:SXAXR, SIPKAXX:VPT:SNIT-AA¹⁷-QIM:LGEMS:EHS:GXGXR, HVTKPTX:VPT:SNIT-AA¹⁷-QIM:LGEMS:EHS:SXGXH, YVPKPXX:VPT:SNIT-AA¹⁷-QIM:LGEMS:EHS:SXGXH, TVPKPXX:VPT:SNIT-AA¹⁷-QIM:LGEMS:EHS:AXGXH, AVPKAXX:VPT:SNIT-AA¹⁷-QIM:LGEMS:EHS:AXGXH, KVGKAXX:VPT:SNIT-AA¹⁷-QIM:LGEMS:EHS:XGXR, KASKAXX:VPT:SNIT-AA¹⁷-QIM:LGEMS:EHS:EXGXR, GSAGPXX:VPT:SNIT-AA¹⁷-QIM:LGEMS:EHS:GXGXS, AAPASXX:VPT:SNIT-AA¹⁷-QIM:LGEMS:EHS:AXGXR, STPPTXX:VPT:SNIT-AA¹⁷-QIM:LGEMS:EHS:SXGXR, HVPKPXX:VPT:SNIT-AA¹⁷-QIM:LGEMS:EHS:SXGXH, RVPSTXX:VPT:SNIT-AA¹⁷-QIM:LGEMS:EHS:XGXL, ASAAPXX:VPT:SNIT-AA¹⁷-QIM:LGEMS:EHS:XKXS, ASASPXX:VPT:SNIT-AA¹⁷-QIM:LGEMS:EHS:XKXS, NDEGLEX:VPT:SNIT-AA¹⁷-QIM:LGEMS:EHS:KXEXR, SSVKXQP:VPT:SNIT-AA¹⁷-QIM:LGEMS:EHS:LEXAXA, RNVQXRP:VPT:SNIT-AA¹⁷-QIM:LGEMS:EHS:LAXKXE, KIPKAXX:VPT:SNIT-AA¹⁷-QIM:LGEMS:VVE:GXGXR, GIPEPXX:VPE:SNIT-AA¹⁷-QIM:LGEMS:TVE:SXAXR, SIPKAXX:VPT:SNIT-AA¹⁷-QIM:LGEMS:VVE:GXGXR, HVTKPTX:APT:SNIT-AA¹⁷-QIM:LGEMS:VVR:SXGXH, YVPKPXX:APT:SNIT-AA¹⁷-QIM:LGEMS:VVR:SXGXH, TVPKPXX:APT:SNIT-AA¹⁷-QIM:LGEMS:VVR:AXGXH, AVPKAXX:APT:SNIT-AA¹⁷-QIM:LGEMS:VVK:AXGXH, KVGKAXX:VPT:SNIT-AA¹⁷-QIM:LGEMS:VAE:XGXR, KASKAXX:VPT:SNIT-AA¹⁷-QIM:LGEMS:AVS:EXGXR, GSAGPXX:TPT:SNIT-AA¹⁷-QIM:LGEMS:VVD:RXGXS, AAPASXX:VPA:SNIT-AA¹⁷-QIM:LGEMS:VVE:AXGXR, STPPTXX:VPT:SNIT-AA¹⁷-QIM:LGEMS:VVE:SXGXR, HVPKPXX:APT:SNIT-AA¹⁷-QIM:LGEMS:VVR:SXGXH, RVPSTXX:APV:SNIT-AA¹⁷-QIM:LGEMS:VEE:XGXL, ASAAPXX:VPQ:SNIT-AA¹⁷-QIM:LGEMS:VRS:XKXS, ASASPXX:VSQ:SNIT-AA¹⁷-QIM:LGEMS:VKS:XKXS, ASASPXX:VPQ:SNIT-AA¹⁷-QIM:LGEMS:VKS:XKXS, NDEGLEX:VPT:SNIT-AA¹⁷-QIM:LGEMS:QHN:KXEXR, SSVKXQP:SRV:SNIT-AA¹⁷-QIM:LGEMS:EEH:LEXAXA, RNVQXRP:TQV:SNIT-AA¹⁷-QIM:LGEMS:EDH:LAXKXE, KIPKAXX:SRV:RSVK-AA¹⁷-AKV:KEVQV:EEH:GXGXR, GIPEPXX:SRV:RSVK-AA¹⁷-AKV:KEVQV:EEH:SXAXR, SIPKAXX:SRV:RSVK-AA¹⁷-AKV:KEVQV:EEH:GXGXR, HVTKPTX:SRV:RSVK-AA¹⁷-AKV:KEVQV:EEH:SXGXH, YVPKPXX:SRV:RSVK-AA¹⁷-AKV:KEVQV:EEH:SXGXH, TVPKPXX:SRV:RSVK-AA¹⁷-AKV:KEVQV:EEH:AXGXH, AVPKAXX:SRV:RSVK-AA¹⁷-AKV:KEVQV:EEH:AXGXH, KVGKAXX:SRV:RSVK-AA¹⁷-AKV:KEVQV:EEH:XGXR, KASKAXX:SRV:RSVK-AA¹⁷-AKV:KEVQV:EEH:EXGXR, GSAGPXX:SRV:RSVK-AA¹⁷-AKV:KEVQV:EEH:RXGXS, AAPASXX:SRV:RSVK-AA¹⁷-AKV:KEVQV:EEH:AXGXR, STPPTXX:SRV:RSVK-AA¹⁷-AKV:KEVQV:EEH:SXGXR, HVPKPXX:SRV:RSVK-AA¹⁷-AKV:KEVQV:EEH:SXGXH, RVPSTXX:SRV:RSVK-AA¹⁷-AKV:KEVQV:EEH:XGXL, ASAAPXX:SRV:RSVK-AA¹⁷-AKV:KEVQV:EEH:XKXS, ASASPXX:SRV:RSVK-AA¹⁷-AKV:KEVQV:EEH:XKXS, NDEGLEX:SRV:RSVK-AA¹⁷-AKV:KEVQV:EEH:KXEXR, NDEGLEX:SRV:RSVK-AA¹⁷-AKV:KEVQV:EEH:QXEXR, RNVQXRP:SRV:RSVK-AA¹⁷-AKV:KEVQV:EEH:LAXKXE, KIPKAXX:VPT:RSVK-AA¹⁷-AKV:KEVQV:VVE:GXGXR, GIPEPXX:VPE:RSVK-AA¹⁷-AKV:KEVQV:TVE:SXAXR, SIPKAXX:VPT:RSVK-AA¹⁷-AKV:KEVQV:VVE:GXGXR, HVTKPTX:APT:RSVK-AA¹⁷-AKV:KEVQV:VVR:SXGXH, YVPKPXX:APT:RSVK-AA¹⁷-AKV:KEVQV:VVR:SXGXH, TVPKPXX:APT:RSVK-AA¹⁷-AKV:KEVQV:VVR:AXGXH, AVPKAXX:APT:RSVK-AA¹⁷-AKV:KEVQV:VVK:AXGXH, KVGKAXX:VPT:RSVK-AA¹⁷-AKV:KEVQV:VAE:XGXR, KASKAXX:VPT:RSVK-AA¹⁷-AKV:KEVQV:AVS:EXGXR, GSAGPXX:TPT:RSVK-AA¹⁷-AKV:KEVQV:VVD:RXGXS, AAPASXX:VPA:RSVK-AA¹⁷-AKV:KEVQV:VVE:AXGXR, STPPTXX:VPT:RSVK-AA¹⁷-AKV:KEVQV:VVE:SXGXR, HVPKPXX:APT:RSVK-AA¹⁷-AKV:KEVQV:VVR:SXGXH, RVPSTXX:APV:RSVK-AA¹⁷-AKV:KEVQV:VEE:XGXL, ASAAPXX:VPQ:RSVK-AA¹⁷-AKV:KEVQV:VRS:XKXS, ASASPXX:VSQ:RSVK-AA¹⁷-AKV:KEVQV:VKS:XKXS, ASASPXX:VPQ:RSVK-AA¹⁷-AKV:KEVQV:VKS:XKXS, NDEGLEX:VPT:RSVK-AA¹⁷-AKV:KEVQV:QHN:KXEXR, NDEGLEX:VPT:RSVK-AA¹⁷-AKV:KEVQV:EHS:QXEXR, RNVQXRP:TQV:RSVK-AA¹⁷-AKV:KEVQV:EDH:LAXKXE, KIPKAXX:TQV:RPVQ-AA¹⁷-RKI:KKATV:EDH:GXGXR, GIPEPXX:TQV:RPVQ-AA¹⁷-RKI:KKATV:EDH:SXAXR, SIPKAXX:TQV:RPVQ-AA¹⁷-RKI:KKATV:EDH:GXGXR, HVTKPTX:TQV:RPVQ-AA¹⁷-RKI:KKATV:EDH:SXGXH, YVPKPXX:TQV:RPVQ-AA¹⁷-RKI:KKATV:EDH:SXGXH, TVPKPXX:TQV:RPVQ-AA¹⁷-RKI:KKATV:EDH:AXGXH, AVPKAXX:TQV:RPVQ-AA¹⁷-RKI:KKATV:EDH:AXGXH, KVGKAXX:TQV:RPVQ-AA¹⁷-RKI:KKATV:EDH:XGXR, KASKAXX:TQV:RPVQ-AA¹⁷-RKI:KKATV:EDH:EXGXR, GSAGPXX:TQV:RPVQ-AA¹⁷-RKI:KKATV:EDH:RXGXS, AAPASXX:TQV:RPVQ-AA¹⁷-RKI:KKATV:EDH:AXGXR, STP PTXX:TQV:RPVQ-AA¹⁷-RKI:KKATV:EDH:SXGXR, HVPKPXX:TQV:RPVQ-AA¹⁷-RKI:KKATV:EDH:SXGXH, RVPSTXX:TQV:RPVQ-AA¹⁷-RKI:KKATV:EDH:XGXL, ASAAPXX:TQV:RPVQ-AA¹⁷-RKI:KKATV:EDH:XKXS, ASASPXX:TQV:RPVQ-AA¹⁷-RKI:KKATV:EDH:XKXS, NDEGLEX:TQV:RPVQ-AA¹⁷-RKI:KKATV:EDH:KXEXR, NDEGLEX:TQV:RPVQ-AA¹⁷-RKI:KKATV:EDH:QXEXR, SSVKXQP:TQV:RPVQ-AA¹⁷-RKI:KKATV:EDH:LEXAXA, KIPKAXX:VPT:RPVQ-AA¹⁷-RKI:KKATV:VVE:GXGXR, GIPEPXX:VPE:RPVQ-AA¹⁷-RKI:KKATV:TVE:SXAXR, SIPKAXX:VPT:RPVQ-AA¹⁷-RKI:KKATV:VVE:GXGXR, HVTKPTX:APT:RPVQ-AA¹⁷-RKI:KKATV:VVR:SXGXH, YVPKPXX:APT:RPVQ-AA¹⁷-RKI:KKATV:VVR:SXGXH, TVPKPXX:APT:RPVQ-AA¹⁷-RKI:KKATV:VVR:AXGXH, AVPKAXX:APT:RPVQ-AA¹⁷-RKI:KKATV:VVK:AXGXH, KVGKAXX:VPT:RPVQ-AA¹⁷-RKI:KKATV:VAE:XGXR, KASKAXX:VPT:RPVQ-AA¹⁷-RKI:KKATV:AVS:EXGXR, GSAGPXX:TPT:RPVQ-AA¹⁷-RKI:KKATV:VVD:RXGXS, AAPASXX:VPA:RPVQ-AA¹⁷-RKI:KKATV:VVE:AXGXR, STPPTXX:VPT:RPVQ-AA¹⁷-RKI:KKATV:VVE:SXGXR, HVPKPXX:APT:RPVQ-AA¹⁷-RKI:KKATV:VVR:SXGXH, RVPSTXX:APV:RPVQ-AA¹⁷-RKI:KKATV:VEE:XGXL, ASAAPXX:VPQ:RPVQ-AA¹⁷-RKI:KKATV:VRS:XKXS, ASASPXX:VSQ:RPVQ-AA¹⁷-RKI:KKATV:VKS:XKXS, ASASPXX:VPQ:RPVQ-AA¹⁷-RKI:KKATV:VKS:XKXS, NDEGLEX:VPT:RPVQ-AA¹⁷-RKI:KKATV:QHN:KXEXR, NDEGLEX:VPT:RPVQ-AA¹⁷-RKI:KKATV:EHS:QXEXR and SSVKXQP:SRV:RPVQ-AA¹⁷-RKI:KKATV:EEH:LEXAXA; and wherein AA¹⁷ is selected from the group consisting of G, A, V, L, I, P, F, M, W, T and S (in particular is selected from the group consisting of M, I, L, V and T). More particularly, the hexaplet PEP7:PEP3:PEP12:PEP2:PEP4:PEP8 is selected from the group consisting of GIPEPXX:VPT:SAIS-AA¹⁷-LYL:LKNYQ:VVE:SXAXR, HVTKPTX:VPT:SAIS-AA¹⁷-LYL:LKNYQ:VVE:SXGXH, YVPKPXX:VPT:SAIS-AA¹⁷-LYL:LKNYQ:VVE:SXGXH, TVPKPXX:VPT:SAIS-AA¹⁷-LYL:LKNYQ:VVE:AXGXH, AVPKAXX:VPT:SAIS-AA¹⁷-LYL:LKNYQ:VVE:AXGXH, KVGKAXX:VPT:SAIS-AA¹⁷-LYL:LKNYQ:VVE:XGXR, KASKAXX:VPT:SAIS-AA¹⁷-LYL:LKNYQ:VVE:EXGXR, GSAGPXX:VPT:SAIS-AA¹⁷-LYL:LKNYQ:VVE:RXGXS, AAPASXX:VPT:SAIS-AA¹⁷-LYL:LKNYQ:VVE:AXGXR, STPPTXX:VPT:SAIS-AA¹⁷-LYL:LKNYQ:VVE:SXGXR, HVPKPXX:VPT:SAIS-AA¹⁷-LYL:LKNYQ:VVE:SXGXH, RVPSTXX:VPT:SAIS-AA¹⁷-LYL:LKNYQ:VVE:XGXL, ASAAPXX:VPT:SAIS-AA¹⁷-LYL:LKNYQ:VVE:XKXS, ASASPXX:VPT:SAIS-AA¹⁷-LYL:LKNYQ:VVE:XKXS, GIPEPXX:VPE:SAIS-AA¹⁷-LYL:LKNYQ:TVE:SXAXR, HVTKPTX:APT:SAIS-AA¹⁷-LYL:LKNYQ:VVR:SXGXH, YVPKPXX:APT:SAIS-AA¹⁷-LYL:LKNYQ:VVR:SXGXH, TVPKPXX:APT:SAIS-AA¹⁷-LYL:LKNYQ:VVR:AXGXH, AVPKAXX:APT:SAIS-AA¹⁷-LYL:LKNYQ:VVK:AXGXH, KVGKAXX:VPT:SAIS-AA¹⁷-LYL:LKNYQ:VAE:XGXR, KASKAXX:VPT:SAIS-AA¹⁷-LYL:LKNYQ:AVS:EXGXR, GSAGPXX:TPT:SAIS-AA¹⁷-LYL:LKNYQ:VVD:RXGXS, AAPASXX:VPA:SAIS-AA¹⁷-LYL:LKNYQ:VVE:AXGXR, HVPKPXX:APT:SAIS-AA¹⁷-LYL:LKNYQ:VVR:SXGXH, RVPSTXX:APV:SAIS-AA¹⁷-LYL:LKNYQ:VEE:XGXL, ASAAPXX:VPQ:SAIS-AA¹⁷-LYL:LKNYQ:VRS:XKXS, ASASPXX:VSQ:SAIS-AA¹⁷-LYL:LKNYQ:VKS:XKXS, ASASPXX:VPQ:SAIS-AA¹⁷-LYL:LKNYQ:VKS:XKXS, NDEGLEX:VPT:SAIS-AA¹⁷-LYL:LKNYQ:QHN:KXEXR, NDEGLEX:VPT:SAIS-AA¹⁷-LYL:LKNYQ:EHS:QXEXR, SSVKXQP:SRV:SAIS-AA¹⁷-LYL:LKNYQ:EEH:LEXAXA, RNVQXRP:TQV:SAIS-AA¹⁷-LYL:LKNYQ:EDH:LAXKXE, KIPKAXX:VPE:SSLS-AA¹⁷-LFF:LKVYP:TVE:GXGXR, SIPKAXX:VPE:SSLS-AA¹⁷-LFF:LKVYP:TVE:GXGXR, HVTKPTX:VPE:SSLS-AA¹⁷-LFF:LKVYP:TVE:SXGXH, YVPKPXX:VPE:SSLS-AA¹⁷-LFF:LKVYP:TVE:SXGXH, TVPKPXX:VPE:SSLS-AA¹⁷-LFF:LKVYP:TVE:AXGXH, AVPKAXX:VPE:SSLS-AA¹⁷-LFF:LKVYP:TVE:AXGXH, KVGKAXX:VPE:SSLS-AA¹⁷-LFF:LKVYP:TVE:XGXR, KASKAXX:VPE:SSLS-AA¹⁷-LFF:LKVYP:TVE:EXGXR, GSAGPXX:VPE:SSLS-AA¹⁷-LFF:LKVYP:TVE:RXGXS, AAPASXX:VPE:SSLS-AA¹⁷-LFF:LKVYP:TVE:AXGXR, STPPTXX:VPE:SSLS-AA¹⁷-LFF:LKVYP:TVE:SXGXR, HVPKPXX:VPE:SSLS-AA¹⁷-LFF:LKVYP:TVE:SXGXH, RVPSTXX:VPE:SSLS-AA¹⁷-LFF:LKVYP:TVE:XGXL, ASAAPXX:VPE:SSLS-AA¹⁷-LFF:LKVYP:TVE:XKXS, ASASPXX:VPE:SSLS-AA¹⁷-LFF:LKVYP:TVE:XKXS, KIPKAXX:VPT:SSLS-AA¹⁷-LFF:LKVYP:VVE:GXGXR, SIPKAXX:VPT:SSLS-AA¹⁷-LFF:LKVYP:VVE:GXGXR, HVTKPTX:APT:SSLS-AA¹⁷-LFF:LKVYP:VVR:SXGXH, YVPKPXX:APT:SSLS-AA¹⁷-LFF:LKVYP:VVR:SXGXH, TVPKPXX:APT:SSLS-AA¹⁷-LFF:LKVYP:VVR:AXGXH, AVPKAXX:APT:SSLS-AA¹⁷-LFF:LKVYP:VVK:AXGXH, KVGKAXX:VPT:SSLS-AA¹⁷-LFF:LKVYP:VAE:XGXR, KASKAXX:VPT:SSLS-AA¹⁷-LFF:LKVYP:AVS:EXGXR, GSAGPXX:TPT:SSLS-AA¹⁷-LFF:LKVYP:VVD:RXGXS, AAPASXX:VPA:SSLS-AA¹⁷-LFF:LKVYP:VVE:AXGXR, STPPTXX:VPT:SSLS-AA¹⁷-LFF:LKVYP:VVE:SXGXR, HVPKPXX:APT:SSLS-AA¹⁷-LFF:LKVYP:VVR:SXGXH, RVPSTXX:APV:SSLS-AA¹⁷-LFF:LKVYP:VEE:XGXL, ASAAPXX:VPQ:SSLS-AA¹⁷-LFF:LKVYP:VRS:XKXS, ASASPXX:VSQ:SSLS-AA¹⁷-LFF:LKVYP:VKS:XKXS, ASASPXX:VPQ:SSLS-AA¹⁷-LFF:LKVYP:VKS:XKXS, NDEGLEX:VPT:SSLS-AA¹⁷-LFF:LKVYP:QHN:KXEXR, NDEGLEX:VPT:SSLS-AA¹⁷-LFF:LKVYP:EHS:QXEXR, SSVKXQP:SRV:SSLS-AA¹⁷-LFF:LKVYP:EEH:LEXAXA, RNVQXRP:TQV:SSLS-AA¹⁷-LFF:LKVYP:EDH:LAXKXE, KIPKAXX:APT:NAIS-AA¹⁷-LYF:LKKYR:VVR:GXGXR, GIPEPXX:APT:NAIS-AA¹⁷-LYF:LKKYR:VVR:SXAXR, SIPKAXX:APT:NAIS-AA¹⁷-LYF:LKKYR:VVR:GXGXR, AVPKAXX:APT:NAIS-AA¹⁷-LYF:LKKYR:VVR:AXGXH, KVGKAXX:APT:NAIS-AA¹⁷-LYF:LKKYR:VVR:XGXR, KASKAXX:APT:NAIS-AA¹⁷-LYF:LKKYR:VVR:EXGXR, GSAGPXX:APT:NAIS-AA¹⁷-LYF:LKKYR:VVR:RXGXS, AAPASXX:APT:NAIS-AA¹⁷-LYF:LKKYR:VVR:AXGXR, STPPTXX:APT:NAIS-AA¹⁷-LYF:LKKYR:VVR:SXGXR, RVPSTXX:APT:NAIS-AA¹⁷-LYF:LKKYR:VVR:XGXL, ASAAPXX:APT:NAIS-AA¹⁷-LYF:LKKYR:VVR:XKXS, ASASPXX:APT:NAIS-AA¹⁷-LYF:LKKYR:VVR:XKXS, KIPKAXX:VPT:NAIS-AA¹⁷-LYF:LKKYR:VVE:GXGXR, GIPEPXX:VPE:NAIS-AA¹⁷-LYF:LKKYR:TVE:SXAXR, SIPKAXX:VPT:NAIS-AA¹⁷-LYF:LKKYR:VVE:GXGXR, AVPKAXX:APT:NAIS-AA¹⁷-LYF:LKKYR:VVK:AXGXH, KVGKAXX:VPT:NAIS-AA¹⁷-LYF:LKKYR:VAE:XGXR, KASKAXX:VPT:NAIS-AA¹⁷-LYF:LKKYR:AVS:EXGXR, GSAGPXX:TPT:NAIS-AA¹⁷-LYF:LKKYR:VVD:RXGXS, AAPASXX:VPA:NAIS-AA¹⁷-LYF:LKKYR:VVE:AXGXR, STPPTXX:VPT:NAIS-AA¹⁷-LYF:LKKYR:VVE:SXGXR, RVPSTXX:APV:NAIS-AA¹⁷-LYF:LKKYR:VEE:XGXL, ASAAPXX:VPQ:NAIS-AA¹⁷-LYF:LKKYR:VRS:XKXS, ASASPXX:VSQ:NAIS-AA¹⁷-LYF:LKKYR:VKS:XKXS, ASASPXX:VPQ:NAIS-AA¹⁷-LYF:LKKYR:VKS:XKXS, NDEGLEX:VPT:NAIS-AA¹⁷-LYF:LKKYR:QHN:KXEXR, NDEGLEX:VPT:NAIS-AA¹⁷-LYF:LKKYR:EHS:QXEXR, SSVKXQP:SRV:NAIS-AA¹⁷-LYF:LKKYR:EEH:LEXAXA, RNVQXRP:TQV:NAIS-AA¹⁷-LYF:LKKYR:EDH:LAXKXE, KIPKAXX:APT:SATS-AA¹⁷-LYY:LRKHR:VVK:GXGXR, GIPEPXX:APT:SATS-AA¹⁷-LYY:LRKHR:VVK:SXAXR, SIPKAXX:APT:SATS-AA¹⁷-LYY:LRKHR:VVK:GXGXR, HVTKPTX:APT:SATS-AA¹⁷-LYY:LRKHR:VVK:SXGXH, YVPKPXX:APT:SATS-AA¹⁷-LYY:LRKHR:VVK:SXGXH, TVPKPXX:APT:SATS-AA¹⁷-LYY:LRKHR:VVK:AXGXH, KVGKAXX:APT:SATS-AA¹⁷-LYY:LRKHR:VVK:XGXR, KASKAXX:APT:SATS-AA¹⁷-LYY:LRKHR:VVK:EXGXR, GSAGPXX:APT:SATS-AA¹⁷-LYY:LRKHR:VVK:RXGXS, AAPASXX:APT:SATS-AA¹⁷-LYY:LRKHR:VVK:AXGXR, STPPTXX:APT:SATS-AA¹⁷-LYY:LRKHR:VVK:SXGXR, HVPKPXX:APT:SATS-AA¹⁷-LYY:LRKHR:VVK:SXGXH, RVPSTXX:APT:SATS-AA¹⁷-LYY:LRKHR:VVK:XGXL, ASAAPXX:APT:SATS-AA¹⁷-LYY:LRKHR:VVK:XKXS, ASASPXX:APT:SATS-AA¹⁷-LYY:LRKHR:VVK:XKXS, KIPKAXX:VPT:SATS-AA¹⁷-LYY:LRKHR:VVE:GXGXR, GIPEPXX:VPE:SATS-AA¹⁷-LYY:LRKHR:TVE:SXAXR, SIPKAXX:VPT:SATS-AA¹⁷-LYY:LRKHR:VVE:GXGXR, HVTKPTX:APT:SATS-AA¹⁷-LYY:LRKHR:VVR:SXGXH, YVPKPXX:APT:SATS-AA¹⁷-LYY:LRKHR:VVR:SXGXH, TVPKPXX:APT:SATS-AA¹⁷-LYY:LRKHR:VVR:AXGXH, KVGKAXX:VPT:SATS-AA¹⁷-LYY:LRKHR:VAE:XGXR, KASKAXX:VPT:SATS-AA¹⁷-LYY:LRKHR:AVS:EXGXR, GSAGPXX:TPT:SATS-AA¹⁷-LYY:LRKHR:VVD:RXGXS, AAPASXX:VPA:SATS-AA¹⁷-LYY:LRKHR:VVE:AXGXR, STPPTXX:VPT:SATS-AA¹⁷-LYY:LRKHR:VVE:SXGXR, HVPKPXX:APT:SATS-AA¹⁷-LYY:LRKHR:VVR:SXGXH, RVPSTXX:APV:SATS-AA¹⁷-LYY:LRKHR:VEE:XGXL, ASAAPXX:VPQ:SATS-AA¹⁷-LYY:LRKHR:VRS:XKXS, ASASPXX:VSQ:SATS-AA¹⁷-LYY:LRKHR:VKS:XKXS, ASASPXX:VPQ:SATS-AA¹⁷-LYY:LRKHR:VKS:XKXS, NDEGLEX:VPT:SATS-AA¹⁷-LYY:LRKHR:QHN:KXEXR, NDEGLEX:VPT:SATS-AA¹⁷-LYY:LRKHR:EHS:QXEXR, SSVKXQP:SRV:SATS-AA¹⁷-LYY:LRKHR:EEH:LEXAXA, RNVQXRP:TQV:SATS-AA¹⁷-LYY:LRKHR:EDH:LAXKXE, KIPKAXX:VPT:SPIS-AA¹⁷-LYK:LKYHY:VAE:GXGXR, GIPEPXX:VPT:SPIS-AA¹⁷-LYK:LKYHY:VAE:SXAXR, SIPKAXX:VPT:SPIS-AA¹⁷-LYK:LKYHY:VAE:GXGXR, HVTKPTX:VPT:SPIS-AA¹⁷-LYK:LKYHY:VAE:SXGXH, YVPKPXX:VPT:SPIS-AA¹⁷-LYK:LKYHY:VAE:SXGXH, TVPKPXX:VPT:SPIS-AA¹⁷-LYK:LKYHY:VAE:AXGXH, AVPKAXX:VPT:SPIS-AA¹⁷-LYK:LKYHY:VAE:AXGXH, KASKAXX:VPT:SPIS-AA¹⁷-LYK:LKYHY:VAE:EXGXR, GSAGPXX:VPT:SPIS-AA¹⁷-LYK:LKYHY:VAE:RXGXS, AAPASXX:VPT:SPIS-AA¹⁷-LYK:LKYHY:VAE:AXGXR, STPPTXX:VPT:SPIS-AA¹⁷-LYK:LKYHY:VAE:SXGXR, HVPKPXX:VPT:SPIS-AA¹⁷-LYK:LKYHY:VAE:SXGXH, RVPSTXX:VPT:SPIS-AA¹⁷-LYK:LKYHY:VAE:XGXL, ASAAPXX:VPT:SPIS-AA¹⁷-LYK:LKYHY:VAE:XKXS, ASASPXX:VPT:SPIS-AA¹⁷-LYK:LKYHY:VAE:XKXS, KIPKAXX:VPT:SPIS-AA¹⁷-LYK:LKYHY:VVE:GXGXR, GIPEPXX:VPE:SPIS-AA¹⁷-LYK:LKYHY:TVE:SXAXR, SIPKAXX:VPT:SPIS-AA¹⁷-LYK:LKYHY:VVE:GXGXR, HVTKPTX:APT:SPIS-AA¹⁷-LYK:LKYHY:VVR:SXGXH, YVPKPXX:APT:SPIS-AA¹⁷-LYK: LKYHY:VVR:SXGXH, TVPKPXX:APT:SPIS-AA¹⁷-LYK:LKYHY:VVR:AXGXH, AVPKAXX:APT:SPIS-AA¹⁷-LYK:LKYHY:VVK:AXGXH, KASKAXX:VPT:SPIS-AA¹⁷-LYK:LKYHY:AVS:EXGXR, GSAGPXX:TPT:SPIS-AA¹⁷-LYK:LKYHY:VVD:RXGXS, AAPASXX:VPA:SPIS-AA¹⁷-LYK:LKYHY:VVE:AXGXR, STPPTXX:VPT:SPIS-AA¹⁷-LYK:LKYHY:VVE:SXGXR, HVPKPXX:APT:SPIS-AA¹⁷-LYK:LKYHY:VVR:SXGXH, RVPSTXX:APV:SPIS-AA¹⁷-LYK:LKYHY:VEE:XGXL, ASAAPXX:VPQ:SPIS-AA¹⁷-LYK:LKYHY:VRS:XKXS, ASASPXX:VSQ:SPIS-AA¹⁷-LYK: LKYHY:VKS:XKXS, ASASPXX:VPQ:SPIS-AA¹⁷-LYK:LKYHY:VKS:XKXS, NDEGLEX:VPT:SPIS-AA¹⁷-LYK:LKYHY:QHN:KXEXR, NDEGLEX:VPT:SPIS-AA¹⁷-LYK:LKYHY:EHS:QXEXR, SSVKXQP:SRV:SPIS-AA¹⁷-LYK:LKYHY:EEH:LEXAXA, RNVQXRP:TQV:SPIS-AA¹⁷-LYK:LKYHY:EDH:LAXKXE, KIPKAXX:VPT:EPIS-AA¹⁷-LYL:KFKYE:AVS:GXGXR, GIPEPXX:VPT:EPIS-AA¹⁷-LYL:KFKYE:AVS:SXAXR, SIPKAXX:VPT:EPIS-AA¹⁷-LYL:KFKYE:AVS:GXGXR, HVTKPTX:VPT:EPIS-AA¹⁷-LYL:KFKYE:AVS:SXGXH, YVPKPXX:VPT:EPIS-AA¹⁷-LYL:KFKYE:AVS:SXGXH, TVPKPXX:VPT:EPIS-AA¹⁷-LYL:KFKYE:AVS:AXGXH, AVPKAXX:VPT:EPIS-AA¹⁷-LYL:KFKYE:AVS:AXGXH, KVGKAXX:VPT:EPIS-AA¹⁷-LYL:KFKYE:AVS:XGXR, GSAGPXX:VPT:EPIS-AA¹⁷-LYL:KFKYE:AVS:RXGXS, AAPASXX:VPT:EPIS-AA¹⁷-LYL:KFKYE:AVS:AXGXR, STPPTXX:VPT:EPIS-AA¹⁷-LYL:KFKYE:AVS:SXGXR, HVPKPXX:VPT:EPIS-AA¹⁷-LYL:KFKYE:AVS:SXGXH, RVPSTXX:VPT:EPIS-AA¹⁷-LYL:KFKYE:AVS:XGXL, ASAAPXX:VPT:EPIS-AA¹⁷-LYL:KFKYE:AVS:XKXS, ASASPXX:VPT:EPIS-AA¹⁷-LYL:KFKYE:AVS:XKXS, KIPKAXX:VPT:EPIS-AA¹⁷-LYL:KFKYE:VVE:GXGXR, GIPEPXX:VPE:EPIS-AA¹⁷-LYL:KFKYE:TVE:SXAXR, SIPKAXX:VPT:EPIS-AA¹⁷-LYL:KFKYE:VVE:GXGXR, HVTKPTX:APT:EPIS-AA¹⁷-LYL:KFKYE:VVR:SXGXH, YVPKPXX:APT:EPIS-AA¹⁷-LYL:KFKYE:VVR:SXGXH, TVPKPXX:APT:EPIS-AA¹⁷-LYL:KFKYE:VVR:AXGXH, AVPKAXX:APT:EPIS-AA¹⁷-LYL:KFKYE:VVK:AXGXH, KVGKAXX:VPT:EPIS-AA¹⁷-LYL:KFKYE:VAE:XGXR, GSAGPXX:TPT:EPIS-AA¹⁷-LYL:KFKYE:VVD:RXGXS, AAPASXX:VPA:EPIS-AA¹⁷-LYL:KFKYE:VVE:AXGXR, STPPTXX:VPT:EPIS-AA¹⁷-LYL:KFKYE:VVE:SXGXR, HVPKPXX:APT:EPIS-AA¹⁷-LYL:KFKYE:VVR:SXGXH, RVPSTXX:APV:EPIS-AA¹⁷-LYL:KFKYE:VEE:XGXL, ASAAPXX:VPQ:EPIS-AA¹⁷-LYL:KFKYE:VRS:XKXS, ASASPXX:VSQ:EPIS-AA¹⁷-LYL:KFKYE:VKS:XKXS, ASASPXX:VPQ:EPIS-AA¹⁷-LYL:KFKYE:VKS:XKXS, NDEGLEX:VPT:EPIS-AA¹⁷-LYL:KFKYE:QHN:KXEXR, NDEGLEX:VPT:EPIS-AA¹⁷-LYL:KFKYE:EHS:QXEXR, SSVKXQP:SRV:EPIS-AA¹⁷-LYL:KFKYE:EEH:LEXAXA, RNVQXRP:TQV:EPIS-AA¹⁷-LYL:KFKYE:EDH:LAXKXE, KIPKAXX:TPT:SPIN-AA¹⁷-LYF:YGKIP:VVD:GXGXR, GIPEPXX:TPT:SPIN-AA¹⁷-LYF:YGKIP:VVD:SXAXR, SIPKAXX:TPT:SPIN-AA¹⁷-LYF:YGKIP:VVD:GXGXR, HVTKPTX:TPT:SPIN-AA¹⁷-LYF:YGKIP:VVD:SXGXH, YVPKPXX:TPT:SPIN-AA¹⁷-LYF:YGKIP:VVD:SXGXH, TVPKPXX:TPT:SPIN-AA¹⁷-LYF:YGKIP:VVD:AXGXH, AVPKAXX:TPT:SPIN-AA¹⁷-LYF:YGKIP:VVD:AXGXH, KVGKAXX:TPT:SPIN-AA¹⁷-LYF:YGKIP:VVD:XGXR, KASKAXX:TPT:SPIN-AA¹⁷-LYF:YGKIP:VVD:EXGXR, AAPASXX:TPT:SPIN-AA¹⁷-LYF:YGKIP:VVD:AXGXR, STPPTXX:TPT:SPIN-AA¹⁷-LYF:YGKIP:VVD:SXGXR, HVPKPXX:TPT:SPIN-AA¹⁷-LYF:YGKIP:VVD:SXGXH, RVPSTXX:TPT:SPIN-AA¹⁷-LYF:YGKIP:VVD:XGXL, ASAAPXX:TPT:SPIN-AA¹⁷-LYF:YGKIP:VVD:XKXS, ASASPXX:TPT:SPIN-AA¹⁷-LYF:YGKIP:VVD:XKXS, KIPKAXX:VPT:SPIN-AA¹⁷-LYF:YGKIP:VVE:GXGXR, GIPEPXX:VPE:SPIN-AA¹⁷-LYF:YGKIP:TVE:SXAXR, SIPKAXX:VPT:SPIN-AA¹⁷-LYF:YGKIP:VVE:GXGXR, HVTKPTX:APT:SPIN-AA¹⁷-LYF:YGKIP:VVR:SXGXH, YVPKPXX:APT:SPIN-AA¹⁷-LYF:YGKIP:VVR:SXGXH, TVPKPXX:APT:SPIN-AA¹⁷-LYF:YGKIP:VVR:AXGXH, AVPKAXX:APT:SPIN-AA¹⁷-LYF:YGKIP:VVK:AXGXH, KVGKAXX:VPT:SPIN-AA¹⁷-LYF:YGKIP:VAE:XGXR, KASKAXX:VPT:SPIN-AA¹⁷-LYF:YGKIP:AVS:EXGXR, AAPASXX:VPA:SPIN-AA¹⁷-LYF:YGKIP:VVE:AXGXR, STPPTXX:VPT:SPIN-AA¹⁷-LYF:YGKIP:VVE:SXGXR, HVPKPXX:APT:SPIN-AA¹⁷-LYF:YGKIP:VVR:SXGXH, RVPSTXX:APV:SPIN-AA¹⁷-LYF:YGKIP:VEE:XGXL, ASAAPXX:VPQ:SPIN-AA¹⁷-LYF:YGKIP:VRS:XKXS, ASASPXX:VSQ:SPIN-AA¹⁷-LYF:YGKIP:VKS:XKXS, ASASPXX:VPQ:SPIN-AA¹⁷-LYF:YGKIP:VKS:XKXS, NDEGLEX:VPT:SPIN-AA¹⁷-LYF:YGKIP:QHN:KXEXR, NDEGLEX:VPT:SPIN-AA¹⁷-LYF:YGKIP:EHS:QXEXR, SSVKXQP:SRV:SPIN-AA¹⁷-LYF:YGKIP:EEH:LEXAXA, RNVQXRP:TQV:SPIN-AA¹⁷-LYF:YGKIP:EDH:LAXKXE, KIPKAXX:VPA:SPIS-AA¹⁷-LYI:YKQYE:VVE:GXGXR, GIPEPXX:VPA:SPIS-AA¹⁷-LYI:YKQYE:VVE:SXAXR, SIPKAXX:VPA:SPIS-AA¹⁷-LYI:YKQYE:VVE:GXGXR, HVTKPTX:VPA:SPIS-AA¹⁷-LYI:YKQYE:VVE:SXGXH, YVPKPXX:VPA:SPIS-AA¹⁷-LYI:YKQYE:VVE:SXGXH, TVPKPXX:VPA:SPIS-AA¹⁷-LYI:YKQYE:VVE:AXGXH, AVPKAXX:VPA:SPIS-AA¹⁷-LYI:YKQYE:VVE:AXGXH, KVGKAXX:VPA:SPIS-AA¹⁷-LYI:YKQYE:VVE:XGXR, KASKAXX:VPA:SPIS-AA¹⁷-LYI:YKQYE:VVE:EXGXR, GSAGPXX:VPA:SPIS-AA¹⁷-LYI:YKQYE:VVE:RXGXS, STPPTXX:VPA:SPIS-AA¹⁷-LYI:YKQYE:VVE:SXGXR, HVPKPXX:VPA:SPIS-AA¹⁷-LYI:YKQYE:VVE:SXGXH, RVPSTXX:VPA:SPIS-AA¹⁷-LYI:YKQYE:VVE:XGXL, ASAAPXX:VPA:SPIS-AA¹⁷-LYI:YKQYE:VVE:XKXS, ASASPXX:VPA:SPIS-AA¹⁷-LYI:YKQYE:VVE:XKXS, KIPKAXX:VPT:SPIS-AA¹⁷-LYI:YKQYE:VVE:GXGXR, GIPEPXX:VPE:SPIS-AA¹⁷-LYI:YKQYE:TVE:SXAXR, SIPKAXX:VPT:SPIS-AA¹⁷-LYI:YKQYE:VVE:GXGXR, HVTKPTX:APT:SPIS-AA¹⁷-LYI:YKQYE:VVR:SXGXH, YVPKPXX:APT:SPIS-AA¹⁷-LYI:YKQYE:VVR:SXGXH, TVPKPXX:APT:SPIS-AA¹⁷-LYI:YKQYE:VVR:AXGXH, AVPKAXX:APT:SPIS-AA¹⁷-LYI:YKQYE:VVK:AXGXH, KVGKAXX:VPT:SPIS-AA¹⁷-LYI:YKQYE:VAE:XGXR, KASKAXX:VPT:SPIS-AA¹⁷-LYI:YKQYE:AVS:EXGXR, GSAGPXX:TPT:SPIS-AA¹⁷-LYI:YKQYE:VVD:RXGXS, STPPTXX:VPT:SPIS-AA¹⁷-LYI:YKQYE:VVE:SXGXR, HVPKPXX:APT:SPIS-AA¹⁷-LYI:YKQYE:VVR:SXGXH, RVPSTXX:APV:SPIS-AA¹⁷-LYI:YKQYE:VEE:XGXL, ASAAPXX:VPQ:SPIS-AA¹⁷-LYI:YKQYE:VRS:XKXS, ASASPXX:VSQ:SPIS-AA¹⁷-LYI:YKQYE:VKS:XKXS, ASASPXX:VPQ:SPIS-AA¹⁷-LYI:YKQYE:VKS:XKXS, NDEGLEX:VPT:SPIS-AA¹⁷-LYI:YKQYE:QHN:KXEXR, NDEGLEX:VPT:SPIS-AA¹⁷-LYI:YKQYE:EHS:QXEXR, SSVKXQP:SRV:SPIS-AA¹⁷-LYI:YKQYE:EEH:LEXAXA, RNVQXRP:TQV:SPIS-AA¹⁷-LYI:YKQYE:EDH:LAXKXE, KIPKAXX:VPT:SPIS-AA¹⁷-LFI:YKQYE:VVE:GXGXR, GIPEPXX:VPT:SPIS-AA¹⁷-LFI:YKQYE:VVE:SXAXR, SIPKAXX:VPT:SPIS-AA¹⁷-LFI:YKQYE:VVE:GXGXR, HVTKPTX:VPT:SPIS-AA¹⁷-LFI:YKQYE:VVE:SXGXH, YVPKPXX:VPT:SPIS-AA¹⁷-LFI:YKQYE:VVE:SXGXH, TVPKPXX:VPT:SPIS-AA¹⁷-LFI:YKQYE:VVE:AXGXH, AVPKAXX:VPT:SPIS-AA¹⁷-LFI:YKQYE:VVE:AXGXH, KVGKAXX:VPT:SPIS-AA¹⁷-LFI:YKQYE:VVE:XGXR, KASKAXX:VPT:SPIS-AA¹⁷-LFI:YKQYE:VVE:EXGXR, GSAGPXX:VPT:SPIS-AA¹⁷-LFI:YKQYE:VVE:RXGXS, AAPASXX:VPT:SPIS-AA¹⁷-LFI:YKQYE:VVE:AXGXR, HVPKPXX:VPT:SPIS-AA¹⁷-LFI:YKQYE:VVE:SXGXH, RVPSTXX:VPT:SPIS-AA¹⁷-LFI:YKQYE:VVE:XGXL, ASAAPXX:VPT:SPIS-AA¹⁷-LFI:YKQYE:VVE:XKXS, ASASPXX:VPT:SPIS-AA¹⁷-LFI:YKQYE:VVE:XKXS, GIPEPXX:VPE:SPIS-AA¹⁷-LFI:YKQYE:TVE:SXAXR, HVTKPTX:APT:SPIS-AA¹⁷-LFI:YKQYE:VVR:SXGXH, YVPKPXX:APT:SPIS-AA¹⁷-LFI:YKQYE:VVR:SXGXH, TVPKPXX:APT:SPIS-AA¹⁷-LFI:YKQYE:VVR:AXGXH, AVPKAXX:APT:SPIS-AA¹⁷-LFI:YKQYE:VVK:AXGXH, KVGKAXX:VPT:SPIS-AA¹⁷-LFI:YKQYE:VAE:XGXR, KASKAXX:VPT:SPIS-AA¹⁷-LFI:YKQYE:AVS:EXGXR, GSAGPXX:TPT:SPIS-AA¹⁷-LFI:YKQYE:VVD:RXGXS, AAPASXX:VPA:SPIS-AA¹⁷-LFI:YKQYE:VVE:AXGXR, HVPKPXX:APT:SPIS-AA¹⁷-LFI:YKQYE:VVR:SXGXH, RVPSTXX:APV:SPIS-AA¹⁷-LFI:YKQYE:VEE:XGXL, ASAAPXX:VPQ:SPIS-AA¹⁷-LFI:YKQYE:VRS:XKXS, ASASPXX:VSQ:SPIS-AA¹⁷-LFI:YKQYE:VKS:XKXS, ASASPXX:VPQ:SPIS-AA¹⁷-LFI:YKQYE:VKS:XKXS, NDEGLEX:VPT:SPIS-AA¹⁷-LFI:YKQYE:QHN:KXEXR, NDEGLEX:VPT:SPIS-AA¹⁷-LFI:YKQYE:EHS:QXEXR, SSVKXQP:SRV:SPIS-AA¹⁷-LFI:YKQYE:EEH:LEXAXA, RNVQXRP:TQV:SPIS-AA¹⁷-LFI:YKQYE:EDH:LAXKXE, KIPKAXX:APV:KPLS-AA¹⁷-LYV:DHHKD:VEE:GXGXR, GIPEPXX:APV:KPLS-AA¹⁷-LYV:DHHKD:VEE:SXAXR, SIPKAXX:APV:KPLS-AA¹⁷-LYV:DHHKD:VEE:GXGXR, HVTKPTX:APV:KPLS-AA¹⁷-LYV:DHHKD:VEE:SXGXH, YVPKPXX:APV:KPLS-AA¹⁷-LYV:DHHKD:VEE:SXGXH, TVPKPXX:APV:KPLS-AA¹⁷-LYV:DHHKD:VEE:AXGXH, AVPKAXX:APV:KPLS-AA¹⁷-LYV:DHHKD:VEE:AXGXH, KVGKAXX:APV:KPLS-AA¹⁷-LYV:DHHKD:VEE:XGXR, KASKAXX:APV:KPLS-AA¹⁷-LYV:DHHKD:VEE:EXGXR, GSAGPXX:APV:KPLS-AA¹⁷-LYV:DHHKD:VEE:RXGXS, AAPASXX:APV:KPLS-AA¹⁷-LYV:DHHKD:VEE:AXGXR, STPPTXX:APV:KPLS-AA¹⁷-LYV:DHHKD:VEE:SXGXR, HVPKPXX:APV:KPLS-AA¹⁷-LYV:DHHKD:VEE:SXGXH, ASAAPXX:APV:KPLS-AA¹⁷-LYV:DHHKD:VEE:XKXS, ASASPXX:APV:KPLS-AA¹⁷-LYV:DHHKD:VEE:XKXS, KIPKAXX:VPT:KPLS-AA¹⁷-LYV:DHHKD:VVE:GXGXR, GIPEPXX:VPE:KPLS-AA¹⁷-LYV:DHHKD:TVE:SXAXR, SIPKAXX:VPT:KPLS-AA¹⁷-LYV:DHHKD:VVE:GXGXR, HVTKPTX:APT:KPLS-AA¹⁷-LYV:DHHKD:VVR:SXGXH, YVPKPXX:APT:KPLS-AA¹⁷-LYV:DHHKD:VVR:SXGXH, TVPKPXX:APT:KPLS-AA¹⁷-LYV:DHHKD:VVR:AXGXH, AVPKAXX:APT:KPLS-AA¹⁷-LYV:DHHKD:VVK:AXGXH, KVGKAXX:VPT:KPLS-AA¹⁷-LYV:DHHKD:VAE:XGXR, KASKAXX:VPT:KPLS-AA¹⁷-LYV:DHHKD:AVS:EXGXR, GSAGPXX:TPT:KPLS-AA¹⁷-LYV:DHHKD:VVD:RXGXS, AAPASXX:VPA:KPLS-AA¹⁷-LYV:DHHKD:VVE:AXGXR, STPPTXX:VPT:KPLS-AA¹⁷-LYV:DHHKD:VVE:SXGXR, HVPKPXX:APT:KPLS-AA¹⁷-LYV:DHHKD:VVR:SXGXH, ASAAPXX:VPQ:KPLS-AA¹⁷-LYV:DHHKD:VRS:XKXS, ASASPXX:VSQ:KPLS-AA¹⁷-LYV:DHHKD:VKS:XKXS, ASASPXX:VPQ:KPLS-AA¹⁷-LYV:DHHKD:VKS:XKXS, NDEGLEX:VPT:KPLS-AA¹⁷-LYV:DHHKD:QHN:KXEXR, NDEGLEX:VPT:KPLS-AA¹⁷-LYV:DHHKD:EHS:QXEXR, SSVKXQP:SRV:KPLS-AA¹⁷-LYV:DHHKD:EEH:LEXAXA, RNVQXRP:TQV:KPLS-AA¹⁷-LYV:DHHKD:EDH:LAXKXE, KIPKAXX:VPQ:EPLP-AA¹⁷-VYY:EQLSN:VRS:GXGXR, GIPEPXX:VPQ:EPLP-AA¹⁷-VYY:EQLSN:VRS:SXAXR, SIPKAXX:VPQ:EPLP-AA¹⁷-VYY:EQLSN:VRS:GXGXR, HVTKPTX:VPQ:EPLP-AA¹⁷-VYY:EQLSN:VRS:SXGXH, YVPKPXX:VPQ:EPLP-AA¹⁷-VYY:EQLSN:VRS:SXGXH, TVPKPXX:VPQ:EPLP-AA¹⁷-VYY:EQLSN:VRS:AXGXH, AVPKAXX:VPQ:EPLP-AA¹⁷-VYY:EQLSN:VRS:AXGXH, KVGKAXX:VPQ:EPLP-AA¹⁷-VYY:EQLSN:VRS:XGXR, KASKAXX:VPQ:EPLP-AA¹⁷-VYY:EQLSN:VRS:EXGXR, GSAGPXX:VPQ:EPLP-AA¹⁷-VYY:EQLSN:VRS:RXGXS, AAPASXX:VPQ:EPLP-AA¹⁷-VYY:EQLSN:VRS:AXGXR, STPPTXX:VPQ:EPLP-AA¹⁷-VYY:EQLSN:VRS:SXGXR, HVPKPXX:VPQ:EPLP-AA¹⁷-VYY:EQLSN:VRS:SXGXH, RVPSTXX:VPQ:EPLP-AA¹⁷-VYY:EQLSN:VRS:XGXL, ASASPXX:VPQ:EPLP-AA¹⁷-VYY:EQLSN:VRS:XKXS, KIPKAXX:VPT:EPLP-AA¹⁷-VYY:EQLSN:VVE:GXGXR, GIPEPXX:VPE:EPLP-AA¹⁷-VYY:EQLSN:TVE:SXAXR, SIPKAXX:VPT:EPLP-AA¹⁷-VYY:EQLSN:VVE:GXGXR, HVTKPTX:APT:EPLP-AA¹⁷-VYY:EQLSN:VVR:SXGXH, YVPKPXX:APT:EPLP-AA¹⁷-VYY:EQLSN:VVR:SXGXH, TVPKPXX:APT:EPLP-AA¹⁷-VYY:EQLSN:VVR:AXGXH, AVPKAXX:APT:EPLP-AA¹⁷-VYY:EQLSN:VVK:AXGXH, KVGKAXX:VPT:EPLP-AA¹⁷-VYY:EQLSN:VAE:XGXR, KASKAXX:VPT:EPLP-AA¹⁷-VYY:EQLSN:AVS:EXGXR, GSAGPXX:TPT:EPLP-AA¹⁷-VYY:EQLSN:VVD:RXGXS, AAPASXX:VPA:EPLP-AA¹⁷-VYY:EQLSN:VVE:AXGXR, STPPTXX:VPT:EPLP-AA¹⁷-VYY:EQLSN:VVE:SXGXR, HVPKPXX:APT:EPLP-AA¹⁷-VYY:EQLSN:VVR:SXGXH, RVPSTXX:APV:EPLP-AA¹⁷-VYY:EQLSN:VEE:XGXL, ASASPXX:VSQ:EPLP-AA¹⁷-VYY:EQLSN:VKS:XKXS, ASASPXX:VPQ:EPLP-AA¹⁷-VYY:EQLSN:VKS:XKXS, NDEGLEX:VPT:EPLP-AA¹⁷-VYY:EQLSN:QHN:KXEXR, NDEGLEX:VPT:EPLP-AA¹⁷-VYY:EQLSN:EHS:QXEXR, SSVKXQP:SRV:EPLP-AA¹⁷-VYY:EQLSN:EEH:LEXAXA, RNVQXRP:TQV:EPLP-AA¹⁷-VYY:EQLSN:EDH:LAXKXE, KIPKAXX:VSQ:EPLT-AA¹⁷-LYY:EQLSN:VKS:GXGXR, GIPEPXX:VSQ:EPLT-AA¹⁷-LYY:EQLSN:VKS:SXAXR, SIPKAXX:VSQ:EPLT-AA¹⁷-LYY:EQLSN:VKS:GXGXR, HVTKPTX:VSQ:EPLT-AA¹⁷-LYY:EQLSN:VKS:SXGXH, YVPKPXX:VSQ:EPLT-AA¹⁷-LYY:EQLSN:VKS:SXGXH, TVPKPXX:VSQ:EPLT-AA¹⁷-LYY:EQLSN:VKS:AXGXH, AVPKAXX:VSQ:EPLT-AA¹⁷-LYY:EQLSN:VKS:AXGXH, KVGKAXX:VSQ:EPLT-AA¹⁷-LYY:EQLSN:VKS:XGXR, KASKAXX:VSQ:EPLT-AA¹⁷-LYY:EQLSN:VKS:EXGXR, GSAGPXX:VSQ:EPLT-AA¹⁷-LYY:EQLSN:VKS:RXGXS, AAPASXX:VSQ:EPLT-AA¹⁷-LYY:EQLSN:VKS:AXGXR, STPPTXX:VSQ:EPLT-AA¹⁷-LYY:EQLSN:VKS:SXGXR, HVPKPXX:VSQ:EPLT-AA¹⁷-LYY:EQLSN:VKS:SXGXH, RVPSTXX:VSQ:EPLT-AA¹⁷-LYY:EQLSN:VKS:XGXL, ASAAPXX:VSQ:EPLT-AA¹⁷-LYY:EQLSN:VKS:XKXS, ASASPXX:VSQ:EPLT-AA¹⁷-LYY:EQLSN:VKS:XKXS, KIPKAXX:VPT:EPLT-AA¹⁷-LYY:EQLSN:VVE:GXGXR, GIPEPXX:VPE:EPLT-AA¹⁷-LYY:EQLSN:TVE:SXAXR, SIPKAXX:VPT:EPLT-AA¹⁷-LYY:EQLSN:VVE:GXGXR, HVTKPTX:APT:EPLT-AA¹⁷-LYY:EQLSN:VVR:SXGXH, YVPKPXX:APT:EPLT-AA¹⁷-LYY:EQLSN:VVR:SXGXH, TVPKPXX:APT:EPLT-AA¹⁷-LYY:EQLSN:VVR:AXGXH, AVPKAXX:APT:EPLT-AA¹⁷-LYY:EQLSN:VVK:AXGXH, KVGKAXX:VPT:EPLT-AA¹⁷-LYY:EQLSN:VAE:XGXR, KASKAXX:VPT:EPLT-AA¹⁷-LYY:EQLSN:AVS:EXGXR, GSAGPXX:TPT:EPLT-AA¹⁷-LYY:EQLSN:VVD:RXGXS, AAPASXX:VPA:EPLT-AA¹⁷-LYY:EQLSN:VVE:AXGXR, STPPTXX:VPT:EPLT-AA¹⁷-LYY:EQLSN:VVE:SXGXR, HVPKPXX:APT:EPLT-AA¹⁷-LYY:EQLSN:VVR:SXGXH, RVPSTXX:APV:EPLT-AA¹⁷-LYY:EQLSN:VEE:XGXL, ASAAPXX:VPQ:EPLT-AA¹⁷-LYY:EQLSN:VRS:XKXS, NDEGLEX:VPT:EPLT-AA¹⁷-LYY:EQLSN:QHN:KXEXR, NDEGLEX:VPT:EPLT-AA¹⁷-LYY:EQLSN:EHS:QXEXR, SSVKXQP:SRV:EPLT-AA¹⁷-LYY:EQLSN:EEH:LEXAXA, RNVQXRP:TQV:EPLT-AA¹⁷-LYY:EQLSN:EDH:LAXKXE, KIPKAXX:VPQ:EPLT-AA¹⁷-LYY:EQLSN:VKS:GXGXR, GIPEPXX:VPQ:EPLT-AA¹⁷-LYY:EQLSN:VKS:SXAXR, SIPKAXX:VPQ:EPLT-AA¹⁷-LYY:EQLSN:VKS:GXGXR, HVTKPTX:VPQ:EPLT-AA¹⁷-LYY:EQLSN:VKS:SXGXH, YVPKPXX:VPQ:EPLT-AA¹⁷-LYY:EQLSN:VKS:SXGXH, TVPKPXX:VPQ:EPLT-AA¹⁷-LYY:EQLSN:VKS:AXGXH, AVPKAXX:VPQ:EPLT-AA¹⁷-LYY:EQLSN:VKS:AXGXH, KVGKAXX:VPQ:EPLT-AA¹⁷-LYY:EQLSN:VKS:XGXR, KASKAXX:VPQ:EPLT-AA¹⁷-LYY:EQLSN:VKS:EXGXR, GSAGPXX:VPQ:EPLT-AA¹⁷-LYY:EQLSN:VKS:RXGXS, AAPASXX:VPQ:EPLT-AA¹⁷-LYY:EQLSN:VKS:AXGXR, STPPTXX:VPQ:EPLT-AA¹⁷-LYY:EQLSN:VKS:SXGXR, HVPKPXX:VPQ:EPLT-AA¹⁷-LYY:EQLSN:VKS:SXGXH, RVPSTXX:VPQ:EPLT-AA¹⁷-LYY:EQLSN:VKS:XGXL, ASAAPXX:VPQ:EPLT-AA¹⁷-LYY:EQLSN:VKS:XKXS, ASASPXX:VPQ:EPLT-AA¹⁷-LYY:EQLSN:VKS:XKXS, NDEGLEX:VPT:SNIT-AA¹⁷-QIM:IGEMS:QHN:QXEXR, KIPKAXX:VPT:SNIT-AA¹⁷-QIM:IGEMS:VVE:GXGXR, GIPEPXX:VPE:SNIT-AA¹⁷-QIM:IGEMS:TVE:SXAXR, SIPKAXX:VPT:SNIT-AA¹⁷-QIM:IGEMS:VVE:GXGXR, HVTKPTX:APT:SNIT-AA¹⁷-QIM:IGEMS:VVR:SXGXH, YVPKPXX:APT:SNIT-AA¹⁷-QIM:IGEMS:VVR:SXGXH, TVPKPXX:APT:SNIT-AA¹⁷-QIM:IGEMS:VVR:AXGXH, AVPKAXX:APT:SNIT-AA¹⁷-QIM:IGEMS:VVK:AXGXH, KVGKAXX:VPT:SNIT-AA¹⁷-QIM:IGEMS:VAE:XGXR, KASKAXX:VPT:SNIT-AA¹⁷-QIM:IGEMS:AVS:EXGXR, GSAGPXX:TPT:SNIT-AA¹⁷-QIM:IGEMS:VVD:RXGXS, AAPASXX:VPA:SNIT-AA¹⁷-QIM:IGEMS:VVE:AXGXR, STPPTXX:VPT:SNIT-AA¹⁷-QIM:IGEMS:VVE:SXGXR, HVPKPXX:APT:SNIT-AA¹⁷-QIM:IGEMS:VVR:SXGXH, RVPSTXX:APV:SNIT-AA¹⁷-QIM:IGEMS:VEE:XGXL, ASAAPXX:VPQ:SNIT-AA¹⁷-QIM:IGEMS:VRS:XKXS, ASASPXX:VSQ:SNIT-AA¹⁷-QIM:IGEMS:VKS:XKXS, ASASPXX:VPQ:SNIT-AA¹⁷-QIM:IGEMS:VKS:XKXS, NDEGLEX:VPT:SNIT-AA¹⁷-QIM:IGEMS:EHS:QXEXR, SSVKXQP:SRV:SNIT-AA¹⁷-QIM:IGEMS:EEH:LEXAXA, RNVQXRP:TQV:SNIT-AA¹⁷-QIM:IGEMS:EDH:LAXKXE, NDEGLEX:VPT:SNIT-AA¹⁷-QIM:LGEMS:EHS:KXEXR, KIPKAXX:VPT:SNIT-AA¹⁷-QIM:LGEMS:VVE:GXGXR, GIPEPXX:VPE:SNIT-AA¹⁷-QIM:LGEMS:TVE:SXAXR, SIPKAXX:VPT:SNIT-AA¹⁷-QIM:LGEMS:VVE:GXGXR, HVTKPTX:APT:SNIT-AA¹⁷-QIM:LGEMS:VVR:SXGXH, YVPKPXX:APT:SNIT-AA¹⁷-QIM:LGEMS:VVR:SXGXH, TVPKPXX:APT:SNIT-AA¹⁷-QIM:LGEMS:VVR:AXGXH, AVPKAXX:APT:SNIT-AA¹⁷-QIM:LGEMS:VVK:AXGXH, KVGKAXX:VPT:SNIT-AA¹⁷-QIM:LGEMS:VAE:XGXR, KASKAXX:VPT:SNIT-AA¹⁷-QIM:LGEMS:AVS:EXGXR, GSAGPXX:TPT:SNIT-AA¹⁷-QIM:LGEMS:VVD:RXGXS, AAPASXX:VPA:SNIT-AA¹⁷-QIM:LGEMS:VVE:AXGXR, STPPTXX:VPT:SNIT-AA¹⁷-QIM:LGEMS:VVE:SXGXR, HVPKPXX:APT:SNIT-AA¹⁷-QIM:LGEMS:VVR:SXGXH, RVPSTXX:APV:SNIT-AA¹⁷-QIM:LGEMS:VEE:XGXL, ASAAPXX:VPQ:SNIT-AA¹⁷-QIM:LGEMS:VRS:XKXS, ASASPXX:VSQ:SNIT-AA¹⁷-QIM:LGEMS:VKS:XKXS, ASASPXX:VPQ:SNIT-AA¹⁷-QIM:LGEMS:VKS:XKXS, NDEGLEX:VPT:SNIT-AA¹⁷-QIM:LGEMS:QHN:KXEXR, SSVKXQP:SRV:SNIT-AA¹⁷-QIM:LGEMS:EEH:LEXAXA, RNVQXRP:TQV:SNIT-AA¹⁷-QIM:LGEMS:EDH:LAXKXE, RNVQXRP:SRV:RSVK-AA¹⁷-AKV:KEVQV:EEH:LAXKXE, KIPKAXX:VPT:RSVK-AA¹⁷-AKV:KEVQV:VVE:GXGXR, GIPEPXX:VPE:RSVK-AA¹⁷-AKV:KEVQV:TVE:SXAXR, SIPKAXX:VPT:RSVK-AA¹⁷-AKV:KEVQV:VVE:GXGXR, HVTKPTX:APT:RSVK-AA¹⁷-AKV:KEVQV:VVR:SXGXH, YVPKPXX:APT:RSVK-AA¹⁷-AKV:KEVQV:VVK:SXGXH, TVPKPXX:APT:RSVK-AA¹⁷-AKV:KEVQV:VVK:AXGXH, AVPKAXX:APT:RSVK-AA¹⁷-AKV:KEVQV:VVK:AXGXH, KVGKAXX:VPT:RSVK-AA¹⁷-AKV:KEVQV:VAE:XGXR, KASKAXX:VPT:RSVK-AA¹⁷-AKV:KEVQV:AVS:EXGXR, GSAGPXX:TPT:RSVK-AA¹⁷-AKV:KEVQV:VVD:RXGXS, AAPASXX:VPA:RSVK-AA¹⁷-AKV:KEVQV:VVE:AXGXR, STPPTXX:VPT:RSVK-AA¹⁷-AKV:KEVQV:VVE:SXGXR, HVPKPXX:APT:RSVK-AA¹⁷-AKV:KEVQV:VVK:SXGXH, RVPSTXX:APV:RSVK-AA¹⁷-AKV:KEVQV:VEE:XGXL, ASAAPXX:VPQ:RSVK-AA¹⁷-AKV:KEVQV:VRS:XKXS, ASASPXX:VSQ:RSVK-AA¹⁷-AKV:KEVQV:VKS:XKXS, ASASPXX:VPQ:RSVK-AA¹⁷-AKV:KEVQV:VKS:XKXS, NDEGLEX:VPT:RSVK-AA¹⁷-AKV:KEVQV:QHN:KXEXR, NDEGLEX:VPT:RSVK-AA¹⁷-AKV:KEVQV:EHS:QXEXR, RNVQXRP:TQV:RSVK-AA¹⁷-AKV:KEVQV:EDH:LAXKXE, SSVKXQP:TQV:RPVQ-AA¹⁷-RKI:KKATV:EDH:LEXAXA, KIPKAXX:VPT:RPVQ-AA¹⁷-RKI:KKATV:VVE:GXGXR, GIPEPXX:VPE:RPVQ-AA¹⁷-RKI:KKATV:TVE:SXAXR, SIPKAXX:VPT:RPVQ-AA¹⁷-RKI:KKATV:VVE:GXGXR, HVTKPTX:APT:RPVQ-AA¹⁷-RKI:KKATV:VVR:SXGXH, YVPKPXX:APT:RPVQ-AA¹⁷-RKI:KKATV:VVR:SXGXH, TVPKPXX:APT:RPVQ-AA¹⁷-RKI:KKATV:VVR:AXGXH, AVPKAXX:APT:RPVQ-AA¹⁷-RKI:KKATV:VVK:AXGXH, KVGKAXX:VPT:RPVQ-AA¹⁷-RKI:KKATV:VAE:XGXR, KASKAXX:VPT:RPVQ-AA¹⁷-RKI:KKATV:AVS:EXGXR, GSAGPXX:TPT:RPVQ-AA¹⁷-RKI:KKATV:VVD:RXGXS, AAPASXX:VPA:RPVQ-AA¹⁷-RKI:KKATV:VVE:AXGXR, STPPTXX:VPT:RPVQ-AA¹⁷-RKI:KKATV:VVE:SXGXR, HVPKPXX:APT:RPVQ-AA¹⁷-RKI:KKATV:VVR:SXGXH, RVPSTXX:APV:RPVQ-AA¹⁷-RKI:KKATV:VEE:XGXL, ASAAPXX:VPQ:RPVQ-AA¹⁷-RKI:KKATV:VRS:XKXS, ASASPXX:VSQ:RPVQ-AA¹⁷-RKI:KKATV:VKS:XKXS, ASASPXX:VPQ:RPVQ-AA¹⁷-RKI:KKATV:VKS:XKXS, NDEGLEX:VPT:RPVQ-AA¹⁷-RKI:KKATV:QHN:KXEXR, NDEGLEX:VPT:RPVQ-AA¹⁷-RKI:KKATV:EHS:QXEXR and SSVKXQP:SRV:RPVQ-AA¹⁷-RKI:KKATV:EEH:LEXAXA; and wherein AA¹⁷ is selected from the group consisting of G, A, V, L, I, P, F, M, W, T and S (in particular is selected from the group consisting of M, I, L, V and T).

[0397] In particular, in certain embodiments, the hexaplet PEP7:PEP5:PEP1:PEP2:PEP6:PEP8 is selected from the group consisting of GIPEPXX:VPTKM:SAIS:LKNYQ:NMVVE:SXAXR, SIPKAXX:VPTEL:SAIS:LKNYQ:EMVVE:GXGXR, HVTKPTX:VPTKL:SAIS:LKNYQ:NMVVE:SXGXH, YVPKPXX:VPTKL:SAIS:LKNYQ:NMVVE:SXGXH, TVPKPXX:VPTQL:SAIS:LKNYQ:NMVVE:AXGXH, AVPKAXX:VPTKL:SAIS:LKNYQ:NMVVE:AXGXH, KVGKAXX:VPTKL:SAIS:LKNYQ:EGMSVVE:XGXR, KASKAXX:VPTKL:SAIS:LKNYQ:GMVVE:EXGXR, GSAGPXX:VPTKM:SAIS:LKNYQ:GMVVE:RXGXS, AAPASXX:VPTRL:SAIS:LKNYQ:DMVVE:AXGXR, STPPTXX:VPTRL:SAIS:LKNYQ:DMVVE:SXGXR, HVPKPXX:VPTKL:SAIS:LKNYQ:NMVVE:SXGXH, RVPSTXX:VPTKT:SAIS:LKNYQ:MIVVE:XGXL, ASAAPXX:VPTAL:SAIS:LKNYQ:MIVVE:XKXS, ASASPXX:VPTDL:SAIS:LKNYQ:MIVVE:XKXS, ASASPXX:VPTDL:SAIS:LKNYQ:MVVVE:XKXS, NDEGLEX:VPTEE:SAIS:LKNYQ:FLVVE:KXEXR, NDEGLEX:VPTGQ:SAIS:LKNYQ:LEVVE:QXEXR, SSVKXQP:VPTHH:SAIS:LKNYQ:RLVVE:LEXAXA, RNVQXRP:VPTQL:SAIS:LKNYQ:TLVVE:LAXKXE, GIPEPXX:VPEKM:SAIS:LKNYQ:NMTVE:SXAXR, HVTKPTX:APTKL:SAIS:LKNYQ:NMVVR:SXGXH, YVPKPXX:APTKL:SAIS:LKNYQ:NMVVR:SXGXH, TVPKPXX:APTQL:SAIS:LKNYQ:NMVVR:AXGXH, AVPKAXX:APTKL:SAIS:LKNYQ:NMVVK:AXGXH, KVGKAXX:VPTKL:SAIS:LKNYQ:EGMSVAE:XGXR, KASKAXX:VPTKL:SAIS:LKNYQ:GMAVS:EXGXR, GSAGPXX:TPTKM:SAIS:LKNYQ:GMVVD:RXGXS, AAPASXX:VPARL:SAIS:LKNYQ:DMVVE:AXGXR, HVPKPXX:APTKL:SAIS:LKNYQ:NMVVR:SXGXH, RVPSTXX:APVKT:SAIS:LKNYQ:MIVEE:XGXL, ASAAPXX:VPQAL:SAIS:LKNYQ:MIVRS:XKXS, ASASPXX:VSQDL:SAIS:LKNYQ:MIVKS:XKXS, ASASPXX:VPQDL:SAIS:LKNYQ:MVVKS:XKXS, NDEGLEX:VPTEE:SAIS:LKNYQ:FLQHN:KXEXR, NDEGLEX:VPTGQ:SAIS:LKNYQ:LEEHS:QXEXR, SSVKXQP:SRVHH:SAIS:LKNYQ:RLEEH:LEXAXA, RNVQXRP:TQVQL:SAIS:LKNYQ:TLEDH:LAXKXE, KIPKAXX:VPEEL:SSLS:LKVYP:DMTVE:GXGXR, SIPKAXX:VPEEL:SSLS:LKVYP: EMTVE:GXGXR, HVTKPTX:VPEKL:SSLS:LKVYP:NMTVE:SXGXH, YVPKPXX:VPEKL:SSLS:LKVYP:NMTVE:SXGXH, TVPKPXX:VPEQL:SSLS:LKVYP:NMTVE:AXGXH, AVPKAXX:VPEKL:SSLS:LKVYP:NMTVE:AXGXH, KVGKAXX:VPEKL:SSLS:LKVYP:EGMSTVE:XGXR, KASKAXX:VPEKL:SSLS:LKVYP:GMTVE:EXGXR, GSAGPXX:VPEKM:SSLS:LKVYP:GMTVE:RXGXS, AAPASXX:VPERL:SSLS:LKVYP:DMTVE:AXGXR, STPPTXX:VPERL:SSLS:LKVYP:DMTVE:SXGXR, HVPKPXX:VPEKL:SSLS:LKVYP:NMTVE:SXGXH, RVPSTXX:VPEKT:SSLS:LKVYP:MITVE:XGXL, ASAAPXX:VPEAL:SSLS:LKVYP:MITVE:XKXS, ASASPXX:VPEDL:SSLS:LKVYP:MITVE:XKXS, ASASPXX:VPEDL:SSLS:LKVYP:MVTVE:XKXS, NDEGLEX:VPEEE:SSLS:LKVYP:FLTVE:KXEXR, NDEGLEX:VPEGQ:SSLS:LKVYP:LETVE:QXEXR, SSVKXQP:VPEHH:SSLS:LKVYP:RLTVE:LEXAXA, RNVQXRP:VPEQL:SSLS:LKVYP:TLTVE:LAXKXE, KIPKAXX:VPTEL:SSLS:LKVYP:DMVVE:GXGXR, SIPKAXX:VPTEL:SSLS:LKVYP:EMVVE:GXGXR, HVTKPTX:APTKL:SSLS:LKVYP:NMVVR:SXGXH, YVPKPXX:APTKL:SSLS:LKVYP:NMVVR:SXGXH, TVPKPXX:APTQL:SSLS:LKVYP:NMVVR:AXGXH, AVPKAXX:APTKL:SSLS:LKVYP:NMVVK:AXGXH, KVGKAXX:VPTKL:SSLS:LKVYP:EGMSVAE:XGXR, KASKAXX:VPTKL:SSLS:LKVYP:GMAVS:EXGXR, GSAGPXX:TPTKM:SSLS:LKVYP:GMVVD:RXGXS, AAPASXX:VPARL:SSLS:LKVYP:DMVVE:AXGXR, STPPTXX:VPTRL:SSLS:LKVYP:DMVVE:SXGXR, HVPKPXX:APTKL:SSLS:LKVYP:NMVVR:SXGXH, RVPSTXX:APVKT:SSLS:LKVYP:MIVEE:XGXL, ASAAPXX:VPQAL:SSLS:LKVYP:MIVRS:XKXS, ASASPXX:VSQDL:SSLS:LKVYP:MIVKS:XKXS, ASASPXX:VPQDL:SSLS:LKVYP:MVVKS:XKXS, NDEGLEX:VPTEE:SSLS:LKVYP:FLQHN:KXEXR, NDEGLEX:VPTGQ:SSLS:LKVYP:LEEHS:QXEXR, SSVKXQP:SRVHH:SSLS:LKVYP:RLEEH:LEXAXA, RNVQXRP:TQVQL:SSLS:LKVYP:TLEDH:LAXKXE, KIPKAXX:VPTEL:SAIS:LKNYQ:DMVVE:GXGXR, KIPKAXX:APTEL:NAIS:LKKYR:DMVVR:GXGXR, GIPEPXX:APTKM:NAIS:LKKYR:NMVVR:SXAXR, SIPKAXX:APTEL:NAIS:LKKYR:EMVVR:GXGXR, YVPKPXX:APTKL:NAIS:LKKYR:NMVVR:SXGXH, TVPKPXX:APTQL:NAIS:LKKYR:NMVVR:AXGXH, AVPKAXX:APTKL:NAIS:LKKYR:NMVVR:AXGXH, KVGKAXX:APTKL:NAIS:LKKYR:EGMSVVR:XGXR, KASKAXX:APTKL:NAIS:LKKYR:GMVVR:EXGXR, GSAGPXX:APTKM:NAIS:LKKYR:GMVVR:RXGXS, AAPASXX:APTRL:NAIS:LKKYR:DMVVR:AXGXR, STPPTXX:APTRL:NAIS:LKKYR:DMVVR:SXGXR, HVPKPXX:APTKL:NAIS:LKKYR:NMVVR:SXGXH, RVPSTXX:APTKT:NAIS:LKKYR:MIVVR:XGXL, ASAAPXX:APTAL:NAIS:LKKYR:MIVVR:XKXS, ASASPXX:APTDL:NAIS:LKKYR:MIVVR:XKXS, ASASPXX:APTDL:NAIS:LKKYR:MVVVR:XKXS, NDEGLEX:APTEE:NAIS:LKKYR:FLVVR:KXEXR, NDEGLEX:APTGQ:NAIS:LKKYR:LEVVR:QXEXR, SSVKXQP:APTHH:NAIS:LKKYR:RLVVR:LEXAXA, RNVQXRP:APTQL:NAIS:LKKYR:TLVVR:LAXKXE, KIPKAXX:VPTEL:NAIS:LKKYR:DMVVE:GXGXR, GIPEPXX:VPEKM:NAIS:LKKYR:NMTVE:SXAXR, SIPKAXX:VPTEL:NAIS:LKKYR:EMVVE:GXGXR, AVPKAXX:APTKL:NAIS:LKKYR:NMVVK:AXGXH, KVGKAXX:VPTKL:NAIS:LKKYR:EGMSVAE:XGXR, KASKAXX:VPTKL:NAIS:LKKYR:GMAVS:EXGXR, GSAGPXX:TPTKM:NAIS:LKKYR:GMVVD:RXGXS, AAPASXX:VPARL:NAIS:LKKYR:DMVVE:AXGXR, STPPTXX:VPTRL:NAIS:LKKYR:DMVVE:SXGXR, RVPSTXX:APVKT:NAIS:LKKYR:MIVEE:XGXL, ASAAPXX:VPQAL:NAIS:LKKYR:MIVRS:XKXS, ASASPXX:VSQDL:NAIS:LKKYR:MIVKS:XKXS, ASASPXX:VPQDL:NAIS:LKKYR:MVVKS:XKXS, NDEGLEX:VPTEE:NAIS:LKKYR:FLQHN:KXEXR, NDEGLEX:VPTGQ:NAIS:LKKYR:LEEHS:QXEXR, SSVKXQP:SRVHH:NAIS:LKKYR:RLEEH:LEXAXA, RNVQXRP:TQVQL:NAIS:LKKYR:TLEDH:LAXKXE, HVTKPTX:APTKL:NAIS:LKKYR:NMVVR:SXGXH, KIPKAXX:APTEL:SATS:LRKHR:DMVVK:GXGXR, GIPEPXX:APTKM:SATS:LRKHR:NMVVK:SXAXR, SIPKAXX:APTEL:SATS:LRKHR:EMVVK:GXGXR, HVTKPTX:APTKL:SATS:LRKHR:NMVVK:SXGXH, YVPKPXX:APTKL:SATS:LRKHR:NMVVK:SXGXH, TVPKPXX:APTQL:SATS:LRKHR:NMVVK:AXGXH, KVGKAXX:APTKL:SATS:LRKHR:EGMSVVK:XGXR, KASKAXX:APTKL:SATS:LRKHR:GMVVK:EXGXR, GSAGPXX:APTKM:SATS:LRKHR:GMVVK:RXGXS, AAPASXX:APTRL:SATS:LRKHR:DMVVK:AXGXR, STPPTXX:APTRL:SATS:LRKHR:DMVVK:SXGXR, HVPKPXX:APTKL:SATS:LRKHR:NMVVK:SXGXH, RVPSTXX:APTKT:SATS:LRKHR:MIVVK:XGXL, ASAAPXX:APTAL:SATS:LRKHR:MIVVK:XKXS, ASASPXX:APTDL:SATS:LRKHR:MIVVK:XKXS, ASASPXX:APTDL:SATS:LRKHR:MVVVK:XKXS, NDEGLEX:APTEE:SATS:LRKHR:FLVVK:KXEXR, NDEGLEX:APTGQ:SATS:LRKHR:LEVVK:QXEXR, SSVKXQP:APTHH:SATS:LRKHR:RLVVK:LEXAXA, RNVQXRP:APTQL:SATS:LRKHR:TLVVK:LAXKXE, KIPKAXX:VPTEL:SATS:LRKHR:DMVVE:GXGXR, GIPEPXX:VPEKM:SATS:LRKHR:NMTVE:SXAXR, SIPKAXX:VPTEL:SATS:LRKHR:EMVVE:GXGXR, HVTKPTX:APTKL:SATS:LRKHR:NMVVR:SXGXH, YVPKPXX:APTKL:SATS:LRKHR:NMVVR:SXGXH, TVPKPXX:APTQL:SATS:LRKHR:NMVVR:AXGXH, KVGKAXX:VPTKL:SATS:LRKHR:EGMSVAE:XGXR, KASKAXX:VPTKL:SATS:LRKHR:GMAVS:EXGXR, GSAGPXX:TPTKM:SATS:LRKHR:GMVVD:RXGXS, AAPASXX:VPARL:SATS:LRKHR:DMVVE:AXGXR, STPPTXX:VPTRL:SATS:LRKHR:DMVVE:SXGXR, HVPKPXX:APTKL:SATS:LRKHR:NMVVR:SXGXH, RVPSTXX:APVKT:SATS:LRKHR:MIVEE:XGXL, ASAAPXX:VPQAL:SATS:LRKHR:MIVRS:XKXS, ASASPXX:VSQDL:SATS:LRKHR:MIVKS:XKXS, ASASPXX:VPQDL:SATS:LRKHR:MVVKS:XKXS, NDEGLEX:VPTEE:SATS:LRKHR:FLQHN:KXEXR, NDEGLEX:VPTGQ:SATS:LRKHR:LEEHS:QXEXR, SSVKXQP:SRVHH:SATS:LRKHR:RLEEH:LEXAXA, RNVQXRP:TQVQL:SATS:LRKHR:TLEDH:LAXKXE, KIPKAXX:VPTEL:SPIS:LKYHY:DMVAE:GXGXR, GIPEPXX:VPTKM:SPIS:LKYHY:NMVAE:SXAXR, SIPKAXX:VPTEL:SPIS:LKYHY:EMVAE:GXGXR, HVTKPTX:VPTKL:SPIS:LKYHY:NMVAE:SXGXH, YVPKPXX:VPTKL:SPIS:LKYHY:NMVAE:SXGXH, TVPKPXX:VPTQL:SPIS:LKYHY:NMVAE:AXGXH, AVPKAXX:VPTKL:SPIS:LKYHY:NMVAE:AXGXH, KASKAXX:VPTKL:SPIS:LKYHY:GMVAE:EXGXR, GSAGPXX:VPTKM:SPIS:LKYHY:GMVAE:RXGXS, AAPASXX:VPTRL:SPIS:LKYHY:DMVAE:AXGXR, STPPTXX:VPTRL:SPIS:LKYHY:DMVAE:SXGXR, HVPKPXX:VPTKL:SPIS:LKYHY:NMVAE:SXGXH, RVPSTXX:VPTKT:SPIS:LKYHY:MIVAE:XGXL, ASAAPXX:VPTAL:SPIS:LKYHY:MIVAE:XKXS, ASASPXX:VPTDL:SPIS:LKYHY:MIVAE:XKXS, ASASPXX:VPTDL:SPIS:LKYHY:MVVAE:XKXS, NDEGLEX:VPTEE:SPIS:LKYHY:FLVAE:KXEXR, NDEGLEX:VPTGQ:SPIS:LKYHY:LEVAE:QXEXR, SSVKXQP:VPTHH:SPIS:LKYHY:RLVAE:LEXAXA, RNVQXRP:VPTQL:SPIS:LKYHY:TLVAE:LAXKXE, KIPKAXX:VPTEL:SPIS:LKYHY:DMVVE:GXGXR, GIPEPXX:VPEKM:SPIS:LKYHY:NMTVE:SXAXR, SIPKAXX:VPTEL:SPIS:LKYHY:EMVVE:GXGXR, HVTKPTX:APTKL:SPIS:LKYHY:NMVVR:SXGXH, YVPKPXX:APTKL:SPIS:LKYHY:NMVVR:SXGXH, TVPKPXX:APTQL:SPIS:LKYHY:NMVVR:AXGXH, AVPKAXX:APTKL:SPIS:LKYHY:NMVVK:AXGXH, KASKAXX:VPTKL:SPIS:LKYHY:GMAVS:EXGXR, GSAGPXX:TPTKM:SPIS:LKYHY:GMVVD:RXGXS, AAPASXX:VPARL:SPIS:LKYHY:DMVVE:AXGXR, STPPTXX:VPTRL:SPIS:LKYHY:DMVVE:SXGXR, HVPKPXX:APTKL:SPIS:LKYHY:NMVVR:SXGXH, RVPSTXX:APVKT:SPIS:LKYHY:MIVEE:XGXL, ASAAPXX:VPQAL:SPIS:LKYHY:MIVRS:XKXS, ASASPXX:VSQDL:SPIS:LKYHY:MIVKS:XKXS, ASASPXX:VPQDL:SPIS:LKYHY:MVVKS:XKXS, NDEGLEX:VPTEE:SPIS:LKYHY:FLQHN:KXEXR, NDEGLEX:VPTGQ:SPIS:LKYHY:LEEHS:QXEXR, SSVKXQP:SRVHH:SPIS:LKYHY:RLEEH:LEXAXA, RNVQXRP:TQVQL:SPIS:LKYHY:TLEDH:LAXKXE, KIPKAXX:VPTEL:EPIS:KFKYE:DMAVS:GXGXR, GIPEPXX:VPTKM:EPIS:KFKYE:NMAVS:SXAXR, SIPKAXX:VPTEL:EPIS:KFKYE:EMAVS:GXGXR, HVTKPTX:VPTKL:EPIS:KFKYE:NMAVS:SXGXH, YVPKPXX:VPTKL:EPIS:KFKYE:NMAVS:SXGXH, TVPKPXX:VPTQL:EPIS:KFKYE:NMAVS:AXGXH, AVPKAXX:VPTKL:EPIS:KFKYE:NMAVS:AXGXH, KVGKAXX:VPTKL:EPIS:KFKYE:EGMSAVS:XGXR, GSAGPXX:VPTKM:EPIS:KFKYE:GMAVS:RXGXS, AAPASXX:VPTRL:EPIS:KFKYE:DMAVS:AXGXR, STPPTXX:VPTRL:EPIS:KFKYE:DMAVS:SXGXR, HVPKPXX:VPTKL:EPIS:KFKYE:NMAVS:SXGXH, RVPSTXX:VPTKT:EPIS:KFKYE:MIAVS:XGXL, ASAAPXX:VPTAL:EPIS:KFKYE:MIAVS:XKXS, ASASPXX:VPTDL:EPIS:KFKYE:MIAVS:XKXS, ASASPXX:VPTDL:EPIS:KFKYE:MVAVS:XKXS, NDEGLEX:VPTEE:EPIS:KFKYE:FLAVS:KXEXR, NDEGLEX:VPTGQ:EPIS:KFKYE:LEAVS:QXEXR, SSVKXQP:VPTHH:EPIS:KFKYE:RLAVS:LEXAXA, RNVQXRP:VPTQL:EPIS:KFKYE:TLAVS:LAXKXE, KIPKAXX:VPTEL:EPIS:KFKYE:DMVVE:GXGXR, GIPEPXX:VPEKM:EPIS:KFKYE:NMTVE:SXAXR, SIPKAXX:VPTEL:EPIS:KFKYE:EMVVE:GXGXR, HVTKPTX:APTKL:EPIS:KFKYE:NMVVR:SXGXH, YVPKPXX:APTKL:EPIS:KFKYE:NMVVR:SXGXH, TVPKPXX:APTQL:EPIS:KFKYE:NMVVR:AXGXH, AVPKAXX:APTKL:EPIS:KFKYE:NMVVK:AXGXH, KVGKAXX:VPTKL:EPIS:KFKYE:EGMSVAE:XGXR, GSAGPXX:TPTKM:EPIS:KFKYE:GMVVD:RXGXS, AAPASXX:VPARL:EPIS:KFKYE:DMVVE:AXGXR, STPPTXX:VPTRL:EPIS:KFKYE:DMVVE:SXGXR, HVPKPXX:APTKL:EPIS:KFKYE:NMVVR:SXGXH, RVPSTXX:APVKT:EPIS:KFKYE:MIVEE:XGXL, ASAAPXX:VPQAL:EPIS:KFKYE:MIVRS:XKXS, ASASPXX:VSQDL:EPIS:KFKYE:MIVKS:XKXS, ASASPXX:VPQDL:EPIS:KFKYE:MVVKS:XKXS, NDEGLEX:VPTEE:EPIS:KFKYE:FLQHN:KXEXR, NDEGLEX:VPTGQ:EPIS:KFKYE:LEEHS:QXEXR, SSVKXQP:SRVHH:EPIS:KFKYE:RLEEH:LEXAXA, RNVQXRP:TQVQL:EPIS:KFKYE:TLEDH:LAXKXE, KIPKAXX:TPTEL:SPIN:YGKIP:DMVVD:GXGXR, GIPEPXX:TPTKM:SPIN:YGKIP:NMVVD:SXAXR, SIPKAXX:TPTEL:SPIN:YGKIP:EMVVD:GXGXR, HVTKPTX:TPTKL:SPIN:YGKIP:NMVVD:SXGXH, YVPKPXX:TPTKL:SPIN:YGKIP:NMVVD:SXGXH, TVPKPXX:TPTQL:SPIN:YGKIP:NMVVD:AXGXH, AVPKAXX:TPTKL:SPIN:YGKIP:NMVVD:AXGXH, KVGKAXX:TPTKL:SPIN:YGKIP:EGMSVVD:XGXR, KASKAXX:TPTKL:SPIN:YGKIP:GMVVD:EXGXR, AAPASXX:TPTRL:SPIN:YGKIP:DMVVD:AXGXR, STPPTXX:TPTRL:SPIN:YGKIP:DMVVD:SXGXR, HVPKPXX:TPTKL:SPIN:YGKIP:NMVVD:SXGXH, RVPSTXX:TPTKT:SPIN:YGKIP:MIVVD:XGXL, ASAAPXX:TPTAL:SPIN:YGKIP:MIVVD:XKXS, ASASPXX:TPTDL:SPIN:YGKIP:MIVVD:XKXS, ASASPXX:TPTDL:SPIN:YGKIP:MVVVD:XKXS, NDEGLEX:TPTEE:SPIN:YGKIP:FLVVD:KXEXR, NDEGLEX:TPTGQ:SPIN:YGKIP:LEVVD:QXEXR, SSVKXQP:TPTHH:SPIN:YGKIP:RLVVD:LEXAXA, RNVQXRP:TPTQL:SPIN:YGKIP:TLVVD:LAXKXE, KIPKAXX:VPTEL:SPIN:YGKIP:DMVVE:GXGXR, GIPEPXX:VPEKM:SPIN:YGKIP:NMTVE:SXAXR, SIPKAXX:VPTEL:SPIN:YGKIP:EMVVE:GXGXR, HVTKPTX:APTKL:SPIN:YGKIP:NMVVR:SXGXH, YVPKPXX:APTKL:SPIN:YGKIP:NMVVR:SXGXH, TVPKPXX:APTQL:SPIN:YGKIP:NMVVR:AXGXH, AVPKAXX:APTKL:SPIN:YGKIP:NMVVK:AXGXH, KVGKAXX:VPTKL:SPIN:YGKIP:EGMSVAE:XGXR, KASKAXX:VPTKL:SPIN:YGKIP:GMAVS:EXGXR, AAPASXX:VPARL:SPIN:YGKIP:DMVVE:AXGXR, STPPTXX:VPTRL:SPIN:YGKIP:DMVVE:SXGXR, HVPKPXX:APTKL:SPIN:YGKIP:NMVVR:SXGXH, RVPSTXX:APVKT:SPIN:YGKIP:MIVEE:XGXL, ASAAPXX:VPQAL:SPIN:YGKIP:MIVRS:XKXS, ASASPXX:VSQDL:SPIN:YGKIP:MIVKS:XKXS, ASASPXX:VPQDL:SPIN:YGKIP:MVVKS:XKXS, NDEGLEX:VPTEE:SPIN:YGKIP:FLQHN:KXEXR, NDEGLEX:VPTGQ:SPIN:YGKIP:LEEHS:QXEXR, SSVKXQP:SRVHH:SPIN:YGKIP:RLEEH:LEXAXA, RNVQXRP:TQVQL:SPIN:YGKIP:TLEDH:LAXKXE, KIPKAXX:VPAEL:SPIS:YKQYE:DMVVE:GXGXR, GIPEPXX:VPAKM:SPIS:YKQYE:NMVVE:SXAXR, SIPKAXX:VPAEL:SPIS:YKQYE:EMVVE:GXGXR, HVTKPTX:VPAKL:SPIS:YKQYE:NMVVE:SXGXH, YVPKPXX:VPAKL:SPIS:YKQYE:NMVVE:SXGXH, TVPKPXX:VPAQL:SPIS:YKQYE:NMVVE:AXGXH, AVPKAXX:VPAKL:SPIS:YKQYE:NMVVE:AXGXH, KVGKAXX:VPAKL:SPIS:YKQYE:EGMSVVE:XGXR, KASKAXX:VPAKL:SPIS:YKQYE:GMVVE:EXGXR, GSAGPXX:VPAKM:SPIS:YKQYE:GMVVE:RXGXS, STPPTXX:VPARL:SPIS:YKQYE:DMVVE:SXGXR, HVPKPXX:VPAKL:SPIS:YKQYE:NMVVE:SXGXH, RVPSTXX:VPAKT:SPIS:YKQYE:MIVVE:XGXL, ASAAPXX:VPAAL:SPIS:YKQYE:MIVVE:XKXS, ASASPXX:VPADL:SPIS:YKQYE:MIVVE:XKXS, ASASPXX:VPADL:SPIS:YKQYE:MVVVE:XKXS, NDEGLEX:VPAEE:SPIS:YKQYE:FLVVE:KXEXR, NDEGLEX:VPAGQ:SPIS:YKQYE:LEVVE:QXEXR, SSVKXQP:VPAHH:SPIS:YKQYE:RLVVE:LEXAXA, RNVQXRP:VPAQL:SPIS:YKQYE:TLVVE:LAXKXE, KIPKAXX:VPTEL:SPIS:YKQYE:DMVVE:GXGXR, GIPEPXX:VPEKM:SPIS:YKQYE:NMTVE:SXAXR, SIPKAXX:VPTEL:SPIS:YKQYE:EMVVE:GXGXR, HVTKPTX:APTKL:SPIS:YKQYE:NMVVR:SXGXH, YVPKPXX:APTKL:SPIS:YKQYE:NMVVR:SXGXH, TVPKPXX:APTQL:SPIS:YKQYE:NMVVR:AXGXH, AVPKAXX:APTKL:SPIS:YKQYE:NMVVK:AXGXH, KVGKAXX:VPTKL:SPIS:YKQYE:EGMSVAE:XGXR, KASKAXX:VPTKL:SPIS:YKQYE:GMAVS:EXGXR, GSAGPXX:TPTKM:SPIS:YKQYE:GMVVD:RXGXS, STPPTXX:VPTRL:SPIS:YKQYE:DMVVE:SXGXR, HVPKPXX:APTKL:SPIS:YKQYE:NMVVR:SXGXH, RVPSTXX:APVKT:SPIS:YKQYE:MIVEE:XGXL, ASAAPXX:VPQAL:SPIS:YKQYE:MIVRS:XKXS, ASASPXX:VSQDL:SPIS:YKQYE:MIVKS:XKXS, ASASPXX:VPQDL:SPIS:YKQYE:MVVKS:XKXS, NDEGLEX:VPTEE:SPIS:YKQYE:FLQHN:KXEXR, NDEGLEX:VPTGQ:SPIS:YKQYE:LEEHS:QXEXR, SSVKXQP:SRVHH:SPIS:YKQYE:RLEEH:LEXAXA, RNVQXRP:TQVQL:SPIS:YKQYE:TLEDH:LAXKXE, GIPEPXX:VPTKM:SPIS:YKQYE:NMVVE:SXAXR, HVTKPTX:VPTKL:SPIS:YKQYE:NMVVE:SXGXH, YVPKPXX:VPTKL:SPIS:YKQYE:NMVVE:SXGXH, TVPKPXX:VPTQL:SPIS:YKQYE:NMVVE:AXGXH, AVPKAXX:VPTKL:SPIS:YKQYE:NMVVE:AXGXH, KVGKAXX:VPTKL:SPIS:YKQYE:EGMSVVE:XGXR, KASKAXX:VPTKL:SPIS:YKQYE:GMVVE:EXGXR, GSAGPXX:VPTKM:SPIS:YKQYE:GMVVE:RXGXS, AAPASXX:VPTRL:SPIS:YKQYE:DMVVE:AXGXR, HVPKPXX:VPTKL:SPIS:YKQYE:NMVVE:SXGXH, RVPSTXX:VPTKT:SPIS:YKQYE:MIVVE:XGXL, ASAAPXX:VPTAL:SPIS:YKQYE:MIVVE:XKXS, ASASPXX:VPTDL:SPIS:YKQYE:MIVVE:XKXS, ASASPXX:VPTDL:SPIS:YKQYE:MVVVE:XKXS, NDEGLEX:VPTEE:SPIS:YKQYE:FLVVE:KXEXR, NDEGLEX:VPTGQ:SPIS:YKQYE:LEVVE:QXEXR, SSVKXQP:VPTHH:SPIS:YKQYE:RLVVE:LEXAXA, RNVQXRP:VPTQL:SPIS:YKQYE:TLVVE:LAXKXE, AAPASXX:VPARL:SPIS:YKQYE:DMVVE:AXGXR, KIPKAXX:APVEL:KPLS:DHHKD:DMVEE:GXGXR, GIPEPXX:APVKM:KPLS:DHHKD:NMVEE:SXAXR, SIPKAXX:APVEL:KPLS:DHHKD:EMVEE:GXGXR, HVTKPTX:APVKL:KPLS:DHHKD:NMVEE:SXGXH, YVPKPXX:APVKL:KPLS:DHHKD:NMVEE:SXGXH, TVPKPXX:APVQL:KPLS:DHHKD:NMVEE:AXGXH, AVPKAXX:APVKL:KPLS:DHHKD:NMVEE:AXGXH, KVGKAXX:APVKL:KPLS:DHHKD:EGMSVEE:XGXR, KASKAXX:APVKL:KPLS:DHHKD:GMVEE:EXGXR, GSAGPXX:APVKM:KPLS:DHHKD:GMVEE:RXGXS, AAPASXX:APVRL:KPLS:DHHKD:DMVEE:AXGXR, STPPTXX:APVRL:KPLS:DHHKD:DMVEE:SXGXR, HVPKPXX:APVKL:KPLS:DHHKD:NMVEE:SXGXH, ASAAPXX:APVAL:KPLS:DHHKD:MIVEE:XKXS, ASASPXX:APVDL:KPLS:DHHKD:MIVEE:XKXS, ASASPXX:APVDL:KPLS:DHHKD:MVVEE:XKXS, NDEGLEX:APVEE:KPLS:DHHKD:FLVEE:KXEXR, NDEGLEX:APVGQ:KPLS:DHHKD:LEVEE:QXEXR, SSVKXQP:APVHH:KPLS:DHHKD:RLVEE:LEXAXA, RNVQXRP:APVQL:KPLS:DHHKD:TLVEE:LAXKXE, KIPKAXX:VPTEL:KPLS:DHHKD:DMVVE:GXGXR, GIPEPXX:VPEKM:KPLS:DHHKD:NMTVE:SXAXR, SIPKAXX:VPTEL:KPLS:DHHKD:EMVVE:GXGXR, HVTKPTX:APTKL:KPLS:DHHKD:NMVVR:SXGXH, YVPKPXX:APTKL:KPLS:DHHKD:NMVVR:SXGXH, TVPKPXX:APTQL:KPLS:DHHKD:NMVVR:AXGXH, AVPKAXX:APTKL:KPLS:DHHKD:NMVVK:AXGXH, KVGKAXX:VPTKL:KPLS:DHHKD:EGMSVAE:XGXR, KASKAXX:VPTKL:KPLS:DHHKD:GMAVS:EXGXR, GSAGPXX:TPTKM:KPLS:DHHKD:GMVVD:RXGXS, AAPASXX:VPARL:KPLS:DHHKD:DMVVE:AXGXR, STPPTXX:VPTRL:KPLS:DHHKD:DMVVE:SXGXR, HVPKPXX:APTKL:KPLS:DHHKD:NMVVR:SXGXH, ASAAPXX:VPQAL:KPLS:DHHKD:MIVRS:XKXS, ASASPXX:VSQDL:KPLS:DHHKD:MIVKS:XKXS, ASASPXX:VPQDL:KPLS:DHHKD:MVVKS:XKXS, NDEGLEX:VPTEE:KPLS:DHHKD:FLQHN:KXEXR, NDEGLEX:VPTGQ:KPLS:DHHKD:LEEHS:QXEXR, SSVKXQP:SRVHH:KPLS:DHHKD:RLEEH:LEXAXA, RNVQXRP:TQVQL:KPLS:DHHKD:TLEDH:LAXKXE, KIPKAXX:VPQEL:EPLP:EQLSN:DMVRS:GXGXR, GIPEPXX:VPQKM:EPLP:EQLSN:NMVRS:SXAXR, SIPKAXX:VPQEL:EPLP:EQLSN:EMVRS:GXGXR, HVTKPTX:VPQKL:EPLP:EQLSN:NMVRS:SXGXH, YVPKPXX:VPQKL:EPLP:EQLSN:NMVRS:SXGXH, TVPKPXX:VPQQL:EPLP:EQLSN:NMVRS:AXGXH, AVPKAXX:VPQKL:EPLP:EQLSN:NMVRS:AXGXH, KVGKAXX:VPQKL:EPLP:EQLSN:EGMSVRS:XGXR, KASKAXX:VPQKL:EPLP:EQLSN:GMVRS:EXGXR, GSAGPXX:VPQKM:EPLP:EQLSN:GMVRS:RXGXS, AAPASXX:VPQRL:EPLP:EQLSN:DMVRS:AXGXR, STPPTXX:VPQRL:EPLP:EQLSN:DMVRS:SXGXR, HVPKPXX:VPQKL:EPLP:EQLSN:NMVRS:SXGXH, RVPSTXX:VPQKT:EPLP:EQLSN:MIVRS:XGXL, ASASPXX:VPQDL:EPLP:EQLSN:MIVRS:XKXS, ASASPXX:VPQDL:EPLP:EQLSN:MVVRS:XKXS, NDEGLEX:VPQEE:EPLP:EQLSN:FLVRS:KXEXR, NDEGLEX:VPQGQ:EPLP:EQLSN:LEVRS:QXEXR, SSVKXQP:VPQHH:EPLP:EQLSN:RLVRS:LEXAXA, RNVQXRP:VPQQL:EPLP:EQLSN:TLVRS:LAXKXE, KIPKAXX:VPTEL:EPLP:EQLSN:DMVVE:GXGXR, GIPEPXX:VPEKM:EPLP:EQLSN:NMTVE:SXAXR, SIPKAXX:VPTEL:EPLP:EQLSN:EMVVE:GXGXR, HVTKPTX:APTKL:EPLP:EQLSN:NMVVR:SXGXH, YVPKPXX:APTKL:EPLP:EQLSN:NMVVR:SXGXH, TVPKPXX:APTQL:EPLP:EQLSN:NMVVR:AXGXH, AVPKAXX:APTKL:EPLP:EQLSN:NMVVK:AXGXH, KVGKAXX:VPTKL:EPLP:EQLSN:EGMSVAE:XGXR, KASKAXX:VPTKL:EPLP:EQLSN:GMAVS:EXGXR, GSAGPXX:TPTKM:EPLP:EQLSN:GMVVD:RXGXS, AAPASXX:VPARL:EPLP:EQLSN:DMVVE:AXGXR, STPPTXX:VPTRL:EPLP:EQLSN:DMVVE:SXGXR, HVPKPXX:APTKL:EPLP:EQLSN:NMVVR:SXGXH, RVPSTXX:APVKT:EPLP:EQLSN:MIVEE:XGXL, ASASPXX:VSQDL:EPLP:EQLSN:MIVKS:XKXS, ASASPXX:VPQDL:EPLP:EQLSN:MVVKS:XKXS, NDEGLEX:VPTEE:EPLP:EQLSN:FLQHN:KXEXR, NDEGLEX:VPTGQ:EPLP:EQLSN:LEEHS:QXEXR, SSVKXQP:SRVHH:EPLP:EQLSN:RLEEH:LEXAXA, RNVQXRP:TQVQL:EPLP:EQLSN:TLEDH:LAXKXE, KIPKAXX:VSQEL:EPLT:EQLSN:DMVKS:GXGXR, GIPEPXX:VSQKM:EPLT:EQLSN:NMVKS:SXAXR, SIPKAXX:VSQEL:EPLT:EQLSN:EMVKS:GXGXR, HVTKPTX:VSQKL:EPLT:EQLSN:NMVKS:SXGXH, YVPKPXX:VSQKL:EPLT:EQLSN:NMVKS:SXGXH, TVPKPXX:VSQQL:EPLT:EQLSN:NMVKS:AXGXH, AVPKAXX:VSQKL:EPLT:EQLSN:NMVKS:AXGXH, KVGKAXX:VSQKL:EPLT:EQLSN:EGMSVKS:XGXR, KASKAXX:VSQKL:EPLT:EQLSN:GMVKS:EXGXR, GSAGPXX:VSQKM:EPLT:EQLSN:GMVKS:RXGXS, AAPASXX:VSQRL:EPLT:EQLSN:DMVKS:AXGXR, STPPTXX:VSQRL:EPLT:EQLSN:DMVKS:SXGXR, HVPKPXX:VSQKL:EPLT:EQLSN:NMVKS:SXGXH, RVPSTXX:VSQKT:EPLT:EQLSN:MIVKS:XGXL, ASAAPXX:VSQAL:EPLT:EQLSN:MIVKS:XKXS, ASASPXX:VSQDL:EPLT:EQLSN:MVVKS:XKXS, NDEGLEX:VSQEE:EPLT:EQLSN:FLVKS:KXEXR, NDEGLEX:VSQGQ:EPLT:EQLSN:LEVKS:QXEXR, SSVKXQP:VSQHH:EPLT:EQLSN:RLVKS:LEXAXA, RNVQXRP:VSQQL:EPLT:EQLSN:TLVKS:LAXKXE, KIPKAXX:VPTEL:EPLT:EQLSN:DMVVE:GXGXR, GIPEPXX:VPEKM:EPLT:EQLSN:NMTVE:SXAXR, SIPKAXX:VPTEL:EPLT:EQLSN:EMVVE:GXGXR, HVTKPTX:APTKL:EPLT:EQLSN:NMVVR:SXGXH, YVPKPXX:APTKL:EPLT:EQLSN:NMVVR:SXGXH, TVPKPXX:APTQL:EPLT:EQLSN:NMVVR:AXGXH, AVPKAXX:APTKL:EPLT:EQLSN:NMVVK:AXGXH, KVGKAXX:VPTKL:EPLT:EQLSN:EGMSVAE:XGXR, KASKAXX:VPTKL:EPLT:EQLSN:GMAVS:EXGXR, GSAGPXX:TPTKM:EPLT:EQLSN:GMVVD:RXGXS, AAPASXX:VPARL:EPLT:EQLSN:DMVVE:AXGXR, STPPTXX:VPTRL:EPLT:EQLSN:DMVVE:SXGXR, HVPKPXX:APTKL:EPLT:EQLSN:NMVVR:SXGXH, RVPSTXX:APVKT:EPLT:EQLSN:MIVEE:XGXL, ASAAPXX:VPQAL:EPLT:EQLSN:MIVRS:XKXS, ASASPXX:VPQDL:EPLT:EQLSN:MVVKS:XKXS, NDEGLEX:VPTEE:EPLT:EQLSN:FLQHN:KXEXR, NDEGLEX:VPTGQ:EPLT:EQLSN:LEEHS:QXEXR, SSVKXQP:SRVHH:EPLT:EQLSN:RLEEH:LEXAXA, RNVQXRP:TQVQL:EPLT:EQLSN:TLEDH:LAXKXE, KIPKAXX:VPQEL:EPLT:EQLSN:DMVKS:GXGXR, GIPEPXX:VPQKM:EPLT:EQLSN:NMVKS:SXAXR, SIPKAXX:VPQEL:EPLT:EQLSN:EMVKS:GXGXR, HVTKPTX:VPQKL:EPLT:EQLSN:NMVKS:SXGXH, YVPKPXX:VPQKL:EPLT:EQLSN:NMVKS:SXGXH, TVPKPXX:VPQQL:EPLT:EQLSN:NMVKS:AXGXH, AVPKAXX:VPQKL:EPLT:EQLSN:NMVKS:AXGXH, KVGKAXX:VPQKL:EPLT:EQLSN:EGMSVKS:XGXR, KASKAXX:VPQKL:EPLT:EQLSN:GMVKS:EXGXR, GSAGPXX:VPQKM:EPLT:EQLSN:GMVKS:RXGXS, AAPASXX:VPQRL:EPLT:EQLSN:DMVKS:AXGXR, STPPTXX:VPQRL:EPLT:EQLSN:DMVKS:SXGXR, HVPKPXX:VPQKL:EPLT:EQLSN:NMVKS:SXGXH, RVPSTXX:VPQKT:EPLT:EQLSN:MIVKS:XGXL, ASAAPXX:VPQAL:EPLT:EQLSN:MIVKS:XKXS, ASASPXX:VPQDL:EPLT:EQLSN:MIVKS:XKXS, NDEGLEX:VPQEE:EPLT:EQLSN:FLVKS:KXEXR, NDEGLEX:VPQGQ:EPLT:EQLSN:LEVKS:QXEXR, SSVKXQP:VPQHH:EPLT:EQLSN:RLVKS:LEXAXA, RNVQXRP:VPQQL:EPLT:EQLSN:TLVKS:LAXKXE, ASASPXX:VSQDL:EPLT:EQLSN:MIVKS:XKXS, KIPKAXX:VPTEL:SNIT:IGEMS:DMQHN:GXGXR, GIPEPXX:VPTKM:SNIT:IGEMS:NMQHN:SXAXR, SIPKAXX:VPTEL:SNIT:IGEMS:EMQHN:GXGXR, HVTKPTX:VPTKL:SNIT:IGEMS:NMQHN:SXGXH, YVPKPXX:VPTKL:SNIT:IGEMS:NMQHN:SXGXH, TVPKPXX:VPTQL:SNIT:IGEMS:NMQHN:AXGXH, AVPKAXX:VPTKL:SNIT:IGEMS:NMQHN:AXGXH, KVGKAXX:VPTKL:SNIT:IGEMS:EGMSQHN:XGXR, KASKAXX:VPTKL:SNIT:IGEMS:GMQHN:EXGXR, GSAGPXX:VPTKM:SNIT:IGEMS:GMQHN:RXGXS, AAPASXX:VPTRL:SNIT:IGEMS:DMQHN:AXGXR, STPPTXX:VPTRL:SNIT:IGEMS:DMQHN:SXGXR, HVPKPXX:VPTKL:SNIT:IGEMS:NMQHN:SXGXH, RVPSTXX:VPTKT:SNIT:IGEMS:MIQHN:XGXL, ASAAPXX:VPTAL:SNIT:IGEMS:MIQHN:XKXS, ASASPXX:VPTDL:SNIT:IGEMS:MIQHN:XKXS, ASASPXX:VPTDL:SNIT:IGEMS:MVQHN:XKXS, NDEGLEX:VPTGQ:SNIT:IGEMS:LEQHN:QXEXR, NDEGLEX:VPTEE:SNIT:IGEMS:FLQHN:KXEXR, SSVKXQP:VPTHH:SNIT:IGEMS:RLQHN:LEXAXA, RNVQXRP:VPTQL:SNIT:IGEMS:TLQHN:LAXKXE, KIPKAXX:VPTEL:SNIT:IGEMS:DMVVE:GXGXR, GIPEPXX:VPEKM:SNIT:IGEMS:NMTVE:SXAXR, SIPKAXX:VPTEL:SNIT:IGEMS:EMVVE:GXGXR, HVTKPTX:APTKL:SNIT:IGEMS:NMVVR:SXGXH, YVPKPXX:APTKL:SNIT:IGEMS:NMVVR:SXGXH, TVPKPXX:APTQL:SNIT:IGEMS:NMVVR:AXGXH, AVPKAXX:APTKL:SNIT:IGEMS:NMVVK:AXGXH, KVGKAXX:VPTKL:SNIT:IGEMS:EGMSVAE:XGXR, KASKAXX:VPTKL:SNIT:IGEMS:GMAVS:EXGXR, GSAGPXX:TPTKM:SNIT:IGEMS:GMVVD:RXGXS, AAPASXX:VPARL:SNIT:IGEMS:DMVVE:AXGXR, STPPTXX:VPTRL:SNIT:IGEMS:DMVVE:SXGXR, HVPKPXX:APTKL:SNIT:IGEMS:NMVVR:SXGXH, RVPSTXX:APVKT:SNIT:IGEMS:MIVEE:XGXL, ASAAPXX:VPQAL:SNIT:IGEMS:MIVRS:XKXS, ASASPXX:VSQDL:SNIT:IGEMS:MIVKS:XKXS, ASASPXX:VPQDL:SNIT:IGEMS:MVVKS:XKXS, NDEGLEX:VPTGQ:SNIT:IGEMS:LEEHS:QXEXR, SSVKXQP:SRVHH:SNIT:IGEMS:RLEEH:LEXAXA, RNVQXRP:TQVQL:SNIT:IGEMS:TLEDH:LAXKXE, KIPKAXX:VPTEL:SNIT:LGEMS:DMEHS:GXGXR, GIPEPXX:VPTKM:SNIT:LGEMS:NMEHS:SXAXR, SIPKAXX:VPTEL:SNIT:LGEMS:EMEHS:GXGXR, HVTKPTX:VPTKL:SNIT:LGEMS:NMEHS:SXGXH, YVPKPXX:VPTKL:SNIT:LGEMS:NMEHS:SXGXH, TVPKPXX:VPTQL:SNIT:LGEMS:NMEHS:AXGXH, AVPKAXX:VPTKL:SNIT:LGEMS:NMEHS:AXGXH, KVGKAXX:VPTKL:SNIT:LGEMS:EGMSEHS:XGXR, KASKAXX:VPTKL:SNIT:LGEMS:GMEHS:EXGXR, GSAGPXX:VPTKM:SNIT:LGEMS:GMEHS:RXGXS, AAPASXX:VPTRL:SNIT:LGEMS:DMEHS:AXGXR, STPPTXX:VPTRL:SNIT:LGEMS:DMEHS:SXGXR, HVPKPXX:VPTKL:SNIT:LGEMS:NMEHS:SXGXH, RVPSTXX:VPTKT:SNIT:LGEMS:MIEHS:XGXL, ASAAPXX:VPTAL:SNIT:LGEMS:MIEHS:XKXS, ASASPXX:VPTDL:SNIT:LGEMS:MIEHS:XKXS, ASASPXX:VPTDL:SNIT:LGEMS:MVEHS:XKXS, NDEGLEX:VPTEE:SNIT:LGEMS:FLEHS:KXEXR, SSVKXQP:VPTHH:SNIT:LGEMS:RLEHS:LEXAXA, RNVQXRP:VPTQL:SNIT:LGEMS:TLEHS:LAXKXE, KIPKAXX:VPTEL:SNIT:LGEMS:DMVVE:GXGXR, GIPEPXX:VPEKM:SNIT:LGEMS:NMTVE:SXAXR, SIPKAXX:VPTEL:SNIT:LGEMS:EMVVE:GXGXR, HVTKPTX:APTKL:SNIT:LGEMS:NMVVR:SXGXH, YVPKPXX:APTKL:SNIT:LGEMS:NMVVR:SXGXH, TVPKPXX:APTQL:SNIT:LGEMS:NMVVR:AXGXH, AVPKAXX:APTKL:SNIT:LGEMS:NMVVK:AXGXH, KVGKAXX:VPTKL:SNIT:LGEMS:EGMSVAE:XGXR, KASKAXX:VPTKL:SNIT:LGEMS:GMAVS:EXGXR, GSAGPXX:TPTKM:SNIT:LGEMS:GMVVD:RXGXS, AAPASXX:VPARL:SNIT:LGEMS:DMVVE:AXGXR, STPPTXX:VPTRL:SNIT:LGEMS:DMVVE:SXGXR, HVPKPXX:APTKL:SNIT:LGEMS:NMVVR:SXGXH, RVPSTXX:APVKT:SNIT:LGEMS:MIVEE:XGXL, ASAAPXX:VPQAL:SNIT:LGEMS:MIVRS:XKXS, ASASPXX:VSQDL:SNIT:LGEMS:MIVKS:XKXS, ASASPXX:VPQDL:SNIT:LGEMS:MVVKS:XKXS, NDEGLEX:VPTEE:SNIT:LGEMS:FLQHN:KXEXR, SSVKXQP:SRVHH:SNIT:LGEMS:RLEEH:LEXAXA, RNVQXRP:TQVQL:SNIT:LGEMS:TLEDH:LAXKXE, KIPKAXX:SRVEL:RSVK:KEVQV:DMEEH:GXGXR, GIPEPXX:SRVKM:RSVK:KEVQV:NMEEH:SXAXR, SIPKAXX:SRVEL:RSVK:KEVQV:EMEEH:GXGXR, HVTKPTX:SRVKL:RSVK:KEVQV:NMEEH:SXGXH, YVPKPXX:SRVKL:RSVK:KEVQV:NMEEH:SXGXH, TVPKPXX:SRVQL:RSVK:KEVQV:NMEEH:AXGXH, AVPKAXX:SRVKL:RSVK:KEVQV:NMEEH:AXGXH, KVGKAXX:SRVKL:RSVK:KEVQV:EGMSEEH:XGXR, KASKAXX:SRVKL:RSVK:KEVQV:GMEEH:EXGXR, GSAGPXX:SRVKM:RSVK:KEVQV:GMEEH:RXGXS, AAPASXX:SRVRL:RSVK:KEVQV:DMEEH:AXGXR, STPPTXX:SRVRL:RSVK:KEVQV:DMEEH:SXGXR, HVPKPXX:SRVKL:RSVK:KEVQV:NMEEH:SXGXH, RVPSTXX:SRVKT:RSVK:KEVQV:MIEEH:XGXL, ASAAPXX:SRVAL:RSVK:KEVQV:MIEEH:XKXS, ASASPXX:SRVDL:RSVK:KEVQV:MIEEH:XKXS, ASASPXX:SRVDL:RSVK:KEVQV:MVEEH:XKXS, NDEGLEX:SRVEE:RSVK:KEVQV:FLEEH:KXEXR, NDEGLEX:SRVGQ:RSVK:KEVQV:LEEEH:QXEXR, RNVQXRP:SRVQL:RSVK:KEVQV:TLEEH:LAXKXE, KIPKAXX:VPTEL:RSVK:KEVQV:DMVVE:GXGXR, GIPEPXX:VPEKM:RSVK:KEVQV:NMTVE:SXAXR, SIPKAXX:VPTEL:RSVK:KEVQV:EMVVE:GXGXR, HVTKPTX:APTKL:RSVK:KEVQV:NMVVR:SXGXH, YVPKPXX:APTKL:RSVK:KEVQV:NMVVR:SXGXH, TVPKPXX:APTQL:RSVK:KEVQV:NMVVR:AXGXH, AVPKAXX:APTKL:RSVK:KEVQV:NMVVK:AXGXH, KVGKAXX:VPTKL:RSVK:KEVQV:EGMSVAE:XGXR, KASKAXX:VPTKL:RSVK:KEVQV:GMAVS:EXGXR, GSAGPXX:TPTKM:RSVK:KEVQV:GMVVD:RXGXS, AAPASXX:VPARL:RSVK:KEVQV:DMVVE:AXGXR, STPPTXX:VPTRL:RSVK:KEVQV:DMVVE:SXGXR, HVPKPXX:APTKL:RSVK:KEVQV:NMVVR:SXGXH, RVPSTXX:APVKT:RSVK:KEVQV:MIVEE:XGXL, ASAAPXX:VPQAL:RSVK:KEVQV:MIVRS:XKXS, ASASPXX:VSQDL:RSVK:KEVQV:MIVKS:XKXS, ASASPXX:VPQDL:RSVK:KEVQV:MVVKS:XKXS, NDEGLEX:VPTEE:RSVK:KEVQV:FLQHN:KXEXR, NDEGLEX:VPTGQ:RSVK:KEVQV:LEEHS:QXEXR, RNVQXRP:TQVQL:RSVK:KEVQV:TLEDH:LAXKXE, KIPKAXX:TQVEL:RPVQ:KKATV:DMEDH:GXGXR, GIPEPXX:TQVKM:RPVQ:KKATV:NMEDH:SXAXR, SIPKAXX:TQVEL:RPVQ:KKATV:EMEDH:GXGXR, HVTKPTX:TQVKL:RPVQ:KKATV:NMEDH:SXGXH, YVPKPXX:TQVKL:RPVQ:KKATV:NMEDH:SXGXH, TVPKPXX:TQVQL:RPVQ:KKATV:NMEDH:AXGXH, AVPKAXX:TQVKL:RPVQ:KKATV:NMEDH:AXGXH, KVGKAXX:TQVKL:RPVQ:KKATV:EGMSEDH:XGXR, KASKAXX:TQVKL:RPVQ:KKATV:GMEDH:EXGXR, GSAGPXX:TQVKM:RPVQ:KKATV:GMEDH:RXGXS, AAPASXX:TQVRL:RPVQ:KKATV:DMEDH:AXGXR, STPPTXX:TQVRL:RPVQ:KKATV:DMEDH:SXGXR, HVPKPXX:TQVKL:RPVQ:KKATV:NMEDH:SXGXH, RVPSTXX:TQVKT:RPVQ:KKATV:MIEDH:XGXL, ASAAPXX:TQVAL:RPVQ:KKATV:MIEDH:XKXS, ASASPXX:TQVDL:RPVQ:KKATV:MIEDH:XKXS, ASASPXX:TQVDL:RPVQ:KKATV:MVEDH:XKXS, NDEGLEX:TQVEE:RPVQ:KKATV:FLEDH:KXEXR, NDEGLEX:TQVGQ:RPVQ:KKATV:LEEDH:QXEXR, SSVKXQP:TQVHH:RPVQ:KKATV:RLEDH:LEXAXA, KIPKAXX:VPTEL:RPVQ:KKATV:DMVVE:GXGXR, GIPEPXX:VPEKM:RPVQ:KKATV:NMTVE:SXAXR, SIPKAXX:VPTEL:RPVQ:KKATV:EMVVE:GXGXR, HVTKPTX:APTKL:RPVQ:KKATV:NMVVR:SXGXH, YVPKPXX:APTKL:RPVQ:KKATV:NMVVR:SXGXH, TVPKPXX:APTQL:RPVQ:KKATV:NMVVR:AXGXH, AVPKAXX:APTKL:RPVQ:KKATV:NMVVK:AXGXH, KVGKAXX:VPTKL:RPVQ:KKATV:EGMSVAE:XGXR, KASKAXX:VPTKL:RPVQ:KKATV:GMAVS:EXGXR, GSAGPXX:TPTKM:RPVQ:KKATV:GMVVD:RXGXS, AAPASXX:VPARL:RPVQ:KKATV:DMVVE:AXGXR, STPPTXX:VPTRL:RPVQ:KKATV:DMVVE:SXGXR, HVPKPXX:APTKL:RPVQ:KKATV:NMVVR:SXGXH, RVPSTXX:APVKT:RPVQ:KKATV:MIVEE:XGXL, ASAAPXX:VPQAL:RPVQ:KKATV:MIVRS:XKXS, ASASPXX:VSQDL:RPVQ:KKATV:MIVKS:XKXS, ASASPXX:VPQDL:RPVQ:KKATV:MVVKS:XKXS, NDEGLEX:VPTEE:RPVQ:KKATV:FLQHN:KXEXR, NDEGLEX:VPTGQ:RPVQ:KKATV:LEEHS:QXEXR and SSVKXQP:SRVHH:RPVQ:KKATV:RLEEH:LEXAXA. More particularly, the hexaplet PEP7:PEP5:PEP1:PEP2:PEP6:PEP8 is selected from the group consisting of GIPEPXX:VPTKM:SAIS:LKNYQ:NMVVE:SXAXR, HVTKPTX:VPTKL:SAIS:LKNYQ:NMVVE:SXGXH, YVPKPXX:VPTKL:SAIS:LKNYQ:NMVVE:SXGXH, TVPKPXX:VPTQL:SAIS:LKNYQ:NMVVE:AXGXH, AVPKAXX:VPTKL:SAIS:LKNYQ:NMVVE:AXGXH, KVGKAXX:VPTKL:SAIS:LKNYQ:EGMSVVE:XGXR, KASKAXX:VPTKL:SAIS:LKNYQ:GMVVE:EXGXR, GSAGPXX:VPTKM:SAIS:LKNYQ:GMVVE:RXGXS, AAPASXX:VPTRL:SAIS:LKNYQ:DMVVE:AXGXR, STPPTXX:VPTRL:SAIS:LKNYQ:DMVVE:SXGXR, HVPKPXX:VPTKL:SAIS:LKNYQ:NMVVE:SXGXH, RVPSTXX:VPTKT:SAIS:LKNYQ:MIVVE:XGXL, ASAAPXX:VPTAL:SAIS:LKNYQ:MIVVE:XKXS, ASASPXX:VPTDL:SAIS:LKNYQ:MIVVE:XKXS, ASASPXX:VPTDL:SAIS:LKNYQ:MVVVE:XKXS, GIPEPXX:VPEKM:SAIS:LKNYQ:NMTVE:SXAXR, HVTKPTX:APTKL:SAIS:LKNYQ:NMVVR:SXGXH, YVPKPXX:APTKL:SAIS:LKNYQ:NMVVR:SXGXH, TVPKPXX:APTQL:SAIS:LKNYQ:NMVVR:AXGXH, AVPKAXX:APTKL:SAIS:LKNYQ:NMVVK:AXGXH, KVGKAXX:VPTKL:SAIS:LKNYQ:EGMSVAE:XGXR, KASKAXX:VPTKL:SAIS:LKNYQ:GMAVS:EXGXR, GSAGPXX:TPTKM:SAIS:LKNYQ:GMVVD:RXGXS, AAPASXX:VPARL:SAIS:LKNYQ:DMVVE:AXGXR, HVPKPXX:APTKL:SAIS:LKNYQ:NMVVR:SXGXH, RVPSTXX:APVKT:SAIS:LKNYQ:MIVEE:XGXL, ASAAPXX:VPQAL:SAIS:LKNYQ:MIVRS:XKXS, ASASPXX:VSQDL:SAIS:LKNYQ:MIVKS:XKXS, ASASPXX:VPQDL:SAIS:LKNYQ:MVVKS:XKXS, NDEGLEX:VPTEE:SAIS:LKNYQ:FLQHN:KXEXR, NDEGLEX:VPTGQ:SAIS:LKNYQ:LEEHS:QXEXR, SSVKXQP:SRVHH:SAIS:LKNYQ:RLEEH:LEXAXA, RNVQXRP:TQVQL:SAIS:LKNYQ:TLEDH:LAXKXE, KIPKAXX:VPEEL:SSLS:LKVYP:DMTVE:GXGXR, SIPKAXX:VPEEL:SSLS:LKVYP: EMTVE:GXGXR, HVTKPTX:VPEKL:SSLS:LKVYP:NMTVE:SXGXH, YVPKPXX:VPEKL:SSLS:LKVYP:NMTVE:SXGXH, TVPKPXX:VPEQL:SSLS:LKVYP:NMTVE:AXGXH, AVPKAXX:VPEKL:SSLS:LKVYP:NMTVE:AXGXH, KVGKAXX:VPEKL:SSLS:LKVYP:EGMSTVE:XGXR, KASKAXX:VPEKL:SSLS:LKVYP:GMTVE:EXGXR, GSAGPXX:VPEKM:SSLS:LKVYP:GMTVE:RXGXS, AAPASXX:VPERL:SSLS:LKVYP:DMTVE:AXGXR, STPPTXX:VPERL:SSLS:LKVYP:DMTVE:SXGXR, HVPKPXX:VPEKL:SSLS:LKVYP:NMTVE:SXGXH, RVPSTXX:VPEKT:SSLS:LKVYP:MITVE:XGXL, ASAAPXX:VPEAL:SSLS:LKVYP:MITVE:XKXS, ASASPXX:VPEDL:SSLS:LKVYP:MITVE:XKXS, ASASPXX:VPEDL:SSLS:LKVYP:MVTVE:XKXS, KIPKAXX:VPTEL:SSLS:LKVYP:DMVVE:GXGXR, SIPKAXX:VPTEL:SSLS:LKVYP:EMVVE:GXGXR, HVTKPTX:APTKL:SSLS:LKVYP:NMVVR:SXGXH, YVPKPXX:APTKL:SSLS:LKVYP:NMVVR:SXGXH, TVPKPXX:APTQL:SSLS:LKVYP:NMVVR:AXGXH, AVPKAXX:APTKL:SSLS:LKVYP:NMVVK:AXGXH, KVGKAXX:VPTKL:SSLS:LKVYP:EGMSVAE:XGXR, KASKAXX:VPTKL:SSLS:LKVYP:GMAVS:EXGXR, GSAGPXX:TPTKM:SSLS:LKVYP:GMVVD:RXGXS, AAPASXX:VPARL:SSLS:LKVYP:DMVVE:AXGXR, STPPTXX:VPTRL:SSLS:LKVYP:DMVVE:SXGXR, HVPKPXX:APTKL:SSLS:LKVYP:NMVVR:SXGXH, RVPSTXX:APVKT:SSLS:LKVYP:MIVEE:XGXL, ASAAPXX:VPQAL:SSLS:LKVYP:MIVRS:XKXS, ASASPXX:VSQDL:SSLS:LKVYP:MIVKS:XKXS, ASASPXX:VPQDL:SSLS:LKVYP:MVVKS:XKXS, NDEGLEX:VPTEE:SSLS:LKVYP:FLQHN:KXEXR, NDEGLEX:VPTGQ:SSLS:LKVYP:LEEHS:QXEXR, SSVKXQP:SRVHH:SSLS:LKVYP:RLEEH:LEXAXA, RNVQXRP:TQVQL:SSLS:LKVYP:TLEDH:LAXKXE, KIPKAXX:APTEL:NAIS:LKKYR:DMVVR:GXGXR, GIPEPXX:APTKM:NAIS:LKKYR:NMVVR:SXAXR, SIPKAXX:APTEL:NAIS:LKKYR:EMVVR:GXGXR, AVPKAXX:APTKL:NAIS:LKKYR:NMVVR:AXGXH, KVGKAXX:APTKL:NAIS:LKKYR:EGMSVVR:XGXR, KASKAXX:APTKL:NAIS:LKKYR:GMVVR:EXGXR, GSAGPXX:APTKM:NAIS:LKKYR:GMVVR:RXGXS, AAPASXX:APTRL:NAIS:LKKYR:DMVVR:AXGXR, STPPTXX:APTRL:NAIS:LKKYR:DMVVR:SXGXR, RVPSTXX:APTKT:NAIS:LKKYR:MIVVR:XGXL, ASAAPXX:APTAL:NAIS:LKKYR:MIVVR:XKXS, ASASPXX:APTDL:NAIS:LKKYR:MIVVR:XKXS, ASASPXX:APTDL:NAIS:LKKYR:MVVVR:XKXS, KIPKAXX:VPTEL:NAIS:LKKYR:DMVVE:GXGXR, GIPEPXX:VPEKM:NAIS:LKKYR:NMTVE:SXAXR, SIPKAXX:VPTEL:NAIS:LKKYR:EMVVE:GXGXR, AVPKAXX:APTKL:NAIS:LKKYR:NMVVK:AXGXH, KVGKAXX:VPTKL:NAIS:LKKYR:EGMSVAE:XGXR, KASKAXX:VPTKL:NAIS:LKKYR:GMAVS:EXGXR, GSAGPXX:TPTKM:NAIS:LKKYR:GMVVD:RXGXS, AAPASXX:VPARL:NAIS:LKKYR:DMVVE:AXGXR, STPPTXX:VPTRL:NAIS:LKKYR:DMVVE:SXGXR, RVPSTXX:APVKT:NAIS:LKKYR:MIVEE:XGXL, ASAAPXX:VPQAL:NAIS:LKKYR:MIVRS:XKXS, ASASPXX:VSQDL:NAIS:LKKYR:MIVKS:XKXS, ASASPXX:VPQDL:NAIS:LKKYR:MVVKS:XKXS, NDEGLEX:VPTEE:NAIS:LKKYR:FLQHN:KXEXR, NDEGLEX:VPTGQ:NAIS:LKKYR:LEEHS:QXEXR, SSVKXQP:SRVHH:NAIS:LKKYR:RLEEH:LEXAXA, RNVQXRP:TQVQL:NAIS:LKKYR:TLEDH:LAXKXE, KIPKAXX:APTEL:SATS:LRKHR:DMVVK:GXGXR, GIPEPXX:APTKM:SATS:LRKHR:NMVVK:SXAXR, SIPKAXX:APTEL:SATS:LRKHR:EMVVK:GXGXR, HVTKPTX:APTKL:SATS:LRKHR:NMVVK:SXGXH, YVPKPXX:APTKL:SATS:LRKHR:NMVVK:SXGXH, TVPKPXX:APTQL:SATS:LRKHR:NMVVK:AXGXH, KVGKAXX:APTKL:SATS:LRKHR:EGMSVVK:XGXR, KASKAXX:APTKL:SATS:LRKHR:GMVVK:EXGXR, GSAGPXX:APTKM:SATS:LRKHR:GMVVK:RXGXS, AAPASXX:APTRL:SATS:LRKHR:DMVVK:AXGXR, STPPTXX:APTRL:SATS:LRKHR:DMVVK:SXGXR, HVPKPXX:APTKL:SATS:LRKHR:NMVVK:SXGXH, RVPSTXX:APTKT:SATS:LRKHR:MIVVK:XGXL, ASAAPXX:APTAL:SATS:LRKHR:MIVVK:XKXS, ASASPXX:APTDL:SATS:LRKHR:MIVVK:XKXS, ASASPXX:APTDL:SATS:LRKHR:MVVVK:XKXS, KIPKAXX:VPTEL:SATS:LRKHR:DMVVE:GXGXR, GIPEPXX:VPEKM:SATS:LRKHR:NMTVE:SXAXR, SIPKAXX:VPTEL:SATS:LRKHR:EMVVE:GXGXR, HVTKPTX:APTKL:SATS:LRKHR:NMVVR:SXGXH, YVPKPXX:APTKL:SATS:LRKHR:NMVVR:SXGXH, TVPKPXX:APTQL:SATS:LRKHR:NMVVR:AXGXH, KVGKAXX:VPTKL:SATS:LRKHR:EGMSVAE:XGXR, KASKAXX:VPTKL:SATS:LRKHR:GMAVS:EXGXR, GSAGPXX:TPTKM:SATS:LRKHR:GMVVD:RXGXS, AAPASXX:VPARL:SATS:LRKHR:DMVVE:AXGXR, STPPTXX:VPTRL:SATS:LRKHR:DMVVE:SXGXR, HVPKPXX:APTKL:SATS:LRKHR:NMVVR:SXGXH, RVPSTXX:APVKT:SATS:LRKHR:MIVEE:XGXL, ASAAPXX:VPQAL:SATS:LRKHR:MIVRS:XKXS, ASASPXX:VSQDL:SATS:LRKHR:MIVKS:XKXS, ASASPXX:VPQDL:SATS:LRKHR:MVVKS:XKXS, NDEGLEX:VPTEE:SATS:LRKHR:FLQHN:KXEXR, NDEGLEX:VPTGQ:SATS:LRKHR:LEEHS:QXEXR, SSVKXQP:SRVHH:SATS:LRKHR:RLEEH:LEXAXA, RNVQXRP:TQVQL:SATS:LRKHR:TLEDH:LAXKXE, KIPKAXX:VPTEL:SPIS:LKYHY:DMVAE:GXGXR, GIPEPXX:VPTKM:SPIS:LKYHY:NMVAE:SXAXR, SIPKAXX:VPTEL:SPIS:LKYHY:EMVAE:GXGXR, HVTKPTX:VPTKL:SPIS:LKYHY:NMVAE:SXGXH, YVPKPXX:VPTKL:SPIS:LKYHY:NMVAE:SXGXH, TVPKPXX:VPTQL:SPIS:LKYHY:NMVAE:AXGXH, AVPKAXX:VPTKL:SPIS:LKYHY:NMVAE:AXGXH, KASKAXX:VPTKL:SPIS:LKYHY:GMVAE:EXGXR, GSAGPXX:VPTKM:SPIS:LKYHY:GMVAE:RXGXS, AAPASXX:VPTRL:SPIS:LKYHY:DMVAE:AXGXR, STPPTXX:VPTRL:SPIS:LKYHY:DMVAE:SXGXR, HVPKPXX:VPTKL:SPIS:LKYHY:NMVAE:SXGXH, RVPSTXX:VPTKT:SPIS:LKYHY:MIVAE:XGXL, ASAAPXX:VPTAL:SPIS:LKYHY:MIVAE:XKXS, ASASPXX:VPTDL:SPIS:LKYHY:MIVAE:XKXS, ASASPXX:VPTDL:SPIS:LKYHY:MVVAE:XKXS, KIPKAXX:VPTEL:SPIS:LKYHY:DMVVE:GXGXR, GIPEPXX:VPEKM:SPIS:LKYHY:NMTVE:SXAXR, SIPKAXX:VPTEL:SPIS:LKYHY:EMVVE:GXGXR, HVTKPTX:APTKL:SPIS:LKYHY:NMVVR:SXGXH, YVPKPXX:APTKL:SPIS:LKYHY:NMVVR:SXGXH, TVPKPXX:APTQL:SPIS:LKYHY:NMVVR:AXGXH, AVPKAXX:APTKL:SPIS:LKYHY:NMVVK:AXGXH, KASKAXX:VPTKL:SPIS:LKYHY:GMAVS:EXGXR, GSAGPXX:TPTKM:SPIS:LKYHY:GMVVD:RXGXS, AAPASXX:VPARL:SPIS:LKYHY:DMVVE:AXGXR, STPPTXX:VPTRL:SPIS:LKYHY:DMVVE:SXGXR, HVPKPXX:APTKL:SPIS:LKYHY:NMVVR:SXGXH, RVPSTXX:APVKT:SPIS:LKYHY:MIVEE:XGXL, ASAAPXX:VPQAL:SPIS:LKYHY:MIVRS:XKXS, ASASPXX:VSQDL:SPIS:LKYHY:MIVKS:XKXS, ASASPXX:VPQDL:SPIS:LKYHY:MVVKS:XKXS, NDEGLEX:VPTEE:SPIS:LKYHY:FLQHN:KXEXR, NDEGLEX:VPTGQ:SPIS:LKYHY:LEEHS:QXEXR, SSVKXQP:SRVHH:SPIS:LKYHY:RLEEH:LEXAXA, RNVQXRP:TQVQL:SPIS:LKYHY:TLEDH:LAXKXE, KIPKAXX:VPTEL:EPIS:KFKYE:DMAVS:GXGXR, GIPEPXX:VPTKM:EPIS:KFKYE:NMAVS:SXAXR, SIPKAXX:VPTEL:EPIS:KFKYE:EMAVS:GXGXR, HVTKPTX:VPTKL:EPIS:KFKYE:NMAVS:SXGXH, YVPKPXX:VPTKL:EPIS:KFKYE:NMAVS:SXGXH, TVPKPXX:VPTQL:EPIS:KFKYE:NMAVS:AXGXH, AVPKAXX:VPTKL:EPIS:KFKYE:NMAVS:AXGXH, KVGKAXX:VPTKL:EPIS:KFKYE:EGMSAVS:XGXR, GSAGPXX:VPTKM:EPIS:KFKYE:GMAVS:RXGXS, AAPASXX:VPTRL:EPIS:KFKYE:DMAVS:AXGXR, STPPTXX:VPTRL:EPIS:KFKYE:DMAVS:SXGXR, HVPKPXX:VPTKL:EPIS:KFKYE:NMAVS:SXGXH, RVPSTXX:VPTKT:EPIS:KFKYE:MIAVS:XGXL, ASAAPXX:VPTAL:EPIS:KFKYE:MIAVS:XKXS, ASASPXX:VPTDL:EPIS:KFKYE:MIAVS:XKXS, ASASPXX:VPTDL:EPIS:KFKYE:MVAVS:XKXS, KIPKAXX:VPTEL:EPIS:KFKYE:DMVVE:GXGXR, GIPEPXX:VPEKM:EPIS:KFKYE:NMTVE:SXAXR, SIPKAXX:VPTEL:EPIS:KFKYE:EMVVE:GXGXR, HVTKPTX:APTKL:EPIS:KFKYE:NMVVR:SXGXH, YVPKPXX:APTKL:EPIS:KFKYE:NMVVR:SXGXH, TVPKPXX:APTQL:EPIS:KFKYE:NMVVR:AXGXH, AVPKAXX:APTKL:EPIS:KFKYE:NMVVK:AXGXH, KVGKAXX:VPTKL:EPIS:KFKYE:EGMSVAE:XGXR, GSAGPXX:TPTKM:EPIS:KFKYE:GMVVD:RXGXS, AAPASXX:VPARL:EPIS:KFKYE:DMVVE:AXGXR, STPPTXX:VPTRL:EPIS:KFKYE:DMVVE:SXGXR, HVPKPXX:APTKL:EPIS:KFKYE:NMVVR:SXGXH, RVPSTXX:APVKT:EPIS:KFKYE:MIVEE:XGXL, ASAAPXX:VPQAL:EPIS:KFKYE:MIVRS:XKXS, ASASPXX:VSQDL:EPIS:KFKYE:MIVKS:XKXS, ASASPXX:VPQDL:EPIS:KFKYE:MVVKS:XKXS, NDEGLEX:VPTEE:EPIS:KFKYE:FLQHN:KXEXR, NDEGLEX:VPTGQ:EPIS:KFKYE:LEEHS:QXEXR, SSVKXQP:SRVHH:EPIS:KFKYE:RLEEH:LEXAXA, RNVQXRP:TQVQL:EPIS:KFKYE:TLEDH:LAXKXE, KIPKAXX:TPTEL:SPIN:YGKIP:DMVVD:GXGXR, GIPEPXX:TPTKM:SPIN:YGKIP:NMVVD:SXAXR, SIPKAXX:TPTEL:SPIN:YGKIP:EMVVD:GXGXR, HVTKPTX:TPTKL:SPIN:YGKIP:NMVVD:SXGXH, YVPKPXX:TPTKL:SPIN:YGKIP:NMVVD:SXGXH, TVPKPXX:TPTQL:SPIN:YGKIP:NMVVD:AXGXH, AVPKAXX:TPTKL:SPIN:YGKIP:NMVVD:AXGXH, KVGKAXX:TPTKL:SPIN:YGKIP:EGMSVVD:XGXR, KASKAXX:TPTKL:SPIN:YGKIP:GMVVD:EXGXR, AAPASXX:TPTRL:SPIN:YGKIP:DMVVD:AXGXR, STPPTXX:TPTRL:SPIN:YGKIP:DMVVD:SXGXR, HVPKPXX:TPTKL:SPIN:YGKIP:NMVVD:SXGXH, RVPSTXX:TPTKT:SPIN:YGKIP:MIVVD:XGXL, ASAAPXX:TPTAL:SPIN:YGKIP:MIVVD:XKXS, ASASPXX:TPTDL:SPIN:YGKIP:MIVVD:XKXS, ASASPXX:TPTDL:SPIN:YGKIP:MVVVD:XKXS, KIPKAXX:VPTEL:SPIN:YGKIP:DMVVE:GXGXR, GIPEPXX:VPEKM:SPIN:YGKIP:NMTVE:SXAXR, SIPKAXX:VPTEL:SPIN:YGKIP:EMVVE:GXGXR, HVTKPTX:APTKL:SPIN:YGKIP:NMVVR:SXGXH, YVPKPXX:APTKL:SPIN:YGKIP:NMVVR:SXGXH, TVPKPXX:APTQL:SPIN:YGKIP:NMVVR:AXGXH, AVPKAXX:APTKL:SPIN:YGKIP:NMVVK:AXGXH, KVGKAXX:VPTKL:SPIN:YGKIP:EGMSVAE:XGXR, KASKAXX:VPTKL:SPIN:YGKIP:GMAVS:EXGXR, AAPASXX:VPARL:SPIN:YGKIP:DMVVE:AXGXR, STPPTXX:VPTRL:SPIN:YGKIP:DMVVE:SXGXR, HVPKPXX:APTKL:SPIN:YGKIP:NMVVR:SXGXH, RVPSTXX:APVKT:SPIN:YGKIP:MIVEE:XGXL, ASAAPXX:VPQAL:SPIN:YGKIP:MIVRS:XKXS, ASASPXX:VSQDL:SPIN:YGKIP:MIVKS:XKXS, ASASPXX:VPQDL:SPIN:YGKIP:MVVKS:XKXS, NDEGLEX:VPTEE:SPIN:YGKIP:FLQHN:KXEXR, NDEGLEX:VPTGQ:SPIN:YGKIP:LEEHS:QXEXR, SSVKXQP:SRVHH:SPIN:YGKIP:RLEEH:LEXAXA, RNVQXRP:TQVQL:SPIN:YGKIP:TLEDH:LAXKXE, KIPKAXX:VPAEL:SPIS:YKQYE:DMVVE:GXGXR, GIPEPXX:VPAKM:SPIS:YKQYE:NMVVE:SXAXR, SIPKAXX:VPAEL:SPIS:YKQYE:EMVVE:GXGXR, HVTKPTX:VPAKL:SPIS:YKQYE:NMVVE:SXGXH, YVPKPXX:VPAKL:SPIS:YKQYE:NMVVE:SXGXH, TVPKPXX:VPAQL:SPIS:YKQYE:NMVVE:AXGXH, AVPKAXX:VPAKL:SPIS:YKQYE:NMVVE:AXGXH, KVGKAXX:VPAKL:SPIS:YKQYE:EGMSVVE:XGXR, KASKAXX:VPAKL:SPIS:YKQYE:GMVVE:EXGXR, GSAGPXX:VPAKM:SPIS:YKQYE:GMVVE:RXGXS, STPPTXX:VPARL:SPIS:YKQYE:DMVVE:SXGXR, HVPKPXX:VPAKL:SPIS:YKQYE:NMVVE:SXGXH, RVPSTXX:VPAKT:SPIS:YKQYE:MIVVE:XGXL, ASAAPXX:VPAAL:SPIS:YKQYE:MIVVE:XKXS, ASASPXX:VPADL:SPIS:YKQYE:MIVVE:XKXS, ASASPXX:VPADL:SPIS:YKQYE:MVVVE:XKXS, KIPKAXX:VPTEL:SPIS:YKQYE:DMVVE:GXGXR, GIPEPXX:VPEKM:SPIS:YKQYE:NMTVE:SXAXR, SIPKAXX:VPTEL:SPIS:YKQYE:EMVVE:GXGXR, HVTKPTX:APTKL:SPIS:YKQYE:NMVVR:SXGXH, YVPKPXX:APTKL:SPIS:YKQYE:NMVVR:SXGXH, TVPKPXX:APTQL:SPIS:YKQYE:NMVVR:AXGXH, AVPKAXX:APTKL:SPIS:YKQYE:NMVVK:AXGXH, KVGKAXX:VPTKL:SPIS:YKQYE:EGMSVAE:XGXR, KASKAXX:VPTKL:SPIS:YKQYE:GMAVS:EXGXR, GSAGPXX:TPTKM:SPIS:YKQYE:GMVVD:RXGXS, STPPTXX:VPTRL:SPIS:YKQYE:DMVVE:SXGXR, HVPKPXX:APTKL:SPIS:YKQYE:NMVVR:SXGXH, RVPSTXX:APVKT:SPIS:YKQYE:MIVEE:XGXL, ASAAPXX:VPQAL:SPIS:YKQYE:MIVRS:XKXS, ASASPXX:VSQDL:SPIS:YKQYE:MIVKS:XKXS, ASASPXX:VPQDL:SPIS:YKQYE:MVVKS:XKXS, NDEGLEX:VPTEE:SPIS:YKQYE:FLQHN:KXEXR, NDEGLEX:VPTGQ:SPIS:YKQYE:LEEHS:QXEXR, SSVKXQP:SRVHH:SPIS:YKQYE:RLEEH:LEXAXA, RNVQXRP:TQVQL:SPIS:YKQYE:TLEDH:LAXKXE, GIPEPXX:VPTKM:SPIS:YKQYE:NMVVE:SXAXR, HVTKPTX:VPTKL:SPIS:YKQYE:NMVVE:SXGXH, YVPKPXX:VPTKL:SPIS:YKQYE:NMVVE:SXGXH, TVPKPXX:VPTQL:SPIS:YKQYE:NMVVE:AXGXH, AVPKAXX:VPTKL:SPIS:YKQYE:NMVVE:AXGXH, KVGKAXX:VPTKL:SPIS:YKQYE:EGMSVVE:XGXR, KASKAXX:VPTKL:SPIS:YKQYE:GMVVE:EXGXR, GSAGPXX:VPTKM:SPIS:YKQYE:GMVVE:RXGXS, AAPASXX:VPTRL:SPIS:YKQYE:DMVVE:AXGXR, HVPKPXX:VPTKL:SPIS:YKQYE:NMVVE:SXGXH, RVPSTXX:VPTKT:SPIS:YKQYE:MIVVE:XGXL, ASAAPXX:VPTAL:SPIS:YKQYE:MIVVE:XKXS, ASASPXX:VPTDL:SPIS:YKQYE:MIVVE:XKXS, ASASPXX:VPTDL:SPIS:YKQYE:MVVVE:XKXS, AAPASXX:VPARL:SPIS:YKQYE:DMVVE:AXGXR, KIPKAXX:APVEL:KPLS:DHHKD:DMVEE:GXGXR, GIPEPXX:APVKM:KPLS:DHHKD:NMVEE:SXAXR, SIPKAXX:APVEL:KPLS:DHHKD:EMVEE:GXGXR, HVTKPTX:APVKL:KPLS:DHHKD:NMVEE:SXGXH, YVPKPXX:APVKL:KPLS:DHHKD:NMVEE:SXGXH, TVPKPXX:APVQL:KPLS:DHHKD:NMVEE:AXGXH, AVPKAXX:APVKL:KPLS:DHHKD:NMVEE:AXGXH, KVGKAXX:APVKL:KPLS:DHHKD:EGMSVEE:XGXR, KASKAXX:APVKL:KPLS:DHHKD:GMVEE:EXGXR, GSAGPXX:APVKM:KPLS:DHHKD:GMVEE:RXGXS, AAPASXX:APVRL:KPLS:DHHKD:DMVEE:AXGXR, STPPTXX:APVRL:KPLS:DHHKD:DMVEE:SXGXR, HVPKPXX:APVKL:KPLS:DHHKD:NMVEE:SXGXH, ASAAPXX:APVAL:KPLS:DHHKD:MIVEE:XKXS, ASASPXX:APVDL:KPLS:DHHKD:MIVEE:XKXS, ASASPXX:APVDL:KPLS:DHHKD:MVVEE:XKXS, KIPKAXX:VPTEL:KPLS:DHHKD:DMVVE:GXGXR, GIPEPXX:VPEKM:KPLS:DHHKD:NMTVE:SXAXR, SIPKAXX:VPTEL:KPLS:DHHKD:EMVVE:GXGXR, HVTKPTX:APTKL:KPLS:DHHKD:NMVVR:SXGXH, YVPKPXX:APTKL:KPLS:DHHKD:NMVVR:SXGXH, TVPKPXX:APTQL:KPLS:DHHKD:NMVVR:AXGXH, AVPKAXX:APTKL:KPLS:DHHKD:NMVVK:AXGXH, KVGKAXX:VPTKL:KPLS:DHHKD:EGMSVAE:XGXR, KASKAXX:VPTKL:KPLS:DHHKD:GMAVS:EXGXR, GSAGPXX:TPTKM:KPLS:DHHKD:GMVVD:RXGXS, AAPASXX:VPARL:KPLS:DHHKD:DMVVE:AXGXR, STPPTXX:VPTRL:KPLS:DHHKD:DMVVE:SXGXR, HVPKPXX:APTKL:KPLS:DHHKD:NMVVR:SXGXH, ASAAPXX:VPQAL:KPLS:DHHKD:MIVRS:XKXS, ASASPXX:VSQDL:KPLS:DHHKD:MIVKS:XKXS, ASASPXX:VPQDL:KPLS:DHHKD:MVVKS:XKXS, NDEGLEX:VPTEE:KPLS:DHHKD:FLQHN:KXEXR, NDEGLEX:VPTGQ:KPLS:DHHKD:LEEHS:QXEXR, SSVKXQP:SRVHH:KPLS:DHHKD:RLEEH:LEXAXA, RNVQXRP:TQVQL:KPLS:DHHKD:TLEDH:LAXKXE, KIPKAXX:VPQEL:EPLP:EQLSN:DMVRS:GXGXR, GIPEPXX:VPQKM:EPLP:EQLSN:NMVRS:SXAXR, SIPKAXX:VPQEL:EPLP:EQLSN:EMVRS:GXGXR, HVTKPTX:VPQKL:EPLP:EQLSN:NMVRS:SXGXH, YVPKPXX:VPQKL:EPLP:EQLSN:NMVRS:SXGXH, TVPKPXX:VPQQL:EPLP:EQLSN:NMVRS:AXGXH, AVPKAXX:VPQKL:EPLP:EQLSN:NMVRS:AXGXH, KVGKAXX:VPQKL:EPLP:EQLSN:EGMSVRS:XGXR, KASKAXX:VPQKL:EPLP:EQLSN:GMVRS:EXGXR, GSAGPXX:VPQKM:EPLP:EQLSN:GMVRS:RXGXS, AAPASXX:VPQRL:EPLP:EQLSN:DMVRS:AXGXR, STPPTXX:VPQRL:EPLP:EQLSN:DMVRS:SXGXR, HVPKPXX:VPQKL:EPLP:EQLSN:NMVRS:SXGXH, RVPSTXX:VPQKT:EPLP:EQLSN:MIVRS:XGXL, ASASPXX:VPQDL:EPLP:EQLSN:MIVRS:XKXS, ASASPXX:VPQDL:EPLP:EQLSN:MVVRS:XKXS, KIPKAXX:VPTEL:EPLP:EQLSN:DMVVE:GXGXR, GIPEPXX:VPEKM:EPLP:EQLSN:NMTVE:SXAXR, SIPKAXX:VPTEL:EPLP:EQLSN:EMVVE:GXGXR, HVTKPTX:APTKL:EPLP:EQLSN:NMVVR:SXGXH, YVPKPXX:APTKL:EPLP:EQLSN:NMVVR:SXGXH, TVPKPXX:APTQL:EPLP:EQLSN:NMVVR:AXGXH, AVPKAXX:APTKL:EPLP:EQLSN:NMVVK:AXGXH, KVGKAXX:VPTKL:EPLP:EQLSN:EGMSVAE:XGXR, KASKAXX:VPTKL:EPLP:EQLSN:GMAVS:EXGXR, GSAGPXX:TPTKM:EPLP:EQLSN:GMVVD:RXGXS, AAPASXX:VPARL:EPLP:EQLSN:DMVVE:AXGXR, STPPTXX:VPTRL:EPLP:EQLSN:DMVVE:SXGXR, HVPKPXX:APTKL:EPLP:EQLSN:NMVVR:SXGXH, RVPSTXX:APVKT:EPLP:EQLSN:MIVEE:XGXL, ASASPXX:VSQDL:EPLP:EQLSN:MIVKS:XKXS, ASASPXX:VPQDL:EPLP:EQLSN:MVVKS:XKXS, NDEGLEX:VPTEE:EPLP:EQLSN:FLQHN:KXEXR, NDEGLEX:VPTGQ:EPLP:EQLSN:LEEHS:QXEXR, SSVKXQP:SRVHH:EPLP:EQLSN:RLEEH:LEXAXA, RNVQXRP:TQVQL:EPLP:EQLSN:TLEDH:LAXKXE, KIPKAXX:VSQEL:EPLT:EQLSN:DMVKS:GXGXR, GIPEPXX:VSQKM:EPLT:EQLSN:NMVKS:SXAXR, SIPKAXX:VSQEL:EPLT:EQLSN:EMVKS:GXGXR, HVTKPTX:VSQKL:EPLT:EQLSN:NMVKS:SXGXH, YVPKPXX:VSQKL:EPLT:EQLSN:NMVKS:SXGXH, TVPKPXX:VSQQL:EPLT:EQLSN:NMVKS:AXGXH, AVPKAXX:VSQKL:EPLT:EQLSN:NMVKS:AXGXH, KVGKAXX:VSQKL:EPLT:EQLSN:EGMSVKS:XGXR, KASKAXX:VSQKL:EPLT:EQLSN:GMVKS:EXGXR, GSAGPXX:VSQKM:EPLT:EQLSN:GMVKS:RXGXS, AAPASXX:VSQRL:EPLT:EQLSN:DMVKS:AXGXR, STPPTXX:VSQRL:EPLT:EQLSN:DMVKS:SXGXR, HVPKPXX:VSQKL:EPLT:EQLSN:NMVKS:SXGXH, RVPSTXX:VSQKT:EPLT:EQLSN:MIVKS:XGXL, ASAAPXX:VSQAL:EPLT:EQLSN:MIVKS:XKXS, ASASPXX:VSQDL:EPLT:EQLSN:MVVKS:XKXS, KIPKAXX:VPTEL:EPLT:EQLSN:DMVVE:GXGXR, GIPEPXX:VPEKM:EPLT:EQLSN:NMTVE:SXAXR, SIPKAXX:VPTEL:EPLT:EQLSN:EMVVE:GXGXR, HVTKPTX:APTKL:EPLT:EQLSN:NMVVR:SXGXH, YVPKPXX:APTKL:EPLT:EQLSN:NMVVR:SXGXH, TVPKPXX:APTQL:EPLT:EQLSN:NMVVR:AXGXH, AVPKAXX:APTKL:EPLT:EQLSN:NMVVK:AXGXH, KVGKAXX:VPTKL:EPLT:EQLSN:EGMSVAE:XGXR, KASKAXX:VPTKL:EPLT:EQLSN:GMAVS:EXGXR, GSAGPXX:TPTKM:EPLT:EQLSN:GMVVD:RXGXS, AAPASXX:VPARL:EPLT:EQLSN:DMVVE:AXGXR, STPPTXX:VPTRL:EPLT:EQLSN:DMVVE:SXGXR, HVPKPXX:APTKL:EPLT:EQLSN:NMVVR:SXGXH, RVPSTXX:APVKT:EPLT:EQLSN:MIVEE:XGXL, ASAAPXX:VPQAL:EPLT:EQLSN:MIVRS:XKXS, NDEGLEX:VPTEE:EPLT:EQLSN:FLQHN:KXEXR, NDEGLEX:VPTGQ:EPLT:EQLSN:LEEHS:QXEXR, SSVKXQP:SRVHH:EPLT:EQLSN:RLEEH:LEXAXA, RNVQXRP:TQVQL:EPLT:EQLSN:TLEDH:LAXKXE, KIPKAXX:VPQEL:EPLT:EQLSN:DMVKS:GXGXR, GIPEPXX:VPQKM:EPLT:EQLSN:NMVKS:SXAXR, SIPKAXX:VPQEL:EPLT:EQLSN:EMVKS:GXGXR, HVTKPTX:VPQKL:EPLT:EQLSN:NMVKS:SXGXH, YVPKPXX:VPQKL:EPLT:EQLSN:NMVKS:SXGXH, TVPKPXX:VPQQL:EPLT:EQLSN:NMVKS:AXGXH, AVPKAXX:VPQKL:EPLT:EQLSN:NMVKS:AXGXH, KVGKAXX:VPQKL:EPLT:EQLSN:EGMSVKS:XGXR, KASKAXX:VPQKL:EPLT:EQLSN:GMVKS:EXGXR, GSAGPXX:VPQKM:EPLT:EQLSN:GMVKS:RXGXS, AAPASXX:VPQRL:EPLT:EQLSN:DMVKS:AXGXR, STPPTXX:VPQRL:EPLT:EQLSN:DMVKS:SXGXR, HVPKPXX:VPQKL:EPLT:EQLSN:NMVKS:SXGXH, RVPSTXX:VPQKT:EPLT:EQLSN:MIVKS:XGXL, ASAAPXX:VPQAL:EPLT:EQLSN:MIVKS:XKXS, ASASPXX:VPQDL:EPLT:EQLSN:MIVKS:XKXS, NDEGLEX:VPTGQ:SNIT:IGEMS:LEQHN:QXEXR, KIPKAXX:VPTEL:SNIT:IGEMS:DMVVE:GXGXR, GIPEPXX:VPEKM:SNIT:IGEMS:NMTVE:SXAXR, SIPKAXX:VPTEL:SNIT:IGEMS:EMVVE:GXGXR, HVTKPTX:APTKL:SNIT:IGEMS:NMVVR:SXGXH, YVPKPXX:APTKL:SNIT:IGEMS:NMVVR:SXGXH, TVPKPXX:APTQL:SNIT:IGEMS:NMVVR:AXGXH, AVPKAXX:APTKL:SNIT:IGEMS:NMVVK:AXGXH, KVGKAXX:VPTKL:SNIT:IGEMS:EGMSVAE:XGXR, KASKAXX:VPTKL:SNIT:IGEMS:GMAVS:EXGXR, GSAGPXX:TPTKM:SNIT:IGEMS:GMVVD:RXGXS, AAPASXX:VPARL:SNIT:IGEMS:DMVVE:AXGXR, STPPTXX:VPTRL:SNIT:IGEMS:DMVVE:SXGXR, HVPKPXX:APTKL:SNIT:IGEMS:NMVVR:SXGXH, RVPSTXX:APVKT:SNIT:IGEMS:MIVEE:XGXL, ASAAPXX:VPQAL:SNIT:IGEMS:MIVRS:XKXS, ASASPXX:VSQDL:SNIT:IGEMS:MIVKS:XKXS, ASASPXX:VPQDL:SNIT:IGEMS:MVVKS:XKXS, NDEGLEX:VPTGQ:SNIT:IGEMS:LEEHS:QXEXR, SSVKXQP:SRVHH:SNIT:IGEMS:RLEEH:LEXAXA, RNVQXRP:TQVQL:SNIT:IGEMS:TLEDH:LAXKXE, NDEGLEX:VPTEE:SNIT:LGEMS:FLEHS:KXEXR, KIPKAXX:VPTEL:SNIT:LGEMS:DMVVE:GXGXR, GIPEPXX:VPEKM:SNIT:LGEMS:NMTVE:SXAXR, SIPKAXX:VPTEL:SNIT:LGEMS:EMVVE:GXGXR, HVTKPTX:APTKL:SNIT:LGEMS:NMVVR:SXGXH, YVPKPXX:APTKL:SNIT:LGEMS:NMVVR:SXGXH, TVPKPXX:APTQL:SNIT:LGEMS:NMVVR:AXGXH, AVPKAXX:APTKL:SNIT:LGEMS:NMVVK:AXGXH, KVGKAXX:VPTKL:SNIT:LGEMS:EGMSVAE:XGXR, KASKAXX:VPTKL:SNIT:LGEMS:GMAVS:EXGXR, GSAGPXX:TPTKM:SNIT:LGEMS:GMVVD:RXGXS, AAPASXX:VPARL:SNIT:LGEMS:DMVVE:AXGXR, STPPTXX:VPTRL:SNIT:LGEMS:DMVVE:SXGXR, HVPKPXX:APTKL:SNIT:LGEMS:NMVVR:SXGXH, RVPSTXX:APVKT:SNIT:LGEMS:MIVEE:XGXL, ASAAPXX:VPQAL:SNIT:LGEMS:MIVRS:XKXS, ASASPXX:VSQDL:SNIT:LGEMS:MIVKS:XKXS, ASASPXX:VPQDL:SNIT:LGEMS:MVVKS:XKXS, NDEGLEX:VPTEE:SNIT:LGEMS:FLQHN:KXEXR, SSVKXQP:SRVHH:SNIT:LGEMS:RLEEH:LEXAXA, RNVQXRP:TQVQL:SNIT:LGEMS:TLEDH:LAXKXE, RNVQXRP:SRVQL:RSVK:KEVQV:TLEEH:LAXKXE, KIPKAXX:VPTEL:RSVK:KEVQV:DMVVE:GXGXR, GIPEPXX:VPEKM:RSVK:KEVQV:NMTVE:SXAXR, SIPKAXX:VPTEL:RSVK:KEVQV:EMVVE:GXGXR, HVTKPTX:APTKL:RSVK:KEVQV:NMVVR:SXGXH, YVPKPXX:APTKL:RSVK:KEVQV:NMVVR:SXGXH, TVPKPXX:APTQL:RSVK:KEVQV:NMVVR:AXGXH, AVPKAXX:APTKL:RSVK:KEVQV:NMVVK:AXGXH, KVGKAXX:VPTKL:RSVK:KEVQV:EGMSVAE:XGXR, KASKAXX:VPTKL:RSVK:KEVQV:GMAVS:EXGXR, GSAGPXX:TPTKM:RSVK:KEVQV:GMVVD:RXGXS, AAPASXX:VPARL:RSVK:KEVQV:DMVVE:AXGXR, STPPTXX:VPTRL:RSVK:KEVQV:DMVVE:SXGXR, HVPKPXX:APTKL:RSVK:KEVQV:NMVVR:SXGXH, RVPSTXX:APVKT:RSVK:KEVQV:MIVEE:XGXL, ASAAPXX:VPQAL:RSVK:KEVQV:MIVRS:XKXS, ASASPXX:VSQDL:RSVK:KEVQV:MIVKS:XKXS, ASASPXX:VPQDL:RSVK:KEVQV:MVVKS:XKXS, NDEGLEX:VPTEE:RSVK:KEVQV:FLQHN:KXEXR, NDEGLEX:VPTGQ:RSVK:KEVQV:LEEHS:QXEXR, RNVQXRP:TQVQL:RSVK:KEVQV:TLEDH:LAXKXE, SSVKXQP:TQVHH:RPVQ:KKATV:RLEDH:LEXAXA, KIPKAXX:VPTEL:RPVQ:KKATV:DMVVE:GXGXR, GIPEPXX:VPEKM:RPVQ:KKATV:NMTVE:SXAXR, SIPKAXX:VPTEL:RPVQ:KKATV:EMVVE:GXGXR, HVTKPTX:APTKL:RPVQ:KKATV:NMVVR:SXGXH, YVPKPXX:APTKL:RPVQ:KKATV:NMVVR:SXGXH, TVPKPXX:APTQL:RPVQ:KKATV:NMVVR:AXGXH, AVPKAXX:APTKL:RPVQ:KKATV:NMVVK:AXGXH, KVGKAXX:VPTKL:RPVQ:KKATV:EGMSVAE:XGXR, KASKAXX:VPTKL:RPVQ:KKATV:GMAVS:EXGXR, GSAGPXX:TPTKM:RPVQ:KKATV:GMVVD:RXGXS, AAPASXX:VPARL:RPVQ:KKATV:DMVVE:AXGXR, STPPTXX:VPTRL:RPVQ:KKATV:DMVVE:SXGXR, HVPKPXX:APTKL:RPVQ:KKATV:NMVVR:SXGXH, RVPSTXX:APVKT:RPVQ:KKATV:MIVEE:XGXL, ASAAPXX:VPQAL:RPVQ:KKATV:MIVRS:XKXS, ASASPXX:VSQDL:RPVQ:KKATV:MIVKS:XKXS, ASASPXX:VPQDL:RPVQ:KKATV:MVVKS:XKXS, NDEGLEX:VPTEE:RPVQ:KKATV:FLQHN:KXEXR, NDEGLEX:VPTGQ:RPVQ:KKATV:LEEHS:QXEXR and SSVKXQP:SRVHH:RPVQ:KKATV:RLEEH:LEXAXA.

[0398] In particular, in certain embodiments, the hexaplet PEP7:PEP5:PEP12:PEP2:PEP6:PEP8 is selected from the group consisting of GIPEPXX:VPTKM:SAIS-AA¹⁷-LYL:LKNYQ:NMVVE:SXAXR, SIPKAXX:VPTEL:SAIS-AA¹⁷-LYL:LKNYQ:EMVVE:GXGXR, HVTKPTX:VPTKL:SAIS-AA¹⁷-LYL:LKNYQ:NMVVE:SXGXH, YVPKPXX:VPTKL:SAIS-AA¹⁷-LYL:LKNYQ:NMVVE:SXGXH, TVPKPXX:VPTQL:SAIS-AA¹⁷-LYL:LKNYQ:NMVVE:AXGXH, AVPKAXX:VPTKL:SAIS-AA¹⁷-LYL:LKNYQ:NMVVE:AXGXH, KVGKAXX:VPTKL:SAIS-AA¹⁷-LYL:LKNYQ:EGMSVVE:XGXR, KASKAXX:VPTKL:SAIS-AA¹⁷-LYL:LKNYQ:GMVVE:EXGXR, GSAGPXX:VPTKM:SAIS-AA¹⁷-LYL:LKNYQ:GMVVE:RXGXS, AAPASXX:VPTRL:SAIS-AA¹⁷-LYL:LKNYQ:DMVVE:AXGXR, STPPTXX:VPTRL:SAIS-AA¹⁷-LYL:LKNYQ:DMVVE:SXGXR, HVPKPXX:VPTKL:SAIS-AA¹⁷-LYL:LKNYQ:NMVVE:SXGXH, RVPSTXX:VPTKT:SAIS-AA¹⁷-LYL:LKNYQ:MIVVE:XGXL, ASAAPXX:VPTAL:SAIS-AA¹⁷-LYL:LKNYQ:MIVVE:XKXS, ASASPXX:VPTDL:SAIS-AA¹⁷-LYL:LKNYQ:MIVVE:XKXS, ASASPXX:VPTDL:SAIS-AA¹⁷-LYL:LKNYQ:MVVVE:XKXS, NDEGLEX:VPTEE:SAIS-AA¹⁷-LYL:LKNYQ:FLVVE:KXEXR, NDEGLEX:VPTGQ:SAIS-AA¹⁷-LYL:LKNYQ:LEVVE:QXEXR, SSVKXQP:VPTHH:SAIS-AA¹⁷-LYL:LKNYQ:RLVVE:LEXAXA, RNVQXRP:VPTQL:SAIS-AA¹⁷-LYL:LKNYQ:TLVVE:LAXKXE, GIPEPXX:VPEKM:SAIS-AA¹⁷-LYL:LKNYQ:NMTVE:SXAXR, HVTKPTX:APTKL:SAIS-AA¹⁷-LYL:LKNYQ:NMVVR:SXGXH, YVPKPXX:APTKL:SAIS-AA¹⁷-LYL:LKNYQ:NMVVR:SXGXH, TVPKPXX:APTQL:SAIS-AA¹⁷-LYL:LKNYQ:NMVVR:AXGXH, AVPKAXX:APTKL:SAIS-AA¹⁷-LYL:LKNYQ:NMVVK:AXGXH, KVGKAXX:VPTKL:SAIS-AA¹⁷-LYL:LKNYQ:EGMSVAE:XGXR, KASKAXX:VPTKL:SAIS-AA¹⁷-LYL:LKNYQ:GMAVS:EXGXR, GSAGPXX:TPTKM:SAIS-AA¹⁷-LYL:LKNYQ:GMVVD:RXGXS, AAPASXX:VPARL:SAIS-AA¹⁷-LYL:LKNYQ:DMVVE:AXGXR, HVPKPXX:APTKL:SAIS-AA¹⁷-LYL:LKNYQ:NMVVR:SXGXH, RVPSTXX:APVKT:SAIS-AA¹⁷-LYL:LKNYQ:MIVEE:XGXL, ASAAPXX:VPQAL:SAIS-AA¹⁷-LYL:LKNYQ:MIVRS:XKXS, ASASPXX:VSQDL:SAIS-AA¹⁷-LYL:LKNYQ:MIVKS:XKXS, ASASPXX:VPQDL:SAIS-AA¹⁷-LYL:LKNYQ:MVVKS:XKXS, NDEGLEX:VPTEE:SAIS-AA¹⁷-LYL:LKNYQ:FLQHN:KXEXR, NDEGLEX:VPTGQ:SAIS-AA¹⁷-LYL:LKNYQ:LEEHS:QXEXR, SSVKXQP:SRVHH:SAIS-AA¹⁷-LYL:LKNYQ:RLEEH:LEXAXA, RNVQXRP:TQVQL:SAIS-AA¹⁷-LYL:LKNYQ:TLEDH:LAXKXE, KIPKAXX:VPEEL:SSLS-AA¹⁷-LFF:LKVYP:DMTVE:GXGXR, SIPKAXX:VPEEL:SSLS-AA¹⁷-LFF:LKVYP:EMTVE:GXGXR, HVTKPTX:VPEKL:SSLS-AA¹⁷-LFF:LKVYP:NMTVE:SXGXH, YVPKPXX:VPEKL:SSLS-AA¹⁷-LFF:LKVYP:NMTVE:SXGXH, TVPKPXX:VPEQL:SSLS-AA¹⁷-LFF:LKVYP:NMTVE:AXGXH, AVPKAXX:VPEKL:SSLS-AA¹⁷-LFF:LKVYP:NMTVE:AXGXH, KVGKAXX:VPEKL:SSLS-AA¹⁷-LFF:LKVYP:EGMSTVE:XGXR, KASKAXX:VPEKL:SSLS-AA¹⁷-LFF:LKVYP:GMTVE:EXGXR, GSAGPXX:VPEKM:SSLS-AA¹⁷-LFF:LKVYP:GMTVE:RXGXS, AAPASXX:VPERL:SSLS-AA¹⁷-LFF:LKVYP:DMTVE:AXGXR, STPPTXX:VPERL:SSLS-AA¹⁷-LFF:LKVYP:DMTVE:SXGXR, HVPKPXX:VPEKL:SSLS-AA¹⁷-LFF:LKVYP:NMTVE:SXGXH, RVPSTXX:VPEKT:SSLS-AA¹⁷-LFF:LKVYP:MITVE:XGXL, ASAAPXX:VPEAL:SSLS-AA¹⁷-LFF:LKVYP:MITVE:XKXS, ASASPXX:VPEDL:SSLS-AA¹⁷-LFF:LKVYP:MITVE:XKXS, ASASPXX:VPEDL:SSLS-AA¹⁷-LFF:LKVYP:MVTVE:XKXS, NDEGLEX:VPEEE:SSLS-AA¹⁷-LFF:LKVYP:FLTVE:KXEXR, NDEGLEX:VPEGQ:SSLS-AA¹⁷-LFF:LKVYP:LETVE:QXEXR, SSVKXQP:VPEHH:SSLS-AA¹⁷-LFF:LKVYP:RLTVE:LEXAXA, RNVQXRP:VPEQL:SSLS-AA¹⁷-LFF:LKVYP:TLTVE:LAXKXE, KIPKAXX:VPTEL:SSLS-AA¹⁷-LFF:LKVYP:DMVVE:GXGXR, SIPKAXX:VPTEL:SSLS-AA¹⁷-LFF:LKVYP:EMVVE:GXGXR, HVTKPTX:APTKL:SSLS-AA¹⁷-LFF:LKVYP:NMVVR:SXGXH, YVPKPXX:APTKL:SSLS-AA¹⁷-LFF:LKVYP:NMVVR:SXGXH, TVPKPXX:APTQL:SSLS-AA¹⁷-LFF:LKVYP:NMVVR:AXGXH, AVPKAXX:APTKL:SSLS-AA¹⁷-LFF:LKVYP:NMVVK:AXGXH, KVGKAXX:VPTKL:SSLS-AA¹⁷-LFF:LKVYP:EGMSVAE:XGXR, KASKAXX:VPTKL:SSLS-AA¹⁷-LFF:LKVYP:GMAVS:EXGXR, GSAGPXX:TPTKM:SSLS-AA¹⁷-LFF:LKVYP:GMVVD:RXGXS, AAPASXX:VPARL:SSLS-AA¹⁷-LFF:LKVYP:DMVVE:AXGXR, STPPTXX:VPTRL:SSLS-AA¹⁷-LFF:LKVYP:DMVVE:SXGXR, HVPKPXX:APTKL:SSLS-AA¹⁷-LFF:LKVYP:NMVVR:SXGXH, RVPSTXX:APVKT:SSLS-AA¹⁷-LFF:LKVYP:MIVEE:XGXL, ASAAPXX:VPQAL:SSLS-AA¹⁷-LFF:LKVYP:MIVRS:XKXS, ASASPXX:VSQDL:SSLS-AA¹⁷-LFF:LKVYP:MIVKS:XKXS, ASASPXX:VPQDL:SSLS-AA¹⁷-LFF:LKVYP:MVVKS:XKXS, NDEGLEX:VPTEE:SSLS-AA¹⁷-LFF:LKVYP:FLQHN:KXEXR, NDEGLEX:VPTGQ:SSLS-AA¹⁷-LFF:LKVYP:LEEHS:QXEXR, SSVKXQP:SRVHH:SSLS-AA¹⁷-LFF:LKVYP:RLEEH:LEXAXA, RNVQXRP:TQVQL:SSLS-AA¹⁷-LFF:LKVYP:TLEDH:LAXKXE, KIPKAXX:VPTEL:SAIS-AA¹⁷-LYL:LKNYQ:DMVVE:GXGXR, KIPKAXX:APTEL:NAIS-AA¹⁷-LYF:LKKYR:DMVVR:GXGXR, GIPEPXX:APTKM:NAIS-AA¹⁷-LYF:LKKYR:NMVVR:SXAXR, SIPKAXX:APTEL:NAIS-AA¹⁷-LYF:LKKYR:EMVVR:GXGXR, YVPKPXX:APTKL:NAIS-AA¹⁷-LYF:LKKYR:NMVVR:SXGXH, TVPKPXX:APTQL:NAIS-AA¹⁷-LYF:LKKYR:NMVVR:AXGXH, AVPKAXX:APTKL:NAIS-AA¹⁷-LYF:LKKYR:NMVVR:AXGXH, KVGKAXX:APTKL:NAIS-AA¹⁷-LYF:LKKYR:EGMSVVR:XGXR, KASKAXX:APTKL:NAIS-AA¹⁷-LYF:LKKYR:GMVVR:EXGXR, GSAGPXX:APTKM:NAIS-AA¹⁷-LYF:LKKYR:GMVVR:RXGXS, AAPASXX:APTRL:NAIS-AA¹⁷-LYF:LKKYR:DMVVR:AXGXR, STPPTXX:APTRL:NAIS-AA¹⁷-LYF:LKKYR:DMVVR:SXGXR, HVPKPXX:APTKL:NAIS-AA¹⁷-LYF:LKKYR:NMVVR:SXGXH, RVPSTXX:APTKT:NAIS-AA¹⁷-LYF:LKKYR:M IVVR:XGXL, ASAAPXX:APTAL:NAIS-AA¹⁷-LYF:LKKYR:MIVVR:XKXS, ASASPXX:APTDL:NAIS-AA¹⁷-LYF:LKKYR:MIVVR:XKXS, ASASPXX:APTDL:NAIS-AA¹⁷-LYF:LKKYR:MVVVR:XKXS, NDEGLEX:APTEE:NAIS-AA¹⁷-LYF:LKKYR:FLVVR:KXEXR, NDEGLEX:APTGQ:NAIS-AA¹⁷-LYF:LKKYR:LEVVR:QXEXR, SSVKXQP:APTHH:NAIS-AA¹⁷-LYF:LKKYR:RLVVR:LEXAXA, RNVQXRP:APTQL:NAIS-AA¹⁷-LYF:LKKYR:TLVVR:LAXKXE, KIPKAXX:VPTEL:NAIS-AA¹⁷-LYF:LKKYR:DMVVE:GXGXR, GIPEPXX:VPEKM:NAIS-AA¹⁷-LYF:LKKYR:NMTVE:SXAXR, SIPKAXX:VPTEL:NAIS-AA¹⁷-LYF:LKKYR:EMVVE:GXGXR, AVPKAXX:APTKL:NAIS-AA¹⁷-LYF:LKKYR:NMVVK:AXGXH, KVGKAXX:VPTKL:NAIS-AA¹⁷-LYF:LKKYR:EGMSVAE:XGXR, KASKAXX:VPTKL:NAIS-AA¹⁷-LYF:LKKYR:GMAVS:EXGXR, GSAGPXX:TPTKM:NAIS-AA¹⁷-LYF:LKKYR:GMVVD:ERXGXS, AAPASXX:VPARL:NAIS-AA¹⁷-LYF:LKKYR:DMVVE:AXGXR, STPPTXX:VPTRL:NAIS-AA¹⁷-LYF:LKKYR:DMVVE:SXGXR, RVPSTXX:APVKT:NAIS-AA¹⁷-LYF:LKKYR:MIVEE:XGXL, ASAAPXX:VPQAL:NAIS-AA¹⁷-LYF:LKKYR:MIVRS:XKXS, ASASPXX:VSQDL:NAIS-AA¹⁷-LYF:LKKYR:MIVKS:XKXS, ASASPXX:VPQDL:NAIS-AA¹⁷-LYF:LKKYR:MVVKS:XKXS, NDEGLEX:VPTEE:NAIS-AA¹⁷-LYF:LKKYR:FLQHN:KXEXR, NDEGLEX:VPTGQ:NAIS-AA¹⁷-LYF:LKKYR:LEEHS:QXEXR, SSVKXQP:SRVHH:NAIS-AA¹⁷-LYF:LKKYR:RLEEH:LEXAXA, RNVQXRP:TQVQL:NAIS-AA¹⁷-LYF:LKKYR:TLEDH:LAXKXE, HVTKPTX:APTKL:NAIS-AA¹⁷-LYF:LKKYR:NMVVR:SXGXH, KIPKAXX:APTEL:SATS-AA¹⁷-LYY:LRKHR:DMVVK:GXGXR, GIPEPXX:APTKM:SATS-AA¹⁷-LYY:LRKHR:NMVVK:SXAXR, SIPKAXX:APTEL:SATS-AA¹⁷-LYY:LRKHR:EMVVK:GXGXR, HVTKPTX:APTKL:SATS-AA¹⁷-LYY:LRKHR:NMVVK:SXGXH, YVPKPXX:APTKL:SATS-AA¹⁷-LYY:LRKHR:NMVVK:SXGXH, TVPKPXX:APTQL:SATS-AA¹⁷-LYY:LRKHR:NMVVK:AXGXH, KVGKAXX:APTKL:SATS-AA¹⁷-LYY:LRKHR:EGMSVVK:XGXR, KASKAXX:APTKL:SATS-AA¹⁷-LYY:LRKHR:GMVVK:EXGXR, GSAGPXX:APTKM:SATS-AA¹⁷-LYY:LRKHR:G MVVK:RXGXS, AAPASXX:APTRL:SATS-AA¹⁷-LYY:LRKHR:DMVVK:AXGXR, STPPTXX:APTRL:SATS-AA¹⁷-LYY:LRKHR:DMVVK:SXGXR, HVPKPXX:APTKL:SATS-AA¹⁷-LYY:LRKHR:NMVVK:SXGXH, RVPSTXX:APTKT:SATS-AA¹⁷-LYY:LRKHR:MIVVK:XGXL, ASAAPXX:APTAL:SATS-AA¹⁷-LYY:LRKHR:MIVVK:XKXS, ASASPXX:APTDL:SATS-AA¹⁷-LYY:LRKHR:MIVVK:XKXS, ASASPXX:APTDL:SATS-AA¹⁷-LYY:LRKHR:MVVVK:XKXS, NDEGLEX:APTEE:SATS-AA¹⁷-LYY:LRKHR:FLVVK:KXEXR, NDEGLEX:APTGQ:SATS-AA¹⁷-LYY:LRKHR:LEVVK:QXEXR, SSVKXQP:APTHH:SATS-AA¹⁷-LYY:LRKHR:RLVVK:LEXAXA, RNVQXRP:APTQL:SATS-AA¹⁷-LYY:LRKHR:TLVVK:LAXKXE, KIPKAXX:VPTEL:SATS-AA¹⁷-LYY:LRKHR:DMVVE:GXGXR, GIPEPXX:VPEKM:SATS-AA¹⁷-LYY:LRKHR:NMTVE:SXAXR, SIPKAXX:VPTEL:SATS-AA¹⁷-LYY:LRKHR:EMVVE:GXGXR, HVTKPTX:APTKL:SATS-AA¹⁷-LYY:LRKHR:NMVVR:SXGXH, YVPKPXX:APTKL:SATS-AA¹⁷-LYY:LRKHR:NMVVR:SXGXH, TVPKPXX:APTQL:SATS-AA¹⁷-LYY:LRKHR:NMVVR:AXGXH, KVGKAXX:VPTKL:SATS-AA¹⁷-LYY:LRKHR:EGMSVAE:XGXR, KASKAXX:VPTKL:SATS-AA¹⁷-LYY:LRKHR:GMAVS:EXGXR, GSAGPXX:TPTKM:SATS-AA¹⁷-LYY:LRKHR:GMVVD:RXGXS, AAPASXX:VPARL:SATS-AA¹⁷-LYY:LRKHR:DMVVE:AXGXR, STPPTXX:VPTRL:SATS-AA¹⁷-LYY:LRKHR:DMVVE:SXGXR, HVPKPXX:APTKL:SATS-AA¹⁷-LYY:LRKHR:NMVVR:SXGXH, RVPSTXX:APVKT:SATS-AA¹⁷-LYY:LRKHR:MIVEE:XGXL, ASAAPXX:VPQAL:SATS-AA¹⁷-LYY:LRKHR:MIVRS:XKXS, ASASPXX:VSQDL:SATS-AA¹⁷-LYY:LRKHR:MIVKS:XKXS, ASASPXX:VPQDL:SATS-AA¹⁷-LYY:LRKHR:MVVKS:XKXS, NDEGLEX:VPTEE:SATS-AA¹⁷-LYY:LRKHR:FLQHN:KXEXR, NDEGLEX:VPTGQ:SATS-AA¹⁷-LYY:LRKHR:LEEHS:QXEXR, SSVKXQP:SRVHH:SATS-AA¹⁷-LYY:LRKHR:RLEEH:LEXAXA, RNVQXRP:TQVQL:SATS-AA¹⁷-LYY:LRKHR:TLEDH:LAXKXE, KIPKAXX:VPTEL:SPIS-AA¹⁷-LYK:LKYHY:DMVAE:GXGXR, GIPEPXX:VPTKM:SPIS-AA¹⁷-LYK:LKYHY:NMVAE:SXAXR, SIPKAXX:VPTEL:SPIS-AA¹⁷-LYK:LKYHY:EMVAE:GXGXR, HVTKPTX:VPTKL:SPIS-AA¹⁷-LYK:LKYHY:NMVAE:SXGXH, YVPKPXX:VPTKL:SPIS-AA¹⁷-LYK:LKYHY:N MVAE:SXGXH, TVPKPXX:VPTQL:SPIS-AA¹⁷-LYK:LKYHY:N MVAE:AXGXH, AVPKAXX:VPTKL:SPIS-AA¹⁷-LYK:LKYHY:NMVAE:AXGXH, KASKAXX:VPTKL:SPIS-AA¹⁷-LYK:LKYHY:GMVAE:EXGXR, GSAGPXX:VPTKM:SPIS-AA¹⁷-LYK:LKYHY:GMVAE:RXGXS, AAPASXX:VPTRL:SPIS-AA¹⁷-LYK:LKYHY:DMVAE:AXGXR, STPPTXX:VPTRL:SPIS-AA¹⁷-LYK:LKYHY:DMVAE:SXGXR, HVPKPXX:VPTKL:SPIS-AA¹⁷-LYK:LKYHY:NMVAE:SXGXH, RVPSTXX:VPTKT:SPIS-AA¹⁷-LYK:LKYHY:MIVAE:XGXL, ASAAPXX:VPTAL:SPIS-AA¹⁷-LYK:LKYHY:MIVAE:XKXS, ASASPXX:VPTDL:SPIS-AA¹⁷-LYK:LKYHY:MIVAE:XKXS, ASASPXX:VPTDL:SPIS-AA¹⁷-LYK:LKYHY:MVVAE:XKXS, NDEGLEX:VPTEE:SPIS-AA¹⁷-LYK:LKYHY:FLVAE:KXEXR, NDEGLEX:VPTGQ:SPIS-AA¹⁷-LYK:LKYHY:LEVAE:QXEXR, SSVKXQP:VPTHH:SPIS-AA¹⁷-LYK:LKYHY:RLVAE:LEXAXA, RNVQXRP:VPTQL:SPIS-AA¹⁷-LYK:LKYHY:TLVAE:LAXKXE, KIPKAXX:VPTEL:SPIS-AA¹⁷-LYK:LKYHY:DMVVE:GXGXR, GIPEPXX:VPEKM:SPIS-AA¹⁷-LYK:LKYHY:NMTVE:SXAXR, SIPKAXX:VPTEL:SPIS-AA¹⁷-LYK:LKYHY:EMVVE:GXGXR, HVTKPTX:APTKL:SPIS-AA¹⁷-LYK:LKYHY:NMVVR:SXGXH, YVPKPXX:APTKL:SPIS-AA¹⁷-LYK:LKYHY:NMVVR:SXGXH, TVPKPXX:APTQL:SPIS-AA¹⁷-LYK:LKYHY:NMVVR:AXGXH, AVPKAXX:APTKL:SPIS-AA¹⁷-LYK:LKYHY:NMVVK:AXGXH, KASKAXX:VPTKL:SPIS-AA¹⁷-LYK:LKYHY:GMAVS:EXGXR, GSAGPXX:TPTKM:SPIS-AA¹⁷-LYK:LKYHY:GMVVD:RXGXS, AAPASXX:VPARL:SPIS-AA¹⁷-LYK:LKYHY:DMVVE:AXGXR, STPPTXX:VPTRL:SPIS-AA¹⁷-LYK:LKYHY:DMVVE:SXGXR, HVPKPXX:APTKL:SPIS-AA¹⁷-LYK:LKYHY:NMVVR:SXGXH, RVPSTXX:APVKT:SPIS-AA¹⁷-LYK:LKYHY:MIVEE:XGXL, ASAAPXX:VPQAL:SPIS-AA¹⁷-LYK:LKYHY:MIVRS:XKXS, ASASPXX:VSQDL:SPIS-AA¹⁷-LYK:LKYHY:MIVKS:XKXS, ASASPXX:VPQDL:SPIS-AA¹⁷-LYK:LKYHY:MVVKS:XKXS, NDEGLEX:VPTEE:SPIS-AA¹⁷-LYK:LKYHY:FLQHN:KXEXR, NDEGLEX:VPTGQ:SPIS-AA¹⁷-LYK:LKYHY:LEEHS:QXEXR, SSVKXQP:SRVHH:SPIS-AA¹⁷-LYK:LKYHY:RLEEH:LEXAXA, RNVQXRP:TQVQL:SPIS-AA¹⁷-LYK:LKYHY:TLEDH:LAXKXE, KIPKAXX:VPTEL:EPIS-AA¹⁷-LYL:KFKYE:DMAVS:GXGXR, GIPEPXX:VPTKM:EPIS-AA¹⁷-LYL:KFKYE:NMAVS:SXAXR, SIPKAXX:VPTEL:EPIS-AA¹⁷-LYL:KFKYE:EMAVS:GXGXR, HVTKPTX:VPTKL:EPIS-AA¹⁷-LYL:KFKYE:NMAVS:SXGXH, YVPKPXX:VPTKL:EPIS-AA¹⁷-LYL:KFKYE:NMAVS:SXGXH, TVPKPXX:VPTQL:EPIS-AA¹⁷-LYL:KFKYE:NMAVS:AXGXH, AVPKAXX:VPTKL:EPIS-AA¹⁷-LYL:KFKYE:NMAVS:AXGXH, KVGKAXX:VPTKL:EPIS-AA¹⁷-LYL:KFKYE:EGMSAVS:XGXR, GSAGPXX:VPTKM:EPIS-AA¹⁷-LYL:KFKYE:GMAVS:RXGXS, AAPASXX:VPTRL:EPIS-AA¹⁷-LYL:KFKYE:DMAVS:AXGXR, STPPTXX:VPTRL:EPIS-AA¹⁷-LYL:KFKYE:DMAVS:SXGXR, HVPKPXX:VPTKL:EPIS-AA¹⁷-LYL:KFKYE:NMAVS:SXGXH, RVPSTXX:VPTKT:EPIS-AA¹⁷-LYL:KFKYE:MIAVS:XGXL, ASAAPXX:VPTAL:EPIS-AA¹⁷-LYL:KFKYE:MIAVS:XKXS, ASASPXX:VPTDL:EPIS-AA¹⁷-LYL:KFKYE:MIAVS:XKXS, ASASPXX:VPTDL:EPIS-AA¹⁷-LYL:KFKYE:MVAVS:XKXS, NDEGLEX:VPTEE:EPIS-AA¹⁷-LYL:KFKYE:FLAVS:KXEXR, NDEGLEX:VPTGQ:EPIS-AA¹⁷-LYL:KFKYE:LEAVS:QXEXR, SSVKXQP:VPTHH:EPIS-AA¹⁷-LYL:KFKYE:RLAVS:LEXAXA, RNVQXRP:VPTQL:EPIS-AA¹⁷-LYL:KFKYE:TLAVS:LAXKXE, KIPKAXX:VPTEL:EPIS-AA¹⁷-LYL:KFKYE:DMVVE:GXGXR, GIPEPXX:VPEKM:EPIS-AA¹⁷-LYL:KFKYE:NMTVE:SXAXR, SIPKAXX:VPTEL:EPIS-AA¹⁷-LYL:KFKYE:EMVVE:GXGXR, HVTKPTX:APTKL:EPIS-AA¹⁷-LYL:KFKYE:NMVVR:SXGXH, YVPKPXX:APTKL:EPIS-AA¹⁷-LYL:KFKYE:NMVVR:SXGXH, TVPKPXX:APTQL:EPIS-AA¹⁷-LYL:KFKYE:NMVVR:AXGXH, AVPKAXX:APTKL:EPIS-AA¹⁷-LYL:KFKYE:NMVVK:AXGXH, KVGKAXX:VPTKL:EPIS-AA¹⁷-LYL:KFKYE:EGMSVAE:XGXR, GSAGPXX:TPTKM:EPIS-AA¹⁷-LYL:KFKYE:GMVVD:RXGXS, AAPASXX:VPARL:EPIS-AA¹⁷-LYL:KFKYE:DMVVE:AXGXR, STPPTXX:VPTRL:EPIS-AA¹⁷-LYL:KFKYE:DMVVE:SXGXR, HVPKPXX:APTKL:EPIS-AA¹⁷-LYL:KFKYE:NMVVR:SXGXH, RVPSTXX:APVKT:EPIS-AA¹⁷-LYL:KFKYE:MIVEE:XGXL, ASAAPXX:VPQAL:EPIS-AA¹⁷-LYL:KFKYE:MIVRS:XKXS, ASASPXX:VSQDL:EPIS-AA¹⁷-LYL:KFKYE:MIVKS:XKXS, ASASPXX:VPQDL:EPIS-AA¹⁷-LYL:KFKYE:MVVKS:XKXS, NDEGLEX:VPTEE:EPIS-AA¹⁷-LYL:KFKYE:FLQHN:KXEXR, NDEGLEX:VPTGQ:EPIS-AA¹⁷-LYL:KFKYE:LEEHS:QXEXR, SSVKXQP:SRVHH:EPIS-AA¹⁷-LYL:KFKYE:RLEEH:LEXAXA, RNVQXRP:TQVQL:EPIS-AA¹⁷-LYL:KFKYE:TLEDH:LAXKXE, KIPKAXX:TPTEL:SPIN-AA¹⁷-LYF:YGKIP:DMVVD:GXGXR, GIPEPXX:TPTKM:SPIN-AA¹⁷-LYF:YGKIP:NMVVD:SXAXR, SIPKAXX:TPTEL:SPIN-AA¹⁷-LYF:YGKIP:EMVVD:GXGXR, HVTKPTX:TPTKL:SPIN-AA¹⁷-LYF:YGKIP:NMVVD:SXGXH, YVPKPXX:TPTKL:SPIN-AA¹⁷-LYF:YGKIP:NMVVD:SXGXH, TVPKPXX:TPTQL:SPIN-AA¹⁷-LYF:YGKIP:NMVVD:AXGXH, AVPKAXX:TPTKL:SPIN-AA¹⁷-LYF:YGKIP:NMVVD:AXGXH, KVGKAXX:TPTKL:SPIN-AA¹⁷-LYF:YGKIP:EGMSVVD:XGXR, KASKAXX:TPTKL:SPIN-AA¹⁷-LYF:YGKIP:GMVVD:EXGXR, AAPASXX:TPTRL:SPIN-AA¹⁷-LYF:YGKIP:DMVVD:AXGXR, STPPTXX:TPTRL:SPIN-AA¹⁷-LYF:YGKIP:DMVVD:SXGXR, HVPKPXX:TPTKL:SPIN-AA¹⁷-LYF:YGKIP:NMVVD:SXGXH, RVPSTXX:TPTKT:SPIN-AA¹⁷-LYF:YGKIP:MIVVD:XGXL, ASAAPXX:TPTAL:SPIN-AA¹⁷-LYF:YGKIP:MIVVD:XKXS, ASASPXX:TPTDL:SPIN-AA¹⁷-LYF:YGKIP:MIVVD:XKXS, ASASPXX:TPTDL:SPIN-AA¹⁷-LYF:YGKIP:MVVVD:XKXS, NDEGLEX:TPTEE:SPIN-AA¹⁷-LYF:YGKIP:FLVVD:KXEXR, NDEGLEX:TPTGQ:SPIN-AA¹⁷-LYF:YGKIP:LEVVD:QXEXR, SSVKXQP:TPTHH:SPIN-AA¹⁷-LYF:YGKIP:RLVVD:LEXAXA, RNVQXRP:TPTQL:SPIN-AA¹⁷-LYF:YGKIP:TLVVD:LAXKXE, KIPKAXX:VPTEL:SPIN-AA¹⁷-LYF:YGKIP:DMVVE:GXGXR, GIPEPXX:VPEKM:SPIN-AA¹⁷-LYF:YGKIP:NMTVE:SXAXR, SIPKAXX:VPTEL:SPIN-AA¹⁷-LYF:YGKIP:EMVVE:GXGXR, HVTKPTX:APTKL:SPIN-AA¹⁷-LYF:YGKIP:NMVVR:SXGXH, YVPKPXX:APTKL:SPIN-AA¹⁷-LYF:YGKIP:NMVVR:SXGXH, TVPKPXX:APTQL:SPIN-AA¹⁷-LYF:YGKIP:NMVVR:AXGXH, AVPKAXX:APTKL:SPIN-AA¹⁷-LYF:YGKIP:NMVVK:AXGXH, KVGKAXX:VPTKL:SPIN-AA¹⁷-LYF:YGKIP:EGMSVAE:XGXR, KASKAXX:VPTKL:SPIN-AA¹⁷-LYF:YGKIP:GMAVS:EXGXR, AAPASXX:VPARL:SPIN-AA¹⁷-LYF:YGKIP:DMVVE:AXGXR, STPPTXX:VPTRL:SPIN-AA¹⁷-LYF:YGKIP:DMVVE:SXGXR, HVPKPXX:APTKL:SPIN-AA¹⁷-LYF:YGKIP:NMVVR:SXGXH, RVPSTXX:APVKT:SPIN-AA¹⁷-LYF:YGKIP:MIVEE:XGXL, ASAAPXX:VPQAL:SPIN-AA¹⁷-LYF:YGKIP:MIVRS:XKXS, ASASPXX:VSQDL:SPIN-AA¹⁷-LYF:YGKIP:MIVKS:XKXS, ASASPXX:VPQDL:SPIN-AA¹⁷-LYF:YGKIP:MVVKS:XKXS, NDEGLEX:VPTEE:SPIN-AA¹⁷-LYF:YGKIP:FLQHN:KXEXR, NDEGLEX:VPTGQ:SPIN-AA¹⁷-LYF:YGKIP:LEEHS:QXEXR, SSVKXQP:SRVHH:SPIN-AA¹⁷-LYF:YGKIP:RLEEH:LEXAXA, RNVQXRP:TQVQL:SPIN-AA¹⁷-LYF:YGKIP:TLEDH:LAXKXE, KIPKAXX:VPAEL:SPIS-AA¹⁷-LYI:YKQYE:DMVVE:GXGXR, GIPEPXX:VPAKM:SPIS-AA¹⁷-LYI:YKQYE:NMVVE:SXAXR, SIPKAXX:VPAEL:SPIS-AA¹⁷-LYI:YKQYE:EMVVE:GXGXR, HVTKPTX:VPAKL:SPIS-AA¹⁷-LYI:YKQYE:NMVVE:SXGXH, YVPKPXX:VPAKL:SPIS-AA¹⁷-LYI:YKQYE:NMVVE:SXGXH, TVPKPXX:VPAQL:SPIS-AA¹⁷-LYI:YKQYE:NMVVE:AXGXH, AVPKAXX:VPAKL:SPIS-AA¹⁷-LYI:YKQYE:NMVVE:AXGXH, KVGKAXX:VPAKL:SPIS-AA¹⁷-LYI:YKQYE:EGMSVVE:XGXR, KASKAXX:VPAKL:SPIS-AA¹⁷-LYI:YKQYE:GMVVE:EXGXR, GSAGPXX:VPAKM:SPIS-AA¹⁷-LYI:YKQYE:GMVVE:RXGXS, STPPTXX:VPARL:SPIS-AA¹⁷-LYI:YKQYE:DMVVE:SXGXR, HVPKPXX:VPAKL:SPIS-AA¹⁷-LYI:YKQYE:NMVVE:SXGXH, RVPSTXX:VPAKT:SPIS-AA¹⁷-LYI:YKQYE:MIVVE:XGXL, ASAAPXX:VPAAL:SPIS-AA¹⁷-LYI:YKQYE:MIVVE:XKXS, ASASPXX:VPADL:SPIS-AA¹⁷-LYI:YKQYE:MIVVE:XKXS, ASASPXX:VPADL:SPIS-AA¹⁷-LYI:YKQYE:MVVVE:XKXS, NDEGLEX:VPAEE:SPIS-AA¹⁷-LYI:YKQYE:FLVVE:KXEXR, NDEGLEX:VPAGQ:SPIS-AA¹⁷-LYI:YKQYE:LEVVE:QXEXR, SSVKXQP:VPAHH:SPIS-AA¹⁷-LYI:YKQYE:RLVVE:LEXAXA, RNVQXRP:VPAQL:SPIS-AA¹⁷-LYI:YKQYE:TLVVE:LAXKXE, KIPKAXX:VPTEL:SPIS-AA¹⁷-LYI:YKQYE:DMVVE:GXGXR, GIPEPXX:VPEKM:SPIS-AA¹⁷-LYI:YKQYE:NMTVE:SXAXR, SIPKAXX:VPTEL:SPIS-AA¹⁷-LYI:YKQYE:EMVVE:GXGXR, HVTKPTX:APTKL:SPIS-AA¹⁷-LYI:YKQYE:NMVVR:SXGXH, YVPKPXX:APTKL:SPIS-AA¹⁷-LYI:YKQYE:NMVVR:SXGXH, TVPKPXX:APTQL:SPIS-AA¹⁷-LYI:YKQYE:NMVVR:AXGXH, AVPKAXX:APTKL:SPIS-AA¹⁷-LYI:YKQYE:NMVVK:AXGXH, KVGKAXX:VPTKL:SPIS-AA¹⁷-LYI:YKQYE:EGMSVAE:XGXR, KASKAXX:VPTKL:SPIS-AA¹⁷-LYI:YKQYE:GMAVS:EXGXR, GSAGPXX:TPTKM:SPIS-AA¹⁷-LYI:YKQYE:GMVVD:RXGXS, STPPTXX:VPTRL:SPIS-AA¹⁷-LYI:YKQYE:DMVVE:SXGXR, HVPKPXX:APTKL:SPIS-AA¹⁷-LYI:YKQYE:NMVVR:SXGXH, RVPSTXX:APVKT:SPIS-AA¹⁷-LYI:YKQYE:MIVEE:XGXL, ASAAPXX:VPQAL:SPIS-AA¹⁷-LYI:YKQYE:MIVRS:XKXS, ASASPXX:VSQDL:SPIS-AA¹⁷-LYI:YKQYE:MIVKS:XKXS, ASASPXX:VPQDL:SPIS-AA¹⁷-LYI:YKQYE:MVVKS:XKXS, NDEGLEX:VPTEE:SPIS-AA¹⁷-LYI:YKQYE:FLQHN:KXEXR, NDEGLEX:VPTGQ:SPIS-AA¹⁷-LYI:YKQYE:LEEHS:QXEXR, SSVKXQP:SRVHH:SPIS-AA¹⁷-LYI:YKQYE:RLEEH:LEXAXA, RNVQXRP:TQVQL:SPIS-AA¹⁷-LYI:YKQYE:TLEDH:LAXKXE, KIPKAXX:VPTEL:SPIS-AA¹⁷-LFI:YKQYE:DMVVE:GXGXR, GIPEPXX:VPTKM:SPIS-AA¹⁷-LFI:YKQYE:NMVVE:SXAXR, SIPKAXX:VPTEL:SPIS-AA¹⁷-LFI:YKQYE:EMVVE:GXGXR, HVTKPTX:VPTKL:SPIS-AA¹⁷-LFI:YKQYE:NMVVE:SXGXH, YVPKPXX:VPTKL:SPIS-AA¹⁷-LFI:YKQYE:NMVVE:SXGXH, TVPKPXX:VPTQL:SPIS-AA¹⁷-LFI:YKQYE:NMVVE:AXGXH, AVPKAXX:VPTKL:SPIS-AA¹⁷-LFI:YKQYE:NMVVE:AXGXH, KVGKAXX:VPTKL:SPIS-AA¹⁷-LFI:YKQYE:EGMSVVE:XGXR, KASKAXX:VPTKL:SPIS-AA¹⁷-LFI:YKQYE:GMVVE:EXGXR, GSAGPXX:VPTKM:SPIS-AA¹⁷-LFI:YKQYE:GMVVE:RXGXS, AAPASXX:VPTRL:SPIS-AA¹⁷-LFI:YKQYE:DMVVE:AXGXR, HVPKPXX:VPTKL:SPIS-AA¹⁷-LFI:YKQYE:NMVVE:SXGXH, RVPSTXX:VPTKT:SPIS-AA¹⁷-LFI:YKQYE:MIVVE:XGXL, ASAAPXX:VPTAL:SPIS-AA¹⁷-LFI:YKQYE:MIVVE:XKXS, ASASPXX:VPTDL:SPIS-AA¹⁷-LFI:YKQYE:MIVVE:XKXS, ASASPXX:VPTDL:SPIS-AA¹⁷-LFI:YKQYE:MVVVE:XKXS, NDEGLEX:VPTEE:SPIS-AA¹⁷-LFI:YKQYE:FLVVE:KXEXR, NDEGLEX:VPTGQ:SPIS-AA¹⁷-LFI:YKQYE:LEVVE:QXEXR, SSVKXQP:VPTHH:SPIS-AA¹⁷-LFI:YKQYE:RLVVE:LEXAXA, RNVQXRP:VPTQL:SPIS-AA¹⁷-LFI:YKQYE:TLVVE:LAXKXE, GIPEPXX:VPEKM:SPIS-AA¹⁷-LFI:YKQYE:NMTVE:SXAXR, HVTKPTX:APTKL:SPIS-AA¹⁷-LFI:YKQYE:NMVVR:SXGXH, YVPKPXX:APTKL:SPIS-AA¹⁷-LFI:YKQYE:NMVVR:SXGXH, TVPKPXX:APTQL:SPIS-AA¹⁷-LFI:YKQYE:NMVVR:AXGXH, AVPKAXX:APTKL:SPIS-AA¹⁷-LFI:YKQYE:NMVVK:AXGXH, KVGKAXX:VPTKL:SPIS-AA¹⁷-LFI:YKQYE:EGMSVAE:XGXR, KASKAXX:VPTKL:SPIS-AA¹⁷-LFI:YKQYE:GMAVS:EXGXR, GSAGPXX:TPTKM:SPIS-AA¹⁷-LFI:YKQYE:GMVVD:RXGXS, AAPASXX:VPARL:SPIS-AA¹⁷-LFI:YKQYE:DMVVE:AXGXR, HVPKPXX:APTKL:SPIS-AA¹⁷-LFI:YKQYE:NMVVR:SXGXH, RVPSTXX:APVKT:SPIS-AA¹⁷-LFI:YKQYE:MIVEE:XGXL, ASAAPXX:VPQAL:SPIS-AA¹⁷-LFI:YKQYE:MIVRS:XKXS, ASASPXX:VSQDL:SPIS-AA¹⁷-LFI:YKQYE:MIVKS:XKXS, ASASPXX:VPQDL:SPIS-AA¹⁷-LFI:YKQYE:MVVKS:XKXS, NDEGLEX:VPTEE:SPIS-AA¹⁷-LFI:YKQYE:FLQHN:KXEXR, NDEGLEX:VPTGQ:SPIS-AA¹⁷-LFI:YKQYE:LEEHS:QXEXR, SSVKXQP:SRVHH:SPIS-AA¹⁷-LFI:YKQYE:RLEEH:LEXAXA, RNVQXRP:TQVQL:SPIS-AA¹⁷-LFI:YKQYE:TLEDH:LAXKXE, KIPKAXX:APVEL:KPLS-AA¹⁷-LYV:DHHKD:DMVEE:GXGXR, GIPEPXX:APVKM:KPLS-AA¹⁷-LYV:DHHKD:NMVEE:SXAXR, SIPKAXX:APVEL:KPLS-AA¹⁷-LYV:DHHKD:EMVEE:GXGXR, HVTKPTX:APVKL:KPLS-AA¹⁷-LYV:DHHKD:NMVEE:SXGXH, YVPKPXX:APVKL:KPLS-AA¹⁷-LYV:DHHKD:NMVEE:SXGXH, TVPKPXX:APVQL:KPLS-AA¹⁷-LYV:DHHKD:NMVEE:AXGXH, AVPKAXX:APVKL:KPLS-AA¹⁷-LYV:DHHKD:NMVEE:AXGXH, KVGKAXX:APVKL:KPLS-AA¹⁷-LYV:DHHKD:EGMSVEE:XGXR, KASKAXX:APVKL:KPLS-AA¹⁷-LYV:DHHKD:GMVEE:EXGXR, GSAGPXX:APVKM:KPLS-AA¹⁷-LYV:DHHKD:GMVEE:RXGXS, AAPASXX:APVRL:KPLS-AA¹⁷-LYV:DHHKD:DMVEE:AXGXR, STPPTXX:APVRL:KPLS-AA¹⁷-LYV:DHHKD:DMVEE:SXGXR, HVPKPXX:APVKL:KPLS-AA¹⁷-LYV:DHHKD:NMVEE:SXGXH, ASAAPXX:APVAL:KPLS-AA¹⁷-LYV:DHHKD:MIVEE:XKXS, ASASPXX:APVDL:KPLS-AA¹⁷-LYV:DHHKD:MIVEE:XKXS, ASASPXX:APVDL:KPLS-AA¹⁷-LYV:DHHKD:MVVEE:XKXS, NDEGLEX:APVEE:KPLS-AA¹⁷-LYV:DHHKD:FLVEE:KXEXR, NDEGLEX:APVGQ:KPLS-AA¹⁷-LYV:DHHKD:LEVEE:QXEXR, SSVKXQP:APVHH:KPLS-AA¹⁷-LYV:DHHKD:RLVEE:LEXAXA, RNVQXRP:APVQL:KPLS-AA¹⁷-LYV:DHHKD:TLVEE:LAXKXE, KIPKAXX:VPTEL:KPLS-AA¹⁷-LYV:DHHKD:DMVVE:GXGXR, GIPEPXX:VPEKM:KPLS-AA¹⁷-LYV:DHHKD:NMTVE:SXAXR, SIPKAXX:VPTEL:KPLS-AA¹⁷-LYV:DHHKD:EMVVE:GXGXR, HVTKPTX:APTKL:KPLS-AA¹⁷-LYV:DHHKD:NMVVR:SXGXH, YVPKPXX:APTKL:KPLS-AA¹⁷-LYV:DHHKD:NMVVR:SXGXH, TVPKPXX:APTQL:KPLS-AA¹⁷-LYV:DHHKD:NMVVR:AXGXH, AVPKAXX:APTKL:KPLS-AA¹⁷-LYV:DHHKD:NMVVK:AXGXH, KVGKAXX:VPTKL:KPLS-AA¹⁷-LYV:DHHKD:EGMSVAE:XGXR, KASKAXX:VPTKL:KPLS-AA¹⁷-LYV:DHHKD:GMAVS:EXGXR, GSAGPXX:TPTKM:KPLS-AA¹⁷-LYV:DHHKD:GMVVD:RXGXS, AAPASXX:VPARL:KPLS-AA¹⁷-LYV:DHHKD:DMVVE:AXGXR, STPPTXX:VPTRL:KPLS-AA¹⁷-LYV:DHHKD:DMVVE:SXGXR, HVPKPXX:APTKL:KPLS-AA¹⁷-LYV:DHHKD:NMVVR:SXGXH, ASAAPXX:VPQAL:KPLS-AA¹⁷-LYV:DHHKD:MIVRS:XKXS, ASASPXX:VSQDL:KPLS-AA¹⁷-LYV:DHHKD:MIVKS:XKXS, ASASPXX:VPQDL:KPLS-AA¹⁷-LYV:DHHKD:MVVKS:XKXS, NDEGLEX:VPTEE:KPLS-AA¹⁷-LYV:DHHKD:FLQHN:KXEXR, NDEGLEX:VPTGQ:KPLS-AA¹⁷-LYV:DHHKD:LEEHS:QXEXR, SSVKXQP:SRVHH:KPLS-AA¹⁷-LYV:DHHKD:RLEEH:LEXAXA, RNVQXRP:TQVQL:KPLS-AA¹⁷-LYV:DHHKD:TLEDH:LAXKXE, KIPKAXX:VPQEL:EPLP-AA¹⁷-VYY:EQLSN:DMVRS:GXGXR, GIPEPXX:VPQKM:EPLP-AA¹⁷-VYY:EQLSN:NMVRS:SXAXR, SIPKAXX:VPQEL:EPLP-AA¹⁷-VYY:EQLSN:EMVRS:GXGXR, HVTKPTX:VPQKL:EPLP-AA¹⁷-VYY:EQLSN:NMVRS:SXGXH, YVPKPXX:VPQKL:EPLP-AA¹⁷-VYY:EQLSN:NMVRS:SXGXH, TVPKPXX:VPQQL:EPLP-AA¹⁷-VYY:EQLSN:NMVRS:AXGXH, AVPKAXX:VPQKL:EPLP-AA¹⁷-VYY:EQLSN:NMVRS:AXGXH, KVGKAXX:VPQKL:EPLP-AA¹⁷-VYY:EQLSN:EGMSVRS:XGXR, KASKAXX:VPQKL:EPLP-AA¹⁷-VYY:EQLSN:GMVRS:EXGXR, GSAGPXX:VPQKM:EPLP-AA¹⁷-VYY:EQLSN:GMVRS:RXGXS, AAPASXX:VPQRL:EPLP-AA¹⁷-VYY:EQLSN:DMVRS:AXGXR, STPPTXX:VPQRL:EPLP-AA¹⁷-VYY:EQLSN:DMVRS:SXGXR, HVPKPXX:VPQKL:EPLP-AA¹⁷-VYY:EQLSN:NMVRS:SXGXH, RVPSTXX:VPQKT:EPLP-AA¹⁷-VYY:EQLSN:MIVRS:XGXL, ASASPXX:VPQDL:EPLP-AA¹⁷-VYY:EQLSN:MIVRS:XKXS, ASASPXX:VPQDL:EPLP-AA¹⁷-VYY:EQLSN:MVVRS:XKXS, NDEGLEX:VPQEE:EPLP-AA¹⁷-VYY:EQLSN:FLVRS:KXEXR, NDEGLEX:VPQGQ:EPLP-AA¹⁷-VYY:EQLSN:LEVRS:QXEXR, SSVKXQP:VPQHH:EPLP-AA¹⁷-VYY:EQLSN:RLVRS:LEXAXA, RNVQXRP:VPQQL:EPLP-AA¹⁷-VYY:EQLSN:TLVRS:LAXKXE, KIPKAXX:VPTEL:EPLP-AA¹⁷-VYY:EQLSN:DMVVE:GXGXR, GIPEPXX:VPEKM:EPLP-AA¹⁷-VYY:EQLSN:NMTVE:SXAXR, SIPKAXX:VPTEL:EPLP-AA¹⁷-VYY:EQLSN:EMVVE:GXGXR, HVTKPTX:APTKL:EPLP-AA¹⁷-VYY:EQLSN:NMVVR:SXGXH, YVPKPXX:APTKL:EPLP-AA¹⁷-VYY:EQLSN:NMVVR:SXGXH, TVPKPXX:APTQL:EPLP-AA¹⁷-VYY:EQLSN:NMVVR:AXGXH, AVPKAXX:APTKL:EPLP-AA¹⁷-VYY:EQLSN:NMVVK:AXGXH, KVGKAXX:VPTKL:EPLP-AA¹⁷-VYY:EQLSN:EGMSVAE:XGXR, KASKAXX:VPTKL:EPLP-AA¹⁷-VYY:EQLSN:GMAVS:EXGXR, GSAGPXX:TPTKM:EPLP-AA¹⁷-VYY:EQLSN:GMVVD:RXGXS, AAPASXX:VPARL:EPLP-AA¹⁷-VYY:EQLSN:DMVVE:AXGXR, STPPTXX:VPTRL:EPLP-AA¹⁷-VYY:EQLSN:DMVVE:SXGXR, HVPKPXX:APTKL:EPLP-AA¹⁷-VYY:EQLSN:NMVVR:SXGXH, RVPSTXX:APVKT:EPLP-AA¹⁷-VYY:EQLSN:MIVEE:XGXL, ASASPXX:VSQDL:EPLP-AA¹⁷-VYY:EQLSN:MIVKS:XKXS, ASASPXX:VPQDL:EPLP-AA¹⁷-VYY:EQLSN:MVVKS:XKXS, NDEGLEX:VPTEE:EPLP-AA¹⁷-VYY:EQLSN:FLQHN:KXEXR, NDEGLEX:VPTGQ:EPLP-AA¹⁷-VYY:EQLSN:LEEHS:QXEXR, SSVKXQP:SRVHH:EPLP-AA¹⁷-VYY:EQLSN:RLEEH:LEXAXA, RNVQXRP:TQVQL:EPLP-AA¹⁷-VYY:EQLSN:TLEDH:LAXKXE, KIPKAXX:VSQEL:EPLT-AA¹⁷-LYY:EQLSN:DMVKS:GXGXR, GIPEPXX:VSQKM:EPLT-AA¹⁷-LYY:EQLSN:NMVKS:SXAXR, SIPKAXX:VSQEL:EPLT-AA¹⁷-LYY:EQLSN:EMVKS:GXGXR, HVTKPTX:VSQKL:EPLT-AA¹⁷-LYY:EQLSN:NMVKS:SXGXH, YVPKPXX:VSQKL:EPLT-AA¹⁷-LYY:EQLSN:NMVKS:SXGXH, TVPKPXX:VSQQL:EPLT-AA¹⁷-LYY:EQLSN:NMVKS:AXGXH, AVPKAXX:VSQKL:EPLT-AA¹⁷-LYY:EQLSN:NMVKS:AXGXH, KVGKAXX:VSQKL:EPLT-AA¹⁷-LYY:EQLSN:EGMSVKS:XGXR, KASKAXX:VSQKL:EPLT-AA¹⁷-LYY:EQLSN:GMVKS:EXGXR, GSAGPXX:VSQKM:EPLT-AA¹⁷-LYY:EQLSN:GMVKS:RXGXS, AAPASXX:VSQRL:EPLT-AA¹⁷-LYY:EQLSN:DMVKS:AXGXR, STPPTXX:VSQRL:EPLT-AA¹⁷-LYY:EQLSN:DMVKS:SXGXR, HVPKPXX:VSQKL:EPLT-AA¹⁷-LYY:EQLSN:NMVKS:SXGXH, RVPSTXX:VSQKT:EPLT-AA¹⁷-LYY:EQLSN:MIVKS:XGXL, ASAAPXX:VSQAL:EPLT-AA¹⁷-LYY:EQLSN:MIVKS:XKXS, ASASPXX:VSQDL:EPLT-AA¹⁷-LYY:EQLSN:MVVKS:XKXS, NDEGLEX:VSQEE:EPLT-AA¹⁷-LYY:EQLSN:FLVKS:KXEXR, NDEGLEX:VSQGQ:EPLT-AA¹⁷-LYY:EQLSN:LEVKS:QXEXR, SSVKXQP:VSQHH:EPLT-AA¹⁷-LYY:EQLSN:RLVKS:LEXAXA, RNVQXRP:VSQQL:EPLT-AA¹⁷-LYY:EQLSN:TLVKS:LAXKXE, KIPKAXX:VPTEL:EPLT-AA¹⁷-LYY:EQLSN:DMVVE:GXGXR, GIPEPXX:VPEKM:EPLT-AA¹⁷-LYY:EQLSN:NMTVE:SXAXR, SIPKAXX:VPTEL:EPLT-AA¹⁷-LYY:EQLSN:EMVVE:GXGXR, HVTKPTX:APTKL:EPLT-AA¹⁷-LYY:EQLSN:NMVVR:SXGXH, YVPKPXX:APTKL:EPLT-AA¹⁷-LYY:EQLSN:NMVVR:SXGXH, TV PKPXX:APTQL:EPLT-AA¹⁷-LYY:EQLSN: NMVV R:AXGXH, AV PKAXX:APTKL:EPLT-AA¹⁷-LYY:EQLSN:NMVVK:AXGXH, KVGKAXX:VPTKL:EPLT-AA¹⁷-LYY:EQLSN:EGMSVAE:XGXR, KASKAXX:VPTKL:EPLT-AA¹⁷-LYY:EQLSN:GMAVS:EXGXR, GSAGPXX:TPTKM:EPLT-AA¹⁷-LYY:EQLSN:GMVVD:RXGXS, AAPASXX:VPARL:EPLT-AA¹⁷-LYY:EQLSN:DMVVE:AXGXR, STPPTXX:VPTRL:EPLT-AA¹⁷-LYY:EQLSN:DMVVE:SXGXR, HVPKPXX:APTKL:EPLT-AA¹⁷-LYY:EQLSN:NMVVR:SXGXH, RVPSTXX:APVKT:EPLT-AA¹⁷-LYY:EQLSN:MIVEE:XGXL, ASAAPXX:VPQAL:EPLT-AA¹⁷-LYY:EQLSN:MIVRS:XKXS, ASASPXX:VPQDL:EPLT-AA¹⁷-LYY:EQLSN:MVVKS:XKXS, NDEGLEX:VPTEE:EPLT-AA¹⁷-LYY:EQLSN:FLQHN:KXEXR, NDEGLEX:VPTGQ:EPLT-AA¹⁷-LYY:EQLSN:LEEHS:QXEXR, SSVKXQP:SRVHH:EPLT-AA¹⁷-LYY:EQLSN:RLEEH:LEXAXA, RNVQXRP:TQVQL:EPLT-AA¹⁷-LYY:EQLSN:TLEDH:LAXKXE, KIPKAXX:VPQEL:EPLT-AA¹⁷-LYY:EQLSN:DMVKS:GXGXR, GIPEPXX:VPQKM:EPLT-AA¹⁷-LYY:EQLSN:NMVKS:SXAXR, SIPKAXX:VPQEL:EPLT-AA¹⁷-LYY:EQLSN:EMVKS:GXGXR, HVTKPTX:VPQKL:EPLT-AA¹⁷-LYY:EQLSN:NMVKS:SXGXH, YVPKPXX:VPQKL:EPLT-AA¹⁷-LYY:EQLSN:NMVKS:SXGXH, TVPKPXX:VPQQL:EPLT-AA¹⁷-LYY:EQLSN:NMVKS:AXGXH, AVPKAXX:VPQKL:EPLT-AA¹⁷-LYY:EQLSN:NMVKS:AXGXH, KVGKAXX:VPQKL:EPLT-AA¹⁷-LYY:EQLSN:EGMSVKS:XGXR, KASKAXX:VPQKL:EPLT-AA¹⁷-LYY:EQLSN:GMVKS:EXGXR, GSAGPXX:VPQKM:EPLT-AA¹⁷-LYY:EQLSN:GMVKS:RXGXS, AAPASXX:VPQRL:EPLT-AA¹⁷-LYY:EQLSN:DMVKS:AXGXR, STPPTXX:VPQRL:EPLT-AA¹⁷-LYY:EQLSN:DMVKS:SXGXR, HVPKPXX:VPQKL:EPLT-AA¹⁷-LYY:EQLSN:NMVKS:SXGXH, RVPSTXX:VPQKT:EPLT-AA¹⁷-LYY:EQLSN:MIVKS:XGXL, ASAAPXX:VPQAL:EPLT-AA¹⁷-LYY:EQLSN:MIVKS:XKXS, ASASPXX:VPQDL:EPLT-AA¹⁷-LYY:EQLSN:MIVKS:XKXS, NDEGLEX:VPQEE:EPLT-AA¹⁷-LYY:EQLSN:FLVKS:KXEXR, NDEGLEX:VPQGQ:EPLT-AA¹⁷-LYY:EQLSN:LEVKS:QXEXR, SSVKXQP:VPQHH:EPLT-AA¹⁷-LYY:EQLSN:RLVKS:LEXAXA, RNVQXRP:VPQQL:EPLT-AA¹⁷-LYY:EQLSN:TLVKS:LAXKXE, ASASPXX:VSQDL:EPLT-AA¹⁷-LYY:EQLSN:MIVKS:XKXS, KIPKAXX:VPTEL:SNIT-AA¹⁷-QIM:IGEMS:DMQHN:GXGXR, GIPEPXX:VPTKM:SNIT-AA¹⁷-QIM:IGEMS:NMQHN:SXAXR, SIPKAXX:VPTEL:SNIT-AA¹⁷-QIM:IGEMS:EMQHN:GXGXR, HVTKPTX:VPTKL:SNIT-AA¹⁷-QIM:IGEMS: NMQHN:SXGXH, YVPKPXX:VPTKL:SNIT-AA¹⁷-QIM:IGEMS:NMQHN:SXGXH, TVPKPXX:VPTQL:SNIT-AA¹⁷-QIM:IGEMS: NMQHN:AXGXH, AVPKAXX:VPTKL:SNIT-AA¹⁷-QIM:IGEMS: NMQHN:AXGXH, KVGKAXX:VPTKL:SNIT-AA¹⁷-QIM:IGEMS: EGMSQHN:XGXR, KASKAXX:VPTKL:SNIT-AA¹⁷-QIM:IGEMS:GMQHN:EXGXR, GSAGPXX:VPTKM:SNIT-AA¹⁷-QIM:IGEMS:GMQHN:RXGXS, AAPASXX:VPTRL:SNIT-AA¹⁷-QIM:IGEMS:DMQHN:AXGXR, STPPTXX:VPTRL:SNIT-AA¹⁷-QIM:IGEMS: DMQHN:SXGXR, HVPKPXX:VPTKL:SNIT-AA¹⁷-QIM:IGEMS: NMQHN:SXGXH, RVPSTXX:VPTKT:SNIT-AA¹⁷-QIM:IGEMS:MIQHN:XGXL, ASAAPXX:VPTAL:SNIT-AA¹⁷-QIM:IGEMS: MIQHN:XKXS, ASASPXX:VPTDL:SNIT-AA¹⁷-QIM:IGEMS: MIQHN:XKXS, ASASPXX:VPTDL:SNIT-AA¹⁷-QIM:IGEMS:MVQHN:XKXS, NDEGLEX:VPTGQ:SNIT-AA¹⁷-QIM:IGEMS:LEQHN:QXEXR, NDEGLEX:VPTEE:SNIT-AA¹⁷-QIM:IGEMS:FLQHN:KXEXR, SSVKXQP:VPTHH:SNIT-AA¹⁷-QIM:IGEMS: RLQHN:LEXAXA, RNVQXRP:VPTQL:SNIT-AA¹⁷-QIM:IGEMS:TLQHN:LAXKXE, KIPKAXX:VPTEL:SNIT-AA¹⁷-QIM:IGEMS:DMVVE:GXGXR, GIPEPXX:VPEKM:SNIT-AA¹⁷-QIM:IGEMS:NMTVE:SXAXR, SIPKAXX:VPTEL:SNIT-AA¹⁷-QIM:IGEMS:EMVVE:GXGXR, HVTKPTX:APTKL:SNIT-AA¹⁷-QIM:IGEMS: NMVVR:SXGXH, YVPKPXX:APTKL:SNIT-AA¹⁷-QIM:IGEMS:NMVVR:SXGXH, TVPKPXX:APTQL:SNIT-AA¹⁷-QIM:IGEMS: NMVVR:AXGXH, AVPKAXX:APTKL:SNIT-AA¹⁷-QIM:IGEMS: NMVVK:AXGXH, KVGKAXX:VPTKL:SNIT-AA¹⁷-QIM:IGEMS:EGMSVAE:XGXR, KASKAXX:VPTKL:SNIT-AA¹⁷-QIM:IGEMS:GMAVS:EXGXR, GSAGPXX:TPTKM:SNIT-AA¹⁷-QIM:IGEMS:GMVVD:RXGXS, AAPASXX:VPARL:SNIT-AA¹⁷-QIM:IGEMS:DMVVE:AXGXR, STPPTXX:VPTRL:SNIT-AA¹⁷-QIM:IGEMS:DMVVE:AXGXR, HVPKPXX:APTKL:SNIT-AA¹⁷-QIM:IGEMS: NMVVR:SXGXH, RVPSTXX:APVKT:SNIT-AA¹⁷-QIM:IGEMS:MIVEE:XGXL, ASAAPXX:VPQAL:SNIT-AA¹⁷-QIM:IGEMS:MIVRS:XKXS, ASASPXX:VSQDL:SNIT-AA¹⁷-QIM:IGEMS:MIVKS:XKXS, ASASPXX:VPQDL:SNIT-AA¹⁷-QIM:IGEMS:MVVKS:XKXS, NDEGLEX:VPTGQ:SNIT-AA¹⁷-QIM:IGEMS:LEEHS:QXEXR, SSVKXQP:SRVHH:SNIT-AA¹⁷-QIM:IGEMS:RLEEH:LEXAXA, RNVQXRP:TQVQL:SNIT-AA¹⁷-QIM:IGEMS:TLEDH:LAXKXE, KIPKAXX:VPTEL:SNIT-AA¹⁷-QIM:LGEMS:DMEHS:GXGXR, GIPEPXX:VPTKM:SNIT-AA¹⁷-QIM:LGEMS:NMEHS:SXAXR, SIPKAXX:VPTEL:SNIT-AA¹⁷-QIM:LGEMS:EMEHS:GXGXR, HVTKPTX:VPTKL:SNIT-AA¹⁷-QIM:LGEMS:NMEHS:SXGXH, YVPKPXX:VPTKL:SNIT-AA¹⁷-QIM:LGEMS:NMEHS:SXGXH, TVPKPXX:VPTQL:SNIT-AA¹⁷-QIM:LGEMS:NMEHS:AXGXH, AVPKAXX:VPTKL:SNIT-AA¹⁷-QIM:LGEMS:NMEHS:AXGXH, KVGKAXX:VPTKL:SNIT-AA¹⁷-QIM:LGEMS: EGMS EHS:XGXR, KASKAXX:VPTKL:SNIT-AA¹⁷-QIM:LGEMS:GMEHS:EXGXR, GSAGPXX:VPTKM:SNIT-AA¹⁷-QIM:LGEMS:GMEHS:EXGXS, AAPASXX:VPTRL:SNIT-AA¹⁷-QIM:LGEMS:DMEHS:AXGXR, STPPTXX:VPTRL:SNIT-AA¹⁷-QIM:LGEMS:DMEHS:SXGXR, HVPKPXX:VPTKL:SNIT-AA¹⁷-QIM:LGEMS:NMEHS:SXGXH, RVPSTXX:VPTKT:SNIT-AA¹⁷-QIM:LGEMS:MIEHS:XGXL, ASAAPXX:VPTAL:SNIT-AA¹⁷-QIM:LGEMS:MIEHS:XKXS, ASASPXX:VPTDL:SNIT-AA¹⁷-QIM:LGEMS:MIEHS:XKXS, ASASPXX:VPTDL:SNIT-AA¹⁷-QIM:LGEMS:MVEHS:XKXS, NDEGLEX:VPTEE:SNIT-AA¹⁷-QIM:LGEMS:FLEHS:KXEXR, SSVKXQP:VPTHH:SNIT-AA¹⁷-QIM:LGEMS:RLEHS:LEXAXA, RNVQXRP:VPTQL:SNIT-AA¹⁷-QIM:LGEMS:TLEHS:LAXKXE, KIPKAXX:VPTEL:SNIT-AA¹⁷-QIM:LGEMS:DMVVE:GXGXR, GIPEPXX:VPEKM:SNIT-AA¹⁷-QIM:LGEMS:NMTVE:SXAXR, SIPKAXX:VPTEL:SNIT-AA¹⁷-QIM:LGEMS:EMVVE:GXGXR, HVTKPTX:APTKL:SNIT-AA¹⁷-QIM:LGEMS:NMVVR:SXGXH, YVPKPXX:APTKL:SNIT-AA¹⁷-QIM:LGEMS:NMVVR:SXGXH, TVPKPXX:APTQL:SNIT-AA¹⁷-QIM:LGEMS: NMVVR:AXGXH, AVPKAXX:APTKL:SNIT-AA¹⁷-QIM:LGEMS:NMVVK:AXGXH, KVGKAXX:VPTKL:SNIT-AA¹⁷-QIM:LGEMS:EGMSVAE:XGXR, KASKAXX:VPTKL:SNIT-AA¹⁷-QIM:LGEMS:GMAVS:EXGXR, GSAGPXX:TPTKM:SNIT-AA¹⁷-QIM:LGEMS:GMVVD:RXGXS, AAPASXX:VPARL:SNIT-AA¹⁷-QIM:LGEMS:DMVVE:AXGXR, STPPTXX:VPTRL:SNIT-AA¹⁷-QIM:LGEMS:DMVVE:SXGXR, HVPKPXX:APTKL:SNIT-AA¹⁷-QIM:LGEMS:NMVVR:SXGXH, RVPSTXX:APVKT:SNIT-AA¹⁷-QIM:LGEMS:MIVEE:XGXL, ASAAPXX:VPQAL:SNIT-AA¹⁷-QIM:LGEMS:MIVRS:XKXS, ASASPXX:VSQDL:SNIT-AA¹⁷-QIM:LGEMS:MIVKS:XKXS, ASASPXX:VPQDL:SNIT-AA¹⁷-QIM:LGEMS: MVVKS:XKXS, NDEGLEX:VPTEE:SNIT-AA¹⁷-QIM:LGEMS:FLQHN:KXEXR, SSVKXQP:SRVHH:SNIT-AA¹⁷-QIM:LGEMS:RLEEH:LEXAXA, RNVQXRP:TQVQL:SNIT-AA¹⁷-QIM:LGEMS:TLEDH:LAXKXE, KIPKAXX:SRVEL:RSVK-AA¹⁷-AKV:KEVQV:DMEEH:GXGXR, GIPEPXX:SRVKM:RSVK-AA¹⁷-AKV:KEVQV:NMEEH:SXAXR, SIPKAXX:SRVEL:RSVK-AA¹⁷-AKV:KEVQV:EMEEH:GXGXR, HVTKPTX:SRVKL:RSVK-AA¹⁷-AKV:KEVQV:NMEEH:SXGXH, YVPKPXX:SRVKL:RSVK-AA¹⁷-AKV:KEVQV:NMEEH:SXGXH, TVPKPXX:SRVQL:RSVK-AA¹⁷-AKV:KEVQV:NMEEH:AXGXH, AVPKAXX:SRVKL:RSVK-AA¹⁷-AKV:KEVQV:NMEEH:AXGXH, KVGKAXX:SRVKL:RSVK-AA¹⁷-AKV:KEVQV:EGMSEEH:XGXR, KASKAXX:SRVKL:RSVK-AA¹⁷-AKV:KEVQV:GMEEH:EXGXR, GSAGPXX:SRVKM:RSVK-AA¹⁷-AKV:KEVQV:GME EH:RXGXS, AAPASXX:SRVRL:RSVK-AA¹⁷-AKV:KEVQV:DMEEH:AXGXR, STPPTXX:SRVRL:RSVK-AA¹⁷-AKV:KEVQV:DMEEH:SXGXR, HVPKPXX:SRVKL:RSVK-AA¹⁷-AKV:KEVQV:NMEEH:SXGXH, RVPSTXX:SRVKT:RSVK-AA¹⁷-AKV:KEVQV:MIEEH:XGXL, ASAAPXX:SRVAL:RSVK-AA¹⁷-AKV:KEVQV:MIEEH:XKXS, ASASPXX:SRVDL:RSVK-AA¹⁷-AKV:KEVQV:MIEEH:XKXS, ASASPXX:SRVDL:RSVK-AA¹⁷-AKV:KEVQV:MVEEH:XKXS, NDEGLEX:SRVEE:RSVK-AA¹⁷-AKV:KEVQV:FLEEH:KXEXR, NDEGLEX:SRVGQ:RSVK-AA¹⁷-AKV:KEVQV:LEEEH:QXEXR, RNVQXRP:SRVQL:RSVK-AA¹⁷-AKV:KEVQV:TLEEH:LAXKXE, KIPKAXX:VPTEL:RSVK-AA¹⁷-AKV:KEVQV:DMVVE:GXGXR, GIPEPXX:VPEKM:RSVK-AA¹⁷-AKV:KEVQV:NMTVE:SXAXR, SIPKAXX:VPTEL:RSVK-AA¹⁷-AKV:KEVQV:EMVVE:GXGXR, HVTKPTX:APTKL:RSVK-AA¹⁷-AKV:KEVQV:NMVVR:SXGXH, YVPKPXX:APTKL:RSVK-AA¹⁷-AKV:KEVQV:NMVVR:SXGXH, TVPKPXX:APTQL:RSVK-AA¹⁷-AKV:KEVQV:NMVVR:AXGXH, AVPKAXX:APTKL:RSVK-AA¹⁷-AKV:KEVQV:NMVVK:AXGXH, KVGKAXX:VPTKL:RSVK-AA¹⁷-AKV:KEVQV:EGMSVAE:XGXR, KASKAXX:VPTKL:RSVK-AA¹⁷-AKV:KEVQV:GMAVS:EXGXR, GSAGPXX:TPTKM:RSVK-AA¹⁷-AKV:KEVQV:GMVVD:RXGXS, AAPASXX:VPARL:RSVK-AA¹⁷-AKV:KEVQV:DMVVE:AXGXR, STPPTXX:VPTRL:RSVK-AA¹⁷-AKV:KEVQV:DMVVE:SXGXR, HVPKPXX:APTKL:RSVK-AA¹⁷-AKV:KEVQV:NMVVR:SXGXH, RVPSTXX:APVKT:RSVK-AA¹⁷-AKV:KEVQV:MIVEE:XGXL, ASAAPXX:VPQAL:RSVK-AA¹⁷-AKV:KEVQV:MIVRS:XKXS, ASASPXX:VSQDL:RSVK-AA¹⁷-AKV:KEVQV:MIVKS:XKXS, ASASPXX:VPQDL:RSVK-AA¹⁷-AKV:KEVQV:MVVKS:XKXS, NDEGLEX:VPTEE:RSVK-AA¹⁷-AKV:KEVQV:FLQHN:KXEXR, NDEGLEX:VPTGQ:RSVK-AA¹⁷-AKV:KEVQV:LEEHS:QXEXR, RNVQXRP:TQVQL:RSVK-AA¹⁷-AKV:KEVQV:TLEDH:LAXKXE, KIPKAXX:TQVEL:RPVQ-AA¹⁷-RKI:KKATV:DMEDH:GXGXR, GIPEPXX:TQVKM:RPVQ-AA¹⁷-RKI:KKATV:NMEDH:SXAXR, SIPKAXX:TQVEL:RPVQ-AA¹⁷-RKI:KKATV:EMEDH:GXGXR, HVTKPTX:TQVKL:RPVQ-AA¹⁷-RKI:KKATV:NMEDH:SXGXH, YVPKPXX:TQVKL:RPVQ-AA¹⁷-RKI:KKATV:NMEDH:SXGXH, TVPKPXX:TQVQL:RPVQ-AA¹⁷-RKI:KKATV:NMEDH:AXGXH, AVPKAXX:TQVKL:RPVQ-AA¹⁷-RKI:KKATV:NMEDH:AXGXH, KVGKAXX:TQVKL:RPVQ-AA¹⁷-RKI:KKATV:EGMSEDH:XGXR, KASKAXX:TQVKL:RPVQ-AA¹⁷-RKI:KKATV:GMEDH:EXGXR, GSAGPXX:TQVKM:RPVQ-AA¹⁷-RKI:KKATV:GMEDH:RXGXS, AAPASXX:TQVRL:RPVQ-AA¹⁷-RKI:KKATV:DMEDH:AXGXR, STPPTXX:TQVRL:RPVQ-AA¹⁷-RKI:KKATV:DMEDH:SXGXR, HVPKPXX:TQVKL:RPVQ-AA¹⁷-RKI:KKATV:NMEDH:SXGXH, RVPSTXX:TQVKT:RPVQ-AA¹⁷-RKI:KKATV:MIEDH:XGXL, ASAAPXX:TQVAL:RPVQ-AA¹⁷-RKI:KKATV:MIEDH:XKXS, ASASPXX:TQVDL:RPVQ-AA¹⁷-RKI:KKATV:MIEDH:XKXS, ASASPXX:TQVDL:RPVQ-AA¹⁷-RKI:KKATV:MVEDH:XKXS, NDEGLEX:TQVEE:RPVQ-AA¹⁷-RKI:KKATV:FLEDH:KXEXR, NDEGLEX:TQVGQ:RPVQ-AA¹⁷-RKI:KKATV:LEEDH:QXEXR, SSVKXQP:TQVHH:RPVQ-AA¹⁷-RKI:KKATV:RLEDH:LEXAXA, KIPKAXX:VPTEL:RPVQ-AA¹⁷-RKI:KKATV:DMVVE:GXGXR, GIPEPXX:VPEKM:RPVQ-AA¹⁷-RKI:KKATV:NMTVE:SXAXR, SIPKAXX:VPTEL:RPVQ-AA¹⁷-RKI:KKATV:EMVVE:GXGXR, HVTKPTX:APTKL:RPVQ-AA¹⁷-RKI:KKATV:NMVVR:SXGXH, YVPKPXX:APTKL:RPVQ-AA¹⁷-RKI:KKATV:NMVVR:SXGXH, TVPKPXX:APTQL:RPVQ-AA¹⁷-RKI:KKATV:NMVVR:AXGXH, AVPKAXX:APTKL:RPVQ-AA¹⁷-RKI:KKATV:NMVVK:AXGXH, KVGKAXX:VPTKL:RPVQ-AA¹⁷-RKI:KKATV:EGMSVAE:XGXR, KASKAXX:VPTKL:RPVQ-AA¹⁷-RKI:KKATV:GMAVS:EXGXR, GSAGPXX:TPTKM:RPVQ-AA¹⁷-RKI:KKATV:GMVVD:RXGXS, AAPASXX:VPARL:RPVQ-AA¹⁷-RKI:KKATV:DMVVE:AXGXR, STPPTXX:VPTRL:RPVQ-AA¹⁷-RKI:KKATV:DMVVE:SXGXR, HVPKPXX:APTKL:RPVQ-AA¹⁷-RKI:KKATV:NMVVR:SXGXH, RVPSTXX:APVKT:RPVQ-AA¹⁷-RKI:KKATV:MIVEE:XGXL, ASAAPXX:VPQAL:RPVQ-AA¹⁷-RKI:KKATV:MIVRS:XKXS, ASASPXX:VSQDL:RPVQ-AA¹⁷-RKI:KKATV:MIVKS:XKXS, ASASPXX:VPQDL:RPVQ-AA¹⁷-RKI:KKATV:MVVKS:XKXS, NDEGLEX:VPTEE:RPVQ-AA¹⁷-RKI:KKATV:FLQHN:KXEXR, NDEGLEX:VPTGQ:RPVQ-AA¹⁷-RKI:KKATV:LEEHS:QXEXR and SSVKXQP:SRVHH:RPVQ-AA¹⁷-RKI:KKATV:RLEEH:LEXAXA; and wherein AA¹⁷ is selected from the group consisting of G, A, V, L, I, P, F, M, W, T and S (in particular is selected from the group consisting of M, I, L, V and T). More particularly, the hexaplet PEP7:PEP5:PEP12:PEP2:PEP6:PEP8 is selected from the group consisting of GIPEPXX:VPTKM:SAIS-AA17-LYL:LKNYQ:NMVVE:SXAXR, HVTKPTX:VPTKL:SAIS-AA17-LYL:LKNYQ:NMVVE:SXGXH, YVPKPXX:VPTKL:SAIS-AA17-LYL:LKNYQ:NMVVE:SXGXH, TVPKPXX:VPTQL:SAIS-AA17-LYL:LKNYQ:NMVVE:AXGXH, AVPKAXX:VPTKL:SAIS-AA17-LYL:LKNYQ:NMVVE:AXGXH, KVGKAXX:VPTKL:SAIS-AA17-LYL:LKNYQ:EGMSVVE:XGXR, KASKAXX:VPTKL:SAIS-AA17-LYL:LKNYQ:GMVVE:EXGXR, GSAGPXX:VPTKM:SAIS-AA17-LYL:LKNYQ:GMVVE:RXGXS, AAPASXX:VPTRL:SAIS-AA17-LYL:LKNYQ:DMVVE:AXGXR, STPPTXX:VPTRL:SAIS-AA17-LYL:LKNYQ:DMVVE:SXGXR, HVPKPXX:VPTKL:SAIS-AA17-LYL:LKNYQ:NMVVE:SXGXH, RVPSTXX:VPTKT:SAIS-AA17-LYL:LKNYQ:MIVVE:XGXL, ASAAPXX:VPTAL:SAIS-AA17-LYL:LKNYQ:MIVVE:XKXS, ASASPXX:VPTDL:SAIS-AA17-LYL:LKNYQ:MIVVE:XKXS, ASASPXX:VPTDL:SAIS-AA17-LYL:LKNYQ:MVVVE:XKXS, GIPEPXX:VPEKM:SAIS-AA17-LYL:LKNYQ:NMTVE:SXAXR, HVTKPTX:APTKL:SAIS-AA17-LYL:LKNYQ:NMVVR:SXGXH, YVPKPXX:APTKL:SAIS-AA17-LYL:LKNYQ:NMVVR:SXGXH, TVPKPXX:APTQL:SAIS-AA17-LYL:LKNYQ:NMVVR:AXGXH, AVPKAXX:APTKL:SAIS-AA17-LYL:LKNYQ:NMVVK:AXGXH, KVGKAXX:VPTKL:SAIS-AA17-LYL:LKNYQ:EGMSVAE:XGXR, KASKAXX:VPTKL:SAIS-AA17-LYL:LKNYQ:GMAVS:EXGXR, GSAGPXX:TPTKM:SAIS-AA17-LYL:LKNYQ:GMVVD:RXGXS, AAPASXX:VPARL:SAIS-AA17-LYL:LKNYQ:DMVVE:AXGXR, HVPKPXX:APTKL:SAIS-AA17-LYL:LKNYQ:NMVVR:SXGXH, RVPSTXX:APVKT:SAIS-AA17-LYL:LKNYQ:MIVEE:XGXL, ASAAPXX:VPQAL:SAIS-AA17-LYL:LKNYQ:MIVRS:XKXS, ASASPXX:VSQDL:SAIS-AA17-LYL:LKNYQ:MIVKS:XKXS, ASASPXX:VPQDL:SAIS-AA17-LYL:LKNYQ:MVVKS:XKXS, NDEGLEX:VPTEE:SAIS-AA17-LYL:LKNYQ:FLQHN:KXEXR, NDEGLEX:VPTGQ:SAIS-AA17-LYL:LKNYQ:LEEHS:QXEXR, SSVKXQP:SRVHH:SAIS-AA17-LYL:LKNYQ:RLEEH:LEXAXA, RNVQXRP:TQVQL:SAIS-AA17-LYL:LKNYQ:TLEDH:LAXKXE, KIPKAXX:VPEEL:SSLS-AA17-LFF:LKVYP:DMTVE:GXGXR, SIPKAXX:VPEEL:SSLS-AA17-LFF:LKVYP:EMTVE:GXGXR, HVTKPTX:VPEKL:SSLS-AA17-LFF:LKVYP:NMTVE:SXGXH, YVPKPXX:VPEKL:SSLS-AA17-LFF:LKVYP:NMTVE:SXGXH, TVPKPXX:VPEQL:SSLS-AA17-LFF:LKVYP:NMTVE:AXGXH, AVPKAXX:VPEKL:SSLS-AA17-LFF:LKVYP:NMTVE:AXGXH, KVGKAXX:VPEKL:SSLS-AA17-LFF:LKVYP:EGMSTVE:XGXR, KASKAXX:VPEKL:SSLS-AA17-LFF:LKVYP:GMTVE:EXGXR, GSAGPXX:VPEKM:SSLS-AA17-LFF:LKVYP:GMTVE:RXGXS, AAPASXX:VPERL:SSLS-AA17-LFF:LKVYP:DMTVE:AXGXR, STPPTXX:VPERL:SSLS-AA17-LFF:LKVYP:DMTVE:SXGXR, HVPKPXX:VPEKL:SSLS-AA17-LFF:LKVYP:NMTVE:SXGXH, RVPSTXX:VPEKT:SSLS-AA17-LFF:LKVYP:MITVE:XGXL, ASAAPXX:VPEAL:SSLS-AA17-LFF:LKVYP:MITVE:XKXS, ASASPXX:VPEDL:SSLS-AA17-LFF:LKVYP:MITVE:XKXS, ASASPXX:VPEDL:SSLS-AA17-LFF:LKVYP:MVTVE:XKXS, KIPKAXX:VPTEL:SSLS-AA17-LFF:LKVYP:DMVVE:GXGXR, SIPKAXX:VPTEL:SSLS-AA17-LFF:LKVYP:EMVVE:GXGXR, HVTKPTX:APTKL:SSLS-AA17-LFF:LKVYP:NMVVR:SXGXH, YVPKPXX:APTKL:SSLS-AA17-LFF:LKVYP:NMVVR:SXGXH, TVPKPXX:APTQL:SSLS-AA17-LFF:LKVYP:NMVVR:AXGXH, AVPKAXX:APTKL:SSLS-AA17-LFF:LKVYP:NMVVK:AXGXH, KVGKAXX:VPTKL:SSLS-AA17-LFF:LKVYP:EGMSVAE:XGXR, KASKAXX:VPTKL:SSLS-AA17-LFF:LKVYP:GMAVS:EXGXR, GSAGPXX:TPTKM:SSLS-AA17-LFF:LKVYP:GMVVD:RXGXS, AAPASXX:VPARL:SSLS-AA17-LFF:LKVYP:DMVVE:AXGXR, STPPTXX:VPTRL:SSLS-AA17-LFF:LKVYP:DMVVE:SXGXR, HVPKPXX:APTKL:SSLS-AA17-LFF:LKVYP:NMVVR:SXGXH, RVPSTXX:APVKT:SSLS-AA17-LFF:LKVYP:MIVEE:XGXL, ASAAPXX:VPQAL:SSLS-AA17-LFF:LKVYP:MIVRS:XKXS, ASASPXX:VSQDL:SSLS-AA17-LFF:LKVYP:MIVKS:XKXS, ASASPXX:VPQDL:SSLS-AA17-LFF:LKVYP:MVVKS:XKXS, NDEGLEX:VPTEE:SSLS-AA17-LFF:LKVYP:FLQHN:KXEXR, NDEGLEX:VPTGQ:SSLS-AA17-LFF:LKVYP:LEEHS:QXEXR, SSVKXQP:SRVHH:SSLS-AA17-LFF:LKVYP:RLEEH:LEXAXA, RNVQXRP:TQVQL:SSLS-AA17-LFF:LKVYP:TLEDH:LAXKXE, KIPKAXX:APTEL:NAIS-AA17-LYF:LKKYR:DMVVR:GXGXR, GIPEPXX:APTKM:NAIS-AA17-LYF:LKKYR:NMVVR:SXAXR, SIPKAXX:APTEL:NAIS-AA17-LYF:LKKYR:EMVVR:GXGXR, AVPKAXX:APTKL:NAIS-AA17-LYF:LKKYR:NMVVR:AXGXH, KVGKAXX:APTKL:NAIS-AA17-LYF:LKKYR:EGMSVVR:XGXR, KASKAXX:APTKL:NAIS-AA17-LYF:LKKYR:GMVVR:EXGXR, GSAGPXX:APTKM:NAIS-AA17-LYF:LKKYR:GMVVR:RXGXS, AAPASXX:APTRL:NAIS-AA17-LYF:LKKYR:DMVVR:AXGXR, STPPTXX:APTRL:NAIS-AA17-LYF:LKKYR:DMVVR:SXGXR, RVPSTXX:APTKT:NAIS-AA17-LYF:LKKYR:MIVVR:XGXL, ASAAPXX:APTAL:NAIS-AA17-LYF:LKKYR:MIVVR:XKXS, ASASPXX:APTDL:NAIS-AA17-LYF:LKKYR:MIVVR:XKXS, ASASPXX:APTDL:NAIS-AA17-LYF:LKKYR:MVVVR:XKXS, KIPKAXX:VPTEL:NAIS-AA17-LYF:LKKYR:DMVVE:GXGXR, GIPEPXX:VPEKM:NAIS-AA17-LYF:LKKYR:NMTVE:SXAXR, SIPKAXX:VPTEL:NAIS-AA17-LYF:LKKYR:EMVVE:GXGXR, AVPKAXX:APTKL:NAIS-AA17-LYF:LKKYR:NMVVK:AXGXH, KVGKAXX:VPTKL:NAIS-AA17-LYF:LKKYR:EGMSVAE:XGXR, KASKAXX:VPTKL:NAIS-AA17-LYF:LKKYR:GMAVS:EXGXR, GSAGPXX:TPTKM:NAIS-AA17-LYF:LKKYR:GMVVD:RXGXS, AAPASXX:VPARL:NAIS-AA17-LYF:LKKYR:DMVVE:AXGXR, STPPTXX:VPTRL:NAIS-AA17-LYF:LKKYR:DMVVE:SXGXR, RVPSTXX:APVKT:NAIS-AA17-LYF:LKKYR:MIVEE:XGXL, ASAAPXX:VPQAL:NAIS-AA17-LYF:LKKYR:MIVRS:XKXS, ASASPXX:VSQDL:NAIS-AA17-LYF:LKKYR:MIVKS:XKXS, ASASPXX:VPQDL:NAIS-AA17-LYF:LKKYR:MVVKS:XKXS, NDEGLEX:VPTEE:NAIS-AA17-LYF:LKKYR:FLQHN:KXEXR, NDEGLEX:VPTGQ:NAIS-AA17-LYF:LKKYR:LEEHS:QXEXR, SSVKXQP:SRVHH:NAIS-AA17-LYF:LKKYR:RLEEH:LEXAXA, RNVQXRP:TQVQL:NAIS-AA17-LYF:LKKYR:TLEDH:LAXKXE, KIPKAXX:APTEL:SATS-AA17-LYY:LRKHR:DMVVK:GXGXR, GIPEPXX:APTKM:SATS-AA17-LYY:LRKHR:NMVVK:SXAXR, SIPKAXX:APTEL:SATS-AA17-LYY:LRKHR:EMVVK:GXGXR, HVTKPTX:APTKL:SATS-AA17-LYY:LRKHR:NMVVK:SXGXH, YVPKPXX:APTKL:SATS-AA17-LYY:LRKHR:NMVVK:SXGXH, TVPKPXX:APTQL:SATS-AA17-LYY:LRKHR:NMVVK:AXGXH, KVGKAXX:APTKL:SATS-AA17-LYY:LRKHR:EGMSVVK:XGXR, KASKAXX:APTKL:SATS-AA17-LYY:LRKHR:GMVVK:EXGXR, GSAGPXX:APTKM:SATS-AA17-LYY:LRKHR:GMVVK:RXGXS, AAPASXX:APTRL:SATS-AA17-LYY:LRKHR:DMVVK:AXGXR, STPPTXX:APTRL:SATS-AA17-LYY:LRKHR:DMVVK:SXGXR, HVPKPXX:APTKL:SATS-AA17-LYY:LRKHR:NMVVK:SXGXH, RVPSTXX:APTKT:SATS-AA17-LYY:LRKHR:MIVVK:XGXL, ASAAPXX:APTAL:SATS-AA17-LYY:LRKHR:MIVVK:XKXS, ASASPXX:APTDL:SATS-AA17-LYY:LRKHR:MIVVK:XKXS, ASASPXX:APTDL:SATS-AA17-LYY:LRKHR:MVVVK:XKXS, KIPKAXX:VPTEL:SATS-AA17-LYY:LRKHR:DMVVE:GXGXR, GIPEPXX:VPEKM:SATS-AA17-LYY:LRKHR:NMTVE:SXAXR, SIPKAXX:VPTEL:SATS-AA17-LYY:LRKHR:EMVVE:GXGXR, HVTKPTX:APTKL:SATS-AA17-LYY:LRKHR:NMVVR:SXGXH, YVPKPXX:APTKL:SATS-AA17-LYY:LRKHR:NMVVR:SXGXH, TVPKPXX:APTQL:SATS-AA17-LYY:LRKHR:NMVVR:AXGXH, KVGKAXX:VPTKL:SATS-AA17-LYY:LRKHR:EGMSVAE:XGXR, KASKAXX:VPTKL:SATS-AA17-LYY:LRKHR:GMAVS:EXGXR, GSAGPXX:TPTKM:SATS-AA17-LYY:LRKHR:GMVVD:RXGXS, AAPASXX:VPARL:SATS-AA17-LYY:LRKHR:DMVVE:AXGXR, STPPTXX:VPTRL:SATS-AA17-LYY:LRKHR:DMVVE:SXGXR, HVPKPXX:APTKL:SATS-AA17-LYY:LRKHR:NMVVR:SXGXH, RVPSTXX:APVKT:SATS-AA17-LYY:LRKHR:MIVEE:XGXL, ASAAPXX:VPQAL:SATS-AA17-LYY:LRKHR:MIVRS:XKXS, ASASPXX:VSQDL:SATS-AA17-LYY:LRKHR:MIVKS:XKXS, ASASPXX:VPQDL:SATS-AA17-LYY:LRKHR:MVVKS:XKXS, NDEGLEX:VPTEE:SATS-AA17-LYY:LRKHR:FLQHN:KXEXR, NDEGLEX:VPTGQ:SATS-AA17-LYY:LRKHR:LEEHS:QXEXR, SSVKXQP:SRVHH:SATS-AA17-LYY:LRKHR:RLEEH:LEXAXA, RNVQXRP:TQVQL:SATS-AA17-LYY:LRKHR:TLEDH:LAXKXE, KIPKAXX:VPTEL:SPIS-AA17-LYK:LKYHY:DMVAE:GXGXR, GIPEPXX:VPTKM:SPIS-AA17-LYK:LKYHY:NMVAE:SXAXR, SIPKAXX:VPTEL:SPIS-AA17-LYK:LKYHY:EMVAE:GXGXR, HVTKPTX:VPTKL:SPIS-AA17-LYK:LKYHY:NMVAE:SXGXH, YVPKPXX:VPTKL:SPIS-AA17-LYK:LKYHY:NMVAE:SXGXH, TVPKPXX:VPTQL:SPIS-AA17-LYK:LKYHY:NMVAE:AXGXH, AVPKAXX:VPTKL:SPIS-AA17-LYK:LKYHY:NMVAE:AXGXH, KASKAXX:VPTKL:SPIS-AA17-LYK:LKYHY:GMVAE:EXGXR, GSAGPXX:VPTKM:SPIS-AA17-LYK:LKYHY:GMVAE:RXGXS, AAPASXX:VPTRL:SPIS-AA17-LYK:LKYHY:DMVAE:AXGXR, STPPTXX:VPTRL:SPIS-AA17-LYK:LKYHY:DMVAE:SXGXR, HVPKPXX:VPTKL:SPIS-AA17-LYK:LKYHY:NMVAE:SXGXH, RVPSTXX:VPTKT:SPIS-AA17-LYK:LKYHY:MIVAE:XGXL, ASAAPXX:VPTAL:SPIS-AA17-LYK:LKYHY:MIVAE:XKXS, ASASPXX:VPTDL:SPIS-AA17-LYK:LKYHY:MIVAE:XKXS, ASASPXX:VPTDL:SPIS-AA17-LYK:LKYHY:MVVAE:XKXS, KIPKAXX:VPTEL:SPIS-AA17-LYK:LKYHY:DMVVE:GXGXR, GIPEPXX:VPEKM:SPIS-AA17-LYK:LKYHY:NMTVE:SXAXR, SIPKAXX:VPTEL:SPIS-AA17-LYK:LKYHY:EMVVE:GXGXR, HVTKPTX:APTKL:SPIS-AA17-LYK:LKYHY:NMVVR:SXGXH, YVPKPXX:APTKL:SPIS-AA17-LYK:LKYHY:NMVVR:SXGXH, TVPKPXX:APTQL:SPIS-AA17-LYK:LKYHY:NMVVR:AXGXH, AVPKAXX:APTKL:SPIS-AA17-LYK:LKYHY:NMVVK:AXGXH, KASKAXX:VPTKL:SPIS-AA17-LYK:LKYHY:GMAVS:EXGXR, GSAGPXX:TPTKM:SPIS-AA17-LYK:LKYHY:GMVVD:RXGXS, AAPASXX:VPARL:SPIS-AA17-LYK:LKYHY:DMVVE:AXGXR, STPPTXX:VPTRL:SPIS-AA17-LYK:LKYHY:DMVVE:SXGXR, HVPKPXX:APTKL:SPIS-AA17-LYK:LKYHY:NMVVR:SXGXH, RVPSTXX:APVKT:SPIS-AA17-LYK:LKYHY:MIVEE:XGXL, ASAAPXX:VPQAL:SPIS-AA17-LYK:LKYHY:MIVRS:XKXS, ASASPXX:VSQDL:SPIS-AA17-LYK:LKYHY:MIVKS:XKXS, ASASPXX:VPQDL:SPIS-AA17-LYK:LKYHY:MVVKS:XKXS, NDEGLEX:VPTEE:SPIS-AA17-LYK:LKYHY:FLQHN:KXEXR, NDEGLEX:VPTGQ:SPIS-AA17-LYK:LKYHY:LEEHS:QXEXR, SSVKXQP:SRVHH:SPIS-AA17-LYK:LKYHY:RLEEH:LEXAXA, RNVQXRP:TQVQL:SPIS-AA17-LYK:LKYHY:TLEDH:LAXKXE, KIPKAXX:VPTEL:EPIS-AA17-LYL:KFKYE:DMAVS:GXGXR, GIPEPXX:VPTKM:EPIS-AA17-LYL:KFKYE:NMAVS:SXAXR, SIPKAXX:VPTEL:EPIS-AA17-LYL:KFKYE:EMAVS:GXGXR, HVTKPTX:VPTKL:EPIS-AA17-LYL:KFKYE:NMAVS:SXGXH, YVPKPXX:VPTKL:EPIS-AA17-LYL:KFKYE:NMAVS:SXGXH, TVPKPXX:VPTQL:EPIS-AA17-LYL:KFKYE:NMAVS:AXGXH, AVPKAXX:VPTKL:EPIS-AA17-LYL:KFKYE:NMAVS:AXGXH, KVGKAXX:VPTKL:EPIS-AA17-LYL:KFKYE:EGMSAVS:XGXR, GSAGPXX:VPTKM:EPIS-AA17-LYL:KFKYE:GMAVS:RXGXS, AAPASXX:VPTRL:EPIS-AA17-LYL:KFKYE:DMAVS:AXGXR, STPPTXX:VPTRL:EPIS-AA17-LYL:KFKYE:DMAVS:SXGXR, HVPKPXX:VPTKL:EPIS-AA17-LYL:KFKYE:NMAVS:SXGXH, RVPSTXX:VPTKT:EPIS-AA17-LYL:KFKYE:MIAVS:XGXL, ASAAPXX:VPTAL:EPIS-AA17-LYL:KFKYE:MIAVS:XKXS, ASASPXX:VPTDL:EPIS-AA17-LYL:KFKYE:MIAVS:XKXS, ASASPXX:VPTDL:EPIS-AA17-LYL:KFKYE:MVAVS:XKXS, KIPKAXX:VPTEL:EPIS-AA17-LYL:KFKYE:DMVVE:GXGXR, GIPEPXX:VPEKM:EPIS-AA17-LYL:KFKYE:NMTVE:SXAXR, SIPKAXX:VPTEL:EPIS-AA17-LYL:KFKYE:EMVVE:GXGXR, HVTKPTX:APTKL:EPIS-AA17-LYL:KFKYE:NMVVR:SXGXH, YVPKPXX:APTKL:EPIS-AA17-LYL:KFKYE:NMVVR:SXGXH, TVPKPXX:APTQL:EPIS-AA17-LYL:KFKYE:NMVVR:AXGXH, AVPKAXX:APTKL:EPIS-AA17-LYL:KFKYE:NMVVK:AXGXH, KVGKAXX:VPTKL:EPIS-AA17-LYL:KFKYE:EGMSVAE:XGXR, GSAGPXX:TPTKM:EPIS-AA17-LYL:KFKYE:GMVVD:RXGXS, AAPASXX:VPARL:EPIS-AA17-LYL:KFKYE:DMVVE:AXGXR, STPPTXX:VPTRL:EPIS-AA17-LYL:KFKYE:DMVVE:SXGXR, HVPKPXX:APTKL:EPIS-AA17-LYL:KFKYE:NMVVR:SXGXH, RVPSTXX:APVKT:EPIS-AA17-LYL:KFKYE:MIVEE:XGXL, ASAAPXX:VPQAL:EPIS-AA17-LYL:KFKYE:MIVRS:XKXS, ASASPXX:VSQDL:EPIS-AA17-LYL:KFKYE:MIVKS:XKXS, ASASPXX:VPQDL:EPIS-AA17-LYL:KFKYE:MVVKS:XKXS, NDEGLEX:VPTEE:EPIS-AA17-LYL:KFKYE:FLQHN:KXEXR, NDEGLEX:VPTGQ:EPIS-AA17-LYL:KFKYE:LEEHS:QXEXR, SSVKXQP:SRVHH:EPIS-AA17-LYL:KFKYE:RLEEH:LEXAXA, RNVQXRP:TQVQL:EPIS-AA17-LYL:KFKYE:TLEDH:LAXKXE, KIPKAXX:TPTEL:SPIN-AA17-LYF:YGKIP:DMVVD:GXGXR, GIPEPXX:TPTKM:SPIN-AA17-LYF:YGKIP:NMVVD:SXAXR, SIPKAXX:TPTEL:SPIN-AA17-LYF:YGKIP:EMVVD:GXGXR, HVTKPTX:TPTKL:SPIN-AA17-LYF:YGKIP:NMVVD:SXGXH, YVPKPXX:TPTKL:SPIN-AA17-LYF:YGKIP:NMVVD:SXGXH, TVPKPXX:TPTQL:SPIN-AA17-LYF:YGKIP:NMVVD:AXGXH, AVPKAXX:TPTKL:SPIN-AA17-LYF:YGKIP:NMVVD:AXGXH, KVGKAXX:TPTKL:SPIN-AA17-LYF:YGKIP:EGMSVVD:XGXR, KASKAXX:TPTKL:SPIN-AA17-LYF:YGKIP:GMVVD:EXGXR, AAPASXX:TPTRL:SPIN-AA17-LYF:YGKIP:DMVVD:AXGXR, STPPTXX:TPTRL:SPIN-AA17-LYF:YGKIP:DMVVD:SXGXR, HVPKPXX:TPTKL:SPIN-AA17-LYF:YGKIP:NMVVD:SXGXH, RVPSTXX:TPTKT:SPIN-AA17-LYF:YGKIP:MIVVD:XGXL, ASAAPXX:TPTAL:SPIN-AA17-LYF:YGKIP:MIVVD:XKXS, ASASPXX:TPTDL:SPIN-AA17-LYF:YGKIP:MIVVD:XKXS, ASASPXX:TPTDL:SPIN-AA17-LYF:YGKIP:MVVVD:XKXS, KIPKAXX:VPTEL:SPIN-AA17-LYF:YGKIP:DMVVE:GXGXR, GIPEPXX:VPEKM:SPIN-AA17-LYF:YGKIP:NMTVE:SXAXR, SIPKAXX:VPTEL:SPIN-AA17-LYF:YGKIP:EMVVE:GXGXR, HVTKPTX:APTKL:SPIN-AA17-LYF:YGKIP:NMVVR:SXGXH, YVPKPXX:APTKL:SPIN-AA17-LYF:YGKIP:NMVVR:SXGXH, TVPKPXX:APTQL:SPIN-AA17-LYF:YGKIP:NMVVR:AXGXH, AVPKAXX:APTKL:SPIN-AA17-LYF:YGKIP:NMVVK:AXGXH, KVGKAXX:VPTKL:SPIN-AA17-LYF:YGKIP:EGMSVAE:XGXR, KASKAXX:VPTKL:SPIN-AA17-LYF:YGKIP:GMAVS:EXGXR, AAPASXX:VPARL:SPIN-AA17-LYF:YGKIP:DMVVE:AXGXR, STPPTXX:VPTRL:SPIN-AA17-LYF:YGKIP:DMVVE:SXGXR, HVPKPXX:APTKL:SPIN-AA17-LYF:YGKIP:NMVVR:SXGXH, RVPSTXX:APVKT:SPIN-AA17-LYF:YGKIP:MIVEE:XGXL, ASAAPXX:VPQAL:SPIN-AA17-LYF:YGKIP:MIVRS:XKXS, ASASPXX:VSQDL:SPIN-AA17-LYF:YGKIP:MIVKS:XKXS, ASASPXX:VPQDL:SPIN-AA17-LYF:YGKIP:MVVKS:XKXS, NDEGLEX:VPTEE:SPIN-AA17-LYF:YGKIP:FLQHN:KXEXR, NDEGLEX:VPTGQ:SPIN-AA17-LYF:YGKIP:LEEHS:QXEXR, SSVKXQP:SRVHH:SPIN-AA17-LYF:YGKIP:RLEEH:LEXAXA, RNVQXRP:TQVQL:SPIN-AA17-LYF:YGKIP:TLEDH:LAXKXE, KIPKAXX:VPAEL:SPIS-AA17-LYI:YKQYE:DMVVE:GXGXR, GIPEPXX:VPAKM:SPIS-AA17-LYI:YKQYE:NMVVE:SXAXR, SIPKAXX:VPAEL:SPIS-AA17-LYI:YKQYE:EMVVE:GXGXR, HVTKPTX:VPAKL:SPIS-AA17-LYI:YKQYE:NMVVE:SXGXH, YVPKPXX:VPAKL:SPIS-AA17-LYI:YKQYE:NMVVE:SXGXH, TVPKPXX:VPAQL:SPIS-AA17-LYI:YKQYE:NMVVE:AXGXH, AVPKAXX:VPAKL:SPIS-AA17-LYI:YKQYE:NMVVE:AXGXH, KVGKAXX:VPAKL:SPIS-AA17-LYI:YKQYE:EGMSVVE:XGXR, KASKAXX:VPAKL:SPIS-AA17-LYI:YKQYE:GMVVE:EXGXR, GSAGPXX:VPAKM:SPIS-AA17-LYI:YKQYE:GMVVE:RXGXS, STPPTXX:VPARL:SPIS-AA17-LYI:YKQYE:DMVVE:SXGXR, HVPKPXX:VPAKL:SPIS-AA17-LYI:YKQYE:NMVVE:SXGXH, RVPSTXX:VPAKT:SPIS-AA17-LYI:YKQYE:MIVVE:XGXL, ASAAPXX:VPAAL:SPIS-AA17-LYI:YKQYE:MIVVE:XKXS, ASASPXX:VPADL:SPIS-AA17-LYI:YKQYE:MIVVE:XKXS, ASASPXX:VPADL:SPIS-AA17-LYI:YKQYE:MVVVE:XKXS, KIPKAXX:VPTEL:SPIS-AA17-LYI:YKQYE:DMVVE:GXGXR, GIPEPXX:VPEKM:SPIS-AA17-LYI:YKQYE:NMTVE:SXAXR, SIPKAXX:VPTEL:SPIS-AA17-LYI:YKQYE:EMVVE:GXGXR, HVTKPTX:APTKL:SPIS-AA17-LYI:YKQYE:NMVVR:SXGXH, YVPKPXX:APTKL:SPIS-AA17-LYI:YKQYE:NMVVR:SXGXH, TVPKPXX:APTQL:SPIS-AA17-LYI:YKQYE:NMVVR:AXGXH, AVPKAXX:APTKL:SPIS-AA17-LYI:YKQYE:NMVVK:AXGXH, KVGKAXX:VPTKL:SPIS-AA17-LYI:YKQYE:EGMSVAE:XGXR, KASKAXX:VPTKL:SPIS-AA17-LYI:YKQYE:GMAVS:EXGXR, GSAGPXX:TPTKM:SPIS-AA17-LYI:YKQYE:GMVVD:RXGXS, STPPTXX:VPTRL:SPIS-AA17-LYI:YKQYE:DMVVE:SXGXR, HVPKPXX:APTKL:SPIS-AA17-LYI:YKQYE:NMVVR:SXGXH, RVPSTXX:APVKT:SPIS-AA17-LYI:YKQYE:MIVEE:XGXL, ASAAPXX:VPQAL:SPIS-AA17-LYI:YKQYE:MIVRS:XKXS, ASASPXX:VSQDL:SPIS-AA17-LYI:YKQYE:MIVKS:XKXS, ASASPXX:VPQDL:SPIS-AA17-LYI:YKQYE:MVVKS:XKXS, NDEGLEX:VPTEE:SPIS-AA17-LYI:YKQYE:FLQHN:KXEXR, NDEGLEX:VPTGQ:SPIS-AA17-LYI:YKQYE:LEEHS:QXEXR, SSVKXQP:SRVHH:SPIS-AA17-LYI:YKQYE:RLEEH:LEXAXA, RNVQXRP:TQVQL:SPIS-AA17-LYI:YKQYE:TLEDH:LAXKXE, KIPKAXX:VPTEL:SPIS-AA17-LFI:YKQYE:DMVVE:GXGXR, GIPEPXX:VPTKM:SPIS-AA17-LFI:YKQYE:NMVVE:SXAXR, SIPKAXX:VPTEL:SPIS-AA17-LFI:YKQYE:EMVVE:GXGXR, HVTKPTX:VPTKL:SPIS-AA17-LFI:YKQYE:NMVVE:SXGXH, YVPKPXX:VPTKL:SPIS-AA17-LFI:YKQYE:NMVVE:SXGXH, TVPKPXX:VPTQL:SPIS-AA17-LFI:YKQYE:NMVVE:AXGXH, AVPKAXX:VPTKL:SPIS-AA17-LFI:YKQYE:NMVVE:AXGXH, KVGKAXX:VPTKL:SPIS-AA17-LFI:YKQYE:EGMSVVE:XGXR, KASKAXX:VPTKL:SPIS-AA17-LFI:YKQYE:GMVVE:EXGXR, GSAGPXX:VPTKM:SPIS-AA17-LFI:YKQYE:GMVVE:RXGXS, AAPASXX:VPTRL:SPIS-AA17-LFI:YKQYE:DMVVE:AXGXR, HVPKPXX:VPTKL:SPIS-AA17-LFI:YKQYE:NMVVE:SXGXH, RVPSTXX:VPTKT:SPIS-AA17-LFI:YKQYE:MIVVE:XGXL, ASAAPXX:VPTAL:SPIS-AA17-LFI:YKQYE:MIVVE:XKXS, ASASPXX:VPTDL:SPIS-AA17-LFI:YKQYE:MIVVE:XKXS, ASASPXX:VPTDL:SPIS-AA17-LFI:YKQYE:MVVVE:XKXS, GIPEPXX:VPEKM:SPIS-AA17-LFI:YKQYE:NMTVE:SXAXR, HVTKPTX:APTKL:SPIS-AA17-LFI:YKQYE:NMVVR:SXGXH, YVPKPXX:APTKL:SPIS-AA17-LFI:YKQYE:NMVVR:SXGXH, TVPKPXX:APTQL:SPIS-AA17-LFI:YKQYE:NMVVR:AXGXH, AVPKAXX:APTKL:SPIS-AA17-LFI:YKQYE:NMVVK:AXGXH, KVGKAXX:VPTKL:SPIS-AA17-LFI:YKQYE:EGMSVAE:XGXR, KASKAXX:VPTKL:SPIS-AA17-LFI:YKQYE:GMAVS:EXGXR, GSAGPXX:TPTKM:SPIS-AA17-LFI:YKQYE:GMVVD:RXGXS, AAPASXX:VPARL:SPIS-AA17-LFI:YKQYE:DMVVE:AXGXR, HVPKPXX:APTKL:SPIS-AA17-LFI:YKQYE:NMVVR:SXGXH, RVPSTXX:APVKT:SPIS-AA17-LFI:YKQYE:MIVEE:XGXL, ASAAPXX:VPQAL:SPIS-AA17-LFI:YKQYE:MIVRS:XKXS, ASASPXX:VSQDL:SPIS-AA17-LFI:YKQYE:MIVKS:XKXS, ASASPXX:VPQDL:SPIS-AA17-LFI:YKQYE:MVVKS:XKXS, NDEGLEX:VPTEE:SPIS-AA17-LFI:YKQYE:FLQHN:KXEXR, NDEGLEX:VPTGQ:SPIS-AA17-LFI:YKQYE:LEEHS:QXEXR, SSVKXQP:SRVHH:SPIS-AA17-LFI:YKQYE:RLEEH:LEXAXA, RNVQXRP:TQVQL:SPIS-AA17-LFI:YKQYE:TLEDH:LAXKXE, KIPKAXX:APVEL:KPLS-AA17-LYV:DHHKD:DMVEE:GXGXR, GIPEPXX:APVKM:KPLS-AA17-LYV:DHHKD:NMVEE:SXAXR, SIPKAXX:APVEL:KPLS-AA17-LYV:DHHKD:EMVEE:GXGXR, HVTKPTX:APVKL:KPLS-AA17-LYV:DHHKD:NMVEE:SXGXH, YVPKPXX:APVKL:KPLS-AA17-LYV:DHHKD:NMVEE:SXGXH, TVPKPXX:APVQL:KPLS-AA17-LYV:DHHKD:NMVEE:AXGXH, AVPKAXX:APVKL:KPLS-AA17-LYV:DHHKD:NMVEE:AXGXH, KVGKAXX:APVKL:KPLS-AA17-LYV:DHHKD:EGMSVEE:XGXR, KASKAXX:APVKL:KPLS-AA17-LYV:DHHKD:GMVEE:EXGXR, GSAGPXX:APVKM:KPLS-AA17-LYV:DHHKD:GMVEE:RXGXS, AAPASXX:APVRL:KPLS-AA17-LYV:DHHKD:DMVEE:AXGXR, STPPTXX:APVRL:KPLS-AA17-LYV:DHHKD:DMVEE:SXGXR, HVPKPXX:APVKL:KPLS-AA17-LYV:DHHKD:NMVEE:SXGXH, ASAAPXX:APVAL:KPLS-AA17-LYV:DHHKD:MIVEE:XKXS, ASASPXX:APVDL:KPLS-AA17-LYV:DHHKD:MIVEE:XKXS, ASASPXX:APVDL:KPLS-AA17-LYV:DHHKD:MVVEE:XKXS, KIPKAXX:VPTEL:KPLS-AA17-LYV:DHHKD:DMVVE:GXGXR, GIPEPXX:VPEKM:KPLS-AA17-LYV:DHHKD:NMTVE:SXAXR, SIPKAXX:VPTEL:KPLS-AA17-LYV:DHHKD:EMVVE:GXGXR, HVTKPTX:APTKL:KPLS-AA17-LYV:DHHKD:NMVVR:SXGXH, YVPKPXX:APTKL:KPLS-AA17-LYV:DHHKD:NMVVR:SXGXH, TVPKPXX:APTQL:KPLS-AA17-LYV:DHHKD:NMVVR:AXGXH, AVPKAXX:APTKL:KPLS-AA17-LYV:DHHKD:NMVVK:AXGXH, KVGKAXX:VPTKL:KPLS-AA17-LYV:DHHKD:EGMSVAE:XGXR, KASKAXX:VPTKL:KPLS-AA17-LYV:DHHKD:GMAVS:EXGXR, GSAGPXX:TPTKM:KPLS-AA17-LYV:DHHKD:GMVVD:RXGXS, AAPASXX:VPARL:KPLS-AA17-LYV:DHHKD:DMVVE:AXGXR, STPPTXX:VPTRL:KPLS-AA17-LYV:DHHKD:DMVVE:SXGXR, HVPKPXX:APTKL:KPLS-AA17-LYV:DHHKD:NMVVR:SXGXH, ASAAPXX:VPQAL:KPLS-AA17-LYV:DHHKD:MIVRS:XKXS, ASASPXX:VSQDL:KPLS-AA17-LYV:DHHKD:MIVKS:XKXS, ASASPXX:VPQDL:KPLS-AA17-LYV:DHHKD:MVVKS:XKXS, NDEGLEX:VPTEE:KPLS-AA17-LYV:DHHKD:FLQHN:KXEXR, NDEGLEX:VPTGQ:KPLS-AA17-LYV:DHHKD:LEEHS:QXEXR, SSVKXQP:SRVHH:KPLS-AA17-LYV:DHHKD:RLEEH:LEXAXA, RNVQXRP:TQVQL:KPLS-AA17-LYV:DHHKD:TLEDH:LAXKXE, KIPKAXX:VPQEL:EPLP-AA17-VYY:EQLSN:DMVRS:GXGXR, GIPEPXX:VPQKM:EPLP-AA17-VYY:EQLSN:NMVRS:SXAXR, SIPKAXX:VPQEL:EPLP-AA17-VYY:EQLSN:EMVRS:GXGXR, HVTKPTX:VPQKL:EPLP-AA17-VYY:EQLSN:NMVRS:SXGXH, YVPKPXX:VPQKL:EPLP-AA17-VYY:EQLSN:NMVRS:SXGXH, TVPKPXX:VPQQL:EPLP-AA17-VYY:EQLSN:NMVRS:AXGXH, AVPKAXX:VPQKL:EPLP-AA17-VYY:EQLSN:NMVRS:AXGXH, KVGKAXX:VPQKL:EPLP-AA17-VYY:EQLSN:EGMSVRS:XGXR, KASKAXX:VPQKL:EPLP-AA17-VYY:EQLSN:GMVRS:EXGXR, GSAGPXX:VPQKM:EPLP-AA17-VYY:EQLSN:GMVRS:RXGXS, AAPASXX:VPQRL:EPLP-AA17-VYY:EQLSN:DMVRS:AXGXR, STPPTXX:VPQRL:EPLP-AA17-VYY:EQLSN:DMVRS:SXGXR, HVPKPXX:VPQKL:EPLP-AA17-VYY:EQLSN:NMVRS:SXGXH, RVPSTXX:VPQKT:EPLP-AA17-VYY:EQLSN:MIVRS:XGXL, ASASPXX:VPQDL:EPLP-AA17-VYY:EQLSN:MIVRS:XKXS, ASASPXX:VPQDL:EPLP-AA17-VYY:EQLSN:MVVRS:XKXS, KIPKAXX:VPTEL:EPLP-AA17-VYY:EQLSN:DMVVE:GXGXR, GIPEPXX:VPEKM:EPLP-AA17-VYY:EQLSN:NMTVE:SXAXR, SIPKAXX:VPTEL:EPLP-AA17-VYY:EQLSN:EMVVE:GXGXR, HVTKPTX:APTKL:EPLP-AA17-VYY:EQLSN:NMVVR:SXGXH, YVPKPXX:APTKL:EPLP-AA17-VYY:EQLSN:NMVVR:SXGXH, TVPKPXX:APTQL:EPLP-AA17-VYY:EQLSN:NMVVR:AXGXH, AVPKAXX:APTKL:EPLP-AA17-VYY:EQLSN:NMVVK:AXGXH, KVGKAXX:VPTKL:EPLP-AA17-VYY:EQLSN:EGMSVAE:XGXR, KASKAXX:VPTKL:EPLP-AA17-VYY:EQLSN:GMAVS:EXGXR, GSAGPXX:TPTKM:EPLP-AA17-VYY:EQLSN:GMVVD:RXGXS, AAPASXX:VPARL:EPLP-AA17-VYY:EQLSN:DMVVE:AXGXR, STPPTXX:VPTRL:EPLP-AA17-VYY:EQLSN:DMVVE:SXGXR, HVPKPXX:APTKL:EPLP-AA17-VYY:EQLSN:NMVVR:SXGXH, RVPSTXX:APVKT:EPLP-AA17-VYY:EQLSN:MIVEE:XGXL, ASASPXX:VSQDL:EPLP-AA17-VYY:EQLSN:MIVKS:XKXS, ASASPXX:VPQDL:EPLP-AA17-VYY:EQLSN:MVVKS:XKXS, NDEGLEX:VPTEE:EPLP-AA17-VYY:EQLSN:FLQHN:KXEXR, NDEGLEX:VPTGQ:EPLP-AA17-VYY:EQLSN:LEEHS:QXEXR, SSVKXQP:SRVHH:EPLP-AA17-VYY:EQLSN:RLEEH:LEXAXA, RNVQXRP:TQVQL:EPLP-AA17-VYY:EQLSN:TLEDH:LAXKXE, KIPKAXX:VSQEL:EPLT-AA17-LYY:EQLSN:DMVKS:GXGXR, GIPEPXX:VSQKM:EPLT-AA17-LYY:EQLSN:NMVKS:SXAXR, SIPKAXX:VSQEL:EPLT-AA17-LYY:EQLSN:EMVKS:GXGXR, HVTKPTX:VSQKL:EPLT-AA17-LYY:EQLSN:NMVKS:SXGXH, YVPKPXX:VSQKL:EPLT-AA17-LYY:EQLSN:NMVKS:SXGXH, TVPKPXX:VSQQL:EPLT-AA17-LYY:EQLSN:NMVKS:AXGXH, AVPKAXX:VSQKL:EPLT-AA17-LYY:EQLSN:NMVKS:AXGXH, KVGKAXX:VSQKL:EPLT-AA17-LYY:EQLSN:EGMSVKS:XGXR, KASKAXX:VSQKL:EPLT-AA17-LYY:EQLSN:GMVKS:EXGXR, GSAGPXX:VSQKM:EPLT-AA17-LYY:EQLSN:GMVKS:RXGXS, AAPASXX:VSQRL:EPLT-AA17-LYY:EQLSN:DMVKS:AXGXR, STPPTXX:VSQRL:EPLT-AA17-LYY:EQLSN:DMVKS:SXGXR, HVPKPXX:VSQKL:EPLT-AA17-LYY:EQLSN:NMVKS:SXGXH, RVPSTXX:VSQKT:EPLT-AA17-LYY:EQLSN:MIVKS:XGXL, ASAAPXX:VSQAL:EPLT-AA17-LYY:EQLSN:MIVKS:XKXS, ASASPXX:VSQDL:EPLT-AA17-LYY:EQLSN:MVVKS:XKXS, KIPKAXX:VPTEL:EPLT-AA17-LYY:EQLSN:DMVVE:GXGXR, GIPEPXX:VPEKM:EPLT-AA17-LYY:EQLSN:NMTVE:SXAXR, SIPKAXX:VPTEL:EPLT-AA17-LYY:EQLSN:EMVVE:GXGXR, HVTKPTX:APTKL:EPLT-AA17-LYY:EQLSN:NMVVR:SXGXH, YVPKPXX:APTKL:EPLT-AA17-LYY:EQLSN:NMVVR:SXGXH, TVPKPXX:APTQL:EPLT-AA17-LYY:EQLSN:NMVVR:AXGXH, AVPKAXX:APTKL:EPLT-AA17-LYY:EQLSN:NMVVK:AXGXH, KVGKAXX:VPTKL:EPLT-AA17-LYY:EQLSN:EGMSVAE:XGXR, KASKAXX:VPTKL:EPLT-AA17-LYY:EQLSN:GMAVS:EXGXR, GSAGPXX:TPTKM:EPLT-AA17-LYY:EQLSN:GMVVD:RXGXS, AAPASXX:VPARL:EPLT-AA17-LYY:EQLSN:DMVVE:AXGXR, STPPTXX:VPTRL:EPLT-AA17-LYY:EQLSN:DMVVE:SXGXR, HVPKPXX:APTKL:EPLT-AA17-LYY:EQLSN:NMVVR:SXGXH, RVPSTXX:APVKT:EPLT-AA17-LYY:EQLSN:MIVEE:XGXL, ASAAPXX:VPQAL:EPLT-AA17-LYY:EQLSN:MIVRS:XKXS, NDEGLEX:VPTEE:EPLT-AA17-LYY:EQLSN:FLQHN:KXEXR, NDEGLEX:VPTGQ:EPLT-AA17-LYY:EQLSN:LEEHS:QXEXR, SSVKXQP:SRVHH:EPLT-AA17-LYY:EQLSN:RLEEH:LEXAXA, RNVQXRP:TQVQL:EPLT-AA17-LYY:EQLSN:TLEDH:LAXKXE, KIPKAXX:VPQEL:EPLT-AA17-LYY:EQLSN:DMVKS:GXGXR, GIPEPXX:VPQKM:EPLT-AA17-LYY:EQLSN:NMVKS:SXAXR, SIPKAXX:VPQEL:EPLT-AA17-LYY:EQLSN:EMVKS:GXGXR, HVTKPTX:VPQKL:EPLT-AA17-LYY:EQLSN:NMVKS:SXGXH, YVPKPXX:VPQKL:EPLT-AA17-LYY:EQLSN:NMVKS:SXGXH, TVPKPXX:VPQQL:EPLT-AA17-LYY:EQLSN:NMVKS:AXGXH, AVPKAXX:VPQKL:EPLT-AA17-LYY:EQLSN:NMVKS:AXGXH, KVGKAXX:VPQKL:EPLT-AA17-LYY:EQLSN:EGMSVKS:XGXR, KASKAXX:VPQKL:EPLT-AA17-LYY:EQLSN:GMVKS:EXGXR, GSAGPXX:VPQKM:EPLT-AA17-LYY:EQLSN:GMVKS:RXGXS, AAPASXX:VPQRL:EPLT-AA17-LYY:EQLSN:DMVKS:AXGXR, STPPTXX:VPQRL:EPLT-AA17-LYY:EQLSN:DMVKS:SXGXR, HVPKPXX:VPQKL:EPLT-AA17-LYY:EQLSN:NMVKS:SXGXH, RVPSTXX:VPQKT:EPLT-AA17-LYY:EQLSN:MIVKS:XGXL, ASAAPXX:VPQAL:EPLT-AA17-LYY:EQLSN:MIVKS:XKXS, ASASPXX:VPQDL:EPLT-AA17-LYY:EQLSN:MIVKS:XKXS, NDEGLEX:VPTGQ:SNIT-AA17-QIM:IGEMS:LEQHN:QXEXR, KIPKAXX:VPTEL:SNIT-AA17-QIM:IGEMS:DMVVE:GXGXR, GIPEPXX:VPEKM:SNIT-AA17-QIM:IGEMS:NMTVE:SXAXR, SIPKAXX:VPTEL:SNIT-AA17-QIM:IGEMS:EMVVE:GXGXR, HVTKPTX:APTKL:SNIT-AA17-QIM:IGEMS:NMVVR:SXGXH, YVPKPXX:APTKL:SNIT-AA17-QIM:IGEMS:NMVVR:SXGXH, TVPKPXX:APTQL:SNIT-AA17-QIM:IGEMS:NMVVR:AXGXH, AVPKAXX:APTKL:SNIT-AA17-QIM:IGEMS:NMVVK:AXGXH, KVGKAXX:VPTKL:SNIT-AA17-QIM:IGEMS:EGMSVAE:XGXR, KASKAXX:VPTKL:SNIT-AA17-QIM:IGEMS:GMAVS:EXGXR, GSAGPXX:TPTKM:SNIT-AA17-QIM:IGEMS:GMVVD:RXGXS, AAPASXX:VPARL:SNIT-AA17-QIM:IGEMS:DMVVE:AXGXR, STPPTXX:VPTRL:SNIT-AA17-QIM:IGEMS:DMVVE:SXGXR, HVPKPXX:APTKL:SNIT-AA17-QIM:IGEMS:NMVVR:SXGXH, RVPSTXX:APVKT:SNIT-AA17-QIM:IGEMS:MIVEE:XGXL, ASAAPXX:VPQAL:SNIT-AA17-QIM:IGEMS:MIVRS:XKXS, ASASPXX:VSQDL:SNIT-AA17-QIM:IGEMS:MIVKS:XKXS, ASASPXX:VPQDL:SNIT-AA17-QIM:IGEMS:MVVKS:XKXS, NDEGLEX:VPTGQ:SNIT-AA17-QIM:IGEMS:LEEHS:QXEXR, SSVKXQP:SRVHH:SNIT-AA17-QIM:IGEMS:RLEEH:LEXAXA, RNVQXRP:TQVQL:SNIT-AA17-QIM:IGEMS:TLEDH:LAXKXE, NDEGLEX:VPTEE:SNIT-AA17-QIM:LGEMS:FLEHS:KXEXR, KIPKAXX:VPTEL:SNIT-AA17-QIM:LGEMS:DMVVE:GXGXR, GIPEPXX:VPEKM:SNIT-AA17-QIM:LGEMS:NMTVE:SXAXR, SIPKAXX:VPTEL:SNIT-AA17-QIM:LGEMS:EMVVE:GXGXR, HVTKPTX:APTKL:SNIT-AA17-QIM:LGEMS:NMVVR:SXGXH, YVPKPXX:APTKL:SNIT-AA17-QIM:LGEMS:NMVVR:SXGXH, TVPKPXX:APTQL:SNIT-AA17-QIM:LGEMS:NMVVR:AXGXH, AVPKAXX:APTKL:SNIT-AA17-QIM:LGEMS:NMVVK:AXGXH, KVGKAXX:VPTKL:SNIT-AA17-QIM:LGEMS:EGMSVAE:XGXR, KASKAXX:VPTKL:SNIT-AA17-QIM:LGEMS:GMAVS:EXGXR, GSAGPXX:TPTKM:SNIT-AA17-QIM:LGEMS:GMVVD:RXGXS, AAPASXX:VPARL:SNIT-AA17-QIM:LGEMS:DMVVE:AXGXR, STPPTXX:VPTRL:SNIT-AA17-QIM:LGEMS:DMVVE:SXGXR, HVPKPXX:APTKL:SNIT-AA17-QIM:LGEMS:NMVVR:SXGXH, RVPSTXX:APVKT:SNIT-AA17-QIM:LGEMS:MIVEE:XGXL, ASAAPXX:VPQAL:SNIT-AA17-QIM:LGEMS:MIVRS:XKXS, ASASPXX:VSQDL:SNIT-AA17-QIM:LGEMS:MIVKS:XKXS, ASASPXX:VPQDL:SNIT-AA17-QIM:LGEMS:MVVKS:XKXS, NDEGLEX:VPTEE:SNIT-AA17-QIM:LGEMS:FLQHN:KXEXR, SSVKXQP:SRVHH:SNIT-AA17-QIM:LGEMS:RLEEH:LEXAXA, RNVQXRP:TQVQL:SNIT-AA17-QIM:LGEMS:TLEDH:LAXKXE, RNVQXRP:SRVQL:RSVK-AA17-AKV:KEVQV:TLEEH:LAXKXE, KIPKAXX:VPTEL:RSVK-AA17-AKV:KEVQV:DMVVE:GXGXR, GIPEPXX:VPEKM:RSVK-AA17-AKV:KEVQV:NMTVE:SXAXR, SIPKAXX:VPTEL:RSVK-AA17-AKV:KEVQV:EMVVE:GXGXR, HVTKPTX:APTKL:RSVK-AA17-AKV:KEVQV:NMVVR:SXGXH, YVPKPXX:APTKL:RSVK-AA17-AKV:KEVQV:NMVVR:SXGXH, TVPKPXX:APTQL:RSVK-AA17-AKV:KEVQV:NMVVR:AXGXH, AVPKAXX:APTKL:RSVK-AA17-AKV:KEVQV:NMVVK:AXGXH, KVGKAXX:VPTKL:RSVK-AA17-AKV:KEVQV:EGMSVAE:XGXR, KASKAXX:VPTKL:RSVK-AA17-AKV:KEVQV:GMAVS:EXGXR, GSAGPXX:TPTKM:RSVK-AA17-AKV:KEVQV:GMVVD:RXGXS, AAPASXX:VPARL:RSVK-AA17-AKV:KEVQV:DMVVE:AXGXR, STPPTXX:VPTRL:RSVK-AA17-AKV:KEVQV:DMVVE:SXGXR, HVPKPXX:APTKL:RSVK-AA17-AKV:KEVQV:NMVVR:SXGXH, RVPSTXX:APVKT:RSVK-AA17-AKV:KEVQV:MIVEE:XGXL, ASAAPXX:VPQAL:RSVK-AA17-AKV:KEVQV:MIVRS:XKXS, ASASPXX:VSQDL:RSVK-AA17-AKV:KEVQV:MIVKS:XKXS, ASASPXX:VPQDL:RSVK-AA17-AKV:KEVQV:MVVKS:XKXS, NDEGLEX:VPTEE:RSVK-AA17-AKV:KEVQV:FLQHN:KXEXR, NDEGLEX:VPTGQ:RSVK-AA17-AKV:KEVQV:LEEHS:QXEXR, RNVQXRP:TQVQL:RSVK-AA17-AKV:KEVQV:TLEDH:LAXKXE, SSVKXQP:TQVHH:RPVQ-AA17-RKI:KKATV:RLEDH:LEXAXA, KIPKAXX:VPTEL:RPVQ-AA17-RKI:KKATV:DMVVE:GXGXR, GIPEPXX:VPEKM:RPVQ-AA17-RKI:KKATV:NMTVE:SXAXR, SIPKAXX:VPTEL:RPVQ-AA17-RKI:KKATV:EMVVE:GXGXR, HVTKPTX:APTKL:RPVQ-AA17-RKI:KKATV:NMVVR:SXGXH, YVPKPXX:APTKL:RPVQ-AA17-RKI:KKATV:NMVVR:SXGXH, TVPKPXX:APTQL:RPVQ-AA17-RKI:KKATV:NMVVR:AXGXH, AVPKAXX:APTKL:RPVQ-AA17-RKI:KKATV:NMVVK:AXGXH, KVGKAXX:VPTKL:RPVQ-AA17-RKI:KKATV:EGMSVAE:XGXR, KASKAXX:VPTKL:RPVQ-AA17-RKI:KKATV:GMAVS:EXGXR, GSAGPXX:TPTKM:RPVQ-AA17-RKI:KKATV:GMVVD:RXGXS, AAPASXX:VPARL:RPVQ-AA17-RKI:KKATV:DMVVE:AXGXR, STPPTXX:VPTRL:RPVQ-AA17-RKI:KKATV:DMVVE:SXGXR, HVPKPXX:APTKL:RPVQ-AA17-RKI:KKATV:NMVVR:SXGXH, RVPSTXX:APVKT:RPVQ-AA17-RKI:KKATV:MIVEE:XGXL, ASAAPXX:VPQAL:RPVQ-AA17-RKI:KKATV:MIVRS:XKXS, ASASPXX:VSQDL:RPVQ-AA17-RKI:KKATV:MIVKS:XKXS, ASASPXX:VPQDL:RPVQ-AA17-RKI:KKATV:MVVKS:XKXS, NDEGLEX:VPTEE:RPVQ-AA17-RKI:KKATV:FLQHN:KXEXR, NDEGLEX:VPTGQ:RPVQ-AA17-RKI:KKATV:LEEHS:QXEXR and SSVKXQP:SRVHH:RPVQ-AA17-RKI:KKATV:RLEEH:LEXAXA; and wherein AA¹⁷ is selected from the group consisting of G, A, V, L, I, P, F, M, W, T and S (in particular is selected from the group consisting of M, I, L, V and T).

[0399] In particular, in certain embodiments, the heptuplet PEP7:PEP3:PEP1:LINKER:PEP2:PEP4:PEP8 is selected from the group consisting of GIPEPXX:VPT:SAIS:DENKNVV:LKNYQ:VVE:SXAXR, SIPKAXX:VPT:SAIS:DEYDKVV:LKNYQ:VVE:GXGXR, HVTKPTX:VPT:SAIS:DDSSNVI:LKNYQ:VVE:SXGXH, YVPKPXX:VPT:SAIS:DDSSNVI:LKNYQ:VVE:SXGXH, TVPKPXX:VPT:SAIS:DDSSNVI:LKNYQ:VVE:AXGXH, AVPKAXX:VPT:SAIS:DSSNNVI:LKNYQ:VVE:AXGXH, KVGKAXX:VPT:SAIS:DDMGVPT:LKNYQ:VVE:XGXR, KASKAXX:VPT:SAIS:DKGVVTY:LKNYQ:VVE:EXGXR, GSAGPXX:VPT:SAIS:NDKQQII:LKNYQ:VVE:RXGXS, AAPASXX:VPT:SAIS:DAANNVV:LKNYQ:VVE:AXGXR, STPPTXX:VPT:SAIS:DSANNVV:LKNYQ:VVE:SXGXR, HVPKPXX:VPT:SAIS:DDSSNVI:LKNYQ:VVE:SXGXH, RVPSTXX:VPT:SAIS:DNGRVLL:LKNYQ:VVE:XGXL, ASAAPXX:VPT:SAIS:VGRKPKV:LKNYQ:VVE:XKXS, ASASPXX:VPT:SAIS:IGKTPKI:LKNYQ:VVE:XKXS, ASASPXX:VPT:SAIS:VGRTPKV:LKNYQ:VVE:XKXS, NDEGLEX:VPT:SAIS:RIKPHQGQH:LKNYQ:VVE:KXEXR, NDEGLEX:VPT:SAIS:RIKPHQGQH:LKNYQ:VVE:QXEXR, SSVKXQP:VPT:SAIS:EYVRKKPKL:LKNYQ:VVE:LEXAXA, RNVQXRP:VPT:SAIS:EIVRKKPIF:LKNYQ:VVE:LAXKXE, GIPEPXX:VPE:SAIS:DENKNVV:LKNYQ:TVE:SXAXR, HVTKPTX:APT:SAIS:DDSSNVI:LKNYQ:VVR:SXGXH, YVPKPXX:APT:SAIS:DDSSNVI:LKNYQ:VVR:SXGXH, TVPKPXX:APT:SAIS:DDSSNVI:LKNYQ:VVR:AXGXH, AVPKAXX:APT:SAIS:DSSNNVI:LKNYQ:VVK:AXGXH, KVGKAXX:VPT:SAIS:DDMGVPT:LKNYQ:VAE:XGXR, KASKAXX:VPT:SAIS:DKGVVTY:LKNYQ:AVS:EXGXR, GSAGPXX:TPT:SAIS:NDKQQII:LKNYQ:VVD:RXGXS, AAPASXX:VPA:SAIS:DAANNVV:LKNYQ:VVE:AXGXR, HVPKPXX:APT:SAIS:DDSSNVI:LKNYQ:VVR:SXGXH, RVPSTXX:APV:SAIS:DNGRVLL:LKNYQ:VEE:XGXL, ASAAPXX:VPQ:SAIS:VGRKPKV:LKNYQ:VRS:XKXS, ASASPXX:VSQ:SAIS:IGKTPKI:LKNYQ:VKS:XKXS, ASASPXX:VPQ:SAIS:VGRTPKV:LKNYQ:VKS:XKXS, NDEGLEX:VPT:SAIS:RIKPHQGQH:LKNYQ:QHN:KXEXR, NDEGLEX:VPT:SAIS:RIKPHQGQH:LKNYQ:EHS:QXEXR, SSVKXQP:SRV:SAIS:EYVRKKPKL:LKNYQ:EEH:LEXAXA, RNVQXRP:TQV:SAIS:EIVRKKPIF:LKNYQ:EDH:LAXKXE, KIPKAXX:VPE:SSLS:DENEKVV:LKVYP:TVE:GXGXR, SIPKAXX:VPE:SSLS:DEYDKVV:LKVYP:TVE:GXGXR, HVTKPTX:VPE:SSLS:DDSSNVI:LKVYP:TVE:SXGXH, YVPKPXX:VPE:SSLS:DDSSNVI:LKVYP:TVE:SXGXH, TVPKPXX:VPE:SSLS:DDSSNVI:LKVYP:TVE:AXGXH, AVPKAXX:VPE:SSLS:DSSNNVI:LKVYP:TVE:AXGXH, KVGKAXX:VPE:SSLS:DDMGVPT:LKVYP:TVE:XGXR, KASKAXX:VPE:SSLS:DKGVVTY:LKVYP:TVE:EXGXR, GSAGPXX:VPE:SSLS:NDKQQII:LKVYP:TVE:RXGXS, AAPASXX:VPE:SSLS:DAANNVV:LKVYP:TVE:AXGXR, STPPTXX:VPE:SSLS:DSANNVV:LKVYP:TVE:SXGXR, HVPKPXX:VPE:SSLS:DDSSNVI:LKVYP:TVE:SXGXH, RVPSTXX:VPE:SSLS:DNGRVLL:LKVYP:TVE:XGXL, ASAAPXX:VPE:SSLS:VGRKPKV:LKVYP:TVE:XKXS, ASASPXX:VPE:SSLS:IGKTPKI:LKVYP:TVE:XKXS, ASASPXX:VPE:SSLS:VGRTPKV:LKVYP:TVE:XKXS, NDEGLEX:VPE:SSLS:RIKPHQGQH:LKVYP:TVE:KXEXR, NDEGLEX:VPE:SSLS:RIKPHQGQH:LKVYP:TVE:QXEXR, SSVKXQP:VPE:SSLS:EYVRKKPKL:LKVYP:TVE:LEXAXA, RNVQXRP:VPE:SSLS:EIVRKKPIF:LKVYP:TVE:LAXKXE, KIPKAXX:VPT:SSLS:DENEKVV:LKVYP:VVE:GXGXR, SIPKAXX:VPT:SSLS:DEYDKVV:LKVYP:VVE:GXGXR, HVTKPTX:APT:SSLS:DDSSNVI:LKVYP:VVR:SXGXH, YVPKPXX:APT:SSLS:DDSSNVI:LKVYP:VVR:SXGXH, TVPKPXX:APT:SSLS:DDSSNVI:LKVYP:VVR:AXGXH, AVPKAXX:APT:SSLS:DSSNNVI:LKVYP:VVK:AXGXH, KVGKAXX:VPT:SSLS:DDMGVPT:LKVYP:VAE:XGXR, KASKAXX:VPT:SSLS:DKGVVTY:LKVYP:AVS:EXGXR, GSAGPXX:TPT:SSLS:NDKQQII:LKVYP:VVD:RXGXS, AAPASXX:VPA:SSLS:DAANNVV:LKVYP:VVE:AXGXR, STPPTXX:VPT:SSLS:DSANNVV:LKVYP:VVE:SXGXR, HVPKPXX:APT:SSLS:DDSSNVI:LKVYP:VVR:SXGXH, RVPSTXX:APV:SSLS:DNGRVLL:LKVYP:VEE:XGXL, ASAAPXX:VPQ:SSLS:VGRKPKV:LKVYP:VRS:XKXS, ASASPXX:VSQ:SSLS:IGKTPKI:LKVYP:VKS:XKXS, ASASPXX:VPQ:SSLS:VGRTPKV:LKVYP:VKS:XKXS, NDEGLEX:VPT:SSLS:RIKPHQGQH:LKVYP:QHN:KXEXR, NDEGLEX:VPT:SSLS:RIKPHQGQH:LKVYP:EHS:QXEXR, SSVKXQP:SRV:SSLS:EYVRKKPKL:LKVYP:EEH:LEXAXA, RNVQXRP:TQV:SSLS:EIVRKKPIF:LKVYP:EDH:LAXKXE, KIPKAXX:VPT:SAIS:DENEKVV:LKNYQ:VVE:GXGXR, KIPKAXX:APT:NAIS:DENEKVV:LKKYR:VVR:GXGXR, GIPEPXX:APT:NAIS:DENKNVV:LKKYR:VVR:SXAXR, SIPKAXX:APT:NAIS:DEYDKVV:LKKYR:VVR:GXGXR, YVPKPXX:APT:NAIS:DDSSNVI:LKKYR:VVR:SXGXH, TVPKPXX:APT:NAIS:DDSSNVI:LKKYR:VVR:AXGXH, AVPKAXX:APT:NAIS:DSSNNVI:LKKYR:VVR:AXGXH, KVGKAXX:APT:NAIS:DDMGVPT:LKKYR:VVR:XGXR, KASKAXX:APT:NAIS:DKGVVTY:LKKYR:VVR:EXGXR, GSAGPXX:APT:NAIS:NDKQQII:LKKYR:VVR:RXGXS, AAPASXX:APT:NAIS:DAANNVV:LKKYR:VVR:AXGXR, STPPTXX:APT:NAIS:DSANNVV:LKKYR:VVR:SXGXR, HVPKPXX:APT:NAIS:DDSSNVI:LKKYR:VVR:SXGXH, RVPSTXX:APT:NAIS:DNGRVLL:LKKYR:VVR:XGXL, ASAAPXX:APT:NAIS:VGRKPKV:LKKYR:VVR:XKXS, ASASPXX:APT:NAIS:IGKTPKI:LKKYR:VVR:XKXS, ASASPXX:APT:NAIS:VGRTPKV:LKKYR:VVR:XKXS, NDEGLEX:APT:NAIS:RIKPHQGQH:LKKYR:VVR:KXEXR, NDEGLEX:APT:NAIS:RIKPHQGQH:LKKYR:VVR:QXEXR, SSVKXQP:APT:NAIS:EYVRKKPKL:LKKYR:VVR:LEXAXA, RNVQXRP:APT:NAIS:EIVRKKPIF:LKKYR:VVR:LAXKXE, KIPKAXX:VPT:NAIS:DENEKVV:LKKYR:VVE:GXGXR, GIPEPXX:VPE:NAIS:DENKNVV:LKKYR:TVE:SXAXR, SIPKAXX:VPT:NAIS:DEYDKVV:LKKYR:VVE:GXGXR, AVPKAXX:APT:NAIS:DSSNNVI:LKKYR:VVK:AXGXH, KVGKAXX:VPT:NAIS:DDMGVPT:LKKYR:VAE:XGXR, KASKAXX:VPT:NAIS:DKGVVTY:LKKYR:AVS:EXGXR, GSAGPXX:TPT:NAIS:NDKQQII:LKKYR:VVD:RXGXS, AAPASXX:VPA:NAIS:DAANNVV:LKKYR:VVE:AXGXR, STPPTXX:VPT:NAIS:DSANNVV:LKKYR:VVE:SXGXR, RVPSTXX:APV:NAIS:DNGRVLL:LKKYR:VEE:XGXL, ASAAPXX:VPQ:NAIS:VGRKPKV:LKKYR:VRS:XKXS, ASASPXX:VSQ:NAIS:IGKTPKI:LKKYR:VKS:XKXS, ASASPXX:VPQ:NAIS:VGRTPKV:LKKYR:VKS:XKXS, NDEGLEX:VPT:NAIS:RIKPHQGQH:LKKYR:QHN:KXEXR, NDEGLEX:VPT:NAIS:RIKPHQGQH:LKKYR:EHS:QXEXR, SSVKXQP:SRV:NAIS:EYVRKKPKL:LKKYR:EEH:LEXAXA, RNVQXRP:TQV:NAIS:EIVRKKPIF:LKKYR:EDH:LAXKXE, HVTKPTX:APT:NAIS:DDSSNVI:LKKYR:VVR:SXGXH, KIPKAXX:APT:SATS:DENEKVV:LRKHR:VVK:GXGXR, GIPEPXX:APT:SATS:DENKNVV:LRKHR:VVK:SXAXR, SIPKAXX:APT:SATS:DEYDKVV:LRKHR:VVK:GXGXR, HVTKPTX:APT:SATS:DDSSNVI:LRKHR:VVK:SXGXH, YVPKPXX:APT:SATS:DDSSNVI:LRKHR:VVK:SXGXH, TVPKPXX:APT:SATS:DDSSNVI:LRKHR:VVK:AXGXH, KVGKAXX:APT:SATS:DDMGVPT:LRKHR:VVK:XGXR, KASKAXX:APT:SATS:DKGVVTY:LRKHR:VVK:EXGXR, GSAGPXX:APT:SATS:NDKQQII:LRKHR:VVK:RXGXS, AAPASXX:APT:SATS:DAANNVV:LRKHR:VVK:AXGXR, STPPTXX:APT:SATS:DSANNVV:LRKHR:VVK:SXGXR, HVPKPXX:APT:SATS:DDSSNVI:LRKHR:VVK:SXGXH, RVPSTXX:APT:SATS:DNGRVLL:LRKHR:VVK:XGXL, ASAAPXX:APT:SATS:VGRKPKV:LRKHR:VVK:XKXS, ASASPXX:APT:SATS:IGKTPKI:LRKHR:VVK:XKXS, ASASPXX:APT:SATS:VGRTPKV:LRKHR:VVK:XKXS, NDEGLEX:APT:SATS:RIKPHQGQH:LRKHR:VVK:KXEXR, NDEGLEX:APT:SATS:RIKPHQGQH:LRKHR:VVK:QXEXR, SSVKXQP:APT:SATS:EYVRKKPKL:LRKHR:VVK:LEXAXA, RNVQXRP:APT:SATS:EIVRKKPIF:LRKHR:VVK:LAXKXE, KIPKAXX:VPT:SATS:DENEKVV:LRKHR:VVE:GXGXR, GIPEPXX:VPE:SATS:DENKNVV:LRKHR:TVE:SXAXR, SIPKAXX:VPT:SATS:DEYDKVV:LRKHR:VVE:GXGXR, HVTKPTX:APT:SATS:DDSSNVI:LRKHR:VVR:SXGXH, YVPKPXX:APT:SATS:DDSSNVI:LRKHR:VVR:SXGXH, TVPKPXX:APT:SATS:DDSSNVI:LRKHR:VVR:AXGXH, KVGKAXX:VPT:SATS:DDMGVPT:LRKHR:VAE:XGXR, KASKAXX:VPT:SATS:DKGVVTY:LRKHR:AVS:EXGXR, GSAGPXX:TPT:SATS:NDKQQII:LRKHR:VVD:RXGXS, AAPASXX:VPA:SATS:DAANNVV:LRKHR:VVE:AXGXR, STPPTXX:VPT:SATS:DSANNVV:LRKHR:VVE:SXGXR, HVPKPXX:APT:SATS:DDSSNVI:LRKHR:VVR:SXGXH, RVPSTXX:APV:SATS:DNGRVLL:LRKHR:VEE:XGXL, ASAAPXX:VPQ:SATS:VGRKPKV:LRKHR:VRS:XKXS, ASASPXX:VSQ:SATS:IGKTPKI:LRKHR:VKS:XKXS, ASASPXX:VPQ:SATS:VGRTPKV:LRKHR:VKS:XKXS, NDEGLEX:VPT:SATS:RIKPHQGQH:LRKHR:QHN:KXEXR, NDEGLEX:VPT:SATS:RIKPHQGQH:LRKHR:EHS:QXEXR, SSVKXQP:SRV:SATS:EYVRKKPKL:LRKHR:EEH:LEXAXA, RNVQXRP:TQV:SATS:EIVRKKPIF:LRKHR:EDH:LAXKXE, KIPKAXX:VPT:SPIS:DENEKVV:LKYHY:VAE:GXGXR, GIPEPXX:VPT:SPIS:DENKNVV:LKYHY:VAE:SXAXR, SIPKAXX:VPT:SPIS:DEYDKVV:LKYHY:VAE:GXGXR, HVTKPTX:VPT:SPIS:DDSSNVI:LKYHY:VAE:SXGXH, YVPKPXX:VPT:SPIS:DDSSNVI:LKYHY:VAE:SXGXH, TVPKPXX:VPT:SPIS:DDSSNVI:LKYHY:VAE:AXGXH, AVPKAXX:VPT:SPIS:DSSNNVI:LKYHY:VAE:AXGXH, KASKAXX:VPT:SPIS:DKGVVTY:LKYHY:VAE:EXGXR, GSAGPXX:VPT:SPIS:NDKQQII:LKYHY:VAE:RXGXS, AAPASXX:VPT:SPIS:DAANNVV:LKYHY:VAE:AXGXR, STPPTXX:VPT:SPIS:DSANNVV:LKYHY:VAE:SXGXR, HVPKPXX:VPT:SPIS:DDSSNVI:LKYHY:VAE:SXGXH, RVPSTXX:VPT:SPIS:DNGRVLL:LKYHY:VAE:XGXL, ASAAPXX:VPT:SPIS:VGRKPKV:LKYHY:VAE:XKXS, ASASPXX:VPT:SPIS:IGKTPKI:LKYHY:VAE:XKXS, ASASPXX:VPT:SPIS:VGRTPKV:LKYHY:VAE:XKXS, NDEGLEX:VPT:SPIS:RIKPHQGQH:LKYHY:VAE:KXEXR, NDEGLEX:VPT:SPIS:RIKPHQGQH:LKYHY:VAE:QXEXR, SSVKXQP:VPT:SPIS:EYVRKKPKL:LKYHY:VAE:LEXAXA, RNVQXRP:VPT:SPIS:EIVRKKPIF:LKYHY:VAE:LAXKXE, KIPKAXX:VPT:SPIS:DENEKVV:LKYHY:VVE:GXGXR, GIPEPXX:VPE:SPIS:DENKNVV:LKYHY:TVE:SXAXR, SIPKAXX:VPT:SPIS:DEYDKVV:LKYHY:VVE:GXGXR, HVTKPTX:APT:SPIS:DDSSNVI:LKYHY:VVR:SXGXH, YVPKPXX:APT:SPIS:DDSSNVI:LKYHY:VVR:SXGXH, TVPKPXX:APT:SPIS:DDSSNVI:LKYHY:VVR:AXGXH, AVPKAXX:APT:SPIS:DSSNNVI:LKYHY:VVK:AXGXH KASKAXX:VPT:SPIS:DKGVVTY:LKYHY:AVS:EXGXR, GSAGPXX:TPT:SPIS:NDKQQII:LKYHY:VVD:RXGXS, AAPASXX:VPA:SPIS:DAANNVV:LKYHY:VVE:AXGXR, STPPTXX:VPT:SPIS:DSANNVV:LKYHY:VVE:SXGXR, HVPKPXX:APT:SPIS:DDSSNVI:LKYHY:VVR:SXGXH, RVPSTXX:APV:SPIS:DNGRVLL:LKYHY:VEE:XGXL, ASAAPXX:VPQ:SPIS:VGRKPKV:LKYHY:VRS:XKXS, ASASPXX:VSQ:SPIS:IGKTPKI:LKYHY:VKS:XKXS, ASASPXX:VPQ:SPIS:VGRTPKV:LKYHY:VKS:XKXS, NDEGLEX:VPT:SPIS:RIKPHQGQH:LKYHY:QHN:KXEXR, NDEGLEX:VPT:SPIS:RIKPHQGQH:LKYHY:EHS:QXEXR, SSVKXQP:SRV:SPIS:EYVRKKPKL:LKYHY:EEH:LEXAXA, RNVQXRP:TQV:SPIS:EIVRKKPIF:LKYHY:EDH:LAXKXE, KIPKAXX:VPT:EPIS:DENEKVV:KFKYE:AVS:GXGXR, GIPEPXX:VPT:EPIS:DENKNVV:KFKYE:AVS:SXAXR, SIPKAXX:VPT:EPIS:DEYDKVV:KFKYE:AVS:GXGXR, HVTKPTX:VPT:EPIS:DDSSNVI:KFKYE:AVS:SXGXH, YVPKPXX:VPT:EPIS:DDSSNVI:KFKYE:AVS:SXGXH, TVPKPXX:VPT:EPIS:DDSSNVI:KFKYE:AVS:AXGXH, AVPKAXX:VPT:EPIS:DSSNNVI:KFKYE:AVS:AXGXH, KVGKAXX:VPT:EPIS:DDMGVPT:KFKYE:AVS:XGXR, GSAGPXX:VPT:EPIS:NDKQQII:KFKYE:AVS:RXGXS, AAPASXX:VPT:EPIS:DAANNVV:KFKYE:AVS:AXGXR, STPPTXX:VPT:EPIS:DSANNVV:KFKYE:AVS:SXGXR, HVPKPXX:VPT:EPIS:DDSSNVI:KFKYE:AVS:SXGXH, RVPSTXX:VPT:EPIS:DNGRVLL:KFKYE:AVS:XGXL, ASAAPXX:VPT:EPIS:VGRKPKV:KFKYE:AVS:XKXS, ASASPXX:VPT:EPIS:IGKTPKI:KFKYE:AVS:XKXS, ASASPXX:VPT:EPIS:VGRTPKV:KFKYE:AVS:XKXS, NDEGLEX:VPT:EPIS:RIKPHQGQH:KFKYE:AVS:KXEXR, NDEGLEX:VPT:EPIS:RIKPHQGQH:KFKYE:AVS:QXEXR, SSVKXQP:VPT:EPIS:EYVRKKPKL:KFKYE:AVS:LEXAXA, RNVQXRP:VPT:EPIS:EIVRKKPIF:KFKYE:AVS:LAXKXE, KIPKAXX:VPT:EPIS:DENEKVV:KFKYE:VVE:GXGXR, GIPEPXX:VPE:EPIS:DENKNVV:KFKYE:TVE:SXAXR, SIPKAXX:VPT:EPIS:DEYDKVV:KFKYE:VVE:GXGXR, HVTKPTX:APT:EPIS:DDSSNVI:KFKYE:VVR:SXGXH, YVPKPXX:APT:EPIS:DDSSNVI:KFKYE:VVR:SXGXH, TVPKPXX:APT:EPIS:DDSSNVI:KFKYE:VVR:AXGXH, AVPKAXX:APT:EPIS:DSSNNVI:KFKYE:VVK:AXGXH, KVGKAXX:VPT:EPIS:DDMGVPT:KFKYE:VAE:XGXR, GSAGPXX:TPT:EPIS:NDKQQII:KFKYE:VVD:RXGXS, AAPASXX:VPA:EPIS:DAANNVV:KFKYE:VVE:AXGXR, STPPTXX:VPT:EPIS:DSANNVV:KFKYE:VVE:SXGXR, HVPKPXX:APT:EPIS:DDSSNVI:KFKYE:VVR:SXGXH, RVPSTXX:APV:EPIS:DNGRVLL:KFKYE:VEE:XGXL, ASAAPXX:VPQ:EPIS:VGRKPKV:KFKYE:VRS:XKXS, ASASPXX:VSQ:EPIS:IGKTPKI:KFKYE:VKS:XKXS, ASASPXX:VPQ:EPIS:VGRTPKV:KFKYE:VKS:XKXS, NDEGLEX:VPT:EPIS:RIKPHQGQH:KFKYE:QHN:KXEXR, NDEGLEX:VPT:EPIS:RIKPHQGQH:KFKYE:EHS:QXEXR, SSVKXQP:SRV:EPIS:EYVRKKPKL:KFKYE:EEH:LEXAXA, RNVQXRP:TQV:EPIS:EIVRKKPIF:KFKYE:EDH:LAXKXE, KIPKAXX:TPT:SPIN:DENEKVV:YGKIP:VVD:GXGXR, GIPEPXX:TPT:SPIN:DENKNVV:YGKIP:VVD:SXAXR, SIPKAXX:TPT:SPIN:DEYDKVV:YGKIP:VVD:GXGXR, HVTKPTX:TPT:SPIN:DDSSNVI:YGKIP:VVD:SXGXH, YVPKPXX:TPT:SPIN:DDSSNVI:YGKIP:VVD:SXGXH, TVPKPXX:TPT:SPIN:DDSSNVI:YGKIP:VVD:AXGXH, AVPKAXX:TPT:SPIN:DSSNNVI:YGKIP:VVD:AXGXH, KVGKAXX:TPT:SPIN:DDMGVPT:YGKIP:VVD:XGXR, KASKAXX:TPT:SPIN:DKGVVTY:YGKIP:VVD:EXGXR, AAPASXX:TPT:SPIN:DAANNVV:YGKIP:VVD:AXGXR, STPPTXX:TPT:SPIN:DSANNVV:YGKIP:VVD:SXGXR, HVPKPXX:TPT:SPIN:DDSSNVI:YGKIP:VVD:SXGXH, RVPSTXX:TPT:SPIN:DNGRVLL:YGKIP:VVD:XGXL, ASAAPXX:TPT:SPIN:VGRKPKV:YGKIP:VVD:XKXS, ASASPXX:TPT:SPIN:IGKTPKI:YGKIP:VVD:XKXS, ASASPXX:TPT:SPIN:VGRTPKV:YGKIP:VVD:XKXS, NDEGLEX:TPT:SPIN:RIKPHQGQH:YGKIP:VVD:KXEXR, NDEGLEX:TPT:SPIN:RIKPHQGQH:YGKIP:VVD:QXEXR, SSVKXQP:TPT:SPIN:EYVRKKPKL:YGKIP:VVD:LEXAXA, RNVQXRP:TPT:SPIN:EIVRKKPIF:YGKIP:VVD:LAXKXE, KIPKAXX:VPT:SPIN:DENEKVV:YGKIP:VVE:GXGXR, GIPEPXX:VPE:SPIN:DENKNVV:YGKIP:TVE:SXAXR, SIPKAXX:VPT:SPIN:DEYDKVV:YGKIP:VVE:GXGXR, HVTKPTX:APT:SPIN:DDSSNVI:YGKIP:VVR:SXGXH, YVPKPXX:APT:SPIN:DDSSNVI:YGKIP:VVR:SXGXH, TVPKPXX:APT:SPIN:DDSSNVI:YGKIP:VVR:AXGXH, AVPKAXX:APT:SPIN:DSSNNVI:YGKIP:VVK:AXGXH, KVGKAXX:VPT:SPIN:DDMGVPT:YGKIP:VAE:XGXR, KASKAXX:VPT:SPIN:DKGVVTY:YGKIP:AVS:EXGXR, AAPASXX:VPA:SPIN:DAANNVV:YGKIP:VVE:AXGXR, STPPTXX:VPT:SPIN:DSANNVV:YGKIP:VVE:SXGXR, HVPKPXX:APT:SPIN:DDSSNVI:YGKIP:VVR:SXGXH, RVPSTXX:APV:SPIN:DNGRVLL:YGKIP:VEE:XGXL, ASAAPXX:VPQ:SPIN:VGRKPKV:YGKIP:VRS:XKXS, ASASPXX:VSQ:SPIN:IGKTPKI:YGKIP:VKS:XKXS, ASASPXX:VPQ:SPIN:VGRTPKV:YGKIP:VKS:XKXS, NDEGLEX:VPT:SPIN:RIKPHQGQH:YGKIP:QHN:KXEXR, NDEGLEX:VPT:SPIN:RIKPHQGQH:YGKIP:EHS:QXEXR, SSVKXQP:SRV:SPIN:EYVRKKPKL:YGKIP:EEH:LEXAXA, RNVQXRP:TQV:SPIN:EIVRKKPIF:YGKIP:EDH:LAXKXE, KIPKAXX:VPA:SPIS:DENEKVV:YKQYE:VVE:GXGXR, GIPEPXX:VPA:SPIS:DENKNVV:YKQYE:VVE:SXAXR, SIPKAXX:VPA:SPIS:DEYDKVV:YKQYE:VVE:GXGXR, HVTKPTX:VPA:SPIS:DDSSNVI:YKQYE:VVE:SXGXH, YVPKPXX:VPA:SPIS:DDSSNVI:YKQYE:VVE:SXGXH, TVPKPXX:VPA:SPIS:DDSSNVI:YKQYE:VVE:AXGXH, AVPKAXX:VPA:SPIS:DSSNNVI:YKQYE:VVE:AXGXH, KVGKAXX:VPA:SPIS:DDMGVPT:YKQYE:VVE:XGXR, KASKAXX:VPA:SPIS:DKGVVTY:YKQYE:VVE:EXGXR, GSAGPXX:VPA:SPIS:NDKQQII:YKQYE:VVE:RXGXS, STPPTXX:VPA:SPIS:DSANNVV:YKQYE:VVE:SXGXR, HVPKPXX:VPA:SPIS:DDSSNVI:YKQYE:VVE:SXGXH, RVPSTXX:VPA:SPIS:DNGRVLL:YKQYE:VVE:XGXL, ASAAPXX:VPA:SPIS:VGRKPKV:YKQYE:VVE:XKXS, ASASPXX:VPA:SPIS:IGKTPKI:YKQYE:VVE:XKXS, ASASPXX:VPA:SPIS:VGRTPKV:YKQYE:VVE:XKXS, NDEGLEX:VPA:SPIS:RIKPHQGQH:YKQYE:VVE:KXEXR, NDEGLEX:VPA:SPIS:RIKPHQGQH:YKQYE:VVE:QXEXR, SSVKXQP:VPA:SPIS:EYVRKKPKL:YKQYE:VVE:LEXAXA, RNVQXRP:VPA:SPIS:EIVRKKPIF:YKQYE:VVE:LAXKXE, KIPKAXX:VPT:SPIS:DENEKVV:YKQYE:VVE:GXGXR, GIPEPXX:VPE:SPIS:DENKNVV:YKQYE:TVE:SXAXR, SIPKAXX:VPT:SPIS:DEYDKVV:YKQYE:VVE:GXGXR, HVTKPTX:APT:SPIS:DDSSNVI:YKQYE:VVR:SXGXH, YVPKPXX:APT:SPIS:DDSSNVI:YKQYE:VVR:SXGXH, TVPKPXX:APT:SPIS:DDSSNVI:YKQYE:VVR:AXGXH, AVPKAXX:APT:SPIS:DSSNNVI:YKQYE:VVK:AXGXH, KVGKAXX:VPT:SPIS:DDMGVPT:YKQYE:VAE:XGXR, KASKAXX:VPT:SPIS:DKGVVTY:YKQYE:AVS:EXGXR, GSAGPXX:TPT:SPIS:NDKQQII:YKQYE:VVD:RXGXS, STPPTXX:VPT:SPIS:DSANNVV:YKQYE:VVE:SXGXR, HVPKPXX:APT:SPIS:DDSSNVI:YKQYE:VVR:SXGXH, RVPSTXX:APV:SPIS:DNGRVLL:YKQYE:VEE:XGXL, ASAAPXX:VPQ:SPIS:VGRKPKV:YKQYE:VRS:XKXS, ASASPXX:VSQ:SPIS:IGKTPKI:YKQYE:VKS:XKXS, ASASPXX:VPQ:SPIS:VGRTPKV:YKQYE:VKS:XKXS, NDEGLEX:VPT:SPIS:RIKPHQGQH:YKQYE:QHN:KXEXR, NDEGLEX:VPT:SPIS:RIKPHQGQH:YKQYE:EHS:QXEXR, SSVKXQP:SRV:SPIS:EYVRKKPKL:YKQYE:EEH:LEXAXA, RNVQXRP:TQV:SPIS:EIVRKKPIF:YKQYE:EDH:LAXKXE, GIPEPXX:VPT:SPIS:DENKNVV:YKQYE:VVE:SXAXR, HVTKPTX:VPT:SPIS:DDSSNVI:YKQYE:VVE:SXGXH, YVPKPXX:VPT:SPIS:DDSSNVI:YKQYE:VVE:SXGXH, TVPKPXX:VPT:SPIS:DDSSNVI:YKQYE:VVE:AXGXH, AVPKAXX:VPT:SPIS:DSSNNVI:YKQYE:VVE:AXGXH, KVGKAXX:VPT:SPIS:DDMGVPT:YKQYE:VVE:XGXR, KASKAXX:VPT:SPIS:DKGVVTY:YKQYE:VVE:EXGXR, GSAGPXX:VPT:SPIS:NDKQQII:YKQYE:VVE:RXGXS, AAPASXX:VPT:SPIS:DAANNVV:YKQYE:VVE:AXGXR, HVPKPXX:VPT:SPIS:DDSSNVI:YKQYE:VVE:SXGXH, RVPSTXX:VPT:SPIS:DNGRVLL:YKQYE:VVE:XGXL, ASAAPXX:VPT:SPIS:VGRKPKV:YKQYE:VVE:XKXS, ASASPXX:VPT:SPIS:IGKTPKI:YKQYE:VVE:XKXS, ASASPXX:VPT:SPIS:VGRTPKV:YKQYE:VVE:XKXS, NDEGLEX:VPT:SPIS:RIKPHQGQH:YKQYE:VVE:KXEXR, NDEGLEX:VPT:SPIS:RIKPHQGQH:YKQYE:VVE:QXEXR, SSVKXQP:VPT:SPIS:EYVRKKPKL:YKQYE:VVE:LEXAXA, RNVQXRP:VPT:SPIS:EIVRKKPIF:YKQYE:VVE:LAXKXE, AAPASXX:VPA:SPIS:DAANNVV:YKQYE:VVE:AXGXR, KIPKAXX:APV:KPLS:DENEKVV:DHHKD:VEE:GXGXR, GIPEPXX:APV:KPLS:DENKNVV:DHHKD:VEE:SXAXR, SIPKAXX:APV:KPLS:DEYDKVV:DHHKD:VEE:GXGXR, HVTKPTX:APV:KPLS:DDSSNVI:DHHKD:VEE:SXGXH, YVPKPXX:APV:KPLS:DDSSNVI:DHHKD:VEE:SXGXH, TVPKPXX:APV:KPLS:DDSSNVI:DHHKD:VEE:AXGXH, AVPKAXX:APV:KPLS:DSSNNVI:DHHKD:VEE:AXGXH, KVGKAXX:APV:KPLS:DDMGVPT:DHHKD:VEE:XGXR, KASKAXX:APV:KPLS:DKGVVTY:DHHKD:VEE:EXGXR, GSAGPXX:APV:KPLS:NDKQQII:DHHKD:VEE:RXGXS, AAPASXX:APV:KPLS:DAANNVV:DHHKD:VEE:AXGXR, STPPTXX:APV:KPLS:DSANNVV:DHHKD:VEE:SXGXR, HVPKPXX:APV:KPLS:DDSSNVI:DHHKD:VEE:SXGXH, ASAAPXX:APV:KPLS:VGRKPKV:DHHKD:VEE:XKXS, ASASPXX:APV:KPLS:IGKTPKI:DHHKD:VEE:XKXS, ASASPXX:APV:KPLS:VGRTPKV:DHHKD:VEE:XKXS, NDEGLEX:APV:KPLS:RIKPHQGQH:DHHKD:VEE:KXEXR, NDEGLEX:APV:KPLS:RIKPHQGQH:DHHKD:VEE:QXEXR, SSVKXQP:APV:KPLS:EYVRKKPKL:DHHKD:VEE:LEXAXA, RNVQXRP:APV:KPLS:EIVRKKPIF:DHHKD:VEE:LAXKXE, KIPKAXX:VPT:KPLS:DENEKVV:DHHKD:VVE:GXGXR, GIPEPXX:VPE:KPLS:DENKNVV:DHHKD:TVE:SXAXR, SIPKAXX:VPT:KPLS:DEYDKVV:DHHKD:VVE:GXGXR, HVTKPTX:APT:KPLS:DDSSNVI:DHHKD:VVR:SXGXH, YVPKPXX:APT:KPLS:DDSSNVI:DHHKD:VVR:SXGXH, TVPKPXX:APT:KPLS:DDSSNVI:DHHKD:VVR:AXGXH, AVPKAXX:APT:KPLS:DSSNNVI:DHHKD:VVK:AXGXH, KVGKAXX:VPT:KPLS:DDMGVPT:DHHKD:VAE:XGXR, KASKAXX:VPT:KPLS:DKGVVTY:DHHKD:AVS:EXGXR, GSAGPXX:TPT:KPLS:NDKQQII:DHHKD:VVD:RXGXS, AAPASXX:VPA:KPLS:DAANNVV:DHHKD:VVE:AXGXR, STPPTXX:VPT:KPLS:DSANNVV:DHHKD:VVE:SXGXR, HVPKPXX:APT:KPLS:DDSSNVI:DHHKD:VVR:SXGXH, ASAAPXX:VPQ:KPLS:VGRKPKV:DHHKD:VRS:XKXS, ASASPXX:VSQ:KPLS:IGKTPKI:DHHKD:VKS:XKXS, ASASPXX:VPQ:KPLS:VGRTPKV:DHHKD:VKS:XKXS, NDEGLEX:VPT:KPLS:RIKPHQGQH:DHHKD:QHN:KXEXR, NDEGLEX:VPT:KPLS:RIKPHQGQH:DHHKD:EHS:QXEXR, SSVKXQP:SRV:KPLS:EYVRKKPKL:DHHKD:EEH:LEXAXA, RNVQXRP:TQV:KPLS:EIVRKKPIF:DHHKD:EDH:LAXKXE, KIPKAXX:VPQ:EPLP:DENEKVV:EQLSN:VRS:GXGXR, GIPEPXX:VPQ:EPLP:DENKNVV:EQLSN:VRS:SXAXR, SIPKAXX:VPQ:EPLP:DEYDKVV:EQLSN:VRS:GXGXR, HVTKPTX:VPQ:EPLP:DDSSNVI:EQLSN:VRS:SXGXH, YVPKPXX:VPQ:EPLP:DDSSNVI:EQLSN:VRS:SXGXH, TVPKPXX:VPQ:EPLP:DDSSNVI:EQLSN:VRS:AXGXH, AVPKAXX:VPQ:EPLP:DSSNNVI:EQLSN:VRS:AXGXH, KVGKAXX:VPQ:EPLP:DDMGVPT:EQLSN:VRS:XGXR, KASKAXX:VPQ:EPLP:DKGVVTY:EQLSN:VRS:EXGXR, GSAGPXX:VPQ:EPLP:NDKQQII:EQLSN:VRS:RXGXS, AAPASXX:VPQ:EPLP:DAANNVV:EQLSN:VRS:AXGXR, STPPTXX:VPQ:EPLP:DSANNVV:EQLSN:VRS:SXGXR, HVPKPXX:VPQ:EPLP:DDSSNVI:EQLSN:VRS:SXGXH, RVPSTXX:VPQ:EPLP:DNGRVLL:EQLSN:VRS:XGXL, ASASPXX:VPQ:EPLP:IGKTPKI:EQLSN:VRS:XKXS, ASASPXX:VPQ:EPLP:VGRTPKV:EQLSN:VRS:XKXS, NDEGLEX:VPQ:EPLP:RIKPHQGQH:EQLSN:VRS:KXEXR, NDEGLEX:VPQ:EPLP:RIKPHQGQH:EQLSN:VRS:QXEXR, SSVKXQP:VPQ:EPLP:EYVRKKPKL:EQLSN:VRS:LEXAXA, RNVQXRP:VPQ:EPLP:EIVRKKPIF:EQLSN:VRS:LAXKXE, KIPKAXX:VPT:EPLP:DENEKVV:EQLSN:VVE:GXGXR, GIPEPXX:VPE:EPLP:DENKNVV:EQLSN:TVE:SXAXR, SIPKAXX:VPT:EPLP:DEYDKVV:EQLSN:VVE:GXGXR, HVTKPTX:APT:EPLP:DDSSNVI:EQLSN:VVR:SXGXH, YVPKPXX:APT:EPLP:DDSSNVI:EQLSN:VVR:SXGXH, TVPKPXX:APT:EPLP:DDSSNVI:EQLSN:VVR:AXGXH, AVPKAXX:APT:EPLP:DSSNNVI:EQLSN:VVK:AXGXH, KVGKAXX:VPT:EPLP:DDMGVPT:EQLSN:VAE:XGXR, KASKAXX:VPT:EPLP:DKGVVTY:EQLSN:AVS:EXGXR, GSAGPXX:TPT:EPLP:NDKQQII:EQLSN:VVD:RXGXS, AAPASXX:VPA:EPLP:DAANNVV:EQLSN:VVE:AXGXR, STPPTXX:VPT:EPLP:DSANNVV:EQLSN:VVE:SXGXR, HVPKPXX:APT:EPLP:DDSSNVI:EQLSN:VVR:SXGXH, RVPSTXX:APV:EPLP:DNGRVLL:EQLSN:VEE:XGXL, ASASPXX:VSQ:EPLP:IGKTPKI:EQLSN:VKS:XKXS, ASASPXX:VPQ:EPLP:VGRTPKV:EQLSN:VKS:XKXS, NDEGLEX:VPT:EPLP:RIKPHQGQH:EQLSN:QHN:KXEXR, NDEGLEX:VPT:EPLP:RIKPHQGQH:EQLSN:EHS:QXEXR, SSVKXQP:SRV:EPLP:EYVRKKPKL:EQLSN:EEH:LEXAXA, RNVQXRP:TQV:EPLP:EIVRKKPIF:EQLSN:EDH:LAXKXE, KIPKAXX:VSQ:EPLT:DENEKVV:EQLSN:VKS:GXGXR, GIPEPXX:VSQ:EPLT:DENKNVV:EQLSN:VKS:SXAXR, SIPKAXX:VSQ:EPLT:DEYDKVV:EQLSN:VKS:GXGXR, HVTKPTX:VSQ:EPLT:DDSSNVI:EQLSN:VKS:SXGXH, YVPKPXX:VSQ:EPLT:DDSSNVI:EQLSN:VKS:SXGXH, TVPKPXX:VSQ:EPLT:DDSSNVI:EQLSN:VKS:AXGXH, AVPKAXX:VSQ:EPLT:DSSNNVI:EQLSN:VKS:AXGXH, KVGKAXX:VSQ:EPLT:DDMGVPT:EQLSN:VKS:XGXR, KASKAXX:VSQ:EPLT:DKGVVTY:EQLSN:VKS:EXGXR, GSAGPXX:VSQ:EPLT:NDKQQII:EQLSN:VKS:RXGXS, AAPASXX:VSQ:EPLT:DAANNVV:EQLSN:VKS:AXGXR, STPPTXX:VSQ:EPLT:DSANNVV:EQLSN:VKS:SXGXR, HVPKPXX:VSQ:EPLT:DDSSNVI:EQLSN:VKS:SXGXH, RVPSTXX:VSQ:EPLT:DNGRVLL:EQLSN:VKS:XGXL, ASAAPXX:VSQ:EPLT:VGRKPKV:EQLSN:VKS:XKXS, ASASPXX:VSQ:EPLT:VGRTPKV:EQLSN:VKS:XKXS, NDEGLEX:VSQ:EPLT:RIKPHQGQH:EQLSN:VKS:KXEXR, NDEGLEX:VSQ:EPLT:RIKPHQGQH:EQLSN:VKS:QXEXR, SSVKXQP:VSQ:EPLT:EYVRKKPKL:EQLSN:VKS:LEXAXA, RNVQXRP:VSQ:EPLT:EIVRKKPIF:EQLSN:VKS:LAXKXE, KIPKAXX:VPT:EPLT:DENEKVV:EQLSN:VVE:GXGXR, GIPEPXX:VPE:EPLT:DENKNVV:EQLSN:TVE:SXAXR, SIPKAXX:VPT:EPLT:DEYDKVV:EQLSN:VVE:GXGXR, HVTKPTX:APT:EPLT:DDSSNVI:EQLSN:VVR:SXGXH, YVPKPXX:APT:EPLT:DDSSNVI:EQLSN:VVR:SXGXH, TVPKPXX:APT:EPLT:DDSSNVI:EQLSN:VVR:AXGXH, AVPKAXX:APT:EPLT:DSSNNVI:EQLSN:VVK:AXGXH, KVGKAXX:VPT:EPLT:DDMGVPT:EQLSN:VAE:XGXR, KASKAXX:VPT:EPLT:DKGVVTY:EQLSN:AVS:EXGXR, GSAGPXX:TPT:EPLT:NDKQQII:EQLSN:VVD:RXGXS, AAPASXX:VPA:EPLT:DAANNVV:EQLSN:VVE:AXGXR, STPPTXX:VPT:EPLT:DSANNVV:EQLSN:VVE:SXGXR, HVPKPXX:APT:EPLT:DDSSNVI:EQLSN:VVR:SXGXH, RVPSTXX:APV:EPLT:DNGRVLL:EQLSN:VEE:XGXL, ASAAPXX:VPQ:EPLT:VGRKPKV:EQLSN:VRS:XKXS, ASASPXX:VPQ:EPLT:VGRTPKV:EQLSN:VKS:XKXS, NDEGLEX:VPT:EPLT:RIKPHQGQH:EQLSN:QHN:KXEXR, NDEGLEX:VPT:EPLT:RIKPHQGQH:EQLSN:EHS:QXEXR, SSVKXQP:SRV:EPLT:EYVRKKPKL:EQLSN:EEH:LEXAXA, RNVQXRP:TQV:EPLT:EIVRKKPIF:EQLSN:EDH:LAXKXE, KIPKAXX:VPQ:EPLT:DENEKVV:EQLSN:VKS:GXGXR, GIPEPXX:VPQ:EPLT:DENKNVV:EQLSN:VKS:SXAXR, SIPKAXX:VPQ:EPLT:DEYDKVV:EQLSN:VKS:GXGXR, HVTKPTX:VPQ:EPLT:DDSSNVI:EQLSN:VKS:SXGXH, YVPKPXX:VPQ:EPLT:DDSSNVI:EQLSN:VKS:SXGXH, TVPKPXX:VPQ:EPLT:DDSSNVI:EQLSN:VKS:AXGXH, AVPKAXX:VPQ:EPLT:DSSNNVI:EQLSN:VKS:AXGXH, KVGKAXX:VPQ:EPLT:DDMGVPT:EQLSN:VKS:XGXR, KASKAXX:VPQ:EPLT:DKGVVTY:EQLSN:VKS:EXGXR, GSAGPXX:VPQ:EPLT:NDKQQII:EQLSN:VKS:RXGXS, AAPASXX:VPQ:EPLT:DAANNVV:EQLSN:VKS:AXGXR, STPPTXX:VPQ:EPLT:DSANNVV:EQLSN:VKS:SXGXR, HVPKPXX:VPQ:EPLT:DDSSNVI:EQLSN:VKS:SXGXH, RVPSTXX:VPQ:EPLT:DNGRVLL:EQLSN:VKS:XGXL, ASAAPXX:VPQ:EPLT:VGRKPKV:EQLSN:VKS:XKXS, ASASPXX:VPQ:EPLT:IGKTPKI:EQLSN:VKS:XKXS, NDEGLEX:VPQ:EPLT:RIKPHQGQH:EQLSN:VKS:KXEXR, NDEGLEX:VPQ:EPLT:RIKPHQGQH:EQLSN:VKS:QXEXR, SSVKXQP:VPQ:EPLT:EYVRKKPKL:EQLSN:VKS:LEXAXA, RNVQXRP:VPQ:EPLT:EIVRKKPIF:EQLSN:VKS:LAXKXE, ASASPXX:VSQ:EPLT:IGKTPKI:EQLSN:VKS:XKXS, KIPKAXX:VPT:SNIT:DENEKVV:IGEMS:QHN:GXGXR, GIPEPXX:VPT:SNIT:DENKNVV:IGEMS:QHN:SXAXR, SIPKAXX:VPT:SNIT:DEYDKVV:IGEMS:QHN:GXGXR, HVTKPTX:VPT:SNIT:DDSSNVI:IGEMS:QHN:SXGXH, YVPKPXX:VPT:SNIT:DDSSNVI:IGEMS:QHN:SXGXH, TVPKPXX:VPT:SNIT:DDSSNVI:IGEMS:QHN:AXGXH, AVPKAXX:VPT:SNIT:DSSNNVI:IGEMS:QHN:AXGXH, KVGKAXX:VPT:SNIT:DDMGVPT:IGEMS:QHN:XGXR, KASKAXX:VPT:SNIT:DKGVVTY:IGEMS:QHN:EXGXR, GSAGPXX:VPT:SNIT:NDKQQII:IGEMS:QHN:RXGXS, AAPASXX:VPT:SNIT:DAANNVV:IGEMS:QHN:AXGXR, STPPTXX:VPT:SNIT:DSANNVV:IGEMS:QHN:SXGXR, HVPKPXX:VPT:SNIT:DDSSNVI:IGEMS:QHN:SXGXH, RVPSTXX:VPT:SNIT:DNGRVLL:IGEMS:QHN:XGXL, ASAAPXX:VPT:SNIT:VGRKPKV:IGEMS:QHN:XKXS, ASASPXX:VPT:SNIT:IGKTPKI:IGEMS:QHN:XKXS, ASASPXX:VPT:SNIT:VGRTPKV:IGEMS:QHN:XKXS, NDEGLEX:VPT:SNIT:RIKPHQGQH:IGEMS:QHN:QXEXR, NDEGLEX:VPT:SNIT:RIKPHQGQH:IGEMS:QHN:KXEXR, SSVKXQP:VPT:SNIT:EYVRKKPKL:IGEMS:QHN:LEXAXA, RNVQXRP:VPT:SNIT:EIVRKKPIF:IGEMS:QHN:LAXKXE, KIPKAXX:VPT:SNIT:DENEKVV:IGEMS:VVE:GXGXR, GIPEPXX:VPE:SNIT:DENKNVV:IGEMS:TVE:SXAXR, SIPKAXX:VPT:SNIT:DEYDKVV:IGEMS:VVE:GXGXR, HVTKPTX:APT:SNIT:DDSSNVI:IGEMS:VVR:SXGXH, YVPKPXX:APT:SNIT:DDSSNVI:IGEMS:VVR:SXGXH, TVPKPXX:APT:SNIT:DDSSNVI:IGEMS:VVR:AXGXH, AVPKAXX:APT:SNIT:DSSNNVI:IGEMS:VVK:AXGXH, KVGKAXX:VPT:SNIT:DDMGVPT:IGEMS:VAE:XGXR, KASKAXX:VPT:SNIT:DKGVVTY:IGEMS:AVS:EXGXR, GSAGPXX:TPT:SNIT:NDKQQII:IGEMS:VVD:RXGXS, AAPASXX:VPA:SNIT:DAANNVV:IGEMS:VVE:AXGXR, STPPTXX:VPT:SNIT:DSANNVV:IGEMS:VVE:SXGXR, HVPKPXX:APT:SNIT:DDSSNVI:IGEMS:VVR:SXGXH, RVPSTXX:APV:SNIT:DNGRVLL:IGEMS:VEE:XGXL, ASAAPXX:VPQ:SNIT:VGRKPKV:IGEMS:VRS:XKXS, ASASPXX:VSQ:SNIT:IGKTPKI:IGEMS:VKS:XKXS, ASASPXX:VPQ:SNIT:VGRTPKV:IGEMS:VKS:XKXS, NDEGLEX:VPT:SNIT:RIKPHQGQH:IGEMS:EHS:QXEXR, SSVKXQP:SRV:SNIT:EYVRKKPKL:IGEMS:EEH:LEXAXA, RNVQXRP:TQV:SNIT:EIVRKKPIF:IGEMS:EDH:LAXKXE, KIPKAXX:VPT:SNIT:DENEKVV:LGEMS:EHS:GXGXR, GIPEPXX:VPT:SNIT:DENKNVV:LGEMS:EHS:SXAXR, SIPKAXX:VPT:SNIT:DEYDKVV:LGEMS:EHS:GXGXR, HVTKPTX:VPT:SNIT:DDSSNVI:LGEMS:EHS:SXGXH YVPKPXX:VPT:SNIT:DDSSNVI:LGEMS:EHS:SXGXH TVPKPXX:VPT:SNIT:DDSSNVI:LGEMS:EHS:AXGXH, AVPKAXX:VPT:SNIT:DSSNNVI:LGEMS:EHS:AXGXH KVGKAXX:VPT:SNIT:DDMGVPT:LGEMS:EHS:XGXR, KASKAXX:VPT:SNIT:DKGVVTY:LGEMS:EHS:EXGXR, GSAGPXX:VPT:SNIT:NDKQQII:LGEMS:EHS:RXGXS, AAPASXX:VPT:SNIT:DAANNVV:LGEMS:EHS:AXGXR, STPPTXX:VPT:SNIT:DSANNVV:LGEMS:EHS:SXGXR, HVPKPXX:VPT:SNIT:DDSSNVI:LGEMS:EHS:SXGXH, RVPSTXX:VPT:SNIT:DNGRVLL:LGEMS:EHS:XGXL, ASAAPXX:VPT:SNIT:VGRKPKV:LGEMS:EHS:XKXS, ASASPXX:VPT:SNIT:IGKTPKI:LGEMS:EHS:XKXS, ASASPXX:VPT:SNIT:VGRTPKV:LGEMS:EHS:XKXS, NDEGLEX:VPT:SNIT:RIKPHQGQH:LGEMS:EHS:KXEXR, SSVKXQP:VPT:SNIT:EYVRKKPKL:LGEMS:EHS:LEXAXA, RNVQXRP:VPT:SNIT:EIVRKKPIF:LGEMS:EHS:LAXKXE, KIPKAXX:VPT:SNIT:DENEKVV:LGEMS:VVE:GXGXR, GIPEPXX:VPE:SNIT:DENKNVV:LGEMS:TVE:SXAXR, SIPKAXX:VPT:SNIT:DEYDKVV:LGEMS:VVE:GXGXR, HVTKPTX:APT:SNIT:DDSSNVI:LGEMS:VVR:SXGXH YVPKPXX:APT:SNIT:DDSSNVI:LGEMS:VVR:SXGXH TVPKPXX:APT:SNIT:DDSSNVI:LGEMS:VVR:AXGXH, AVPKAXX:APT:SNIT:DSSNNVI:LGEMS:VVK:AXGXH KVGKAXX:VPT:SNIT:DDMGVPT:LGEMS:VAE:XGXR, KASKAXX:VPT:SNIT:DKGVVTY:LGEMS:AVS:EXGXR, GSAGPXX:TPT:SNIT:NDKQQII:LGEMS:VVD:RXGXS, AAPASXX:VPA:SNIT:DAANNVV:LGEMS:VVE:AXGXR, STPPTXX:VPT:SNIT:DSANNVV:LGEMS:VVE:SXGXR, HVPKPXX:APT:SNIT:DDSSNVI:LGEMS:VVR:SXGXH, RVPSTXX:APV:SNIT:DNGRVLL:LGEMS:VEE:XGXL, ASAAPXX:VPQ:SNIT:VGRKPKV:LGEMS:VRS:XKXS, ASASPXX:VSQ:SNIT:IGKTPKI:LGEMS:VKS:XKXS, ASASPXX:VPQ:SNIT:VGRTPKV:LGEMS:VKS:XKXS, NDEGLEX:VPT:SNIT:RIKPHQGQH:LGEMS:QHN:KXEXR, SSVKXQP:SRV:SNIT:EYVRKKPKL:LGEMS:EEH:LEXAXA, RNVQXRP:TQV:SNIT:EIVRKKPIF:LGEMS:EDH:LAXKXE, KIPKAXX:SRV:RSVK:DENEKVV:KEVQV:EEH:GXGXR, GIPEPXX:SRV:RSVK:DENKNVV:KEVQV:EEH:SXAXR, SIPKAXX:SRV:RSVK:DEYDKVV:KEVQV:EEH:GXGXR, HVTKPTX:SRV:RSVK:DDSSNVI:KEVQV:EEH:SXGXH, YVPKPXX:SRV:RSVK:DDSSNVI:KEVQV:EEH:SXGXH, TVPKPXX:SRV:RSVK:DDSSNVI:KEVQV:EEH:AXGXH, AVPKAXX:SRV:RSVK:DSSNNVI:KEVQV:EEH:AXGXH, KVGKAXX:SRV:RSVK:DDMGVPT:KEVQV:EEH:XGXR, KASKAXX:SRV:RSVK:DKGVVTY:KEVQV:EEH:EXGXR, GSAGPXX:SRV:RSVK:NDKQQII:KEVQV:EEH:RXGXS, AAPASXX:SRV:RSVK:DAANNVV:KEVQV:EEH:AXGXR, STPPTXX:SRV:RSVK:DSANNVV:KEVQV:EEH:SXGXR, HVPKPXX:SRV:RSVK:DDSSNVI:KEVQV:EEH:SXGXH, RVPSTXX:SRV:RSVK:DNGRVLL:KEVQV:EEH:XGXL, ASAAPXX:SRV:RSVK:VGRKPKV:KEVQV:EEH:XKXS, ASASPXX:SRV:RSVK:IGKTPKI:KEVQV:EEH:XKXS, ASASPXX:SRV:RSVK:VGRTPKV:KEVQV:EEH:XKXS, NDEGLEX:SRV:RSVK:RIKPHQGQH:KEVQV:EEH:KXEXR NDEGLEX:SRV:RSVK:RIKPHQGQH:KEVQV:EEH:QXEXR, RNVQXRP:SRV:RSVK:EIVRKKPIF:KEVQV:EEH:LAXKXE, KIPKAXX:VPT:RSVK:DENEKVV:KEVQV:VVE:GXGXR, GIPEPXX:VPE:RSVK:DENKNVV:KEVQV:TVE:SXAXR, SIPKAXX:VPT:RSVK:DEYDKVV:KEVQV:VVE:GXGXR, HVTKPTX:APT:RSVK:DDSSNVI:KEVQV:VVR:SXGXH, YVPKPXX:APT:RSVK:DDSSNVI:KEVQV:VVR:SXGXH, TVPKPXX:APT:RSVK:DDSSNVI:KEVQV:VVR:AXGXH, AVPKAXX:APT:RSVK:DSSNNVI:KEVQV:VVK:AXGXH, KVGKAXX:VPT:RSVK:DDMGVPT:KEVQV:VAE:XGXR, KASKAXX:VPT:RSVK:DKGVVTY:KEVQV:AVS:EXGXR, GSAGPXX:TPT:RSVK:NDKQQII:KEVQV:VVD:RXGXS, AAPASXX:VPA:RSVK:DAANNVV:KEVQV:VVE:AXGXR, STPPTXX:VPT:RSVK:DSANNVV:KEVQV:VVE:SXGXR, HVPKPXX:APT:RSVK:DDSSNVI:KEVQV:VVR:SXGXH, RVPSTXX:APV:RSVK:DNGRVLL:KEVQV:VEE:XGXL, ASAAPXX:VPQ:RSVK:VGRKPKV:KEVQV:VRS:XKXS, ASASPXX:VSQ:RSVK:IGKTPKI:KEVQV:VKS:XKXS, ASASPXX:VPQ:RSVK:VGRTPKV:KEVQV:VKS:XKXS, NDEGLEX:VPT:RSVK:RIKPHQGQH:KEVQV:QHN:KXEXR, NDEGLEX:VPT:RSVK:RIKPHQGQH:KEVQV:EHS:QXEXR, RNVQXRP:TQV:RSVK:EIVRKKPIF:KEVQV:EDH:LAXKXE, KIPKAXX:TQV:RPVQ:DENEKVV:KKATV:EDH:GXGXR, GIPEPXX:TQV:RPVQ:DENKNVV:KKATV:EDH:SXAXR, SIPKAXX:TQV:RPVQ:DEYDKVV:KKATV:EDH:GXGXR, HVTKPTX:TQV:RPVQ:DDSSNVI:KKATV:EDH:SXGXH, YVPKPXX:TQV:RPVQ:DDSSNVI:KKATV:EDH:SXGXH, TVPKPXX:TQV:RPVQ:DDSSNVI:KKATV:EDH:AXGXH, AVPKAXX:TQV:RPVQ:DSSNNVI:KKATV:EDH:AXGXH, KVGKAXX:TQV:RPVQ:DDMGVPT:KKATV:EDH:XGXR, KASKAXX:TQV:RPVQ:DKGVVTY:KKATV:EDH:EXGXR, GSAGPXX:TQV:RPVQ:NDKQQII:KKATV:EDH:RXGXS, AAPASXX:TQV:RPVQ:DAANNVV:KKATV:EDH:AXGXR, STPPTXX:TQV:RPVQ:DSANNVV:KKATV:EDH:SXGXR, HVPKPXX:TQV:RPVQ:DDSSNVI:KKATV:EDH:SXGXH, RVPSTXX:TQV:RPVQ:DNGRVLL:KKATV:EDH:XGXL, ASAAPXX:TQV:RPVQ:VGRKPKV:KKATV:EDH:XKXS, ASASPXX:TQV:RPVQ:IGKTPKI:KKATV:EDH:XKXS, ASASPXX:TQV:RPVQ:VGRTPKV:KKATV:EDH:XKXS, NDEGLEX:TQV:RPVQ:RIKPHQGQH:KKATV:EDH:KXEXR, NDEGLEX:TQV:RPVQ:RIKPHQGQH:KKATV:EDH:QXEXR, SSVKXQP:TQV:RPVQ:EYVRKKPKL:KKATV:EDH:LEXAXA, KIPKAXX:VPT:RPVQ:DENEKVV:KKATV:VVE:GXGXR, GIPEPXX:VPE:RPVQ:DENKNVV:KKATV:TVE:SXAXR, SIPKAXX:VPT:RPVQ:DEYDKVV:KKATV:VVE:GXGXR, HVTKPTX:APT:RPVQ:DDSSNVI:KKATV:VVR:SXGXH, YVPKPXX:APT:RPVQ:DDSSNVI:KKATV:VVR:SXGXH, TVPKPXX:APT:RPVQ:DDSSNVI:KKATV:VVR:AXGXH, AVPKAXX:APT:RPVQ:DSSNNVI:KKATV:VVK:AXGXH, KVGKAXX:VPT:RPVQ:DDMGVPT:KKATV:VAE:XGXR, KASKAXX:VPT:RPVQ:DKGVVTY:KKATV:AVS:EXGXR, GSAGPXX:TPT:RPVQ:NDKQQII:KKATV:VVD:RXGXS, AAPASXX:VPA:RPVQ:DAANNVV:KKATV:VVE:AXGXR, STPPTXX:VPT:RPVQ:DSANNVV:KKATV:VVE:SXGXR, HVPKPXX:APT:RPVQ:DDSSNVI:KKATV:VVR:SXGXH, RVPSTXX:APV:RPVQ:DNGRVLL:KKATV:VEE:XGXL, ASAAPXX:VPQ:RPVQ:VGRKPKV:KKATV:VRS:XKXS, ASASPXX:VSQ:RPVQ:IGKTPKI:KKATV:VKS:XKXS, ASASPXX:VPQ:RPVQ:VGRTPKV:KKATV:VKS:XKXS, NDEGLEX:VPT:RPVQ:RIKPHQGQH:KKATV:QHN:KXEXR, NDEGLEX:VPT:RPVQ:RIKPHQGQH:KKATV:EHS:QXEXR and SSVKXQP:SRV:RPVQ:EYVRKKPKL:KKATV:EEH:LEXAXA. More particularly, in certain embodiments, the heptuplet PEP7:PEP3:PEP1:LINKER:PEP2:PEP4:PEP8 is selected from the group consisting of GIPEPXX:VPT:SAIS:DENKNVV:LKNYQ:VVE:SXAXR, HVTKPTX:VPT:SAIS:DDSSNVI:LKNYQ:VVE:SXGXH, YVPKPXX:VPT:SAIS:DDSSNVI:LKNYQ:VVE:SXGXH, TVPKPXX:VPT:SAIS:DDSSNVI:LKNYQ:VVE:AXGXH, AVPKAXX:VPT:SAIS:DSSNNVI:LKNYQ:VVE:AXGXH, KVGKAXX:VPT:SAIS:DDMGVPT:LKNYQ:VVE:XGXR, KASKAXX:VPT:SAIS:DKGVVTY:LKNYQ:VVE:EXGXR, GSAGPXX:VPT:SAIS:NDKQQII:LKNYQ:VVE:RXGXS, AAPASXX:VPT:SAIS:DAANNVV:LKNYQ:VVE:AXGXR, STPPTXX:VPT:SAIS:DSANNVV:LKNYQ:VVE:SXGXR, HVPKPXX:VPT:SAIS:DDSSNVI:LKNYQ:VVE:SXGXH, RVPSTXX:VPT:SAIS:DNGRVLL:LKNYQ:VVE:XGXL, ASAAPXX:VPT:SAIS:VGRKPKV:LKNYQ:VVE:XKXS, ASASPXX:VPT:SAIS:IGKTPKI:LKNYQ:VVE:XKXS, ASASPXX:VPT:SAIS:VGRTPKV:LKNYQ:VVE:XKXS, GIPEPXX:VPE:SAIS:DENKNVV:LKNYQ:TVE:SXAXR, HVTKPTX:APT:SAIS:DDSSNVI:LKNYQ:VVR:SXGXH, YVPKPXX:APT:SAIS:DDSSNVI:LKNYQ:VVR:SXGXH, TVPKPXX:APT:SAIS:DDSSNVI:LKNYQ:VVR:AXGXH, AVPKAXX:APT:SAIS:DSSNNVI:LKNYQ:VVK:AXGXH, KVGKAXX:VPT:SAIS:DDMGVPT:LKNYQ:VAE:XGXR, KASKAXX:VPT:SAIS:DKGVVTY:LKNYQ:AVS:EXGXR, GSAGPXX:TPT:SAIS:NDKQQII:LKNYQ:VVD:RXGXS, AAPASXX:VPA:SAIS:DAANNVV:LKNYQ:VVE:AXGXR, HVPKPXX:APT:SAIS:DDSSNVI:LKNYQ:VVR:SXGXH, RVPSTXX:APV:SAIS:DNGRVLL:LKNYQ:VEE:XGXL, ASAAPXX:VPQ:SAIS:VGRKPKV:LKNYQ:VRS:XKXS, ASASPXX:VSQ:SAIS:IGKTPKI:LKNYQ:VKS:XKXS, ASASPXX:VPQ:SAIS:VGRTPKV:LKNYQ:VKS:XKXS, NDEGLEX:VPT:SAIS:RIKPHQGQH:LKNYQ:QHN:KXEXR, NDEGLEX:VPT:SAIS:RIKPHQGQH:LKNYQ:EHS:QXEXR, SSVKXQP:SRV:SAIS:EYVRKKPKL:LKNYQ:EEH:LEXAXA, RNVQXRP:TQV:SAIS:EIVRKKPIF:LKNYQ:EDH:LAXKXE, KIPKAXX:VPE:SSLS:DENEKVV:LKVYP:TVE:GXGXR, SIPKAXX:VPE:SSLS:DEYDKVV:LKVYP:TVE:GXGXR, HVTKPTX:VPE:SSLS:DDSSNVI:LKVYP:TVE:SXGXH, YVPKPXX:VPE:SSLS:DDSSNVI:LKVYP:TVE:SXGXH, TVPKPXX:VPE:SSLS:DDSSNVI:LKVYP:TVE:AXGXH, AVPKAXX:VPE:SSLS:DSSNNVI:LKVYP:TVE:AXGXH, KVGKAXX:VPE:SSLS:DDMGVPT:LKVYP:TVE:XGXR, KASKAXX:VPE:SSLS:DKGVVTY:LKVYP:TVE:EXGXR, GSAGPXX:VPE:SSLS:NDKQQII:LKVYP:TVE:RXGXS, AAPASXX:VPE:SSLS:DAANNVV:LKVYP:TVE:AXGXR, STPPTXX:VPE:SSLS:DSANNVV:LKVYP:TVE:SXGXR, HVPKPXX:VPE:SSLS:DDSSNVI:LKVYP:TVE:SXGXH, RVPSTXX:VPE:SSLS:DNGRVLL:LKVYP:TVE:XGXL, ASAAPXX:VPE:SSLS:VGRKPKV:LKVYP:TVE:XKXS, ASASPXX:VPE:SSLS:IGKTPKI:LKVYP:TVE:XKXS, ASASPXX:VPE:SSLS:VGRTPKV:LKVYP:TVE:XKXS, KIPKAXX:VPT:SSLS:DENEKVV:LKVYP:VVE:GXGXR, SIPKAXX:VPT:SSLS:DEYDKVV:LKVYP:VVE:GXGXR, HVTKPTX:APT:SSLS:DDSSNVI:LKVYP:VVR:SXGXH, YVPKPXX:APT:SSLS:DDSSNVI:LKVYP:VVR:SXGXH, TVPKPXX:APT:SSLS:DDSSNVI:LKVYP:VVR:AXGXH, AVPKAXX:APT:SSLS:DSSNNVI:LKVYP:VVK:AXGXH, KVGKAXX:VPT:SSLS:DDMGVPT:LKVYP:VAE:XGXR, KASKAXX:VPT:SSLS:DKGVVTY:LKVYP:AVS:EXGXR, GSAGPXX:TPT:SSLS:NDKQQII:LKVYP:VVD:RXGXS, AAPASXX:VPA:SSLS:DAANNVV:LKVYP:VVE:AXGXR, STPPTXX:VPT:SSLS:DSANNVV:LKVYP:VVE:SXGXR HVPKPXX:APT:SSLS:DDSSNVI:LKVYP:VVR:SXGXH, RVPSTXX:APV:SSLS:DNGRVLL:LKVYP:VEE:XGXL, ASAAPXX:VPQ:SSLS:VGRKPKV:LKVYP:VRS:XKXS, ASASPXX:VSQ:SSLS:IGKTPKI:LKVYP:VKS:XKXS, ASASPXX:VPQ:SSLS:VGRTPKV:LKVYP:VKS:XKXS, NDEGLEX:VPT:SSLS:RIKPHQGQH:LKVYP:QHN:KXEXR, NDEGLEX:VPT:SSLS:RIKPHQGQH:LKVYP:EHS:QXEXR, SSVKXQP:SRV:SSLS:EYVRKKPKL:LKVYP:EEH:LEXAXA, RNVQXRP:TQV:SSLS:EIVRKKPIF:LKVYP:EDH:LAXKXE, KIPKAXX:APT:NAIS:DENEKVV:LKKYR:VVR:GXGXR, GIPEPXX:APT:NAIS:DENKNVV:LKKYR:VVR:SXAXR, SIPKAXX:APT:NAIS:DEYDKVV:LKKYR:VVR:GXGXR, AVPKAXX:APT:NAIS:DSSNNVI:LKKYR:VVR:AXGXH, KVGKAXX:APT:NAIS:DDMGVPT:LKKYR:VVR:XGXR, KASKAXX:APT:NAIS:DKGVVTY:LKKYR:VVR:EXGXR, GSAGPXX:APT:NAIS:NDKQQII:LKKYR:VVR:RXGXS, AAPASXX:APT:NAIS:DAANNVV:LKKYR:VVR:AXGXR, STPPTXX:APT:NAIS:DSANNVV:LKKYR:VVR:SXGXR, RVPSTXX:APT:NAIS:DNGRVLL:LKKYR:VVR:XGXL, ASAAPXX:APT:NAIS:VGRKPKV:LKKYR:VVR:XKXS, ASASPXX:APT:NAIS:IGKTPKI:LKKYR:VVR:XKXS, ASASPXX:APT:NAIS:VGRTPKV:LKKYR:VVR:XKXS, KIPKAXX:VPT:NAIS:DENEKVV:LKKYR:VVE:GXGXR, GIPEPXX:VPE:NAIS:DENKNVV:LKKYR:TVE:SXAXR, SIPKAXX:VPT:NAIS:DEYDKVV:LKKYR:VVE:GXGXR, AVPKAXX:APT:NAIS:DSSNNVI:LKKYR:VVK:AXGXH, KVGKAXX:VPT:NAIS:DDMGVPT:LKKYR:VAE:XGXR, KASKAXX:VPT:NAIS:DKGVVTY:LKKYR:AVS:EXGXR, GSAGPXX:TPT:NAIS:NDKQQII:LKKYR:VVD:RXGXS, AAPASXX:VPA:NAIS:DAANNVV:LKKYR:VVE:AXGXR, STPPTXX:VPT:NAIS:DSANNVV:LKKYR:VVE:SXGXR, RVPSTXX:APV:NAIS:DNGRVLL:LKKYR:VEE:XGXL, ASAAPXX:VPQ:NAIS:VGRKPKV:LKKYR:VRS:XKXS, ASASPXX:VSQ:NAIS:IGKTPKI:LKKYR:VKS:XKXS, ASASPXX:VPQ:NAIS:VGRTPKV:LKKYR:VKS:XKXS, NDEGLEX:VPT:NAIS:RIKPHQGQH:LKKYR:QHN:KXEXR, NDEGLEX:VPT:NAIS:RIKPHQGQH:LKKYR:EHS:QXEXR, SSVKXQP:SRV:NAIS:EYVRKKPKL:LKKYR:EEH:LEXAXA, RNVQXRP:TQV:NAIS:EIVRKKPIF:LKKYR:EDH:LAXKXE, KIPKAXX:APT:SATS:DENEKVV:LRKHR:VVK:GXGXR, GIPEPXX:APT:SATS:DENKNVV:LRKHR:VVK:SXAXR, SIPKAXX:APT:SATS:DEYDKVV:LRKHR:VVK:GXGXR, HVTKPTX:APT:SATS:DDSSNVI:LRKHR:VVK:SXGXH, YVPKPXX:APT:SATS:DDSSNVI:LRKHR:VVK:SXGXH, TVPKPXX:APT:SATS:DDSSNVI:LRKHR:VVK:AXGXH, KVGKAXX:APT:SATS:DDMGVPT:LRKHR:VVK:XGXR, KASKAXX:APT:SATS:DKGVVTY:LRKHR:VVK:EXGXR, GSAGPXX:APT:SATS:NDKQQII:LRKHR:VVK:RXGXS, AAPASXX:APT:SATS:DAANNVV:LRKHR:VVK:AXGXR, STPPTXX:APT:SATS:DSANNVV:LRKHR:VVK:SXGXR, HVPKPXX:APT:SATS:DDSSNVI:LRKHR:VVK:SXGXH, RVPSTXX:APT:SATS:DNGRVLL:LRKHR:VVK:XGXL, ASAAPXX:APT:SATS:VGRKPKV:LRKHR:VVK:XKXS, ASASPXX:APT:SATS:IGKTPKI:LRKHR:VVK:XKXS, ASASPXX:APT:SATS:VGRTPKV:LRKHR:VVK:XKXS, KIPKAXX:VPT:SATS:DENEKVV:LRKHR:VVE:GXGXR, GIPEPXX:VPE:SATS:DENKNVV:LRKHR:TVE:SXAXR, SIPKAXX:VPT:SATS:DEYDKVV:LRKHR:VVE:GXGXR, HVTKPTX:APT:SATS:DDSSNVI:LRKHR:VVR:SXGXH, YVPKPXX:APT:SATS:DDSSNVI:LRKHR:VVR:SXGXH, TVPKPXX:APT:SATS:DDSSNVI:LRKHR:VVR:AXGXH, KVGKAXX:VPT:SATS:DDMGVPT:LRKHR:VAE:XGXR, KASKAXX:VPT:SATS:DKGVVTY:LRKHR:AVS:EXGXR, GSAGPXX:TPT:SATS:NDKQQII:LRKHR:VVD:RXGXS, AAPASXX:VPA:SATS:DAANNVV:LRKHR:VVE:AXGXR, STPPTXX:VPT:SATS:DSANNVV:LRKHR:VVE:SXGXR, HVPKPXX:APT:SATS:DDSSNVI:LRKHR:VVR:SXGXH, RVPSTXX:APV:SATS:DNGRVLL:LRKHR:VEE:XGXL, ASAAPXX:VPQ:SATS:VGRKPKV:LRKHR:VRS:XKXS, ASASPXX:VSQ:SATS:IGKTPKI:LRKHR:VKS:XKXS, ASASPXX:VPQ:SATS:VGRTPKV:LRKHR:VKS:XKXS, NDEGLEX:VPT:SATS:RIKPHQGQH:LRKHR:QHN:KXEXR, NDEGLEX:VPT:SATS:RIKPHQGQH:LRKHR:EHS:QXEXR, SSVKXQP:SRV:SATS:EYVRKKPKL:LRKHR:EEH:LEXAXA, RNVQXRP:TQV:SATS:EIVRKKPIF:LRKHR:EDH:LAXKXE, KIPKAXX:VPT:SPIS:DENEKVV:LKYHY:VAE:GXGXR, GIPEPXX:VPT:SPIS:DENKNVV:LKYHY:VAE:SXAXR, SIPKAXX:VPT:SPIS:DEYDKVV:LKYHY:VAE:GXGXR, HVTKPTX:VPT:SPIS:DDSSNVI:LKYHY:VAE:SXGXH, YVPKPXX:VPT:SPIS:DDSSNVI:LKYHY:VAE:SXGXH, TVPKPXX:VPT:SPIS:DDSSNVI:LKYHY:VAE:AXGXH, AVPKAXX:VPT:SPIS:DSSNNVI:LKYHY:VAE:AXGXH, KASKAXX:VPT:SPIS:DKGVVTY:LKYHY:VAE:EXGXR, GSAGPXX:VPT:SPIS:NDKQQII:LKYHY:VAE:RXGXS, AAPASXX:VPT:SPIS:DAANNVV:LKYHY:VAE:AXGXR, STPPTXX:VPT:SPIS:DSANNVV:LKYHY:VAE:SXGXR, HVPKPXX:VPT:SPIS:DDSSNVI:LKYHY:VAE:SXGXH, RVPSTXX:VPT:SPIS:DNGRVLL:LKYHY:VAE:XGXL, ASAAPXX:VPT:SPIS:VGRKPKV:LKYHY:VAE:XKXS, ASASPXX:VPT:SPIS:IGKTPKI:LKYHY:VAE:XKXS, ASASPXX:VPT:SPIS:VGRTPKV:LKYHY:VAE:XKXS, KIPKAXX:VPT:SPIS:DENEKVV:LKYHY:VVE:GXGXR, GIPEPXX:VPE:SPIS:DENKNVV:LKYHY:TVE:SXAXR, SIPKAXX:VPT:SPIS:DEYDKVV:LKYHY:VVE:GXGXR, HVTKPTX:APT:SPIS:DDSSNVI:LKYHY:VVR:SXGXH, YVPKPXX:APT:SPIS:DDSSNVI:LKYHY:VVR:SXGXH, TVPKPXX:APT:SPIS:DDSSNVI:LKYHY:VVR:AXGXH, AVPKAXX:APT:SPIS:DSSNNVI:LKYHY:VVK:AXGXH KASKAXX:VPT:SPIS:DKGVVTY:LKYHY:AVS:EXGXR, GSAGPXX:TPT:SPIS:NDKQQII:LKYHY:VVD:RXGXS, AAPASXX:VPA:SPIS:DAANNVV:LKYHY:VVE:AXGXR, STPPTXX:VPT:SPIS:DSANNVV:LKYHY:VVE:SXGXR, HVPKPXX:APT:SPIS:DDSSNVI:LKYHY:VVR:SXGXH, RVPSTXX:APV:SPIS:DNGRVLL:LKYHY:VEE:XGXL, ASAAPXX:VPQ:SPIS:VGRKPKV:LKYHY:VRS:XKXS, ASASPXX:VSQ:SPIS:IGKTPKI:LKYHY:VKS:XKXS, ASASPXX:VPQ:SPIS:VGRTPKV:LKYHY:VKS:XKXS, NDEGLEX:VPT:SPIS:RIKPHQGQH:LKYHY:QHN:KXEXR, NDEGLEX:VPT:SPIS:RIKPHQGQH:LKYHY:EHS:QXEXR, SSVKXQP:SRV:SPIS:EYVRKKPKL:LKYHY:EEH:LEXAXA, RNVQXRP:TQV:SPIS:EIVRKKPIF:LKYHY:EDH:LAXKXE, KIPKAXX:VPT:EPIS:DENEKVV:KFKYE:AVS:GXGXR, GIPEPXX:VPT:EPIS:DENKNVV:KFKYE:AVS:SXAXR, SIPKAXX:VPT:EPIS:DEYDKVV:KFKYE:AVS:GXGXR, HVTKPTX:VPT:EPIS:DDSSNVI:KFKYE:AVS:SXGXH, YVPKPXX:VPT:EPIS:DDSSNVI:KFKYE:AVS:SXGXH, TVPKPXX:VPT:EPIS:DDSSNVI:KFKYE:AVS:AXGXH, AVPKAXX:VPT:EPIS:DSSNNVI:KFKYE:AVS:AXGXH, KVGKAXX:VPT:EPIS:DDMGVPT:KFKYE:AVS:XGXR, GSAGPXX:VPT:EPIS:NDKQQII:KFKYE:AVS:RXGXS, AAPASXX:VPT:EPIS:DAANNVV:KFKYE:AVS:AXGXR, STPPTXX:VPT:EPIS:DSANNVV:KFKYE:AVS:SXGXR, HVPKPXX:VPT:EPIS:DDSSNVI:KFKYE:AVS:SXGXH, RVPSTXX:VPT:EPIS:DNGRVLL:KFKYE:AVS:XGXL, ASAAPXX:VPT:EPIS:VGRKPKV:KFKYE:AVS:XKXS, ASASPXX:VPT:EPIS:IGKTPKI:KFKYE:AVS:XKXS, ASASPXX:VPT:EPIS:VGRTPKV:KFKYE:AVS:XKXS, KIPKAXX:VPT:EPIS:DENEKVV:KFKYE:VVE:GXGXR, GIPEPXX:VPE:EPIS:DENKNVV:KFKYE:TVE:SXAXR, SIPKAXX:VPT:EPIS:DEYDKVV:KFKYE:VVE:GXGXR, HVTKPTX:APT:EPIS:DDSSNVI:KFKYE:VVR:SXGXH, YVPKPXX:APT:EPIS:DDSSNVI:KFKYE:VVR:SXGXH, TVPKPXX:APT:EPIS:DDSSNVI:KFKYE:VVR:AXGXH, AVPKAXX:APT:EPIS:DSSNNVI:KFKYE:VVK:AXGXH, KVGKAXX:VPT:EPIS:DDMGVPT:KFKYE:VAE:XGXR, GSAGPXX:TPT:EPIS:NDKQQII:KFKYE:VVD:RXGXS, AAPASXX:VPA:EPIS:DAANNVV:KFKYE:VVE:AXGXR, STPPTXX:VPT:EPIS:DSANNVV:KFKYE:VVE:SXGXR, HVPKPXX:APT:EPIS:DDSSNVI:KFKYE:VVR:SXGXH, RVPSTXX:APV:EPIS:DNGRVLL:KFKYE:VEE:XGXL, ASAAPXX:VPQ:EPIS:VGRKPKV:KFKYE:VRS:XKXS, ASASPXX:VSQ:EPIS:IGKTPKI:KFKYE:VKS:XKXS, ASASPXX:VPQ:EPIS:VGRTPKV:KFKYE:VKS:XKXS, NDEGLEX:VPT:EPIS:RIKPHQGQH:KFKYE:QHN:KXEXR, NDEGLEX:VPT:EPIS:RIKPHQGQH:KFKYE:EHS:QXEXR, SSVKXQP:SRV:EPIS:EYVRKKPKL:KFKYE:EEH:LEXAXA, RNVQXRP:TQV:EPIS:EIVRKKPIF:KFKYE:EDH:LAXKXE, KIPKAXX:TPT:SPIN:DENEKVV:YGKIP:VVD:GXGXR, GIPEPXX:TPT:SPIN:DENKNVV:YGKIP:VVD:SXAXR, SIPKAXX:TPT:SPIN:DEYDKVV:YGKIP:VVD:GXGXR, HVTKPTX:TPT:SPIN:DDSSNVI:YGKIP:VVD:SXGXH, YVPKPXX:TPT:SPIN:DDSSNVI:YGKIP:VVD:SXGXH, TVPKPXX:TPT:SPIN:DDSSNVI:YGKIP:VVD:AXGXH, AVPKAXX:TPT:SPIN:DSSNNVI:YGKIP:VVD:AXGXH, KVGKAXX:TPT:SPIN:DDMGVPT:YGKIP:VVD:XGXR, KASKAXX:TPT:SPIN:DKGVVTY:YGKIP:VVD:EXGXR, AAPASXX:TPT:SPIN:DAANNVV:YGKIP:VVD:AXGXR, STPPTXX:TPT:SPIN:DSANNVV:YGKIP:VVD:SXGXR, HVPKPXX:TPT:SPIN:DDSSNVI:YGKIP:VVD:SXGXH, RVPSTXX:TPT:SPIN:DNGRVLL:YGKIP:VVD:XGXL, ASAAPXX:TPT:SPIN:VGRKPKV:YGKIP:VVD:XKXS, ASASPXX:TPT:SPIN:IGKTPKI:YGKIP:VVD:XKXS, ASASPXX:TPT:SPIN:VGRTPKV:YGKIP:VVD:XKXS, KIPKAXX:VPT:SPIN:DENEKVV:YGKIP:VVE:GXGXR, GIPEPXX:VPE:SPIN:DENKNVV:YGKIP:TVE:SXAXR, SIPKAXX:VPT:SPIN:DEYDKVV:YGKIP:VVE:GXGXR, HVTKPTX:APT:SPIN:DDSSNVI:YGKIP:VVR:SXGXH, YVPKPXX:APT:SPIN:DDSSNVI:YGKIP:VVR:SXGXH, TVPKPXX:APT:SPIN:DDSSNVI:YGKIP:VVR:AXGXH, AVPKAXX:APT:SPIN:DSSNNVI:YGKIP:VVK:AXGXH, KVGKAXX:VPT:SPIN:DDMGVPT:YGKIP:VAE:XGXR, KASKAXX:VPT:SPIN:DKGVVTY:YGKIP:AVS:EXGXR, AAPASXX:VPA:SPIN:DAANNVV:YGKIP:VVE:AXGXR, STPPTXX:VPT:SPIN:DSANNVV:YGKIP:VVE:SXGXR, HVPKPXX:APT:SPIN:DDSSNVI:YGKIP:VVR:SXGXH, RVPSTXX:APV:SPIN:DNGRVLL:YGKIP:VEE:XGXL, ASAAPXX:VPQ:SPIN:VGRKPKV:YGKIP:VRS:XKXS, ASASPXX:VSQ:SPIN:IGKTPKI:YGKIP:VKS:XKXS, ASASPXX:VPQ:SPIN:VGRTPKV:YGKIP:VKS:XKXS, NDEGLEX:VPT:SPIN:RIKPHQGQH:YGKIP:QHN:KXEXR, NDEGLEX:VPT:SPIN:RIKPHQGQH:YGKIP:EHS:QXEXR, SSVKXQP:SRV:SPIN:EYVRKKPKL:YGKIP:EEH:LEXAXA, RNVQXRP:TQV:SPIN:EIVRKKPIF:YGKIP:EDH:LAXKXE, KIPKAXX:VPA:SPIS:DENEKVV:YKQYE:VVE:GXGXR, GIPEPXX:VPA:SPIS:DENKNVV:YKQYE:VVE:SXAXR, SIPKAXX:VPA:SPIS:DEYDKVV:YKQYE:VVE:GXGXR, HVTKPTX:VPA:SPIS:DDSSNVI:YKQYE:VVE:SXGXH, YVPKPXX:VPA:SPIS:DDSSNVI:YKQYE:VVE:SXGXH, TVPKPXX:VPA:SPIS:DDSSNVI:YKQYE:VVE:AXGXH, AVPKAXX:VPA:SPIS:DSSNNVI:YKQYE:VVE:AXGXH, KVGKAXX:VPA:SPIS:DDMGVPT:YKQYE:VVE:XGXR, KASKAXX:VPA:SPIS:DKGVVTY:YKQYE:VVE:EXGXR, GSAGPXX:VPA:SPIS:NDKQQII:YKQYE:VVE:RXGXS, STPPTXX:VPA:SPIS:DSANNVV:YKQYE:VVE:SXGXR, HVPKPXX:VPA:SPIS:DDSSNVI:YKQYE:VVE:SXGXH, RVPSTXX:VPA:SPIS:DNGRVLL:YKQYE:VVE:XGXL, ASAAPXX:VPA:SPIS:VGRKPKV:YKQYE:VVE:XKXS, ASASPXX:VPA:SPIS:IGKTPKI:YKQYE:VVE:XKXS, ASASPXX:VPA:SPIS:VGRTPKV:YKQYE:VVE:XKXS, KIPKAXX:VPT:SPIS:DENEKVV:YKQYE:VVE:GXGXR, GIPEPXX:VPE:SPIS:DENKNVV:YKQYE:TVE:SXAXR, SIPKAXX:VPT:SPIS:DEYDKVV:YKQYE:VVE:GXGXR, HVTKPTX:APT:SPIS:DDSSNVI:YKQYE:VVR:SXGXH, YVPKPXX:APT:SPIS:DDSSNVI:YKQYE:VVR:SXGXH, TVPKPXX:APT:SPIS:DDSSNVI:YKQYE:VVR:AXGXH, AVPKAXX:APT:SPIS:DSSNNVI:YKQYE:VVK:AXGXH, KVGKAXX:VPT:SPIS:DDMGVPT:YKQYE:VAE:XGXR, KASKAXX:VPT:SPIS:DKGVVTY:YKQYE:AVS:EXGXR, GSAGPXX:TPT:SPIS:NDKQQII:YKQYE:VVD:RXGXS, STPPTXX:VPT:SPIS:DSANNVV:YKQYE:VVE:SXGXR, HVPKPXX:APT:SPIS:DDSSNVI:YKQYE:VVR:SXGXH, RVPSTXX:APV:SPIS:DNGRVLL:YKQYE:VEE:XGXL, ASAAPXX:VPQ:SPIS:VGRKPKV:YKQYE:VRS:XKXS, ASASPXX:VSQ:SPIS:IGKTPKI:YKQYE:VKS:XKXS, ASASPXX:VPQ:SPIS:VGRTPKV:YKQYE:VKS:XKXS, NDEGLEX:VPT:SPIS:RIKPHQGQH:YKQYE:QHN:KXEXR, NDEGLEX:VPT:SPIS:RIKPHQGQH:YKQYE:EHS:QXEXR, SSVKXQP:SRV:SPIS:EYVRKKPKL:YKQYE:EEH:LEXAXA, RNVQXRP:TQV:SPIS:EIVRKKPIF:YKQYE:EDH:LAXKXE, GIPEPXX:VPT:SPIS:DENKNVV:YKQYE:VVE:SXAXR, HVTKPTX:VPT:SPIS:DDSSNVI:YKQYE:VVE:SXGXH, YVPKPXX:VPT:SPIS:DDSSNVI:YKQYE:VVE:SXGXH, TVPKPXX:VPT:SPIS:DDSSNVI:YKQYE:VVE:AXGXH, AVPKAXX:VPT:SPIS:DSSNNVI:YKQYE:VVE:AXGXH, KVGKAXX:VPT:SPIS:DDMGVPT:YKQYE:VVE:XGXR, KASKAXX:VPT:SPIS:DKGVVTY:YKQYE:VVE:EXGXR, GSAGPXX:VPT:SPIS:NDKQQII:YKQYE:VVE:RXGXS, AAPASXX:VPT:SPIS:DAANNVV:YKQYE:VVE:AXGXR, HVPKPXX:VPT:SPIS:DDSSNVI:YKQYE:VVE:SXGXH, RVPSTXX:VPT:SPIS:DNGRVLL:YKQYE:VVE:XGXL, ASAAPXX:VPT:SPIS:VGRKPKV:YKQYE:VVE:XKXS, ASASPXX:VPT:SPIS:IGKTPKI:YKQYE:VVE:XKXS, ASASPXX:VPT:SPIS:VGRTPKV:YKQYE:VVE:XKXS, AAPASXX:VPA:SPIS:DAANNVV:YKQYE:VVE:AXGXR, KIPKAXX:APV:KPLS:DENEKVV:DHHKD:VEE:GXGXR, GIPEPXX:APV:KPLS:DENKNVV:DHHKD:VEE:SXAXR, SIPKAXX:APV:KPLS:DEYDKVV:DHHKD:VEE:GXGXR, HVTKPTX:APV:KPLS:DDSSNVI:DHHKD:VEE:SXGXH, YVPKPXX:APV:KPLS:DDSSNVI:DHHKD:VEE:SXGXH, TVPKPXX:APV:KPLS:DDSSNVI:DHHKD:VEE:AXGXH, AVPKAXX:APV:KPLS:DSSNNVI:DHHKD:VEE:AXGXH, KVGKAXX:APV:KPLS:DDMGVPT:DHHKD:VEE:XGXR, KASKAXX:APV:KPLS:DKGVVTY:DHHKD:VEE:EXGXR, GSAGPXX:APV:KPLS:NDKQQII:DHHKD:VEE:RXGXS, AAPASXX:APV:KPLS:DAANNVV:DHHKD:VEE:AXGXR, STPPTXX:APV:KPLS:DSANNVV:DHHKD:VEE:SXGXR, HVPKPXX:APV:KPLS:DDSSNVI:DHHKD:VEE:SXGXH, ASAAPXX:APV:KPLS:VGRKPKV:DHHKD:VEE:XKXS, ASASPXX:APV:KPLS:IGKTPKI:DHHKD:VEE:XKXS, ASASPXX:APV:KPLS:VGRTPKV:DHHKD:VEE:XKXS, KIPKAXX:VPT:KPLS:DENEKVV:DHHKD:VVE:GXGXR, GIPEPXX:VPE:KPLS:DENKNVV:DHHKD:TVE:SXAXR, SIPKAXX:VPT:KPLS:DEYDKVV:DHHKD:VVE:GXGXR, HVTKPTX:APT:KPLS:DDSSNVI:DHHKD:VVR:SXGXH, YVPKPXX:APT:KPLS:DDSSNVI:DHHKD:VVR:SXGXH, TVPKPXX:APT:KPLS:DDSSNVI:DHHKD:VVR:AXGXH, AVPKAXX:APT:KPLS:DSSNNVI:DHHKD:VVK:AXGXH, KVGKAXX:VPT:KPLS:DDMGVPT:DHHKD:VAE:XGXR, KASKAXX:VPT:KPLS:DKGVVTY:DHHKD:AVS:EXGXR, GSAGPXX:TPT:KPLS:NDKQQII:DHHKD:VVD:RXGXS, AAPASXX:VPA:KPLS:DAANNVV:DHHKD:VVE:AXGXR, STPPTXX:VPT:KPLS:DSANNVV:DHHKD:VVE:SXGXR, HVPKPXX:APT:KPLS:DDSSNVI:DHHKD:VVR:SXGXH, ASAAPXX:VPQ:KPLS:VGRKPKV:DHHKD:VRS:XKXS, ASASPXX:VSQ:KPLS:IGKTPKI:DHHKD:VKS:XKXS, ASASPXX:VPQ:KPLS:VGRTPKV:DHHKD:VKS:XKXS, NDEGLEX:VPT:KPLS:RIKPHQGQH:DHHKD:QHN:KXEXR, NDEGLEX:VPT:KPLS:RIKPHQGQH:DHHKD:EHS:QXEXR, SSVKXQP:SRV:KPLS:EYVRKKPKL:DHHKD:EEH:LEXAXA, RNVQXRP:TQV:KPLS:EIVRKKPIF:DHHKD:EDH:LAXKXE, KIPKAXX:VPQ:EPLP:DENEKVV:EQLSN:VRS:GXGXR, GIPEPXX:VPQ:EPLP:DENKNVV:EQLSN:VRS:SXAXR, SIPKAXX:VPQ:EPLP:DEYDKVV:EQLSN:VRS:GXGXR, HVTKPTX:VPQ:EPLP:DDSSNVI:EQLSN:VRS:SXGXH, YVPKPXX:VPQ:EPLP:DDSSNVI:EQLSN:VRS:SXGXH, TVPKPXX:VPQ:EPLP:DDSSNVI:EQLSN:VRS:AXGXH, AVPKAXX:VPQ:EPLP:DSSNNVI:EQLSN:VRS:AXGXH, KVGKAXX:VPQ:EPLP:DDMGVPT:EQLSN:VRS:XGXR, KASKAXX:VPQ:EPLP:DKGVVTY:EQLSN:VRS:EXGXR, GSAGPXX:VPQ:EPLP:NDKQQII:EQLSN:VRS:RXGXS, AAPASXX:VPQ:EPLP:DAANNVV:EQLSN:VRS:AXGXR, STPPTXX:VPQ:EPLP:DSANNVV:EQLSN:VRS:SXGXR, HVPKPXX:VPQ:EPLP:DDSSNVI:EQLSN:VRS:SXGXH, RVPSTXX:VPQ:EPLP:DNGRVLL:EQLSN:VRS:XGXL, ASASPXX:VPQ:EPLP:IGKTPKI:EQLSN:VRS:XKXS, ASASPXX:VPQ:EPLP:VGRTPKV:EQLSN:VRS:XKXS, KIPKAXX:VPT:EPLP:DENEKVV:EQLSN:VVE:GXGXR, GIPEPXX:VPE:EPLP:DENKNVV:EQLSN:TVE:SXAXR, SIPKAXX:VPT:EPLP:DEYDKVV:EQLSN:VVE:GXGXR, HVTKPTX:APT:EPLP:DDSSNVI:EQLSN:VVR:SXGXH, YVPKPXX:APT:EPLP:DDSSNVI:EQLSN:VVR:SXGXH, TVPKPXX:APT:EPLP:DDSSNVI:EQLSN:VVR:AXGXH, AVPKAXX:APT:EPLP:DSSNNVI:EQLSN:VVK:AXGXH, KVGKAXX:VPT:EPLP:DDMGVPT:EQLSN:VAE:XGXR, KASKAXX:VPT:EPLP:DKGVVTY:EQLSN:AVS:EXGXR, GSAGPXX:TPT:EPLP:NDKQQII:EQLSN:VVD:RXGXS, AAPASXX:VPA:EPLP:DAANNVV:EQLSN:VVE:AXGXR, STPPTXX:VPT:EPLP:DSANNVV:EQLSN:VVE:SXGXR, HVPKPXX:APT:EPLP:DDSSNVI:EQLSN:VVR:SXGXH, RVPSTXX:APV:EPLP:DNGRVLL:EQLSN:VEE:XGXL, ASASPXX:VSQ:EPLP:IGKTPKI:EQLSN:VKS:XKXS, ASASPXX:VPQ:EPLP:VGRTPKV:EQLSN:VKS:XKXS, NDEGLEX:VPT:EPLP:RIKPHQGQH:EQLSN:QHN:KXEXR, NDEGLEX:VPT:EPLP:RIKPHQGQH:EQLSN:EHS:QXEXR, SSVKXQP:SRV:EPLP:EYVRKKPKL:EQLSN:EEH:LEXAXA, RNVQXRP:TQV:EPLP:EIVRKKPIF:EQLSN:EDH:LAXKXE, KIPKAXX:VSQ:EPLT:DENEKVV:EQLSN:VKS:GXGXR, GIPEPXX:VSQ:EPLT:DENKNVV:EQLSN:VKS:SXAXR, SIPKAXX:VSQ:EPLT:DEYDKVV:EQLSN:VKS:GXGXR, HVTKPTX:VSQ:EPLT:DDSSNVI:EQLSN:VKS:SXGXH, YVPKPXX:VSQ:EPLT:DDSSNVI:EQLSN:VKS:SXGXH, TVPKPXX:VSQ:EPLT:DDSSNVI:EQLSN:VKS:AXGXH, AVPKAXX:VSQ:EPLT:DSSNNVI:EQLSN:VKS:AXGXH, KVGKAXX:VSQ:EPLT:DDMGVPT:EQLSN:VKS:XGXR, KASKAXX:VSQ:EPLT:DKGVVTY:EQLSN:VKS:EXGXR, GSAGPXX:VSQ:EPLT:NDKQQII:EQLSN:VKS:RXGXS, AAPASXX:VSQ:EPLT:DAANNVV:EQLSN:VKS:AXGXR, STPPTXX:VSQ:EPLT:DSANNVV:EQLSN:VKS:SXGXR, HVPKPXX:VSQ:EPLT:DDSSNVI:EQLSN:VKS:SXGXH, RVPSTXX:VSQ:EPLT:DNGRVLL:EQLSN:VKS:XGXL, ASAAPXX:VSQ:EPLT:VGRKPKV:EQLSN:VKS:XKXS, ASASPXX:VSQ:EPLT:VGRTPKV:EQLSN:VKS:XKXS, KIPKAXX:VPT:EPLT:DENEKVV:EQLSN:VVE:GXGXR, GIPEPXX:VPE:EPLT:DENKNVV:EQLSN:TVE:SXAXR, SIPKAXX:VPT:EPLT:DEYDKVV:EQLSN:VVE:GXGXR, HVTKPTX:APT:EPLT:DDSSNVI:EQLSN:VVR:SXGXH, YVPKPXX:APT:EPLT:DDSSNVI:EQLSN:VVR:SXGXH, TVPKPXX:APT:EPLT:DDSSNVI:EQLSN:VVR:AXGXH, AVPKAXX:APT:EPLT:DSSNNVI:EQLSN:VVK:AXGXH, KVGKAXX:VPT:EPLT:DDMGVPT:EQLSN:VAE:XGXR, KASKAXX:VPT:EPLT:DKGVVTY:EQLSN:AVS:EXGXR, GSAGPXX:TPT:EPLT:NDKQQII:EQLSN:VVD:RXGXS, AAPASXX:VPA:EPLT:DAANNVV:EQLSN:VVE:AXGXR, STPPTXX:VPT:EPLT:DSANNVV:EQLSN:VVE:SXGXR, HVPKPXX:APT:EPLT:DDSSNVI:EQLSN:VVR:SXGXH, RVPSTXX:APV:EPLT:DNGRVLL:EQLSN:VEE:XGXL, ASAAPXX:VPQ:EPLT:VGRKPKV:EQLSN:VRS:XKXS, NDEGLEX:VPT:EPLT:RIKPHQGQH:EQLSN:QHN:KXEXR, NDEGLEX:VPT:EPLT:RIKPHQGQH:EQLSN:EHS:QXEXR, SSVKXQP:SRV:EPLT:EYVRKKPKL:EQLSN:EEH:LEXAXA, RNVQXRP:TQV:EPLT:EIVRKKPIF:EQLSN:EDH:LAXKXE, KIPKAXX:VPQ:EPLT:DENEKVV:EQLSN:VKS:GXGXR, GIPEPXX:VPQ:EPLT:DENKNVV:EQLSN:VKS:SXAXR, SIPKAXX:VPQ:EPLT:DEYDKVV:EQLSN:VKS:GXGXR, HVTKPTX:VPQ:EPLT:DDSSNVI:EQLSN:VKS:SXGXH, YVPKPXX:VPQ:EPLT:DDSSNVI:EQLSN:VKS:SXGXH, TVPKPXX:VPQ:EPLT:DDSSNVI:EQLSN:VKS:AXGXH, AVPKAXX:VPQ:EPLT:DSSNNVI:EQLSN:VKS:AXGXH, KVGKAXX:VPQ:EPLT:DDMGVPT:EQLSN:VKS:XGXR, KASKAXX:VPQ:EPLT:DKGVVTY:EQLSN:VKS:EXGXR, GSAGPXX:VPQ:EPLT:NDKQQII:EQLSN:VKS:RXGXS, AAPASXX:VPQ:EPLT:DAANNVV:EQLSN:VKS:AXGXR, STPPTXX:VPQ:EPLT:DSANNVV:EQLSN:VKS:SXGXR, HVPKPXX:VPQ:EPLT:DDSSNVI:EQLSN:VKS:SXGXH, RVPSTXX:VPQ:EPLT:DNGRVLL:EQLSN:VKS:XGXL, ASAAPXX:VPQ:EPLT:VGRKPKV:EQLSN:VKS:XKXS, ASASPXX:VPQ:EPLT:IGKTPKI:EQLSN:VKS:XKXS, NDEGLEX:VPT:SNIT:RIKPHQGQH:IGEMS:QHN:QXEXR, KIPKAXX:VPT:SNIT:DENEKVV:IGEMS:VVE:GXGXR, GIPEPXX:VPE:SNIT:DENKNVV:IGEMS:TVE:SXAXR, SIPKAXX:VPT:SNIT:DEYDKVV:IGEMS:VVE:GXGXR, HVTKPTX:APT:SNIT:DDSSNVI:IGEMS:VVR:SXGXH, YVPKPXX:APT:SNIT:DDSSNVI:IGEMS:VVR:SXGXH, TVPKPXX:APT:SNIT:DDSSNVI:IGEMS:VVR:AXGXH, AVPKAXX:APT:SNIT:DSSNNVI:IGEMS:VVK:AXGXH, KVGKAXX:VPT:SNIT:DDMGVPT:IGEMS:VAE:XGXR, KASKAXX:VPT:SNIT:DKGVVTY:IGEMS:AVS:EXGXR, GSAGPXX:TPT:SNIT:NDKQQII:IGEMS:VVD:RXGXS, AAPASXX:VPA:SNIT:DAANNVV:IGEMS:VVE:AXGXR, STPPTXX:VPT:SNIT:DSANNVV:IGEMS:VVE:SXGXR, HVPKPXX:APT:SNIT:DDSSNVI:IGEMS:VVR:SXGXH, RVPSTXX:APV:SNIT:DNGRVLL:IGEMS:VEE:XGXL, ASAAPXX:VPQ:SNIT:VGRKPKV:IGEMS:VRS:XKXS, ASASPXX:VSQ:SNIT:IGKTPKI:IGEMS:VKS:XKXS, ASASPXX:VPQ:SNIT:VGRTPKV:IGEMS:VKS:XKXS, NDEGLEX:VPT:SNIT:RIKPHQGQH:IGEMS:EHS:QXEXR, SSVKXQP:SRV:SNIT:EYVRKKPKL:IGEMS:EEH:LEXAXA, RNVQXRP:TQV:SNIT:EIVRKKPIF:IGEMS:EDH:LAXKXE, NDEGLEX:VPT:SNIT:RIKPHQGQH:LGEMS:EHS:KXEXR, KIPKAXX:VPT:SNIT:DENEKVV:LGEMS:VVE:GXGXR, GIPEPXX:VPE:SNIT:DENKNVV:LGEMS:TVE:SXAXR SIPKAXX:VPT:SNIT:DEYDKVV:LGEMS:VVE:GXGXR, HVTKPTX:APT:SNIT:DDSSNVI:LGEMS:VVR:SXGXH YVPKPXX:APT:SNIT:DDSSNVI:LGEMS:VVR:SXGXH TVPKPXX:APT:SNIT:DDSSNVI:LGEMS:VVR:AXGXH, AVPKAXX:APT:SNIT:DSSNNVI:LGEMS:VVK:AXGXH KVGKAXX:VPT:SNIT:DDMGVPT:LGEMS:VAE:XGXR, KASKAXX:VPT:SNIT:DKGVVTY:LGEMS:AVS:EXGXR, GSAGPXX:TPT:SNIT:NDKQQII:LGEMS:VVD:RXGXS, AAPASXX:VPA:SNIT:DAANNVV:LGEMS:VVE:AXGXR, STPPTXX:VPT:SNIT:DSANNVV:LGEMS:VVE:SXGXR, HVPKPXX:APT:SNIT:DDSSNVI:LGEMS:VVR:SXGXH, RVPSTXX:APV:SNIT:DNGRVLL:LGEMS:VEE:XGXL, ASAAPXX:VPQ:SNIT:VGRKPKV:LGEMS:VRS:XKXS, ASASPXX:VSQ:SNIT:IGKTPKI:LGEMS:VKS:XKXS, ASASPXX:VPQ:SNIT:VGRTPKV:LGEMS:VKS:XKXS, NDEGLEX:VPT:SNIT:RIKPHQGQH:LGEMS:QHN:KXEXR, SSVKXQP:SRV:SNIT:EYVRKKPKL:LGEMS:EEH:LEXAXA, RNVQXRP:TQV:SNIT:EIVRKKPIF:LGEMS:EDH:LAXKXE, RNVQXRP:SRV:RSVK:EIVRKKPIF:KEVQV:EEH:LAXKXE, KIPKAXX:VPT:RSVK:DENEKVV:KEVQV:VVE:GXGXR, GIPEPXX:VPE:RSVK:DENKNVV:KEVQV:TVE:SXAXR, SIPKAXX:VPT:RSVK:DEYDKVV:KEVQV:VVE:GXGXR, HVTKPTX:APT:RSVK:DDSSNVI:KEVQV:VVR:SXGXH, YVPKPXX:APT:RSVK:DDSSNVI:KEVQV:VVR:SXGXH, TVPKPXX:APT:RSVK:DDSSNVI:KEVQV:VVR:AXGXH, AVPKAXX:APT:RSVK:DSSNNVI:KEVQV:VVK:AXGXH, KVGKAXX:VPT:RSVK:DDMGVPT:KEVQV:VAE:XGXR, KASKAXX:VPT:RSVK:DKGVVTY:KEVQV:AVS:EXGXR, GSAGPXX:TPT:RSVK:NDKQQII:KEVQV:VVD:RXGXS, AAPASXX:VPA:RSVK:DAANNVV:KEVQV:VVE:AXGXR, STPPTXX:VPT:RSVK:DSANNVV:KEVQV:VVE:SXGXR, HVPKPXX:APT:RSVK:DDSSNVI:KEVQV:VVR:SXGXH, RVPSTXX:APV:RSVK:DNGRVLL:KEVQV:VEE:XGXL, ASAAPXX:VPQ:RSVK:VGRKPKV:KEVQV:VRS:XKXS, ASASPXX:VSQ:RSVK:IGKTPKI:KEVQV:VKS:XKXS, ASASPXX:VPQ:RSVK:VGRTPKV:KEVQV:VKS:XKXS, NDEGLEX:VPT:RSVK:RIKPHQGQH:KEVQV:QHN:KXEXR, NDEGLEX:VPT:RSVK:RIKPHQGQH:KEVQV:EHS:QXEXR, RNVQXRP:TQV:RSVK:EIVRKKPIF:KEVQV:EDH:LAXKXE, SSVKXQP:TQV:RPVQ:EYVRKKPKL:KKATV:EDH:LEXAXA, KIPKAXX:VPT:RPVQ:DENEKVV:KKATV:VVE:GXGXR, GIPEPXX:VPE:RPVQ:DENKNVV:KKATV:TVE:SXAXR, SIPKAXX:VPT:RPVQ:DEYDKVV:KKATV:VVE:GXGXR, HVTKPTX:APT:RPVQ:DDSSNVI:KKATV:VVR:SXGXH, YVPKPXX:APT:RPVQ:DDSSNVI:KKATV:VVR:SXGXH, TVPKPXX:APT:RPVQ:DDSSNVI:KKATV:VVR:AXGXH, AVPKAXX:APT:RPVQ:DSSNNVI:KKATV:VVK:AXGXH, KVGKAXX:VPT:RPVQ:DDMGVPT:KKATV:VAE:XGXR, KASKAXX:VPT:RPVQ:DKGVVTY:KKATV:AVS:EXGXR, GSAGPXX:TPT:RPVQ:NDKQQII:KKATV:VVD:RXGXS, AAPASXX:VPA:RPVQ:DAANNVV:KKATV:VVE:AXGXR, STPPTXX:VPT:RPVQ:DSANNVV:KKATV:VVE:SXGXR, HVPKPXX:APT:RPVQ:DDSSNVI:KKATV:VVR:SXGXH, RVPSTXX:APV:RPVQ:DNGRVLL:KKATV:VEE:XGXL, ASAAPXX:VPQ:RPVQ:VGRKPKV:KKATV:VRS:XKXS, ASASPXX:VSQ:RPVQ:IGKTPKI:KKATV:VKS:XKXS, ASASPXX:VPQ:RPVQ:VGRTPKV:KKATV:VKS:XKXS, NDEGLEX:VPT:RPVQ:RIKPHQGQH:KKATV:QHN:KXEXR, NDEGLEX:VPT:RPVQ:RIKPHQGQH:KKATV:EHS:QXEXR and SSVKXQP:SRV:RPVQ:EYVRKKPKL:KKATV:EEH:LEXAXA.

[0400] In particular, in certain embodiments, the heptuplet PEP7:PEP3:PEP12:LINKER:PEP2:PEP4:PEP8 is selected from the group consisting of GIPEPXX:VPT:SAIS-AA¹⁷-LYL:DENKNVV:LKNYQ:VVE:SXAXR, SIPKAXX:VPT:SAIS-AA¹⁷-LYL:DEYDKVV:LKNYQ:VVE:GXGXR, HVTKPTX:VPT:SAIS-AA¹⁷-LYL:DDSSNVI:LKNYQ:VVE:SXGXH, YVPKPXX:VPT:SAIS-AA¹⁷-LYL:DDSSNVI:LKNYQ:VVE:SXGXH, TVPKPXX:VPT:SAIS-AA¹⁷-LYL:DDSSNVI:LKNYQ:VVE:AXGXH, AVPKAXX:VPT:SAIS-AA¹⁷-LYL:DSSNNVI:LKNYQ:VVE:AXGXH, KVGKAXX:VPT:SAIS-AA¹⁷-LYL:DDMGVPT:LKNYQ:VVE:XGXR, KASKAXX:VPT:SAIS-AA¹⁷-LYL:DKGVVTY:LKNYQ:VVE:EXGXR, GSAGPXX:VPT:SAIS-AA¹⁷-LYL:NDKQQII:LKNYQ:VVE:RXGXS, AAPASXX:VPT:SAIS-AA¹⁷-LYL:DAANNVV:LKNYQ:VVE:AXGXR, STPPTXX:VPT:SAIS-AA¹⁷-LYL:DSANNVV:LKNYQ:VVE:SXGXR, HVPKPXX:VPT:SAIS-AA¹⁷-LYL:DDSSNVI:LKNYQ:VVE:SXGXH, RVPSTXX:VPT:SAIS-AA¹⁷-LYL:DNGRVLL:LKNYQ:VVE:XGXL, ASAAPXX:VPT:SAIS-AA¹⁷-LYL:VGRKPKV:LKNYQ:VVE:XKXS, ASASPXX:VPT:SAIS-AA¹⁷-LYL:IGKTPKI:LKNYQ:VVE:XKXS, ASASPXX:VPT:SAIS-AA¹⁷-LYL:VGRTPKV:LKNYQ:VVE:XKXS, NDEGLEX:VPT:SAIS-AA¹⁷-LYL:RIKPHQGQH:LKNYQ:VVE:KXEXR, NDEGLEX:VPT:SAIS-AA¹⁷-LYL:RIKPHQGQH:LKNYQ:VVE:QXEXR, SSVKXQP:VPT:SAIS-AA¹⁷-LYL:EYVRKKPKL:LKNYQ:VVE:LEXAXA, RNVQXRP:VPT:SAIS-AA¹⁷-LYL:EIVRKKPIF:LKNYQ:VVE:LAXKXE, GIPEPXX:VPE:SAIS-AA¹⁷-LYL:DENKNVV:LKNYQ:TVE:SXAXR, HVTKPTX:APT:SAIS-AA¹⁷-LYL:DDSSNVI:LKNYQ:VVR:SXGXH, YVPKPXX:APT:SAIS-AA¹⁷-LYL:DDSSNVI:LKNYQ:VVR:SXGXH, TVPKPXX:APT:SAIS-AA¹⁷-LYL:DDSSNVI:LKNYQ:VVR:AXGXH, AVPKAXX:APT:SAIS-AA¹⁷-LYL:DSSNNVI:LKNYQ:VVK:AXGXH, KVGKAXX:VPT:SAIS-AA¹⁷-LYL:DDMGVPT:LKNYQ:VAE:XGXR, KASKAXX:VPT:SAIS-AA¹⁷-LYL:DKGVVTY:LKNYQ:AVS:EXGXR, GSAGPXX:TPT:SAIS-AA¹⁷-LYL: NDKQQII:LKNYQ:VVD:RXGXS, AAPASXX:VPA:SAIS-AA¹⁷-LYL:DAANNVV:LKNYQ:VVE:AXGXR, HVPKPXX:APT:SAIS-AA¹⁷-LYL:DDSSNVI:LKNYQ:VVR:SXGXH, RVPSTXX:APV:SAIS-AA¹⁷-LYL:DNGRVLL:LKNYQ:VEE:XGXL, ASAAPXX:VPQ:SAIS-AA¹⁷-LYL:VGRKPKV:LKNYQ:VRS:XKXS, ASASPXX:VSQ:SAIS-AA¹⁷-LYL:IGKTPKI:LKNYQ:VKS:XKXS, ASASPXX:VPQ:SAIS-AA¹⁷-LYL:VGRTPKV:LKNYQ:VKS:XKXS, NDEGLEX:VPT:SAIS-AA¹⁷-LYL:RIKPHQGQH:LKNYQ:QHN:KXEXR, NDEGLEX:VPT:SAIS-AA¹⁷-LYL:RIKPHQGQH:LKNYQ:EHS:QXEXR, SSVKXQP:SRV:SAIS-AA¹⁷-LYL:EYVRKKPKL:LKNYQ:EEH:LEXAXA, RNVQXRP:TQV:SAIS-AA¹⁷-LYL:EIVRKKPIF:LKNYQ:EDH:LAXKXE, KIPKAXX:VPE:SSLS-AA¹⁷-LFF:DENEKVV:LKVYP:TVE:GXGXR, SIPKAXX:VPE:SSLS-AA¹⁷-LFF:DEYDKVV:LKVYP:TVE:GXGXR, HVTKPTX:VPE:SSLS-AA¹⁷-LFF:DDSSNVI:LKVYP:TVE:SXGXH, YVPKPXX:VPE:SSLS-AA¹⁷-LFF:DDSSNVI:LKVYP:TVE:SXGXH, TVPKPXX:VPE:SSLS-AA¹⁷-LFF:DDSSNVI:LKVYP:TVE:AXGXH, AVPKAXX:VPE:SSLS-AA¹⁷-LFF:DSSNNVI:LKVYP:TVE:AXGXH, KVGKAXX:VPE:SSLS-AA¹⁷-LFF:DDMGVPT:LKVYP:TVE:XGXR, KASKAXX:VPE:SSLS-AA¹⁷-LFF:DKGVVTY: LKVYP:TVE:EXGXR, GSAGPXX:VPE:SSLS-AA¹⁷-LFF:NDKQQII:LKVYP:TVE:RXGXS, AAPASXX:VPE:SSLS-AA¹⁷-LFF:DAANNVV:LKVYP:TVE:AXGXR, STPPTXX:VPE:SSLS-AA¹⁷-LFF:DSANNVV:LKVYP:TVE:SXGXR, HVPKPXX:VPE:SSLS-AA¹⁷-LFF:DDSSNVI:LKVYP:TVE:SXGXH, RVPSTXX:VPE:SSLS-AA¹⁷-LFF:DNGRVLL:LKVYP:TVE:XGXL, ASAAPXX:VPE:SSLS-AA¹⁷-LFF:VGRKPKV:LKVYP:TVE:XKXS, ASASPXX:VPE:SSLS-AA¹⁷-LFF:IGKTPKI:LKVYP:TVE:XKXS, ASASPXX:VPE:SSLS-AA¹⁷-LFF:VGRTPKV:LKVYP:TVE:XKXS, NDEGLEX:VPE:SSLS-AA¹⁷-LFF:RIKPHQGQH:LKVYP:TVE:KXEXR, NDEGLEX:VPE:SSLS-AA¹⁷-LFF:RIKPHQGQH:LKVYP:TVE:QXEXR, SSVKXQP:VPE:SSLS-AA¹⁷-LFF:EYVRKKPKL:LKVYP:TVE:LEXAXA, RNVQXRP:VPE:SSLS-AA¹⁷-LFF:EIVRKKPIF:LKVYP:TVE:LAXKXE, KIPKAXX:VPT:SSLS-AA¹⁷-LFF:DENEKVV:LKVYP:VVE:GXGXR, SIPKAXX:VPT:SSLS-AA¹⁷-LFF:DEYDKVV:LKVYP:VVE:GXGXR, HVTKPTX:APT:SSLS-AA¹⁷-LFF:DDSSNVI:LKVYP:VVR:SXGXH, YVPKPXX:APT:SSLS-AA¹⁷-LFF:DDSSNVI:LKVYP:VVR:SXGXH, TVPKPXX:APT:SSLS-AA¹⁷-LFF:DDSSNVI:LKVYP:VVR:AXGXH, AVPKAXX:APT:SSLS-AA¹⁷-LFF:DSSNNVI:LKVYP:VVK:AXGXH, KVGKAXX:VPT:SSLS-AA¹⁷-LFF:DDMGVPT:LKVYP:VAE:XGXR, KASKAXX:VPT:SSLS-AA¹⁷-LFF:DKGVVTY: LKVYP:AVS:EXGXR, GSAGPXX:TPT:SSLS-AA¹⁷-LFF:NDKQQII:LKVYP:VVD:RXGXS, AAPASXX:VPA:SSLS-AA¹⁷-LFF:DAANNVV:LKVYP:VVE:AXGXR, STPPTXX:VPT:SSLS-AA¹⁷-LFF:DSANNVV:LKVYP:VVE:SXGXR, HVPKPXX:APT:SSLS-AA¹⁷-LFF:DDSSNVI:LKVYP:VVR:SXGXH, RVPSTXX:APV:SSLS-AA¹⁷-LFF:DNGRVLL:LKVYP:VEE:XGXL, ASAAPXX:VPQ:SSLS-AA¹⁷-LFF:VGRKPKV:LKVYP:VRS:XKXS, ASASPXX:VSQ:SSLS-AA¹⁷-LFF:IGKTPKI:LKVYP:VKS:XKXS, ASASPXX:VPQ:SSLS-AA¹⁷-LFF:VGRTPKV:LKVYP:VKS:XKXS, NDEGLEX:VPT:SSLS-AA¹⁷-LFF:RIKPHQGQH:LKVYP:QHN:KXEXR, NDEGLEX:VPT:SSLS-AA¹⁷-LFF:RIKPHQGQH:LKVYP:EHS:QXEXR, SSVKXQP:SRV:SSLS-AA¹⁷-LFF:EYVRKKPKL:LKVYP:EEH:LEXAXA, RNVQXRP:TQV:SSLS-AA¹⁷-LFF:EIVRKKPIF:LKVYP:EDH:LAXKXE, KIPKAXX:VPT:SAIS-AA¹⁷-LYL:DENEKVV:LKNYQ:VVE:GXGXR, KIPKAXX:APT:NAIS-AA¹⁷-LYF:DENEKVV:LKKYR:VVR:GXGXR, GIPEPXX:APT:NAIS-AA¹⁷-LYF:DENKNVV:LKKYR:VVR:SXAXR, SIPKAXX:APT:NAIS-AA¹⁷-LYF:DEYDKVV:LKKYR:VVR:GXGXR, YVPKPXX:APT:NAIS-AA¹⁷-LYF:DDSSNVI:LKKYR:VVR:SXGXH, TVPKPXX:APT:NAIS-AA¹⁷-LYF:DDSSNVI:LKKYR:VVR:AXGXH, AVPKAXX:APT:NAIS-AA¹⁷-LYF:DSSNNVI:LKKYR:VVR:AXGXH, KVGKAXX:APT:NAIS-AA¹⁷-LYF:DDMGVPT:LKKYR:VVR:XGXR, KASKAXX:APT:NAIS-AA¹⁷-LYF:DKGVVTY:LKKYR:VVR:EXGXR, GSAGPXX:APT:NAIS-AA¹⁷-LYF:NDKQQII:LKKYR:VVR:RXGXS, AAPASXX:APT:NAIS-AA¹⁷-LYF:DAANNVV:LKKYR:VVR:AXGXR, STPPTXX:APT:NAIS-AA¹⁷-LYF:DSANNVV:LKKYR:VVR:SXGXR, HVPKPXX:APT:NAIS-AA¹⁷-LYF:DDSSNVI:LKKYR:VVR:SXGXH, RVPSTXX:APT:NAIS-AA¹⁷-LYF:DNGRVLL:LKKYR:VVR:XGXL, ASAAPXX:APT:NAIS-AA¹⁷-LYF:VGRKPKV:LKKYR:VVR:XKXS, ASASPXX:APT:NAIS-AA¹⁷-LYF:IGKTPKI:LKKYR:VVR:XKXS, ASASPXX:APT:NAIS-AA¹⁷-LYF:VGRTPKV:LKKYR:VVR:XKXS, NDEGLEX:APT:NAIS-AA¹⁷-LYF:RIKPHQGQH:LKKYR:VVR:KXEXR, NDEGLEX:APT:NAIS-AA¹⁷-LYF:RIKPHQGQH:LKKYR:VVR:QXEXR, SSVKXQP:APT:NAIS-AA¹⁷-LYF:EYVRKKPKL:LKKYR:VVR:LEXAXA, RNVQXRP:APT:NAIS-AA¹⁷-LYF:EIVRKKPIF:LKKYR:VVR:LAXKXE, KIPKAXX:VPT:NAIS-AA¹⁷-LYF:DENEKVV:LKKYR:VVE:GXGXR, GIPEPXX:VPE:NAIS-AA¹⁷-LYF:DENKNVV:LKKYR:TVE:SXAXR, SIPKAXX:VPT:NAIS-AA¹⁷-LYF:DEYDKVV:LKKYR:VVE:GXGXR, AVPKAXX:APT:NAIS-AA¹⁷-LYF:DSSNNVI:LKKYR:VVK:AXGXH, KVGKAXX:VPT:NAIS-AA¹⁷-LYF:DDMGVPT:LKKYR:VAE:XGXR, KASKAXX:VPT:NAIS-AA¹⁷-LYF:DKGVVTY:LKKYR:AVS:EXGXR, GSAGPXX:TPT:NAIS-AA¹⁷-LYF:NDKQQII:LKKYR:VVD:RXGXS, AAPASXX:VPA:NAIS-AA¹⁷-LYF:DAANNVV:LKKYR:VVE:AXGXR, STPPTXX:VPT:NAIS-AA¹⁷-LYF:DSANNVV:LKKYR:VVE:SXGXR, RVPSTXX:APV:NAIS-AA¹⁷-LYF:DNGRVLL:LKKYR:VEE:XGXL, ASAAPXX:VPQ:NAIS-AA¹⁷-LYF:VGRKPKV:LKKYR:VRS:XKXS, ASASPXX:VSQ:NAIS-AA¹⁷-LYF:IGKTPKI:LKKYR:VKS:XKXS, ASASPXX:VPQ:NAIS-AA¹⁷-LYF:VGRTPKV:LKKYR:VKS:XKXS, NDEGLEX:VPT:NAIS-AA¹⁷-LYF:RIKPHQGQH:LKKYR:QHN:KXEXR, NDEGLEX:VPT:NAIS-AA¹⁷-LYF:RIKPHQGQH:LKKYR:EHS:QXEXR, SSVKXQP:SRV:NAIS-AA¹⁷-LYF:EYVRKKPKL:LKKYR:EEH:LEXAXA, RNVQXRP:TQV:NAIS-AA¹⁷-LYF:EIVRKKPIF:LKKYR:EDH:LAXKXE, HVTKPTX:APT:NAIS-AA¹⁷-LYF:DDSSNVI:LKKYR:VVR:SXGXH, KIPKAXX:APT:SATS-AA¹⁷-LYY:DENEKVV:LRKHR:VVK:GXGXR, GIPEPXX:APT:SATS-AA¹⁷-LYY:DENKNVV:LRKHR:VVK:SXAXR, SIPKAXX:APT:SATS-AA¹⁷-LYY:DEYDKVV:LRKHR:VVK:GXGXR, HVTKPTX:APT:SATS-AA¹⁷-LYY:DDSSNVI:LRKHR:VVK:SXGXH, YVPKPXX:APT:SATS-AA¹⁷-LYY:DDSSNVI:LRKHR:VVK:SXGXH, TVPKPXX:APT:SATS-AA¹⁷-LYY:DDSSNVI:LRKHR:VVK:AXGXH, KVGKAXX:APT:SATS-AA¹⁷-LYY:DDMGVPT:LRKHR:VVK:XGXR, KASKAXX:APT:SATS-AA¹⁷-LYY:DKGVVTY:LRKHR:VVK:EXGXR, GSAGPXX:APT:SATS-AA¹⁷-LYY:NDKQQII:LRKHR:VVK:RXGXS, AAPASXX:APT:SATS-AA¹⁷-LYY:DAANNVV:LRKHR:VVK:AXGXR, STPPTXX:APT:SATS-AA¹⁷-LYY:DSANNVV:LRKHR:VVK:SXGXR, HVPKPXX:APT:SATS-AA¹⁷-LYY:DDSSNVI:LRKHR:VVK:SXGXH, RVPSTXX:APT:SATS-AA¹⁷-LYY:DNGRVLL:LRKHR:VVK:XGXL, ASAAPXX:APT:SATS-AA¹⁷-LYY:VGRKPKV:LRKHR:VVK:XKXS, ASASPXX:APT:SATS-AA¹⁷-LYY:IGKTPKI:LRKHR:VVK:XKXS, ASASPXX:APT:SATS-AA¹⁷-LYY:VGRTPKV:LRKHR:VVK:XKXS, NDEGLEX:APT:SATS-AA¹⁷-LYY:RIKPHQGQH:LRKHR:VVK:KXEXR, NDEGLEX:APT:SATS-AA¹⁷-LYY:RIKPHQGQH:LRKHR:VVK:QXEXR, SSVKXQP:APT:SATS-AA¹⁷-LYY:EYVRKKPKL:LRKHR:VVK:LEXAXA, RNVQXRP:APT:SATS-AA¹⁷-LYY:EIVRKKPIF:LRKHR:VVK:LAXKXE, KIPKAXX:VPT:SATS-AA¹⁷-LYY:DENEKVV:LRKHR:VVE:GXGXR, GIPEPXX:VPE:SATS-AA¹⁷-LYY:DENKNVV:LRKHR:TVE:SXAXR, SIPKAXX:VPT:SATS-AA¹⁷-LYY:DEYDKVV:LRKHR:VVE:GXGXR, HVTKPTX:APT:SATS-AA¹⁷-LYY:DDSSNVI:LRKHR:VVR:SXGXH, YVPKPXX:APT:SATS-AA¹⁷-LYY:DDSSNVI:LRKHR:VVR:SXGXH, TVPKPXX:APT:SATS-AA¹⁷-LYY:DDSSNVI:LRKHR:VVR:AXGXH, KVGKAXX:VPT:SATS-AA¹⁷-LYY:DDMGVPT:LRKHR:VAE:XGXR, KASKAXX:VPT:SATS-AA¹⁷-LYY:DKGVVTY:LRKHR:AVS:EXGXR, GSAGPXX:TPT:SATS-AA¹⁷-LYY:N DKQQI I:LRKHR:VVD:RXGXS, AAPASXX:VPA:SATS-AA¹⁷-LYY:DAANNVV:LRKHR:VVE:AXGXR, STPPTXX:VPT:SATS-AA¹⁷-LYY:DSANNVV:LRKHR:VVE:SXGXR, HVPKPXX:APT:SATS-AA¹⁷-LYY:DDSSNVI:LRKHR:VVR:SXGXH, RVPSTXX:APV:SATS-AA¹⁷-LYY:DNGRVLL:LRKHR:VEE:XGXL, ASAAPXX:VPQ:SATS-AA¹⁷-LYY:VGRKPKV:LRKHR:VRS:XKXS, ASASPXX:VSQ:SATS-AA¹⁷-LYY:IGKTPKI:LRKHR:VKS:XKXS, ASASPXX:VPQ:SATS-AA¹⁷-LYY:VGRTPKV:LRKHR:VKS:XKXS, NDEGLEX:VPT:SATS-AA¹⁷-LYY:RIKPHQGQH:LRKHR:QHN:KXEXR, NDEGLEX:VPT:SATS-AA¹⁷-LYY:RIKPHQGQH:LRKHR:EHS:QXEXR, SSVKXQP:SRV:SATS-AA¹⁷-LYY:EYVRKKPKL:LRKHR:EEH:LEXAXA, RNVQXRP:TQV:SATS-AA¹⁷-LYY:EIVRKKPIF:LRKHR:EDH:LAXKXE, KIPKAXX:VPT:SPIS-AA¹⁷-LYK:DENEKVV:LKYHY:VAE:GXGXR, GIPEPXX:VPT:SPIS-AA¹⁷-LYK:DENKNVV:LKYHY:VAE:SXAXR, SIPKAXX:VPT:SPIS-AA¹⁷-LYK:DEYDKVV:LKYHY:VAE:GXGXR, HVTKPTX:VPT:SPIS-AA¹⁷-LYK:DDSSNVI:LKYHY:VAE:SXGXH, YVPKPXX:VPT:SPIS-AA¹⁷-LYK:DDSSNVI:LKYHY:VAE:SXGXH, TVPKPXX:VPT:SPIS-AA¹⁷-LYK:DDSSNVI:LKYHY:VAE:AXGXH, AVPKAXX:VPT:SPIS-AA¹⁷-LYK:DSSNNVI:LKYHY:VAE:AXGXH, KASKAXX:VPT:SPIS-AA¹⁷-LYK:DKGVVTY:LKYHY:VAE:EXGXR, GSAGPXX:VPT:SPIS-AA¹⁷-LYK:NDKQQII:LKYHY:VAE:RXGXS, AAPASXX:VPT:SPIS-AA¹⁷-LYK:DAANNVV:LKYHY:VAE:AXGXR, STPPTXX:VPT:SPIS-AA¹⁷-LYK:DSANNVV:LKYHY:VAE:SXGXR, HVPKPXX:VPT:SPIS-AA¹⁷-LYK:DDSSNVI:LKYHY:VAE:SXGXH, RVPSTXX:VPT:SPIS-AA¹⁷-LYK:DNGRVLL:LKYHY:VAE:XGXL, ASAAPXX:VPT:SPIS-AA¹⁷-LYK:VGRKPKV:LKYHY:VAE:XKXS, ASASPXX:VPT:SPIS-AA¹⁷-LYK:IGKTPKI:LKYHY:VAE:XKXS, ASASPXX:VPT:SPIS-AA¹⁷-LYK:VGRTPKV:LKYHY:VAE:XKXS, NDEGLEX:VPT:SPIS-AA¹⁷-LYK:RIKPHQGQH:LKYHY:VAE:KXEXR, NDEGLEX:VPT:SPIS-AA¹⁷-LYK:RIKPHQGQH:LKYHY:VAE:QXEXR, SSVKXQP:VPT:SPIS-AA¹⁷-LYK:EYVRKKPKL:LKYHY:VAE:LEXAXA, RNVQXRP:VPT:SPIS-AA¹⁷-LYK:EIVRKKPIF:LKYHY:VAE:LAXKXE, KIPKAXX:VPT:SPIS-AA¹⁷-LYK:DENEKVV:LKYHY:VVE:GXGXR, GIPEPXX:VPE:SPIS-AA¹⁷-LYK:DENKNVV:LKYHY:TVE:SXAXR, SIPKAXX:VPT:SPIS-AA¹⁷-LYK:DEYDKVV:LKYHY:VVE:GXGXR, HVTKPTX:APT:SPIS-AA¹⁷-LYK:DDSSNVI:LKYHY:VVR:SXGXH, YVPKPXX:APT:SPIS-AA¹⁷-LYK:DDSSNVI:LKYHY:VVR:SXGXH, TVPKPXX:APT:SPIS-AA¹⁷-LYK:DDSSNVI:LKYHY:VVR:AXGXH, AVPKAXX:APT:SPIS-AA¹⁷-LYK:DSSNNVI:LKYHY:VVK:AXGXH, KASKAXX:VPT:SPIS-AA¹⁷-LYK:DKGVVTY:LKYHY:AVS:EXGXR, GSAGPXX:TPT:SPIS-AA¹⁷-LYK:NDKQQII:LKYHY:VVD:RXGXS, AAPASXX:VPA:SPIS-AA¹⁷-LYK:DAANNVV:LKYHY:VVE:AXGXR, STPPTXX:VPT:SPIS-AA¹⁷-LYK:DSANNVV:LKYHY:VVE:SXGXR, HVPKPXX:APT:SPIS-AA¹⁷-LYK:DDSSNVI:LKYHY:VVR:SXGXH, RVPSTXX:APV:SPIS-AA¹⁷-LYK:DNGRVLL:LKYHY:VEE:XGXL, ASAAPXX:VPQ:SPIS-AA¹⁷-LYK:VGRKPKV:LKYHY:VRS:XKXS, ASASPXX:VSQ:SPIS-AA¹⁷-LYK:IGKTPKI:LKYHY:VKS:XKXS, ASASPXX:VPQ:SPIS-AA¹⁷-LYK:VGRTPKV:LKYHY:VKS:XKXS, NDEGLEX:VPT:SPIS-AA¹⁷-LYK:RIKPHQGQH:LKYHY:QHN:KXEXR, NDEGLEX:VPT:SPIS-AA¹⁷-LYK:RIKPHQGQH:LKYHY:EHS:QXEXR, SSVKXQP:SRV:SPIS-AA¹⁷-LYK:EYVRKKPKL:LKYHY:EEH:LEXAXA, RNVQXRP:TQV:SPIS-AA¹⁷-LYK:EIVRKKPIF:LKYHY:EDH:LAXKXE, KIPKAXX:VPT:EPIS-AA¹⁷-LYL:DENEKVV:KFKYE:AVS:GXGXR, GIPEPXX:VPT:EPIS-AA¹⁷-LYL:DENKNVV:KFKYE:AVS:SXAXR, SIPKAXX:VPT:EPIS-AA¹⁷-LYL:DEYDKVV:KFKYE:AVS:GXGXR, HVTKPTX:VPT:EPIS-AA¹⁷-LYL:DDSSNVI:KFKYE:AVS:SXGXH, YVPKPXX:VPT:EPIS-AA¹⁷-LYL:DDSSNVI:KFKYE:AVS:SXGXH, TVPKPXX:VPT:EPIS-AA¹⁷-LYL:DDSSNVI:KFKYE:AVS:AXGXH, AVPKAXX:VPT:EPIS-AA¹⁷-LYL:DSSNNVI:KFKYE:AVS:AXGXH, KVGKAXX:VPT:EPIS-AA¹⁷-LYL:DDMGVPT:KFKYE:AVS:XGXR, GSAGPXX:VPT:EPIS-AA¹⁷-LYL:NDKQQII:KFKYE:AVS:RXGXS, AAPASXX:VPT:EPIS-AA¹⁷-LYL:DAANNVV:KFKYE:AVS:AXGXR, STPPTXX:VPT:EPIS-AA¹⁷-LYL:DSANNVV:KFKYE:AVS:SXGXR, HVPKPXX:VPT:EPIS-AA¹⁷-LYL:DDSSNVI:KFKYE:AVS:SXGXH, RVPSTXX:VPT:EPIS-AA¹⁷-LYL:DNGRVLL:KFKYE:AVS:XGXL, ASAAPXX:VPT:EPIS-AA¹⁷-LYL:VGRKPKV:KFKYE:AVS:XKXS, ASASPXX:VPT:EPIS-AA¹⁷-LYL:IGKTPKI:KFKYE:AVS:XKXS, ASASPXX:VPT:EPIS-AA¹⁷-LYL:VGRTPKV:KFKYE:AVS:XKXS, NDEGLEX:VPT:EPIS-AA¹⁷-LYL:RIKPHQGQH:KFKYE:AVS:KXEXR, NDEGLEX:VPT:EPIS-AA¹⁷-LYL:RIKPHQGQH:KFKYE:AVS:QXEXR, SSVKXQP:VPT:EPIS-AA¹⁷-LYL:EYVRKKPKL:KFKYE:AVS:LEXAXA, RNVQXRP:VPT:EPIS-AA¹⁷-LYL:EIVRKKPIF:KFKYE:AVS:LAXKXE, KIPKAXX:VPT:EPIS-AA¹⁷-LYL:DENEKVV:KFKYE:VVE:GXGXR, GIPEPXX:VPE:EPIS-AA¹⁷-LYL:DENKNVV:KFKYE:TVE:SXAXR, SIPKAXX:VPT:EPIS-AA¹⁷-LYL:DEYDKVV:KFKYE:VVE:GXGXR, HVTKPTX:APT:EPIS-AA¹⁷-LYL:DDSSNVI:KFKYE:VVR:SXGXH, YVPKPXX:APT:EPIS-AA¹⁷-LYL:DDSSNVI:KFKYE:VVR:SXGXH, TVPKPXX:APT:EPIS-AA¹⁷-LYL:DDSSNVI:KFKYE:VVR:AXGXH, AVPKAXX:APT:EPIS-AA¹⁷-LYL:DSSNNVI:KFKYE:VVK:AXGXH, KVGKAXX:VPT:EPIS-AA¹⁷-LYL:DDMGVPT:KFKYE:VAE:XGXR, GSAGPXX:TPT:EPIS-AA¹⁷-LYL:NDKQQII:KFKYE:VVD:RXGXS, AAPASXX:VPA:EPIS-AA¹⁷-LYL:DAANNVV:KFKYE:VVE:AXGXR, STPPTXX:VPT:EPIS-AA¹⁷-LYL:DSANNVV:KFKYE:VVE:SXGXR, HVPKPXX:APT:EPIS-AA¹⁷-LYL:DDSSNVI:KFKYE:VVR:SXGXH, RVPSTXX:APV:EPIS-AA¹⁷-LYL:DNGRVLL:KFKYE:VEE:XGXL, ASAAPXX:VPQ:EPIS-AA¹⁷-LYL:VGRKPKV:KFKYE:VRS:XKXS, ASASPXX:VSQ:EPIS-AA¹⁷-LYL:IGKTPKI:KFKYE:VKS:XKXS, ASASPXX:VPQ:EPIS-AA¹⁷-LYL:VGRTPKV:KFKYE:VKS:XKXS, NDEGLEX:VPT:EPIS-AA¹⁷-LYL:RIKPHQGQH:KFKYE:QHN:KXEXR, NDEGLEX:VPT:EPIS-AA¹⁷-LYL:RIKPHQGQH:KFKYE:EHS:QXEXR, SSVKXQP:SRV:EPIS-AA¹⁷-LYL:EYVRKKPKL:KFKYE:EEH:LEXAXA, RNVQXRP:TQV:EPIS-AA¹⁷-LYL:EIVRKKPIF:KFKYE:EDH:LAXKXE, KIPKAXX:TPT:SPIN-AA¹⁷-LYF:DENEKVV:YGKIP:VVD:GXGXR, GIPEPXX:TPT:SPIN-AA¹⁷-LYF:DENKNVV:YGKIP:VVD:SXAXR, SIPKAXX:TPT:SPIN-AA¹⁷-LYF:DEYDKVV:YGKIP:VVD:GXGXR, HVTKPTX:TPT:SPIN-AA¹⁷-LYF:DDSSNVI:YGKIP:VVD:SXGXH, YVPKPXX:TPT:SPIN-AA¹⁷-LYF:DDSSNVI:YGKIP:VVD:SXGXH, TVPKPXX:TPT:SPIN-AA¹⁷-LYF:DDSSNVI:YGKIP:VVD:AXGXH, AVPKAXX:TPT:SPIN-AA¹⁷-LYF:DSSNNVI:YGKIP:VVD:AXGXH, KVGKAXX:TPT:SPIN-AA¹⁷-LYF:DDMGVPT:YGKIP:VVD:XGXR, KASKAXX:TPT:SPIN-AA¹⁷-LYF:DKGVVTY:YGKIP:VVD:EXGXR, AAPASXX:TPT:SPIN-AA¹⁷-LYF:DAANNVV:YGKIP:VVD:AXGXR, STPPTXX:TPT:SPIN-AA¹⁷-LYF:DSANNVV:YGKIP:VVD:SXGXR, HVPKPXX:TPT:SPIN-AA¹⁷-LYF:DDSSNVI:YGKIP:VVD:SXGXH, RVPSTXX:TPT:SPIN-AA¹⁷-LYF:DNGRVLL:YGKIP:VVD:XGXL, ASAAPXX:TPT:SPIN-AA¹⁷-LYF:VGRKPKV:YGKIP:VVD:XKXS, ASASPXX:TPT:SPIN-AA¹⁷-LYF:IGKTPKI:YGKIP:VVD:XKXS, ASASPXX:TPT:SPIN-AA¹⁷-LYF:VGRTPKV:YGKIP:VVD:XKXS, NDEGLEX:TPT:SPIN-AA¹⁷-LYF:RIKPHQGQH:YGKIP:VVD:KXEXR, NDEGLEX:TPT:SPIN-AA¹⁷-LYF:RIKPHQGQH:YGKIP:VVD:QXEXR, SSVKXQP:TPT:SPIN-AA¹⁷-LYF:EYVRKKPKL:YGKIP:VVD:LEXAXA, RNVQXRP:TPT:SPIN-AA¹⁷-LYF:EIVRKKPIF:YGKIP:VVD:LAXKXE, KIPKAXX:VPT:SPIN-AA¹⁷-LYF:DENEKVV:YGKIP:VVE:GXGXR, GIPEPXX:VPE:SPIN-AA¹⁷-LYF:DENKNVV:YGKIP:TVE:SXAXR, SIPKAXX:VPT:SPIN-AA¹⁷-LYF:DEYDKVV:YGKIP:VVE:GXGXR, HVTKPTX:APT:SPIN-AA¹⁷-LYF:DDSSNVI:YGKIP:VVR:SXGXH, YVPKPXX:APT:SPIN-AA¹⁷-LYF:DDSSNVI:YGKIP:VVR:SXGXH, TVPKPXX:APT:SPIN-AA¹⁷-LYF:DDSSNVI:YGKIP:VVR:AXGXH, AVPKAXX:APT:SPIN-AA¹⁷-LYF:DSSNNVI:YGKIP:VVK:AXGXH, KVGKAXX:VPT:SPIN-AA¹⁷-LYF:DDMGVPT:YGKIP:VAE:XGXR, KASKAXX:VPT:SPIN-AA¹⁷-LYF:DKGVVTY:YGKIP:AVS:EXGXR, AAPASXX:VPA:SPIN-AA¹⁷-LYF:DAANNVV:YGKIP:VVE:AXGXR, STPPTXX:VPT:SPIN-AA¹⁷-LYF:DSANNVV:YGKIP:VVE:SXGXR, HVPKPXX:APT:SPIN-AA¹⁷-LYF:DDSSNVI:YGKIP:VVR:SXGXH, RVPSTXX:APV:SPIN-AA¹⁷-LYF:DNGRVLL:YGKIP:VEE:XGXL, ASAAPXX:VPQ:SPIN-AA¹⁷-LYF:VGRKPKV:YGKIP:VRS:XKXS, ASASPXX:VSQ:SPIN-AA¹⁷-LYF:IGKTPKI:YGKIP:VKS:XKXS, ASASPXX:VPQ:SPIN-AA¹⁷-LYF:VGRTPKV:YGKIP:VKS:XKXS, NDEGLEX:VPT:SPIN-AA¹⁷-LYF:RIKPHQGQH:YGKIP:QHN:KXEXR, NDEGLEX:VPT:SPIN-AA¹⁷-LYF:RIKPHQGQH:YGKIP:EHS:QXEXR, SSVKXQP:SRV:SPIN-AA¹⁷-LYF:EYVRKKPKL:YGKIP:EEH:LEXAXA, RNVQXRP:TQV:SPIN-AA¹⁷-LYF:EIVRKKPIF:YGKIP:EDH:LAXKXE, KIPKAXX:VPA:SPIS-AA¹⁷-LYI:DENEKVV:YKQYE:VVE:GXGXR, GIPEPXX:VPA:SPIS-AA¹⁷-LYI:DENKNVV:YKQYE:VVE:SXAXR, SIPKAXX:VPA:SPIS-AA¹⁷-LYI:DEYDKVV:YKQYE:VVE:GXGXR, HVTKPTX:VPA:SPIS-AA¹⁷-LYI:DDSSNVI:YKQYE:VVE:SXGXH, YVPKPXX:VPA:SPIS-AA¹⁷-LYI:DDSSNVI:YKQYE:VVE:SXGXH, TVPKPXX:VPA:SPIS-AA¹⁷-LYI:DDSSNVI:YKQYE:VVE:AXGXH, AVPKAXX:VPA:SPIS-AA¹⁷-LYI:DSSNNVI:YKQYE:VVE:AXGXH, KVGKAXX:VPA:SPIS-AA¹⁷-LYI:DDMGVPT:YKQYE:VVE:XGXR, KASKAXX:VPA:SPIS-AA¹⁷-LYI:DKGVVTY:YKQYE:VVE:EXGXR, GSAGPXX:VPA:SPIS-AA¹⁷-LYI:NDKQQII:YKQYE:VVE:RXGXS, STPPTXX:VPA:SPIS-AA¹⁷-LYI:DSANNVV:YKQYE:VVE:SXGXR, HVPKPXX:VPA:SPIS-AA¹⁷-LYI:DDSSNVI:YKQYE:VVE:SXGXH, RVPSTXX:VPA:SPIS-AA¹⁷-LYI:DNGRVLL:YKQYE:VVE:XGXL, ASAAPXX:VPA:SPIS-AA¹⁷-LYI:VGRKPKV:YKQYE:VVE:XKXS, ASASPXX:VPA:SPIS-AA¹⁷-LYI:IGKTPKI:YKQYE:VVE:XKXS, ASASPXX:VPA:SPIS-AA¹⁷-LYI:VGRTPKV:YKQYE:VVE:XKXS, NDEGLEX:VPA:SPIS-AA¹⁷-LYI:RIKPHQGQH:YKQYE:VVE:KXEXR, NDEGLEX:VPA:SPIS-AA¹⁷-LYI:RIKPHQGQH:YKQYE:VVE:QXEXR, SSVKXQP:VPA:SPIS-AA¹⁷-LYI:EYVRKKPKL:YKQYE:VVE:LEXAXA, RNVQXRP:VPA:SPIS-AA¹⁷-LYI:EIVRKKPIF:YKQYE:VVE:LAXKXE, KIPKAXX:VPT:SPIS-AA¹⁷-LYI:DENEKVV:YKQYE:VVE:GXGXR, GIPEPXX:VPE:SPIS-AA¹⁷-LYI:DENKNVV:YKQYE:TVE:SXAXR, SIPKAXX:VPT:SPIS-AA¹⁷-LYI:DEYDKVV:YKQYE:VVE:GXGXR, HVTKPTX:APT:SPIS-AA¹⁷-LYI:DDSSNVI:YKQYE:VVR:SXGXH, YVPKPXX:APT:SPIS-AA¹⁷-LYI:DDSSNVI:YKQYE:VVR:SXGXH, TVPKPXX:APT:SPIS-AA¹⁷-LYI:DDSSNVI:YKQYE:VVR:AXGXH, AVPKAXX:APT:SPIS-AA¹⁷-LYI:DSSNNVI:YKQYE:VVK:AXGXH, KVGKAXX:VPT:SPIS-AA¹⁷-LYI:DDMGVPT:YKQYE:VAE:XGXR, KASKAXX:VPT:SPIS-AA¹⁷-LYI:DKGVVTY:YKQYE:AVS:EXGXR, GSAGPXX:TPT:SPIS-AA¹⁷-LYI:NDKQQII:YKQYE:VVD:RXGXS, STPPTXX:VPT:SPIS-AA¹⁷-LYI:DSANNVV:YKQYE:VVE:SXGXR, HVPKPXX:APT:SPIS-AA¹⁷-LYI:DDSSNVI:YKQYE:VVR:SXGXH, RVPSTXX:APV:SPIS-AA¹⁷-LYI:DNGRVLL:YKQYE:VEE:XGXL, ASAAPXX:VPQ:SPIS-AA¹⁷-LYI:VGRKPKV:YKQYE:VRS:XKXS, ASASPXX:VSQ:SPIS-AA¹⁷-LYI:IGKTPKI:YKQYE:VKS:XKXS, ASASPXX:VPQ:SPIS-AA¹⁷-LYI:VGRTPKV:YKQYE:VKS:XKXS, NDEGLEX:VPT:SPIS-AA¹⁷-LYI:RIKPHQGQH:YKQYE:QHN:KXEXR, NDEGLEX:VPT:SPIS-AA¹⁷-LYI:RIKPHQGQH:YKQYE:EHS:QXEXR, SSVKXQP:SRV:SPIS-AA¹⁷-LYI:EYVRKKPKL:YKQYE:EEH:LEXAXA, RNVQXRP:TQV:SPIS-AA¹⁷-LYI:EIVRKKPIF:YKQYE:EDH:LAXKXE, KIPKAXX:VPT:SPIS-AA¹⁷-LFI:DENEKVV:YKQYE:VVE:GXGXR, GIPEPXX:VPT:SPIS-AA¹⁷-LFI:DENKNVV:YKQYE:VVE:SXAXR, SIPKAXX:VPT:SPIS-AA¹⁷-LFI:DEYDKVV:YKQYE:VVE:GXGXR, HVTKPTX:VPT:SPIS-AA¹⁷-LFI:DDSSNVI:YKQYE:VVE:SXGXH, YVPKPXX:VPT:SPIS-AA¹⁷-LFI:DDSSNVI:YKQYE:VVE:SXGXH, TVPKPXX:VPT:SPIS-AA¹⁷-LFI:DDSSNVI:YKQYE:VVE:AXGXH, AVPKAXX:VPT:SPIS-AA¹⁷-LFI:DSSNNVI:YKQYE:VVE:AXGXH, KVGKAXX:VPT:SPIS-AA¹⁷-LFI:DDMGVPT:YKQYE:VVE:XGXR, KASKAXX:VPT:SPIS-AA¹⁷-LFI:DKGVVTY:YKQYE:VVE:EXGXR, GSAGPXX:VPT:SPIS-AA¹⁷-LFI:NDKQQII:YKQYE:VVE:RXGXS, AAPASXX:VPT:SPIS-AA¹⁷-LFI:DAANNVV:YKQYE:VVE:AXGXR, HVPKPXX:VPT:SPIS-AA¹⁷-LFI:DDSSNVI:YKQYE:VVE:SXGXH, RVPSTXX:VPT:SPIS-AA¹⁷-LFI:DNGRVLL:YKQYE:VVE:XGXL, ASAAPXX:VPT:SPIS-AA¹⁷-LFI:VGRKPKV:YKQYE:VVE:XKXS, ASASPXX:VPT:SPIS-AA¹⁷-LFI:IGKTPKI:YKQYE:VVE:XKXS, ASASPXX:VPT:SPIS-AA¹⁷-LFI:VGRTPKV:YKQYE:VVE:XKXS, NDEGLEX:VPT:SPIS-AA¹⁷-LFI:RIKPHQGQH:YKQYE:VVE:KXEXR, NDEGLEX:VPT:SPIS-AA¹⁷-LFI:RIKPHQGQH:YKQYE:VVE:QXEXR, SSVKXQP:VPT:SPIS-AA¹⁷-LFI:EYVRKKPKL:YKQYE:VVE:LEXAXA, RNVQXRP:VPT:SPIS-AA¹⁷-LFI:EIVRKKPIF:YKQYE:VVE:LAXKXE, GIPEPXX:VPE:SPIS-AA¹⁷-LFI:DENKNVV:YKQYE:TVE:SXAXR, HVTKPTX:APT:SPIS-AA¹⁷-LFI:DDSSNVI:YKQYE:VVR:SXGXH, YVPKPXX:APT:SPIS-AA¹⁷-LFI:DDSSNVI:YKQYE:VVR:SXGXH, TVPKPXX:APT:SPIS-AA¹⁷-LFI:DDSSNVI:YKQYE:VVR:AXGXH, AVPKAXX:APT:SPIS-AA¹⁷-LFI:DSSNNVI:YKQYE:VVK:AXGXH, KVGKAXX:VPT:SPIS-AA¹⁷-LFI:DDMGVPT:YKQYE:VAE:XGXR, KASKAXX:VPT:SPIS-AA¹⁷-LFI:DKGVVTY:YKQYE:AVS:EXGXR, GSAGPXX:TPT:SPIS-AA¹⁷-LFI:NDKQQII:YKQYE:VVD:RXGXS, AAPASXX:VPA:SPIS-AA¹⁷-LFI:DAANNVV:YKQYE:VVE:AXGXR, HVPKPXX:APT:SPIS-AA¹⁷-LFI:DDSSNVI:YKQYE:VVR:SXGXH, RVPSTXX:APV:SPIS-AA¹⁷-LFI:DNGRVLL:YKQYE:VEE:XGXL, ASAAPXX:VPQ:SPIS-AA¹⁷-LFI:VGRKPKV:YKQYE:VRS:XKXS, ASASPXX:VSQ:SPIS-AA¹⁷-LFI:IGKTPKI:YKQYE:VKS:XKXS, ASASPXX:VPQ:SPIS-AA¹⁷-LFI:VGRTPKV:YKQYE:VKS:XKXS, NDEGLEX:VPT:SPIS-AA¹⁷-LFI:RIKPHQGQH:YKQYE:QHN:KXEXR, NDEGLEX:VPT:SPIS-AA¹⁷-LFI:RIKPHQGQH:YKQYE:EHS:QXEXR, SSVKXQP:SRV:SPIS-AA¹⁷-LFI:EYVRKKPKL:YKQYE:EEH:LEXAXA, RNVQXRP:TQV:SPIS-AA¹⁷-LFI:EIVRKKPIF:YKQYE:EDH:LAXKXE, KIPKAXX:APV:KPLS-AA¹⁷-LYV:DENEKVV:DHHKD:VEE:GXGXR, GIPEPXX:APV:KPLS-AA¹⁷-LYV:DENKNVV:DHHKD:VEE:SXAXR, SIPKAXX:APV:KPLS-AA¹⁷-LYV:DEYDKVV:DHHKD:VEE:GXGXR, HVTKPTX:APV:KPLS-AA¹⁷-LYV:DDSSNVI:DHHKD:VEE:SXGXH, YVPKPXX:APV:KPLS-AA¹⁷-LYV:DDSSNVI:DHHKD:VEE:SXGXH, TVPKPXX:APV:KPLS-AA¹⁷-LYV:DDSSNVI:DHHKD:VEE:AXGXH, AVPKAXX:APV:KPLS-AA¹⁷-LYV:DSSNNVI:DHHKD:VEE:AXGXH, KVGKAXX:APV:KPLS-AA¹⁷-LYV:DDMGVPT:DHHKD:VEE:XGXR, KASKAXX:APV:KPLS-AA¹⁷-LYV:DKGVVTY:DHHKD:VEE:EXGXR, GSAGPXX:APV:KPLS-AA¹⁷-LYV:NDKQQII:DHHKD:VEE:RXGXS, AAPASXX:APV:KPLS-AA¹⁷-LYV:DAANNVV:DHHKD:VEE:AXGXR, STPPTXX:APV:KPLS-AA¹⁷-LYV:DSANNVV:DHHKD:VEE:SXGXR, HVPKPXX:APV:KPLS-AA¹⁷-LYV:DDSSNVI:DHHKD:VEE:SXGXH, ASAAPXX:APV:KPLS-AA¹⁷-LYV:VGRKPKV:DHHKD:VEE:XKXS, ASASPXX:APV:KPLS-AA¹⁷-LYV:IGKTPKI:DHHKD:VEE:XKXS, ASASPXX:APV:KPLS-AA¹⁷-LYV:VGRTPKV:DHHKD:VEE:XKXS, NDEGLEX:APV:KPLS-AA¹⁷-LYV:RIKPHQGQH:DHHKD:VEE:KXEXR, NDEGLEX:APV:KPLS-AA¹⁷-LYV:RIKPHQGQH:DHHKD:VEE:QXEXR, SSVKXQP:APV:KPLS-AA¹⁷-LYV:EYVRKKPKL:DHHKD:VEE:LEXAXA, RNVQXRP:APV:KPLS-AA¹⁷-LYV:EIVRKKPIF:DHHKD:VEE:LAXKXE, KIPKAXX:VPT:KPLS-AA¹⁷-LYV:DENEKVV:DHHKD:VVE:GXGXR, GIPEPXX:VPE:KPLS-AA¹⁷-LYV:DENKNVV:DHHKD:TVE:SXAXR, SIPKAXX:VPT:KPLS-AA¹⁷-LYV:DEYDKVV:DHHKD:VVE:GXGXR, HVTKPTX:APT:KPLS-AA¹⁷-LYV:DDSSNVI:DHHKD:VVR:SXGXH, YVPKPXX:APT:KPLS-AA¹⁷-LYV:DDSSNVI:DHHKD:VVR:SXGXH, TVPKPXX:APT:KPLS-AA¹⁷-LYV:DDSSNVI:DHHKD:VVR:AXGXH, AVPKAXX:APT:KPLS-AA¹⁷-LYV:DSSNNVI:DHHKD:VVK:AXGXH, KVGKAXX:VPT:KPLS-AA¹⁷-LYV:DDMGVPT:DHHKD:VAE:XGXR, KASKAXX:VPT:KPLS-AA¹⁷-LYV:DKGVVTY:DHHKD:AVS:EXGXR, GSAGPXX:TPT:KPLS-AA¹⁷-LYV:NDKQQII:DHHKD:VVD:RXGXS, AAPASXX:VPA:KPLS-AA¹⁷-LYV:DAANNVV:DHHKD:VVE:AXGXR, STPPTXX:VPT:KPLS-AA¹⁷-LYV:DSANNVV:DHHKD:VVE:SXGXR, HVPKPXX:APT:KPLS-AA¹⁷-LYV:DDSSNVI:DHHKD:VVR:SXGXH, ASAAPXX:VPQ:KPLS-AA¹⁷-LYV:VGRKPKV:DHHKD:VRS:XKXS, ASASPXX:VSQ:KPLS-AA¹⁷-LYV:IGKTPKI:DHHKD:VKS:XKXS, ASASPXX:VPQ:KPLS-AA¹⁷-LYV:VGRTPKV:DHHKD:VKS:XKXS, NDEGLEX:VPT:KPLS-AA¹⁷-LYV:RIKPHQGQH:DHHKD:QHN:KXEXR, NDEGLEX:VPT:KPLS-AA¹⁷-LYV:RIKPHQGQH:DHHKD:EHS:QXEXR, SSVKXQP:SRV:KPLS-AA¹⁷-LYV:EYVRKKPKL:DHHKD:EEH:LEXAXA, RNVQXRP:TQV:KPLS-AA¹⁷-LYV:EIVRKKPIF:DHHKD:EDH:LAXKXE, KIPKAXX:VPQ:EPLP-AA¹⁷-VYY:DENEKVV:EQLSN:VRS:GXGXR, GIPEPXX:VPQ:EPLP-AA¹⁷-VYY:DENKNVV:EQLSN:VRS:SXAXR, SIPKAXX:VPQ:EPLP-AA¹⁷-VYY:DEYDKVV:EQLSN:VRS:GXGXR, HVTKPTX:VPQ:EPLP-AA¹⁷-VYY:DDSSNVI:EQLSN:VRS:SXGXH, YVPKPXX:VPQ:EPLP-AA¹⁷-VYY:DDSSNVI:EQLSN:VRS:SXGXH, TVPKPXX:VPQ:EPLP-AA¹⁷-VYY:DDSSNVI:EQLSN:VRS:AXGXH, AVPKAXX:VPQ:EPLP-AA¹⁷-VYY:DSSNNVI:EQLSN:VRS:AXGXH, KVGKAXX:VPQ:EPLP-AA¹⁷-VYY:DDMGVPT:EQLSN:VRS:XGXR, KASKAXX:VPQ:EPLP-AA¹⁷-VYY:DKGVVTY:EQLSN:VRS:EXGXR, GSAGPXX:VPQ:EPLP-AA¹⁷-VYY:NDKQQII:EQLSN:VRS:RXGXS, AAPASXX:VPQ:EPLP-AA¹⁷-VYY:DAANNVV:EQLSN:VRS:AXGXR, STPPTXX:VPQ:EPLP-AA¹⁷-VYY:DSANNVV:EQLSN:VRS:SXGXR, HVPKPXX:VPQ:EPLP-AA¹⁷-VYY:DDSSNVI:EQLSN:VRS:SXGXH, RVPSTXX:VPQ:EPLP-AA¹⁷-VYY:DNGRVLL:EQLSN:VRS:XGXL, ASASPXX:VPQ:EPLP-AA¹⁷-VYY:IGKTPKI:EQLSN:VRS:XKXS, ASASPXX:VPQ:EPLP-AA¹⁷-VYY:VGRTPKV:EQLSN:VRS:XKXS, NDEGLEX:VPQ:EPLP-AA¹⁷-VYY:RIKPHQGQH:EQLSN:VRS:KXEXR, NDEGLEX:VPQ:EPLP-AA¹⁷-VYY:RIKPHQGQH:EQLSN:VRS:QXEXR, SSVKXQP:VPQ:EPLP-AA¹⁷-VYY:EYVRKKPKL:EQLSN:VRS:LEXAXA, RNVQXRP:VPQ:EPLP-AA¹⁷-VYY:EIVRKKPIF:EQLSN:VRS:LAXKXE, KIPKAXX:VPT:EPLP-AA¹⁷-VYY:DENEKVV:EQLSN:VVE:GXGXR, GIPEPXX:VPE:EPLP-AA¹⁷-VYY:DENKNVV:EQLSN:TVE:SXAXR, SIPKAXX:VPT:EPLP-AA¹⁷-VYY:DEYDKVV:EQLSN:VVE:GXGXR, HVTKPTX:APT:EPLP-AA¹⁷-VYY:DDSSNVI:EQLSN:VVR:SXGXH, YVPKPXX:APT:EPLP-AA¹⁷-VYY:DDSSNVI:EQLSN:VVR:SXGXH, TVPKPXX:APT:EPLP-AA¹⁷-VYY:DDSSNVI:EQLSN:VVR:AXGXH, AVPKAXX:APT:EPLP-AA¹⁷-VYY:DSSNNVI:EQLSN:VVK:AXGXH, KVGKAXX:VPT:EPLP-AA¹⁷-VYY:DDMGVPT:EQLSN:VAE:XGXR, KASKAXX:VPT:EPLP-AA¹⁷-VYY:DKGVVTY:EQLSN:AVS:EXGXR, GSAGPXX:TPT:EPLP-AA¹⁷-VYY:NDKQQII:EQLSN:VVD:RXGXS, AAPASXX:VPA:EPLP-AA¹⁷-VYY:DAANNVV:EQLSN:VVE:AXGXR, STPPTXX:VPT:EPLP-AA¹⁷-VYY:DSANNVV:EQLSN:VVE:SXGXR, HVPKPXX:APT:EPLP-AA¹⁷-VYY:DDSSNVI:EQLSN:VVR:SXGXH, RVPSTXX:APV:EPLP-AA¹⁷-VYY:DNGRVLL:EQLSN:VEE:XGXL, ASASPXX:VSQ:EPLP-AA¹⁷-VYY:IGKTPKI:EQLSN:VKS:XKXS, ASASPXX:VPQ:EPLP-AA¹⁷-VYY:VGRTPKV:EQLSN:VKS:XKXS, NDEGLEX:VPT:EPLP-AA¹⁷-VYY:RIKPHQGQH:EQLSN:QHN:KXEXR, NDEGLEX:VPT:EPLP-AA¹⁷-VYY:RIKPHQGQH:EQLSN:EHS:QXEXR, SSVKXQP:SRV:EPLP-AA¹⁷-VYY:EYVRKKPKL:EQLSN:EEH:LEXAXA, RNVQXRP:TQV:EPLP-AA¹⁷-VYY:EIVRKKPIF:EQLSN:EDH:LAXKXE, KIPKAXX:VSQ:EPLT-AA¹⁷-LYY:DENEKVV:EQLSN:VKS:GXGXR, GIPEPXX:VSQ:EPLT-AA¹⁷-LYY:DENKNVV:EQLSN:VKS:SXAXR, SIPKAXX:VSQ:EPLT-AA¹⁷-LYY:DEYDKVV:EQLSN:VKS:GXGXR, HVTKPTX:VSQ:EPLT-AA¹⁷-LYY:DDSSNVI:EQLSN:VKS:SXGXH, YVPKPXX:VSQ:EPLT-AA¹⁷-LYY:DDSSNVI:EQLSN:VKS:SXGXH, TVPKPXX:VSQ:EPLT-AA¹⁷-LYY:DDSSNVI:EQLSN:VKS:AXGXH, AVPKAXX:VSQ:EPLT-AA¹⁷-LYY:DSSNNVI:EQLSN:VKS:AXGXH, KVGKAXX:VSQ:EPLT-AA¹⁷-LYY:DDMGVPT:EQLSN:VKS:XGXR, KASKAXX:VSQ:EPLT-AA¹⁷-LYY:DKGVVTY:EQLSN:VKS:EXGXR, GSAGPXX:VSQ:EPLT-AA¹⁷-LYY:NDKQQII:EQLSN:VKS:RXGXS, AAPASXX:VSQ:EPLT-AA¹⁷-LYY:DAANNVV:EQLSN:VKS:AXGXR, STPPTXX:VSQ:EPLT-AA¹⁷-LYY:DSANNVV:EQLSN:VKS:SXGXR, HVPKPXX:VSQ:EPLT-AA¹⁷-LYY:DDSSNVI:EQLSN:VKS:SXGXH, RVPSTXX:VSQ:EPLT-AA¹⁷-LYY:DNGRVLL:EQLSN:VKS:XGXL, ASAAPXX:VSQ:EPLT-AA¹⁷-LYY:VGRKPKV:EQLSN:VKS:XKXS, ASASPXX:VSQ:EPLT-AA¹⁷-LYY:VGRTPKV:EQLSN:VKS:XKXS, NDEGLEX:VSQ:EPLT-AA¹⁷-LYY:RIKPHQGQH:EQLSN:VKS:KXEXR, NDEGLEX:VSQ:EPLT-AA¹⁷-LYY:RIKPHQGQH:EQLSN:VKS:QXEXR, SSVKXQP:VSQ:EPLT-AA¹⁷-LYY:EYVRKKPKL:EQLSN:VKS:LEXAXA, RNVQXRP:VSQ:EPLT-AA¹⁷-LYY:EIVRKKPIF:EQLSN:VKS:LAXKXE, KIPKAXX:VPT:EPLT-AA¹⁷-LYY:DENEKVV:EQLSN:VVE:GXGXR, GIPEPXX:VPE:EPLT-AA¹⁷-LYY:DENKNVV:EQLSN:TVE:SXAXR, SIPKAXX:VPT:EPLT-AA¹⁷-LYY:DEYDKVV:EQLSN:VVE:GXGXR, HVTKPTX:APT:EPLT-AA¹⁷-LYY:DDSSNVI:EQLSN:VVR:SXGXH, YVPKPXX:APT:EPLT-AA¹⁷-LYY:DDSSNVI:EQLSN:VVR:SXGXH, TVPKPXX:APT:EPLT-AA¹⁷-LYY:DDSSNVI:EQLSN:VVR:AXGXH, AVPKAXX:APT:EPLT-AA¹⁷-LYY:DSSNNVI:EQLSN:VVK:AXGXH, KVGKAXX:VPT:EPLT-AA¹⁷-LYY:DDMGVPT:EQLSN:VAE:XGXR, KASKAXX:VPT:EPLT-AA¹⁷-LYY: DKGVVTY:EQLSN:AVS:EXGXR, GSAGPXX:TPT:EPLT-AA¹⁷-LYY:NDKQQII:EQLSN:VVD:RXGXS, AAPASXX:VPA:EPLT-AA¹⁷-LYY:DAANNVV:EQLSN:VVE:AXGXR, STPPTXX:VPT:EPLT-AA¹⁷-LYY:DSANNVV:EQLSN:VVE:SXGXR, HVPKPXX:APT:EPLT-AA¹⁷-LYY:DDSSNVI:EQLSN:VVR:SXGXH, RVPSTXX:APV:EPLT-AA¹⁷-LYY:DNGRVLL:EQLSN:VEE:XGXL, ASAAPXX:VPQ:EPLT-AA¹⁷-LYY:VGRKPKV:EQLSN:VRS:XKXS, ASASPXX:VPQ:EPLT-AA¹⁷-LYY:VGRTPKV:EQLSN:VKS:XKXS, NDEGLEX:VPT:EPLT-AA¹⁷-LYY:RIKPHQGQH:EQLSN:QHN:KXEXR, NDEGLEX:VPT:EPLT-AA¹⁷-LYY:RIKPHQGQH:EQLSN:EHS:QXEXR, SSVKXQP:SRV:EPLT-AA¹⁷-LYY:EYVRKKPKL:EQLSN:EEH:LEXAXA, RNVQXRP:TQV:EPLT-AA¹⁷-LYY:EIVRKKPIF:EQLSN:EDH:LAXKXE, KIPKAXX:VPQ:EPLT-AA¹⁷-LYY:DENEKVV:EQLSN:VKS:GXGXR, GIPEPXX:VPQ:EPLT-AA¹⁷-LYY:DENKNVV:EQLSN:VKS:SXAXR, SIPKAXX:VPQ:EPLT-AA¹⁷-LYY:DEYDKVV:EQLSN:VKS:GXGXR, HVTKPTX:VPQ:EPLT-AA¹⁷-LYY:DDSSNVI:EQLSN:VKS:SXGXH, YVPKPXX:VPQ:EPLT-AA¹⁷-LYY:DDSSNVI:EQLSN:VKS:SXGXH, TVPKPXX:VPQ:EPLT-AA¹⁷-LYY:DDSSNVI:EQLSN:VKS:AXGXH, AVPKAXX:VPQ:EPLT-AA¹⁷-LYY:DSSNNVI:EQLSN:VKS:AXGXH, KVGKAXX:VPQ:EPLT-AA¹⁷-LYY:DDMGVPT:EQLSN:VKS:XGXR, KASKAXX:VPQ:EPLT-AA¹⁷-LYY:DKGVVTY:EQLSN:VKS:EXGXR, GSAGPXX:VPQ:EPLT-AA¹⁷-LYY:NDKQQII:EQLSN:VKS:RXGXS, AAPASXX:VPQ:EPLT-AA¹⁷-LYY:DAANNVV:EQLSN:VKS:AXGXR, STPPTXX:VPQ:EPLT-AA¹⁷-LYY:DSANNVV:EQLSN:VKS:SXGXR, HVPKPXX:VPQ:EPLT-AA¹⁷-LYY:DDSSNVI:EQLSN:VKS:SXGXH, RVPSTXX:VPQ:EPLT-AA¹⁷-LYY:DNGRVLL:EQLSN:VKS:XGXL, ASAAPXX:VPQ:EPLT-AA¹⁷-LYY:VGRKPKV:EQLSN:VKS:XKXS, ASASPXX:VPQ:EPLT-AA¹⁷-LYY:IGKTPKI:EQLSN:VKS:XKXS, NDEGLEX:VPQ:EPLT-AA¹⁷-LYY:RIKPHQGQH:EQLSN:VKS:KXEXR, NDEGLEX:VPQ:EPLT-AA¹⁷-LYY:RIKPHQGQH:EQLSN:VKS:QXEXR, SSVKXQP:VPQ:EPLT-AA¹⁷-LYY:EYVRKKPKL:EQLSN:VKS:LEXAXA, RNVQXRP:VPQ:EPLT-AA¹⁷-LYY:EIVRKKPIF:EQLSN:VKS:LAXKXE, ASASPXX:VSQ:EPLT-AA¹⁷-LYY:IGKTPKI:EQLSN:VKS:XKXS, KIPKAXX:VPT:SNIT-AA¹⁷-QIM:DENEKVV:IGEMS:QHN:GXGXR, GIPEPXX:VPT:SNIT-AA¹⁷-QIM:DENKNVV:IGEMS:QHN:SXAXR, SIPKAXX:VPT:SNIT-AA¹⁷-QIM:DEYDKVV:IGEMS:QHN:GXGXR, HVTKPTX:VPT:SNIT-AA¹⁷-QIM:DDSSNVI:IGEMS:QHN:SXGXH, YVPKPXX:VPT:SNIT-AA¹⁷-QIM:DDSSNVI:IGEMS:QHN:SXGXH, TVPKPXX:VPT:SNIT-AA¹⁷-QIM:DDSSNVI:IGEMS:QHN:AXGXH, AVPKAXX:VPT:SNIT-AA¹⁷-QIM:DSSNNVI:IGEMS:QHN:AXGXH, KVGKAXX:VPT:SNIT-AA¹⁷-QIM:DDMGVPT:IGEMS:QHN:XGXR, KASKAXX:VPT:SNIT-AA¹⁷-QIM:DKGVVTY:IGEMS:QHN:EXGXR, GSAGPXX:VPT:SNIT-AA¹⁷-QIM:NDKQQII:IGEMS:QHN:RXGXS, AAPASXX:VPT:SNIT-AA¹⁷-QIM:DAANNVV:IGEMS:QHN:AXGXR, STPPTXX:VPT:SNIT-AA¹⁷-QIM:DSANNVV:IGEMS:QHN:SXGXR, HVPKPXX:VPT:SNIT-AA¹⁷-QIM:DDSSNVI:IGEMS:QHN:SXGXH, RVPSTXX:VPT:SNIT-AA¹⁷-QIM:DNGRVLL:IGEMS:QHN:XGXL, ASAAPXX:VPT:SNIT-AA¹⁷-QIM:VGRKPKV:IGEMS:QHN:XKXS, ASASPXX:VPT:SNIT-AA¹⁷-QIM:IGKTPKI:IGEMS:QHN:XKXS, ASASPXX:VPT:SNIT-AA¹⁷-QIM:VGRTPKV:IGEMS:QHN:XKXS, NDEGLEX:VPT:SNIT-AA¹⁷-QIM:RIKPHQGQH:IGEMS:QHN:QXEXR, NDEGLEX:VPT:SNIT-AA¹⁷-QIM:RIKPHQGQH:IGEMS:QHN:KXEXR, SSVKXQP:VPT:SNIT-AA¹⁷-QIM:EYVRKKPKL:IGEMS:QHN:LEXAXA, RNVQXRP:VPT:SNIT-AA¹⁷-QIM:EIVRKKPIF:IGEMS:QHN:LAXKXE, KIPKAXX:VPT:SNIT-AA¹⁷-QIM:DENEKVV:IGEMS:VVE:GXGXR, GIPEPXX:VPE:SNIT-AA¹⁷-QIM:DENKNVV:IGEMS:TVE:SXAXR, SIPKAXX:VPT:SNIT-AA¹⁷-QIM:DEYDKVV:IGEMS:VVE:GXGXR, HVTKPTX:APT:SNIT-AA¹⁷-QIM:DDSSNVI:IGEMS:VVR:SXGXH, YVPKPXX:APT:SNIT-AA¹⁷-QIM:DDSSNVI:IGEMS:VVR:SXGXH, TVPKPXX:APT:SNIT-AA¹⁷-QIM:DDSSNVI:IGEMS:VVR:AXGXH, AVPKAXX:APT:SNIT-AA¹⁷-QIM:DSSNNVI:IGEMS:VVK:AXGXH, KVGKAXX:VPT:SNIT-AA¹⁷-QIM:DDMGVPT:IGEMS:VAE:XGXR, KASKAXX:VPT:SNIT-AA¹⁷-QIM:DKGVVTY:IGEMS:AVS:EXGXR, GSAGPXX:TPT:SNIT-AA¹⁷-QIM:NDKQQII:IGEMS:VVD:RXGXS, AAPASXX:VPA:SNIT-AA¹⁷-QIM:DAANNVV:IGEMS:VVE:AXGXR, STPPTXX:VPT:SNIT-AA¹⁷-QIM:DSANNVV:IGEMS:VVE:SXGXR, HVPKPXX:APT:SNIT-AA¹⁷-QIM:DDSSNVI:IGEMS:VVR:SXGXH, RVPSTXX:APV:SNIT-AA¹⁷-QIM:DNGRVLL:IGEMS:VEE:XGXL, ASAAPXX:VPQ:SNIT-AA¹⁷-QIM:VGRKPKV:IGEMS:VRS:XKXS, ASASPXX:VSQ:SNIT-AA¹⁷-QIM:IGKTPKI:IGEMS:VKS:XKXS, ASASPXX:VPQ:SNIT-AA¹⁷-QIM:VGRTPKV:IGEMS:VKS:XKXS, NDEGLEX:VPT:SNIT-AA¹⁷-QIM:RIKPHQGQH:IGEMS:EHS:QXEXR, SSVKXQP:SRV:SNIT-AA¹⁷-QIM:EYVRKKPKL:IGEMS:EEH:LEXAXA, RNVQXRP:TQV:SNIT-AA¹⁷-QIM:EIVRKKPIF:IGEMS:EDH:LAXKXE, KIPKAXX:VPT:SNIT-AA¹⁷-QIM:DENEKVV:LGEMS:EHS:GXGXR, GIPEPXX:VPT:SNIT-AA¹⁷-QIM:DENKNVV:LGEMS:EHS:SXAXR, SIPKAXX:VPT:SNIT-AA¹⁷-QIM:DEYDKVV:LGEMS:EHS:GXGXR, HVTKPTX:VPT:SNIT-AA¹⁷-QIM:DDSSNVI:LGEMS:EHS:SXGXH, YVPKPXX:VPT:SNIT-AA¹⁷-QIM:DDSSNVI:LGEMS:EHS:SXGXH, TVPKPXX:VPT:SNIT-AA¹⁷-QIM:DDSSNVI:LGEMS:EHS:AXGXH, AVPKAXX:VPT:SNIT-AA¹⁷-QIM:DSSNNVI:LGEMS:EHS:AXGXH, KVGKAXX:VPT:SNIT-AA¹⁷-QIM:DDMGVPT:LGEMS:EHS:XGXR, KASKAXX:VPT:SNIT-AA¹⁷-QIM:DKGVVTY:LGEMS:EHS:EXGXR, GSAGPXX:VPT:SNIT-AA¹⁷-QIM:NDKQQII:LGEMS:EHS:RXGXS, AAPASXX:VPT:SNIT-AA¹⁷-QIM:DAANNVV:LGEMS:EHS:AXGXR, STPPTXX:VPT:SNIT-AA¹⁷-QIM:DSANNVV:LGEMS:EHS:SXGXR, HVPKPXX:VPT:SNIT-AA¹⁷-QIM:DDSSNVI:LGEMS:EHS:SXGXH, RVPSTXX:VPT:SNIT-AA¹⁷-QIM:DNGRVLL:LGEMS:EHS:XGXL, ASAAPXX:VPT:SNIT-AA¹⁷-QIM:VGRKPKV:LGEMS:EHS:XKXS, ASASPXX:VPT:SNIT-AA¹⁷-QIM:IGKTPKI:LGEMS:EHS:XKXS, ASASPXX:VPT:SNIT-AA¹⁷-QIM:VGRTPKV:LGEMS:EHS:XKXS, NDEGLEX:VPT:SNIT-AA¹⁷-QIM:RIKPHQGQH:LGEMS:EHS:KXEXR, SSVKXQP:VPT:SNIT-AA¹⁷-QIM:EYVRKKPKL:LGEMS:EHS:LEXAXA, RNVQXRP:VPT:SNIT-AA¹⁷-QIM:EIVRKKPIF:LGEMS:EHS:LAXKXE, KIPKAXX:VPT:SNIT-AA¹⁷-QIM:DENEKVV:LGEMS:VVE:GXGXR, GIPEPXX:VPE:SNIT-AA¹⁷-QIM:DENKNVV:LGEMS:TVE:SXAXR, SIPKAXX:VPT:SNIT-AA¹⁷-QIM:DEYDKVV:LGEMS:VVE:GXGXR, HVTKPTX:APT:SNIT-AA¹⁷-QIM:DDSSNVI:LGEMS:VVR:SXGXH, YVPKPXX:APT:SNIT-AA¹⁷-QIM:DDSSNVI:LGEMS:VVR:SXGXH, TVPKPXX:APT:SNIT-AA¹⁷-QIM:DDSSNVI:LGEMS:VVR:AXGXH, AVPKAXX:APT:SNIT-AA¹⁷-QIM:DSSNNVI:LGEMS:VVK:AXGXH, KVGKAXX:VPT:SNIT-AA¹⁷-QIM:DDMGVPT:LGEMS:VAE:XGXR, KASKAXX:VPT:SNIT-AA¹⁷-QIM:DKGVVTY:LGEMS:AVS:EXGXR, GSAGPXX:TPT:SNIT-AA¹⁷-QIM:NDKQQII:LGEMS:VVD:RXGXS, AAPASXX:VPA:SNIT-AA¹⁷-QIM:DAANNVV:LGEMS:VVE:AXGXR, STPPTXX:VPT:SNIT-AA¹⁷-QIM:DSANNVV:LGEMS:VVE:SXGXR, HVPKPXX:APT:SNIT-AA¹⁷-QIM:DDSSNVI:LGEMS:VVR:SXGXH, RVPSTXX:APV:SNIT-AA¹⁷-QIM:DNGRVLL:LGEMS:VEE:XGXL, ASAAPXX:VPQ:SNIT-AA¹⁷-QIM:VGRKPKV:LGEMS:VRS:XKXS, ASASPXX:VSQ:SNIT-AA¹⁷-QIM:IGKTPKI:LGEMS:VKS:XKXS, ASASPXX:VPQ:SNIT-AA¹⁷-QIM:VGRTPKV:LGEMS:VKS:XKXS, NDEGLEX:VPT:SNIT-AA¹⁷-QIM:RIKPHQGQH:LGEMS:QHN:KXEXR, SSVKXQP:SRV:SNIT-AA¹⁷-QIM:EYVRKKPKL:LGEMS:EEH:LEXAXA, RNVQXRP:TQV:SNIT-AA¹⁷-QIM:EIVRKKPIF:LGEMS:EDH:LAXKXE, KIPKAXX:SRV:RSVK-AA¹⁷-AKV:DENEKVV:KEVQV:EEH:GXGXR, GIPEPXX:SRV:RSVK-AA¹⁷-AKV:DENKNVV:KEVQV:EEH:SXAXR, SIPKAXX:SRV:RSVK-AA¹⁷-AKV:DEYDKVV:KEVQV:EEH:GXGXR, HVTKPTX:SRV:RSVK-AA¹⁷-AKV:DDSSNVI:KEVQV:EEH:SXGXH, YVPKPXX:SRV:RSVK-AA¹⁷-AKV:DDSSNVI:KEVQV:EEH:SXGXH, TVPKPXX:SRV:RSVK-AA¹⁷-AKV:DDSSNVI:KEVQV:EEH:AXGXH, AVPKAXX:SRV:RSVK-AA¹⁷-AKV:DSSNNVI:KEVQV:EEH:AXGXH, KVGKAXX:SRV:RSVK-AA¹⁷-AKV:DDMGVPT:KEVQV:EEH:XGXR, KASKAXX:SRV:RSVK-AA¹⁷-AKV:DKGVVTY:KEVQV:EEH:EXGXR, GSAGPXX:SRV:RSVK-AA¹⁷-AKV:NDKQQII:KEVQV:EEH:RXGXS, AAPASXX:SRV:RSVK-AA¹⁷-AKV:DAANNVV:KEVQV:EEH:AXGXR, STPPTXX:SRV:RSVK-AA¹⁷-AKV:DSANNVV:KEVQV:EEH:SXGXR, HVPKPXX:SRV:RSVK-AA¹⁷-AKV:DDSSNVI:KEVQV:EEH:SXGXH, RVPSTXX:SRV:RSVK-AA¹⁷-AKV:DNGRVLL:KEVQV:EEH:XGXL, ASAAPXX:SRV:RSVK-AA¹⁷-AKV:VGRKPKV:KEVQV:EEH:XKXS, ASASPXX:SRV:RSVK-AA¹⁷-AKV:IGKTPKI:KEVQV:EEH:XKXS, ASASPXX:SRV:RSVK-AA¹⁷-AKV:VGRTPKV:KEVQV:EEH:XKXS, NDEGLEX:SRV:RSVK-AA¹⁷-AKV:RIKPHQGQH:KEVQV:EEH:KXEXR, NDEGLEX:SRV:RSVK-AA¹⁷-AKV:RIKPHQGQH:KEVQV:EEH:QXEXR, RNVQXRP:SRV:RSVK-AA¹⁷-AKV:EIVRKKPIF:KEVQV:EEH:LAXKXE, KIPKAXX:VPT:RSVK-AA¹⁷-AKV:DENEKVV:KEVQV:VVE:GXGXR, GIPEPXX:VPE:RSVK-AA¹⁷-AKV:DENKNVV:KEVQV:TVE:SXAXR, SIPKAXX:VPT:RSVK-AA¹⁷-AKV:DEYDKVV:KEVQV:VVE:GXGXR, HVTKPTX:APT:RSVK-AA¹⁷-AKV:DDSSNVI:KEVQV:VVR:SXGXH, YVPKPXX:APT:RSVK-AA¹⁷-AKV:DDSSNVI:KEVQV:VVR:SXGXH, TVPKPXX:APT:RSVK-AA¹⁷-AKV:DDSSNVI:KEVQV:VVR:AXGXH, AVPKAXX:APT:RSVK-AA¹⁷-AKV:DSSNNVI:KEVQV:VVK:AXGXH, KVGKAXX:VPT:RSVK-AA¹⁷-AKV:DDMGVPT:KEVQV:VAE:XGXR, KASKAXX:VPT:RSVK-AA¹⁷-AKV:DKGVVTY:KEVQV:AVS:EXGXR, GSAGPXX:TPT:RSVK-AA¹⁷-AKV:N DKQQI I:KEVQV:VVD:RXGXS, AAPASXX:VPA:RSVK-AA¹⁷-AKV:DAANNVV:KEVQV:VVE:AXGXR, STPPTXX:VPT:RSVK-AA¹⁷-AKV:DSANNVV:KEVQV:VVE:SXGXR, HVPKPXX:APT:RSVK-AA¹⁷-AKV:DDSSNVI:KEVQV:VVR:SXGXH, RVPSTXX:APV:RSVK-AA¹⁷-AKV:DNGRVLL:KEVQV:VEE:XGXL, ASAAPXX:VPQ:RSVK-AA¹⁷-AKV:VGRKPKV:KEVQV:VRS:XKXS, ASASPXX:VSQ:RSVK-AA¹⁷-AKV:IGKTPKI:KEVQV:VKS:XKXS, ASASPXX:VPQ:RSVK-AA¹⁷-AKV:VGRTPKV:KEVQV:VKS:XKXS, NDEGLEX:VPT:RSVK-AA¹⁷-AKV:RIKPHQGQH:KEVQV:QHN:KXEXR, NDEGLEX:VPT:RSVK-AA¹⁷-AKV:RIKPHQGQH:KEVQV:EHS:QXEXR, RNVQXRP:TQV:RSVK-AA¹⁷-AKV:EIVRKKPIF:KEVQV:EDH:LAXKXE, KIPKAXX:TQV:RPVQ-AA¹⁷-RKI:DENEKVV:KKATV:EDH:GXGXR, GIPEPXX:TQV:RPVQ-AA¹⁷-RKI:DENKNVV:KKATV:EDH:SXAXR, SIPKAXX:TQV:RPVQ-AA¹⁷-RKI:DEYDKVV:KKATV:EDH:GXGXR, HVTKPTX:TQV:RPVQ-AA¹⁷-RKI:DDSSNVI:KKATV:EDH:SXGXH, YVPKPXX:TQV:RPVQ-AA¹⁷-RKI:DDSSNVI:KKATV:EDH:SXGXH, TVPKPXX:TQV:RPVQ-AA¹⁷-RKI:DDSSNVI:KKATV:EDH:AXGXH, AVPKAXX:TQV:RPVQ-AA¹⁷-RKI:DSSNNVI:KKATV:EDH:AXGXH, KVGKAXX:TQV:RPVQ-AA¹⁷-RKI:DDMGVPT:KKATV:EDH:XGXR, KASKAXX:TQV:RPVQ-AA¹⁷-RKI:DKGVVTY:KKATV:EDH:EXGXR, GSAGPXX:TQV:RPVQ-AA¹⁷-RKI:NDKQQII:KKATV:EDH:RXGXS, AAPASXX:TQV:RPVQ-AA¹⁷-RKI:DAANNVV:KKATV:EDH:AXGXR, STPPTXX:TQV:RPVQ-AA¹⁷-RKI:DSANNVV:KKATV:EDH:SXGXR, HVPKPXX:TQV:RPVQ-AA¹⁷-RKI:DDSSNVI:KKATV:EDH:SXGXH, RVPSTXX:TQV:RPVQ-AA¹⁷-RKI:DNGRVLL:KKATV:EDH:XGXL, ASAAPXX:TQV:RPVQ-AA¹⁷-RKI:VGRKPKV:KKATV:EDH:XKXS, ASASPXX:TQV:RPVQ-AA¹⁷-RKI:IGKTPKI:KKATV:EDH:XKXS, ASASPXX:TQV:RPVQ-AA¹⁷-RKI:VGRTPKV:KKATV:EDH:XKXS, NDEGLEX:TQV:RPVQ-AA¹⁷-RKI:RIKPHQGQH:KKATV:EDH:KXEXR, NDEGLEX:TQV:RPVQ-AA¹⁷-RKI:RIKPHQGQH:KKATV:EDH:QXEXR, SSVKXQP:TQV:RPVQ-AA¹⁷-RKI:EYVRKKPKL:KKATV:EDH:LEXAXA, KIPKAXX:VPT:RPVQ-AA¹⁷-RKI:DENEKVV:KKATV:VVE:GXGXR, GIPEPXX:VPE:RPVQ-AA¹⁷-RKI:DENKNVV:KKATV:TVE:SXAXR, SIPKAXX:VPT:RPVQ-AA¹⁷-RKI:DEYDKVV:KKATV:VVE:GXGXR, HVTKPTX:APT:RPVQ-AA¹⁷-RKI:DDSSNVI:KKATV:VVR:SXGXH, YVPKPXX:APT:RPVQ-AA¹⁷-RKI:DDSSNVI:KKATV:VVR:SXGXH, TVPKPXX:APT:RPVQ-AA¹⁷-RKI:DDSSNVI:KKATV:VVR:AXGXH, AVPKAXX:APT:RPVQ-AA¹⁷-RKI:DSSNNVI:KKATV:VVK:AXGXH, KVGKAXX:VPT:RPVQ-AA¹⁷-RKI:DDMGVPT:KKATV:VAE:XGXR, KASKAXX:VPT:RPVQ-AA¹⁷-RKI:DKGVVTY:KKATV:AVS:EXGXR, GSAGPXX:TPT:RPVQ-AA¹⁷-RKI:NDKQQII:KKATV:VVD:RXGXS, AAPASXX:VPA:RPVQ-AA¹⁷-RKI:DAANNVV:KKATV:VVE:AXGXR, STPPTXX:VPT:RPVQ-AA¹⁷-RKI:DSANNVV:KKATV:VVE:SXGXR, HVPKPXX:APT:RPVQ-AA¹⁷-RKI:DDSSNVI:KKATV:VVR:SXGXH, RVPSTXX:APV:RPVQ-AA¹⁷-RKI:DNGRVLL:KKATV:VEE:XGXL, ASAAPXX:VPQ:RPVQ-AA¹⁷-RKI:VGRKPKV:KKATV:VRS:XKXS, ASASPXX:VSQ:RPVQ-AA¹⁷-RKI:IGKTPKI:KKATV:VKS:XKXS, ASASPXX:VPQ:RPVQ-AA¹⁷-RKI:VGRTPKV:KKATV:VKS:XKXS, NDEGLEX:VPT:RPVQ-AA¹⁷-RKI:RIKPHQGQH:KKATV:QHN:KXEXR, NDEGLEX:VPT:RPVQ-AA¹⁷-RKI:RIKPHQGQH:KKATV:EHS:QXEXR and SSVKXQP:SRV:RPVQ-AA¹⁷-RKI:EYVRKKPKL:KKATV:EEH:LEXAXA; and wherein AA¹⁷ is selected from the group consisting of G, A, V, L, I, P, F, M, W, T and S (in particular is selected from the group consisting of M, I, L, V and T). More particularly, the heptuplet PEP7:PEP3:PEP12:LINKER:PEP2:PEP4:PEP8 is selected from the group consisting of GIPEPXX:VPT:SAIS-AA¹⁷-LYL:DENKNVV:LKNYQ:VVE:SXAXR, HVTKPTX:VPT:SAIS-AA¹⁷-LYL:DDSSNVI:LKNYQ:VVE:SXGXH, YVPKPXX:VPT:SAIS-AA¹⁷-LYL:DDSSNVI:LKNYQ:VVE:SXGXH, TVPKPXX:VPT:SAIS-AA¹⁷-LYL:DDSSNVI:LKNYQ:VVE:AXGXH, AVPKAXX:VPT:SAIS-AA¹⁷-LYL:DSSNNVI:LKNYQ:VVE:AXGXH, KVGKAXX:VPT:SAIS-AA¹⁷-LYL:DDMGVPT:LKNYQ:VVE:XGXR, KASKAXX:VPT:SAIS-AA¹⁷-LYL:DKGVVTY:LKNYQ:VVE:EXGXR, GSAGPXX:VPT:SAIS-AA¹⁷-LYL:NDKQQII:LKNYQ:VVE:RXGXS, AAPASXX:VPT:SAIS-AA¹⁷-LYL:DAANNVV:LKNYQ:VVE:AXGXR, STPPTXX:VPT:SAIS-AA¹⁷-LYL:DSANNVV:LKNYQ:VVE:SXGXR, HVPKPXX:VPT:SAIS-AA¹⁷-LYL:DDSSNVI:LKNYQ:VVE:SXGXH, RVPSTXX:VPT:SAIS-AA¹⁷-LYL:DNGRVLL:LKNYQ:VVE:XGXL, ASAAPXX:VPT:SAIS-AA¹⁷-LYL:VGRKPKV:LKNYQ:VVE:XKXS, ASASPXX:VPT:SAIS-AA¹⁷-LYL:IGKTPKI:LKNYQ:VVE:XKXS, ASASPXX:VPT:SAIS-AA¹⁷-LYL:VGRTPKV:LKNYQ:VVE:XKXS, GIPEPXX:VPE:SAIS-AA¹⁷-LYL:DENKNVV:LKNYQ:TVE:SXAXR, HVTKPTX:APT:SAIS-AA¹⁷-LYL:DDSSNVI:LKNYQ:VVR:SXGXH, YVPKPXX:APT:SAIS-AA¹⁷-LYL:DDSSNVI:LKNYQ:VVR:SXGXH, TVPKPXX:APT:SAIS-AA¹⁷-LYL:DDSSNVI:LKNYQ:VVR:AXGXH, AVPKAXX:APT:SAIS-AA¹⁷-LYL:DSSNNVI:LKNYQ:VVK:AXGXH, KVGKAXX:VPT:SAIS-AA¹⁷-LYL:DDMGVPT:LKNYQ:VAE:XGXR, KASKAXX:VPT:SAIS-AA¹⁷-LYL:DKGVVTY:LKNYQ:AVS:EXGXR, GSAGPXX:TPT:SAIS-AA¹⁷-LYL:NDKQQII:LKNYQ:VVD:RXGXS, AAPASXX:VPA:SAIS-AA¹⁷-LYL:DAANNVV:LKNYQ:VVE:AXGXR, HVPKPXX:APT:SAIS-AA¹⁷-LYL:DDSSNVI:LKNYQ:VVR:SXGXH, RVPSTXX:APV:SAIS-AA¹⁷-LYL:DNGRVLL:LKNYQ:VEE:XGXL, ASAAPXX:VPQ:SAIS-AA¹⁷-LYL:VGRKPKV:LKNYQ:VRS:XKXS, ASASPXX:VSQ:SAIS-AA¹⁷-LYL:IGKTPKI:LKNYQ:VKS:XKXS, ASASPXX:VPQ:SAIS-AA¹⁷-LYL:VGRTPKV:LKNYQ:VKS:XKXS, NDEGLEX:VPT:SAIS-AA¹⁷-LYL:RIKPHQGQH:LKNYQ:QHN:KXEXR, NDEGLEX:VPT:SAIS-AA¹⁷-LYL:RIKPHQGQH:LKNYQ:EHS:QXEXR, SSVKXQP:SRV:SAIS-AA¹⁷-LYL:EYVRKKPKL:LKNYQ:EEH:LEXAXA, RNVQXRP:TQV:SAIS-AA¹⁷-LYL:EIVRKKPIF:LKNYQ:EDH:LAXKXE, KIPKAXX:VPE:SSLS-AA¹⁷-LFF:DENEKVV:LKVYP:TVE:GXGXR, SIPKAXX:VPE:SSLS-AA¹⁷-LFF:DEYDKVV:LKVYP:TVE:GXGXR, HVTKPTX:VPE:SSLS-AA¹⁷-LFF:DDSSNVI:LKVYP:TVE:SXGXH, YVPKPXX:VPE:SSLS-AA¹⁷-LFF:DDSSNVI:LKVYP:TVE:SXGXH, TVPKPXX:VPE:SSLS-AA¹⁷-LFF:DDSSNVI:LKVYP:TVE:AXGXH, AVPKAXX:VPE:SSLS-AA¹⁷-LFF:DSSNNVI:LKVYP:TVE:AXGXH, KVGKAXX:VPE:SSLS-AA¹⁷-LFF:DDMGVPT:LKVYP:TVE:XGXR, KASKAXX:VPE:SSLS-AA¹⁷-LFF:DKGVVTY: LKVYP:TVE:EXGXR, GSAGPXX:VPE:SSLS-AA¹⁷-LFF:NDKQQII:LKVYP:TVE:RXGXS, AAPASXX:VPE:SSLS-AA¹⁷-LFF:DAANNVV:LKVYP:TVE:AXGXR, STPPTXX:VPE:SSLS-AA¹⁷-LFF:DSANNVV:LKVYP:TVE:SXGXR, HVPKPXX:VPE:SSLS-AA¹⁷-LFF:DDSSNVI:LKVYP:TVE:SXGXH, RVPSTXX:VPE:SSLS-AA¹⁷-LFF:DNGRVLL:LKVYP:TVE:XGXL, ASAAPXX:VPE:SSLS-AA¹⁷-LFF:VGRKPKV:LKVYP:TVE:XKXS, ASASPXX:VPE:SSLS-AA¹⁷-LFF:IGKTPKI:LKVYP:TVE:XKXS, ASASPXX:VPE:SSLS-AA¹⁷-LFF:VGRTPKV:LKVYP:TVE:XKXS, KIPKAXX:VPT:SSLS-AA¹⁷-LFF:DENEKVV:LKVYP:VVE:GXGXR, SIPKAXX:VPT:SSLS-AA¹⁷-LFF:DEYDKVV:LKVYP:VVE:GXGXR, HVTKPTX:APT:SSLS-AA¹⁷-LFF:DDSSNVI:LKVYP:VVR:SXGXH, YVPKPXX:APT:SSLS-AA¹⁷-LFF:DDSSNVI:LKVYP:VVR:SXGXH, TVPKPXX:APT:SSLS-AA¹⁷-LFF:DDSSNVI:LKVYP:VVR:AXGXH, AVPKAXX:APT:SSLS-AA¹⁷-LFF:DSSNNVI:LKVYP:VVK:AXGXH, KVGKAXX:VPT:SSLS-AA¹⁷-LFF:DDMGVPT:LKVYP:VAE:XGXR, KASKAXX:VPT:SSLS-AA¹⁷-LFF:DKGVVTY:LKVYP:AVS:EXGXR, GSAGPXX:TPT:SSLS-AA¹⁷-LFF:NDKQQII:LKVYP:VVD:RXGXS, AAPASXX:VPA:SSLS-AA¹⁷-LFF:DAANNVV:LKVYP:VVE:AXGXR, STPPTXX:VPT:SSLS-AA¹⁷-LFF:DSANNVV:LKVYP:VVE:SXGXR, HVPKPXX:APT:SSLS-AA¹⁷-LFF:DDSSNVI:LKVYP:VVR:SXGXH, RVPSTXX:APV:SSLS-AA¹⁷-LFF:DNGRVLL:LKVYP:VEE:XGXL, ASAAPXX:VPQ:SSLS-AA¹⁷-LFF:VGRKPKV:LKVYP:VRS:XKXS, ASASPXX:VSQ:SSLS-AA¹⁷-LFF:IGKTPKI:LKVYP:VKS:XKXS, ASASPXX:VPQ:SSLS-AA¹⁷-LFF:VGRTPKV:LKVYP:VKS:XKXS, NDEGLEX:VPT:SSLS-AA¹⁷-LFF:RIKPHQGQH:LKVYP:QHN:KXEXR, NDEGLEX:VPT:SSLS-AA¹⁷-LFF:RIKPHQGQH:LKVYP:EHS:QXEXR, SSVKXQP:SRV:SSLS-AA¹⁷-LFF:EYVRKKPKL:LKVYP:EEH:LEXAXA, RNVQXRP:TQV:SSLS-AA¹⁷-LFF:EIVRKKPIF:LKVYP:EDH:LAXKXE, KIPKAXX:APT:NAIS-AA¹⁷-LYF:DENEKVV:LKKYR:VVR:GXGXR, GIPEPXX:APT:NAIS-AA¹⁷-LYF:DENKNVV:LKKYR:VVR:SXAXR, SIPKAXX:APT:NAIS-AA¹⁷-LYF:DEYDKVV:LKKYR:VVR:GXGXR, AVPKAXX:APT:NAIS-AA¹⁷-LYF:DSSNNVI:LKKYR:VVR:AXGXH, KVGKAXX:APT:NAIS-AA¹⁷-LYF:DDMGVPT:LKKYR:VVR:XGXR, KASKAXX:APT:NAIS-AA¹⁷-LYF:DKGVVTY:LKKYR:VVR:EXGXR, GSAGPXX:APT:NAIS-AA¹⁷-LYF:NDKQQII:LKKYR:VVR:RXGXS, AAPASXX:APT:NAIS-AA¹⁷-LYF:DAANNVV:LKKYR:VVR:AXGXR, STPPTXX:APT:NAIS-AA¹⁷-LYF:DSANNVV:LKKYR:VVR:SXGXR, RVPSTXX:APT:NAIS-AA¹⁷-LYF:DNGRVLL:LKKYR:VVR:XGXL, ASAAPXX:APT:NAIS-AA¹⁷-LYF:VGRKPKV:LKKYR:VVR:XKXS, ASASPXX:APT:NAIS-AA¹⁷-LYF:IGKTPKI:LKKYR:VVR:XKXS, ASASPXX:APT:NAIS-AA¹⁷-LYF:VGRTPKV:LKKYR:VVR:XKXS, KIPKAXX:VPT:NAIS-AA¹⁷-LYF:DENEKVV:LKKYR:VVE:GXGXR, GIPEPXX:VPE:NAIS-AA¹⁷-LYF:DENKNVV:LKKYR:TVE:SXAXR, SIPKAXX:VPT:NAIS-AA¹⁷-LYF:DEYDKVV:LKKYR:VVE:GXGXR, AVPKAXX:APT:NAIS-AA¹⁷-LYF:DSSNNVI:LKKYR:VVK:AXGXH, KVGKAXX:VPT:NAIS-AA¹⁷-LYF:DDMGVPT:LKKYR:VAE:XGXR, KASKAXX:VPT:NAIS-AA¹⁷-LYF:DKGVVTY:LKKYR:AVS:EXGXR, GSAGPXX:TPT:NAIS-AA¹⁷-LYF:NDKQQII:LKKYR:VVD:RXGXS, AAPASXX:VPA:NAIS-AA¹⁷-LYF:DAANNVV:LKKYR:VVE:AXGXR, STPPTXX:VPT:NAIS-AA¹⁷-LYF:DSANNVV:LKKYR:VVE:SXGXR, RVPSTXX:APV:NAIS-AA¹⁷-LYF:DNGRVLL:LKKYR:VEE:XGXL, ASAAPXX:VPQ:NAIS-AA¹⁷-LYF:VGRKPKV:LKKYR:VRS:XKXS, ASASPXX:VSQ:NAIS-AA¹⁷-LYF:IGKTPKI:LKKYR:VKS:XKXS, ASASPXX:VPQ:NAIS-AA¹⁷-LYF:VGRTPKV:LKKYR:VKS:XKXS, NDEGLEX:VPT:NAIS-AA¹⁷-LYF:RIKPHQGQH:LKKYR:QHN:KXEXR, NDEGLEX:VPT:NAIS-AA¹⁷-LYF:RIKPHQGQH:LKKYR:EHS:QXEXR, SSVKXQP:SRV:NAIS-AA¹⁷-LYF:EYVRKKPKL:LKKYR:EEH:LEXAXA, RNVQXRP:TQV:NAIS-AA¹⁷-LYF:EIVRKKPIF:LKKYR:EDH:LAXKXE, KIPKAXX:APT:SATS-AA¹⁷-LYY:DENEKVV:LRKHR:VVK:GXGXR, GIPEPXX:APT:SATS-AA¹⁷-LYY:DENKNVV:LRKHR:VVK:SXAXR, SIPKAXX:APT:SATS-AA¹⁷-LYY:DEYDKVV:LRKHR:VVK:GXGXR, HVTKPTX:APT:SATS-AA¹⁷-LYY:DDSSNVI:LRKHR:VVK:SXGXH, YVPKPXX:APT:SATS-AA¹⁷-LYY:DDSSNVI:LRKHR:VVK:SXGXH, TVPKPXX:APT:SATS-AA¹⁷-LYY:DDSSNVI:LRKHR:VVK:AXGXH, KVGKAXX:APT:SATS-AA¹⁷-LYY:DDMGVPT:LRKHR:VVK:XGXR, KASKAXX:APT:SATS-AA¹⁷-LYY:DKGVVTY:LRKHR:VVK:EXGXR, GSAGPXX:APT:SATS-AA¹⁷-LYY:NDKQQII:LRKHR:VVK:RXGXS, AAPASXX:APT:SATS-AA¹⁷-LYY:DAANNVV:LRKHR:VVK:AXGXR, STPPTXX:APT:SATS-AA¹⁷-LYY:DSANNVV:LRKHR:VVK:SXGXR, HVPKPXX:APT:SATS-AA¹⁷-LYY:DDSSNVI:LRKHR:VVK:SXGXH, RVPSTXX:APT:SATS-AA¹⁷-LYY:DNGRVLL:LRKHR:VVK:XGXL, ASAAPXX:APT:SATS-AA¹⁷-LYY:VGRKPKV:LRKHR:VVK:XKXS, ASASPXX:APT:SATS-AA¹⁷-LYY:IGKTPKI:LRKHR:VVK:XKXS, ASASPXX:APT:SATS-AA¹⁷-LYY:VGRTPKV:LRKHR:VVK:XKXS, KIPKAXX:VPT:SATS-AA¹⁷-LYY:DENEKVV:LRKHR:VVE:GXGXR, GIPEPXX:VPE:SATS-AA¹⁷-LYY:DENKNVV:LRKHR:TVE:SXAXR, SIPKAXX:VPT:SATS-AA¹⁷-LYY:DEYDKVV:LRKHR:VVE:GXGXR, HVTKPTX:APT:SATS-AA¹⁷-LYY:DDSSNVI:LRKHR:VVR:SXGXH, YVPKPXX:APT:SATS-AA¹⁷-LYY:DDSSNVI:LRKHR:VVR:SXGXH, TVPKPXX:APT:SATS-AA¹⁷-LYY:DDSSNVI:LRKHR:VVR:AXGXH, KVGKAXX:VPT:SATS-AA¹⁷-LYY:DDMGVPT:LRKHR:VAE:XGXR, KASKAXX:VPT:SATS-AA¹⁷-LYY:DKGVVTY:LRKHR:AVS:EXGXR, GSAGPXX:TPT:SATS-AA¹⁷-LYY:NDKQQII:LRKHR:VVD:RXGXS, AAPASXX:VPA:SATS-AA¹⁷-LYY:DAANNVV:LRKHR:VVE:AXGXR, STPPTXX:VPT:SATS-AA¹⁷-LYY:DSANNVV:LRKHR:VVE:SXGXR, HVPKPXX:APT:SATS-AA¹⁷-LYY:DDSSNVI:LRKHR:VVR:SXGXH, RVPSTXX:APV:SATS-AA¹⁷-LYY:DNGRVLL:LRKHR:VEE:XGXL, ASAAPXX:VPQ:SATS-AA¹⁷-LYY:VGRKPKV:LRKHR:VRS:XKXS, ASASPXX:VSQ:SATS-AA¹⁷-LYY:IGKTPKI:LRKHR:VKS:XKXS, ASASPXX:VPQ:SATS-AA¹⁷-LYY:VGRTPKV:LRKHR:VKS:XKXS, NDEGLEX:VPT:SATS-AA¹⁷-LYY:RIKPHQGQH:LRKHR:QHN:KXEXR, NDEGLEX:VPT:SATS-AA¹⁷-LYY:RIKPHQGQH:LRKHR:EHS:QXEXR, SSVKXQP:SRV:SATS-AA¹⁷-LYY:EYVRKKPKL:LRKHR:EEH:LEXAXA, RNVQXRP:TQV:SATS-AA¹⁷-LYY:EIVRKKPIF:LRKHR:EDH:LAXKXE, KIPKAXX:VPT:SPIS-AA¹⁷-LYK:DENEKVV:LKYHY:VAE:GXGXR, GIPEPXX:VPT:SPIS-AA¹⁷-LYK:DENKNVV:LKYHY:VAE:SXAXR, SIPKAXX:VPT:SPIS-AA¹⁷-LYK:DEYDKVV:LKYHY:VAE:GXGXR, HVTKPTX:VPT:SPIS-AA¹⁷-LYK:DDSSNVI:LKYHY:VAE:SXGXH, YVPKPXX:VPT:SPIS-AA¹⁷-LYK:DDSSNVI:LKYHY:VAE:SXGXH, TVPKPXX:VPT:SPIS-AA¹⁷-LYK:DDSSNVI:LKYHY:VAE:AXGXH, AVPKAXX:VPT:SPIS-AA¹⁷-LYK:DSSNNVI:LKYHY:VAE:AXGXH, KASKAXX:VPT:SPIS-AA¹⁷-LYK:DKGVVTY:LKYHY:VAE:EXGXR, GSAGPXX:VPT:SPIS-AA¹⁷-LYK:NDKQQII:LKYHY:VAE:RXGXS, AAPASXX:VPT:SPIS-AA¹⁷-LYK:DAANNVV:LKYHY:VAE:AXGXR, STPPTXX:VPT:SPIS-AA¹⁷-LYK:DSANNVV:LKYHY:VAE:SXGXR, HVPKPXX:VPT:SPIS-AA¹⁷-LYK:DDSSNVI:LKYHY:VAE:SXGXH, RVPSTXX:VPT:SPIS-AA¹⁷-LYK:DNGRVLL:LKYHY:VAE:XGXL, ASAAPXX:VPT:SPIS-AA¹⁷-LYK:VGRKPKV:LKYHY:VAE:XKXS, ASASPXX:VPT:SPIS-AA¹⁷-LYK:IGKTPKI:LKYHY:VAE:XKXS, ASASPXX:VPT:SPIS-AA¹⁷-LYK:VGRTPKV:LKYHY:VAE:XKXS, KIPKAXX:VPT:SPIS-AA¹⁷-LYK:DENEKVV:LKYHY:VVE:GXGXR, GIPEPXX:VPE:SPIS-AA¹⁷-LYK:DENKNVV:LKYHY:TVE:SXAXR, SIPKAXX:VPT:SPIS-AA¹⁷-LYK:DEYDKVV:LKYHY:VVE:GXGXR, HVTKPTX:APT:SPIS-AA¹⁷-LYK:DDSSNVI:LKYHY:VVR:SXGXH, YVPKPXX:APT:SPIS-AA¹⁷-LYK:DDSSNVI:LKYHY:VVR:SXGXH, TVPKPXX:APT:SPIS-AA¹⁷-LYK:DDSSNVI:LKYHY:VVR:AXGXH, AVPKAXX:APT:SPIS-AA¹⁷-LYK:DSSNNVI:LKYHY:VVK:AXGXH, KASKAXX:VPT:SPIS-AA¹⁷-LYK:DKGVVTY:LKYHY:AVS:EXGXR, GSAGPXX:TPT:SPIS-AA¹⁷-LYK:NDKQQII:LKYHY:VVD:RXGXS, AAPASXX:VPA:SPIS-AA¹⁷-LYK:DAANNVV:LKYHY:VVE:AXGXR, STPPTXX:VPT:SPIS-AA¹⁷-LYK:DSANNVV:LKYHY:VVE:SXGXR, HVPKPXX:APT:SPIS-AA¹⁷-LYK:DDSSNVI:LKYHY:VVR:SXGXH, RVPSTXX:APV:SPIS-AA¹⁷-LYK:DNGRVLL:LKYHY:VEE:XGXL, ASAAPXX:VPQ:SPIS-AA¹⁷-LYK:VGRKPKV:LKYHY:VRS:XKXS, ASASPXX:VSQ:SPIS-AA¹⁷-LYK:IGKTPKI:LKYHY:VKS:XKXS, ASASPXX:VPQ:SPIS-AA¹⁷-LYK:VGRTPKV:LKYHY:VKS:XKXS, NDEGLEX:VPT:SPIS-AA¹⁷-LYK:RIKPHQGQH:LKYHY:QHN:KXEXR, NDEGLEX:VPT:SPIS-AA¹⁷-LYK:RIKPHQGQH:LKYHY:EHS:QXEXR, SSVKXQP:SRV:SPIS-AA¹⁷-LYK:EYVRKKPKL:LKYHY:EEH:LEXAXA, RNVQXRP:TQV:SPIS-AA¹⁷-LYK:EIVRKKPIF:LKYHY:EDH:LAXKXE, KIPKAXX:VPT:EPIS-AA¹⁷-LYL:DENEKVV:KFKYE:AVS:GXGXR, GIPEPXX:VPT:EPIS-AA¹⁷-LYL:DENKNVV:KFKYE:AVS:SXAXR, SIPKAXX:VPT:EPIS-AA¹⁷-LYL:DEYDKVV:KFKYE:AVS:GXGXR, HVTKPTX:VPT:EPIS-AA¹⁷-LYL:DDSSNVI:KFKYE:AVS:SXGXH, YVPKPXX:VPT:EPIS-AA¹⁷-LYL:DDSSNVI:KFKYE:AVS:SXGXH, TVPKPXX:VPT:EPIS-AA¹⁷-LYL:DDSSNVI:KFKYE:AVS:AXGXH, AVPKAXX:VPT:EPIS-AA¹⁷-LYL:DSSNNVI:KFKYE:AVS:AXGXH, KVGKAXX:VPT:EPIS-AA¹⁷-LYL:DDMGVPT:KFKYE:AVS:XGXR, GSAGPXX:VPT:EPIS-AA¹⁷-LYL:NDKQQII:KFKYE:AVS:RXGXS, AAPASXX:VPT:EPIS-AA¹⁷-LYL:DAANNVV:KFKYE:AVS:AXGXR, STPPTXX:VPT:EPIS-AA¹⁷-LYL:DSANNVV:KFKYE:AVS:SXGXR, HVPKPXX:VPT:EPIS-AA¹⁷-LYL:DDSSNVI:KFKYE:AVS:SXGXH, RVPSTXX:VPT:EPIS-AA¹⁷-LYL:DNGRVLL:KFKYE:AVS:XGXL, ASAAPXX:VPT:EPIS-AA¹⁷-LYL:VGRKPKV:KFKYE:AVS:XKXS, ASASPXX:VPT:EPIS-AA¹⁷-LYL:IGKTPKI:KFKYE:AVS:XKXS, ASASPXX:VPT:EPIS-AA¹⁷-LYL:VGRTPKV:KFKYE:AVS:XKXS, KIPKAXX:VPT:EPIS-AA¹⁷-LYL:DENEKVV:KFKYE:VVE:GXGXR, GIPEPXX:VPE:EPIS-AA¹⁷-LYL:DENKNVV:KFKYE:TVE:SXAXR, SIPKAXX:VPT:EPIS-AA¹⁷-LYL:DEYDKVV:KFKYE:VVE:GXGXR, HVTKPTX:APT:EPIS-AA¹⁷-LYL:DDSSNVI:KFKYE:VVR:SXGXH, YVPKPXX:APT:EPIS-AA¹⁷-LYL:DDSSNVI:KFKYE:VVR:SXGXH, TVPKPXX:APT:EPIS-AA¹⁷-LYL:DDSSNVI:KFKYE:VVR:AXGXH, AVPKAXX:APT:EPIS-AA¹⁷-LYL:DSSNNVI:KFKYE:VVK:AXGXH, KVGKAXX:VPT:EPIS-AA¹⁷-LYL:DDMGVPT:KFKYE:VAE:XGXR, GSAGPXX:TPT:EPIS-AA¹⁷-LYL:NDKQQII:KFKYE:VVD:RXGXS, AAPASXX:VPA:EPIS-AA¹⁷-LYL:DAANNVV:KFKYE:VVE:AXGXR, STPPTXX:VPT:EPIS-AA¹⁷-LYL:DSANNVV:KFKYE:VVE:SXGXR, HVPKPXX:APT:EPIS-AA¹⁷-LYL:DDSSNVI:KFKYE:VVR:SXGXH, RVPSTXX:APV:EPIS-AA¹⁷-LYL:DNGRVLL:KFKYE:VEE:XGXL, ASAAPXX:VPQ:EPIS-AA¹⁷-LYL:VGRKPKV:KFKYE:VRS:XKXS, ASASPXX:VSQ:EPIS-AA¹⁷-LYL:IGKTPKI:KFKYE:VKS:XKXS, ASASPXX:VPQ:EPIS-AA¹⁷-LYL:VGRTPKV:KFKYE:VKS:XKXS, NDEGLEX:VPT:EPIS-AA¹⁷-LYL:RIKPHQGQH:KFKYE:QHN:KXEXR, NDEGLEX:VPT:EPIS-AA¹⁷-LYL:RIKPHQGQH:KFKYE:EHS:QXEXR, SSVKXQP:SRV:EPIS-AA¹⁷-LYL:EYVRKKPKL:KFKYE:EEH:LEXAXA, RNVQXRP:TQV:EPIS-AA¹⁷-LYL:EIVRKKPIF:KFKYE:EDH:LAXKXE, KIPKAXX:TPT:SPIN-AA¹⁷-LYF:DENEKVV:YGKIP:VVD:GXGXR, GIPEPXX:TPT:SPIN-AA¹⁷-LYF:DENKNVV:YGKIP:VVD:SXAXR, SIPKAXX:TPT:SPIN-AA¹⁷-LYF:DEYDKVV:YGKIP:VVD:GXGXR, HVTKPTX:TPT:SPIN-AA¹⁷-LYF:DDSSNVI:YGKIP:VVD:SXGXH, YVPKPXX:TPT:SPIN-AA¹⁷-LYF:DDSSNVI:YGKIP:VVD:SXGXH, TVPKPXX:TPT:SPIN-AA¹⁷-LYF:DDSSNVI:YGKIP:VVD:AXGXH, AVPKAXX:TPT:SPIN-AA¹⁷-LYF:DSSNNVI:YGKIP:VVD:AXGXH, KVGKAXX:TPT:SPIN-AA¹⁷-LYF:DDMGVPT:YGKIP:VVD:XGXR, KASKAXX:TPT:SPIN-AA¹⁷-LYF:DKGVVTY:YGKIP:VVD:EXGXR, AAPASXX:TPT:SPIN-AA¹⁷-LYF:DAANNVV:YGKIP:VVD:AXGXR, STPPTXX:TPT:SPIN-AA¹⁷-LYF:DSANNVV:YGKIP:VVD:SXGXR, HVPKPXX:TPT:SPIN-AA¹⁷-LYF:DDSSNVI:YGKIP:VVD:SXGXH, RVPSTXX:TPT:SPIN-AA¹⁷-LYF:DNGRVLL:YGKIP:VVD:XGXL, ASAAPXX:TPT:SPIN-AA¹⁷-LYF:VGRKPKV:YGKIP:VVD:XKXS, ASASPXX:TPT:SPIN-AA¹⁷-LYF:IGKTPKI:YGKIP:VVD:XKXS, ASASPXX:TPT:SPIN-AA¹⁷-LYF:VGRTPKV:YGKIP:VVD:XKXS, KIPKAXX:VPT:SPIN-AA¹⁷-LYF:DENEKVV:YGKIP:VVE:GXGXR, GIPEPXX:VPE:SPIN-AA¹⁷-LYF:DENKNVV:YGKIP:TVE:SXAXR, SIPKAXX:VPT:SPIN-AA¹⁷-LYF:DEYDKVV:YGKIP:VVE:GXGXR, HVTKPTX:APT:SPIN-AA¹⁷-LYF:DDSSNVI:YGKIP:VVR:SXGXH, YVPKPXX:APT:SPIN-AA¹⁷-LYF:DDSSNVI:YGKIP:VVR:SXGXH, TVPKPXX:APT:SPIN-AA¹⁷-LYF:DDSSNVI:YGKIP:VVR:AXGXH, AVPKAXX:APT:SPIN-AA¹⁷-LYF:DSSNNVI:YGKIP:VVK:AXGXH, KVGKAXX:VPT:SPIN-AA¹⁷-LYF:DDMGVPT:YGKIP:VAE:XGXR, KASKAXX:VPT:SPIN-AA¹⁷-LYF:DKGVVTY:YGKIP:AVS:EXGXR, AAPASXX:VPA:SPIN-AA¹⁷-LYF:DAANNVV:YGKIP:VVE:AXGXR, STPPTXX:VPT:SPIN-AA¹⁷-LYF:DSANNVV:YGKIP:VVE:SXGXR, HVPKPXX:APT:SPIN-AA¹⁷-LYF:DDSSNVI:YGKIP:VVR:SXGXH, RVPSTXX:APV:SPIN-AA¹⁷-LYF:DNGRVLL:YGKIP:VEE:XGXL, ASAAPXX:VPQ:SPIN-AA¹⁷-LYF:VGRKPKV:YGKIP:VRS:XKXS, ASASPXX:VSQ:SPIN-AA¹⁷-LYF:IGKTPKI:YGKIP:VKS:XKXS, ASASPXX:VPQ:SPIN-AA¹⁷-LYF:VGRTPKV:YGKIP:VKS:XKXS, NDEGLEX:VPT:SPIN-AA¹⁷-LYF:RIKPHQGQH:YGKIP:QHN:KXEXR, NDEGLEX:VPT:SPIN-AA¹⁷-LYF:RIKPHQGQH:YGKIP:EHS:QXEXR, SSVKXQP:SRV:SPIN-AA¹⁷-LYF:EYVRKKPKL:YGKIP:EEH:LEXAXA, RNVQXRP:TQV:SPIN-AA¹⁷-LYF:EIVRKKPIF:YGKIP:EDH:LAXKXE, KIPKAXX:VPA:SPIS-AA¹⁷-LYI:DENEKVV:YKQYE:VVE:GXGXR, GIPEPXX:VPA:SPIS-AA¹⁷-LYI:DENKNVV:YKQYE:VVE:SXAXR, SIPKAXX:VPA:SPIS-AA¹⁷-LYI:DEYDKVV:YKQYE:VVE:GXGXR, HVTKPTX:VPA:SPIS-AA¹⁷-LYI:DDSSNVI:YKQYE:VVE:SXGXH, YVPKPXX:VPA:SPIS-AA¹⁷-LYI:DDSSNVI:YKQYE:VVE:SXGXH, TVPKPXX:VPA:SPIS-AA¹⁷-LYI:DDSSNVI:YKQYE:VVE:AXGXH, AVPKAXX:VPA:SPIS-AA¹⁷-LYI:DSSNNVI:YKQYE:VVE:AXGXH, KVGKAXX:VPA:SPIS-AA¹⁷-LYI:DDMGVPT:YKQYE:VVE:XGXR, KASKAXX:VPA:SPIS-AA¹⁷-LYI:DKGVVTY:YKQYE:VVE:EXGXR, GSAGPXX:VPA:SPIS-AA¹⁷-LYI:NDKQQII:YKQYE:VVE:RXGXS, STPPTXX:VPA:SPIS-AA¹⁷-LYI:DSANNVV:YKQYE:VVE:SXGXR, HVPKPXX:VPA:SPIS-AA¹⁷-LYI:DDSSNVI:YKQYE:VVE:SXGXH, RVPSTXX:VPA:SPIS-AA¹⁷-LYI:DNGRVLL:YKQYE:VVE:XGXL, ASAAPXX:VPA:SPIS-AA¹⁷-LYI:VGRKPKV:YKQYE:VVE:XKXS, ASASPXX:VPA:SPIS-AA¹⁷-LYI:IGKTPKI:YKQYE:VVE:XKXS, ASASPXX:VPA:SPIS-AA¹⁷-LYI:VGRTPKV:YKQYE:VVE:XKXS, KIPKAXX:VPT:SPIS-AA¹⁷-LYI:DENEKVV:YKQYE:VVE:GXGXR, GIPEPXX:VPE:SPIS-AA¹⁷-LYI:DENKNVV:YKQYE:TVE:SXAXR, SIPKAXX:VPT:SPIS-AA¹⁷-LYI:DEYDKVV:YKQYE:VVE:GXGXR, HVTKPTX:APT:SPIS-AA¹⁷-LYI:DDSSNVI:YKQYE:VVR:SXGXH, YVPKPXX:APT:SPIS-AA¹⁷-LYI:DDSSNVI:YKQYE:VVR:SXGXH, TVPKPXX:APT:SPIS-AA¹⁷-LYI:DDSSNVI:YKQYE:VVR:AXGXH, AVPKAXX:APT:SPIS-AA¹⁷-LYI:DSSNNVI:YKQYE:VVK:AXGXH, KVGKAXX:VPT:SPIS-AA¹⁷-LYI:DDMGVPT:YKQYE:VAE:XGXR, KASKAXX:VPT:SPIS-AA¹⁷-LYI:DKGVVTY:YKQYE:AVS:EXGXR, GSAGPXX:TPT:SPIS-AA¹⁷-LYI:NDKQQII:YKQYE:VVD:RXGXS, STPPTXX:VPT:SPIS-AA¹⁷-LYI:DSANNVV:YKQYE:VVE:SXGXR, HVPKPXX:APT:SPIS-AA¹⁷-LYI:DDSSNVI:YKQYE:VVR:SXGXH, RVPSTXX:APV:SPIS-AA¹⁷-LYI:DNGRVLL:YKQYE:VEE:XGXL, ASAAPXX:VPQ:SPIS-AA¹⁷-LYI:VGRKPKV:YKQYE:VRS:XKXS, ASASPXX:VSQ:SPIS-AA¹⁷-LYI:IGKTPKI:YKQYE:VKS:XKXS, ASASPXX:VPQ:SPIS-AA¹⁷-LYI:VGRTPKV:YKQYE:VKS:XKXS, NDEGLEX:VPT:SPIS-AA¹⁷-LYI:RIKPHQGQH:YKQYE:QHN:KXEXR, NDEGLEX:VPT:SPIS-AA¹⁷-LYI:RIKPHQGQH:YKQYE:EHS:QXEXR, SSVKXQP:SRV:SPIS-AA¹⁷-LYI:EYVRKKPKL:YKQYE:EEH:LEXAXA, RNVQXRP:TQV:SPIS-AA¹⁷-LYI:EIVRKKPIF:YKQYE:EDH:LAXKXE, KIPKAXX:VPT:SPIS-AA¹⁷-LFI:DENEKVV:YKQYE:VVE:GXGXR, GIPEPXX:VPT:SPIS-AA¹⁷-LFI:DENKNVV:YKQYE:VVE:SXAXR, SIPKAXX:VPT:SPIS-AA¹⁷-LFI:DEYDKVV:YKQYE:VVE:GXGXR, HVTKPTX:VPT:SPIS-AA¹⁷-LFI:DDSSNVI:YKQYE:VVE:SXGXH, YVPKPXX:VPT:SPIS-AA¹⁷-LFI:DDSSNVI:YKQYE:VVE:SXGXH, TVPKPXX:VPT:SPIS-AA¹⁷-LFI:DDSSNVI:YKQYE:VVE:AXGXH, AVPKAXX:VPT:SPIS-AA¹⁷-LFI:DSSNNVI:YKQYE:VVE:AXGXH, KVGKAXX:VPT:SPIS-AA¹⁷-LFI:DDMGVPT:YKQYE:VVE:XGXR, KASKAXX:VPT:SPIS-AA¹⁷-LFI:DKGVVTY:YKQYE:VVE:EXGXR, GSAGPXX:VPT:SPIS-AA¹⁷-LFI:NDKQQII:YKQYE:VVE:RXGXS, AAPASXX:VPT:SPIS-AA¹⁷-LFI:DAANNVV:YKQYE:VVE:AXGXR, HVPKPXX:VPT:SPIS-AA¹⁷-LFI:DDSSNVI:YKQYE:VVE:SXGXH, RVPSTXX:VPT:SPIS-AA¹⁷-LFI:DNGRVLL:YKQYE:VVE:XGXL, ASAAPXX:VPT:SPIS-AA¹⁷-LFI:VGRKPKV:YKQYE:VVE:XKXS, ASASPXX:VPT:SPIS-AA¹⁷-LFI:IGKTPKI:YKQYE:VVE:XKXS, ASASPXX:VPT:SPIS-AA¹⁷-LFI:VGRTPKV:YKQYE:VVE:XKXS, GIPEPXX:VPE:SPIS-AA¹⁷-LFI:DENKNVV:YKQYE:TVE:SXAXR, HVTKPTX:APT:SPIS-AA¹⁷-LFI:DDSSNVI:YKQYE:VVR:SXGXH, YVPKPXX:APT:SPIS-AA¹⁷-LFI:DDSSNVI:YKQYE:VVR:SXGXH, TVPKPXX:APT:SPIS-AA¹⁷-LFI:DDSSNVI:YKQYE:VVR:AXGXH, AVPKAXX:APT:SPIS-AA¹⁷-LFI:DSSNNVI:YKQYE:VVK:AXGXH, KVGKAXX:VPT:SPIS-AA¹⁷-LFI:DDMGVPT:YKQYE:VAE:XGXR, KASKAXX:VPT:SPIS-AA¹⁷-LFI:DKGVVTY:YKQYE:AVS:EXGXR, GSAGPXX:TPT:SPIS-AA¹⁷-LFI:NDKQQII:YKQYE:VVD:RXGXS, AAPASXX:VPA:SPIS-AA¹⁷-LFI:DAANNVV:YKQYE:VVE:AXGXR, HVPKPXX:APT:SPIS-AA¹⁷-LFI:DDSSNVI:YKQYE:VVR:SXGXH, RVPSTXX:APV:SPIS-AA¹⁷-LFI:DNGRVLL:YKQYE:VEE:XGXL, ASAAPXX:VPQ:SPIS-AA¹⁷-LFI:VGRKPKV:YKQYE:VRS:XKXS, ASASPXX:VSQ:SPIS-AA¹⁷-LFI:IGKTPKI:YKQYE:VKS:XKXS, ASASPXX:VPQ:SPIS-AA¹⁷-LFI:VGRTPKV:YKQYE:VKS:XKXS, NDEGLEX:VPT:SPIS-AA¹⁷-LFI:RIKPHQGQH:YKQYE:QHN:KXEXR, NDEGLEX:VPT:SPIS-AA¹⁷-LFI:RIKPHQGQH:YKQYE:EHS:QXEXR, SSVKXQP:SRV:SPIS-AA¹⁷-LFI:EYVRKKPKL:YKQYE:EEH:LEXAXA, RNVQXRP:TQV:SPIS-AA¹⁷-LFI:EIVRKKPIF:YKQYE:EDH:LAXKXE, KIPKAXX:APV:KPLS-AA¹⁷-LYV:DENEKVV:DHHKD:VEE:GXGXR, GIPEPXX:APV:KPLS-AA¹⁷-LYV:DENKNVV:DHHKD:VEE:SXAXR, SIPKAXX:APV:KPLS-AA¹⁷-LYV:DEYDKVV:DHHKD:VEE:GXGXR, HVTKPTX:APV:KPLS-AA¹⁷-LYV:DDSSNVI:DHHKD:VEE:SXGXH, YVPKPXX:APV:KPLS-AA¹⁷-LYV:DDSSNVI:DHHKD:VEE:SXGXH, TVPKPXX:APV:KPLS-AA¹⁷-LYV:DDSSNVI:DHHKD:VEE:AXGXH, AVPKAXX:APV:KPLS-AA¹⁷-LYV:DSSNNVI:DHHKD:VEE:AXGXH, KVGKAXX:APV:KPLS-AA¹⁷-LYV:DDMGVPT:DHHKD:VEE:XGXR, KASKAXX:APV:KPLS-AA¹⁷-LYV:DKGVVTY:DHHKD:VEE:EXGXR, GSAGPXX:APV:KPLS-AA¹⁷-LYV:NDKQQII:DHHKD:VEE:RXGXS, AAPASXX:APV:KPLS-AA¹⁷-LYV:DAANNVV:DHHKD:VEE:AXGXR, STPPTXX:APV:KPLS-AA¹⁷-LYV:DSANNVV:DHHKD:VEE:SXGXR, HVPKPXX:APV:KPLS-AA¹⁷-LYV:DDSSNVI:DHHKD:VEE:SXGXH, ASAAPXX:APV:KPLS-AA¹⁷-LYV:VGRKPKV:DHHKD:VEE:XKXS, ASASPXX:APV:KPLS-AA¹⁷-LYV:IGKTPKI:DHHKD:VEE:XKXS, ASASPXX:APV:KPLS-AA¹⁷-LYV:VGRTPKV:DHHKD:VEE:XKXS, KIPKAXX:VPT:KPLS-AA¹⁷-LYV:DENEKVV:DHHKD:VVE:GXGXR, GIPEPXX:VPE:KPLS-AA¹⁷-LYV:DENKNVV:DHHKD:TVE:SXAXR, SIPKAXX:VPT:KPLS-AA¹⁷-LYV:DEYDKVV:DHHKD:VVE:GXGXR, HVTKPTX:APT:KPLS-AA¹⁷-LYV:DDSSNVI:DHHKD:VVR:SXGXH, YVPKPXX:APT:KPLS-AA¹⁷-LYV:DDSSNVI:DHHKD:VVR:SXGXH, TVPKPXX:APT:KPLS-AA¹⁷-LYV:DDSSNVI:DHHKD:VVR:AXGXH, AVPKAXX:APT:KPLS-AA¹⁷-LYV:DSSNNVI:DHHKD:VVK:AXGXH, KVGKAXX:VPT:KPLS-AA¹⁷-LYV:DDMGVPT:DHHKD:VAE:XGXR, KASKAXX:VPT:KPLS-AA¹⁷-LYV:DKGVVTY:DHHKD:AVS:EXGXR, GSAGPXX:TPT:KPLS-AA¹⁷-LYV:NDKQQII:DHHKD:VVD:RXGXS, AAPASXX:VPA:KPLS-AA¹⁷-LYV:DAANNVV:DHHKD:VVE:AXGXR, STPPTXX:VPT:KPLS-AA¹⁷-LYV:DSANNVV:DHHKD:VVE:SXGXR, HVPKPXX:APT:KPLS-AA¹⁷-LYV:DDSSNVI:DHHKD:VVR:SXGXH, ASAAPXX:VPQ:KPLS-AA¹⁷-LYV:VGRKPKV:DHHKD:VRS:XKXS, ASASPXX:VSQ:KPLS-AA¹⁷-LYV:IGKTPKI:DHHKD:VKS:XKXS, ASASPXX:VPQ:KPLS-AA¹⁷-LYV:VGRTPKV:DHHKD:VKS:XKXS, NDEGLEX:VPT:KPLS-AA¹⁷-LYV:RIKPHQGQH:DHHKD:QHN:KXEXR, NDEGLEX:VPT:KPLS-AA¹⁷-LYV:RIKPHQGQH:DHHKD:EHS:QXEXR, SSVKXQP:SRV:KPLS-AA¹⁷-LYV:EYVRKKPKL:DHHKD:EEH:LEXAXA, RNVQXRP:TQV:KPLS-AA¹⁷-LYV:EIVRKKPIF:DHHKD:EDH:LAXKXE, KIPKAXX:VPQ:EPLP-AA¹⁷-VYY:DENEKVV:EQLSN:VRS:GXGXR, GIPEPXX:VPQ:EPLP-AA¹⁷-VYY:DENKNVV:EQLSN:VRS:SXAXR, SIPKAXX:VPQ:EPLP-AA¹⁷-VYY:DEYDKVV:EQLSN:VRS:GXGXR, HVTKPTX:VPQ:EPLP-AA¹⁷-VYY:DDSSNVI:EQLSN:VRS:SXGXH, YVPKPXX:VPQ:EPLP-AA¹⁷-VYY:DDSSNVI:EQLSN:VRS:SXGXH, TVPKPXX:VPQ:EPLP-AA¹⁷-VYY:DDSSNVI:EQLSN:VRS:AXGXH, AVPKAXX:VPQ:EPLP-AA¹⁷-VYY:DSSNNVI:EQLSN:VRS:AXGXH, KVGKAXX:VPQ:EPLP-AA¹⁷-VYY:DDMGVPT:EQLSN:VRS:XGXR, KASKAXX:VPQ:EPLP-AA¹⁷-VYY:DKGVVTY:EQLSN:VRS:EXGXR, GSAGPXX:VPQ:EPLP-AA¹⁷-VYY:NDKQQII:EQLSN:VRS:RXGXS, AAPASXX:VPQ:EPLP-AA¹⁷-VYY:DAANNVV:EQLSN:VRS:AXGXR, STPPTXX:VPQ:EPLP-AA¹⁷-VYY:DSANNVV:EQLSN:VRS:SXGXR, HVPKPXX:VPQ:EPLP-AA¹⁷-VYY:DDSSNVI:EQLSN:VRS:SXGXH, RVPSTXX:VPQ:EPLP-AA¹⁷-VYY:DNGRVLL:EQLSN:VRS:XGXL, ASASPXX:VPQ:EPLP-AA¹⁷-VYY:IGKTPKI:EQLSN:VRS:XKXS, ASASPXX:VPQ:EPLP-AA¹⁷-VYY:VGRTPKV:EQLSN:VRS:XKXS, KIPKAXX:VPT:EPLP-AA¹⁷-VYY:DENEKVV:EQLSN:VVE:GXGXR, GIPEPXX:VPE:EPLP-AA¹⁷-VYY:DENKNVV:EQLSN:TVE:SXAXR, SIPKAXX:VPT:EPLP-AA¹⁷-VYY:DEYDKVV:EQLSN:VVE:GXGXR, HVTKPTX:APT:EPLP-AA¹⁷-VYY:DDSSNVI:EQLSN:VVR:SXGXH, YVPKPXX:APT:EPLP-AA¹⁷-VYY:DDSSNVI:EQLSN:VVR:SXGXH, TVPKPXX:APT:EPLP-AA¹⁷-VYY:DDSSNVI:EQLSN:VVR:AXGXH, AVPKAXX:APT:EPLP-AA¹⁷-VYY:DSSNNVI:EQLSN:VVK:AXGXH, KVGKAXX:VPT:EPLP-AA¹⁷-VYY:DDMGVPT:EQLSN:VAE:XGXR, KASKAXX:VPT:EPLP-AA¹⁷-VYY:DKGVVTY:EQLSN:AVS:EXGXR, GSAGPXX:TPT:EPLP-AA¹⁷-VYY:NDKQQII:EQLSN:VVD:RXGXS, AAPASXX:VPA:EPLP-AA¹⁷-VYY:DAANNVV:EQLSN:VVE:AXGXR, STPPTXX:VPT:EPLP-AA¹⁷-VYY:DSANNVV:EQLSN:VVE:SXGXR, HVPKPXX:APT:EPLP-AA¹⁷-VYY:DDSSNVI:EQLSN:VVR:SXGXH, RVPSTXX:APV:EPLP-AA¹⁷-VYY:DNGRVLL:EQLSN:VEE:XGXL, ASASPXX:VSQ:EPLP-AA¹⁷-VYY:IGKTPKI:EQLSN:VKS:XKXS, ASASPXX:VPQ:EPLP-AA¹⁷-VYY:VGRTPKV:EQLSN:VKS:XKXS, NDEGLEX:VPT:EPLP-AA¹⁷-VYY:RIKPHQGQH:EQLSN:QHN:KXEXR, NDEGLEX:VPT:EPLP-AA¹⁷-VYY:RIKPHQGQH:EQLSN:EHS:QXEXR, SSVKXQP:SRV:EPLP-AA¹⁷-VYY:EYVRKKPKL:EQLSN:EEH:LEXAXA, RNVQXRP:TQV:EPLP-AA¹⁷-VYY:EIVRKKPIF:EQLSN:EDH:LAXKXE, KIPKAXX:VSQ:EPLT-AA¹⁷-LYY:DENEKVV:EQLSN:VKS:GXGXR, GIPEPXX:VSQ:EPLT-AA¹⁷-LYY:DENKNVV:EQLSN:VKS:SXAXR, SIPKAXX:VSQ:EPLT-AA¹⁷-LYY:DEYDKVV:EQLSN:VKS:GXGXR, HVTKPTX:VSQ:EPLT-AA¹⁷-LYY:DDSSNVI:EQLSN:VKS:SXGXH, YVPKPXX:VSQ:EPLT-AA¹⁷-LYY:DDSSNVI:EQLSN:VKS:SXGXH, TVPKPXX:VSQ:EPLT-AA¹⁷-LYY:DDSSNVI:EQLSN:VKS:AXGXH, AVPKAXX:VSQ:EPLT-AA¹⁷-LYY:DSSNNVI:EQLSN:VKS:AXGXH, KVGKAXX:VSQ:EPLT-AA¹⁷-LYY:DDMGVPT:EQLSN:VKS:XGXR, KASKAXX:VSQ:EPLT-AA¹⁷-LYY:DKGVVTY:EQLSN:VKS:EXGXR, GSAGPXX:VSQ:EPLT-AA¹⁷-LYY:NDKQQII:EQLSN:VKS:RXGXS, AAPASXX:VSQ:EPLT-AA¹⁷-LYY:DAANNVV:EQLSN:VKS:AXGXR, STPPTXX:VSQ:EPLT-AA¹⁷-LYY:DSANNVV:EQLSN:VKS:SXGXR, HVPKPXX:VSQ:EPLT-AA¹⁷-LYY:DDSSNVI:EQLSN:VKS:SXGXH, RVPSTXX:VSQ:EPLT-AA¹⁷-LYY:DNGRVLL:EQLSN:VKS:XGXL, ASAAPXX:VSQ:EPLT-AA¹⁷-LYY:VGRKPKV:EQLSN:VKS:XKXS, ASASPXX:VSQ:EPLT-AA¹⁷-LYY:VGRTPKV:EQLSN:VKS:XKXS, KIPKAXX:VPT:EPLT-AA¹⁷-LYY:DENEKVV:EQLSN:VVE:GXGXR, GIPEPXX:VPE:EPLT-AA¹⁷-LYY:DENKNVV:EQLSN:TVE:SXAXR, SIPKAXX:VPT:EPLT-AA¹⁷-LYY:DEYDKVV:EQLSN:VVE:GXGXR, HVTKPTX:APT:EPLT-AA¹⁷-LYY:DDSSNVI:EQLSN:VVR:SXGXH, YVPKPXX:APT:EPLT-AA¹⁷-LYY:DDSSNVI:EQLSN:VVR:SXGXH, TVPKPXX:APT:EPLT-AA¹⁷-LYY:DDSSNVI:EQLSN:VVR:AXGXH, AVPKAXX:APT:EPLT-AA¹⁷-LYY:DSSNNVI:EQLSN:VVK:AXGXH, KVGKAXX:VPT:EPLT-AA¹⁷-LYY:DDMGVPT:EQLSN:VAE:XGXR, KASKAXX:VPT:EPLT-AA¹⁷-LYY:DKGVVTY:EQLSN:AVS:EXGXR, GSAGPXX:TPT:EPLT-AA¹⁷-LYY:NDKQQII:EQLSN:VVD:RXGXS, AAPASXX:VPA:EPLT-AA¹⁷-LYY:DAANNVV:EQLSN:VVE:AXGXR, STPPTXX:VPT:EPLT-AA¹⁷-LYY:DSANNVV:EQLSN:VVE:SXGXR, HVPKPXX:APT:EPLT-AA¹⁷-LYY:DDSSNVI:EQLSN:VVR:SXGXH, RVPSTXX:APV:EPLT-AA¹⁷-LYY:DNGRVLL:EQLSN:VEE:XGXL, ASAAPXX:VPQ:EPLT-AA¹⁷-LYY:VGRKPKV:EQLSN:VRS:XKXS, NDEGLEX:VPT:EPLT-AA¹⁷-LYY:RIKPHQGQH:EQLSN:QHN:KXEXR, NDEGLEX:VPT:EPLT-AA¹⁷-LYY:RIKPHQGQH:EQLSN:EHS:QXEXR, SSVKXQP:SRV:EPLT-AA¹⁷-LYY:EYVRKKPKL:EQLSN:EEH:LEXAXA, RNVQXRP:TQV:EPLT-AA¹⁷-LYY:EIVRKKPIF:EQLSN:EDH:LAXKXE, KIPKAXX:VPQ:EPLT-AA¹⁷-LYY:DENEKVV:EQLSN:VKS:GXGXR, GIPEPXX:VPQ:EPLT-AA¹⁷-LYY:DENKNVV:EQLSN:VKS:SXAXR, SIPKAXX:VPQ:EPLT-AA¹⁷-LYY:DEYDKVV:EQLSN:VKS:GXGXR, HVTKPTX:VPQ:EPLT-AA¹⁷-LYY:DDSSNVI:EQLSN:VKS:SXGXH, YVPKPXX:VPQ:EPLT-AA¹⁷-LYY:DDSSNVI:EQLSN:VKS:SXGXH, TVPKPXX:VPQ:EPLT-AA¹⁷-LYY:DDSSNVI:EQLSN:VKS:AXGXH, AVPKAXX:VPQ:EPLT-AA¹⁷-LYY:DSSNNVI:EQLSN:VKS:AXGXH, KVGKAXX:VPQ:EPLT-AA¹⁷-LYY:DDMGVPT:EQLSN:VKS:XGXR, KASKAXX:VPQ:EPLT-AA¹⁷-LYY:DKGVVTY:EQLSN:VKS:EXGXR, GSAGPXX:VPQ:EPLT-AA¹⁷-LYY:NDKQQII:EQLSN:VKS:RXGXS, AAPASXX:VPQ:EPLT-AA¹⁷-LYY:DAANNVV:EQLSN:VKS:AXGXR, STPPTXX:VPQ:EPLT-AA¹⁷-LYY:DSANNVV:EQLSN:VKS:SXGXR, HVPKPXX:VPQ:EPLT-AA¹⁷-LYY:DDSSNVI:EQLSN:VKS:SXGXH, RVPSTXX:VPQ:EPLT-AA¹⁷-LYY:DNGRVLL:EQLSN:VKS:XGXL, ASAAPXX:VPQ:EPLT-AA¹⁷-LYY:VGRKPKV:EQLSN:VKS:XKXS, ASASPXX:VPQ:EPLT-AA¹⁷-LYY:IGKTPKI:EQLSN:VKS:XKXS, NDEGLEX:VPT:SNIT-AA¹⁷-QIM:RIKPHQGQH:IGEMS:QHN:QXEXR, KIPKAXX:VPT:SNIT-AA¹⁷-QIM:DENEKVV:IGEMS:VVE:GXGXR, GIPEPXX:VPE:SNIT-AA¹⁷-QIM:DENKNVV:IGEMS:TVE:SXAXR, SIPKAXX:VPT:SNIT-AA¹⁷-QIM:DEYDKVV:IGEMS:VVE:GXGXR, HVTKPTX:APT:SNIT-AA¹⁷-QIM:DDSSNVI:IGEMS:VVR:SXGXH, YVPKPXX:APT:SNIT-AA¹⁷-QIM:DDSSNVI:IGEMS:VVR:SXGXH, TVPKPXX:APT:SNIT-AA¹⁷-QIM:DDSSNVI:IGEMS:VVR:AXGXH, AVPKAXX:APT:SNIT-AA¹⁷-QIM:DSSNNVI:IGEMS:VVK:AXGXH, KVGKAXX:VPT:SNIT-AA¹⁷-QIM:DDMGVPT:IGEMS:VAE:XGXR, KASKAXX:VPT:SNIT-AA¹⁷-QIM:DKGVVTY:IGEMS:AVS:EXGXR, GSAGPXX:TPT:SNIT-AA¹⁷-QIM:NDKQQII:IGEMS:VVD:RXGXS, AAPASXX:VPA:SNIT-AA¹⁷-QIM:DAANNVV:IGEMS:VVE:AXGXR, STPPTXX:VPT:SNIT-AA¹⁷-QIM:DSANNVV:IGEMS:VVE:SXGXR, HVPKPXX:APT:SNIT-AA¹⁷-QIM:DDSSNVI:IGEMS:VVR:SXGXH, RVPSTXX:APV:SNIT-AA¹⁷-QIM:DNGRVLL:IGEMS:VEE:XGXL, ASAAPXX:VPQ:SNIT-AA¹⁷-QIM:VGRKPKV:IGEMS:VRS:XKXS, ASASPXX:VSQ:SNIT-AA¹⁷-QIM:IGKTPKI:IGEMS:VKS:XKXS, ASASPXX:VPQ:SNIT-AA¹⁷-QIM:VGRTPKV:IGEMS:VKS:XKXS, NDEGLEX:VPT:SNIT-AA¹⁷-QIM:RIKPHQGQH:IGEMS:EHS:QXEXR, SSVKXQP:SRV:SNIT-AA¹⁷-QIM:EYVRKKPKL:IGEMS:EEH:LEXAXA, RNVQXRP:TQV:SNIT-AA¹⁷-QIM:EIVRKKPIF:IGEMS:EDH:LAXKXE, NDEGLEX:VPT:SNIT-AA¹⁷-QIM:RIKPHQGQH:LGEMS:EHS:KXEXR, KIPKAXX:VPT:SNIT-AA¹⁷-QIM:DENEKVV:LGEMS:VVE:GXGXR, GIPEPXX:VPE:SNIT-AA¹⁷-QIM:DENKNVV:LGEMS:TVE:SXAXR, SIPKAXX:VPT:SNIT-AA¹⁷-QIM:DEYDKVV:LGEMS:VVE:GXGXR, HVTKPTX:APT:SNIT-AA¹⁷-QIM:DDSSNVI:LGEMS:VVR:SXGXH, YVPKPXX:APT:SNIT-AA¹⁷-QIM:DDSSNVI:LGEMS:VVR:SXGXH, TVPKPXX:APT:SNIT-AA¹⁷-QIM:DDSSNVI:LGEMS:VVR:AXGXH, AVPKAXX:APT:SNIT-AA¹⁷-QIM:DSSNNVI:LGEMS:VVK:AXGXH, KVGKAXX:VPT:SNIT-AA¹⁷-QIM:DDMGVPT:LGEMS:VAE:XGXR, KASKAXX:VPT:SNIT-AA¹⁷-QIM:DKGVVTY:LGEMS:AVS:EXGXR, GSAGPXX:TPT:SNIT-AA¹⁷-QIM:NDKQQII:LGEMS:VVD:RXGXS, AAPASXX:VPA:SNIT-AA¹⁷-QIM:DAANNVV:LGEMS:VVE:AXGXR, STPPTXX:VPT:SNIT-AA¹⁷-QIM:DSANNVV:LGEMS:VVE:SXGXR, HVPKPXX:APT:SNIT-AA¹⁷-QIM:DDSSNVI:LGEMS:VVR:SXGXH, RVPSTXX:APV:SNIT-AA¹⁷-QIM:DNGRVLL:LGEMS:VEE:XGXL, ASAAPXX:VPQ:SNIT-AA¹⁷-QIM:VGRKPKV:LGEMS:VRS:XKXS, ASASPXX:VSQ:SNIT-AA¹⁷-QIM:IGKTPKI:LGEMS:VKS:XKXS, ASASPXX:VPQ:SNIT-AA¹⁷-QIM:VGRTPKV:LGEMS:VKS:XKXS, NDEGLEX:VPT:SNIT-AA¹⁷-QIM:RIKPHQGQH:LGEMS:QHN:KXEXR, SSVKXQP:SRV:SNIT-AA¹⁷-QIM:EYVRKKPKL:LGEMS:EEH:LEXAXA, RNVQXRP:TQV:SNIT-AA¹⁷-QIM:EIVRKKPIF:LGEMS:EDH:LAXKXE, RNVQXRP:SRV:RSVK-AA¹⁷-AKV:EIVRKKPIF:KEVQV:EEH:LAXKXE, KIPKAXX:VPT:RSVK-AA¹⁷-AKV:DENEKVV:KEVQV:VVE:GXGXR, GIPEPXX:VPE:RSVK-AA¹⁷-AKV:DENKNVV:KEVQV:TVE:SXAXR, SIPKAXX:VPT:RSVK-AA¹⁷-AKV:DEYDKVV:KEVQV:VVE:GXGXR, HVTKPTX:APT:RSVK-AA¹⁷-AKV:DDSSNVI:KEVQV:VVR:SXGXH, YVPKPXX:APT:RSVK-AA¹⁷-AKV:DDSSNVI:KEVQV:VVR:SXGXH, TVPKPXX:APT:RSVK-AA¹⁷-AKV:DDSSNVI:KEVQV:VVR:AXGXH, AVPKAXX:APT:RSVK-AA¹⁷-AKV:DSSNNVI:KEVQV:VVK:AXGXH, KVGKAXX:VPT:RSVK-AA¹⁷-AKV:DDMGVPT:KEVQV:VAE:XGXR, KASKAXX:VPT:RSVK-AA¹⁷-AKV:DKGVVTY:KEVQV:AVS:EXGXR, GSAGPXX:TPT:RSVK-AA¹⁷-AKV:N DKQQI I:KEVQV:VVD:RXGXS, AAPASXX:VPA:RSVK-AA¹⁷-AKV:DAANNVV:KEVQV:VVE:AXGXR, STPPTXX:VPT:RSVK-AA¹⁷-AKV:DSANNVV:KEVQV:VVE:SXGXR, HVPKPXX:APT:RSVK-AA¹⁷-AKV:DDSSNVI:KEVQV:VVR:SXGXH, RVPSTXX:APV:RSVK-AA¹⁷-AKV:DNGRVLL:KEVQV:VEE:XGXL, ASAAPXX:VPQ:RSVK-AA¹⁷-AKV:VGRKPKV:KEVQV:VRS:XKXS, ASASPXX:VSQ:RSVK-AA¹⁷-AKV:IGKTPKI:KEVQV:VKS:XKXS, ASASPXX:VPQ:RSVK-AA¹⁷-AKV:VGRTPKV:KEVQV:VKS:XKXS, NDEGLEX:VPT:RSVK-AA¹⁷-AKV:RIKPHQGQH:KEVQV:QHN:KXEXR, NDEGLEX:VPT:RSVK-AA¹⁷-AKV:RIKPHQGQH:KEVQV:EHS:QXEXR, RNVQXRP:TQV:RSVK-AA¹⁷-AKV:EIVRKKPIF:KEVQV:EDH:LAXKXE, SSVKXQP:TQV:RPVQ-AA¹⁷-RKI:EYVRKKPKL:KKATV:EDH:LEXAXA, KIPKAXX:VPT:RPVQ-AA¹⁷-RKI:DENEKVV:KKATV:VVE:GXGXR, GIPEPXX:VPE:RPVQ-AA¹⁷-RKI:DENKNVV:KKATV:TVE:SXAXR, SIPKAXX:VPT:RPVQ-AA¹⁷-RKI:DEYDKVV:KKATV:VVE:GXGXR, HVTKPTX:APT:RPVQ-AA¹⁷-RKI:DDSSNVI:KKATV:VVR:SXGXH, YVPKPXX:APT:RPVQ-AA¹⁷-RKI:DDSSNVI:KKATV:VVR:SXGXH, TVPKPXX:APT:RPVQ-AA¹⁷-RKI:DDSSNVI:KKATV:VVR:AXGXH, AVPKAXX:APT:RPVQ-AA¹⁷-RKI:DSSNNVI:KKATV:VVK:AXGXH, KVGKAXX:VPT:RPVQ-AA¹⁷-RKI:DDMGVPT:KKATV:VAE:XGXR, KASKAXX:VPT:RPVQ-AA¹⁷-RKI:DKGVVTY:KKATV:AVS:EXGXR, GSAGPXX:TPT:RPVQ-AA¹⁷-RKI:NDKQQII:KKATV:VVD:RXGXS, AAPASXX:VPA:RPVQ-AA¹⁷-RKI:DAANNVV:KKATV:VVE:AXGXR, STPPTXX:VPT:RPVQ-AA¹⁷-RKI:DSANNVV:KKATV:VVE:SXGXR, HVPKPXX:APT:RPVQ-AA¹⁷-RKI:DDSSNVI:KKATV:VVR:SXGXH, RVPSTXX:APV:RPVQ-AA¹⁷-RKI:DNGRVLL:KKATV:VEE:XGXL, ASAAPXX:VPQ:RPVQ-AA¹⁷-RKI:VGRKPKV:KKATV:VRS:XKXS, ASASPXX:VSQ:RPVQ-AA¹⁷-RKI:IGKTPKI:KKATV:VKS:XKXS, ASASPXX:VPQ:RPVQ-AA¹⁷-RKI:VGRTPKV:KKATV:VKS:XKXS, NDEGLEX:VPT:RPVQ-AA¹⁷-RKI:RIKPHQGQH:KKATV:QHN:KXEXR, NDEGLEX:VPT:RPVQ-AA¹⁷-RKI:RIKPHQGQH:KKATV:EHS:QXEXR and SSVKXQP:SRV:RPVQ-AA¹⁷-RKI:EYVRKKPKL:KKATV:EEH:LEXAXA; and wherein AA¹⁷ is selected from the group consisting of G, A, V, L, I, P, F, M, W, T and S (in particular is selected from the group consisting of M, I, L, V and T).

[0401] In particular, in certain embodiments, the heptuplet PEP7:PEP5:PEP1:LINKER:PEP2:PEP6:PEP8 is selected from the group consisting of GIPEPXX:VPTKM:SAIS:DENKNVV:LKNYQ:NMVVE:SXAXR, SIPKAXX:VPTEL:SAIS:DEYDKVV:LKNYQ:EMVVE:GXGXR, HVTKPTX:VPTKL:SAIS:DDSSNVI:LKNYQ:NMVVE:SXGXH, YVPKPXX:VPTKL:SAIS:DDSSNVI:LKNYQ:NMVVE:SXGXH, TVPKPXX:VPTQL:SAIS:DDSSNVI:LKNYQ:NMVVE:AXGXH, AVPKAXX:VPTKL:SAIS:DSSNNVI:LKNYQ:NMVVE:AXGXH, KVGKAXX:VPTKL:SAIS:DDMGVPT:LKNYQ:EGMSVVE:XGXR, KASKAXX:VPTKL:SAIS:DKGVVTY:LKNYQ:GMVVE:EXGXR, GSAGPXX:VPTKM:SAIS:NDKQQII:LKNYQ:GMVVE:RXGXS, AAPASXX:VPTRL:SAIS:DAANNVV:LKNYQ:DMVVE:AXGXR, STPPTXX:VPTRL:SAIS:DSANNVV:LKNYQ:DMVVE:SXGXR, HVPKPXX:VPTKL:SAIS:DDSSNVI:LKNYQ:NMVVE:SXGXH, RVPSTXX:VPTKT:SAIS:DNGRVLL:LKNYQ:MIVVE:XGXL, ASAAPXX:VPTAL:SAIS:VGRKPKV:LKNYQ:MIVVE:XKXS, ASASPXX:VPTDL:SAIS:IGKTPKI:LKNYQ:MIVVE:XKXS, ASASPXX:VPTDL:SAIS:VGRTPKV:LKNYQ:MVVVE:XKXS, NDEGLXS:VPTEE:SAIS:RIKPHQGQH:LKNYQ:FLVVE:KXEXR, NDEGLXS:VPTGQ:SAIS:RIKPHQGQH:LKNYQ:LEVVE:QXEXR, SSVKXQP:VPTHH:SAIS:EYVRKKPKL:LKNYQ:RLVVE:LEXAXA, RNVQXRP:VPTQL:SAIS:EIVRKKPIF:LKNYQ:TLVVE:LAXKXE, GIPEPXX:VPEKM:SAIS:DENKNVV:LKNYQ:NMTVE:SXAXR, HVTKPTX:APTKL:SAIS:DDSSNVI:LKNYQ:NMVVR:SXGXH, YVPKPXX:APTKL:SAIS:DDSSNVI:LKNYQ:NMVVR:SXGXH, TVPKPXX:APTQL:SAIS:DDSSNVI:LKNYQ:NMVVR:AXGXH, AVPKAXX:APTKL:SAIS:DSSNNVI:LKNYQ:NMVVK:AXGXH, KVGKAXX:VPTKL:SAIS:DDMGVPT:LKNYQ:EGMSVAE:XGXR, KASKAXX:VPTKL:SAIS:DKGVVTY:LKNYQ:GMAVS:EXGXR, GSAGPXX:TPTKM:SAIS:NDKQQII:LKNYQ:GMVVD:RXGXS, AAPASXX:VPARL:SAIS:DAANNVV:LKNYQ:DMVVE:AXGXR, HVPKPXX:APTKL:SAIS:DDSSNVI:LKNYQ:NMVVR:SXGXH, RVPSTXX:APVKT:SAIS:DNGRVLL:LKNYQ:MIVEE:XGXL, ASAAPXX:VPQAL:SAIS:VGRKPKV:LKNYQ:MIVRS:XKXS, ASASPXX:VSQDL:SAIS:IGKTPKI:LKNYQ:MIVKS:XKXS, ASASPXX:VPQDL:SAIS:VGRTPKV:LKNYQ:MVVKS:XKXS, NDEGLXS:VPTEE:SAIS:RIKPHQGQH:LKNYQ:FLQHN:KXEXR, NDEGLXS:VPTGQ:SAIS:RIKPHQGQH:LKNYQ:LEEHS:QXEXR, SSVKXQP:SRVHH:SAIS:EYVRKKPKL:LKNYQ:RLEEH:LEXAXA, RNVQXRP:TQVQL:SAIS:EIVRKKPIF:LKNYQ:TLEDH:LAXKXE, KIPKAXX:VPEEL:SSLS:DENEKVV:LKVYP:DMTVE:GXGXR, SIPKAXX:VPEEL:SSLS:DEYDKVV:LKVYP:EMTVE:GXGXR, HVTKPTX:VPEKL:SSLS:DDSSNVI:LKVYP:NMTVE:SXGXH, YVPKPXX:VPEKL:SSLS:DDSSNVI:LKVYP:NMTVE:SXGXH, TVPKPXX:VPEQL:SSLS:DDSSNVI:LKVYP:NMTVE:AXGXH, AVPKAXX:VPEKL:SSLS:DSSNNVI:LKVYP:NMTVE:AXGXH, KVGKAXX:VPEKL:SSLS:DDMGVPT:LKVYP:EGMSTVE:XGXR, KASKAXX:VPEKL:SSLS:DKGVVTY:LKVYP:GMTVE:EXGXR, GSAGPXX:VPEKM:SSLS:NDKQQII:LKVYP:GMTVE:RXGXS, AAPASXX:VPERL:SSLS:DAANNVV:LKVYP:DMTVE:AXGXR, STPPTXX:VPERL:SSLS:DSANNVV:LKVYP:DMTVE:SXGXR, HVPKPXX:VPEKL:SSLS:DDSSNVI:LKVYP:NMTVE:SXGXH, RVPSTXX:VPEKT:SSLS:DNGRVLL:LKVYP:MITVE:XGXL, ASAAPXX:VPEAL:SSLS:VGRKPKV:LKVYP:MITVE:XKXS, ASASPXX:VPEDL:SSLS:IGKTPKI:LKVYP:MITVE:XKXS, ASASPXX:VPEDL:SSLS:VGRTPKV:LKVYP:MVTVE:XKXS, NDEGLXS:VPEEE:SSLS:RIKPHQGQH:LKVYP:FLTVE:KXEXR, NDEGLXS:VPEGQ:SSLS:RIKPHQGQH:LKVYP:LETVE:QXEXR, SSVKXQP:VPEHH:SSLS:EYVRKKPKL:LKVYP:RLTVE:LEXAXA, RNVQXRP:VPEQL:SSLS:EIVRKKPIF:LKVYP:TLTVE:LAXKXE, KIPKAXX:VPTEL:SSLS:DENEKVV:LKVYP:DMVVE:GXGXR, SIPKAXX:VPTEL:SSLS:DEYDKVV:LKVYP:EMVVE:GXGXR, HVTKPTX:APTKL:SSLS:DDSSNVI:LKVYP:NMVVR:SXGXH, YVPKPXX:APTKL:SSLS:DDSSNVI:LKVYP:NMVVR:SXGXH, TVPKPXX:APTQL:SSLS:DDSSNVI:LKVYP:NMVVR:AXGXH, AVPKAXX:APTKL:SSLS:DSSNNVI:LKVYP:NMVVK:AXGXH, KVGKAXX:VPTKL:SSLS:DDMGVPT:LKVYP:EGMSVAE:XGXR, KASKAXX:VPTKL:SSLS:DKGVVTY:LKVYP:GMAVS:EXGXR, GSAGPXX:TPTKM:SSLS:NDKQQII:LKVYP:GMVVD:RXGXS, AAPASXX:VPARL:SSLS:DAANNVV:LKVYP:DMVVE:AXGXR, STPPTXX:VPTRL:SSLS:DSANNVV:LKVYP:DMVVE:SXGXR, HVPKPXX:APTKL:SSLS:DDSSNVI:LKVYP:NMVVR:SXGXH, RVPSTXX:APVKT:SSLS:DNGRVLL:LKVYP:MIVEE:XGXL, ASAAPXX:VPQAL:SSLS:VGRKPKV:LKVYP:MIVRS:XKXS, ASASPXX:VSQDL:SSLS:IGKTPKI:LKVYP:MIVKS:XKXS, ASASPXX:VPQDL:SSLS:VGRTPKV:LKVYP:MVVKS:XKXS, NDEGLXS:VPTEE:SSLS:RIKPHQGQH:LKVYP:FLQHN:KXEXR, NDEGLXS:VPTGQ:SSLS:RIKPHQGQH:LKVYP:LEEHS:QXEXR, SSVKXQP:SRVHH:SSLS:EYVRKKPKL:LKVYP:RLEEH:LEXAXA, RNVQXRP:TQVQL:SSLS:EIVRKKPIF:LKVYP:TLEDH:LAXKXE, KIPKAXX:VPTEL:SAIS:DENEKVV:LKNYQ:DMVVE:GXGXR, KIPKAXX:APTEL:NAIS:DENEKVV:LKKYR:DMVVR:GXGXR, GIPEPXX:APTKM:NAIS:DENKNVV:LKKYR:NMVVR:SXAXR, SIPKAXX:APTEL:NAIS:DEYDKVV:LKKYR:EMVVR:GXGXR, YVPKPXX:APTKL:NAIS:DDSSNVI:LKKYR:NMVVR:SXGXH, TVPKPXX:APTQL:NAIS:DDSSNVI:LKKYR:NMVVR:AXGXH, AVPKAXX:APTKL:NAIS:DSSNNVI:LKKYR:NMVVR:AXGXH, KVGKAXX:APTKL:NAIS:DDMGVPT:LKKYR:EGMSVVR:XGXR, KASKAXX:APTKL:NAIS:DKGVVTY:LKKYR:GMVVR:EXGXR, GSAGPXX:APTKM:NAIS:NDKQQII:LKKYR:GMVVR:RXGXS, AAPASXX:APTRL:NAIS:DAANNVV:LKKYR:DMVVR:AXGXR, STPPTXX:APTRL:NAIS:DSANNVV:LKKYR:DMVVR:SXGXR, HVPKPXX:APTKL:NAIS:DDSSNVI:LKKYR:NMVVR:SXGXH, RVPSTXX:APTKT:NAIS:DNGRVLL:LKKYR:MIVVR:XGXL, ASAAPXX:APTAL:NAIS:VGRKPKV:LKKYR:MIVVR:XKXS, ASASPXX:APTDL:NAIS:IGKTPKI:LKKYR:MIVVR:XKXS, ASASPXX:APTDL:NAIS:VGRTPKV:LKKYR:MVVVR:XKXS, NDEGLXS:APTEE:NAIS:RIKPHQGQH:LKKYR:FLVVR:KXEXR, NDEGLXS:APTGQ:NAIS:RIKPHQGQH:LKKYR:LEVVR:QXEXR, SSVKXQP:APTHH:NAIS:EYVRKKPKL:LKKYR:RLVVR:LEXAXA, RNVQXRP:APTQL:NAIS:EIVRKKPIF:LKKYR:TLVVR:LAXKXE, KIPKAXX:VPTEL:NAIS:DENEKVV:LKKYR:DMVVE:GXGXR, GIPEPXX:VPEKM:NAIS:DENKNVV:LKKYR:NMTVE:SXAXR, SIPKAXX:VPTEL:NAIS:DEYDKVV:LKKYR:EMVVE:GXGXR, AVPKAXX:APTKL:NAIS:DSSNNVI:LKKYR:NMVVK:AXGXH, KVGKAXX:VPTKL:NAIS:DDMGVPT:LKKYR:EGMSVAE:XGXR, KASKAXX:VPTKL:NAIS:DKGVVTY:LKKYR:GMAVS:EXGXR, GSAGPXX:TPTKM:NAIS:NDKQQII:LKKYR:GMVVD:RXGXS, AAPASXX:VPARL:NAIS:DAANNVV:LKKYR:DMVVE:AXGXR, STPPTXX:VPTRL:NAIS:DSANNVV:LKKYR:DMVVE:SXGXR, RVPSTXX:APVKT:NAIS:DNGRVLL:LKKYR:MIVEE:XGXL, ASAAPXX:VPQAL:NAIS:VGRKPKV:LKKYR:MIVRS:XKXS, ASASPXX:VSQDL:NAIS:IGKTPKI:LKKYR:MIVKS:XKXS, ASASPXX:VPQDL:NAIS:VGRTPKV:LKKYR:MVVKS:XKXS, NDEGLXS:VPTEE:NAIS:RIKPHQGQH:LKKYR:FLQHN:KXEXR, NDEGLXS:VPTGQ:NAIS:RIKPHQGQH:LKKYR:LEEHS:QXEXR, SSVKXQP:SRVHH:NAIS:EYVRKKPKL:LKKYR:RLEEH:LEXAXA, RNVQXRP:TQVQL:NAIS:EIVRKKPIF:LKKYR:TLEDH:LAXKXE, HVTKPTX:APTKL:NAIS:DDSSNVI:LKKYR:NMVVR:SXGXH, KIPKAXX:APTEL:SATS:DENEKVV:LRKHR:DMVVK:GXGXR, GIPEPXX:APTKM:SATS:DENKNVV:LRKHR:NMVVK:SXAXR, SIPKAXX:APTEL:SATS:DEYDKVV:LRKHR:EMVVK:GXGXR, HVTKPTX:APTKL:SATS:DDSSNVI:LRKHR:NMVVK:SXGXH, YVPKPXX:APTKL:SATS:DDSSNVI:LRKHR:NMVVK:SXGXH, TVPKPXX:APTQL:SATS:DDSSNVI:LRKHR:NMVVK:AXGXH, KVGKAXX:APTKL:SATS:DDMGVPT:LRKHR:EGMSVVK:XGXR, KASKAXX:APTKL:SATS:DKGVVTY:LRKHR:GMVVK:EXGXR, GSAGPXX:APTKM:SATS:NDKQQII:LRKHR:GMVVK:RXGXS, AAPASXX:APTRL:SATS:DAANNVV:LRKHR:DMVVK:AXGXR, STPPTXX:APTRL:SATS:DSANNVV:LRKHR:DMVVK:SXGXR, HVPKPXX:APTKL:SATS:DDSSNVI:LRKHR:NMVVK:SXGXH, RVPSTXX:APTKT:SATS:DNGRVLL:LRKHR:MIVVK:XGXL, ASAAPXX:APTAL:SATS:VGRKPKV:LRKHR:MIVVK:XKXS, ASASPXX:APTDL:SATS:IGKTPKI:LRKHR:MIVVK:XKXS, ASASPXX:APTDL:SATS:VGRTPKV:LRKHR:MVVVK:XKXS, NDEGLXS:APTEE:SATS:RIKPHQGQH:LRKHR:FLVVK:KXEXR, NDEGLXS:APTGQ:SATS:RIKPHQGQH:LRKHR:LEVVK:QXEXR, SSVKXQP:APTHH:SATS:EYVRKKPKL:LRKHR: RLVVK:LEXAXA, RNVQXRP:APTQL:SATS:EIVRKKPIF:LRKHR:TLVVK:LAXKXE, KIPKAXX:VPTEL:SATS:DENEKVV:LRKHR:DMVVE:GXGXR, GIPEPXX:VPEKM:SATS:DENKNVV:LRKHR:NMTVE:SXAXR, SIPKAXX:VPTEL:SATS:DEYDKVV:LRKHR:EMVVE:GXGXR, HVTKPTX:APTKL:SATS:DDSSNVI:LRKHR:NMVVR:SXGXH, YVPKPXX:APTKL:SATS:DDSSNVI:LRKHR:NMVVR:SXGXH, TVPKPXX:APTQL:SATS:DDSSNVI:LRKHR:NMVVR:AXGXH, KVGKAXX:VPTKL:SATS:DDMGVPT:LRKHR:EGMSVAE:XGXR, KASKAXX:VPTKL:SATS:DKGVVTY:LRKHR:GMAVS:EXGXR, GSAGPXX:TPTKM:SATS:NDKQQII:LRKHR:GMVVD:RXGXS, AAPASXX:VPARL:SATS:DAANNVV:LRKHR:DMVVE:AXGXR, STPPTXX:VPTRL:SATS:DSANNVV:LRKHR:DMVVE:SXGXR, HVPKPXX:APTKL:SATS:DDSSNVI:LRKHR:NMVVR:SXGXH, RVPSTXX:APVKT:SATS:DNGRVLL:LRKHR:MIVEE:XGXL, ASAAPXX:VPQAL:SATS:VGRKPKV:LRKHR:MIVRS:XKXS, ASASPXX:VSQDL:SATS:IGKTPKI:LRKHR:MIVKS:XKXS, ASASPXX:VPQDL:SATS:VGRTPKV:LRKHR:MVVKS:XKXS, NDEGLXS:VPTEE:SATS:RIKPHQGQH:LRKHR:FLQHN:KXEXR, NDEGLXS:VPTGQ:SATS:RIKPHQGQH:LRKHR:LEEHS:QXEXR, SSVKXQP:SRVHH:SATS:EYVRKKPKL:LRKHR:RLEEH:LEXAXA, RNVQXRP:TQVQL:SATS:EIVRKKPIF:LRKHR:TLEDH:LAXKXE, KIPKAXX:VPTEL:SPIS:DENEKVV:LKYHY:DMVAE:GXGXR, GIPEPXX:VPTKM:SPIS:DENKNVV:LKYHY:NMVAE:SXAXR, SIPKAXX:VPTEL:SPIS:DEYDKVV:LKYHY: EMVAE:GXGXR, HVTKPTX:VPTKL:SPIS:DDSSNVI:LKYHY:NMVAE:SXGXH, YVPKPXX:VPTKL:SPIS:DDSSNVI:LKYHY:NMVAE:SXGXH, TVPKPXX:VPTQL:SPIS:DDSSNVI:LKYHY:NMVAE:AXGXH, AVPKAXX:VPTKL:SPIS:DSSNNVI:LKYHY:NMVAE:AXGXH, KASKAXX:VPTKL:SPIS:DKGVVTY:LKYHY:GMVAE:EXGXR, GSAGPXX:VPTKM:SPIS:NDKQQII:LKYHY:GMVAE:RXGXS, AAPASXX:VPTRL:SPIS:DAANNVV:LKYHY:DMVAE:AXGXR, STPPTXX:VPTRL:SPIS:DSANNVV:LKYHY:DMVAE:SXGXR, HVPKPXX:VPTKL:SPIS:DDSSNVI:LKYHY:NMVAE:SXGXH, RVPSTXX:VPTKT:SPIS:DNGRVLL:LKYHY:MIVAE:XGXL, ASAAPXX:VPTAL:SPIS:VGRKPKV:LKYHY:MIVAE:XKXS, ASASPXX:VPTDL:SPIS:IGKTPKI:LKYHY:MIVAE:XKXS, ASASPXX:VPTDL:SPIS:VGRTPKV:LKYHY:MVVAE:XKXS, NDEGLXS:VPTEE:SPIS:RIKPHQGQH:LKYHY:FLVAE:KXEXR, NDEGLXS:VPTGQ:SPIS:RIKPHQGQH:LKYHY:LEVAE:QXEXR, SSVKXQP:VPTHH:SPIS:EYVRKKPKL:LKYHY:RLVAE:LEXAXA, RNVQXRP:VPTQL:SPIS:EIVRKKPIF:LKYHY:TLVAE:LAXKXE, KIPKAXX:VPTEL:SPIS:DENEKVV:LKYHY:DMVVE:GXGXR, GIPEPXX:VPEKM:SPIS:DENKNVV:LKYHY:NMTVE:SXAXR, SIPKAXX:VPTEL:SPIS:DEYDKVV:LKYHY:EMVVE:GXGXR, HVTKPTX:APTKL:SPIS:DDSSNVI:LKYHY:NMVVR:SXGXH, YVPKPXX:APTKL:SPIS:DDSSNVI:LKYHY:NMVVR:SXGXH, TVPKPXX:APTQL:SPIS:DDSSNVI:LKYHY:NMVVR:AXGXH, AVPKAXX:APTKL:SPIS:DSSNNVI:LKYHY:NMVVK:AXGXH, KASKAXX:VPTKL:SPIS:DKGVVTY:LKYHY:GMAVS:EXGXR, GSAGPXX:TPTKM:SPIS:NDKQQII:LKYHY:GMVVD:RXGXS, AAPASXX:VPARL:SPIS:DAANNVV:LKYHY:DMVVE:AXGXR, STPPTXX:VPTRL:SPIS:DSANNVV:LKYHY:DMVVE:SXGXR, HVPKPXX:APTKL:SPIS:DDSSNVI:LKYHY:NMVVR:SXGXH, RVPSTXX:APVKT:SPIS:DNGRVLL:LKYHY:MIVEE:XGXL, ASAAPXX:VPQAL:SPIS:VGRKPKV:LKYHY:MIVRS:XKXS, ASASPXX:VSQDL:SPIS:IGKTPKI:LKYHY:MIVKS:XKXS, ASASPXX:VPQDL:SPIS:VGRTPKV:LKYHY:MVVKS:XKXS, NDEGLXS:VPTEE:SPIS:RIKPHQGQH:LKYHY:FLQHN:KXEXR, NDEGLXS:VPTGQ:SPIS:RIKPHQGQH:LKYHY:LEEHS:QXEXR, SSVKXQP:SRVHH:SPIS:EYVRKKPKL:LKYHY:RLEEH:LEXAXA, RNVQXRP:TQVQL:SPIS:EIVRKKPIF:LKYHY:TLEDH:LAXKXE, KIPKAXX:VPTEL:EPIS:DENEKVV:KFKYE:DMAVS:GXGXR, GIPEPXX:VPTKM:EPIS:DENKNVV:KFKYE:NMAVS:SXAXR, SIPKAXX:VPTEL:EPIS:DEYDKVV:KFKYE:EMAVS:GXGXR, HVTKPTX:VPTKL:EPIS:DDSSNVI:KFKYE:NMAVS:SXGXH, YVPKPXX:VPTKL:EPIS:DDSSNVI:KFKYE:NMAVS:SXGXH, TVPKPXX:VPTQL:EPIS:DDSSNVI:KFKYE:NMAVS:AXGXH, AVPKAXX:VPTKL:EPIS:DSSNNVI:KFKYE:NMAVS:AXGXH, KVGKAXX:VPTKL:EPIS:DDMGVPT:KFKYE:EGMSAVS:XGXR, GSAGPXX:VPTKM:EPIS:NDKQQII:KFKYE:GMAVS:RXGXS, AAPASXX:VPTRL:EPIS:DAANNVV:KFKYE:DMAVS:AXGXR, STPPTXX:VPTRL:EPIS:DSANNVV:KFKYE:DMAVS:SXGXR, HVPKPXX:VPTKL:EPIS:DDSSNVI:KFKYE:NMAVS:SXGXH, RVPSTXX:VPTKT:EPIS:DNGRVLL:KFKYE:MIAVS:XGXL, ASAAPXX:VPTAL:EPIS:VGRKPKV:KFKYE:MIAVS:XKXS, ASASPXX:VPTDL:EPIS:IGKTPKI:KFKYE:MIAVS:XKXS, ASASPXX:VPTDL:EPIS:VGRTPKV:KFKYE:MVAVS:XKXS, NDEGLXS:VPTEE:EPIS:RIKPHQGQH:KFKYE:FLAVS:KXEXR, NDEGLXS:VPTGQ:EPIS:RIKPHQGQH:KFKYE:LEAVS:QXEXR, SSVKXQP:VPTHH:EPIS:EYVRKKPKL:KFKYE:RLAVS:LEXAXA, RNVQXRP:VPTQL:EPIS:EIVRKKPIF:KFKYE:TLAVS:LAXKXE, KIPKAXX:VPTEL:EPIS:DENEKVV:KFKYE:DMVVE:GXGXR, GIPEPXX:VPEKM:EPIS:DENKNVV:KFKYE:NMTVE:SXAXR, SIPKAXX:VPTEL:EPIS:DEYDKVV:KFKYE:EMVVE:GXGXR, HVTKPTX:APTKL:EPIS:DDSSNVI:KFKYE:NMVVR:SXGXH, YVPKPXX:APTKL:EPIS:DDSSNVI:KFKYE:NMVVR:SXGXH, TVPKPXX:APTQL:EPIS:DDSSNVI:KFKYE:NMVVR:AXGXH, AVPKAXX:APTKL:EPIS:DSSNNVI:KFKYE:NMVVK:AXGXH, KVGKAXX:VPTKL:EPIS:DDMGVPT:KFKYE:EGMSVAE:XGXR, GSAGPXX:TPTKM:EPIS:NDKQQII:KFKYE:GMVVD:RXGXS, AAPASXX:VPARL:EPIS:DAANNVV:KFKYE:DMVVE:AXGXR, STPPTXX:VPTRL:EPIS:DSANNVV:KFKYE:DMVVE:SXGXR, HVPKPXX:APTKL:EPIS:DDSSNVI:KFKYE:NMVVR:SXGXH, RVPSTXX:APVKT:EPIS:DNGRVLL:KFKYE:MIVEE:XGXL, ASAAPXX:VPQAL:EPIS:VGRKPKV:KFKYE:MIVRS:XKXS, ASASPXX:VSQDL:EPIS:IGKTPKI:KFKYE:MIVKS:XKXS, ASASPXX:VPQDL:EPIS:VGRTPKV:KFKYE:MVVKS:XKXS, NDEGLXS:VPTEE:EPIS:RIKPHQGQH:KFKYE:FLQHN:KXEXR, NDEGLXS:VPTGQ:EPIS:RIKPHQGQH:KFKYE:LEEHS:QXEXR, SSVKXQP:SRVHH:EPIS:EYVRKKPKL:KFKYE:RLEEH:LEXAXA, RNVQXRP:TQVQL:EPIS:EIVRKKPIF:KFKYE:TLEDH:LAXKXE, KIPKAXX:TPTEL:SPIN:DENEKVV:YGKIP:DMVVD:GXGXR, GIPEPXX:TPTKM:SPIN:DENKNVV:YGKIP:NMVVD:SXAXR, SIPKAXX:TPTEL:SPIN:DEYDKVV:YGKIP:EMVVD:GXGXR, HVTKPTX:TPTKL:SPIN:DDSSNVI:YGKIP:NMVVD:SXGXH, YVPKPXX:TPTKL:SPIN:DDSSNVI:YGKIP:NMVVD:SXGXH, TVPKPXX:TPTQL:SPIN:DDSSNVI:YGKIP:NMVVD:AXGXH, AVPKAXX:TPTKL:SPIN:DSSNNVI:YGKIP:NMVVD:AXGXH, KVGKAXX:TPTKL:SPIN:DDMGVPT:YGKIP:EGMSVVD:XGXR, KASKAXX:TPTKL:SPIN:DKGVVTY:YGKIP:GMVVD:EXGXR, AAPASXX:TPTRL:SPIN:DAANNVV:YGKIP:DMVVD:AXGXR, STPPTXX:TPTRL:SPIN:DSANNVV:YGKIP:DMVVD:SXGXR, HVPKPXX:TPTKL:SPIN:DDSSNVI:YGKIP:NMVVD:SXGXH, RVPSTXX:TPTKT:SPIN:DNGRVLL:YGKIP:MIVVD:XGXL, ASAAPXX:TPTAL:SPIN:VGRKPKV:YGKIP:MIVVD:XKXS, ASASPXX:TPTDL:SPIN:IGKTPKI:YGKIP:MIVVD:XKXS, ASASPXX:TPTDL:SPIN:VGRTPKV:YGKIP:MVVVD:XKXS, NDEGLXS:TPTEE:SPIN:RIKPHQGQH:YGKIP:FLVVD:KXEXR, NDEGLXS:TPTGQ:SPIN:RIKPHQGQH:YGKIP:LEVVD:QXEXR, SSVKXQP:TPTHH:SPIN:EYVRKKPKL:YGKIP:RLVVD:LEXAXA, RNVQXRP:TPTQL:SPIN:EIVRKKPIF:YGKIP:TLVVD:LAXKXE, KIPKAXX:VPTEL:SPIN:DENEKVV:YGKIP:DMVVE:GXGXR, GIPEPXX:VPEKM:SPIN:DENKNVV:YGKIP:NMTVE:SXAXR, SIPKAXX:VPTEL:SPIN:DEYDKVV:YGKIP:EMVVE:GXGXR, HVTKPTX:APTKL:SPIN:DDSSNVI:YGKIP:NMVVR:SXGXH, YVPKPXX:APTKL:SPIN:DDSSNVI:YGKIP:NMVVR:SXGXH, TVPKPXX:APTQL:SPIN:DDSSNVI:YGKIP:NMVVR:AXGXH, AVPKAXX:APTKL:SPIN:DSSNNVI:YGKIP:NMVVK:AXGXH, KVGKAXX:VPTKL:SPIN:DDMGVPT:YGKIP:EGMSVAE:XGXR, KASKAXX:VPTKL:SPIN:DKGVVTY:YGKIP:GMAVS:EXGXR, AAPASXX:VPARL:SPIN:DAANNVV:YGKIP:DMVVE:AXGXR, STPPTXX:VPTRL:SPIN:DSANNVV:YGKIP:DMVVE:SXGXR, HVPKPXX:APTKL:SPIN:DDSSNVI:YGKIP:NMVVR:SXGXH, RVPSTXX:APVKT:SPIN:DNGRVLL:YGKIP:MIVEE:XGXL, ASAAPXX:VPQAL:SPIN:VGRKPKV:YGKIP:MIVRS:XKXS, ASASPXX:VSQDL:SPIN:IGKTPKI:YGKIP:MIVKS:XKXS, ASASPXX:VPQDL:SPIN:VGRTPKV:YGKIP:MVVKS:XKXS, NDEGLXS:VPTEE:SPIN:RIKPHQGQH:YGKIP:FLQHN:KXEXR, NDEGLXS:VPTGQ:SPIN:RIKPHQGQH:YGKIP:LEEHS:QXEXR, SSVKXQP:SRVHH:SPIN:EYVRKKPKL:YGKIP:RLEEH:LEXAXA, RNVQXRP:TQVQL:SPIN:EIVRKKPIF:YGKIP:TLEDH:LAXKXE, KIPKAXX:VPAEL:SPIS:DENEKVV:YKQYE:DMVVE:GXGXR, GIPEPXX:VPAKM:SPIS:DENKNVV:YKQYE:NMVVE:SXAXR, SIPKAXX:VPAEL:SPIS:DEYDKVV:YKQYE:EMVVE:GXGXR, HVTKPTX:VPAKL:SPIS:DDSSNVI:YKQYE:NMVVE:SXGXH, YVPKPXX:VPAKL:SPIS:DDSSNVI:YKQYE:NMVVE:SXGXH, TVPKPXX:VPAQL:SPIS:DDSSNVI:YKQYE:NMVVE:AXGXH, AVPKAXX:VPAKL:SPIS:DSSNNVI:YKQYE:NMVVE:AXGXH, KVGKAXX:VPAKL:SPIS:DDMGVPT:YKQYE:EGMSVVE:XGXR, KASKAXX:VPAKL:SPIS:DKGVVTY:YKQYE:GMVVE:EXGXR, GSAGPXX:VPAKM:SPIS:NDKQQII:YKQYE:GMVVE:RXGXS, STPPTXX:VPARL:SPIS:DSANNVV:YKQYE:DMVVE:SXGXR, HVPKPXX:VPAKL:SPIS:DDSSNVI:YKQYE:NMVVE:SXGXH, RVPSTXX:VPAKT:SPIS:DNGRVLL:YKQYE:MIVVE:XGXL, ASAAPXX:VPAAL:SPIS:VGRKPKV:YKQYE:MIVVE:XKXS, ASASPXX:VPADL:SPIS:IGKTPKI:YKQYE:MIVVE:XKXS, ASASPXX:VPADL:SPIS:VGRTPKV:YKQYE:MVVVE:XKXS, NDEGLXS:VPAEE:SPIS:RIKPHQGQH:YKQYE:FLVVE:KXEXR, NDEGLXS:VPAGQ:SPIS:RIKPHQGQH:YKQYE:LEVVE:QXEXR, SSVKXQP:VPAHH:SPIS:EYVRKKPKL:YKQYE:RLVVE:LEXAXA, RNVQXRP:VPAQL:SPIS:EIVRKKPIF:YKQYE:TLVVE:LAXKXE, KIPKAXX:VPTEL:SPIS:DENEKVV:YKQYE:DMVVE:GXGXR, GIPEPXX:VPEKM:SPIS:DENKNVV:YKQYE:NMTVE:SXAXR, SIPKAXX:VPTEL:SPIS:DEYDKVV:YKQYE:EMVVE:GXGXR, HVTKPTX:APTKL:SPIS:DDSSNVI:YKQYE:NMVVR:SXGXH, YVPKPXX:APTKL:SPIS:DDSSNVI:YKQYE:NMVVR:SXGXH, TVPKPXX:APTQL:SPIS:DDSSNVI:YKQYE:NMVVR:AXGXH, AVPKAXX:APTKL:SPIS:DSSNNVI:YKQYE:NMVVK:AXGXH, KVGKAXX:VPTKL:SPIS:DDMGVPT:YKQYE:EGMSVAE:XGXR, KASKAXX:VPTKL:SPIS:DKGVVTY:YKQYE:GMAVS:EXGXR, GSAGPXX:TPTKM:SPIS:NDKQQII:YKQYE:GMVVD:RXGXS, STPPTXX:VPTRL:SPIS:DSANNVV:YKQYE:DMVVE:SXGXR, HVPKPXX:APTKL:SPIS:DDSSNVI:YKQYE:NMVVR:SXGXH, RVPSTXX:APVKT:SPIS:DNGRVLL:YKQYE:MIVEE:XGXL, ASAAPXX:VPQAL:SPIS:VGRKPKV:YKQYE:MIVRS:XKXS, ASASPXX:VSQDL:SPIS:IGKTPKI:YKQYE:MIVKS:XKXS, ASASPXX:VPQDL:SPIS:VGRTPKV:YKQYE:MVVKS:XKXS, NDEGLXS:VPTEE:SPIS:RIKPHQGQH:YKQYE:FLQHN:KXEXR, NDEGLXS:VPTGQ:SPIS:RIKPHQGQH:YKQYE:LEEHS:QXEXR, SSVKXQP:SRVHH:SPIS:EYVRKKPKL:YKQYE:RLEEH:LEXAXA, RNVQXRP:TQVQL:SPIS:EIVRKKPIF:YKQYE:TLEDH:LAXKXE, GIPEPXX:VPTKM:SPIS:DENKNVV:YKQYE:NMVVE:SXAXR, HVTKPTX:VPTKL:SPIS:DDSSNVI:YKQYE:NMVVE:SXGXH, YVPKPXX:VPTKL:SPIS:DDSSNVI:YKQYE:NMVVE:SXGXH, TVPKPXX:VPTQL:SPIS:DDSSNVI:YKQYE:NMVVE:AXGXH, AVPKAXX:VPTKL:SPIS:DSSNNVI:YKQYE:NMVVE:AXGXH, KVGKAXX:VPTKL:SPIS:DDMGVPT:YKQYE:EGMSVVE:XGXR, KASKAXX:VPTKL:SPIS:DKGVVTY:YKQYE:GMVVE:EXGXR, GSAGPXX:VPTKM:SPIS:NDKQQII:YKQYE:GMVVE:RXGXS, AAPASXX:VPTRL:SPIS:DAANNVV:YKQYE:DMVVE:AXGXR, HVPKPXX:VPTKL:SPIS:DDSSNVI:YKQYE:NMVVE:SXGXH, RVPSTXX:VPTKT:SPIS:DNGRVLL:YKQYE:MIVVE:XGXL, ASAAPXX:VPTAL:SPIS:VGRKPKV:YKQYE:MIVVE:XKXS, ASASPXX:VPTDL:SPIS:IGKTPKI:YKQYE:MIVVE:XKXS, ASASPXX:VPTDL:SPIS:VGRTPKV:YKQYE:MVVVE:XKXS, NDEGLXS:VPTEE:SPIS:RIKPHQGQH:YKQYE:FLVVE:KXEXR, NDEGLXS:VPTGQ:SPIS:RIKPHQGQH:YKQYE:LEVVE:QXEXR, SSVKXQP:VPTHH:SPIS:EYVRKKPKL:YKQYE:RLVVE:LEXAXA, RNVQXRP:VPTQL:SPIS:EIVRKKPIF:YKQYE:TLVVE:LAXKXE, AAPASXX:VPARL:SPIS:DAANNVV:YKQYE:DMVVE:AXGXR, KIPKAXX:APVEL:KPLS:DENEKVV:DHHKD:DMVEE:GXGXR, GIPEPXX:APVKM:KPLS:DENKNVV:DHHKD:NMVEE:SXAXR, SIPKAXX:APVEL:KPLS:DEYDKVV:DHHKD:EMVEE:GXGXR, HVTKPTX:APVKL:KPLS:DDSSNVI:DHHKD:NMVEE:SXGXH, YVPKPXX:APVKL:KPLS:DDSSNVI:DHHKD:NMVEE:SXGXH, TVPKPXX:APVQL:KPLS:DDSSNVI:DHHKD:NMVEE:AXGXH, AVPKAXX:APVKL:KPLS:DSSNNVI:DHHKD:NMVEE:AXGXH, KVGKAXX:APVKL:KPLS:DDMGVPT:DHHKD:EGMSVEE:XGXR, KASKAXX:APVKL:KPLS:DKGVVTY:DHHKD:GMVEE:EXGXR, GSAGPXX:APVKM:KPLS:NDKQQII:DHHKD:GMVEE:RXGXS, AAPASXX:APVRL:KPLS:DAANNVV:DHHKD:DMVEE:AXGXR, STPPTXX:APVRL:KPLS:DSANNVV:DHHKD:DMVEE:SXGXR, HVPKPXX:APVKL:KPLS:DDSSNVI:DHHKD:NMVEE:SXGXH, ASAAPXX:APVAL:KPLS:VGRKPKV:DHHKD:MIVEE:XKXS, ASASPXX:APVDL:KPLS:IGKTPKI:DHHKD:MIVEE:XKXS, ASASPXX:APVDL:KPLS:VGRTPKV:DHHKD:MVVEE:XKXS, NDEGLXS:APVEE:KPLS:RIKPHQGQH:DHHKD:FLVEE:KXEXR, NDEGLXS:APVGQ:KPLS:RIKPHQGQH:DHHKD:LEVEE:QXEXR, SSVKXQP:APVHH:KPLS:EYVRKKPKL:DHHKD:RLVEE:LEXAXA, RNVQXRP:APVQL:KPLS:EIVRKKPIF:DHHKD:TLVEE:LAXKXE, KIPKAXX:VPTEL:KPLS:DENEKVV:DHHKD:DMVVE:GXGXR, GIPEPXX:VPEKM:KPLS:DENKNVV:DHHKD:NMTVE:SXAXR, SIPKAXX:VPTEL:KPLS:DEYDKVV:DHHKD:EMVVE:GXGXR, HVTKPTX:APTKL:KPLS:DDSSNVI:DHHKD:NMVVR:SXGXH, YVPKPXX:APTKL:KPLS:DDSSNVI:DHHKD:NMVVR:SXGXH, TVPKPXX:APTQL:KPLS:DDSSNVI:DHHKD:NMVVR:AXGXH, AVPKAXX:APTKL:KPLS:DSSNNVI:DHHKD:NMVVK:AXGXH, KVGKAXX:VPTKL:KPLS:DDMGVPT:DHHKD:EGMSVAE:XGXR, KASKAXX:VPTKL:KPLS:DKGVVTY:DHHKD:GMAVS:EXGXR, GSAGPXX:TPTKM:KPLS:NDKQQII:DHHKD:GMVVD:RXGXS, AAPASXX:VPARL:KPLS:DAANNVV:DHHKD:DMVVE:AXGXR, STPPTXX:VPTRL:KPLS:DSANNVV:DHHKD:DMVVE:SXGXR, HVPKPXX:APTKL:KPLS:DDSSNVI:DHHKD:NMVVR:SXGXH, ASAAPXX:VPQAL:KPLS:VGRKPKV:DHHKD:MIVRS:XKXS, ASASPXX:VSQDL:KPLS:IGKTPKI:DHHKD:MIVKS:XKXS, ASASPXX:VPQDL:KPLS:VGRTPKV:DHHKD:MVVKS:XKXS, NDEGLXS:VPTEE:KPLS:RIKPHQGQH:DHHKD:FLQHN:KXEXR, NDEGLXS:VPTGQ:KPLS:RIKPHQGQH:DHHKD:LEEHS:QXEXR, SSVKXQP:SRVHH:KPLS:EYVRKKPKL:DHHKD:RLEEH:LEXAXA, RNVQXRP:TQVQL:KPLS:EIVRKKPIF:DHHKD:TLEDH:LAXKXE, KIPKAXX:VPQEL:EPLP:DENEKVV:EQLSN:DMVRS:GXGXR, GIPEPXX:VPQKM:EPLP:DENKNVV:EQLSN:NMVRS:SXAXR, SIPKAXX:VPQEL:EPLP:DEYDKVV:EQLSN:EMVRS:GXGXR, HVTKPTX:VPQKL:EPLP:DDSSNVI:EQLSN:NMVRS:SXGXH, YVPKPXX:VPQKL:EPLP:DDSSNVI:EQLSN:NMVRS:SXGXH, TVPKPXX:VPQQL:EPLP:DDSSNVI:EQLSN:NMVRS:AXGXH, AVPKAXX:VPQKL:EPLP:DSSNNVI:EQLSN:NMVRS:AXGXH, KVGKAXX:VPQKL:EPLP:DDMGVPT:EQLSN:EGMSVRS:XGXR, KASKAXX:VPQKL:EPLP:DKGVVTY:EQLSN:GMVRS:EXGXR, GSAGPXX:VPQKM:EPLP:NDKQQII:EQLSN:GMVRS:RXGXS, AAPASXX:VPQRL:EPLP:DAANNVV:EQLSN:DMVRS:AXGXR, STPPTXX:VPQRL:EPLP:DSANNVV:EQLSN:DMVRS:SXGXR, HVPKPXX:VPQKL:EPLP:DDSSNVI:EQLSN:NMVRS:SXGXH, RVPSTXX:VPQKT:EPLP:DNGRVLL:EQLSN:MIVRS:XGXL, ASASPXX:VPQDL:EPLP:IGKTPKI:EQLSN:MIVRS:XKXS, ASASPXX:VPQDL:EPLP:VGRTPKV:EQLSN:MVVRS:XKXS, NDEGLXS:VPQEE:EPLP:RIKPHQGQH:EQLSN:FLVRS:KXEXR, NDEGLXS:VPQGQ:EPLP:RIKPHQGQH:EQLSN:LEVRS:QXEXR, SSVKXQP:VPQHH:EPLP:EYVRKKPKL:EQLSN:RLVRS:LEXAXA, RNVQXRP:VPQQL:EPLP:EIVRKKPIF:EQLSN:TLVRS:LAXKXE, KIPKAXX:VPTEL:EPLP:DENEKVV:EQLSN:DMVVE:GXGXR, GIPEPXX:VPEKM:EPLP:DENKNVV:EQLSN:NMTVE:SXAXR, SIPKAXX:VPTEL:EPLP:DEYDKVV:EQLSN:EMVVE:GXGXR, HVTKPTX:APTKL:EPLP:DDSSNVI:EQLSN:NMVVR:SXGXH, YVPKPXX:APTKL:EPLP:DDSSNVI:EQLSN:NMVVR:SXGXH, TVPKPXX:APTQL:EPLP:DDSSNVI:EQLSN:NMVVR:AXGXH, AVPKAXX:APTKL:EPLP:DSSNNVI:EQLSN:NMVVK:AXGXH, KVGKAXX:VPTKL:EPLP:DDMGVPT:EQLSN:EGMSVAE:XGXR, KASKAXX:VPTKL:EPLP:DKGVVTY:EQLSN:GMAVS:EXGXR, GSAGPXX:TPTKM:EPLP:NDKQQII:EQLSN:GMVVD:RXGXS, AAPASXX:VPARL:EPLP:DAANNVV:EQLSN:DMVVE:AXGXR, STPPTXX:VPTRL:EPLP:DSANNVV:EQLSN:DMVVE:SXGXR, HVPKPXX:APTKL:EPLP:DDSSNVI:EQLSN:NMVVR:SXGXH, RVPSTXX:APVKT:EPLP:DNGRVLL:EQLSN:MIVEE:XGXL, ASASPXX:VSQDL:EPLP:IGKTPKI:EQLSN:MIVKS:XKXS, ASASPXX:VPQDL:EPLP:VGRTPKV:EQLSN:MVVKS:XKXS, NDEGLXS:VPTEE:EPLP:RIKPHQGQH:EQLSN:FLQHN:KXEXR, NDEGLXS:VPTGQ:EPLP:RIKPHQGQH:EQLSN:LEEHS:QXEXR, SSVKXQP:SRVHH:EPLP:EYVRKKPKL:EQLSN:RLEEH:LEXAXA, RNVQXRP:TQVQL:EPLP:EIVRKKPIF:EQLSN:TLEDH:LAXKXE, KIPKAXX:VSQEL:EPLT:DENEKVV:EQLSN:DMVKS:GXGXR, GIPEPXX:VSQKM:EPLT:DENKNVV:EQLSN:NMVKS:SXAXR, SIPKAXX:VSQEL:EPLT:DEYDKVV:EQLSN:EMVKS:GXGXR, HVTKPTX:VSQKL:EPLT:DDSSNVI:EQLSN:NMVKS:SXGXH, YVPKPXX:VSQKL:EPLT:DDSSNVI:EQLSN:NMVKS:SXGXH, TVPKPXX:VSQQL:EPLT:DDSSNVI:EQLSN:NMVKS:AXGXH, AVPKAXX:VSQKL:EPLT:DSSNNVI:EQLSN:NMVKS:AXGXH, KVGKAXX:VSQKL:EPLT:DDMGVPT:EQLSN:EGMSVKS:XGXR, KASKAXX:VSQKL:EPLT:DKGVVTY:EQLSN:GMVKS:EXGXR, GSAGPXX:VSQKM:EPLT:NDKQQII:EQLSN:GMVKS:RXGXS, AAPASXX:VSQRL:EPLT:DAANNVV:EQLSN:DMVKS:AXGXR, STPPTXX:VSQRL:EPLT:DSANNVV:EQLSN:DMVKS:SXGXR, HVPKPXX:VSQKL:EPLT:DDSSNVI:EQLSN:NMVKS:SXGXH, RVPSTXX:VSQKT:EPLT:DNGRVLL:EQLSN:MIVKS:XGXL, ASAAPXX:VSQAL:EPLT:VGRKPKV:EQLSN:MIVKS:XKXS, ASASPXX:VSQDL:EPLT:VGRTPKV:EQLSN:MVVKS:XKXS, NDEGLXS:VSQEE:EPLT:RIKPHQGQH:EQLSN:FLVKS:KXEXR, NDEGLXS:VSQGQ:EPLT:RIKPHQGQH:EQLSN:LEVKS:QXEXR, SSVKXQP:VSQHH:EPLT:EYVRKKPKL:EQLSN:RLVKS:LEXAXA, RNVQXRP:VSQQL:EPLT:EIVRKKPIF:EQLSN:TLVKS:LAXKXE, KIPKAXX:VPTEL:EPLT:DENEKVV:EQLSN:DMVVE:GXGXR, GIPEPXX:VPEKM:EPLT:DENKNVV:EQLSN:NMTVE:SXAXR, SIPKAXX:VPTEL:EPLT:DEYDKVV:EQLSN:EMVVE:GXGXR, HVTKPTX:APTKL:EPLT:DDSSNVI:EQLSN:NMVVR:SXGXH, YVPKPXX:APTKL:EPLT:DDSSNVI:EQLSN:NMVVR:SXGXH, TVPKPXX:APTQL:EPLT:DDSSNVI:EQLSN:NMVVR:AXGXH, AVPKAXX:APTKL:EPLT:DSSNNVI:EQLSN:NMVVK:AXGXH, KVGKAXX:VPTKL:EPLT:DDMGVPT:EQLSN:EGMSVAE:XGXR, KASKAXX:VPTKL:EPLT:DKGVVTY:EQLSN:GMAVS:EXGXR, GSAGPXX:TPTKM:EPLT:NDKQQII:EQLSN:GMVVD:RXGXS, AAPASXX:VPARL:EPLT:DAANNVV:EQLSN:DMVVE:AXGXR, STPPTXX:VPTRL:EPLT:DSANNVV:EQLSN:DMVVE:SXGXR, HVPKPXX:APTKL:EPLT:DDSSNVI:EQLSN:NMVVR:SXGXH, RVPSTXX:APVKT:EPLT:DNGRVLL:EQLSN:MIVEE:XGXL, ASAAPXX:VPQAL:EPLT:VGRKPKV:EQLSN:MIVRS:XKXS, ASASPXX:VPQDL:EPLT:VGRTPKV:EQLSN:MVVKS:XKXS, NDEGLXS:VPTEE:EPLT:RIKPHQGQH:EQLSN:FLQHN:KXEXR, NDEGLXS:VPTGQ:EPLT:RIKPHQGQH:EQLSN:LEEHS:QXEXR, SSVKXQP:SRVHH:EPLT:EYVRKKPKL:EQLSN:RLEEH:LEXAXA, RNVQXRP:TQVQL:EPLT:EIVRKKPIF:EQLSN:TLEDH:LAXKXE, KIPKAXX:VPQEL:EPLT:DENEKVV:EQLSN:DMVKS:GXGXR, GIPEPXX:VPQKM:EPLT:DENKNVV:EQLSN:NMVKS:SXAXR, SIPKAXX:VPQEL:EPLT:DEYDKVV:EQLSN:EMVKS:GXGXR, HVTKPTX:VPQKL:EPLT:DDSSNVI:EQLSN:NMVKS:SXGXH, YVPKPXX:VPQKL:EPLT:DDSSNVI:EQLSN:NMVKS:SXGXH, TVPKPXX:VPQQL:EPLT:DDSSNVI:EQLSN:NMVKS:AXGXH, AVPKAXX:VPQKL:EPLT:DSSNNVI:EQLSN:NMVKS:AXGXH, KVGKAXX:VPQKL:EPLT:DDMGVPT:EQLSN:EGMSVKS:XGXR, KASKAXX:VPQKL:EPLT:DKGVVTY:EQLSN:GMVKS:EXGXR, GSAGPXX:VPQKM:EPLT:NDKQQII:EQLSN:GMVKS:RXGXS, AAPASXX:VPQRL:EPLT:DAANNVV:EQLSN:DMVKS:AXGXR, STPPTXX:VPQRL:EPLT:DSANNVV:EQLSN:DMVKS:SXGXR, HVPKPXX:VPQKL:EPLT:DDSSNVI:EQLSN:NMVKS:SXGXH, RVPSTXX:VPQKT:EPLT:DNGRVLL:EQLSN:MIVKS:XGXL, ASAAPXX:VPQAL:EPLT:VGRKPKV:EQLSN:MIVKS:XKXS, ASASPXX:VPQDL:EPLT:IGKTPKI:EQLSN:MIVKS:XKXS, NDEGLXS:VPQEE:EPLT:RIKPHQGQH:EQLSN:FLVKS:KXEXR, NDEGLXS:VPQGQ:EPLT:RIKPHQGQH:EQLSN:LEVKS:QXEXR, SSVKXQP:VPQHH:EPLT:EYVRKKPKL:EQLSN:RLVKS:LEXAXA, RNVQXRP:VPQQL:EPLT:EIVRKKPIF:EQLSN:TLVKS:LAXKXE, ASASPXX:VSQDL:EPLT:IGKTPKI:EQLSN:MIVKS:XKXS, KIPKAXX:VPTEL:SNIT:DENEKVV:IGEMS:DMQHN:GXGXR, GIPEPXX:VPTKM:SNIT:DENKNVV:IGEMS:NMQHN:SXAXR, SIPKAXX:VPTEL:SNIT:DEYDKVV:IGEMS:EMQHN:GXGXR, HVTKPTX:VPTKL:SNIT:DDSSNVI:IGEMS:NMQHN:SXGXH, YVPKPXX:VPTKL:SNIT:DDSSNVI:IGEMS:NMQHN:SXGXH, TVPKPXX:VPTQL:SNIT:DDSSNVI:IGEMS:NMQHN:AXGXH, AVPKAXX:VPTKL:SNIT:DSSNNVI:IGEMS:NMQHN:AXGXH, KVGKAXX:VPTKL:SNIT:DDMGVPT:IGEMS:EGMSQHN:XGXR, KASKAXX:VPTKL:SNIT:DKGVVTY:IGEMS:GMQHN:EXGXR, GSAGPXX:VPTKM:SNIT:NDKQQII:IGEMS:GMQHN:RXGXS, AAPASXX:VPTRL:SNIT:DAANNVV:IGEMS:DMQHN:AXGXR, STPPTXX:VPTRL:SNIT:DSANNVV:IGEMS:DMQHN:SXGXR, HVPKPXX:VPTKL:SNIT:DDSSNVI:IGEMS:NMQHN:SXGXH, RVPSTXX:VPTKT:SNIT:DNGRVLL:IGEMS:MIQHN:XGXL, ASAAPXX:VPTAL:SNIT:VGRKPKV:IGEMS:MIQHN:XKXS, ASASPXX:VPTDL:SNIT:IGKTPKI:IGEMS:MIQHN:XKXS, ASASPXX:VPTDL:SNIT:VGRTPKV:IGEMS:MVQHN:XKXS, NDEGLXS:VPTGQ:SNIT:RIKPHQGQH:IGEMS:LEQHN:QXEXR, NDEGLXS:VPTEE:SNIT:RIKPHQGQH:IGEMS:FLQHN:KXEXR, SSVKXQP:VPTHH:SNIT:EYVRKKPKL:IGEMS:RLQHN:LEXAXA, RNVQXRP:VPTQL:SNIT:EIVRKKPIF:IGEMS:TLQHN:LAXKXE, KIPKAXX:VPTEL:SNIT:DENEKVV:IGEMS:DMVVE:GXGXR, GIPEPXX:VPEKM:SNIT:DENKNVV:IGEMS:NMTVE:SXAXR, SIPKAXX:VPTEL:SNIT:DEYDKVV:IGEMS:EMVVE:GXGXR, HVTKPTX:APTKL:SNIT:DDSSNVI:IGEMS:NMVVR:SXGXH, YVPKPXX:APTKL:SNIT:DDSSNVI:IGEMS:NMVVR:SXGXH, TVPKPXX:APTQL:SNIT:DDSSNVI:IGEMS:NMVVR:AXGXH, AVPKAXX:APTKL:SNIT:DSSNNVI:IGEMS:NMVVK:AXGXH, KVGKAXX:VPTKL:SNIT:DDMGVPT:IGEMS:EGMSVAE:XGXR, KASKAXX:VPTKL:SNIT:DKGVVTY:IGEMS:GMAVS:EXGXR, GSAGPXX:TPTKM:SNIT:NDKQQII:IGEMS:GMVVD:RXGXS, AAPASXX:VPARL:SNIT:DAANNVV:IGEMS:DMVVE:AXGXR, STPPTXX:VPTRL:SNIT:DSANNVV:IGEMS:DMVVE:SXGXR, HVPKPXX:APTKL:SNIT:DDSSNVI:IGEMS:NMVVR:SXGXH, RVPSTXX:APVKT:SNIT:DNGRVLL:IGEMS:MIVEE:XGXL, ASAAPXX:VPQAL:SNIT:VGRKPKV:IGEMS:MIVRS:XKXS, ASASPXX:VSQDL:SNIT:IGKTPKI:IGEMS:MIVKS:XKXS, ASASPXX:VPQDL:SNIT:VGRTPKV:IGEMS:MVVKS:XKXS, NDEGLXS:VPTGQ:SNIT:RIKPHQGQH:IGEMS:LEEHS:QXEXR, SSVKXQP:SRVHH:SNIT:EYVRKKPKL:IGEMS:RLEEH:LEXAXA, RNVQXRP:TQVQL:SNIT:EIVRKKPIF:IGEMS:TLEDH:LAXKXE, KIPKAXX:VPTEL:SNIT:DENEKVV:LGEMS:DMEHS:GXGXR, GIPEPXX:VPTKM:SNIT:DENKNVV:LGEMS:NMEHS:SXAXR, SIPKAXX:VPTEL:SNIT:DEYDKVV:LGEMS:EMEHS:GXGXR, HVTKPTX:VPTKL:SNIT:DDSSNVI:LGEMS:NMEHS:SXGXH, YVPKPXX:VPTKL:SNIT:DDSSNVI:LGEMS:NMEHS:SXGXH, TVPKPXX:VPTQL:SNIT:DDSSNVI:LGEMS:NMEHS:AXGXH, AVPKAXX:VPTKL:SNIT:DSSNNVI:LGEMS:NMEHS:AXGXH, KVGKAXX:VPTKL:SNIT:DDMGVPT:LGEMS:EGMSEHS:XGXR, KASKAXX:VPTKL:SNIT:DKGVVTY:LGEMS:GMEHS:EXGXR, GSAGPXX:VPTKM:SNIT:NDKQQII:LGEMS:GMEHS:RXGXS, AAPASXX:VPTRL:SNIT:DAANNVV:LGEMS:DMEHS:AXGXR, STPPTXX:VPTRL:SNIT:DSANNVV:LGEMS:DMEHS:SXGXR, HVPKPXX:VPTKL:SNIT:DDSSNVI:LGEMS:NMEHS:SXGXH, RVPSTXX:VPTKT:SNIT:DNGRVLL:LGEMS:MIEHS:XGXL, ASAAPXX:VPTAL:SNIT:VGRKPKV:LGEMS:MIEHS:XKXS, ASASPXX:VPTDL:SNIT:IGKTPKI:LGEMS:MIEHS:XKXS, ASASPXX:VPTDL:SNIT:VGRTPKV:LGEMS:MVEHS:XKXS, NDEGLXS:VPTEE:SNIT:RIKPHQGQH:LGEMS:FLEHS:KXEXR, SSVKXQP:VPTHH:SNIT:EYVRKKPKL:LGEMS:RLEHS:LEXAXA, RNVQXRP:VPTQL:SNIT:EIVRKKPIF:LGEMS:TLEHS:LAXKXE, KIPKAXX:VPTEL:SNIT:DENEKVV:LGEMS:DMVVE:GXGXR, GIPEPXX:VPEKM:SNIT:DENKNVV:LGEMS:NMTVE:SXAXR, SIPKAXX:VPTEL:SNIT:DEYDKVV:LGEMS:EMVVE:GXGXR, HVTKPTX:APTKL:SNIT:DDSSNVI:LGEMS:NMVVR:SXGXH, YVPKPXX:APTKL:SNIT:DDSSNVI:LGEMS:NMVVR:SXGXH, TVPKPXX:APTQL:SNIT:DDSSNVI:LGEMS:NMVVR:AXGXH, AVPKAXX:APTKL:SNIT:DSSNNVI:LGEMS:NMVVK:AXGXH, KVGKAXX:VPTKL:SNIT:DDMGVPT:LGEMS:EGMSVAE:XGXR, KASKAXX:VPTKL:SNIT:DKGVVTY:LGEMS:GMAVS:EXGXR, GSAGPXX:TPTKM:SNIT:NDKQQII:LGEMS:GMVVD:RXGXS, AAPASXX:VPARL:SNIT:DAANNVV:LGEMS:DMVVE:AXGXR, STPPTXX:VPTRL:SNIT:DSANNVV:LGEMS:DMVVE:SXGXR, HVPKPXX:APTKL:SNIT:DDSSNVI:LGEMS:NMVVR:SXGXH, RVPSTXX:APVKT:SNIT:DNGRVLL:LGEMS:MIVEE:XGXL, ASAAPXX:VPQAL:SNIT:VGRKPKV:LGEMS:MIVRS:XKXS, ASASPXX:VSQDL:SNIT:IGKTPKI:LGEMS:MIVKS:XKXS, ASASPXX:VPQDL:SNIT:VGRTPKV:LGEMS:MVVKS:XKXS, NDEGLXS:VPTEE:SNIT:RIKPHQGQH:LGEMS:FLQHN:KXEXR, SSVKXQP:SRVHH:SNIT:EYVRKKPKL:LGEMS:RLEEH:LEXAXA, RNVQXRP:TQVQL:SNIT:EIVRKKPIF:LGEMS:TLEDH:LAXKXE, KIPKAXX:SRVEL:RSVK:DENEKVV:KEVQV:DMEEH:GXGXR, GIPEPXX:SRVKM:RSVK:DENKNVV:KEVQV:NMEEH:SXAXR, SIPKAXX:SRVEL:RSVK:DEYDKVV:KEVQV:EMEEH:GXGXR, HVTKPTX:SRVKL:RSVK:DDSSNVI:KEVQV:NMEEH:SXGXH, YVPKPXX:SRVKL:RSVK:DDSSNVI:KEVQV:NMEEH:SXGXH, TVPKPXX:SRVQL:RSVK:DDSSNVI:KEVQV:NMEEH:AXGXH, AVPKAXX:SRVKL:RSVK:DSSNNVI:KEVQV:NMEEH:AXGXH, KVGKAXX:SRVKL:RSVK:DDMGVPT:KEVQV:EGMSEEH:XGXR, KASKAXX:SRVKL:RSVK:DKGVVTY:KEVQV:GMEEH:EXGXR, GSAGPXX:SRVKM:RSVK:NDKQQII:KEVQV:GMEEH:RXGXS, AAPASXX:SRVRL:RSVK:DAANNVV:KEVQV:DMEEH:AXGXR, STPPTXX:SRVRL:RSVK:DSANNVV:KEVQV:DMEEH:SXGXR, HVPKPXX:SRVKL:RSVK:DDSSNVI:KEVQV:NMEEH:SXGXH, RVPSTXX:SRVKT:RSVK:DNGRVLL:KEVQV:MIEEH:XGXL, ASAAPXX:SRVAL:RSVK:VGRKPKV:KEVQV:MIEEH:XKXS, ASASPXX:SRVDL:RSVK:IGKTPKI:KEVQV:MIEEH:XKXS, ASASPXX:SRVDL:RSVK:VGRTPKV:KEVQV:MVEEH:XKXS, NDEGLXS:SRVEE:RSVK:RIKPHQGQH:KEVQV:FLEEH:KXEXR, NDEGLXS:SRVGQ:RSVK:RIKPHQGQH:KEVQV:LEEEH:QXEXR, RNVQXRP:SRVQL:RSVK:EIVRKKPIF:KEVQV:TLEEH:LAXKXE, KIPKAXX:VPTEL:RSVK:DENEKVV:KEVQV:DMVVE:GXGXR, GIPEPXX:VPEKM:RSVK:DENKNVV:KEVQV:NMTVE:SXAXR, SIPKAXX:VPTEL:RSVK:DEYDKVV:KEVQV:EMVVE:GXGXR, HVTKPTX:APTKL:RSVK:DDSSNVI:KEVQV:NMVVR:SXGXH, YVPKPXX:APTKL:RSVK:DDSSNVI:KEVQV:NMVVR:SXGXH, TVPKPXX:APTQL:RSVK:DDSSNVI:KEVQV:NMVVR:AXGXH, AVPKAXX:APTKL:RSVK:DSSNNVI:KEVQV:NMVVK:AXGXH, KVGKAXX:VPTKL:RSVK:DDMGVPT:KEVQV:EGMSVAE:XGXR, KASKAXX:VPTKL:RSVK:DKGVVTY:KEVQV:GMAVS:EXGXR, GSAGPXX:TPTKM:RSVK:NDKQQII:KEVQV:GMVVD:RXGXS, AAPASXX:VPARL:RSVK:DAANNVV:KEVQV:DMVVE:AXGXR, STPPTXX:VPTRL:RSVK:DSANNVV:KEVQV:DMVVE:SXGXR, HVPKPXX:APTKL:RSVK:DDSSNVI:KEVQV:NMVVR:SXGXH, RVPSTXX:APVKT:RSVK:DNGRVLL:KEVQV:MIVEE:XGXL, ASAAPXX:VPQAL:RSVK:VGRKPKV:KEVQV:MIVRS:XKXS, ASASPXX:VSQDL:RSVK:IGKTPKI:KEVQV:MIVKS:XKXS, ASASPXX:VPQDL:RSVK:VGRTPKV:KEVQV:MVVKS:XKXS, NDEGLXS:VPTEE:RSVK:RIKPHQGQH:KEVQV:FLQHN:KXEXR, NDEGLXS:VPTGQ:RSVK:RIKPHQGQH:KEVQV:LEEHS:QXEXR, RNVQXRP:TQVQL:RSVK:EIVRKKPIF:KEVQV:TLEDH:LAXKXE, KIPKAXX:TQVEL:RPVQ:DENEKVV:KKATV:DMEDH:GXGXR, GIPEPXX:TQVKM:RPVQ:DENKNVV:KKATV:NMEDH:SXAXR, SIPKAXX:TQVEL:RPVQ:DEYDKVV:KKATV:EMEDH:GXGXR, HVTKPTX:TQVKL:RPVQ:DDSSNVI:KKATV:NMEDH:SXGXH, YVPKPXX:TQVKL:RPVQ:DDSSNVI:KKATV:NMEDH:SXGXH, TVPKPXX:TQVQL:RPVQ:DDSSNVI:KKATV:NMEDH:AXGXH, AVPKAXX:TQVKL:RPVQ:DSSNNVI:KKATV:NMEDH:AXGXH, KVGKAXX:TQVKL:RPVQ:DDMGVPT:KKATV:EGMSEDH:XGXR, KASKAXX:TQVKL:RPVQ:DKGVVTY:KKATV:GMEDH:EXGXR, GSAGPXX:TQVKM:RPVQ:NDKQQII:KKATV:GMEDH:RXGXS, AAPASXX:TQVRL:RPVQ:DAANNVV:KKATV:DMEDH:AXGXR, STPPTXX:TQVRL:RPVQ:DSANNVV:KKATV:DMEDH:SXGXR, HVPKPXX:TQVKL:RPVQ:DDSSNVI:KKATV:NMEDH:SXGXH, RVPSTXX:TQVKT:RPVQ:DNGRVLL:KKATV:MIEDH:XGXL, ASAAPXX:TQVAL:RPVQ:VGRKPKV:KKATV:MIEDH:XKXS, ASASPXX:TQVDL:RPVQ:IGKTPKI:KKATV:MIEDH:XKXS, ASASPXX:TQVDL:RPVQ:VGRTPKV:KKATV:MVEDH:XKXS, NDEGLXS:TQVEE:RPVQ:RIKPHQGQH:KKATV:FLEDH:KXEXR, NDEGLXS:TQVGQ:RPVQ:RIKPHQGQH:KKATV:LEEDH:QXEXR, SSVKXQP:TQVHH:RPVQ:EYVRKKPKL:KKATV:RLEDH:LEXAXA, KIPKAXX:VPTEL:RPVQ:DENEKVV:KKATV:DMVVE:GXGXR, GIPEPXX:VPEKM:RPVQ:DENKNVV:KKATV:NMTVE:SXAXR, SIPKAXX:VPTEL:RPVQ:DEYDKVV:KKATV:EMVVE:GXGXR, HVTKPTX:APTKL:RPVQ:DDSSNVI:KKATV:NMVVR:SXGXH, YVPKPXX:APTKL:RPVQ:DDSSNVI:KKATV:NMVVR:SXGXH, TVPKPXX:APTQL:RPVQ:DDSSNVI:KKATV:NMVVR:AXGXH, AVPKAXX:APTKL:RPVQ:DSSNNVI:KKATV:NMVVK:AXGXH, KVGKAXX:VPTKL:RPVQ:DDMGVPT:KKATV:EGMSVAE:XGXR, KASKAXX:VPTKL:RPVQ:DKGVVTY:KKATV:GMAVS:EXGXR, GSAGPXX:TPTKM:RPVQ:NDKQQII:KKATV:GMVVD:RXGXS, AAPASXX:VPARL:RPVQ:DAANNVV:KKATV:DMVVE:AXGXR, STPPTXX:VPTRL:RPVQ:DSANNVV:KKATV:DMVVE:SXGXR, HVPKPXX:APTKL:RPVQ:DDSSNVI:KKATV:NMVVR:SXGXH, RVPSTXX:APVKT:RPVQ:DNGRVLL:KKATV:MIVEE:XGXL, ASAAPXX:VPQAL:RPVQ:VGRKPKV:KKATV:MIVRS:XKXS, ASASPXX:VSQDL:RPVQ:IGKTPKI:KKATV:MIVKS:XKXS, ASASPXX:VPQDL:RPVQ:VGRTPKV:KKATV:MVVKS:XKXS, NDEGLXS:VPTEE:RPVQ:RIKPHQGQH:KKATV:FLQHN:KXEXR, NDEGLXS:VPTGQ:RPVQ:RIKPHQGQH:KKATV:LEEHS:QXEXR, SSVKXQP:SRVHH:RPVQ:EYVRKKPKL:KKATV:RLEEH:LEXAXA. More particularly, the heptuplet PEP7:PEP5:PEP1:LINKER:PEP2:PEP6:PEP8 is selected from the group consisting of GIPEPXX:VPTKM:SAIS:DENKNVV:LKNYQ:NMVVE:SXAXR, HVTKPTX:VPTKL:SAIS:DDSSNVI:LKNYQ:NMVVE:SXGXH, YVPKPXX:VPTKL:SAIS:DDSSNVI:LKNYQ:NMVVE:SXGXH, TVPKPXX:VPTQL:SAIS:DDSSNVI:LKNYQ:NMVVE:AXGXH, AVPKAXX:VPTKL:SAIS:DSSNNVI:LKNYQ:NMVVE:AXGXH, KVGKAXX:VPTKL:SAIS:DDMGVPT:LKNYQ:EGMSVVE:XGXR, KASKAXX:VPTKL:SAIS:DKGVVTY:LKNYQ:GMVVE:EXGXR, GSAGPXX:VPTKM:SAIS:NDKQQII:LKNYQ:GMVVE:RXGXS, AAPASXX:VPTRL:SAIS:DAANNVV:LKNYQ:DMVVE:AXGXR, STPPTXX:VPTRL:SAIS:DSANNVV:LKNYQ:DMVVE:SXGXR, HVPKPXX:VPTKL:SAIS:DDSSNVI:LKNYQ:NMVVE:SXGXH, RVPSTXX:VPTKT:SAIS:DNGRVLL:LKNYQ:MIVVE:XGXL, ASAAPXX:VPTAL:SAIS:VGRKPKV:LKNYQ:MIVVE:XKXS, ASASPXX:VPTDL:SAIS:IGKTPKI:LKNYQ:MIVVE:XKXS, ASASPXX:VPTDL:SAIS:VGRTPKV:LKNYQ:MVVVE:XKXS, GIPEPXX:VPEKM:SAIS:DENKNVV:LKNYQ:NMTVE:SXAXR, HVTKPTX:APTKL:SAIS:DDSSNVI:LKNYQ:NMVVR:SXGXH, YVPKPXX:APTKL:SAIS:DDSSNVI:LKNYQ:NMVVR:SXGXH, TVPKPXX:APTQL:SAIS:DDSSNVI:LKNYQ:NMVVR:AXGXH, AVPKAXX:APTKL:SAIS:DSSNNVI:LKNYQ:NMVVK:AXGXH, KVGKAXX:VPTKL:SAIS:DDMGVPT:LKNYQ:EGMSVAE:XGXR, KASKAXX:VPTKL:SAIS:DKGVVTY:LKNYQ:GMAVS:EXGXR, GSAGPXX:TPTKM:SAIS:NDKQQII:LKNYQ:GMVVD:RXGXS, AAPASXX:VPARL:SAIS:DAANNVV:LKNYQ:DMVVE:AXGXR, HVPKPXX:APTKL:SAIS:DDSSNVI:LKNYQ:NMVVR:SXGXH, RVPSTXX:APVKT:SAIS:DNGRVLL:LKNYQ:MIVEE:XGXL, ASAAPXX:VPQAL:SAIS:VGRKPKV:LKNYQ:MIVRS:XKXS, ASASPXX:VSQDL:SAIS:IGKTPKI:LKNYQ:MIVKS:XKXS, ASASPXX:VPQDL:SAIS:VGRTPKV:LKNYQ:MVVKS:XKXS, NDEGLEX:VPTEE:SAIS:RIKPHQGQH:LKNYQ:FLQHN:KXEXR, NDEGLEX:VPTGQ:SAIS:RIKPHQGQH:LKNYQ:LEEHS:QXEXR, SSVKXQP:SRVHH:SAIS:EYVRKKPKL:LKNYQ:RLEEH:LEXAXA, RNVQXRP:TQVQL:SAIS:EIVRKKPIF:LKNYQ:TLEDH:LAXKXE, KIPKAXX:VPEEL:SSLS:DENEKVV:LKVYP:DMTVE:GXGXR, SIPKAXX:VPEEL:SSLS:DEYDKVV:LKVYP:EMTVE:GXGXR, HVTKPTX:VPEKL:SSLS:DDSSNVI:LKVYP:NMTVE:SXGXH, YVPKPXX:VPEKL:SSLS:DDSSNVI:LKVYP:NMTVE:SXGXH, TVPKPXX:VPEQL:SSLS:DDSSNVI:LKVYP:NMTVE:AXGXH, AVPKAXX:VPEKL:SSLS:DSSNNVI:LKVYP:NMTVE:AXGXH, KVGKAXX:VPEKL:SSLS:DDMGVPT:LKVYP:EGMSTVE:XGXR, KASKAXX:VPEKL:SSLS:DKGVVTY:LKVYP:GMTVE:EXGXR, GSAGPXX:VPEKM:SSLS:NDKQQII:LKVYP:GMTVE:RXGXS, AAPASXX:VPERL:SSLS:DAANNVV:LKVYP:DMTVE:AXGXR, STPPTXX:VPERL:SSLS:DSANNVV:LKVYP:DMTVE:SXGXR, HVPKPXX:VPEKL:SSLS:DDSSNVI:LKVYP:NMTVE:SXGXH, RVPSTXX:VPEKT:SSLS:DNGRVLL:LKVYP:MITVE:XGXL, ASAAPXX:VPEAL:SSLS:VGRKPKV:LKVYP:MITVE:XKXS, ASASPXX:VPEDL:SSLS:IGKTPKI:LKVYP:MITVE:XKXS, ASASPXX:VPEDL:SSLS:VGRTPKV:LKVYP:MVTVE:XKXS, KIPKAXX:VPTEL:SSLS:DENEKVV:LKVYP:DMVVE:GXGXR, SIPKAXX:VPTEL:SSLS:DEYDKVV:LKVYP:EMVVE:GXGXR, HVTKPTX:APTKL:SSLS:DDSSNVI:LKVYP:NMVVR:SXGXH, YVPKPXX:APTKL:SSLS:DDSSNVI:LKVYP:NMVVR:SXGXH, TVPKPXX:APTQL:SSLS:DDSSNVI:LKVYP:NMVVR:AXGXH, AVPKAXX:APTKL:SSLS:DSSNNVI:LKVYP:NMVVK:AXGXH, KVGKAXX:VPTKL:SSLS:DDMGVPT:LKVYP:EGMSVAE:XGXR, KASKAXX:VPTKL:SSLS:DKGVVTY:LKVYP:GMAVS:EXGXR, GSAGPXX:TPTKM:SSLS:NDKQQII:LKVYP:GMVVD:RXGXS, AAPASXX:VPARL:SSLS:DAANNVV:LKVYP:DMVVE:AXGXR, STPPTXX:VPTRL:SSLS:DSANNVV:LKVYP:DMVVE:SXGXR, HVPKPXX:APTKL:SSLS:DDSSNVI:LKVYP:NMVVR:SXGXH, RVPSTXX:APVKT:SSLS:DNGRVLL:LKVYP:MIVEE:XGXL, ASAAPXX:VPQAL:SSLS:VGRKPKV:LKVYP:MIVRS:XKXS, ASASPXX:VSQDL:SSLS:IGKTPKI:LKVYP:MIVKS:XKXS, ASASPXX:VPQDL:SSLS:VGRTPKV:LKVYP:MVVKS:XKXS, NDEGLEX:VPTEE:SSLS:RIKPHQGQH:LKVYP:FLQHN:KXEXR, NDEGLEX:VPTGQ:SSLS:RIKPHQGQH:LKVYP:LEEHS:QXEXR, SSVKXQP:SRVHH:SSLS:EYVRKKPKL:LKVYP:RLEEH:LEXAXA, RNVQXRP:TQVQL:SSLS:EIVRKKPIF:LKVYP:TLEDH:LAXKXE, KIPKAXX:APTEL:NAIS:DENEKVV:LKKYR:DMVVR:GXGXR, GIPEPXX:APTKM:NAIS:DENKNVV:LKKYR:NMVVR:SXAXR, SIPKAXX:APTEL:NAIS:DEYDKVV:LKKYR:EMVVR:GXGXR, AVPKAXX:APTKL:NAIS:DSSNNVI:LKKYR:NMVVR:AXGXH, KVGKAXX:APTKL:NAIS:DDMGVPT:LKKYR:EGMSVVR:XGXR, KASKAXX:APTKL:NAIS:DKGVVTY:LKKYR:GMVVR:EXGXR, GSAGPXX:APTKM:NAIS:NDKQQII:LKKYR:GMVVR:RXGXS, AAPASXX:APTRL:NAIS:DAANNVV:LKKYR:DMVVR:AXGXR, STPPTXX:APTRL:NAIS:DSANNVV:LKKYR:DMVVR:SXGXR, RVPSTXX:APTKT:NAIS:DNGRVLL:LKKYR:MIVVR:XGXL, ASAAPXX:APTAL:NAIS:VGRKPKV:LKKYR:MIVVR:XKXS, ASASPXX:APTDL:NAIS:IGKTPKI:LKKYR:MIVVR:XKXS, ASASPXX:APTDL:NAIS:VGRTPKV:LKKYR:MVVVR:XKXS, KIPKAXX:VPTEL:NAIS:DENEKVV:LKKYR:DMVVE:GXGXR, GIPEPXX:VPEKM:NAIS:DENKNVV:LKKYR:NMTVE:SXAXR, SIPKAXX:VPTEL:NAIS:DEYDKVV:LKKYR:EMVVE:GXGXR, AVPKAXX:APTKL:NAIS:DSSNNVI:LKKYR:NMVVK:AXGXH, KVGKAXX:VPTKL:NAIS:DDMGVPT:LKKYR:EGMSVAE:XGXR, KASKAXX:VPTKL:NAIS:DKGVVTY:LKKYR:GMAVS:EXGXR, GSAGPXX:TPTKM:NAIS:NDKQQII:LKKYR:GMVVD:RXGXS, AAPASXX:VPARL:NAIS:DAANNVV:LKKYR:DMVVE:AXGXR, STPPTXX:VPTRL:NAIS:DSANNVV:LKKYR:DMVVE:SXGXR, RVPSTXX:APVKT:NAIS:DNGRVLL:LKKYR:MIVEE:XGXL, ASAAPXX:VPQAL:NAIS:VGRKPKV:LKKYR:MIVRS:XKXS, ASASPXX:VSQDL:NAIS:IGKTPKI:LKKYR:MIVKS:XKXS, ASASPXX:VPQDL:NAIS:VGRTPKV:LKKYR:MVVKS:XKXS, NDEGLEX:VPTEE:NAIS:RIKPHQGQH:LKKYR:FLQHN:KXEXR, NDEGLEX:VPTGQ:NAIS:RIKPHQGQH:LKKYR:LEEHS:QXEXR, SSVKXQP:SRVHH:NAIS:EYVRKKPKL:LKKYR:RLEEH:LEXAXA, RNVQXRP:TQVQL:NAIS:EIVRKKPIF:LKKYR:TLEDH:LAXKXE, KIPKAXX:APTEL:SATS:DENEKVV:LRKHR:DMVVK:GXGXR, GIPEPXX:APTKM:SATS:DENKNVV:LRKHR:NMVVK:SXAXR, SIPKAXX:APTEL:SATS:DEYDKVV:LRKHR:EMVVK:GXGXR, HVTKPTX:APTKL:SATS:DDSSNVI:LRKHR:NMVVK:SXGXH, YVPKPXX:APTKL:SATS:DDSSNVI:LRKHR:NMVVK:SXGXH, TVPKPXX:APTQL:SATS:DDSSNVI:LRKHR:NMVVK:AXGXH, KVGKAXX:APTKL:SATS:DDMGVPT:LRKHR:EGMSVVK:XGXR, KASKAXX:APTKL:SATS:DKGVVTY:LRKHR:GMVVK:EXGXR, GSAGPXX:APTKM:SATS:NDKQQII:LRKHR:GMVVK:RXGXS, AAPASXX:APTRL:SATS:DAANNVV:LRKHR:DMVVK:AXGXR, STPPTXX:APTRL:SATS:DSANNVV:LRKHR:DMVVK:SXGXR, HVPKPXX:APTKL:SATS:DDSSNVI:LRKHR:NMVVK:SXGXH, RVPSTXX:APTKT:SATS:DNGRVLL:LRKHR:MIVVK:XGXL, ASAAPXX:APTAL:SATS:VGRKPKV:LRKHR:MIVVK:XKXS, ASASPXX:APTDL:SATS:IGKTPKI:LRKHR:MIVVK:XKXS, ASASPXX:APTDL:SATS:VGRTPKV:LRKHR:MVVVK:XKXS, KIPKAXX:VPTEL:SATS:DENEKVV:LRKHR:DMVVE:GXGXR, GIPEPXX:VPEKM:SATS:DENKNVV:LRKHR:NMTVE:SXAXR, SIPKAXX:VPTEL:SATS:DEYDKVV:LRKHR:EMVVE:GXGXR, HVTKPTX:APTKL:SATS:DDSSNVI:LRKHR:NMVVR:SXGXH, YVPKPXX:APTKL:SATS:DDSSNVI:LRKHR:NMVVR:SXGXH, TVPKPXX:APTQL:SATS:DDSSNVI:LRKHR:NMVVR:AXGXH, KVGKAXX:VPTKL:SATS:DDMGVPT:LRKHR:EGMSVAE:XGXR, KASKAXX:VPTKL:SATS:DKGVVTY:LRKHR:GMAVS:EXGXR, GSAGPXX:TPTKM:SATS:NDKQQII:LRKHR:GMVVD:RXGXS, AAPASXX:VPARL:SATS:DAANNVV:LRKHR:DMVVE:AXGXR, STPPTXX:VPTRL:SATS:DSANNVV:LRKHR:DMVVE:SXGXR, HVPKPXX:APTKL:SATS:DDSSNVI:LRKHR:NMVVR:SXGXH, RVPSTXX:APVKT:SATS:DNGRVLL:LRKHR:MIVEE:XGXL, ASAAPXX:VPQAL:SATS:VGRKPKV:LRKHR:MIVRS:XKXS, ASASPXX:VSQDL:SATS:IGKTPKI:LRKHR:MIVKS:XKXS, ASASPXX:VPQDL:SATS:VGRTPKV:LRKHR:MVVKS:XKXS, NDEGLEX:VPTEE:SATS:RIKPHQGQH:LRKHR:FLQHN:KXEXR, NDEGLEX:VPTGQ:SATS:RIKPHQGQH:LRKHR:LEEHS:QXEXR, SSVKXQP:SRVHH:SATS:EYVRKKPKL:LRKHR:RLEEH:LEXAXA, RNVQXRP:TQVQL:SATS:EIVRKKPIF:LRKHR:TLEDH:LAXKXE, KIPKAXX:VPTEL:SPIS:DENEKVV:LKYHY:DMVAE:GXGXR, GIPEPXX:VPTKM:SPIS:DENKNVV:LKYHY:NMVAE:SXAXR, SIPKAXX:VPTEL:SPIS:DEYDKVV:LKYHY: EMVAE:GXGXR, HVTKPTX:VPTKL:SPIS:DDSSNVI:LKYHY:NMVAE:SXGXH, YVPKPXX:VPTKL:SPIS:DDSSNVI:LKYHY:NMVAE:SXGXH, TVPKPXX:VPTQL:SPIS:DDSSNVI:LKYHY:NMVAE:AXGXH, AVPKAXX:VPTKL:SPIS:DSSNNVI:LKYHY:NMVAE:AXGXH, KASKAXX:VPTKL:SPIS:DKGVVTY:LKYHY:GMVAE:EXGXR, GSAGPXX:VPTKM:SPIS:NDKQQII:LKYHY:GMVAE:RXGXS, AAPASXX:VPTRL:SPIS:DAANNVV:LKYHY:DMVAE:AXGXR, STPPTXX:VPTRL:SPIS:DSANNVV:LKYHY:DMVAE:SXGXR, HVPKPXX:VPTKL:SPIS:DDSSNVI:LKYHY:NMVAE:SXGXH, RVPSTXX:VPTKT:SPIS:DNGRVLL:LKYHY:MIVAE:XGXL, ASAAPXX:VPTAL:SPIS:VGRKPKV:LKYHY:MIVAE:XKXS, ASASPXX:VPTDL:SPIS:IGKTPKI:LKYHY:MIVAE:XKXS, ASASPXX:VPTDL:SPIS:VGRTPKV:LKYHY:MVVAE:XKXS, KIPKAXX:VPTEL:SPIS:DENEKVV:LKYHY:DMVVE:GXGXR, GIPEPXX:VPEKM:SPIS:DENKNVV:LKYHY:NMTVE:SXAXR, SIPKAXX:VPTEL:SPIS:DEYDKVV:LKYHY:EMVVE:GXGXR, HVTKPTX:APTKL:SPIS:DDSSNVI:LKYHY:NMVVR:SXGXH, YVPKPXX:APTKL:SPIS:DDSSNVI:LKYHY:NMVVR:SXGXH, TVPKPXX:APTQL:SPIS:DDSSNVI:LKYHY:NMVVR:AXGXH, AVPKAXX:APTKL:SPIS:DSSNNVI:LKYHY:NMVVK:AXGXH, KASKAXX:VPTKL:SPIS:DKGVVTY:LKYHY:GMAVS:EXGXR, GSAGPXX:TPTKM:SPIS:NDKQQII:LKYHY:GMVVD:RXGXS, AAPASXX:VPARL:SPIS:DAANNVV:LKYHY:DMVVE:AXGXR, STPPTXX:VPTRL:SPIS:DSANNVV:LKYHY:DMVVE:SXGXR, HVPKPXX:APTKL:SPIS:DDSSNVI:LKYHY:NMVVR:SXGXH, RVPSTXX:APVKT:SPIS:DNGRVLL:LKYHY:MIVEE:XGXL, ASAAPXX:VPQAL:SPIS:VGRKPKV:LKYHY:MIVRS:XKXS, ASASPXX:VSQDL:SPIS:IGKTPKI:LKYHY:MIVKS:XKXS, ASASPXX:VPQDL:SPIS:VGRTPKV:LKYHY:MVVKS:XKXS, NDEGLEX:VPTEE:SPIS:RIKPHQGQH:LKYHY:FLQHN:KXEXR, NDEGLEX:VPTGQ:SPIS:RIKPHQGQH:LKYHY:LEEHS:QXEXR, SSVKXQP:SRVHH:SPIS:EYVRKKPKL:LKYHY:RLEEH:LEXAXA, RNVQXRP:TQVQL:SPIS:EIVRKKPIF:LKYHY:TLEDH:LAXKXE, KIPKAXX:VPTEL:EPIS:DENEKVV:KFKYE:DMAVS:GXGXR, GIPEPXX:VPTKM:EPIS:DENKNVV:KFKYE:NMAVS:SXAXR, SIPKAXX:VPTEL:EPIS:DEYDKVV:KFKYE:EMAVS:GXGXR, HVTKPTX:VPTKL:EPIS:DDSSNVI:KFKYE:NMAVS:SXGXH, YVPKPXX:VPTKL:EPIS:DDSSNVI:KFKYE:NMAVS:SXGXH, TVPKPXX:VPTQL:EPIS:DDSSNVI:KFKYE:NMAVS:AXGXH, AVPKAXX:VPTKL:EPIS:DSSNNVI:KFKYE:NMAVS:AXGXH, KVGKAXX:VPTKL:EPIS:DDMGVPT:KFKYE:EGMSAVS:XGXR, GSAGPXX:VPTKM:EPIS:NDKQQII:KFKYE:GMAVS:RXGXS, AAPASXX:VPTRL:EPIS:DAANNVV:KFKYE:DMAVS:AXGXR, STPPTXX:VPTRL:EPIS:DSANNVV:KFKYE:DMAVS:SXGXR, HVPKPXX:VPTKL:EPIS:DDSSNVI:KFKYE:NMAVS:SXGXH, RVPSTXX:VPTKT:EPIS:DNGRVLL:KFKYE:MIAVS:XGXL, ASAAPXX:VPTAL:EPIS:VGRKPKV:KFKYE:MIAVS:XKXS, ASASPXX:VPTDL:EPIS:IGKTPKI:KFKYE:MIAVS:XKXS, ASASPXX:VPTDL:EPIS:VGRTPKV:KFKYE:MVAVS:XKXS, KIPKAXX:VPTEL:EPIS:DENEKVV:KFKYE:DMVVE:GXGXR, GIPEPXX:VPEKM:EPIS:DENKNVV:KFKYE:NMTVE:SXAXR, SIPKAXX:VPTEL:EPIS:DEYDKVV:KFKYE:EMVVE:GXGXR, HVTKPTX:APTKL:EPIS:DDSSNVI:KFKYE:NMVVR:SXGXH, YVPKPXX:APTKL:EPIS:DDSSNVI:KFKYE:NMVVR:SXGXH, TVPKPXX:APTQL:EPIS:DDSSNVI:KFKYE:NMVVR:AXGXH, AVPKAXX:APTKL:EPIS:DSSNNVI:KFKYE:NMVVK:AXGXH, KVGKAXX:VPTKL:EPIS:DDMGVPT:KFKYE:EGMSVAE:XGXR, GSAGPXX:TPTKM:EPIS:NDKQQII:KFKYE:GMVVD:RXGXS, AAPASXX:VPARL:EPIS:DAANNVV:KFKYE:DMVVE:AXGXR, STPPTXX:VPTRL:EPIS:DSANNVV:KFKYE:DMVVE:SXGXR, HVPKPXX:APTKL:EPIS:DDSSNVI:KFKYE:NMVVR:SXGXH, RVPSTXX:APVKT:EPIS:DNGRVLL:KFKYE:MIVEE:XGXL, ASAAPXX:VPQAL:EPIS:VGRKPKV:KFKYE:MIVRS:XKXS, ASASPXX:VSQDL:EPIS:IGKTPKI:KFKYE:MIVKS:XKXS, ASASPXX:VPQDL:EPIS:VGRTPKV:KFKYE:MVVKS:XKXS, NDEGLEX:VPTEE:EPIS:RIKPHQGQH:KFKYE:FLQHN:KXEXR, NDEGLEX:VPTGQ:EPIS:RIKPHQGQH:KFKYE:LEEHS:QXEXR, SSVKXQP:SRVHH:EPIS:EYVRKKPKL:KFKYE:RLEEH:LEXAXA, RNVQXRP:TQVQL:EPIS:EIVRKKPIF:KFKYE:TLEDH:LAXKXE, KIPKAXX:TPTEL:SPIN:DENEKVV:YGKIP:DMVVD:GXGXR, GIPEPXX:TPTKM:SPIN:DENKNVV:YGKIP:NMVVD:SXAXR, SIPKAXX:TPTEL:SPIN:DEYDKVV:YGKIP:EMVVD:GXGXR, HVTKPTX:TPTKL:SPIN:DDSSNVI:YGKIP:NMVVD:SXGXH, YVPKPXX:TPTKL:SPIN:DDSSNVI:YGKIP:NMVVD:SXGXH, TVPKPXX:TPTQL:SPIN:DDSSNVI:YGKIP:NMVVD:AXGXH, AVPKAXX:TPTKL:SPIN:DSSNNVI:YGKIP:NMVVD:AXGXH, KVGKAXX:TPTKL:SPIN:DDMGVPT:YGKIP:EGMSVVD:XGXR, KASKAXX:TPTKL:SPIN:DKGVVTY:YGKIP:GMVVD:EXGXR, AAPASXX:TPTRL:SPIN:DAANNVV:YGKIP:DMVVD:AXGXR, STPPTXX:TPTRL:SPIN:DSANNVV:YGKIP:DMVVD:SXGXR, HVPKPXX:TPTKL:SPIN:DDSSNVI:YGKIP:NMVVD:SXGXH, RVPSTXX:TPTKT:SPIN:DNGRVLL:YGKIP:MIVVD:XGXL, ASAAPXX:TPTAL:SPIN:VGRKPKV:YGKIP:MIVVD:XKXS, ASASPXX:TPTDL:SPIN:IGKTPKI:YGKIP:MIVVD:XKXS, ASASPXX:TPTDL:SPIN:VGRTPKV:YGKIP:MVVVD:XKXS, KIPKAXX:VPTEL:SPIN:DENEKVV:YGKIP:DMVVE:GXGXR, GIPEPXX:VPEKM:SPIN:DENKNVV:YGKIP:NMTVE:SXAXR, SIPKAXX:VPTEL:SPIN:DEYDKVV:YGKIP:EMVVE:GXGXR, HVTKPTX:APTKL:SPIN:DDSSNVI:YGKIP:NMVVR:SXGXH, YVPKPXX:APTKL:SPIN:DDSSNVI:YGKIP:NMVVR:SXGXH, TVPKPXX:APTQL:SPIN:DDSSNVI:YGKIP:NMVVR:AXGXH, AVPKAXX:APTKL:SPIN:DSSNNVI:YGKIP:NMVVK:AXGXH, KVGKAXX:VPTKL:SPIN:DDMGVPT:YGKIP:EGMSVAE:XGXR, KASKAXX:VPTKL:SPIN:DKGVVTY:YGKIP:GMAVS:EXGXR, AAPASXX:VPARL:SPIN:DAANNVV:YGKIP:DMVVE:AXGXR, STPPTXX:VPTRL:SPIN:DSANNVV:YGKIP:DMVVE:SXGXR, HVPKPXX:APTKL:SPIN:DDSSNVI:YGKIP:NMVVR:SXGXH, RVPSTXX:APVKT:SPIN:DNGRVLL:YGKIP:MIVEE:XGXL, ASAAPXX:VPQAL:SPIN:VGRKPKV:YGKIP:MIVRS:XKXS, ASASPXX:VSQDL:SPIN:IGKTPKI:YGKIP:MIVKS:XKXS, ASASPXX:VPQDL:SPIN:VGRTPKV:YGKIP:MVVKS:XKXS, NDEGLEX:VPTEE:SPIN:RIKPHQGQH:YGKIP:FLQHN:KXEXR, NDEGLEX:VPTGQ:SPIN:RIKPHQGQH:YGKIP:LEEHS:QXEXR, SSVKXQP:SRVHH:SPIN:EYVRKKPKL:YGKIP:RLEEH:LEXAXA, RNVQXRP:TQVQL:SPIN:EIVRKKPIF:YGKIP:TLEDH:LAXKXE, KIPKAXX:VPAEL:SPIS:DENEKVV:YKQYE:DMVVE:GXGXR, GIPEPXX:VPAKM:SPIS:DENKNVV:YKQYE:NMVVE:SXAXR, SIPKAXX:VPAEL:SPIS:DEYDKVV:YKQYE:EMVVE:GXGXR, HVTKPTX:VPAKL:SPIS:DDSSNVI:YKQYE:NMVVE:SXGXH, YVPKPXX:VPAKL:SPIS:DDSSNVI:YKQYE:NMVVE:SXGXH, TVPKPXX:VPAQL:SPIS:DDSSNVI:YKQYE:NMVVE:AXGXH, AVPKAXX:VPAKL:SPIS:DSSNNVI:YKQYE:NMVVE:AXGXH, KVGKAXX:VPAKL:SPIS:DDMGVPT:YKQYE:EGMSVVE:XGXR, KASKAXX:VPAKL:SPIS:DKGVVTY:YKQYE:GMVVE:EXGXR, GSAGPXX:VPAKM:SPIS:NDKQQII:YKQYE:GMVVE:RXGXS, STPPTXX:VPARL:SPIS:DSANNVV:YKQYE:DMVVE:SXGXR, HVPKPXX:VPAKL:SPIS:DDSSNVI:YKQYE:NMVVE:SXGXH, RVPSTXX:VPAKT:SPIS:DNGRVLL:YKQYE:MIVVE:XGXL, ASAAPXX:VPAAL:SPIS:VGRKPKV:YKQYE:MIVVE:XKXS, ASASPXX:VPADL:SPIS:IGKTPKI:YKQYE:MIVVE:XKXS, ASASPXX:VPADL:SPIS:VGRTPKV:YKQYE:MVVVE:XKXS, KIPKAXX:VPTEL:SPIS:DENEKVV:YKQYE:DMVVE:GXGXR, GIPEPXX:VPEKM:SPIS:DENKNVV:YKQYE:NMTVE:SXAXR, SIPKAXX:VPTEL:SPIS:DEYDKVV:YKQYE:EMVVE:GXGXR, HVTKPTX:APTKL:SPIS:DDSSNVI:YKQYE:NMVVR:SXGXH, YVPKPXX:APTKL:SPIS:DDSSNVI:YKQYE:NMVVR:SXGXH, TVPKPXX:APTQL:SPIS:DDSSNVI:YKQYE:NMVVR:AXGXH, AVPKAXX:APTKL:SPIS:DSSNNVI:YKQYE:NMVVK:AXGXH, KVGKAXX:VPTKL:SPIS:DDMGVPT:YKQYE:EGMSVAE:XGXR, KASKAXX:VPTKL:SPIS:DKGVVTY:YKQYE:GMAVS:EXGXR, GSAGPXX:TPTKM:SPIS:NDKQQII:YKQYE:GMVVD:RXGXS, STPPTXX:VPTRL:SPIS:DSANNVV:YKQYE:DMVVE:SXGXR, HVPKPXX:APTKL:SPIS:DDSSNVI:YKQYE:NMVVR:SXGXH, RVPSTXX:APVKT:SPIS:DNGRVLL:YKQYE:MIVEE:XGXL, ASAAPXX:VPQAL:SPIS:VGRKPKV:YKQYE:MIVRS:XKXS, ASASPXX:VSQDL:SPIS:IGKTPKI:YKQYE:MIVKS:XKXS, ASASPXX:VPQDL:SPIS:VGRTPKV:YKQYE:MVVKS:XKXS, NDEGLEX:VPTEE:SPIS:RIKPHQGQH:YKQYE:FLQHN:KXEXR, NDEGLEX:VPTGQ:SPIS:RIKPHQGQH:YKQYE:LEEHS:QXEXR, SSVKXQP:SRVHH:SPIS:EYVRKKPKL:YKQYE:RLEEH:LEXAXA, RNVQXRP:TQVQL:SPIS:EIVRKKPIF:YKQYE:TLEDH:LAXKXE, GIPEPXX:VPTKM:SPIS:DENKNVV:YKQYE:NMVVE:SXAXR, HVTKPTX:VPTKL:SPIS:DDSSNVI:YKQYE:NMVVE:SXGXH, YVPKPXX:VPTKL:SPIS:DDSSNVI:YKQYE:NMVVE:SXGXH, TVPKPXX:VPTQL:SPIS:DDSSNVI:YKQYE:NMVVE:AXGXH, AVPKAXX:VPTKL:SPIS:DSSNNVI:YKQYE:NMVVE:AXGXH, KVGKAXX:VPTKL:SPIS:DDMGVPT:YKQYE:EGMSVVE:XGXR, KASKAXX:VPTKL:SPIS:DKGVVTY:YKQYE:GMVVE:EXGXR, GSAGPXX:VPTKM:SPIS:NDKQQII:YKQYE:GMVVE:RXGXS, AAPASXX:VPTRL:SPIS:DAANNVV:YKQYE:DMVVE:AXGXR, HVPKPXX:VPTKL:SPIS:DDSSNVI:YKQYE:NMVVE:SXGXH, RVPSTXX:VPTKT:SPIS:DNGRVLL:YKQYE:MIVVE:XGXL, ASAAPXX:VPTAL:SPIS:VGRKPKV:YKQYE:MIVVE:XKXS, ASASPXX:VPTDL:SPIS:IGKTPKI:YKQYE:MIVVE:XKXS, ASASPXX:VPTDL:SPIS:VGRTPKV:YKQYE:MVVVE:XKXS, AAPASXX:VPARL:SPIS:DAANNVV:YKQYE:DMVVE:AXGXR, KIPKAXX:APVEL:KPLS:DENEKVV:DHHKD:DMVEE:GXGXR, GIPEPXX:APVKM:KPLS:DENKNVV:DHHKD:NMVEE:SXAXR, SIPKAXX:APVEL:KPLS:DEYDKVV:DHHKD:EMVEE:GXGXR, HVTKPTX:APVKL:KPLS:DDSSNVI:DHHKD:NMVEE:SXGXH, YVPKPXX:APVKL:KPLS:DDSSNVI:DHHKD:NMVEE:SXGXH, TVPKPXX:APVQL:KPLS:DDSSNVI:DHHKD:NMVEE:AXGXH, AVPKAXX:APVKL:KPLS:DSSNNVI:DHHKD:NMVEE:AXGXH, KVGKAXX:APVKL:KPLS:DDMGVPT:DHHKD:EGMSVEE:XGXR, KASKAXX:APVKL:KPLS:DKGVVTY:DHHKD:GMVEE:EXGXR, GSAGPXX:APVKM:KPLS:NDKQQII:DHHKD:GMVEE:RXGXS, AAPASXX:APVRL:KPLS:DAANNVV:DHHKD:DMVEE:AXGXR, STPPTXX:APVRL:KPLS:DSANNVV:DHHKD:DMVEE:SXGXR, HVPKPXX:APVKL:KPLS:DDSSNVI:DHHKD:NMVEE:SXGXH, ASAAPXX:APVAL:KPLS:VGRKPKV:DHHKD:MIVEE:XKXS, ASASPXX:APVDL:KPLS:IGKTPKI:DHHKD:MIVEE:XKXS, ASASPXX:APVDL:KPLS:VGRTPKV:DHHKD:MVVEE:XKXS, KIPKAXX:VPTEL:KPLS:DENEKVV:DHHKD:DMVVE:GXGXR, GIPEPXX:VPEKM:KPLS:DENKNVV:DHHKD:NMTVE:SXAXR, SIPKAXX:VPTEL:KPLS:DEYDKVV:DHHKD:EMVVE:GXGXR, HVTKPTX:APTKL:KPLS:DDSSNVI:DHHKD:NMVVR:SXGXH, YVPKPXX:APTKL:KPLS:DDSSNVI:DHHKD:NMVVR:SXGXH, TVPKPXX:APTQL:KPLS:DDSSNVI:DHHKD:NMVVR:AXGXH, AVPKAXX:APTKL:KPLS:DSSNNVI:DHHKD:NMVVK:AXGXH, KVGKAXX:VPTKL:KPLS:DDMGVPT:DHHKD:EGMSVAE:XGXR, KASKAXX:VPTKL:KPLS:DKGVVTY:DHHKD:GMAVS:EXGXR, GSAGPXX:TPTKM:KPLS:NDKQQII:DHHKD:GMVVD:RXGXS, AAPASXX:VPARL:KPLS:DAANNVV:DHHKD:DMVVE:AXGXR, STPPTXX:VPTRL:KPLS:DSANNVV:DHHKD:DMVVE:SXGXR, HVPKPXX:APTKL:KPLS:DDSSNVI:DHHKD:NMVVR:SXGXH, ASAAPXX:VPQAL:KPLS:VGRKPKV:DHHKD:MIVRS:XKXS, ASASPXX:VSQDL:KPLS:IGKTPKI:DHHKD:MIVKS:XKXS, ASASPXX:VPQDL:KPLS:VGRTPKV:DHHKD:MVVKS:XKXS, NDEGLEX:VPTEE:KPLS:RIKPHQGQH:DHHKD:FLQHN:KXEXR, NDEGLEX:VPTGQ:KPLS:RIKPHQGQH:DHHKD:LEEHS:QXEXR, SSVKXQP:SRVHH:KPLS:EYVRKKPKL:DHHKD:RLEEH:LEXAXA, RNVQXRP:TQVQL:KPLS:EIVRKKPIF:DHHKD:TLEDH:LAXKXE, KIPKAXX:VPQEL:EPLP:DENEKVV:EQLSN:DMVRS:GXGXR, GIPEPXX:VPQKM:EPLP:DENKNVV:EQLSN:NMVRS:SXAXR, SIPKAXX:VPQEL:EPLP:DEYDKVV:EQLSN:EMVRS:GXGXR, HVTKPTX:VPQKL:EPLP:DDSSNVI:EQLSN:NMVRS:SXGXH, YVPKPXX:VPQKL:EPLP:DDSSNVI:EQLSN:NMVRS:SXGXH, TVPKPXX:VPQQL:EPLP:DDSSNVI:EQLSN:NMVRS:AXGXH, AVPKAXX:VPQKL:EPLP:DSSNNVI:EQLSN:NMVRS:AXGXH, KVGKAXX:VPQKL:EPLP:DDMGVPT:EQLSN:EGMSVRS:XGXR, KASKAXX:VPQKL:EPLP:DKGVVTY:EQLSN:GMVRS:EXGXR, GSAGPXX:VPQKM:EPLP:NDKQQII:EQLSN:GMVRS:RXGXS, AAPASXX:VPQRL:EPLP:DAANNVV:EQLSN:DMVRS:AXGXR, STPPTXX:VPQRL:EPLP:DSANNVV:EQLSN:DMVRS:SXGXR, HVPKPXX:VPQKL:EPLP:DDSSNVI:EQLSN:NMVRS:SXGXH, RVPSTXX:VPQKT:EPLP:DNGRVLL:EQLSN:MIVRS:XGXL, ASASPXX:VPQDL:EPLP:IGKTPKI:EQLSN:MIVRS:XKXS, ASASPXX:VPQDL:EPLP:VGRTPKV:EQLSN:MVVRS:XKXS, KIPKAXX:VPTEL:EPLP:DENEKVV:EQLSN:DMVVE:GXGXR, GIPEPXX:VPEKM:EPLP:DENKNVV:EQLSN:NMTVE:SXAXR, SIPKAXX:VPTEL:EPLP:DEYDKVV:EQLSN:EMVVE:GXGXR, HVTKPTX:APTKL:EPLP:DDSSNVI:EQLSN:NMVVR:SXGXH, YVPKPXX:APTKL:EPLP:DDSSNVI:EQLSN:NMVVR:SXGXH, TVPKPXX:APTQL:EPLP:DDSSNVI:EQLSN:NMVVR:AXGXH, AVPKAXX:APTKL:EPLP:DSSNNVI:EQLSN:NMVVK:AXGXH, KVGKAXX:VPTKL:EPLP:DDMGVPT:EQLSN:EGMSVAE:XGXR, KASKAXX:VPTKL:EPLP:DKGVVTY:EQLSN:GMAVS:EXGXR, GSAGPXX:TPTKM:EPLP:NDKQQII:EQLSN:GMVVD:RXGXS, AAPASXX:VPARL:EPLP:DAANNVV:EQLSN:DMVVE:AXGXR, STPPTXX:VPTRL:EPLP:DSANNVV:EQLSN:DMVVE:SXGXR, HVPKPXX:APTKL:EPLP:DDSSNVI:EQLSN:NMVVR:SXGXH, RVPSTXX:APVKT:EPLP:DNGRVLL:EQLSN:MIVEE:XGXL, ASASPXX:VSQDL:EPLP:IGKTPKI:EQLSN:MIVKS:XKXS, ASASPXX:VPQDL:EPLP:VGRTPKV:EQLSN:MVVKS:XKXS, NDEGLEX:VPTEE:EPLP:RIKPHQGQH:EQLSN:FLQHN:KXEXR, NDEGLEX:VPTGQ:EPLP:RIKPHQGQH:EQLSN:LEEHS:QXEXR, SSVKXQP:SRVHH:EPLP:EYVRKKPKL:EQLSN:RLEEH:LEXAXA, RNVQXRP:TQVQL:EPLP:EIVRKKPIF:EQLSN:TLEDH:LAXKXE, KIPKAXX:VSQEL:EPLT:DENEKVV:EQLSN:DMVKS:GXGXR, GIPEPXX:VSQKM:EPLT:DENKNVV:EQLSN:NMVKS:SXAXR, SIPKAXX:VSQEL:EPLT:DEYDKVV:EQLSN:EMVKS:GXGXR, HVTKPTX:VSQKL:EPLT:DDSSNVI:EQLSN:NMVKS:SXGXH, YVPKPXX:VSQKL:EPLT:DDSSNVI:EQLSN:NMVKS:SXGXH, TVPKPXX:VSQQL:EPLT:DDSSNVI:EQLSN:NMVKS:AXGXH, AVPKAXX:VSQKL:EPLT:DSSNNVI:EQLSN:NMVKS:AXGXH, KVGKAXX:VSQKL:EPLT:DDMGVPT:EQLSN:EGMSVKS:XGXR, KASKAXX:VSQKL:EPLT:DKGVVTY:EQLSN:GMVKS:EXGXR, GSAGPXX:VSQKM:EPLT:NDKQQII:EQLSN:GMVKS:RXGXS, AAPASXX:VSQRL:EPLT:DAANNVV:EQLSN:DMVKS:AXGXR, STPPTXX:VSQRL:EPLT:DSANNVV:EQLSN:DMVKS:SXGXR, HVPKPXX:VSQKL:EPLT:DDSSNVI:EQLSN:NMVKS:SXGXH, RVPSTXX:VSQKT:EPLT:DNGRVLL:EQLSN:MIVKS:XGXL, ASAAPXX:VSQAL:EPLT:VGRKPKV:EQLSN:MIVKS:XKXS, ASASPXX:VSQDL:EPLT:VGRTPKV:EQLSN:MVVKS:XKXS, KIPKAXX:VPTEL:EPLT:DENEKVV:EQLSN:DMVVE:GXGXR, GIPEPXX:VPEKM:EPLT:DENKNVV:EQLSN:NMTVE:SXAXR, SIPKAXX:VPTEL:EPLT:DEYDKVV:EQLSN:EMVVE:GXGXR, HVTKPTX:APTKL:EPLT:DDSSNVI:EQLSN:NMVVR:SXGXH, YVPKPXX:APTKL:EPLT:DDSSNVI:EQLSN:NMVVR:SXGXH, TVPKPXX:APTQL:EPLT:DDSSNVI:EQLSN:NMVVR:AXGXH, AVPKAXX:APTKL:EPLT:DSSNNVI:EQLSN:NMVVK:AXGXH, KVGKAXX:VPTKL:EPLT:DDMGVPT:EQLSN:EGMSVAE:XGXR, KASKAXX:VPTKL:EPLT:DKGVVTY:EQLSN:GMAVS:EXGXR, GSAGPXX:TPTKM:EPLT:NDKQQII:EQLSN:GMVVD:RXGXS, AAPASXX:VPARL:EPLT:DAANNVV:EQLSN:DMVVE:AXGXR, STPPTXX:VPTRL:EPLT:DSANNVV:EQLSN:DMVVE:SXGXR, HVPKPXX:APTKL:EPLT:DDSSNVI:EQLSN:NMVVR:SXGXH, RVPSTXX:APVKT:EPLT:DNGRVLL:EQLSN:MIVEE:XGXL, ASAAPXX:VPQAL:EPLT:VGRKPKV:EQLSN:MIVRS:XKXS, NDEGLEX:VPTEE:EPLT:RIKPHQGQH:EQLSN:FLQHN:KXEXR, NDEGLEX:VPTGQ:EPLT:RIKPHQGQH:EQLSN:LEEHS:QXEXR, SSVKXQP:SRVHH:EPLT:EYVRKKPKL:EQLSN:RLEEH:LEXAXA, RNVQXRP:TQVQL:EPLT:EIVRKKPIF:EQLSN:TLEDH:LAXKXE, KIPKAXX:VPQEL:EPLT:DENEKVV:EQLSN:DMVKS:GXGXR, GIPEPXX:VPQKM:EPLT:DENKNVV:EQLSN:NMVKS:SXAXR, SIPKAXX:VPQEL:EPLT:DEYDKVV:EQLSN:EMVKS:GXGXR, HVTKPTX:VPQKL:EPLT:DDSSNVI:EQLSN:NMVKS:SXGXH, YVPKPXX:VPQKL:EPLT:DDSSNVI:EQLSN:NMVKS:SXGXH, TVPKPXX:VPQQL:EPLT:DDSSNVI:EQLSN:NMVKS:AXGXH, AVPKAXX:VPQKL:EPLT:DSSNNVI:EQLSN:NMVKS:AXGXH, KVGKAXX:VPQKL:EPLT:DDMGVPT:EQLSN:EGMSVKS:XGXR, KASKAXX:VPQKL:EPLT:DKGVVTY:EQLSN:GMVKS:EXGXR, GSAGPXX:VPQKM:EPLT:NDKQQII:EQLSN:GMVKS:RXGXS, AAPASXX:VPQRL:EPLT:DAANNVV:EQLSN:DMVKS:AXGXR, STPPTXX:VPQRL:EPLT:DSANNVV:EQLSN:DMVKS:SXGXR, HVPKPXX:VPQKL:EPLT:DDSSNVI:EQLSN:NMVKS:SXGXH, RVPSTXX:VPQKT:EPLT:DNGRVLL:EQLSN:MIVKS:XGXL, ASAAPXX:VPQAL:EPLT:VGRKPKV:EQLSN:MIVKS:XKXS, ASASPXX:VPQDL:EPLT:IGKTPKI:EQLSN:MIVKS:XKXS, NDEGLEX:VPTGQ:SNIT:RIKPHQGQH:IGEMS:LEQHN:QXEXR, KIPKAXX:VPTEL:SNIT:DENEKVV:IGEMS:DMVVE:GXGXR, GIPEPXX:VPEKM:SNIT:DENKNVV:IGEMS:NMTVE:SXAXR, SIPKAXX:VPTEL:SNIT:DEYDKVV:IGEMS:EMVVE:GXGXR, HVTKPTX:APTKL:SNIT:DDSSNVI:IGEMS:NMVVR:SXGXH, YVPKPXX:APTKL:SNIT:DDSSNVI:IGEMS:NMVVR:SXGXH, TVPKPXX:APTQL:SNIT:DDSSNVI:IGEMS:NMVVR:AXGXH, AVPKAXX:APTKL:SNIT:DSSNNVI:IGEMS:NMVVK:AXGXH, KVGKAXX:VPTKL:SNIT:DDMGVPT:IGEMS:EGMSVAE:XGXR, KASKAXX:VPTKL:SNIT:DKGVVTY:IGEMS:GMAVS:EXGXR, GSAGPXX:TPTKM:SNIT:NDKQQII:IGEMS:GMVVD:RXGXS, AAPASXX:VPARL:SNIT:DAANNVV:IGEMS:DMVVE:AXGXR, STPPTXX:VPTRL:SNIT:DSANNVV:IGEMS:DMVVE:SXGXR, HVPKPXX:APTKL:SNIT:DDSSNVI:IGEMS:NMVVR:SXGXH, RVPSTXX:APVKT:SNIT:DNGRVLL:IGEMS:MIVEE:XGXL, ASAAPXX:VPQAL:SNIT:VGRKPKV:IGEMS:MIVRS:XKXS, ASASPXX:VSQDL:SNIT:IGKTPKI:IGEMS:MIVKS:XKXS, ASASPXX:VPQDL:SNIT:VGRTPKV:IGEMS:MVVKS:XKXS, NDEGLEX:VPTGQ:SNIT:RIKPHQGQH:IGEMS:LEEHS:QXEXR, SSVKXQP:SRVHH:SNIT:EYVRKKPKL:IGEMS:RLEEH:LEXAXA, RNVQXRP:TQVQL:SNIT:EIVRKKPIF:IGEMS:TLEDH:LAXKXE, NDEGLEX:VPTEE:SNIT:RIKPHQGQH:LGEMS:FLEHS:KXEXR, KIPKAXX:VPTEL:SNIT:DENEKVV:LGEMS:DMVVE:GXGXR, GIPEPXX:VPEKM:SNIT:DENKNVV:LGEMS:NMTVE:SXAXR, SIPKAXX:VPTEL:SNIT:DEYDKVV:LGEMS:EMVVE:GXGXR, HVTKPTX:APTKL:SNIT:DDSSNVI:LGEMS:NMVVR:SXGXH, YVPKPXX:APTKL:SNIT:DDSSNVI:LGEMS:NMVVR:SXGXH, TVPKPXX:APTQL:SNIT:DDSSNVI:LGEMS:NMVVR:AXGXH, AVPKAXX:APTKL:SNIT:DSSNNVI:LGEMS:NMVVK:AXGXH, KVGKAXX:VPTKL:SNIT:DDMGVPT:LGEMS:EGMSVAE:XGXR, KASKAXX:VPTKL:SNIT:DKGVVTY:LGEMS:GMAVS:EXGXR, GSAGPXX:TPTKM:SNIT:NDKQQII:LGEMS:GMVVD:RXGXS, AAPASXX:VPARL:SNIT:DAANNVV:LGEMS:DMVVE:AXGXR, STPPTXX:VPTRL:SNIT:DSANNVV:LGEMS:DMVVE:SXGXR, HVPKPXX:APTKL:SNIT:DDSSNVI:LGEMS:NMVVR:SXGXH, RVPSTXX:APVKT:SNIT:DNGRVLL:LGEMS:MIVEE:XGXL, ASAAPXX:VPQAL:SNIT:VGRKPKV:LGEMS:MIVRS:XKXS, ASASPXX:VSQDL:SNIT:IGKTPKI:LGEMS:MIVKS:XKXS, ASASPXX:VPQDL:SNIT:VGRTPKV:LGEMS:MVVKS:XKXS, NDEGLEX:VPTEE:SNIT:RIKPHQGQH:LGEMS:FLQHN:KXEXR, SSVKXQP:SRVHH:SNIT:EYVRKKPKL:LGEMS:RLEEH:LEXAXA, RNVQXRP:TQVQL:SNIT:EIVRKKPIF:LGEMS:TLEDH:LAXKXE, RNVQXRP:SRVQL:RSVK:EIVRKKPIF:KEVQV:TLEEH:LAXKXE, KIPKAXX:VPTEL:RSVK:DENEKVV:KEVQV:DMVVE:GXGXR, GIPEPXX:VPEKM:RSVK:DENKNVV:KEVQV:NMTVE:SXAXR, SIPKAXX:VPTEL:RSVK:DEYDKVV:KEVQV:EMVVE:GXGXR, HVTKPTX:APTKL:RSVK:DDSSNVI:KEVQV:NMVVR:SXGXH, YVPKPXX:APTKL:RSVK:DDSSNVI:KEVQV:NMVVR:SXGXH, TVPKPXX:APTQL:RSVK:DDSSNVI:KEVQV:NMVVR:AXGXH, AVPKAXX:APTKL:RSVK:DSSNNVI:KEVQV:NMVVK:AXGXH, KVGKAXX:VPTKL:RSVK:DDMGVPT:KEVQV:EGMSVAE:XGXR, KASKAXX:VPTKL:RSVK:DKGVVTY:KEVQV:GMAVS:EXGXR, GSAGPXX:TPTKM:RSVK:NDKQQII:KEVQV:GMVVD:RXGXS, AAPASXX:VPARL:RSVK:DAANNVV:KEVQV:DMVVE:AXGXR, STPPTXX:VPTRL:RSVK:DSANNVV:KEVQV:DMVVE:SXGXR, HVPKPXX:APTKL:RSVK:DDSSNVI:KEVQV:NMVVR:SXGXH, RVPSTXX:APVKT:RSVK:DNGRVLL:KEVQV:MIVEE:XGXL, ASAAPXX:VPQAL:RSVK:VGRKPKV:KEVQV:MIVRS:XKXS, ASASPXX:VSQDL:RSVK:IGKTPKI:KEVQV:MIVKS:XKXS, ASASPXX:VPQDL:RSVK:VGRTPKV:KEVQV:MVVKS:XKXS, NDEGLEX:VPTEE:RSVK:RIKPHQGQH:KEVQV:FLQHN:KXEXR, NDEGLEX:VPTGQ:RSVK:RIKPHQGQH:KEVQV:LEEHS:QXEXR, RNVQXRP:TQVQL:RSVK:EIVRKKPIF:KEVQV:TLEDH:LAXKXE, SSVKXQP:TQVHH:RPVQ:EYVRKKPKL:KKATV:RLEDH:LEXAXA, KIPKAXX:VPTEL:RPVQ:DENEKVV:KKATV:DMVVE:GXGXR, GIPEPXX:VPEKM:RPVQ:DENKNVV:KKATV:NMTVE:SXAXR, SIPKAXX:VPTEL:RPVQ:DEYDKVV:KKATV:EMVVE:GXGXR, HVTKPTX:APTKL:RPVQ:DDSSNVI:KKATV:NMVVR:SXGXH, YVPKPXX:APTKL:RPVQ:DDSSNVI:KKATV:NMVVR:SXGXH, TVPKPXX:APTQL:RPVQ:DDSSNVI:KKATV:NMVVR:AXGXH, AVPKAXX:APTKL:RPVQ:DSSNNVI:KKATV:NMVVK:AXGXH, KVGKAXX:VPTKL:RPVQ:DDMGVPT:KKATV:EGMSVAE:XGXR, KASKAXX:VPTKL:RPVQ:DKGVVTY:KKATV:GMAVS:EXGXR, GSAGPXX:TPTKM:RPVQ:NDKQQII:KKATV:GMVVD:RXGXS, AAPASXX:VPARL:RPVQ:DAANNVV:KKATV:DMVVE:AXGXR, STPPTXX:VPTRL:RPVQ:DSANNVV:KKATV:DMVVE:SXGXR, HVPKPXX:APTKL:RPVQ:DDSSNVI:KKATV:NMVVR:SXGXH, RVPSTXX:APVKT:RPVQ:DNGRVLL:KKATV:MIVEE:XGXL, ASAAPXX:VPQAL:RPVQ:VGRKPKV:KKATV:MIVRS:XKXS, ASASPXX:VSQDL:RPVQ:IGKTPKI:KKATV:MIVKS:XKXS, ASASPXX:VPQDL:RPVQ:VGRTPKV:KKATV:MVVKS:XKXS, NDEGLEX:VPTEE:RPVQ:RIKPHQGQH:KKATV:FLQHN:KXEXR, NDEGLEX:VPTGQ:RPVQ:RIKPHQGQH:KKATV:LEEHS:QXEXR and SSVKXQP:SRVHH:RPVQ:EYVRKKPKL:KKATV:RLEEH:LEXAXA.

[0402] In particular, in certain embodiments, the heptuplet PEP7:PEP5:PEP12:LINKER:PEP2:PEP6:PEP8 is selected from the group consisting of GIPEPXX:VPTKM:SAIS-AA¹⁷-LYL:DENKNVV:LKNYQ:NMVVE:SXAXR, SIPKAXX:VPTEL:SAIS-AA¹⁷-LYL:DEYDKVV:LKNYQ:EMVVE:GXGXR, HVTKPTX:VPTKL:SAIS-AA¹⁷-LYL:DDSSNVI:LKNYQ:NMVVE:SXGXH, YVPKPXX:VPTKL:SAIS-AA¹⁷-LYL:DDSSNVI:LKNYQ:NMVVE:SXGXH, TVPKPXX:VPTQL:SAIS-AA¹⁷-LYL:DDSSNVI:LKNYQ:NMVVE:AXGXH, AVPKAXX:VPTKL:SAIS-AA¹⁷-LYL:DSSNNVI:LKNYQ:NMVVE:AXGXH, KVGKAXX:VPTKL:SAIS-AA¹⁷-LYL:DDMGVPT:LKNYQ:EGMSVVE:XGXR, KASKAXX:VPTKL:SAIS-AA¹⁷-LYL:DKGVVTY:LKNYQ:GMVVE:EXGXR, GSAGPXX:VPTKM:SAIS-AA¹⁷-LYL:NDKQQII:LKNYQ:GMVVE:RXGXS, AAPASXX:VPTRL:SAIS-AA¹⁷-LYL:DAANNVV:LKNYQ:DMVVE:AXGXR, STPPTXX:VPTRL:SAIS-AA¹⁷-LYL:DSANNVV:LKNYQ:DMVVE:SXGXR, HVPKPXX:VPTKL:SAIS-AA¹⁷-LYL:DDSSNVI:LKNYQ:NMVVE:SXGXH, RVPSTXX:VPTKT:SAIS-AA¹⁷-LYL:DNGRVLL:LKNYQ:MIVVE:XGXL, ASAAPXX:VPTAL:SAIS-AA¹⁷-LYL:VGRKPKV:LKNYQ:MIVVE:XKXS, ASASPXX:VPTDL:SAIS-AA¹⁷-LYL:IGKTPKI:LKNYQ:MIVVE:XKXS, ASASPXX:VPTDL:SAIS-AA¹⁷-LYL:VGRTPKV:LKNYQ:MVVVE:XKXS, NDEGLEX:VPTEE:SAIS-AA¹⁷-LYL:RIKPHQGQH:LKNYQ:FLVVE:KXEXR, NDEGLEX:VPTGQ:SAIS-AA¹⁷-LYL:RIKPHQGQH:LKNYQ:LEVVE:QXEXR, SSVKXQP:VPTHH:SAIS-AA¹⁷-LYL:EYVRKKPKL:LKNYQ:RLVVE:LEXAXA, RNVQXRP:VPTQL:SAIS-AA¹⁷-LYL:EIVRKKPIF:LKNYQ:TLVVE:LAXKXE, GIPEPXX:VPEKM:SAIS-AA¹⁷-LYL:DENKNVV:LKNYQ:NMTVE:SXAXR, HVTKPTX:APTKL:SAIS-AA¹⁷-LYL:DDSSNVI:LKNYQ:NMVVR:SXGXH, YVPKPXX:APTKL:SAIS-AA¹⁷-LYL:DDSSNVI:LKNYQ:NMVVR:SXGXH, TVPKPXX:APTQL:SAIS-AA¹⁷-LYL:DDSSNVI:LKNYQ:NMVVR:AXGXH, AVPKAXX:APTKL:SAIS-AA¹⁷-LYL:DSSNNVI:LKNYQ:NMVVK:AXGXH, KVGKAXX:VPTKL:SAIS-AA¹⁷-LYL:DDMGVPT:LKNYQ:EGMSVAE:XGXR, KASKAXX:VPTKL:SAIS-AA¹⁷-LYL:DKGVVTY:LKNYQ:GMAVS:EXGXR, GSAGPXX:TPTKM:SAIS-AA¹⁷-LYL:NDKQQII:LKNYQ:GMVVD:RXGXS, AAPASXX:VPARL:SAIS-AA¹⁷-LYL:DAANNVV:LKNYQ:DMVVE:AXGXR, HVPKPXX:APTKL:SAIS-AA¹⁷-LYL:DDSSNVI:LKNYQ:NMVVR:SXGXH, RVPSTXX:APVKT:SAIS-AA¹⁷-LYL:DNGRVLL:LKNYQ:MIVEE:XGXL, ASAAPXX:VPQAL:SAIS-AA¹⁷-LYL:VGRKPKV:LKNYQ:MIVRS:XKXS, ASASPXX:VSQDL:SAIS-AA¹⁷-LYL:IGKTPKI:LKNYQ:MIVKS:XKXS, ASASPXX:VPQDL:SAIS-AA¹⁷-LYL:VGRTPKV:LKNYQ:MVVKS:XKXS, NDEGLEX:VPTEE:SAIS-AA¹⁷-LYL:RIKPHQGQH:LKNYQ:FLQHN:KXEXR, NDEGLEX:VPTGQ:SAIS-AA¹⁷-LYL:RIKPHQGQH:LKNYQ:LEEHS:QXEXR, SSVKXQP:SRVHH:SAIS-AA¹⁷-LYL:EYVRKKPKL:LKNYQ:RLEEH:LEXAXA, RNVQXRP:TQVQL:SAIS-AA¹⁷-LYL:EIVRKKPIF:LKNYQ:TLEDH:LAXKXE, KIPKAXX:VPEEL:SSLS-AA¹⁷-LFF:DENEKVV:LKVYP:DMTVE:GXGXR, SIPKAXX:VPEEL:SSLS-AA¹⁷-LFF:DEYDKVV:LKVYP:EMTVE:GXGXR, HVTKPTX:VPEKL:SSLS-AA¹⁷-LFF:DDSSNVI:LKVYP:NMTVE:SXGXH, YVPKPXX:VPEKL:SSLS-AA¹⁷-LFF:DDSSNVI:LKVYP:NMTVE:SXGXH, TVPKPXX:VPEQL:SSLS-AA¹⁷-LFF:DDSSNVI:LKVYP:NMTVE:AXGXH, AVPKAXX:VPEKL:SSLS-AA¹⁷-LFF:DSSNNVI:LKVYP:NMTVE:AXGXH, KVGKAXX:VPEKL:SSLS-AA¹⁷-LFF:DDMGVPT:LKVYP:EGMSTVE:XGXR, KASKAXX:VPEKL:SSLS-AA¹⁷-LFF:DKGVVTY:LKVYP:GMTVE:EXGXR, GSAGPXX:VPEKM:SSLS-AA¹⁷-LFF:NDKQQII:LKVYP:GMTVE:RXGXS, AAPASXX:VPERL:SSLS-AA¹⁷-LFF:DAANNVV:LKVYP:DMTVE:AXGXR, STPPTXX:VPERL:SSLS-AA¹⁷-LFF:DSANNVV:LKVYP:DMTVE:SXGXR, HVPKPXX:VPEKL:SSLS-AA¹⁷-LFF:DDSSNVI:LKVYP:NMTVE:SXGXH, RVPSTXX:VPEKT:SSLS-AA¹⁷-LFF:DNGRVLL:LKVYP:MITVE:XGXL, ASAAPXX:VPEAL:SSLS-AA¹⁷-LFF:VGRKPKV:LKVYP:MITVE:XKXS, ASASPXX:VPEDL:SSLS-AA¹⁷-LFF:IGKTPKI:LKVYP:MITVE:XKXS, ASASPXX:VPEDL:SSLS-AA¹⁷-LFF:VGRTPKV:LKVYP:MVTVE:XKXS, NDEGLEX:VPEEE:SSLS-AA¹⁷-LFF:RIKPHQGQH:LKVYP:FLTVE:KXEXR, NDEGLEX:VPEGQ:SSLS-AA¹⁷-LFF:RIKPHQGQH:LKVYP:LETVE:QXEXR, SSVKXQP:VPEHH:SSLS-AA¹⁷-LFF:EYVRKKPKL:LKVYP:RLTVE:LEXAXA, RNVQXRP:VPEQL:SSLS-AA¹⁷-LFF:EIVRKKPIF:LKVYP:TLTVE:LAXKXE, KIPKAXX:VPTEL:SSLS-AA¹⁷-LFF:DENEKVV:LKVYP:DMVVE:GXGXR, SIPKAXX:VPTEL:SSLS-AA¹⁷-LFF:DEYDKVV:LKVYP:EMVVE:GXGXR, HVTKPTX:APTKL:SSLS-AA¹⁷-LFF:DDSSNVI:LKVYP:NMVVR:SXGXH, YVPKPXX:APTKL:SSLS-AA¹⁷-LFF:DDSSNVI:LKVYP:NMVVR:SXGXH, TVPKPXX:APTQL:SSLS-AA¹⁷-LFF:DDSSNVI:LKVYP:NMVVR:AXGXH, AVPKAXX:APTKL:SSLS-AA¹⁷-LFF:DSSNNVI:LKVYP:NMVVK:AXGXH, KVGKAXX:VPTKL:SSLS-AA¹⁷-LFF:DDMGVPT:LKVYP:EGMSVAE:XGXR, KASKAXX:VPTKL:SSLS-AA¹⁷-LFF:DKGVVTY:LKVYP:GMAVS:EXGXR, GSAGPXX:TPTKM:SSLS-AA¹⁷-LFF:NDKQQII:LKVYP:GMVVD:RXGXS, AAPASXX:VPARL:SSLS-AA¹⁷-LFF:DAANNVV:LKVYP:DMVVE:AXGXR, STPPTXX:VPTRL:SSLS-AA¹⁷-LFF:DSANNVV:LKVYP:DMVVE:SXGXR, HVPKPXX:APTKL:SSLS-AA¹⁷-LFF:DDSSNVI:LKVYP:NMVVR:SXGXH, RVPSTXX:APVKT:SSLS-AA¹⁷-LFF:DNGRVLL:LKVYP:MIVEE:XGXL, ASAAPXX:VPQAL:SSLS-AA¹⁷-LFF:VGRKPKV:LKVYP:MIVRS:XKXS, ASASPXX:VSQDL:SSLS-AA¹⁷-LFF:IGKTPKI:LKVYP:MIVKS:XKXS, ASASPXX:VPQDL:SSLS-AA¹⁷-LFF:VGRTPKV:LKVYP:MVVKS:XKXS, NDEGLEX:VPTEE:SSLS-AA¹⁷-LFF:RIKPHQGQH:LKVYP:FLQHN:KXEXR, NDEGLEX:VPTGQ:SSLS-AA¹⁷-LFF:RIKPHQGQH:LKVYP:LEEHS:QXEXR, SSVKXQP:SRVHH:SSLS-AA¹⁷-LFF:EYVRKKPKL:LKVYP:RLEEH:LEXAXA, RNVQXRP:TQVQL:SSLS-AA¹⁷-LFF:EIVRKKPIF:LKVYP:TLEDH:LAXKXE, KIPKAXX:VPTEL:SAIS-AA¹⁷-LYL:DENEKVV:LKNYQ:DMVVE:GXGXR, KIPKAXX:APTEL:NAIS-AA¹⁷-LYF:DENEKVV:LKKYR:DMVVR:GXGXR, GIPEPXX:APTKM:NAIS-AA¹⁷-LYF:DENKNVV:LKKYR:NMVVR:SXAXR, SIPKAXX:APTEL:NAIS-AA¹⁷-LYF:DEYDKVV:LKKYR:EMVVR:GXGXR, YVPKPXX:APTKL:NAIS-AA¹⁷-LYF:DDSSNVI:LKKYR:NMVVR:SXGXH, TVPKPXX:APTQL:NAIS-AA¹⁷-LYF:DDSSNVI:LKKYR:NMVVR:AXGXH, AVPKAXX:APTKL:NAIS-AA¹⁷-LYF:DSSNNVI:LKKYR:NMVVR:AXGXH, KVGKAXX:APTKL:NAIS-AA¹⁷-LYF:DDMGVPT:LKKYR:EGMSVVR:XGXR, KASKAXX:APTKL:NAIS-AA¹⁷-LYF:DKGVVTY:LKKYR:GMVVR:EXGXR, GSAGPXX:APTKM:NAIS-AA¹⁷-LYF:NDKQQII:LKKYR:GMVVR:RXGXS, AAPASXX:APTRL:NAIS-AA¹⁷-LYF:DAANNVV:LKKYR:DMVVR:AXGXR, STPPTXX:APTRL:NAIS-AA¹⁷-LYF:DSANNVV:LKKYR:DMVVR:SXGXR, HVPKPXX:APTKL:NAIS-AA¹⁷-LYF:DDSSNVI:LKKYR:NMVVR:SXGXH, RVPSTXX:APTKT:NAIS-AA¹⁷-LYF:DNGRVLL:LKKYR:MIVVR:XGXL, ASAAPXX:APTAL:NAIS-AA¹⁷-LYF:VGRKPKV:LKKYR:MIVVR:XKXS, ASASPXX:APTDL:NAIS-AA¹⁷-LYF:IGKTPKI:LKKYR:MIVVR:XKXS, ASASPXX:APTDL:NAIS-AA¹⁷-LYF:VGRTPKV:LKKYR:MVVVR:XKXS, NDEGLEX:APTEE:NAIS-AA¹⁷-LYF:RIKPHQGQH:LKKYR:FLVVR:KXEXR, NDEGLEX:APTGQ:NAIS-AA¹⁷-LYF:RIKPHQGQH:LKKYR:LEVVR:QXEXR, SSVKXQP:APTHH:NAIS-AA¹⁷-LYF:EYVRKKPKL:LKKYR:RLVVR:LEXAXA, RNVQXRP:APTQL:NAIS-AA¹⁷-LYF:EIVRKKPIF:LKKYR:TLVVR:LAXKXE, KIPKAXX:VPTEL:NAIS-AA¹⁷-LYF:DENEKVV:LKKYR:DMVVE:GXGXR, GIPEPXX:VPEKM:NAIS-AA¹⁷-LYF:DENKNVV:LKKYR:NMTVE:SXAXR, SIPKAXX:VPTEL:NAIS-AA¹⁷-LYF:DEYDKVV:LKKYR:EMVVE:GXGXR, AVPKAXX:APTKL:NAIS-AA¹⁷-LYF:DSSNNVI:LKKYR:NMVVK:AXGXH, KVGKAXX:VPTKL:NAIS-AA¹⁷-LYF:DDMGVPT:LKKYR:EGMSVAE:XGXR, KASKAXX:VPTKL:NAIS-AA¹⁷-LYF:DKGVVTY:LKKYR:GMAVS:EXGXR, GSAGPXX:TPTKM:NAIS-AA¹⁷-LYF:NDKQQII:LKKYR:GMVVD:RXGXS, AAPASXX:VPARL:NAIS-AA¹⁷-LYF:DAANNVV:LKKYR:DMVVE:AXGXR, STPPTXX:VPTRL:NAIS-AA¹⁷-LYF:DSANNVV:LKKYR:DMVVE:SXGXR, RVPSTXX:APVKT:NAIS-AA¹⁷-LYF:DNGRVLL:LKKYR:MIVEE:XGXL, ASAAPXX:VPQAL:NAIS-AA¹⁷-LYF:VGRKPKV:LKKYR:MIVRS:XKXS, ASASPXX:VSQDL:NAIS-AA¹⁷-LYF:IGKTPKI:LKKYR:MIVKS:XKXS, ASASPXX:VPQDL:NAIS-AA¹⁷-LYF:VGRTPKV:LKKYR:MVVKS:XKXS, NDEGLEX:VPTEE:NAIS-AA¹⁷-LYF:RIKPHQGQH:LKKYR:FLQHN:KXEXR, NDEGLEX:VPTGQ:NAIS-AA¹⁷-LYF:RIKPHQGQH:LKKYR:LEEHS:QXEXR, SSVKXQP:SRVHH:NAIS-AA¹⁷-LYF:EYVRKKPKL:LKKYR:RLEEH:LEXAXA, RNVQXRP:TQVQL:NAIS-AA¹⁷-LYF:EIVRKKPIF:LKKYR:TLEDH:LAXKXE, HVTKPTX:APTKL:NAIS-AA¹⁷-LYF:DDSSNVI:LKKYR:NMVVR:SXGXH, KIPKAXX:APTEL:SATS-AA¹⁷-LYY:DENEKVV:LRKHR:DMVVK:GXGXR, GIPEPXX:APTKM:SATS-AA¹⁷-LYY:DENKNVV:LRKHR:NMVVK:SXAXR, SIPKAXX:APTEL:SATS-AA¹⁷-LYY:DEYDKVV:LRKHR:EMVVK:GXGXR, HVTKPTX:APTKL:SATS-AA¹⁷-LYY:DDSSNVI:LRKHR:NMVVK:SXGXH, YVPKPXX:APTKL:SATS-AA¹⁷-LYY:DDSSNVI:LRKHR:NMVVK:SXGXH, TVPKPXX:APTQL:SATS-AA¹⁷-LYY:DDSSNVI:LRKHR:NMVVK:AXGXH, KVGKAXX:APTKL:SATS-AA¹⁷-LYY:DDMGVPT:LRKHR:EGMSVVK:XGXR, KASKAXX:APTKL:SATS-AA¹⁷-LYY:DKGVVTY:LRKHR:GMVVK:EXGXR, GSAGPXX:APTKM:SATS-AA¹⁷-LYY:NDKQQII:LRKHR:GMVVK:RXGXS, AAPASXX:APTRL:SATS-AA¹⁷-LYY:DAANNVV:LRKHR:DMVVK:AXGXR, STPPTXX:APTRL:SATS-AA¹⁷-LYY:DSANNVV:LRKHR:DMVVK:SXGXR, HVPKPXX:APTKL:SATS-AA¹⁷-LYY:DDSSNVI:LRKHR:NMVVK:SXGXH, RVPSTXX:APTKT:SATS-AA¹⁷-LYY:DNGRVLL:LRKHR:MIVVK:XGXL, ASAAPXX:APTAL:SATS-AA¹⁷-LYY:VGRKPKV:LRKHR:MIVVK:XKXS, ASASPXX:APTDL:SATS-AA¹⁷-LYY:IGKTPKI:LRKHR:MIVVK:XKXS, ASASPXX:APTDL:SATS-AA¹⁷-LYY:VGRTPKV:LRKHR:MVVVK:XKXS, NDEGLEX:APTEE:SATS-AA¹⁷-LYY:RIKPHQGQH:LRKHR:FLVVK:KXEXR, NDEGLEX:APTGQ:SATS-AA¹⁷-LYY:RIKPHQGQH:LRKHR:LEVVK:QXEXR, SSVKXQP:APTHH:SATS-AA¹⁷-LYY:EYVRKKPKL:LRKHR:RLVVK:LEXAXA, RNVQXRP:APTQL:SATS-AA¹⁷-LYY:EIVRKKPIF:LRKHR:TLVVK:LAXKXE, KIPKAXX:VPTEL:SATS-AA¹⁷-LYY:DENEKVV:LRKHR:DMVVE:GXGXR, GIPEPXX:VPEKM:SATS-AA¹⁷-LYY:DENKNVV:LRKHR:NMTVE:SXAXR, SIPKAXX:VPTEL:SATS-AA¹⁷-LYY:DEYDKVV:LRKHR:EMVVE:GXGXR, HVTKPTX:APTKL:SATS-AA¹⁷-LYY:DDSSNVI:LRKHR:NMVVR:SXGXH, YVPKPXX:APTKL:SATS-AA¹⁷-LYY:DDSSNVI:LRKHR:NMVVR:SXGXH, TVPKPXX:APTQL:SATS-AA¹⁷-LYY:DDSSNVI:LRKHR:NMVVR:AXGXH, KVGKAXX:VPTKL:SATS-AA¹⁷-LYY:DDMGVPT:LRKHR:EGMSVAE:XGXR, KASKAXX:VPTKL:SATS-AA¹⁷-LYY:DKGVVTY:LRKHR:GMAVS:EXGXR, GSAGPXX:TPTKM:SATS-AA¹⁷-LYY:NDKQQII:LRKHR:GMVVD:RXGXS, AAPASXX:VPARL:SATS-AA¹⁷-LYY:DAANNVV:LRKHR:DMVVE:AXGXR, STPPTXX:VPTRL:SATS-AA¹⁷-LYY:DSANNVV:LRKHR:DMVVE:SXGXR, HVPKPXX:APTKL:SATS-AA¹⁷-LYY:DDSSNVI:LRKHR:NMVVR:SXGXH, RVPSTXX:APVKT:SATS-AA¹⁷-LYY:DNGRVLL:LRKHR:MIVEE:XGXL, ASAAPXX:VPQAL:SATS-AA¹⁷-LYY:VGRKPKV:LRKHR:MIVRS:XKXS, ASASPXX:VSQDL:SATS-AA¹⁷-LYY:IGKTPKI:LRKHR:MIVKS:XKXS, ASASPXX:VPQDL:SATS-AA¹⁷-LYY:VGRTPKV:LRKHR:MVVKS:XKXS, NDEGLEX:VPTEE:SATS-AA¹⁷-LYY:RIKPHQGQH:LRKHR:FLQHN:KXEXR, NDEGLEX:VPTGQ:SATS-AA¹⁷-LYY:RIKPHQGQH:LRKHR:LEEHS:QXEXR, SSVKXQP:SRVHH:SATS-AA¹⁷-LYY:EYVRKKPKL:LRKHR:RLEEH:LEXAXA, RNVQXRP:TQVQL:SATS-AA¹⁷-LYY:EIVRKKPIF:LRKHR:TLEDH:LAXKXE, KIPKAXX:VPTEL:SPIS-AA¹⁷-LYK:DENEKVV:LKYHY:DMVAE:GXGXR, GIPEPXX:VPTKM:SPIS-AA¹⁷-LYK:DENKNVV:LKYHY:NMVAE:SXAXR, SIPKAXX:VPTEL:SPIS-AA¹⁷-LYK:DEYDKVV:LKYHY:EMVAE:GXGXR, HVTKPTX:VPTKL:SPIS-AA¹⁷-LYK:DDSSNVI:LKYHY:NMVAE:SXGXH, YVPKPXX:VPTKL:SPIS-AA¹⁷-LYK:DDSSNVI:LKYHY:NMVAE:SXGXH, TVPKPXX:VPTQL:SPIS-AA¹⁷-LYK:DDSSNVI:LKYHY:NMVAE:AXGXH, AVPKAXX:VPTKL:SPIS-AA¹⁷-LYK:DSSNNVI:LKYHY:NMVAE:AXGXH, KASKAXX:VPTKL:SPIS-AA¹⁷-LYK:DKGVVTY:LKYHY:GMVAE:EXGXR, GSAGPXX:VPTKM:SPIS-AA¹⁷-LYK:NDKQQII:LKYHY:GMVAE:RXGXS, AAPASXX:VPTRL:SPIS-AA¹⁷-LYK:DAANNVV:LKYHY:DMVAE:AXGXR, STPPTXX:VPTRL:SPIS-AA¹⁷-LYK:DSANNVV:LKYHY:DMVAE:SXGXR, HVPKPXX:VPTKL:SPIS-AA¹⁷-LYK:DDSSNVI:LKYHY:NMVAE:SXGXH, RVPSTXX:VPTKT:SPIS-AA¹⁷-LYK:DNGRVLL:LKYHY:MIVAE:XGXL, ASAAPXX:VPTAL:SPIS-AA¹⁷-LYK:VGRKPKV:LKYHY:MIVAE:XKXS, ASASPXX:VPTDL:SPIS-AA¹⁷-LYK:IGKTPKI:LKYHY:MIVAE:XKXS, ASASPXX:VPTDL:SPIS-AA¹⁷-LYK:VGRTPKV:LKYHY:MVVAE:XKXS, NDEGLEX:VPTEE:SPIS-AA¹⁷-LYK:RIKPHQGQH:LKYHY:FLVAE:KXEXR, NDEGLEX:VPTGQ:SPIS-AA¹⁷-LYK:RIKPHQGQH:LKYHY:LEVAE:QXEXR, SSVKXQP:VPTHH:SPIS-AA¹⁷-LYK:EYVRKKPKL:LKYHY:RLVAE:LEXAXA, RNVQXRP:VPTQL:SPIS-AA¹⁷-LYK:EIVRKKPIF:LKYHY:TLVAE:LAXKXE, KIPKAXX:VPTEL:SPIS-AA¹⁷-LYK:DENEKVV:LKYHY:DMVVE:GXGXR, GIPEPXX:VPEKM:SPIS-AA¹⁷-LYK:DENKNVV:LKYHY:NMTVE:SXAXR, SIPKAXX:VPTEL:SPIS-AA¹⁷-LYK:DEYDKVV:LKYHY:EMVVE:GXGXR, HVTKPTX:APTKL:SPIS-AA¹⁷-LYK:DDSSNVI:LKYHY:NMVVR:SXGXH, YVPKPXX:APTKL:SPIS-AA¹⁷-LYK:DDSSNVI:LKYHY:NMVVR:SXGXH, TVPKPXX:APTQL:SPIS-AA¹⁷-LYK:DDSSNVI:LKYHY:NMVVR:AXGXH, AVPKAXX:APTKL:SPIS-AA¹⁷-LYK:DSSNNVI:LKYHY:NMVVK:AXGXH, KASKAXX:VPTKL:SPIS-AA¹⁷-LYK:DKGVVTY:LKYHY:GMAVS:EXGXR, GSAGPXX:TPTKM:SPIS-AA¹⁷-LYK:NDKQQII:LKYHY:GMVVD:RXGXS, AAPASXX:VPARL:SPIS-AA¹⁷-LYK:DAANNVV:LKYHY:DMVVE:AXGXR, STPPTXX:VPTRL:SPIS-AA¹⁷-LYK:DSANNVV:LKYHY:DMVVE:SXGXR, HVPKPXX:APTKL:SPIS-AA¹⁷-LYK:DDSSNVI:LKYHY:NMVVR:SXGXH, RVPSTXX:APVKT:SPIS-AA¹⁷-LYK:DNGRVLL:LKYHY:MIVEE:XGXL, ASAAPXX:VPQAL:SPIS-AA¹⁷-LYK:VGRKPKV:LKYHY:MIVRS:XKXS, ASASPXX:VSQDL:SPIS-AA¹⁷-LYK:IGKTPKI:LKYHY:MIVKS:XKXS, ASASPXX:VPQDL:SPIS-AA¹⁷-LYK:VGRTPKV:LKYHY:MVVKS:XKXS, NDEGLEX:VPTEE:SPIS-AA¹⁷-LYK:RIKPHQGQH:LKYHY:FLQHN:KXEXR, NDEGLEX:VPTGQ:SPIS-AA¹⁷-LYK:RIKPHQGQH:LKYHY:LEEHS:QXEXR, SSVKXQP:SRVHH:SPIS-AA¹⁷-LYK:EYVRKKPKL:LKYHY:RLEEH:LEXAXA, RNVQXRP:TQVQL:SPIS-AA¹⁷-LYK:EIVRKKPIF:LKYHY:TLEDH:LAXKXE, KIPKAXX:VPTEL:EPIS-AA¹⁷-LYL:DENEKVV:KFKYE:DMAVS:GXGXR, GIPE PXX:VPTKM:EPIS-AA¹⁷-LYL:DENKNVV:KFKYE:NMAVS:SXAXR, SIPKAXX:VPTEL:EPIS-AA¹⁷-LYL:DEYDKVV:KFKYE:EMAVS:GXGXR, HVTKPTX:VPTKL:EPIS-AA¹⁷-LYL:DDSSNVI:KFKYE:NMAVS:SXGXH, YVPKPXX:VPTKL:EPIS-AA¹⁷-LYL:DDSSNVI:KFKYE:NMAVS:SXGXH, TVPKPXX:VPTQL:EPIS-AA¹⁷-LYL:DDSSNVI:KFKYE:NMAVS:AXGXH, AVPKAXX:VPTKL:EPIS-AA¹⁷-LYL:DSSNNVI:KFKYE:NMAVS:AXGXH, KVGKAXX:VPTKL:EPIS-AA¹⁷-LYL:DDMGVPT:KFKYE:EGMSAVS:XGXR, GSAGPXX:VPTKM:EPIS-AA¹⁷-LYL:NDKQQII:KFKYE:GMAVS:RXGXS, AAPASXX:VPTRL:EPIS-AA¹⁷-LYL:DAANNVV:KFKYE:DMAVS:AXGXR, STPPTXX:VPTRL:EPIS-AA¹⁷-LYL:DSANNVV:KFKYE:DMAVS:SXGXR, HVPKPXX:VPTKL:EPIS-AA¹⁷-LYL:DDSSNVI:KFKYE:NMAVS:SXGXH, RVPSTXX:VPTKT:EPIS-AA¹⁷-LYL:DNGRVLL:KFKYE:MIAVS:XGXL, ASAAPXX:VPTAL:EPIS-AA¹⁷-LYL:VGRKPKV:KFKYE:MIAVS:XKXS, ASASPXX:VPTDL:EPIS-AA¹⁷-LYL:IGKTPKI:KFKYE:MIAVS:XKXS, ASASPXX:VPTDL:EPIS-AA¹⁷-LYL:VGRTPKV:KFKYE:MVAVS:XKXS, NDEGLEX:VPTEE:EPIS-AA¹⁷-LYL:RIKPHQGQH:KFKYE:FLAVS:KXEXR, NDEGLEX:VPTGQ:EPIS-AA¹⁷-LYL:RIKPHQGQH:KFKYE:LEAVS:QXEXR, SSVKXQP:VPTHH:EPIS-AA¹⁷-LYL:EYVRKKPKL:KFKYE:RLAVS:LEXAXA, RNVQXRP:VPTQL:EPIS-AA¹⁷-LYL:EIVRKKPIF:KFKYE:TLAVS:LAXKXE, KIPKAXX:VPTEL:EPIS-AA¹⁷-LYL:DENEKVV:KFKYE:DMVVE:GXGXR, GIPEPXX:VPEKM:EPIS-AA¹⁷-LYL:DENKNVV:KFKYE:NMTVE:SXAXR, SIPKAXX:VPTEL:EPIS-AA¹⁷-LYL:DEYDKVV:KFKYE:EMVVE:GXGXR, HVTKPTX:APTKL:EPIS-AA¹⁷-LYL:DDSSNVI:KFKYE:NMVVR:SXGXH, YVPKPXX:APTKL:EPIS-AA¹⁷-LYL:DDSSNVI:KFKYE:NMVVR:SXGXH, TVPKPXX:APTQL:EPIS-AA¹⁷-LYL:DDSSNVI:KFKYE:NMVVR:AXGXH, AVPKAXX:APTKL:EPIS-AA¹⁷-LYL:DSSNNVI:KFKYE:NMVVK:AXGXH, KVGKAXX:VPTKL:EPIS-AA¹⁷-LYL:DDMGVPT:KFKYE:EGMSVAE:XGXR, GSAGPXX:TPTKM:EPIS-AA¹⁷-LYL:NDKQQII:KFKYE:GMVVD:RXGXS, AAPASXX:VPARL:EPIS-AA¹⁷-LYL:DAANNVV:KFKYE:DMVVE:AXGXR, STPPTXX:VPTRL:EPIS-AA¹⁷-LYL:DSANNVV:KFKYE:DMVVE:SXGXR, HVPKPXX:APTKL:EPIS-AA¹⁷-LYL:DDSSNVI:KFKYE:NMVVR:SXGXH, RVPSTXX:APVKT:EPIS-AA¹⁷-LYL:DNGRVLL:KFKYE:MIVEE:XGXL, ASAAPXX:VPQAL:EPIS-AA¹⁷-LYL:VGRKPKV:KFKYE:MIVRS:XKXS, ASASPXX:VSQDL:EPIS-AA¹⁷-LYL:IGKTPKI:KFKYE:MIVKS:XKXS, ASASPXX:VPQDL:EPIS-AA¹⁷-LYL:VGRTPKV:KFKYE:MVVKS:XKXS, NDEGLEX:VPTEE:EPIS-AA¹⁷-LYL:RIKPHQGQH:KFKYE:FLQHN:KXEXR, NDEGLEX:VPTGQ:EPIS-AA¹⁷-LYL:RIKPHQGQH:KFKYE:LEEHS:QXEXR, SSVKXQP:SRVHH:EPIS-AA¹⁷-LYL:EYVRKKPKL:KFKYE:RLEEH:LEXAXA, RNVQXRP:TQVQL:EPIS-AA¹⁷-LYL:EIVRKKPIF:KFKYE:TLEDH:LAXKXE, KIPKAXX:TPTEL:SPIN-AA¹⁷-LYF:DENEKVV:YGKIP:DMVVD:GXGXR, GIPEPXX:TPTKM:SPIN-AA¹⁷-LYF:DENKNVV:YGKIP:NMVVD:SXAXR, SIPKAXX:TPTEL:SPIN-AA¹⁷-LYF:DEYDKVV:YGKIP:EMVVD:GXGXR, HVTKPTX:TPTKL:SPIN-AA¹⁷-LYF:DDSSNVI:YGKIP:NMVVD:SXGXH, YVPKPXX:TPTKL:SPIN-AA¹⁷-LYF:DDSSNVI:YGKIP:NMVVD:SXGXH, TVPKPXX:TPTQL:SPIN-AA¹⁷-LYF:DDSSNVI:YGKIP:NMVVD:AXGXH, AVPKAXX:TPTKL:SPIN-AA¹⁷-LYF:DSSNNVI:YGKIP:NMVVD:AXGXH, KVGKAXX:TPTKL:SPIN-AA¹⁷-LYF:DDMGVPT:YGKIP:EGMSVVD:XGXR, KASKAXX:TPTKL:SPIN-AA¹⁷-LYF:DKGVVTY:YGKIP:GMVVD:EXGXR, AAPASXX:TPTRL:SPIN-AA¹⁷-LYF:DAANNVV:YGKIP:DMVVD:AXGXR, STPPTXX:TPTRL:SPIN-AA¹⁷-LYF:DSANNVV:YGKIP:DMVVD:SXGXR, HVPKPXX:TPTKL:SPIN-AA¹⁷-LYF:DDSSNVI:YGKIP:NMVVD:SXGXH, RVPSTXX:TPTKT:SPIN-AA¹⁷-LYF:DNGRVLL:YGKIP:MIVVD:XGXL, ASAAPXX:TPTAL:SPIN-AA¹⁷-LYF:VGRKPKV:YGKIP:MIVVD:XKXS, ASASPXX:TPTDL:SPIN-AA¹⁷-LYF:IGKTPKI:YGKIP:MIVVD:XKXS, ASASPXX:TPTDL:SPIN-AA¹⁷-LYF:VGRTPKV:YGKIP:MVVVD:XKXS, NDEGLEX:TPTEE:SPIN-AA¹⁷-LYF:RIKPHQGQH:YGKIP:FLVVD:KXEXR, NDEGLEX:TPTGQ:SPIN-AA¹⁷-LYF:RIKPHQGQH:YGKIP:LEVVD:QXEXR, SSVKXQP:TPTHH:SPIN-AA¹⁷-LYF:EYVRKKPKL:YGKIP:RLVVD:LEXAXA, RNVQXRP:TPTQL:SPIN-AA¹⁷-LYF:EIVRKKPIF:YGKIP:TLVVD:LAXKXE, KIPKAXX:VPTEL:SPIN-AA¹⁷-LYF:DENEKVV:YGKIP:DMVVE:GXGXR, GIPEPXX:VPEKM:SPIN-AA¹⁷-LYF:DENKNVV:YGKIP:NMTVE:SXAXR, SIPKAXX:VPTEL:SPIN-AA¹⁷-LYF:DEYDKVV:YGKIP:EMVVE:GXGXR, HVTKPTX:APTKL:SPIN-AA¹⁷-LYF:DDSSNVI:YGKIP:NMVVR:SXGXH, YVPKPXX:APTKL:SPIN-AA¹⁷-LYF:DDSSNVI:YGKIP:NMVVR:SXGXH, TVPKPXX:APTQL:SPIN-AA¹⁷-LYF:DDSSNVI:YGKIP:NMVVR:AXGXH, AVPKAXX:APTKL:SPIN-AA¹⁷-LYF:DSSNNVI:YGKIP:NMVVK:AXGXH, KVGKAXX:VPTKL:SPIN-AA¹⁷-LYF:DDMGVPT:YGKIP:EGMSVAE:XGXR, KASKAXX:VPTKL:SPIN-AA¹⁷-LYF:DKGVVTY:YGKIP:GMAVS:EXGXR, AAPASXX:VPARL:SPIN-AA¹⁷-LYF:DAANNVV:YGKIP:DMVVE:AXGXR, STPPTXX:VPTRL:SPIN-AA¹⁷-LYF:DSANNVV:YGKIP:DMVVE:SXGXR, HVPKPXX:APTKL:SPIN-AA¹⁷-LYF:DDSSNVI:YGKIP:NMVVR:SXGXH, RVPSTXX:APVKT:SPIN-AA¹⁷-LYF:DNGRVLL:YGKIP:MIVEE:XGXL, ASAAPXX:VPQAL:SPIN-AA¹⁷-LYF:VGRKPKV:YGKIP:MIVRS:XKXS, ASASPXX:VSQDL:SPIN-AA¹⁷-LYF:IGKTPKI:YGKIP:MIVKS:XKXS, ASASPXX:VPQDL:SPIN-AA¹⁷-LYF:VGRTPKV:YGKIP:MVVKS:XKXS, NDEGLEX:VPTEE:SPIN-AA¹⁷-LYF:RIKPHQGQH:YGKIP:FLQHN:KXEXR, NDEGLEX:VPTGQ:SPIN-AA¹⁷-LYF:RIKPHQGQH:YGKIP:LEEHS:QXEXR, SSVKXQP:SRVHH:SPIN-AA¹⁷-LYF:EYVRKKPKL:YGKIP:RLEEH:LEXAXA, RNVQXRP:TQVQL:SPIN-AA¹⁷-LYF:EIVRKKPIF:YGKIP:TLEDH:LAXKXE, KIPKAXX:VPAEL:SPIS-AA¹⁷-LYI:DENEKVV:YKQYE:DMVVE:GXGXR, GIPEPXX:VPAKM:SPIS-AA¹⁷-LYI:DENKNVV:YKQYE:NMVVE:SXAXR, SIPKAXX:VPAEL:SPIS-AA¹⁷-LYI:DEYDKVV:YKQYE:EMVVE:GXGXR, HVTKPTX:VPAKL:SPIS-AA¹⁷-LYI:DDSSNVI:YKQYE:NMVVE:SXGXH, YVPKPXX:VPAKL:SPIS-AA¹⁷-LYI:DDSSNVI:YKQYE:NMVVE:SXGXH, TVPKPXX:VPAQL:SPIS-AA¹⁷-LYI:DDSSNVI:YKQYE:NMVVE:AXGXH, AVPKAXX:VPAKL:SPIS-AA¹⁷-LYI:DSSNNVI:YKQYE:NMVVE:AXGXH, KVGKAXX:VPAKL:SPIS-AA¹⁷-LYI:DDMGVPT:YKQYE:EGMSVVE:XGXR, KASKAXX:VPAKL:SPIS-AA¹⁷-LYI:DKGVVTY:YKQYE:GMVVE:EXGXR, GSAGPXX:VPAKM:SPIS-AA¹⁷-LYI:NDKQQII:YKQYE:GMVVE:RXGXS, STPPTXX:VPARL:SPIS-AA¹⁷-LYI:DSANNVV:YKQYE:DMVVE:SXGXR, HVPKPXX:VPAKL:SPIS-AA¹⁷-LYI:DDSSNVI:YKQYE:NMVVE:SXGXH, RVPSTXX:VPAKT:SPIS-AA¹⁷-LYI:DNGRVLL:YKQYE:MIVVE:XGXL, ASAAPXX:VPAAL:SPIS-AA¹⁷-LYI:VGRKPKV:YKQYE:MIVVE:XKXS, ASASPXX:VPADL:SPIS-AA¹⁷-LYI:IGKTPKI:YKQYE:MIVVE:XKXS, ASASPXX:VPADL:SPIS-AA¹⁷-LYI:VGRTPKV:YKQYE:MVVVE:XKXS, NDEGLEX:VPAEE:SPIS-AA¹⁷-LYI:RIKPHQGQH:YKQYE:FLVVE:KXEXR, NDEGLEX:VPAGQ:SPIS-AA¹⁷-LYI:RIKPHQGQH:YKQYE:LEVVE:QXEXR, SSVKXQP:VPAHH:SPIS-AA¹⁷-LYI:EYVRKKPKL:YKQYE:RLVVE:LEXAXA, RNVQXRP:VPAQL:SPIS-AA¹⁷-LYI:EIVRKKPIF:YKQYE:TLVVE:LAXKXE, KIPKAXX:VPTEL:SPIS-AA¹⁷-LYI:DENEKVV:YKQYE:DMVVE:GXGXR, GIPEPXX:VPEKM:SPIS-AA¹⁷-LYI:DENKNVV:YKQYE:NMTVE:SXAXR, SIPKAXX:VPTEL:SPIS-AA¹⁷-LYI:DEYDKVV:YKQYE:EMVVE:GXGXR, HVTKPTX:APTKL:SPIS-AA¹⁷-LYI:DDSSNVI:YKQYE:NMVVR:SXGXH, YVPKPXX:APTKL:SPIS-AA¹⁷-LYI:DDSSNVI:YKQYE:NMVVR:SXGXH, TVPKPXX:APTQL:SPIS-AA¹⁷-LYI:DDSSNVI:YKQYE:NMVVR:AXGXH, AVPKAXX:APTKL:SPIS-AA¹⁷-LYI:DSSNNVI:YKQYE:NMVVK:AXGXH, KVGKAXX:VPTKL:SPIS-AA¹⁷-LYI:DDMGVPT:YKQYE:EGMSVAE:XGXR, KASKAXX:VPTKL:SPIS-AA¹⁷-LYI:DKGVVTY:YKQYE:GMAVS:EXGXR, GSAGPXX:TPTKM:SPIS-AA¹⁷-LYI:NDKQQII:YKQYE:GMVVD:RXGXS, STPPTXX:VPTRL:SPIS-AA¹⁷-LYI:DSANNVV:YKQYE:DMVVE:SXGXR, HVPKPXX:APTKL:SPIS-AA¹⁷-LYI:DDSSNVI:YKQYE:NMVVR:SXGXH, RVPSTXX:APVKT:SPIS-AA¹⁷-LYI:DNGRVLL:YKQYE:MIVEE:XGXL, ASAAPXX:VPQAL:SPIS-AA¹⁷-LYI:VGRKPKV:YKQYE:MIVRS:XKXS, ASASPXX:VSQDL:SPIS-AA¹⁷-LYI:IGKTPKI:YKQYE:MIVKS:XKXS, ASASPXX:VPQDL:SPIS-AA¹⁷-LYI:VGRTPKV:YKQYE:MVVKS:XKXS, NDEGLEX:VPTEE:SPIS-AA¹⁷-LYI:RIKPHQGQH:YKQYE:FLQHN:KXEXR, NDEGLEX:VPTGQ:SPIS-AA¹⁷-LYI:RIKPHQGQH:YKQYE:LEEHS:QXEXR, SSVKXQP:SRVHH:SPIS-AA¹⁷-LYI:EYVRKKPKL:YKQYE:RLEEH:LEXAXA, RNVQXRP:TQVQL:SPIS-AA¹⁷-LYI:EIVRKKPIF:YKQYE:TLEDH:LAXKXE, KIPKAXX:VPTEL:SPIS-AA¹⁷-LFI:DENEKVV:YKQYE:DMVVE:GXGXR, GIPEPXX:VPTKM:SPIS-AA¹⁷-LFI:DENKNVV:YKQYE:NMVVE:SXAXR, SIPKAXX:VPTEL:SPIS-AA¹⁷-LFI:DEYDKVV:YKQYE:EMVVE:GXGXR, HVTKPTX:VPTKL:SPIS-AA¹⁷-LFI:DDSSNVI:YKQYE:NMVVE:SXGXH, YVPKPXX:VPTKL:SPIS-AA¹⁷-LFI:DDSSNVI:YKQYE:NMVVE:SXGXH, TVPKPXX:VPTQL:SPIS-AA¹⁷-LFI:DDSSNVI:YKQYE:NMVVE:AXGXH, AVPKAXX:VPTKL:SPIS-AA¹⁷-LFI:DSSNNVI:YKQYE:NMVVE:AXGXH, KVGKAXX:VPTKL:SPIS-AA¹⁷-LFI:DDMGVPT:YKQYE:EGMSVVE:XGXR, KASKAXX:VPTKL:SPIS-AA¹⁷-LFI:DKGVVTY:YKQYE:GMVVE:EXGXR, GSAGPXX:VPTKM:SPIS-AA¹⁷-LFI:NDKQQII:YKQYE:GMVVE:RXGXS, AAPASXX:VPTRL:SPIS-AA¹⁷-LFI:DAANNVV:YKQYE:DMVVE:AXGXR, HVPKPXX:VPTKL:SPIS-AA¹⁷-LFI:DDSSNVI:YKQYE:NMVVE:SXGXH, RVPSTXX:VPTKT:SPIS-AA¹⁷-LFI:DNGRVLL:YKQYE:MIVVE:XGXL, ASAAPXX:VPTAL:SPIS-AA¹⁷-LFI:VGRKPKV:YKQYE:MIVVE:XKXS, ASASPXX:VPTDL:SPIS-AA¹⁷-LFI:IGKTPKI:YKQYE:MIVVE:XKXS, ASASPXX:VPTDL:SPIS-AA¹⁷-LFI:VGRTPKV:YKQYE:MVVVE:XKXS, NDEGLEX:VPTEE:SPIS-AA¹⁷-LFI:RIKPHQGQH:YKQYE:FLVVE:KXEXR, NDEGLEX:VPTGQ:SPIS-AA¹⁷-LFI:RIKPHQGQH:YKQYE:LEVVE:QXEXR, SSVKXQP:VPTHH:SPIS-AA¹⁷-LFI:EYVRKKPKL:YKQYE:RLVVE:LEXAXA, RNVQXRP:VPTQL:SPIS-AA¹⁷-LFI:EIVRKKPIF:YKQYE:TLVVE:LAXKXE, GIPEPXX:VPEKM:SPIS-AA¹⁷-LFI:DENKNVV:YKQYE:NMTVE:SXAXR, HVTKPTX:APTKL:SPIS-AA¹⁷-LFI:DDSSNVI:YKQYE:NMVVR:SXGXH, YVPKPXX:APTKL:SPIS-AA¹⁷-LFI:DDSSNVI:YKQYE:NMVVR:SXGXH, TVPKPXX:APTQL:SPIS-AA¹⁷-LFI:DDSSNVI:YKQYE:NMVVR:AXGXH, AVPKAXX:APTKL:SPIS-AA¹⁷-LFI:DSSNNVI:YKQYE:NMVVK:AXGXH, KVGKAXX:VPTKL:SPIS-AA¹⁷-LFI:DDMGVPT:YKQYE:EGMSVAE:XGXR, KASKAXX:VPTKL:SPIS-AA¹⁷-LFI:DKGVVTY:YKQYE:GMAVS:EXGXR, GSAGPXX:TPTKM:SPIS-AA¹⁷-LFI:NDKQQII:YKQYE:GMVVD:RXGXS, AAPASXX:VPARL:SPIS-AA¹⁷-LFI:DAANNVV:YKQYE:DMVVE:AXGXR, HVPKPXX:APTKL:SPIS-AA¹⁷-LFI:DDSSNVI:YKQYE:NMVVR:SXGXH, RVPSTXX:APVKT:SPIS-AA¹⁷-LFI:DNGRVLL:YKQYE:MIVEE:XGXL, ASAAPXX:VPQAL:SPIS-AA¹⁷-LFI:VGRKPKV:YKQYE:MIVRS:XKXS, ASASPXX:VSQDL:SPIS-AA¹⁷-LFI:IGKTPKI:YKQYE:MIVKS:XKXS, ASASPXX:VPQDL:SPIS-AA¹⁷-LFI:VGRTPKV:YKQYE:MVVKS:XKXS, NDEGLEX:VPTEE:SPIS-AA¹⁷-LFI:RIKPHQGQH:YKQYE:FLQHN:KXEXR, NDEGLEX:VPTGQ:SPIS-AA¹⁷-LFI:RIKPHQGQH:YKQYE:LEEHS:QXEXR, SSVKXQP:SRVHH:SPIS-AA¹⁷-LFI:EYVRKKPKL:YKQYE:RLEEH:LEXAXA, RNVQXRP:TQVQL:SPIS-AA¹⁷-LFI:EIVRKKPIF:YKQYE:TLEDH:LAXKXE, KIPKAXX:APVEL:KPLS-AA¹⁷-LYV:DENEKVV:DHHKD:DMVEE:GXGXR, GIPEPXX:APVKM:KPLS-AA¹⁷-LYV:DENKNVV:DHHKD:NMVEE:SXAXR, SIPKAXX:APVEL:KPLS-AA¹⁷-LYV:DEYDKVV:DHHKD:EMVEE:GXGXR, HVTKPTX:APVKL:KPLS-AA¹⁷-LYV:DDSSNVI:DHHKD:NMVEE:SXGXH, YVPKPXX:APVKL:KPLS-AA¹⁷-LYV:DDSSNVI:DHHKD:NMVEE:SXGXH, TVPKPXX:APVQL:KPLS-AA¹⁷-LYV:DDSSNVI:DHHKD:NMVEE:AXGXH, AVPKAXX:APVKL:KPLS-AA¹⁷-LYV:DSSNNVI:DHHKD:NMVEE:AXGXH, KVGKAXX:APVKL:KPLS-AA¹⁷-LYV:DDMGVPT:DHHKD:EGMSVEE:XGXR, KASKAXX:APVKL:KPLS-AA¹⁷-LYV:DKGVVTY:DHHKD:GMVEE:EXGXR, GSAGPXX:APVKM:KPLS-AA¹⁷-LYV:NDKQQII:DHHKD:GMVEE:RXGXS, AAPASXX:APVRL:KPLS-AA¹⁷-LYV:DAANNVV:DHHKD:DMVEE:AXGXR, STPPTXX:APVRL:KPLS-AA¹⁷-LYV:DSANNVV:DHHKD:DMVEE:SXGXR, HVPKPXX:APVKL:KPLS-AA¹⁷-LYV:DDSSNVI:DHHKD:NMVEE:SXGXH, ASAAPXX:APVAL:KPLS-AA¹⁷-LYV:VGRKPKV:DHHKD:MIVEE:XKXS, ASASPXX:APVDL:KPLS-AA¹⁷-LYV:IGKTPKI:DHHKD:MIVEE:XKXS, ASASPXX:APVDL:KPLS-AA¹⁷-LYV:VGRTPKV:DHHKD:MVVEE:XKXS, NDEGLEX:APVEE:KPLS-AA¹⁷-LYV:RIKPHQGQH:DHHKD:FLVEE:KXEXR, NDEGLEX:APVGQ:KPLS-AA¹⁷-LYV:RIKPHQGQH:DHHKD:LEVEE:QXEXR, SSVKXQP:APVHH:KPLS-AA¹⁷-LYV:EYVRKKPKL:DHHKD:RLVEE:LEXAXA, RNVQXRP:APVQL:KPLS-AA¹⁷-LYV:EIVRKKPIF:DHHKD:TLVEE:LAXKXE, KIPKAXX:VPTEL:KPLS-AA¹⁷-LYV:DENEKVV:DHHKD:DMVVE:GXGXR, GIPEPXX:VPEKM:KPLS-AA¹⁷-LYV:DENKNVV:DHHKD:NMTVE:SXAXR, SIPKAXX:VPTEL:KPLS-AA¹⁷-LYV:DEYDKVV:DHHKD:EMVVE:GXGXR, HVTKPTX:APTKL:KPLS-AA¹⁷-LYV:DDSSNVI:DHHKD:NMVVR:SXGXH, YVPKPXX:APTKL:KPLS-AA¹⁷-LYV:DDSSNVI:DHHKD:NMVVR:SXGXH, TVPKPXX:APTQL:KPLS-AA¹⁷-LYV:DDSSNVI:DHHKD:NMVVR:AXGXH, AVPKAXX:APTKL:KPLS-AA¹⁷-LYV:DSSNNVI:DHHKD:NMVVK:AXGXH, KVGKAXX:VPTKL:KPLS-AA¹⁷-LYV:DDMGVPT:DHHKD:EGMSVAE:XGXR, KASKAXX:VPTKL:KPLS-AA¹⁷-LYV:DKGVVTY:DHHKD:GMAVS:EXGXR, GSAGPXX:TPTKM:KPLS-AA¹⁷-LYV:NDKQQII:DHHKD:GMVVD:RXGXS, AAPASXX:VPARL:KPLS-AA¹⁷-LYV:DAANNVV:DHHKD:DMVVE:AXGXR, STPPTXX:VPTRL:KPLS-AA¹⁷-LYV:DSANNVV:DHHKD:DMVVE:SXGXR, HVPKPXX:APTKL:KPLS-AA¹⁷-LYV:DDSSNVI:DHHKD:NMVVR:SXGXH, ASAAPXX:VPQAL:KPLS-AA¹⁷-LYV:VGRKPKV:DHHKD:MIVRS:XKXS, ASASPXX:VSQDL:KPLS-AA¹⁷-LYV:IGKTPKI:DHHKD:MIVKS:XKXS, ASASPXX:VPQDL:KPLS-AA¹⁷-LYV:VGRTPKV:DHHKD:MVVKS:XKXS, NDEGLEX:VPTEE:KPLS-AA¹⁷-LYV:RIKPHQGQH:DHHKD:FLQHN:KXEXR, NDEGLEX:VPTGQ:KPLS-AA¹⁷-LYV:RIKPHQGQH:DHHKD:LEEHS:QXEXR, SSVKXQP:SRVHH:KPLS-AA¹⁷-LYV:EYVRKKPKL:DHHKD:RLEEH:LEXAXA, RNVQXRP:TQVQL:KPLS-AA¹⁷-LYV:EIVRKKPIF:DHHKD:TLEDH:LAXKXE, KIPKAXX:VPQEL:EPLP-AA¹⁷-VYY:DENEKVV:EQLSN:DMVRS:GXGXR, GIPEPXX:VPQKM:EPLP-AA¹⁷-VYY:DENKNVV:EQLSN:NMVRS:SXAXR, SIPKAXX:VPQEL:EPLP-AA¹⁷-VYY:DEYDKVV:EQLSN:EMVRS:GXGXR, HVTKPTX:VPQKL:EPLP-AA¹⁷-VYY:DDSSNVI:EQLSN:NMVRS:SXGXH, YVPKPXX:VPQKL:EPLP-AA¹⁷-VYY:DDSSNVI:EQLSN:NMVRS:SXGXH, TVPKPXX:VPQQL:EPLP-AA¹⁷-VYY:DDSSNVI:EQLSN:NMVRS:AXGXH, AVPKAXX:VPQKL:EPLP-AA¹⁷-VYY:DSSNNVI:EQLSN:NMVRS:AXGXH, KVGKAXX:VPQKL:EPLP-AA¹⁷-VYY:DDMGVPT:EQLSN:EGMSVRS:XGXR, KASKAXX:VPQKL:EPLP-AA¹⁷-VYY:DKGVVTY:EQLSN:GMVRS:EXGXR, GSAGPXX:VPQKM:EPLP-AA¹⁷-VYY:NDKQQII:EQLSN:GMVRS:RXGXS, AAPASXX:VPQRL:EPLP-AA¹⁷-VYY:DAANNVV:EQLSN:DMVRS:AXGXR, STPPTXX:VPQRL:EPLP-AA¹⁷-VYY:DSANNVV:EQLSN:DMVRS:SXGXR, HVPKPXX:VPQKL:EPLP-AA¹⁷-VYY:DDSSNVI:EQLSN:NMVRS:SXGXH, RVPSTXX:VPQKT:EPLP-AA¹⁷-VYY:DNGRVLL:EQLSN:MIVRS:XGXL, ASASPXX:VPQDL:EPLP-AA¹⁷-VYY:IGKTPKI:EQLSN:MIVRS:XKXS, ASASPXX:VPQDL:EPLP-AA¹⁷-VYY:VGRTPKV:EQLSN:MVVRS:XKXS, NDEGLEX:VPQEE:EPLP-AA¹⁷-VYY:RIKPHQGQH:EQLSN:FLVRS:KXEXR, NDEGLEX:VPQGQ:EPLP-AA¹⁷-VYY:RIKPHQGQH:EQLSN:LEVRS:QXEXR, SSVKXQP:VPQHH:EPLP-AA¹⁷-VYY:EYVRKKPKL:EQLSN:RLVRS:LEXAXA, RNVQXRP:VPQQL:EPLP-AA¹⁷-VYY:EIVRKKPIF:EQLSN:TLVRS:LAXKXE, KIPKAXX:VPTEL:EPLP-AA¹⁷-VYY:DENEKVV:EQLSN:DMVVE:GXGXR, GIPEPXX:VPEKM:EPLP-AA¹⁷-VYY:DENKNVV:EQLSN:NMTVE:SXAXR, SIPKAXX:VPTEL:EPLP-AA¹⁷-VYY:DEYDKVV:EQLSN:EMVVE:GXGXR, HVTKPTX:APTKL:EPLP-AA¹⁷-VYY:DDSSNVI:EQLSN:NMVVR:SXGXH, YVPKPXX:APTKL:EPLP-AA¹⁷-VYY:DDSSNVI:EQLSN:NMVVR:SXGXH, TVPKPXX:APTQL:EPLP-AA¹⁷-VYY:DDSSNVI:EQLSN:NMVVR:AXGXH, AVPKAXX:APTKL:EPLP-AA¹⁷-VYY:DSSNNVI:EQLSN:NMVVK:AXGXH, KVGKAXX:VPTKL:EPLP-AA¹⁷-VYY:DDMGVPT:EQLSN:EGMSVAE:XGXR, KASKAXX:VPTKL:EPLP-AA¹⁷-VYY:DKGVVTY:EQLSN:GMAVS:EXGXR, GSAGPXX:TPTKM:EPLP-AA¹⁷-VYY:NDKQQII:EQLSN:GMVVD:RXGXS, AAPASXX:VPARL:EPLP-AA¹⁷-VYY:DAANNVV:EQLSN:DMVVE:AXGXR, STPPTXX:VPTRL:EPLP-AA¹⁷-VYY:DSANNVV:EQLSN:DMVVE:SXGXR, HVPKPXX:APTKL:EPLP-AA¹⁷-VYY:DDSSNVI:EQLSN:NMVVR:SXGXH, RVPSTXX:APVKT:EPLP-AA¹⁷-VYY:DNGRVLL:EQLSN:MIVEE:XGXL, ASASPXX:VSQDL:EPLP-AA¹⁷-VYY:IGKTPKI:EQLSN:MIVKS:XKXS, ASASPXX:VPQDL:EPLP-AA¹⁷-VYY:VGRTPKV:EQLSN:MVVKS:XKXS, NDEGLEX:VPTEE:EPLP-AA¹⁷-VYY:RIKPHQGQH:EQLSN:FLQHN:KXEXR, NDEGLEX:VPTGQ:EPLP-AA¹⁷-VYY:RIKPHQGQH:EQLSN:LEEHS:QXEXR, SSVKXQP:SRVHH:EPLP-AA¹⁷-VYY:EYVRKKPKL:EQLSN:RLEEH:LEXAXA, RNVQXRP:TQVQL:EPLP-AA¹⁷-VYY:EIVRKKPIF:EQLSN:TLEDH:LAXKXE, KIPKAXX:VSQEL:EPLT-AA¹⁷-LYY:DENEKVV:EQLSN:DMVKS:GXGXR, GIPEPXX:VSQKM:EPLT-AA¹⁷-LYY:DENKNVV:EQLSN:NMVKS:SXAXR, SIPKAXX:VSQEL:EPLT-AA¹⁷-LYY:DEYDKVV:EQLSN:EMVKS:GXGXR, HVTKPTX:VSQKL:EPLT-AA¹⁷-LYY:DDSSNVI:EQLSN:NMVKS:SXGXH, YVPKPXX:VSQKL:EPLT-AA¹⁷-LYY:DDSSNVI:EQLSN:NMVKS:SXGXH, TVPKPXX:VSQQL:EPLT-AA¹⁷-LYY:DDSSNVI:EQLSN:NMVKS:AXGXH, AVPKAXX:VSQKL:EPLT-AA¹⁷-LYY:DSSNNVI:EQLSN:NMVKS:AXGXH, KVGKAXX:VSQKL:EPLT-AA¹⁷-LYY:DDMGVPT:EQLSN:EGMSVKS:XGXR, KASKAXX:VSQKL:EPLT-AA¹⁷-LYY:DKGVVTY:EQLSN:GMVKS:EXGXR, GSAGPXX:VSQKM:EPLT-AA¹⁷-LYY:NDKQQII:EQLSN:GMVKS:RXGXS, AAPASXX:VSQRL:EPLT-AA¹⁷-LYY:DAANNVV:EQLSN:DMVKS:AXGXR, STPPTXX:VSQRL:EPLT-AA¹⁷-LYY:DSANNVV:EQLSN:DMVKS:SXGXR, HVPKPXX:VSQKL:EPLT-AA¹⁷-LYY:DDSSNVI:EQLSN:NMVKS:SXGXH, RVPSTXX:VSQKT:EPLT-AA¹⁷-LYY:DNGRVLL:EQLSN:MIVKS:XGXL, ASAAPXX:VSQAL:EPLT-AA¹⁷-LYY:VGRKPKV:EQLSN:MIVKS:XKXS, ASASPXX:VSQDL:EPLT-AA¹⁷-LYY:VGRTPKV:EQLSN:MVVKS:XKXS, NDEGLEX:VSQEE:EPLT-AA¹⁷-LYY:RIKPHQGQH:EQLSN:FLVKS:KXEXR, NDEGLEX:VSQGQ:EPLT-AA¹⁷-LYY:RIKPHQGQH:EQLSN:LEVKS:QXEXR, SSVKXQP:VSQHH:EPLT-AA¹⁷-LYY:EYVRKKPKL:EQLSN:RLVKS:LEXAXA, RNVQXRP:VSQQL:EPLT-AA¹⁷-LYY:EIVRKKPIF:EQLSN:TLVKS:LAXKXE, KIPKAXX:VPTEL:EPLT-AA¹⁷-LYY:DENEKVV:EQLSN:DMVVE:GXGXR, GIPEPXX:VPEKM:EPLT-AA¹⁷-LYY:DENKNVV:EQLSN:NMTVE:SXAXR, SIPKAXX:VPTEL:EPLT-AA¹⁷-LYY:DEYDKVV:EQLSN:EMVVE:GXGXR, HVTKPTX:APTKL:EPLT-AA¹⁷-LYY:DDSSNVI:EQLSN:NMVVR:SXGXH, YVPKPXX:APTKL:EPLT-AA¹⁷-LYY:DDSSNVI:EQLSN:NMVVR:SXGXH, TVPKPXX:APTQL:EPLT-AA¹⁷-LYY:DDSSNVI:EQLSN:NMVVR:AXGXH, AVPKAXX:APTKL:EPLT-AA¹⁷-LYY:DSSNNVI:EQLSN:NMVVK:AXGXH, KVGKAXX:VPTKL:EPLT-AA¹⁷-LYY:DDMGVPT:EQLSN:EGMSVAE:XGXR, KASKAXX:VPTKL:EPLT-AA¹⁷-LYY:DKGVVTY:EQLSN:GMAVS:EXGXR, GSAGPXX:TPTKM:EPLT-AA¹⁷-LYY:NDKQQII:EQLSN:GMVVD:RXGXS, AAPASXX:VPARL:EPLT-AA¹⁷-LYY:DAANNVV:EQLSN:DMVVE:AXGXR, STPPTXX:VPTRL:EPLT-AA¹⁷-LYY:DSANNVV:EQLSN:DMVVE:SXGXR, HVPKPXX:APTKL:EPLT-AA¹⁷-LYY:DDSSNVI:EQLSN:NMVVR:SXGXH, RVPSTXX:APVKT:EPLT-AA¹⁷-LYY:DNGRVLL:EQLSN:MIVEE:XGXL, ASAAPXX:VPQAL:EPLT-AA¹⁷-LYY:VGRKPKV:EQLSN:MIVRS:XKXS, ASASPXX:VPQDL:EPLT-AA¹⁷-LYY:VGRTPKV:EQLSN:MVVKS:XKXS, NDEGLEX:VPTEE:EPLT-AA¹⁷-LYY:RIKPHQGQH:EQLSN:FLQHN:KXEXR, NDEGLEX:VPTGQ:EPLT-AA¹⁷-LYY:RIKPHQGQH:EQLSN:LEEHS:QXEXR, SSVKXQP:SRVHH:EPLT-AA¹⁷-LYY:EYVRKKPKL:EQLSN:RLEEH:LEXAXA, RNVQXRP:TQVQL:EPLT-AA¹⁷-LYY:EIVRKKPIF:EQLSN:TLEDH:LAXKXE, KIPKAXX:VPQEL:EPLT-AA¹⁷-LYY:DENEKVV:EQLSN:DMVKS:GXGXR, GIPEPXX:VPQKM:EPLT-AA¹⁷-LYY:DENKNVV:EQLSN:NMVKS:SXAXR, SIPKAXX:VPQEL:EPLT-AA¹⁷-LYY:DEYDKVV:EQLSN:EMVKS:GXGXR, HVTKPTX:VPQKL:EPLT-AA¹⁷-LYY:DDSSNVI:EQLSN:NMVKS:SXGXH, YVPKPXX:VPQKL:EPLT-AA¹⁷-LYY:DDSSNVI:EQLSN:NMVKS:SXGXH, TVPKPXX:VPQQL:EPLT-AA¹⁷-LYY:DDSSNVI:EQLSN:NMVKS:AXGXH, AVPKAXX:VPQKL:EPLT-AA¹⁷-LYY:DSSNNVI:EQLSN:NMVKS:AXGXH, KVGKAXX:VPQKL:EPLT-AA¹⁷-LYY:DDMGVPT:EQLSN:EGMSVKS:XGXR, KASKAXX:VPQKL:EPLT-AA¹⁷-LYY:DKGVVTY:EQLSN:GMVKS:EXGXR, GSAGPXX:VPQKM:EPLT-AA¹⁷-LYY:NDKQQII:EQLSN:GMVKS:RXGXS, AAPASXX:VPQRL:EPLT-AA¹⁷-LYY:DAANNVV:EQLSN:DMVKS:AXGXR, STPPTXX:VPQRL:EPLT-AA¹⁷-LYY:DSANNVV:EQLSN:DMVKS:SXGXR, HVPKPXX:VPQKL:EPLT-AA¹⁷-LYY:DDSSNVI:EQLSN:NMVKS:SXGXH, RVPSTXX:VPQKT:EPLT-AA¹⁷-LYY:DNGRVLL:EQLSN:MIVKS:XGXL, ASAAPXX:VPQAL:EPLT-AA¹⁷-LYY:VGRKPKV:EQLSN:MIVKS:XKXS, ASASPXX:VPQDL:EPLT-AA¹⁷-LYY:IGKTPKI:EQLSN:MIVKS:XKXS, NDEGLEX:VPQEE:EPLT-AA¹⁷-LYY:RIKPHQGQH:EQLSN:FLVKS:KXEXR, NDEGLEX:VPQGQ:EPLT-AA¹⁷-LYY:RIKPHQGQH:EQLSN:LEVKS:QXEXR, SSVKXQP:VPQHH:EPLT-AA¹⁷-LYY:EYVRKKPKL:EQLSN:RLVKS:LEXAXA, RNVQXRP:VPQQL:EPLT-AA¹⁷-LYY:EIVRKKPIF:EQLSN:TLVKS:LAXKXE, ASASPXX:VSQDL:EPLT-AA¹⁷-LYY:IGKTPKI:EQLSN:MIVKS:XKXS, KIPKAXX:VPTEL:SNIT-AA¹⁷-QIM:DENEKVV:IGEMS:DMQHN:GXGXR, GIPEPXX:VPTKM:SNIT-AA¹⁷-QIM:DENKNVV:IGEMS:NMQHN:SXAXR, SIPKAXX:VPTEL:SNIT-AA¹⁷-QIM:DEYDKVV:IGEMS:EMQHN:GXGXR, HVTKPTX:VPTKL:SNIT-AA¹⁷-QIM:DDSSNVI:IGEMS:NMQHN:SXGXH, YVPKPXX:VPTKL:SNIT-AA¹⁷-QIM:DDSSNVI:IGEMS:NMQHN:SXGXH, TVPKPXX:VPTQL:SNIT-AA¹⁷-QIM:DDSSNVI:IGEMS:NMQHN:AXGXH, AVPKAXX:VPTKL:SNIT-AA¹⁷-QIM:DSSNNVI:IGEMS:NMQHN:AXGXH, KVGKAXX:VPTKL:SNIT-AA¹⁷-QIM:DDMGVPT:IGEMS:EGMSQHN:XGXR, KASKAXX:VPTKL:SNIT-AA¹⁷-QIM:DKGVVTY:IGEMS:GMQHN:EXGXR, GSAGPXX:VPTKM:SNIT-AA¹⁷-QIM:NDKQQII:IGEMS:GMQHN:RXGXS, AAPASXX:VPTRL:SNIT-AA¹⁷-QIM:DAANNVV:IGEMS:DMQHN:AXGXR, STPPTXX:VPTRL:SNIT-AA¹⁷-QIM:DSANNVV:IGEMS:DMQHN:SXGXR, HVPKPXX:VPTKL:SNIT-AA¹⁷-QIM:DDSSNVI:IGEMS:NMQHN:SXGXH, RVPSTXX:VPTKT:SNIT-AA¹⁷-QIM:DNGRVLL:IGEMS:MIQHN:XGXL, ASAAPXX:VPTAL:SNIT-AA¹⁷-QIM:VGRKPKV:IGEMS:MIQHN:XKXS, ASASPXX:VPTDL:SNIT-AA¹⁷-QIM:IGKTPKI:IGEMS:MIQHN:XKXS, ASASPXX:VPTDL:SNIT-AA¹⁷-QIM:VGRTPKV:IGEMS:MVQHN:XKXS, NDEGLEX:VPTGQ:SNIT-AA¹⁷-QIM:RIKPHQGQH:IGEMS:LEQHN:QXEXR, NDEGLEX:VPTEE:SNIT-AA¹⁷-QIM:RIKPHQGQH:IGEMS:FLQHN:KXEXR, SSVKXQP:VPTHH:SNIT-AA¹⁷-QIM:EYVRKKPKL:IGEMS:RLQHN:LEXAXA, RNVQXRP:VPTQL:SNIT-AA¹⁷-QIM:EIVRKKPIF:IGEMS:TLQHN:LAXKXE, KIPKAXX:VPTEL:SNIT-AA¹⁷-QIM:DENEKVV:IGEMS:DMVVE:GXGXR, GIPEPXX:VPEKM:SNIT-AA¹⁷-QIM:DENKNVV:IGEMS:NMTVE:SXAXR, SIPKAXX:VPTEL:SNIT-AA¹⁷-QIM:DEYDKVV:IGEMS:EMVVE:GXGXR, HVTKPTX:APTKL:SNIT-AA¹⁷-QIM:DDSSNVI:IGEMS:NMVVR:SXGXH, YVPKPXX:APTKL:SNIT-AA¹⁷-QIM:DDSSNVI:IGEMS:NMVVR:SXGXH, TVPKPXX:APTQL:SNIT-AA¹⁷-QIM:DDSSNVI:IGEMS:NMVVR:AXGXH, AVPKAXX:APTKL:SNIT-AA¹⁷-QIM:DSSNNVI:IGEMS:NMVVK:AXGXH, KVGKAXX:VPTKL:SNIT-AA¹⁷-QIM:DDMGVPT:IGEMS:EGMSVAE:XGXR, KASKAXX:VPTKL:SNIT-AA¹⁷-QIM:DKGVVTY:IGEMS:GMAVS:EXGXR, GSAGPXX:TPTKM:SNIT-AA¹⁷-QIM:NDKQQII:IGEMS:GMVVD:RXGXS, AAPASXX:VPARL:SNIT-AA¹⁷-QIM:DAANNVV:IGEMS:DMVVE:AXGXR, STPPTXX:VPTRL:SNIT-AA¹⁷-QIM:DSANNVV:IGEMS:DMVVE:SXGXR, HVPKPXX:APTKL:SNIT-AA¹⁷-QIM:DDSSNVI:IGEMS:NMVVR:SXGXH, RVPSTXX:APVKT:SNIT-AA¹⁷-QIM:DNGRVLL:IGEMS:MIVEE:XGXL, ASAAPXX:VPQAL:SNIT-AA¹⁷-QIM:VGRKPKV:IGEMS:MIVRS:XKXS, ASASPXX:VSQDL:SNIT-AA¹⁷-QIM:IGKTPKI:IGEMS:MIVKS:XKXS, ASASPXX:VPQDL:SNIT-AA¹⁷-QIM:VGRTPKV:IGEMS:MVVKS:XKXS, NDEGLEX:VPTGQ:SNIT-AA¹⁷-QIM:RIKPHQGQH:IGEMS:LEEHS:QXEXR, SSVKXQP:SRVHH:SNIT-AA¹⁷-QIM:EYVRKKPKL:IGEMS:RLEEH:LEXAXA, RNVQXRP:TQVQL:SNIT-AA¹⁷-QIM:EIVRKKPIF:IGEMS:TLEDH:LAXKXE, KIPKAXX:VPTEL:SNIT-AA¹⁷-QIM:DENEKVV:LGEMS:DMEHS:GXGXR, GIPEPXX:VPTKM:SNIT-AA¹⁷-QIM:DENKNVV:LGEMS:NMEHS:SXAXR, SIPKAXX:VPTEL:SNIT-AA¹⁷-QIM:DEYDKVV:LGEMS:EMEHS:GXGXR, HVTKPTX:VPTKL:SNIT-AA¹⁷-QIM:DDSSNVI:LGEMS:NMEHS:SXGXH, YVPKPXX:VPTKL:SNIT-AA¹⁷-QIM:DDSSNVI:LGEMS:NMEHS:SXGXH, TVPKPXX:VPTQL:SNIT-AA¹⁷-QIM:DDSSNVI:LGEMS:NMEHS:AXGXH, AVPKAXX:VPTKL:SNIT-AA¹⁷-QIM:DSSNNVI:LGEMS:NMEHS:AXGXH, KVGKAXX:VPTKL:SNIT-AA¹⁷-QIM:DDMGVPT:LGEMS:EGMSEHS:XGXR, KASKAXX:VPTKL:SNIT-AA¹⁷-QIM:DKGVVTY:LGEMS:GMEHS:EXGXR, GSAGPXX:VPTKM:SNIT-AA¹⁷-QIM:NDKQQII:LGEMS:GMEHS:RXGXS, AAPASXX:VPTRL:SNIT-AA¹⁷-QIM:DAANNVV:LGEMS:DMEHS:AXGXR, STPPTXX:VPTRL:SNIT-AA¹⁷-QIM:DSANNVV:LGEMS:DMEHS:SXGXR, HVPKPXX:VPTKL:SNIT-AA¹⁷-QIM:DDSSNVI:LGEMS:NMEHS:SXGXH, RVPSTXX:VPTKT:SNIT-AA¹⁷-QIM:DNGRVLL:LGEMS:MIEHS:XGXL, ASAAPXX:VPTAL:SNIT-AA¹⁷-QIM:VGRKPKV:LGEMS:MIEHS:XKXS, ASASPXX:VPTDL:SNIT-AA¹⁷-QIM:IGKTPKI:LGEMS:MIEHS:XKXS, ASASPXX:VPTDL:SNIT-AA¹⁷-QIM:VGRTPKV:LGEMS:MVEHS:XKXS, NDEGLEX:VPTEE:SNIT-AA¹⁷-QIM:RIKPHQGQH:LGEMS:FLEHS:KXEXR, SSVKXQP:VPTHH:SNIT-AA¹⁷-QIM:EYVRKKPKL:LGEMS:RLEHS:LEXAXA, RNVQXRP:VPTQL:SNIT-AA¹⁷-QIM:EIVRKKPIF:LGEMS:TLEHS:LAXKXE, KIPKAXX:VPTEL:SNIT-AA¹⁷-QIM:DENEKVV:LGEMS:DMVVE:GXGXR, GIPEPXX:VPEKM:SNIT-AA¹⁷-QIM:DENKNVV:LGEMS:NMTVE:SXAXR, SIPKAXX:VPTEL:SNIT-AA¹⁷-QIM:DEYDKVV:LGEMS:EMVVE:GXGXR, HVTKPTX:APTKL:SNIT-AA¹⁷-QIM:DDSSNVI:LGEMS:NMVVR:SXGXH, YVPKPXX:APTKL:SNIT-AA¹⁷-QIM:DDSSNVI:LGEMS:NMVVR:SXGXH, TVPKPXX:APTQL:SNIT-AA¹⁷-QIM:DDSSNVI:LGEMS:NMVVR:AXGXH, AVPKAXX:APTKL:SNIT-AA¹⁷-QIM:DSSNNVI:LGEMS:NMVVK:AXGXH, KVGKAXX:VPTKL:SNIT-AA¹⁷-QIM:DDMGVPT:LGEMS:EGMSVAE:XGXR, KASKAXX:VPTKL:SNIT-AA¹⁷-QIM:DKGVVTY:LGEMS:GMAVS:EXGXR, GSAGPXX:TPTKM:SNIT-AA¹⁷-QIM:NDKQQII:LGEMS:GMVVD:RXGXS, AAPASXX:VPARL:SNIT-AA¹⁷-QIM:DAANNVV:LGEMS:DMVVE:AXGXR, STPPTXX:VPTRL:SNIT-AA¹⁷-QIM:DSANNVV:LGEMS:DMVVE:SXGXR, HVPKPXX:APTKL:SNIT-AA¹⁷-QIM:DDSSNVI:LGEMS:NMVVR:SXGXH, RVPSTXX:APVKT:SNIT-AA¹⁷-QIM:DNGRVLL:LGEMS:MIVEE:XGXL, ASAAPXX:VPQAL:SNIT-AA¹⁷-QIM:VGRKPKV:LGEMS:MIVRS:XKXS, ASASPXX:VSQDL:SNIT-AA¹⁷-QIM:IGKTPKI:LGEMS:MIVKS:XKXS, ASASPXX:VPQDL:SNIT-AA¹⁷-QIM:VGRTPKV:LGEMS:MVVKS:XKXS, NDEGLEX:VPTEE:SNIT-AA¹⁷-QIM:RIKPHQGQH:LGEMS:FLQHN:KXEXR, SSVKXQP:SRVHH:SNIT-AA¹⁷-QIM:EYVRKKPKL:LGEMS:RLEEH:LEXAXA, RNVQXRP:TQVQL:SNIT-AA¹⁷-QIM:EIVRKKPIF:LGEMS:TLEDH:LAXKXE, KIPKAXX:SRVEL:RSVK-AA¹⁷-AKV:DENEKVV:KEVQV:DMEEH:GXGXR, GIPEPXX:SRVKM:RSVK-AA¹⁷-AKV:DENKNVV:KEVQV:NMEEH:SXAXR, SIPKAXX:SRVEL:RSVK-AA¹⁷-AKV:DEYDKVV:KEVQV:EMEEH:GXGXR, HVTKPTX:SRVKL:RSVK-AA¹⁷-AKV:DDSSNVI:KEVQV:NMEEH:SXGXH, YVPKPXX:SRVKL:RSVK-AA¹⁷-AKV:DDSSNVI:KEVQV:NMEEH:SXGXH, TVPKPXX:SRVQL:RSVK-AA¹⁷-AKV:DDSSNVI:KEVQV:NMEEH:AXGXH, AVPKAXX:SRVKL:RSVK-AA¹⁷-AKV:DSSNNVI:KEVQV:NMEEH:AXGXH, KVGKAXX:SRVKL:RSVK-AA¹⁷-AKV:DDMGVPT:KEVQV:EGMSEEH:XGXR, KASKAXX:SRVKL:RSVK-AA¹⁷-AKV:DKGVVTY:KEVQV:GMEEH:EXGXR, GSAGPXX:SRVKM:RSVK-AA¹⁷-AKV:NDKQQII:KEVQV:GMEEH:RXGXS, AAPASXX:SRVRL:RSVK-AA¹⁷-AKV:DAANNVV:KEVQV:DMEEH:AXGXR, STPPTXX:SRVRL:RSVK-AA¹⁷-AKV:DSANNVV:KEVQV:DMEEH:SXGXR, HVPKPXX:SRVKL:RSVK-AA¹⁷-AKV:DDSSNVI:KEVQV:NMEEH:SXGXH, RVPSTXX:SRVKT:RSVK-AA¹⁷-AKV:DNGRVLL:KEVQV:MIEEH:XGXL, ASAAPXX:SRVAL:RSVK-AA¹⁷-AKV:VGRKPKV:KEVQV:MIEEH:XKXS, ASASPXX:SRVDL:RSVK-AA¹⁷-AKV:IGKTPKI:KEVQV:MIEEH:XKXS, ASASPXX:SRVDL:RSVK-AA¹⁷-AKV:VGRTPKV:KEVQV:MVEEH:XKXS, NDEGLEX:SRVEE:RSVK-AA¹⁷-AKV:RIKPHQGQH:KEVQV:FLEEH:KXEXR, NDEGLEX:SRVGQ:RSVK-AA¹⁷-AKV:RIKPHQGQH:KEVQV:LEEEH:QXEXR, RNVQXRP:SRVQL:RSVK-AA¹⁷-AKV:EIVRKKPIF:KEVQV:TLEEH:LAXKXE, KIPKAXX:VPTEL:RSVK-AA¹⁷-AKV:DENEKVV:KEVQV:DMVVE:GXGXR, GIPEPXX:VPEKM:RSVK-AA¹⁷-AKV:DENKNVV:KEVQV:NMTVE:SXAXR, SIPKAXX:VPTEL:RSVK-AA¹⁷-AKV:DEYDKVV:KEVQV:EMVVE:GXGXR, HVTKPTX:APTKL:RSVK-AA¹⁷-AKV:DDSSNVI:KEVQV:NMVVR:SXGXH, YVPKPXX:APTKL:RSVK-AA¹⁷-AKV:DDSSNVI:KEVQV:NMVVR:SXGXH, TVPKPXX:APTQL:RSVK-AA¹⁷-AKV:DDSSNVI:KEVQV:NMVVR:AXGXH, AVPKAXX:APTKL:RSVK-AA¹⁷-AKV:DSSNNVI:KEVQV:NMVVK:AXGXH, KVGKAXX:VPTKL:RSVK-AA¹⁷-AKV:DDMGVPT:KEVQV:EGMSVAE:XGXR, KASKAXX:VPTKL:RSVK-AA¹⁷-AKV:DKGVVTY:KEVQV:GMAVS:EXGXR, GSAGPXX:TPTKM:RSVK-AA¹⁷-AKV:NDKQQII:KEVQV:GMVVD:RXGXS, AAPASXX:VPARL:RSVK-AA¹⁷-AKV:DAANNVV:KEVQV:DMVVE:AXGXR, STPPTXX:VPTRL:RSVK-AA¹⁷-AKV:DSANNVV:KEVQV:DMVVE:SXGXR, HVPKPXX:APTKL:RSVK-AA¹⁷-AKV:DDSSNVI:KEVQV:NMVVR:SXGXH, RVPSTXX:APVKT:RSVK-AA¹⁷-AKV:DNGRVLL:KEVQV:MIVEE:XGXL, ASAAPXX:VPQAL:RSVK-AA¹⁷-AKV:VGRKPKV:KEVQV:MIVRS:XKXS, ASASPXX:VSQDL:RSVK-AA¹⁷-AKV:IGKTPKI:KEVQV:MIVKS:XKXS, ASASPXX:VPQDL:RSVK-AA¹⁷-AKV:VGRTPKV:KEVQV:MVVKS:XKXS, NDEGLEX:VPTEE:RSVK-AA¹⁷-AKV:RIKPHQGQH:KEVQV:FLQHN:KXEXR, NDEGLEX:VPTGQ:RSVK-AA¹⁷-AKV:RIKPHQGQH:KEVQV:LEEHS:QXEXR, RNVQXRP:TQVQL:RSVK-AA¹⁷-AKV:EIVRKKPIF:KEVQV:TLEDH:LAXKXE, KIPKAXX:TQVEL:RPVQ-AA¹⁷-RKI:DENEKVV:KKATV:DMEDH:GXGXR, GIPEPXX:TQVKM:RPVQ-AA¹⁷-RKI:DENKNVV:KKATV:NMEDH:SXAXR, SIPKAXX:TQVEL:RPVQ-AA¹⁷-RKI:DEYDKVV:KKATV:EMEDH:GXGXR, HVTKPTX:TQVKL:RPVQ-AA¹⁷-RKI:DDSSNVI:KKATV:NMEDH:SXGXH, YVPKPXX:TQVKL:RPVQ-AA¹⁷-RKI:DDSSNVI:KKATV:NMEDH:SXGXH, TVPKPXX:TQVQL:RPVQ-AA¹⁷-RKI:DDSSNVI:KKATV:NMEDH:AXGXH, AVPKAXX:TQVKL:RPVQ-AA¹⁷-RKI:DSSNNVI:KKATV:NMEDH:AXGXH, KVGKAXX:TQVKL:RPVQ-AA¹⁷-RKI:DDMGVPT:KKATV:EGMSEDH:XGXR, KASKAXX:TQVKL:RPVQ-AA¹⁷-RKI:DKGVVTY:KKATV:GMEDH:EXGXR, GSAGPXX:TQVKM:RPVQ-AA¹⁷-RKI:NDKQQII:KKATV:GMEDH:RXGXS, AAPASXX:TQVRL:RPVQ-AA¹⁷-RKI:DAANNVV:KKATV:DMEDH:AXGXR, STPPTXX:TQVRL:RPVQ-AA¹⁷-RKI:DSANNVV:KKATV:DMEDH:SXGXR, HVPKPXX:TQVKL:RPVQ-AA¹⁷-RKI:DDSSNVI:KKATV:NMEDH:SXGXH, RVPSTXX:TQVKT:RPVQ-AA¹⁷-RKI:DN GRVLL:KKATV: MIED H:XGXL, ASAAPXX:TQVAL:RPVQ-AA¹⁷-RKI:VGRKPKV:KKATV:MIEDH:XKXS, ASASPXX:TQVDL:RPVQ-AA¹⁷-RKI:IGKTPKI:KKATV:MIEDH:XKXS, ASASPXX:TQVDL:RPVQ-AA¹⁷-RKI:VGRTPKV:KKATV:MVEDH:XKXS, NDEGLEX:TQVEE:RPVQ-AA¹⁷-RKI:RIKPHQGQH:KKATV:FLEDH:KXEXR, NDEGLEX:TQVGQ:RPVQ-AA¹⁷-RKI:RIKPHQGQH:KKATV:LEEDH:QXEXR, SSVKXQP:TQVHH:RPVQ-AA¹⁷-RKI:EYVRKKPKL:KKATV:RLEDH:LEXAXA, KIPKAXX:VPTEL:RPVQ-AA¹⁷-RKI:DENEKVV:KKATV:DMVVE:GXGXR, GIPEPXX:VPEKM:RPVQ-AA¹⁷-RKI:DENKNVV:KKATV:NMTVE:SXAXR, SIPKAXX:VPTEL:RPVQ-AA¹⁷-RKI:DEYDKVV:KKATV:EMVVE:GXGXR, HVTKPTX:APTKL:RPVQ-AA¹⁷-RKI:DDSSNVI:KKATV:NMVVR:SXGXH, YVPKPXX:APTKL:RPVQ-AA¹⁷-RKI:DDSSNVI:KKATV:NMVVR:SXGXH, TVPKPXX:APTQL:RPVQ-AA¹⁷-RKI:DDSSNVI:KKATV:NMVVR:AXGXH, AVPKAXX:APTKL:RPVQ-AA¹⁷-RKI:DSSNNVI:KKATV:NMVVK:AXGXH, KVGKAXX:VPTKL:RPVQ-AA¹⁷-RKI:DDMGVPT:KKATV:EGMSVAE:XGXR, KASKAXX:VPTKL:RPVQ-AA¹⁷-RKI:DKGVVTY:KKATV:GMAVS:EXGXR, GSAGPXX:TPTKM:RPVQ-AA¹⁷-RKI:NDKQQII:KKATV:GMVVD:RXGXS, AAPASXX:VPARL:RPVQ-AA¹⁷-RKI:DAANNVV:KKATV:DMVVE:AXGXR, STPPTXX:VPTRL:RPVQ-AA¹⁷-RKI:DSANNVV:KKATV:DMVVE:SXGXR, HVPKPXX:APTKL:RPVQ-AA¹⁷-RKI:DDSSNVI:KKATV:NMVVR:SXGXH, RVPSTXX:APVKT:RPVQ-AA¹⁷-RKI:DNGRVLL:KKATV:MIVEE:XGXL, ASAAPXX:VPQAL:RPVQ-AA¹⁷-RKI:VGRKPKV:KKATV:MIVRS:XKXS, ASASPXX:VSQDL:RPVQ-AA¹⁷-RKI:IGKTPKI:KKATV:MIVKS:XKXS, ASASPXX:VPQDL:RPVQ-AA¹⁷-RKI:VGRTPKV:KKATV:MVVKS:XKXS, NDEGLEX:VPTEE:RPVQ-AA¹⁷-RKI:RIKPHQGQH:KKATV:FLQHN:KXEXR, NDEGLEX:VPTGQ:RPVQ-AA¹⁷-RKI:RIKPHQGQH:KKATV:LEEHS:QXEXR and SSVKXQP:SRVHH:RPVQ-AA¹⁷-RKI:EYVRKKPKL:KKATV:RLEEH:LEXAXA; and wherein AA¹⁷ is selected from the group consisting of G, A, V, L, I, P, F, M, W, T and S (in particular is selected from the group consisting of M, I, L, V and T). More particularly, the heptuplet PEP7:PEP5:PEP12:LINKER:PEP2:PEP6:PEP8 is selected from the group consisting of GIPEPXX:VPTKM:SAIS-AA¹⁷-LYL:DENKNVV:LKNYQ:NMVVE:SXAXR, HVTKPTX:VPTKL:SAIS-AA¹⁷-LYL:DDSSNVI:LKNYQ:NMVVE:SXGXH, YVPKPXX:VPTKL:SAIS-AA¹⁷-LYL:DDSSNVI:LKNYQ:NMVVE:SXGXH, TVPKPXX:VPTQL:SAIS-AA¹⁷-LYL:DDSSNVI:LKNYQ:NMVVE:AXGXH, AVPKAXX:VPTKL:SAIS-AA¹⁷-LYL:DSSNNVI:LKNYQ:NMVVE:AXGXH, KVGKAXX:VPTKL:SAIS-AA¹⁷-LYL:DDMGVPT:LKNYQ:EGMSVVE:XGXR, KASKAXX:VPTKL:SAIS-AA¹⁷-LYL:DKGVVTY:LKNYQ:GMVVE:EXGXR, GSAGPXX:VPTKM:SAIS-AA¹⁷-LYL:NDKQQII:LKNYQ:GMVVE:RXGXS, AAPASXX:VPTRL:SAIS-AA¹⁷-LYL:DAANNVV:LKNYQ:DMVVE:AXGXR, STPPTXX:VPTRL:SAIS-AA¹⁷-LYL:DSANNVV:LKNYQ:DMVVE:SXGXR, HVPKPXX:VPTKL:SAIS-AA¹⁷-LYL:DDSSNVI:LKNYQ:NMVVE:SXGXH, RVPSTXX:VPTKT:SAIS-AA¹⁷-LYL:DNGRVLL:LKNYQ:MIVVE:XGXL, ASAAPXX:VPTAL:SAIS-AA¹⁷-LYL:VGRKPKV:LKNYQ:MIVVE:XKXS, ASASPXX:VPTDL:SAIS-AA¹⁷-LYL:IGKTPKI:LKNYQ:MIVVE:XKXS, ASASPXX:VPTDL:SAIS-AA¹⁷-LYL:VGRTPKV:LKNYQ:MVVVE:XKXS, GIPEPXX:VPEKM:SAIS-AA¹⁷-LYL:DENKNVV:LKNYQ:NMTVE:SXAXR, HVTKPTX:APTKL:SAIS-AA¹⁷-LYL:DDSSNVI:LKNYQ:NMVVR:SXGXH, YVPKPXX:APTKL:SAIS-AA¹⁷-LYL:DDSSNVI:LKNYQ:NMVVR:SXGXH, TVPKPXX:APTQL:SAIS-AA¹⁷-LYL:DDSSNVI:LKNYQ:NMVVR:AXGXH, AVPKAXX:APTKL:SAIS-AA¹⁷-LYL:DSSNNVI:LKNYQ:NMVVK:AXGXH, KVGKAXX:VPTKL:SAIS-AA¹⁷-LYL:DDMGVPT:LKNYQ:EGMSVAE:XGXR, KASKAXX:VPTKL:SAIS-AA¹⁷-LYL:DKGVVTY:LKNYQ:GMAVS:EXGXR, GSAGPXX:TPTKM:SAIS-AA¹⁷-LYL:NDKQQII:LKNYQ:GMVVD:RXGXS, AAPASXX:VPARL:SAIS-AA¹⁷-LYL:DAANNVV:LKNYQ:DMVVE:AXGXR, HVPKPXX:APTKL:SAIS-AA¹⁷-LYL:DDSSNVI:LKNYQ:NMVVR:SXGXH, RVPSTXX:APVKT:SAIS-AA¹⁷-LYL:DNGRVLL:LKNYQ:MIVEE:XGXL, ASAAPXX:VPQAL:SAIS-AA¹⁷-LYL:VGRKPKV:LKNYQ:MIVRS:XKXS, ASASPXX:VSQDL:SAIS-AA¹⁷-LYL:IGKTPKI:LKNYQ:MIVKS:XKXS, ASASPXX:VPQDL:SAIS-AA¹⁷-LYL:VGRTPKV:LKNYQ:MVVKS:XKXS, NDEGLEX:VPTEE:SAIS-AA¹⁷-LYL:RIKPHQGQH:LKNYQ:FLQHN:KXEXR, NDEGLEX:VPTGQ:SAIS-AA¹⁷-LYL:RIKPHQGQH:LKNYQ:LEEHS:QXEXR, SSVKXQP:SRVHH:SAIS-AA¹⁷-LYL:EYVRKKPKL:LKNYQ:RLEEH:LEXAXA, RNVQXRP:TQVQL:SAIS-AA¹⁷-LYL:EIVRKKPIF:LKNYQ:TLEDH:LAXKXE, KIPKAXX:VPEEL:SSLS-AA¹⁷-LFF:DENEKVV:LKVYP:DMTVE:GXGXR, SIPKAXX:VPEEL:SSLS-AA¹⁷-LFF:DEYDKVV:LKVYP:EMTVE:GXGXR, HVTKPTX:VPEKL:SSLS-AA¹⁷-LFF:DDSSNVI:LKVYP:NMTVE:SXGXH, YVPKPXX:VPEKL:SSLS-AA¹⁷-LFF:DDSSNVI:LKVYP:NMTVE:SXGXH, TVPKPXX:VPEQL:SSLS-AA¹⁷-LFF:DDSSNVI:LKVYP:NMTVE:AXGXH, AVPKAXX:VPEKL:SSLS-AA¹⁷-LFF:DSSNNVI:LKVYP:NMTVE:AXGXH, KVGKAXX:VPEKL:SSLS-AA¹⁷-LFF:DDMGVPT:LKVYP:EGMSTVE:XGXR, KASKAXX:VPEKL:SSLS-AA¹⁷-LFF:DKGVVTY:LKVYP:GMTVE:EXGXR, GSAGPXX:VPEKM:SSLS-AA¹⁷-LFF:NDKQQII:LKVYP:GMTVE:RXGXS, AAPASXX:VPERL:SSLS-AA¹⁷-LFF:DAANNVV:LKVYP:DMTVE:AXGXR, STPPTXX:VPERL:SSLS-AA¹⁷-LFF:DSANNVV:LKVYP:DMTVE:SXGXR, HVPKPXX:VPEKL:SSLS-AA¹⁷-LFF:DDSSNVI:LKVYP:NMTVE:SXGXH, RVPSTXX:VPEKT:SSLS-AA¹⁷-LFF:DNGRVLL:LKVYP:MITVE:XGXL, ASAAPXX:VPEAL:SSLS-AA¹⁷-LFF:VGRKPKV:LKVYP:MITVE:XKXS, ASASPXX:VPEDL:SSLS-AA¹⁷-LFF:IGKTPKI:LKVYP:MITVE:XKXS, ASASPXX:VPEDL:SSLS-AA¹⁷-LFF:VGRTPKV:LKVYP:MVTVE:XKXS, KIPKAXX:VPTEL:SSLS-AA¹⁷-LFF:DENEKVV:LKVYP:DMVVE:GXGXR, SIPKAXX:VPTEL:SSLS-AA¹⁷-LFF:DEYDKVV:LKVYP:EMVVE:GXGXR, HVTKPTX:APTKL:SSLS-AA¹⁷-LFF:DDSSNVI:LKVYP:NMVVR:SXGXH, YVPKPXX:APTKL:SSLS-AA¹⁷-LFF:DDSSNVI:LKVYP:NMVVR:SXGXH, TVPKPXX:APTQL:SSLS-AA¹⁷-LFF:DDSSNVI:LKVYP:NMVVR:AXGXH, AVPKAXX:APTKL:SSLS-AA¹⁷-LFF:DSSNNVI:LKVYP:NMVVK:AXGXH, KVGKAXX:VPTKL:SSLS-AA¹⁷-LFF:DDMGVPT:LKVYP:EGMSVAE:XGXR, KASKAXX:VPTKL:SSLS-AA¹⁷-LFF:DKGVVTY:LKVYP:GMAVS:EXGXR, GSAGPXX:TPTKM:SSLS-AA¹⁷-LFF:NDKQQII:LKVYP:GMVVD:RXGXS, AAPASXX:VPARL:SSLS-AA¹⁷-LFF:DAANNVV:LKVYP:DMVVE:AXGXR, STPPTXX:VPTRL:SSLS-AA¹⁷-LFF:DSANNVV:LKVYP:DMVVE:SXGXR, HVPKPXX:APTKL:SSLS-AA¹⁷-LFF:DDSSNVI:LKVYP:NMVVR:SXGXH, RVPSTXX:APVKT:SSLS-AA¹⁷-LFF:DNGRVLL:LKVYP:MIVEE:XGXL, ASAAPXX:VPQAL:SSLS-AA¹⁷-LFF:VGRKPKV:LKVYP:MIVRS:XKXS, ASASPXX:VSQDL:SSLS-AA¹⁷-LFF:IGKTPKI:LKVYP:MIVKS:XKXS, ASASPXX:VPQDL:SSLS-AA¹⁷-LFF:VGRTPKV:LKVYP:MVVKS:XKXS, NDEGLEX:VPTEE:SSLS-AA¹⁷-LFF:RIKPHQGQH:LKVYP:FLQHN:KXEXR, NDEGLEX:VPTGQ:SSLS-AA¹⁷-LFF:RIKPHQGQH:LKVYP:LEEHS:QXEXR, SSVKXQP:SRVHH:SSLS-AA¹⁷-LFF:EYVRKKPKL:LKVYP:RLEEH:LEXAXA, RNVQXRP:TQVQL:SSLS-AA¹⁷-LFF:EIVRKKPIF:LKVYP:TLEDH:LAXKXE, KIPKAXX:APTEL:NAIS-AA¹⁷-LYF:DENEKVV:LKKYR:DMVVR:GXGXR, GIPEPXX:APTKM:NAIS-AA¹⁷-LYF:DENKNVV:LKKYR:NMVVR:SXAXR, SIPKAXX:APTEL:NAIS-AA¹⁷-LYF:DEYDKVV:LKKYR:EMVVR:GXGXR, AVPKAXX:APTKL:NAIS-AA¹⁷-LYF:DSSNNVI:LKKYR:NMVVR:AXGXH, KVGKAXX:APTKL:NAIS-AA¹⁷-LYF:DDMGVPT:LKKYR:EGMSVVR:XGXR, KASKAXX:APTKL:NAIS-AA¹⁷-LYF:DKGVVTY:LKKYR:GMVVR:EXGXR, GSAGPXX:APTKM:NAIS-AA¹⁷-LYF:NDKQQII:LKKYR:GMVVR:RXGXS, AAPASXX:APTRL:NAIS-AA¹⁷-LYF:DAANNVV:LKKYR:DMVVR:AXGXR, STPPTXX:APTRL:NAIS-AA¹⁷-LYF:DSANNVV:LKKYR:DMVVR:SXGXR, RVPSTXX:APTKT:NAIS-AA¹⁷-LYF:DNGRVLL:LKKYR:MIVVR:XGXL, ASAAPXX:APTAL:NAIS-AA¹⁷-LYF:VGRKPKV:LKKYR:MIVVR:XKXS, ASASPXX:APTDL:NAIS-AA¹⁷-LYF:IGKTPKI:LKKYR:MIVVR:XKXS, ASASPXX:APTDL:NAIS-AA¹⁷-LYF:VGRTPKV:LKKYR:MVVVR:XKXS, KIPKAXX:VPTEL:NAIS-AA¹⁷-LYF:DENEKVV:LKKYR:DMVVE:GXGXR, GIPEPXX:VPEKM:NAIS-AA¹⁷-LYF:DENKNVV:LKKYR:NMTVE:SXAXR, SIPKAXX:VPTEL:NAIS-AA¹⁷-LYF:DEYDKVV:LKKYR:EMVVE:GXGXR, AVPKAXX:APTKL:NAIS-AA¹⁷-LYF:DSSNNVI:LKKYR:NMVVK:AXGXH, KVGKAXX:VPTKL:NAIS-AA¹⁷-LYF:DDMGVPT:LKKYR:EGMSVAE:XGXR, KASKAXX:VPTKL:NAIS-AA¹⁷-LYF:DKGVVTY:LKKYR:GMAVS:EXGXR, GSAGPXX:TPTKM:NAIS-AA¹⁷-LYF:NDKQQII:LKKYR:GMVVD:RXGXS, AAPASXX:VPARL:NAIS-AA¹⁷-LYF:DAANNVV:LKKYR:DMVVE:AXGXR, STPPTXX:VPTRL:NAIS-AA¹⁷-LYF:DSANNVV:LKKYR:DMVVE:SXGXR, RVPSTXX:APVKT:NAIS-AA¹⁷-LYF:DNGRVLL:LKKYR:MIVEE:XGXL, ASAAPXX:VPQAL:NAIS-AA¹⁷-LYF:VGRKPKV:LKKYR:MIVRS:XKXS, ASASPXX:VSQDL:NAIS-AA¹⁷-LYF:IGKTPKI:LKKYR:MIVKS:XKXS, ASASPXX:VPQDL:NAIS-AA¹⁷-LYF:VGRTPKV:LKKYR:MVVKS:XKXS, NDEGLEX:VPTEE:NAIS-AA¹⁷-LYF:RIKPHQGQH:LKKYR:FLQHN:KXEXR, NDEGLEX:VPTGQ:NAIS-AA¹⁷-LYF:RIKPHQGQH:LKKYR:LEEHS:QXEXR, SSVKXQP:SRVHH:NAIS-AA¹⁷-LYF:EYVRKKPKL:LKKYR:RLEEH:LEXAXA, RNVQXRP:TQVQL:NAIS-AA¹⁷-LYF:EIVRKKPIF:LKKYR:TLEDH:LAXKXE, KIPKAXX:APTEL:SATS-AA¹⁷-LYY:DENEKVV:LRKHR:DMVVK:GXGXR, GIPEPXX:APTKM:SATS-AA¹⁷-LYY:DENKNVV:LRKHR:NMVVK:SXAXR, SIPKAXX:APTEL:SATS-AA¹⁷-LYY:DEYDKVV:LRKHR:EMVVK:GXGXR, HVTKPTX:APTKL:SATS-AA¹⁷-LYY:DDSSNVI:LRKHR:NMVVK:SXGXH, YVPKPXX:APTKL:SATS-AA¹⁷-LYY:DDSSNVI:LRKHR:NMVVK:SXGXH, TVPKPXX:APTQL:SATS-AA¹⁷-LYY:DDSSNVI:LRKHR:NMVVK:AXGXH, KVGKAXX:APTKL:SATS-AA¹⁷-LYY:DDMGVPT:LRKHR:EGMSVVK:XGXR, KASKAXX:APTKL:SATS-AA¹⁷-LYY:DKGVVTY:LRKHR:GMVVK:EXGXR, GSAGPXX:APTKM:SATS-AA¹⁷-LYY:NDKQQII:LRKHR:GMVVK:RXGXS, AAPASXX:APTRL:SATS-AA¹⁷-LYY:DAANNVV:LRKHR:DMVVK:AXGXR, STPPTXX:APTRL:SATS-AA¹⁷-LYY:DSANNVV:LRKHR:DMVVK:SXGXR, HVPKPXX:APTKL:SATS-AA¹⁷-LYY:DDSSNVI:LRKHR:NMVVK:SXGXH, RVPSTXX:APTKT:SATS-AA¹⁷-LYY:DNGRVLL:LRKHR:MIVVK:XGXL, ASAAPXX:APTAL:SATS-AA¹⁷-LYY:VGRKPKV:LRKHR:MIVVK:XKXS, ASASPXX:APTDL:SATS-AA¹⁷-LYY:IGKTPKI:LRKHR:MIVVK:XKXS, ASASPXX:APTDL:SATS-AA¹⁷-LYY:VGRTPKV:LRKHR:MVVVK:XKXS, KIPKAXX:VPTEL:SATS-AA¹⁷-LYY:DENEKVV:LRKHR:DMVVE:GXGXR, GIPEPXX:VPEKM:SATS-AA¹⁷-LYY:DENKNVV:LRKHR:NMTVE:SXAXR, SIPKAXX:VPTEL:SATS-AA¹⁷-LYY:DEYDKVV:LRKHR:EMVVE:GXGXR, HVTKPTX:APTKL:SATS-AA¹⁷-LYY:DDSSNVI:LRKHR:NMVVR:SXGXH, YVPKPXX:APTKL:SATS-AA¹⁷-LYY:DDSSNVI:LRKHR:NMVVR:SXGXH, TVPKPXX:APTQL:SATS-AA¹⁷-LYY:DDSSNVI:LRKHR:NMVVR:AXGXH, KVGKAXX:VPTKL:SATS-AA¹⁷-LYY:DDMGVPT:LRKHR:EGMSVAE:XGXR, KASKAXX:VPTKL:SATS-AA¹⁷-LYY:DKGVVTY:LRKHR:GMAVS:EXGXR, GSAGPXX:TPTKM:SATS-AA¹⁷-LYY:NDKQQII:LRKHR:GMVVD:RXGXS, AAPASXX:VPARL:SATS-AA¹⁷-LYY:DAANNVV:LRKHR:DMVVE:AXGXR, STPPTXX:VPTRL:SATS-AA¹⁷-LYY:DSANNVV:LRKHR:DMVVE:SXGXR, HVPKPXX:APTKL:SATS-AA¹⁷-LYY:DDSSNVI:LRKHR:NMVVR:SXGXH, RVPSTXX:APVKT:SATS-AA¹⁷-LYY:DNGRVLL:LRKHR:MIVEE:XGXL, ASAAPXX:VPQAL:SATS-AA¹⁷-LYY:VGRKPKV:LRKHR:MIVRS:XKXS, ASASPXX:VSQDL:SATS-AA¹⁷-LYY:IGKTPKI:LRKHR:MIVKS:XKXS, ASASPXX:VPQDL:SATS-AA¹⁷-LYY:VGRTPKV:LRKHR:MVVKS:XKXS, NDEGLEX:VPTEE:SATS-AA¹⁷-LYY:RIKPHQGQH:LRKHR:FLQHN:KXEXR, NDEGLEX:VPTGQ:SATS-AA¹⁷-LYY:RIKPHQGQH:LRKHR:LEEHS:QXEXR, SSVKXQP:SRVHH:SATS-AA¹⁷-LYY:EYVRKKPKL:LRKHR:RLEEH:LEXAXA, RNVQXRP:TQVQL:SATS-AA¹⁷-LYY:EIVRKKPIF:LRKHR:TLEDH:LAXKXE, KIPKAXX:VPTEL:SPIS-AA¹⁷-LYK:DENEKVV:LKYHY:DMVAE:GXGXR, GIPEPXX:VPTKM:SPIS-AA¹⁷-LYK:DENKNVV:LKYHY:NMVAE:SXAXR, SIPKAXX:VPTEL:SPIS-AA¹⁷-LYK:DEYDKVV:LKYHY:EMVAE:GXGXR, HVTKPTX:VPTKL:SPIS-AA¹⁷-LYK:DDSSNVI:LKYHY:NMVAE:SXGXH, YVPKPXX:VPTKL:SPIS-AA¹⁷-LYK:DDSSNVI:LKYHY:NMVAE:SXGXH, TVPKPXX:VPTQL:SPIS-AA¹⁷-LYK:DDSSNVI:LKYHY:NMVAE:AXGXH, AVPKAXX:VPTKL:SPIS-AA¹⁷-LYK:DSSNNVI:LKYHY:NMVAE:AXGXH, KASKAXX:VPTKL:SPIS-AA¹⁷-LYK:DKGVVTY:LKYHY:GMVAE:EXGXR, GSAGPXX:VPTKM:SPIS-AA¹⁷-LYK:NDKQQII:LKYHY:GMVAE:RXGXS, AAPASXX:VPTRL:SPIS-AA¹⁷-LYK:DAANNVV:LKYHY:DMVAE:AXGXR, STPPTXX:VPTRL:SPIS-AA¹⁷-LYK:DSANNVV:LKYHY:DMVAE:SXGXR, HVPKPXX:VPTKL:SPIS-AA¹⁷-LYK:DDSSNVI:LKYHY:NMVAE:SXGXH, RVPSTXX:VPTKT:SPIS-AA¹⁷-LYK:DNGRVLL:LKYHY:MIVAE:XGXL, ASAAPXX:VPTAL:SPIS-AA¹⁷-LYK:VGRKPKV:LKYHY:MIVAE:XKXS, ASASPXX:VPTDL:SPIS-AA¹⁷-LYK:IGKTPKI:LKYHY:MIVAE:XKXS, ASASPXX:VPTDL:SPIS-AA¹⁷-LYK:VGRTPKV:LKYHY:MVVAE:XKXS, KIPKAXX:VPTEL:SPIS-AA¹⁷-LYK:DENEKVV:LKYHY:DMVVE:GXGXR, GIPEPXX:VPEKM:SPIS-AA¹⁷-LYK:DENKNVV:LKYHY:NMTVE:SXAXR, SIPKAXX:VPTEL:SPIS-AA¹⁷-LYK:DEYDKVV:LKYHY:EMVVE:GXGXR, HVTKPTX:APTKL:SPIS-AA¹⁷-LYK:DDSSNVI:LKYHY:NMVVR:SXGXH, YVPKPXX:APTKL:SPIS-AA¹⁷-LYK:DDSSNVI:LKYHY:NMVVR:SXGXH, TVPKPXX:APTQL:SPIS-AA¹⁷-LYK:DDSSNVI:LKYHY:NMVVR:AXGXH, AVPKAXX:APTKL:SPIS-AA¹⁷-LYK:DSSNNVI:LKYHY:NMVVK:AXGXH, KASKAXX:VPTKL:SPIS-AA¹⁷-LYK:DKGVVTY:LKYHY:GMAVS:EXGXR, GSAGPXX:TPTKM:SPIS-AA¹⁷-LYK:NDKQQII:LKYHY:GMVVD:RXGXS, AAPASXX:VPARL:SPIS-AA¹⁷-LYK:DAANNVV:LKYHY:DMVVE:AXGXR, STPPTXX:VPTRL:SPIS-AA¹⁷-LYK:DSANNVV:LKYHY:DMVVE:SXGXR, HVPKPXX:APTKL:SPIS-AA¹⁷-LYK:DDSSNVI:LKYHY:NMVVR:SXGXH, RVPSTXX:APVKT:SPIS-AA¹⁷-LYK:DNGRVLL:LKYHY:MIVEE:XGXL, ASAAPXX:VPQAL:SPIS-AA¹⁷-LYK:VGRKPKV:LKYHY:MIVRS:XKXS, ASASPXX:VSQDL:SPIS-AA¹⁷-LYK:IGKTPKI:LKYHY:MIVKS:XKXS, ASASPXX:VPQDL:SPIS-AA¹⁷-LYK:VGRTPKV:LKYHY:MVVKS:XKXS, NDEGLEX:VPTEE:SPIS-AA¹⁷-LYK:RIKPHQGQH:LKYHY:FLQHN:KXEXR, NDEGLEX:VPTGQ:SPIS-AA¹⁷-LYK:RIKPHQGQH:LKYHY:LEEHS:QXEXR, SSVKXQP:SRVHH:SPIS-AA¹⁷-LYK:EYVRKKPKL:LKYHY:RLEEH:LEXAXA, RNVQXRP:TQVQL:SPIS-AA¹⁷-LYK:EIVRKKPIF:LKYHY:TLEDH:LAXKXE, KIPKAXX:VPTEL:EPIS-AA¹⁷-LYL:DENEKVV:KFKYE:DMAVS:GXGXR, GIPE PXX:VPTKM:EPIS-AA¹⁷-LYL:DENKNVV:KFKYE:NMAVS:SXAXR, SIPKAXX:VPTEL:EPIS-AA¹⁷-LYL:DEYDKVV:KFKYE:EMAVS:GXGXR, HVTKPTX:VPTKL:EPIS-AA¹⁷-LYL:DDSSNVI:KFKYE:NMAVS:SXGXH, YVPKPXX:VPTKL:EPIS-AA¹⁷-LYL:DDSSNVI:KFKYE:NMAVS:SXGXH, TVPKPXX:VPTQL:EPIS-AA¹⁷-LYL:DDSSNVI:KFKYE:NMAVS:AXGXH, AVPKAXX:VPTKL:EPIS-AA¹⁷-LYL:DSSNNVI:KFKYE:NMAVS:AXGXH, KVGKAXX:VPTKL:EPIS-AA¹⁷-LYL:DDMGVPT:KFKYE:EGMSAVS:XGXR, GSAGPXX:VPTKM:EPIS-AA¹⁷-LYL:NDKQQII:KFKYE:GMAVS:RXGXS, AAPASXX:VPTRL:EPIS-AA¹⁷-LYL:DAANNVV:KFKYE:DMAVS:AXGXR, STPPTXX:VPTRL:EPIS-AA¹⁷-LYL:DSANNVV:KFKYE:DMAVS:SXGXR, HVPKPXX:VPTKL:EPIS-AA¹⁷-LYL:DDSSNVI:KFKYE:NMAVS:SXGXH, RVPSTXX:VPTKT:EPIS-AA¹⁷-LYL:DNGRVLL:KFKYE:MIAVS:XGXL, ASAAPXX:VPTAL:EPIS-AA¹⁷-LYL:VGRKPKV:KFKYE:MIAVS:XKXS, ASASPXX:VPTDL:EPIS-AA¹⁷-LYL:IGKTPKI:KFKYE:MIAVS:XKXS, ASASPXX:VPTDL:EPIS-AA¹⁷-LYL:VGRTPKV:KFKYE:MVAVS:XKXS, KIPKAXX:VPTEL:EPIS-AA¹⁷-LYL:DENEKVV:KFKYE:DMVVE:GXGXR, GIPEPXX:VPEKM:EPIS-AA¹⁷-LYL:DENKNVV:KFKYE:NMTVE:SXAXR, SIPKAXX:VPTEL:EPIS-AA¹⁷-LYL:DEYDKVV:KFKYE:EMVVE:GXGXR, HVTKPTX:APTKL:EPIS-AA¹⁷-LYL:DDSSNVI:KFKYE:NMVVR:SXGXH, YVPKPXX:APTKL:EPIS-AA¹⁷-LYL:DDSSNVI:KFKYE:NMVVR:SXGXH, TVPKPXX:APTQL:EPIS-AA¹⁷-LYL:DDSSNVI:KFKYE:NMVVR:AXGXH, AVPKAXX:APTKL:EPIS-AA¹⁷-LYL:DSSNNVI:KFKYE:NMVVK:AXGXH, KVGKAXX:VPTKL:EPIS-AA¹⁷-LYL:DDMGVPT:KFKYE:EGMSVAE:XGXR, GSAGPXX:TPTKM:EPIS-AA¹⁷-LYL:NDKQQII:KFKYE:GMVVD:RXGXS, AAPASXX:VPARL:EPIS-AA¹⁷-LYL:DAANNVV:KFKYE:DMVVE:AXGXR, STPPTXX:VPTRL:EPIS-AA¹⁷-LYL:DSANNVV:KFKYE:DMVVE:SXGXR, HVPKPXX:APTKL:EPIS-AA¹⁷-LYL:DDSSNVI:KFKYE:NMVVR:SXGXH, RVPSTXX:APVKT:EPIS-AA¹⁷-LYL:DNGRVLL:KFKYE:MIVEE:XGXL, ASAAPXX:VPQAL:EPIS-AA¹⁷-LYL:VGRKPKV:KFKYE:MIVRS:XKXS, ASASPXX:VSQDL:EPIS-AA¹⁷-LYL:IGKTPKI:KFKYE:MIVKS:XKXS, ASASPXX:VPQDL:EPIS-AA¹⁷-LYL:VGRTPKV:KFKYE:MVVKS:XKXS, NDEGLEX:VPTEE:EPIS-AA¹⁷-LYL:RIKPHQGQH:KFKYE:FLQHN:KXEXR, NDEGLEX:VPTGQ:EPIS-AA¹⁷-LYL:RIKPHQGQH:KFKYE:LEEHS:QXEXR, SSVKXQP:SRVHH:EPIS-AA¹⁷-LYL:EYVRKKPKL:KFKYE:RLEEH:LEXAXA, RNVQXRP:TQVQL:EPIS-AA¹⁷-LYL:EIVRKKPIF:KFKYE:TLEDH:LAXKXE, KIPKAXX:TPTEL:SPIN-AA¹⁷-LYF:DENEKVV:YGKIP:DMVVD:GXGXR, GIPEPXX:TPTKM:SPIN-AA¹⁷-LYF:DENKNVV:YGKIP:NMVVD:SXAXR, SIPKAXX:TPTEL:SPIN-AA¹⁷-LYF:DEYDKVV:YGKIP:EMVVD:GXGXR, HVTKPTX:TPTKL:SPIN-AA¹⁷-LYF:DDSSNVI:YGKIP:NMVVD:SXGXH, YVPKPXX:TPTKL:SPIN-AA¹⁷-LYF:DDSSNVI:YGKIP:NMVVD:SXGXH, TVPKPXX:TPTQL:SPIN-AA¹⁷-LYF:DDSSNVI:YGKIP:NMVVD:AXGXH, AVPKAXX:TPTKL:SPIN-AA¹⁷-LYF:DSSNNVI:YGKIP:NMVVD:AXGXH, KVGKAXX:TPTKL:SPIN-AA¹⁷-LYF:DDMGVPT:YGKIP:EGMSVVD:XGXR, KASKAXX:TPTKL:SPIN-AA¹⁷-LYF:DKGVVTY:YGKIP:GMVVD:EXGXR, AAPASXX:TPTRL:SPIN-AA¹⁷-LYF:DAANNVV:YGKIP:DMVVD:AXGXR, STPPTXX:TPTRL:SPIN-AA¹⁷-LYF:DSANNVV:YGKIP:DMVVD:SXGXR, HVPKPXX:TPTKL:SPIN-AA¹⁷-LYF:DDSSNVI:YGKIP:NMVVD:SXGXH, RVPSTXX:TPTKT:SPIN-AA¹⁷-LYF:DNGRVLL:YGKIP:MIVVD:XGXL, ASAAPXX:TPTAL:SPIN-AA¹⁷-LYF:VGRKPKV:YGKIP:MIVVD:XKXS, ASASPXX:TPTDL:SPIN-AA¹⁷-LYF:IGKTPKI:YGKIP:MIVVD:XKXS, ASASPXX:TPTDL:SPIN-AA¹⁷-LYF:VGRTPKV:YGKIP:MVVVD:XKXS, KIPKAXX:VPTEL:SPIN-AA¹⁷-LYF:DENEKVV:YGKIP:DMVVE:GXGXR, GIPEPXX:VPEKM:SPIN-AA¹⁷-LYF:DENKNVV:YGKIP:NMTVE:SXAXR, SIPKAXX:VPTEL:SPIN-AA¹⁷-LYF:DEYDKVV:YGKIP:EMVVE:GXGXR, HVTKPTX:APTKL:SPIN-AA¹⁷-LYF:DDSSNVI:YGKIP:NMVVR:SXGXH, YVPKPXX:APTKL:SPIN-AA¹⁷-LYF:DDSSNVI:YGKIP:NMVVR:SXGXH, TVPKPXX:APTQL:SPIN-AA¹⁷-LYF:DDSSNVI:YGKIP:NMVVR:AXGXH, AVPKAXX:APTKL:SPIN-AA¹⁷-LYF:DSSNNVI:YGKIP:NMVVK:AXGXH, KVGKAXX:VPTKL:SPIN-AA¹⁷-LYF:DDMGVPT:YGKIP:EGMSVAE:XGXR, KASKAXX:VPTKL:SPIN-AA¹⁷-LYF:DKGVVTY:YGKIP:GMAVS:EXGXR, AAPASXX:VPARL:SPIN-AA¹⁷-LYF:DAANNVV:YGKIP:DMVVE:AXGXR, STPPTXX:VPTRL:SPIN-AA¹⁷-LYF:DSANNVV:YGKIP:DMVVE:SXGXR, HVPKPXX:APTKL:SPIN-AA¹⁷-LYF:DDSSNVI:YGKIP:NMVVR:SXGXH, RVPSTXX:APVKT:SPIN-AA¹⁷-LYF:DNGRVLL:YGKIP:MIVEE:XGXL, ASAAPXX:VPQAL:SPIN-AA¹⁷-LYF:VGRKPKV:YGKIP:MIVRS:XKXS, ASASPXX:VSQDL:SPIN-AA¹⁷-LYF:IGKTPKI:YGKIP:MIVKS:XKXS, ASASPXX:VPQDL:SPIN-AA¹⁷-LYF:VGRTPKV:YGKIP:MVVKS:XKXS, NDEGLEX:VPTEE:SPIN-AA¹⁷-LYF:RIKPHQGQH:YGKIP:FLQHN:KXEXR, NDEGLEX:VPTGQ:SPIN-AA¹⁷-LYF:RIKPHQGQH:YGKIP:LEEHS:QXEXR, SSVKXQP:SRVHH:SPIN-AA¹⁷-LYF:EYVRKKPKL:YGKIP:RLEEH:LEXAXA, RNVQXRP:TQVQL:SPIN-AA¹⁷-LYF:EIVRKKPIF:YGKIP:TLEDH:LAXKXE, KIPKAXX:VPAEL:SPIS-AA¹⁷-LYI:DENEKVV:YKQYE:DMVVE:GXGXR, GIPEPXX:VPAKM:SPIS-AA¹⁷-LYI:DENKNVV:YKQYE:NMVVE:SXAXR, SIPKAXX:VPAEL:SPIS-AA¹⁷-LYI:DEYDKVV:YKQYE:EMVVE:GXGXR, HVTKPTX:VPAKL:SPIS-AA¹⁷-LYI:DDSSNVI:YKQYE:NMVVE:SXGXH, YVPKPXX:VPAKL:SPIS-AA¹⁷-LYI:DDSSNVI:YKQYE:NMVVE:SXGXH, TVPKPXX:VPAQL:SPIS-AA¹⁷-LYI:DDSSNVI:YKQYE:NMVVE:AXGXH, AVPKAXX:VPAKL:SPIS-AA¹⁷-LYI:DSSNNVI:YKQYE:NMVVE:AXGXH, KVGKAXX:VPAKL:SPIS-AA¹⁷-LYI:DDMGVPT:YKQYE:EGMSVVE:XGXR, KASKAXX:VPAKL:SPIS-AA¹⁷-LYI:DKGVVTY:YKQYE:GMVVE:EXGXR, GSAGPXX:VPAKM:SPIS-AA¹⁷-LYI:NDKQQII:YKQYE:GMVVE:RXGXS, STPPTXX:VPARL:SPIS-AA¹⁷-LYI:DSANNVV:YKQYE:DMVVE:SXGXR, HVPKPXX:VPAKL:SPIS-AA¹⁷-LYI:DDSSNVI:YKQYE:NMVVE:SXGXH, RVPSTXX:VPAKT:SPIS-AA¹⁷-LYI:DNGRVLL:YKQYE:MIVVE:XGXL, ASAAPXX:VPAAL:SPIS-AA¹⁷-LYI:VGRKPKV:YKQYE:MIVVE:XKXS, ASASPXX:VPADL:SPIS-AA¹⁷-LYI:IGKTPKI:YKQYE:MIVVE:XKXS, ASASPXX:VPADL:SPIS-AA¹⁷-LYI:VGRTPKV:YKQYE:MVVVE:XKXS, KIPKAXX:VPTEL:SPIS-AA¹⁷-LYI:DENEKVV:YKQYE:DMVVE:GXGXR, GIPEPXX:VPEKM:SPIS-AA¹⁷-LYI:DENKNVV:YKQYE:NMTVE:SXAXR, SIPKAXX:VPTEL:SPIS-AA¹⁷-LYI:DEYDKVV:YKQYE:EMVVE:GXGXR, HVTKPTX:APTKL:SPIS-AA¹⁷-LYI:DDSSNVI:YKQYE:NMVVR:SXGXH, YVPKPXX:APTKL:SPIS-AA¹⁷-LYI:DDSSNVI:YKQYE:NMVVR:SXGXH, TVPKPXX:APTQL:SPIS-AA¹⁷-LYI:DDSSNVI:YKQYE:NMVVR:AXGXH, AVPKAXX:APTKL:SPIS-AA¹⁷-LYI:DSSNNVI:YKQYE:NMVVK:AXGXH, KVGKAXX:VPTKL:SPIS-AA¹⁷-LYI:DDMGVPT:YKQYE:EGMSVAE:XGXR, KASKAXX:VPTKL:SPIS-AA¹⁷-LYI:DKGVVTY:YKQYE:GMAVS:EXGXR, GSAGPXX:TPTKM:SPIS-AA¹⁷-LYI:NDKQQII:YKQYE:GMVVD:RXGXS, STPPTXX:VPTRL:SPIS-AA¹⁷-LYI:DSANNVV:YKQYE:DMVVE:SXGXR, HVPKPXX:APTKL:SPIS-AA¹⁷-LYI:DDSSNVI:YKQYE:NMVVR:SXGXH, RVPSTXX:APVKT:SPIS-AA¹⁷-LYI:DNGRVLL:YKQYE:MIVEE:XGXL, ASAAPXX:VPQAL:SPIS-AA¹⁷-LYI:VGRKPKV:YKQYE:MIVRS:XKXS, ASASPXX:VSQDL:SPIS-AA¹⁷-LYI:IGKTPKI:YKQYE:MIVKS:XKXS, ASASPXX:VPQDL:SPIS-AA¹⁷-LYI:VGRTPKV:YKQYE:MVVKS:XKXS, NDEGLEX:VPTEE:SPIS-AA¹⁷-LYI:RIKPHQGQH:YKQYE:FLQHN:KXEXR, NDEGLEX:VPTGQ:SPIS-AA¹⁷-LYI:RIKPHQGQH:YKQYE:LEEHS:QXEXR, SSVKXQP:SRVHH:SPIS-AA¹⁷-LYI:EYVRKKPKL:YKQYE:RLEEH:LEXAXA, RNVQXRP:TQVQL:SPIS-AA¹⁷-LYI:EIVRKKPIF:YKQYE:TLEDH:LAXKXE, KIPKAXX:VPTEL:SPIS-AA¹⁷-LFI:DENEKVV:YKQYE:DMVVE:GXGXR, GIPEPXX:VPTKM:SPIS-AA¹⁷-LFI:DENKNVV:YKQYE:NMVVE:SXAXR, SIPKAXX:VPTEL:SPIS-AA¹⁷-LFI:DEYDKVV:YKQYE:EMVVE:GXGXR, HVTKPTX:VPTKL:SPIS-AA¹⁷-LFI:DDSSNVI:YKQYE:NMVVE:SXGXH, YVPKPXX:VPTKL:SPIS-AA¹⁷-LFI:DDSSNVI:YKQYE:NMVVE:SXGXH, TVPKPXX:VPTQL:SPIS-AA¹⁷-LFI:DDSSNVI:YKQYE:NMVVE:AXGXH, AVPKAXX:VPTKL:SPIS-AA¹⁷-LFI:DSSNNVI:YKQYE:NMVVE:AXGXH, KVGKAXX:VPTKL:SPIS-AA¹⁷-LFI:DDMGVPT:YKQYE:EGMSVVE:XGXR, KASKAXX:VPTKL:SPIS-AA¹⁷-LFI:DKGVVTY:YKQYE:GMVVE:EXGXR, GSAGPXX:VPTKM:SPIS-AA¹⁷-LFI:NDKQQII:YKQYE:GMVVE:RXGXS, AAPASXX:VPTRL:SPIS-AA¹⁷-LFI:DAANNVV:YKQYE:DMVVE:AXGXR, HVPKPXX:VPTKL:SPIS-AA¹⁷-LFI:DDSSNVI:YKQYE:NMVVE:SXGXH, RVPSTXX:VPTKT:SPIS-AA¹⁷-LFI:DNGRVLL:YKQYE:MIVVE:XGXL, ASAAPXX:VPTAL:SPIS-AA¹⁷-LFI:VGRKPKV:YKQYE:MIVVE:XKXS, ASASPXX:VPTDL:SPIS-AA¹⁷-LFI:IGKTPKI:YKQYE:MIVVE:XKXS, ASASPXX:VPTDL:SPIS-AA¹⁷-LFI:VGRTPKV:YKQYE:MVVVE:XKXS, GIPEPXX:VPEKM:SPIS-AA¹⁷-LFI:DENKNVV:YKQYE:NMTVE:SXAXR, HVTKPTX:APTKL:SPIS-AA¹⁷-LFI:DDSSNVI:YKQYE:NMVVR:SXGXH, YVPKPXX:APTKL:SPIS-AA¹⁷-LFI:DDSSNVI:YKQYE:NMVVR:SXGXH, TVPKPXX:APTQL:SPIS-AA¹⁷-LFI:DDSSNVI:YKQYE:NMVVR:AXGXH, AVPKAXX:APTKL:SPIS-AA¹⁷-LFI:DSSNNVI:YKQYE:NMVVK:AXGXH, KVGKAXX:VPTKL:SPIS-AA¹⁷-LFI:DDMGVPT:YKQYE:EGMSVAE:XGXR, KASKAXX:VPTKL:SPIS-AA¹⁷-LFI:DKGVVTY:YKQYE:GMAVS:EXGXR, GSAGPXX:TPTKM:SPIS-AA¹⁷-LFI:NDKQQII:YKQYE:GMVVD:RXGXS, AAPASXX:VPARL:SPIS-AA¹⁷-LFI:DAANNVV:YKQYE:DMVVE:AXGXR, HVPKPXX:APTKL:SPIS-AA¹⁷-LFI:DDSSNVI:YKQYE:NMVVR:SXGXH, RVPSTXX:APVKT:SPIS-AA¹⁷-LFI:DNGRVLL:YKQYE:MIVEE:XGXL, ASAAPXX:VPQAL:SPIS-AA¹⁷-LFI:VGRKPKV:YKQYE:MIVRS:XKXS, ASASPXX:VSQDL:SPIS-AA¹⁷-LFI:IGKTPKI:YKQYE:MIVKS:XKXS, ASASPXX:VPQDL:SPIS-AA¹⁷-LFI:VGRTPKV:YKQYE:MVVKS:XKXS, NDEGLEX:VPTEE:SPIS-AA¹⁷-LFI:RIKPHQGQH:YKQYE:FLQHN:KXEXR, NDEGLEX:VPTGQ:SPIS-AA¹⁷-LFI:RIKPHQGQH:YKQYE:LEEHS:QXEXR, SSVKXQP:SRVHH:SPIS-AA¹⁷-LFI:EYVRKKPKL:YKQYE:RLEEH:LEXAXA, RNVQXRP:TQVQL:SPIS-AA¹⁷-LFI:EIVRKKPIF:YKQYE:TLEDH:LAXKXE, KIPKAXX:APVEL:KPLS-AA¹⁷-LYV:DENEKVV:DHHKD:DMVEE:GXGXR, GIPEPXX:APVKM:KPLS-AA¹⁷-LYV:DENKNVV:DHHKD:NMVEE:SXAXR, SIPKAXX:APVEL:KPLS-AA¹⁷-LYV:DEYDKVV:DHHKD:EMVEE:GXGXR, HVTKPTX:APVKL:KPLS-AA¹⁷-LYV:DDSSNVI:DHHKD:NMVEE:SXGXH, YVPKPXX:APVKL:KPLS-AA¹⁷-LYV:DDSSNVI:DHHKD:NMVEE:SXGXH, TVPKPXX:APVQL:KPLS-AA¹⁷-LYV:DDSSNVI:DHHKD:NMVEE:AXGXH, AVPKAXX:APVKL:KPLS-AA¹⁷-LYV:DSSNNVI:DHHKD:NMVEE:AXGXH, KVGKAXX:APVKL:KPLS-AA¹⁷-LYV:DDMGVPT:DHHKD:EGMSVEE:XGXR, KASKAXX:APVKL:KPLS-AA¹⁷-LYV:DKGVVTY:DHHKD:GMVEE:EXGXR, GSAGPXX:APVKM:KPLS-AA¹⁷-LYV:NDKQQII:DHHKD:GMVEE:RXGXS, AAPASXX:APVRL:KPLS-AA¹⁷-LYV:DAANNVV:DHHKD:DMVEE:AXGXR, STPPTXX:APVRL:KPLS-AA¹⁷-LYV:DSANNVV:DHHKD:DMVEE:SXGXR, HVPKPXX:APVKL:KPLS-AA¹⁷-LYV:DDSSNVI:DHHKD:NMVEE:SXGXH, ASAAPXX:APVAL:KPLS-AA¹⁷-LYV:VGRKPKV:DHHKD:MIVEE:XKXS, ASASPXX:APVDL:KPLS-AA¹⁷-LYV:IGKTPKI:DHHKD:MIVEE:XKXS, ASASPXX:APVDL:KPLS-AA¹⁷-LYV:VGRTPKV:DHHKD:MVVEE:XKXS, KIPKAXX:VPTEL:KPLS-AA¹⁷-LYV:DENEKVV:DHHKD:DMVVE:GXGXR, GIPEPXX:VPEKM:KPLS-AA¹⁷-LYV:DENKNVV:DHHKD:NMTVE:SXAXR, SIPKAXX:VPTEL:KPLS-AA¹⁷-LYV:DEYDKVV:DHHKD:EMVVE:GXGXR, HVTKPTX:APTKL:KPLS-AA¹⁷-LYV:DDSSNVI:DHHKD:NMVVR:SXGXH, YVPKPXX:APTKL:KPLS-AA¹⁷-LYV:DDSSNVI:DHHKD:NMVVR:SXGXH, TVPKPXX:APTQL:KPLS-AA¹⁷-LYV:DDSSNVI:DHHKD:NMVVR:AXGXH, AVPKAXX:APTKL:KPLS-AA¹⁷-LYV:DSSNNVI:DHHKD:NMVVK:AXGXH, KVGKAXX:VPTKL:KPLS-AA¹⁷-LYV:DDMGVPT:DHHKD:EGMSVAE:XGXR, KASKAXX:VPTKL:KPLS-AA¹⁷-LYV:DKGVVTY:DHHKD:GMAVS:EXGXR, GSAGPXX:TPTKM:KPLS-AA¹⁷-LYV:NDKQQII:DHHKD:GMVVD:RXGXS, AAPASXX:VPARL:KPLS-AA¹⁷-LYV:DAANNVV:DHHKD:DMVVE:AXGXR, STPPTXX:VPTRL:KPLS-AA¹⁷-LYV:DSANNVV:DHHKD:DMVVE:SXGXR, HVPKPXX:APTKL:KPLS-AA¹⁷-LYV:DDSSNVI:DHHKD:NMVVR:SXGXH, ASAAPXX:VPQAL:KPLS-AA¹⁷-LYV:VGRKPKV:DHHKD:MIVRS:XKXS, ASASPXX:VSQDL:KPLS-AA¹⁷-LYV:IGKTPKI:DHHKD:MIVKS:XKXS, ASASPXX:VPQDL:KPLS-AA¹⁷-LYV:VGRTPKV:DHHKD:MVVKS:XKXS, NDEGLEX:VPTEE:KPLS-AA¹⁷-LYV:RIKPHQGQH:DHHKD:FLQHN:KXEXR, NDEGLEX:VPTGQ:KPLS-AA¹⁷-LYV:RIKPHQGQH:DHHKD:LEEHS:QXEXR, SSVKXQP:SRVHH:KPLS-AA¹⁷-LYV:EYVRKKPKL:DHHKD:RLEEH:LEXAXA, RNVQXRP:TQVQL:KPLS-AA¹⁷-LYV:EIVRKKPIF:DHHKD:TLEDH:LAXKXE, KIPKAXX:VPQEL:EPLP-AA¹⁷-VYY:DENEKVV:EQLSN:DMVRS:GXGXR, GIPEPXX:VPQKM:EPLP-AA¹⁷-VYY:DENKNVV:EQLSN:NMVRS:SXAXR, SIPKAXX:VPQEL:EPLP-AA¹⁷-VYY:DEYDKVV:EQLSN:EMVRS:GXGXR, HVTKPTX:VPQKL:EPLP-AA¹⁷-VYY:DDSSNVI:EQLSN:NMVRS:SXGXH, YVPKPXX:VPQKL:EPLP-AA¹⁷-VYY:DDSSNVI:EQLSN:NMVRS:SXGXH, TVPKPXX:VPQQL:EPLP-AA¹⁷-VYY:DDSSNVI:EQLSN:NMVRS:AXGXH, AVPKAXX:VPQKL:EPLP-AA¹⁷-VYY:DSSNNVI:EQLSN:NMVRS:AXGXH, KVGKAXX:VPQKL:EPLP-AA¹⁷-VYY:DDMGVPT:EQLSN:EGMSVRS:XGXR, KASKAXX:VPQKL:EPLP-AA¹⁷-VYY:DKGVVTY:EQLSN:GMVRS:EXGXR, GSAGPXX:VPQKM:EPLP-AA¹⁷-VYY:NDKQQII:EQLSN:GMVRS:RXGXS, AAPASXX:VPQRL:EPLP-AA¹⁷-VYY:DAANNVV:EQLSN:DMVRS:AXGXR, STPPTXX:VPQRL:EPLP-AA¹⁷-VYY:DSANNVV:EQLSN:DMVRS:SXGXR, HVPKPXX:VPQKL:EPLP-AA¹⁷-VYY:DDSSNVI:EQLSN:NMVRS:SXGXH, RVPSTXX:VPQKT:EPLP-AA¹⁷-VYY:DNGRVLL:EQLSN:MIVRS:XGXL, ASASPXX:VPQDL:EPLP-AA¹⁷-VYY:IGKTPKI:EQLSN:MIVRS:XKXS, ASASPXX:VPQDL:EPLP-AA¹⁷-VYY:VGRTPKV:EQLSN:MVVRS:XKXS, KIPKAXX:VPTEL:EPLP-AA¹⁷-VYY:DENEKVV:EQLSN:DMVVE:GXGXR, GIPEPXX:VPEKM:EPLP-AA¹⁷-VYY:DENKNVV:EQLSN:NMTVE:SXAXR, SIPKAXX:VPTEL:EPLP-AA¹⁷-VYY:DEYDKVV:EQLSN:EMVVE:GXGXR, HVTKPTX:APTKL:EPLP-AA¹⁷-VYY:DDSSNVI:EQLSN:NMVVR:SXGXH, YVPKPXX:APTKL:EPLP-AA¹⁷-VYY:DDSSNVI:EQLSN:NMVVR:SXGXH, TVPKPXX:APTQL:EPLP-AA¹⁷-VYY:DDSSNVI:EQLSN:NMVVR:AXGXH, AVPKAXX:APTKL:EPLP-AA¹⁷-VYY:DSSNNVI:EQLSN:NMVVK:AXGXH, KVGKAXX:VPTKL:EPLP-AA¹⁷-VYY:DDMGVPT:EQLSN:EGMSVAE:XGXR, KASKAXX:VPTKL:EPLP-AA¹⁷-VYY:DKGVVTY:EQLSN:GMAVS:EXGXR, GSAGPXX:TPTKM:EPLP-AA¹⁷-VYY:NDKQQII:EQLSN:GMVVD:RXGXS, AAPASXX:VPARL:EPLP-AA¹⁷-VYY:DAANNVV:EQLSN:DMVVE:AXGXR, STPPTXX:VPTRL:EPLP-AA¹⁷-VYY:DSANNVV:EQLSN:DMVVE:SXGXR, HVPKPXX:APTKL:EPLP-AA¹⁷-VYY:DDSSNVI:EQLSN:NMVVR:SXGXH, RVPSTXX:APVKT:EPLP-AA¹⁷-VYY:DNGRVLL:EQLSN:MIVEE:XGXL, ASASPXX:VSQDL:EPLP-AA¹⁷-VYY:IGKTPKI:EQLSN:MIVKS:XKXS, ASASPXX:VPQDL:EPLP-AA¹⁷-VYY:VGRTPKV:EQLSN:MVVKS:XKXS, NDEGLEX:VPTEE:EPLP-AA¹⁷-VYY:RIKPHQGQH:EQLSN:FLQHN:KXEXR, NDEGLEX:VPTGQ:EPLP-AA¹⁷-VYY:RIKPHQGQH:EQLSN:LEEHS:QXEXR, SSVKXQP:SRVHH:EPLP-AA¹⁷-VYY:EYVRKKPKL:EQLSN:RLEEH:LEXAXA, RNVQXRP:TQVQL:EPLP-AA¹⁷-VYY:EIVRKKPIF:EQLSN:TLEDH:LAXKXE, KIPKAXX:VSQEL:EPLT-AA¹⁷-LYY:DENEKVV:EQLSN:DMVKS:GXGXR, GIPEPXX:VSQKM:EPLT-AA¹⁷-LYY:DENKNVV:EQLSN:NMVKS:SXAXR, SIPKAXX:VSQEL:EPLT-AA¹⁷-LYY:DEYDKVV:EQLSN:EMVKS:GXGXR, HVTKPTX:VSQKL:EPLT-AA¹⁷-LYY:DDSSNVI:EQLSN:NMVKS:SXGXH, YVPKPXX:VSQKL:EPLT-AA¹⁷-LYY:DDSSNVI:EQLSN:NMVKS:SXGXH, TVPKPXX:VSQQL:EPLT-AA¹⁷-LYY:DDSSNVI:EQLSN:NMVKS:AXGXH, AVPKAXX:VSQKL:EPLT-AA¹⁷-LYY:DSSNNVI:EQLSN:NMVKS:AXGXH, KVGKAXX:VSQKL:EPLT-AA¹⁷-LYY:DDMGVPT:EQLSN:EGMSVKS:XGXR, KASKAXX:VSQKL:EPLT-AA¹⁷-LYY:DKGVVTY:EQLSN:GMVKS:EXGXR, GSAGPXX:VSQKM:EPLT-AA¹⁷-LYY:NDKQQII:EQLSN:GMVKS:RXGXS, AAPASXX:VSQRL:EPLT-AA¹⁷-LYY:DAANNVV:EQLSN:DMVKS:AXGXR, STPPTXX:VSQRL:EPLT-AA¹⁷-LYY:DSANNVV:EQLSN:DMVKS:SXGXR, HVPKPXX:VSQKL:EPLT-AA¹⁷-LYY:DDSSNVI:EQLSN:NMVKS:SXGXH, RVPSTXX:VSQKT:EPLT-AA¹⁷-LYY:DNGRVLL:EQLSN:MIVKS:XGXL, ASAAPXX:VSQAL:EPLT-AA¹⁷-LYY:VGRKPKV:EQLSN:MIVKS:XKXS, ASASPXX:VSQDL:EPLT-AA¹⁷-LYY:VGRTPKV:EQLSN:MVVKS:XKXS, KIPKAXX:VPTEL:EPLT-AA¹⁷-LYY:DENEKVV:EQLSN:DMVVE:GXGXR, GIPEPXX:VPEKM:EPLT-AA¹⁷-LYY:DENKNVV:EQLSN:NMTVE:SXAXR, SIPKAXX:VPTEL:EPLT-AA¹⁷-LYY:DEYDKVV:EQLSN:EMVVE:GXGXR, HVTKPTX:APTKL:EPLT-AA¹⁷-LYY:DDSSNVI:EQLSN:NMVVR:SXGXH, YVPKPXX:APTKL:EPLT-AA¹⁷-LYY:DDSSNVI:EQLSN:NMVVR:SXGXH, TVPKPXX:APTQL:EPLT-AA¹⁷-LYY:DDSSNVI:EQLSN:NMVVR:AXGXH, AVPKAXX:APTKL:EPLT-AA¹⁷-LYY:DSSNNVI:EQLSN:NMVVK:AXGXH, KVGKAXX:VPTKL:EPLT-AA¹⁷-LYY:DDMGVPT:EQLSN:EGMSVAE:XGXR, KASKAXX:VPTKL:EPLT-AA¹⁷-LYY:DKGVVTY:EQLSN:GMAVS:EXGXR, GSAGPXX:TPTKM:EPLT-AA¹⁷-LYY:NDKQQII:EQLSN:GMVVD:RXGXS, AAPASXX:VPARL:EPLT-AA¹⁷-LYY:DAANNVV:EQLSN:DMVVE:AXGXR, STPPTXX:VPTRL:EPLT-AA¹⁷-LYY:DSANNVV:EQLSN:DMVVE:SXGXR, HVPKPXX:APTKL:EPLT-AA¹⁷-LYY:DDSSNVI:EQLSN:NMVVR:SXGXH, RVPSTXX:APVKT:EPLT-AA¹⁷-LYY:DNGRVLL:EQLSN:MIVEE:XGXL, ASAAPXX:VPQAL:EPLT-AA¹⁷-LYY:VGRKPKV:EQLSN:MIVRS:XKXS, NDEGLEX:VPTEE:EPLT-AA¹⁷-LYY:RIKPHQGQH:EQLSN:FLQHN:KXEXR, NDEGLEX:VPTGQ:EPLT-AA¹⁷-LYY:RIKPHQGQH:EQLSN:LEEHS:QXEXR, SSVKXQP:SRVHH:EPLT-AA¹⁷-LYY:EYVRKKPKL:EQLSN:RLEEH:LEXAXA, RNVQXRP:TQVQL:EPLT-AA¹⁷-LYY:EIVRKKPIF:EQLSN:TLEDH:LAXKXE, KIPKAXX:VPQEL:EPLT-AA¹⁷-LYY:DENEKVV:EQLSN:DMVKS:GXGXR, GIPEPXX:VPQKM:EPLT-AA¹⁷-LYY:DENKNVV:EQLSN:NMVKS:SXAXR, SIPKAXX:VPQEL:EPLT-AA¹⁷-LYY:DEYDKVV:EQLSN:EMVKS:GXGXR, HVTKPTX:VPQKL:EPLT-AA¹⁷-LYY:DDSSNVI:EQLSN:NMVKS:SXGXH, YVPKPXX:VPQKL:EPLT-AA¹⁷-LYY:DDSSNVI:EQLSN:NMVKS:SXGXH, TVPKPXX:VPQQL:EPLT-AA¹⁷-LYY:DDSSNVI:EQLSN:NMVKS:AXGXH, AVPKAXX:VPQKL:EPLT-AA¹⁷-LYY:DSSNNVI:EQLSN:NMVKS:AXGXH, KVGKAXX:VPQKL:EPLT-AA¹⁷-LYY:DDMGVPT:EQLSN:EGMSVKS:XGXR, KASKAXX:VPQKL:EPLT-AA¹⁷-LYY:DKGVVTY:EQLSN:GMVKS:EXGXR, GSAGPXX:VPQKM:EPLT-AA¹⁷-LYY:NDKQQII:EQLSN:GMVKS:RXGXS, AAPASXX:VPQRL:EPLT-AA¹⁷-LYY:DAANNVV:EQLSN:DMVKS:AXGXR, STPPTXX:VPQRL:EPLT-AA¹⁷-LYY:DSANNVV:EQLSN:DMVKS:SXGXR, HVPKPXX:VPQKL:EPLT-AA¹⁷-LYY:DDSSNVI:EQLSN:NMVKS:SXGXH, RVPSTXX:VPQKT:EPLT-AA¹⁷-LYY:DNGRVLL:EQLSN:MIVKS:XGXL, ASAAPXX:VPQAL:EPLT-AA¹⁷-LYY:VGRKPKV:EQLSN:MIVKS:XKXS, ASASPXX:VPQDL:EPLT-AA¹⁷-LYY:IGKTPKI:EQLSN:MIVKS:XKXS, NDEGLEX:VPTGQ:SNIT-AA¹⁷-QIM:RIKPHQGQH:IGEMS:LEQHN:QXEXR, KIPKAXX:VPTEL:SNIT-AA¹⁷-QIM:DENEKVV:IGEMS:DMVVE:GXGXR, GIPEPXX:VPEKM:SNIT-AA¹⁷-QIM:DENKNVV:IGEMS:NMTVE:SXAXR, SIPKAXX:VPTEL:SNIT-AA¹⁷-QIM:DEYDKVV:IGEMS:EMVVE:GXGXR, HVTKPTX:APTKL:SNIT-AA¹⁷-QIM:DDSSNVI:IGEMS:NMVVR:SXGXH, YVPKPXX:APTKL:SNIT-AA¹⁷-QIM:DDSSNVI:IGEMS:NMVVR:SXGXH, TVPKPXX:APTQL:SNIT-AA¹⁷-QIM:DDSSNVI:IGEMS:NMVVR:AXGXH, AVPKAXX:APTKL:SNIT-AA¹⁷-QIM:DSSNNVI:IGEMS:NMVVK:AXGXH, KVGKAXX:VPTKL:SNIT-AA¹⁷-QIM:DDMGVPT:IGEMS:EGMSVAE:XGXR, KASKAXX:VPTKL:SNIT-AA¹⁷-QIM:DKGVVTY:IGEMS:GMAVS:EXGXR, GSAGPXX:TPTKM:SNIT-AA¹⁷-QIM:NDKQQII:IGEMS:GMVVD:RXGXS, AAPASXX:VPARL:SNIT-AA¹⁷-QIM:DAANNVV:IGEMS:DMVVE:AXGXR, STPPTXX:VPTRL:SNIT-AA¹⁷-QIM:DSANNVV:IGEMS:DMVVE:SXGXR, HVPKPXX:APTKL:SNIT-AA¹⁷-QIM:DDSSNVI:IGEMS:NMVVR:SXGXH, RVPSTXX:APVKT:SNIT-AA¹⁷-QIM:DNGRVLL:IGEMS:MIVEE:XGXL, ASAAPXX:VPQAL:SNIT-AA¹⁷-QIM:VGRKPKV:IGEMS:MIVRS:XKXS, ASASPXX:VSQDL:SNIT-AA¹⁷-QIM:IGKTPKI:IGEMS:MIVKS:XKXS, ASASPXX:VPQDL:SNIT-AA¹⁷-QIM:VGRTPKV:IGEMS:MVVKS:XKXS, NDEGLEX:VPTGQ:SNIT-AA¹⁷-QIM:RIKPHQGQH:IGEMS:LEEHS:QXEXR, SSVKXQP:SRVHH:SNIT-AA¹⁷-QIM:EYVRKKPKL:IGEMS:RLEEH:LEXAXA, RNVQXRP:TQVQL:SNIT-AA¹⁷-QIM:EIVRKKPIF:IGEMS:TLEDH:LAXKXE, NDEGLEX:VPTEE:SNIT-AA¹⁷-QIM:RIKPHQGQH:LGEMS:FLEHS:KXEXR, KIPKAXX:VPTEL:SNIT-AA¹⁷-QIM:DENEKVV:LGEMS:DMVVE:GXGXR, GIPEPXX:VPEKM:SNIT-AA¹⁷-QIM:DENKNVV:LGEMS:NMTVE:SXAXR, SIPKAXX:VPTEL:SNIT-AA¹⁷-QIM:DEYDKVV:LGEMS:EMVVE:GXGXR, HVTKPTX:APTKL:SNIT-AA¹⁷-QIM:DDSSNVI:LGEMS:NMVVR:SXGXH, YVPKPXX:APTKL:SNIT-AA¹⁷-QIM:DDSSNVI:LGEMS:NMVVR:SXGXH, TVPKPXX:APTQL:SNIT-AA¹⁷-QIM:DDSSNVI:LGEMS:NMVVR:AXGXH, AVPKAXX:APTKL:SNIT-AA¹⁷-QIM:DSSNNVI:LGEMS:NMVVK:AXGXH, KVGKAXX:VPTKL:SNIT-AA¹⁷-QIM:DDMGVPT:LGEMS:EGMSVAE:XGXR, KASKAXX:VPTKL:SNIT-AA¹⁷-QIM:DKGVVTY:LGEMS:GMAVS:EXGXR, GSAGPXX:TPTKM:SNIT-AA¹⁷-QIM:NDKQQII:LGEMS:GMVVD:RXGXS, AAPASXX:VPARL:SNIT-AA¹⁷-QIM:DAANNVV:LGEMS:DMVVE:AXGXR, STPPTXX:VPTRL:SNIT-AA¹⁷-QIM:DSANNVV:LGEMS:DMVVE:SXGXR, HVPKPXX:APTKL:SNIT-AA¹⁷-QIM:DDSSNVI:LGEMS:NMVVR:SXGXH, RVPSTXX:APVKT:SNIT-AA¹⁷-QIM:DNGRVLL:LGEMS:MIVEE:XGXL, ASAAPXX:VPQAL:SNIT-AA¹⁷-QIM:VGRKPKV:LGEMS:MIVRS:XKXS, ASASPXX:VSQDL:SNIT-AA¹⁷-QIM:IGKTPKI:LGEMS:MIVKS:XKXS, ASASPXX:VPQDL:SNIT-AA¹⁷-QIM:VGRTPKV:LGEMS:MVVKS:XKXS, NDEGLEX:VPTEE:SNIT-AA¹⁷-QIM:RIKPHQGQH:LGEMS:FLQHN:KXEXR, SSVKXQP:SRVHH:SNIT-AA¹⁷-QIM:EYVRKKPKL:LGEMS:RLEEH:LEXAXA, RNVQXRP:TQVQL:SNIT-AA¹⁷-QIM:EIVRKKPIF:LGEMS:TLEDH:LAXKXE, RNVQXRP:SRVQL:RSVK-AA¹⁷-AKV:EIVRKKPIF:KEVQV:TLEEH:LAXKXE, KIPKAXX:VPTEL:RSVK-AA¹⁷-AKV:DENEKVV:KEVQV:DMVVE:GXGXR, GIPEPXX:VPEKM:RSVK-AA¹⁷-AKV:DENKNVV:KEVQV:NMTVE:SXAXR, SIPKAXX:VPTEL:RSVK-AA¹⁷-AKV:DEYDKVV:KEVQV:EMVVE:GXGXR, HVTKPTX:APTKL:RSVK-AA¹⁷-AKV:DDSSNVI:KEVQV:NMVVR:SXGXH, YVPKPXX:APTKL:RSVK-AA¹⁷-AKV:DDSSNVI:KEVQV:NMVVR:SXGXH, TVPKPXX:APTQL:RSVK-AA¹⁷-AKV:DDSSNVI:KEVQV:NMVVR:AXGXH, AVPKAXX:APTKL:RSVK-AA¹⁷-AKV:DSSNNVI:KEVQV:NMVVK:AXGXH, KVGKAXX:VPTKL:RSVK-AA¹⁷-AKV:DDMGVPT:KEVQV:EGMSVAE:XGXR, KASKAXX:VPTKL:RSVK-AA¹⁷-AKV:DKGVVTY:KEVQV:GMAVS:EXGXR, GSAGPXX:TPTKM:RSVK-AA¹⁷-AKV:NDKQQII:KEVQV:GMVVD:RXGXS, AAPASXX:VPARL:RSVK-AA¹⁷-AKV:DAANNVV:KEVQV:DMVVE:AXGXR, STPPTXX:VPTRL:RSVK-AA¹⁷-AKV:DSANNVV:KEVQV:DMVVE:SXGXR, HVPKPXX:APTKL:RSVK-AA¹⁷-AKV:DDSSNVI:KEVQV:NMVVR:SXGXH, RVPSTXX:APVKT:RSVK-AA¹⁷-AKV:DNGRVLL:KEVQV:MIVEE:XGXL, ASAAPXX:VPQAL:RSVK-AA¹⁷-AKV:VGRKPKV:KEVQV:MIVRS:XKXS, ASASPXX:VSQDL:RSVK-AA¹⁷-AKV:IGKTPKI:KEVQV:MIVKS:XKXS, ASASPXX:VPQDL:RSVK-AA¹⁷-AKV:VGRTPKV:KEVQV:MVVKS:XKXS, NDEGLEX:VPTEE:RSVK-AA¹⁷-AKV:RIKPHQGQH:KEVQV:FLQHN:KXEXR, NDEGLEX:VPTGQ:RSVK-AA¹⁷-AKV:RIKPHQGQH:KEVQV:LEEHS:QXEXR, RNVQXRP:TQVQL:RSVK-AA¹⁷-AKV:EIVRKKPIF:KEVQV:TLEDH:LAXKXE, SSVKXQP:TQVHH:RPVQ-AA¹⁷-RKI:EYVRKKPKL:KKATV:RLEDH:LEXAXA, KIPKAXX:VPTEL:RPVQ-AA¹⁷-RKI:DENEKVV:KKATV:DMVVE:GXGXR, GIPEPXX:VPEKM:RPVQ-AA¹⁷-RKI:DENKNVV:KKATV:NMTVE:SXAXR, SIPKAXX:VPTEL:RPVQ-AA¹⁷-RKI:DEYDKVV:KKATV:EMVVE:GXGXR, HVTKPTX:APTKL:RPVQ-AA¹⁷-RKI:DDSSNVI:KKATV:NMVVR:SXGXH, YVPKPXX:APTKL:RPVQ-AA¹⁷-RKI:DDSSNVI:KKATV:NMVVR:SXGXH, TVPKPXX:APTQL:RPVQ-AA¹⁷-RKI:DDSSNVI:KKATV:NMVVR:AXGXH, AVPKAXX:APTKL:RPVQ-AA¹⁷-RKI:DSSNNVI:KKATV:NMVVK:AXGXH, KVGKAXX:VPTKL:RPVQ-AA¹⁷-RKI:DDMGVPT:KKATV:EGMSVAE:XGXR, KASKAXX:VPTKL:RPVQ-AA¹⁷-RKI:DKGVVTY:KKATV:GMAVS:EXGXR, GSAGPXX:TPTKM:RPVQ-AA¹⁷-RKI:NDKQQII:KKATV:GMVVD:RXGXS, AAPASXX:VPARL:RPVQ-AA¹⁷-RKI:DAANNVV:KKATV:DMVVE:AXGXR, STPPTXX:VPTRL:RPVQ-AA¹⁷-RKI:DSANNVV:KKATV:DMVVE:SXGXR, HVPKPXX:APTKL:RPVQ-AA¹⁷-RKI:DDSSNVI:KKATV:NMVVR:SXGXH, RVPSTXX:APVKT:RPVQ-AA¹⁷-RKI:DNGRVLL:KKATV:MIVEE:XGXL, ASAAPXX:VPQAL:RPVQ-AA¹⁷-RKI:VGRKPKV:KKATV:MIVRS:XKXS, ASASPXX:VSQDL:RPVQ-AA¹⁷-RKI:IGKTPKI:KKATV:MIVKS:XKXS, ASASPXX:VPQDL:RPVQ-AA¹⁷-RKI:VGRTPKV:KKATV:MVVKS:XKXS, NDEGLEX:VPTEE:RPVQ-AA¹⁷-RKI:RIKPHQGQH:KKATV:FLQHN:KXEXR, NDEGLEX:VPTGQ:RPVQ-AA¹⁷-RKI:RIKPHQGQH:KKATV:LEEHS:QXEXR and SSVKXQP:SRVHH:RPVQ-AA¹⁷-RKI:EYVRKKPKL:KKATV:RLEEH:LEXAXA; and wherein AA¹⁷ is selected from the group consisting of G, A, V, L, I, P, F, M, W, T and S (in particular is selected from the group consisting of M, I, L, V and T).

[0403] In one example, said GFR-binding compound is a synthetic molecule as defined herein in the definition section.

[0404] In one particular example, said GFR-binding compound is a synthetic peptide, or a variant or analog thereof, or a peptidomimetic.

[0405] In one most particular example, said GFR-binding compound is a synthetic peptide.

[0406] In one example, a length of said GFR-binding compound, in solution, such as in a physiologically acceptable solvent such as water or PBS, is comprised between about 6 and about 20 nm, preferably between about 6 and about 16 nm, as determined using the standard «3D» procedure described above.

[0407] In one particular example, said GFR-binding compounds may be any one or a plurality of of peptides of SEQ ID NO: 1 to 2157 and 2242 to 84108.

### Linker

[0408] In one particular example, said LINKER has a Mw comprised between about 28 and about 2,000 Da. In one particular example, said LINKER has a Mw comprised between about 75 and about 2,000 Da. In one particular example, said LINKER has a Mw comprised between about 150 and about 2,000 Da. In one particular example, said LINKER has a Mw comprised between about 150 and about 1,500 Da. In one most particular example, said LINKER has a Mw comprised between about 300 and about 1,000 Da.

[0409] The chemical nature of said LINKER is not meant to be particularly limited and may be any organic molecule capable of covalently connecting two peptide fragments such as PEP(A) and PEP(B) or PEP(C)-PEP12 and PEP2-PEP(D) so long as LINKER provides sufficient spacing between the two elements connected therethrough for these two connected elements to provide or conserve the required tissue regeneration activity. LINKER may thus be a peptide, or variant, analog or peptidomimetic thereof, a polysaccharide, a polynucleotide, a saturated or unsaturated hydrocarbon chain, or a mixture thereof.

[0410] For example, in certain embodiments, LINKER is a peptide with 2 to 16 amino acids. In one particular example, LINKER is a peptide with 2 to 10 amino acids. In one particular example, LINKER is a peptide with 2 to 9 amino acids. In one most particular example, LINKER is a peptide with 5 to 9 amino acids.

[0411] Thus, in one particular example, said GFR-binding compound is a peptide, a variant or analog thereof as defined herein, with between 20 and 60 (in particular between 20 and 50, and more particularly, between 20 and 45) amino acids, of general formula (I); wherein one end of LINKER interacts covalently with one end of PEP(A); wherein another end of LINKER interacts covalently with one end of PEP(B); wherein PEP(A) comprises PEP1 or PEP12; wherein PEP(B) comprises PEP2; wherein LINKER is a peptide comprising 2 to 16 amino acids (in particular 2 to 10, 2 to 9, or 5 to 9 amino acids); and wherein the RMSD is 2.45 Å or less.

[0412] Thus, in one particular example, said GFR-binding compound is a peptide, a variant or analog thereof as defined herein, with (exclusively consisting of, or constituted of) between 25 and 60 (in particular between 25 and 50, and more particularly, between 25 and 45) amino acids, of general formula (II); wherein LINKER is a peptide comprising 2 to 16 amino acids (in particular 2 to 10, 2 to 9, or 5 to 9 amino acids); wherein PEP12 is a peptide with 8 amino acids of formula PEP1-AA¹⁷-PEP11 as already defined herein; wherein PEP1, PEP2, PEP11, PEP(C) and PEP(D) are as already defined herein; wherein AA¹³ and AA²¹ may be both N-terminal amino acids or both C-terminal amino acids; wherein AA²⁵ and AA²⁰ may be both N-terminal amino acids or both C-terminal amino acids; wherein one end of LINKER interacts covalently with one end of PEP12 via AA²⁰; wherein another end of LINKER interacts covalently with PEP2 via AA²¹; wherein one end of PEP(C) interacts covalently with PEP12 via AA¹³; wherein one end of PEP(D) interacts covalently with PEP2 via AA²⁵; and wherein the RMSD is 2.45 Å or less.

[0413] In certain embodiments, said GFR-binding compound is a peptidomimetic as defined herein, with (exclusively consisting of, or constituted of) between 25 and 60 (in particular between 25 and 50, and more particularly, between 25 and 45) amino acids, of general formula (II); wherein LINKER is not a peptide but may comprise amino acids or peptides in covalent or non-covalent (preferably covalent) association with other groups or residues other than amino acids or peptides.

[0414] In one particular example, LINKER comprises (or is) a peptide of general formula (V):

*AA²⁰¹-AA²⁰²-AA²⁰³-AA²⁰⁴-AA²⁰⁵-AA²⁰⁶-AA²⁰⁷-AA²⁰⁸-AA²⁰⁹** (V)

wherein said peptide of formula (III) may be selected from the group consisting of *AA^{III}-AA^{I}-AA^{I}-AA^{II}-AA^{VII}I AA^{XII}-AA^{XII}-AA^{XIII}-AA^{XIII}**, *AA^{III}-AA^{I}-AA^{VI}-AA^{II}-AA^{VII}-AA^{XII}-AA^{XII}-AA^{XIII}-AA^{XIII}**, *AA^{III}-AA^{I}-AA^{I}-AA^{II}-AA^{II}-AA^{XII}-AA^{XII}-AA^{XIII}-AA^{XIII}**, *AA^{III}-AA^{I}-AA^{II}-AA^{II}-AA^{VII}-AA^{XII}-AA^{XII}-AA^{XIII}-AA^{XIII}**, *AA^{III}-AA^{I}-AA^{II}-AA^{IV}-AA^{IV}- AA^{XII}-AA^{XII}-AA^{XIII}-AA^{XIII}**, *AA^{II}-AA^{I}-AA^{II}-AA^{II}-AA^{II}-AA^{XII}-AA^{XII}-AA^{XIII}-AA^{XIII}**, *AA^{III}-AA^{III}-AA^{II}-AA^{VII}-AA^{II}-AA^{XII}- AA^{XII}-AA^{XIII}-AA^{XIII}**, *AA^{III}-AA^{I}-AA^{I}-AA^{II}-AA^{II}-AA^{XII}-AA^{XII}-AA^{XII}-AA^{XIII}**, *AA^{V}-AA^{V}-AA^{VII}-AA^{VII}-AA^{XII}-AA^{XII}-AA^{XIII}-AA^{XIII}**, *AA^{VIII}-AA^{V}-AA^{VII}-AA^{II}-AA^{XII}-AA^{XII}-AA^{XIII}-AA^{XIII}** and *AA^{V}-AA^{V}-AA^{VII}-AA^{II}-AA^{XII}-AA^{XII}-AA^{XIII}-AA^{XIII}**; wherein AA^{I} is any amino acid as defined herein, AA^{II} is any polar amino acid as defined herein, AA^{III} is any acidic amino acid as defined herein, AA^{IV} is any aliphatic amino acid as defined herein, AA^{V} is any apolar amino acid as defined herein, AA^{VI} is any aromatic amino acid as defined herein, AA^{VII} is any basic amino acid as defined herein, AA^{VIII} is L or I as defined herein, AA^{XII} is an amino acid selected from the group consisting of G, A, V, L, I, P, M, K, R, H, Y and E, wherein AA^{XIII} is absent, AA^{II} or AA^{VII}, preferably absent; and wherein any one of the fragment AA²⁰¹, AA²⁰¹-AA²⁰², AA²⁰¹-AA²⁰²-AA²⁰³, AA²⁰¹-AA²⁰²-AA²⁰³-AA²⁰⁴, AA²⁰¹-AA²⁰²-AA²⁰³-AA²⁰⁴-AA²⁰⁵, AA²⁰¹-AA²⁰²-AA²⁰³-AA²⁰⁴-AA²⁰⁵-AA²⁰⁶, AA²⁰¹-AA²⁰²-AA²⁰³-AA²⁰⁴-AA²⁰⁵-AA²⁰⁶-AA²⁰⁷, AA²⁰³-AA²⁰⁴-AA²⁰⁵-AA²⁰⁶-AA²⁰⁷-AA²⁰⁸-AA²⁰⁹-AA²⁰⁴-AA²⁰⁵-AA²⁰⁶-AA²⁰⁷-AA²⁰⁸-AA²⁰⁹-AA²⁰⁵-AA²⁰⁶-AA²⁰⁷-AA²⁰⁸-AA²⁰⁹, AA²⁰⁶-AA²⁰⁷-AA²⁰⁸-AA²⁰⁹, AA²⁰⁷-AA²⁰⁸-AA²⁰⁹, AA²⁰⁸-AA²⁰⁹ or AA²⁰⁹, may be absent. In the peptides of formula (III), any one of the amino acid labelled “*” or the amino acid labelled “**” is an N-terminal amino acid and the other is a C-terminal amino acid.

[0415] For instance, in the peptide of formula *AA^{III}-AA^{I}-AA^{I}-AA^{II}-AA^{VII}-AA^{XII}-AA^{XII}-AA^{XIII}-AA^{XIII}** (V-1), AA^{III} occupies position AA²⁰¹, *AA^{I} occupies position AA²⁰², AA^{I} occupies position AA²⁰³, AA^{II} occupies position AA²⁰⁴, AA^{VII} occupies position AA²⁰⁵, AA^{XII} occupies position AA²⁰⁶, AA^{XII} occupies position AA²⁰⁷, AA^{XIII} occupies position AA²⁰⁸ and AA^{XIII}** occupies position AA²⁰⁹.

[0416] Likewise, in the peptide of formula *AA^{V}-AA^{V}-AA^{VII}-AA^{II}-AA^{XII}-AA^{XII}-AA^{XIII}-AA^{XIII}** (V-1) AA^{V} occupies position AA²⁰¹, AA^{V} occupies position AA²⁰², AA^{II} occupies position AA²⁰³, AA^{II} occupies position AA²⁰⁴, AA^{XII} occupies position AA²⁰⁵, AA^{XII} occupies position AA²⁰⁶, AA^{XIII} occupies position AA²⁰⁷, AA^{XIII} occupies position AA²⁰⁸ and position AA²⁰⁹ is vacant, thus AA²⁰⁸ would be the amino acid which interacts, in certain embodiments, with PEP2 via AA²¹.

[0417] In one example, LINKER may thus be any one of the following peptides:

*AA²⁰¹-AA²⁰²-AA²⁰³-AA²⁰⁴-AA²⁰⁵-AA²⁰⁶-AA²⁰⁷-AA²⁰⁸** (V-1); *AA²⁰¹-AA²⁰²-AA²⁰³-AA²⁰⁴-AA²⁰⁵-AA²⁰⁶-AA²⁰⁷** (V-2); *AA²⁰¹-AA²⁰²-AA²⁰³-AA²⁰⁴-AA²⁰⁵-AA²⁰⁶** (V-3); *AA²⁰¹-AA²⁰²-AA²⁰³-AA²⁰⁴-AA²⁰⁵** (V-4); *AA²⁰¹-AA²⁰²-AA²⁰³-AA²⁰⁴** (V-5); *AA²⁰¹-AA²⁰²-AA²⁰³** (V-6); *AA²⁰¹-AA²⁰²** (V-7); *AA²⁰²-AA²⁰³-AA²⁰⁴-AA²⁰⁵-AA²⁰⁶-AA²⁰⁷-AA²⁰⁸-AA²⁰⁹** (V-8); *AA²⁰³-AA²⁰⁴-AA²⁰⁵-AA²⁰⁶-AA²⁰⁷-AA²⁰⁸-AA²⁰⁹** (V-9); *AA²⁰⁴-AA²⁰⁵-AA²⁰⁶-AA²⁰⁷-AA²⁰⁸-AA²⁰⁹** (V-10); *AA²⁰⁵-AA²⁰⁶-AA²⁰⁷-AA²⁰⁸-AA²⁰⁹** (V-11); *AA²⁰⁶-AA²⁰⁷-AA²⁰⁸-AA²⁰⁹** (V-12); *AA²⁰⁷-AA²⁰⁸-AA²⁰⁹** (V-13); *AA²⁰⁸-AA²⁰⁹** (V-14); wherein, for instance, said peptide of formulae (V-1) may thus be selected from the group consisting of *AA^{III}-AA^{I}-AA^{I}-AA^{II}-AA^{VII}-AA^{XII}-AA^{XII}-AA^{XIII}**, *AA^{III}-AA^{I}-AA^{VI}-AA^{II}-AA^{VII}-AA^{XII}-AA^{XII}-AA^{XIII}**, *AA^{III}-AA^{I}-AA^{I}-AA^{II}-AA^{II}-AA^{XII}-AA^{XII}-AA^{XIII}**, *AA^{III}-AA^{I}-AA^{II}-AA^{II}-AA^{VI}-AA^{XII}-AA^{XII}-AA^{XIII}**, *AA^{III}-AA^{I}-AA^{II}-AA^{IV}-AA^{IV}-AA^{XII}-AA^{XII}-AA^{XIII}**, *AA^{II}-AA^{I}-AA^{II}-AA^{II}-AA^{II}-AA^{XII}-AA^{XII}-AA^{XIII}**, *AA^{III}-AA^{III}-AA^{II}-AA^{VI}-AA^{II}-AA^{XII}-AA^{XII}-AA^{XIII}**, *AA^{III}-AA^{I}-AA^{I}-AA^{II}-AA^{II}-AA^{XII}-AA^{XII}-AA^{XIII}**, *AA^{V}-AA^{V}-AA^{VII}-AA^{VII}-AA^{XII}AA^{XII}-AA^{XIII}**, *AA^{VIII}-AA^{V}-AA^{VII}-AA^{II}-AA^{XII}-AA^{XII}-AA^{XIII}** and *AA^{V}-AA^{V}-AA^{VII}-AA^{II}-AA^{XII}-AA^{XII}-AA^{XIII}**.

[0418] In one particular example, LINKER comprises a peptide of formula (V), (V-2) or (V-4).

[0419] In one example, LINKER comprises (or is) a poly-(aliphatic amino acid) peptide such as poly-alanine peptide (A)ₙ, or a poly-glycine (G)ₙ, n being an integer comprised between 2 and 16, preferably between 2 to 9, such as A-A-A-A-A-A-A-A-A, A-A-A-A-A-A-A, A-A-A-A-A, G-G-G-G-G-G-G-G-G, G-G-G-G-G-G-G or G-G-G-G-G.

[0420] In one particular example, LINKER comprises (or is) a peptide of general formulae (V) to (V-14), more particularly (V), (V-2) or (V-4), or a poly-(aliphatic amino acid)ₙ peptide as defined herein.

[0421] For example, in certain embodiments, LINKER is a polysaccharide comprising 2 to 16 saccharides. In one particular example, LINKER is a polysaccharide comprising 2 to 10 saccharides. In one particular example, LINKER is a polysaccharide comprising 2 to 9 saccharides. In one most particular example, LINKER is a polysaccharide comprising 5 to 9 saccharides. Suitable monosaccharides include, but are not limited to, glucose (dextrose), fructose (levulose) and galactose. Monosaccharides are the building blocks of disaccharides (such as sucrose) and polysaccharides (such as celluloses, chitosans, ulvanes and starches). Further, each carbon atom that supports a hydroxyl group (except for the first and last) is chiral, giving rise to a number of isomeric forms all with the same chemical formula. A large number of biologically important modified monosaccharides exists e.g. amino sugars such as Galactosamine, Glucosamine, Sialic acid, N-Acetylglucosamine, and sulfosugars such as Sulfoquinovose. All of these monosaccharide and polysaccharide derivatives may be used as LINKER in the present invention.

[0422] Thus, in one particular example, said GFR-binding compound is a hydride peptide/polysaccharide peptidomimetic of between 2,000 and 8,000 Da and of general formula (I) defined herein; wherein one end of LINKER interacts covalently with one end of PEP(A); wherein another end of LINKER interacts covalently with one end of PEP(B); wherein PEP(A) comprises PEP1 or PEP12; wherein PEP(B) comprises PEP2; wherein LINKER is a polysaccharide comprising 2 to 16 saccharides (in particular 2 to 10, 2 to 9, or 5 to 9 saccharides); and wherein the RMSD is 2.45 Å or less.

[0423] Thus, in one particular example, said GFR-binding compound is a hydride peptide/polysaccharide peptidomimetic of between 2,000 and 8,000 Da and of general formula (II); wherein LINKER is a polysaccharide comprising 2 to 16 saccharides (in particular 2 to 10, 2 to 9, or 5 to 9 saccharides); wherein PEP12 is a peptide with 8 amino acids of formula PEP1-AA¹⁷-PEP11 as already defined herein; wherein PEP1, PEP2, PEP11, PEP(C) and PEP(D) are as already defined herein; wherein AA¹³ and AA²¹ may be both N-terminal amino acids or both C-terminal amino acids; wherein AA²⁵ and AA²⁰ may be both N-terminal amino acids or both C-terminal amino acids; wherein one end of LINKER interacts covalently with one end of PEP12 via AA²⁰; wherein another end of LINKER interacts covalently with PEP2 via AA²¹; wherein one end of PEP(C) interacts covalently with PEP12 via AA¹³; wherein one end of PEP(D) interacts covalently with PEP2 via AA²⁵; and wherein the RMSD is 2.45 Å or less.

[0424] For example, in certain embodiments, LINKER is a polynucleotide comprising 2 to 16 nucleotides. In one particular example, LINKER is a polynucleotide comprising 2 to 10 nucleotides. In one particular example, LINKER is a polynucleotide comprising 2 to 9 nucleotides. In one most particular example, LINKER is a polynucleotide comprising 5 to 9 nucleotides. Suitable nucleotides include adenine (A), guanine (G), thymine (T), cytosine (C), uracil (U) and derivatives, analogues and/or mimetic thereof.

[0425] Thus, in one particular example, said GFR-binding compound is a hydride peptide/polynucleotide peptidomimetic of between 2,000 and 8,000 Da and of general formula (I) defined herein; wherein one end of LINKER interacts covalently with one end of PEP(A); wherein another end of LINKER interacts covalently with one end of PEP(B); wherein PEP(A) comprises PEP1 or PEP12; wherein PEP(B) comprises PEP2; wherein LINKER is a polynucleotide comprising 2 to 16 nucleotides (in particular 2 to 10, 2 to 9, or 5 to 9 nucleotides); and wherein the RMSD is 2.45 Å or less.

[0426] Thus, in one particular example, said GFR-binding compound is a hydride peptide/polynucleotide peptidomimetic of between 2,000 and 8,000 Da and of general formula (II); wherein LINKER is a polynucleotide comprising 2 to 16 nucleotides (in particular 2 to 10, 2 to 9, or 5 to 9 nucleotides); wherein PEP12 is a peptide with 8 amino acids of formula PEP1-AA¹⁷-PEP11 as already defined herein; wherein PEP1, PEP2, PEP11, PEP(C) and PEP(D) are as already defined herein; wherein AA¹³ and AA²¹ may be both N-terminal amino acids or both C-terminal amino acids; wherein AA²⁵ and AA²⁰ may be both N-terminal amino acids or both C-terminal amino acids; wherein one end of LINKER interacts covalently with one end of PEP12 via AA²⁰; wherein another end of LINKER interacts covalently with PEP2 via AA²¹; wherein one end of PEP(C) interacts covalently with PEP12 via AA¹³; wherein one end of PEP(D) interacts covalently with PEP2 via AA²⁵; and wherein the RMSD is 2.45 Å or less.

[0427] For example, in certain embodiments, LINKER is a saturated or unsaturated hydrocarbon chain comprising between 1 and 22, between 1 and 16, between 1 and 12, between 1 and 8 or between 1 and 6 carbon atoms, wherein said hydrocarbon chain is optionally interrupted by one or more non-carbon atom, preferably between 1 and 16, between 1 and 12 or between 1 and 8 non-carbon atoms as appropriate, wherein said non-carbon atom is selected from the group consisting of —O—, —S—, —C(═O), —SO₂—, —N(Ri)(C═O)—, and —N(Ri)-, wherein Ri is selected from the group consisting of a hydrogen atom, a C1-C6 alkyl group and an aryl group, and wherein said hydrocarbon chain is non-substituted or substituted by at least one radical selected from the group consisting of a halogen, a monosaccharide, a poly(1-6)saccharide, a nucleotide, a poly(1-6)nucleotide, a C1-C10 alkyl group and an aryl group.

[0428] Thus, in one particular example, said GFR-binding compound is a hydride peptide/hydrocarbon chain peptidomimetic of between 2,000 and 8,000 Da and of general formula (I) defined herein; wherein one end of LINKER interacts covalently with one end of PEP(A); wherein another end of LINKER interacts covalently with one end of PEP(B); wherein PEP(A) comprises PEP1 or PEP12; wherein PEP(B) comprises PEP2; wherein LINKER is a saturated or unsaturated hydrocarbon chain comprising between 1 and 22 as defined herein; and wherein the RMSD is 2.45 Å or less.

[0429] Thus, in one particular example, said GFR-binding compound is a hydride peptide/hydrocarbon chain peptidomimetic of between 2,000 and 8,000 Da and of general formula (II); wherein LINKER is a saturated or unsaturated hydrocarbon chain comprising between 1 and 22 as defined herein; wherein PEP12 is a peptide with 8 amino acids of formula PEP1-AA¹⁷-PEP11 as already defined herein; wherein PEP1, PEP2, PEP11, PEP(C) and PEP(D) are as already defined herein; wherein AA¹³ and AA²¹ may be both N-terminal amino acids or both C-terminal amino acids; wherein AA²⁵ and AA²⁰ may be both N-terminal amino acids or both C-terminal amino acids; wherein one end of LINKER interacts covalently with one end of PEP12 via AA²⁰; wherein another end of LINKER interacts covalently with PEP2 via AA²¹; wherein one end of PEP(C) interacts covalently with PEP12 via AA¹³; wherein one end of PEP(D) interacts covalently with PEP2 via AA²⁵; and wherein the RMSD is 2.45 Å or less.

[0430] In one example, LINKER is a saturated or unsaturated hydrocarbon chain of at most 10 nanometres (nm) in length, preferably at most 8 nm, 6 nm, 4 nm or 2 nm as determined using the standard «2D» procedure described above.

[0431] In one example, such saturated or unsaturated hydrocarbon chains include polyethylene glycol (PEG) or any one of its derivatives.

[0432] More particularly, LINKER is a pentapeptide (five amino acids). More particularly, LINKER is a hexapeptide (six amino acids). More particularly, LINKER is a heptapeptide (seven amino acids). More particularly, LINKER is an octapeptide (eight amino acids). More particularly, LINKER is a nonapeptide (nine amino acids).

[0433] In one particular example, LINKER is a peptide selected from the group consisting of DENEKVV, DENKNVV, DEYDKVV, DDSSNVI, DSSNNVI, DDMGVPT, DKGVVTY, NDKQQII, DAANNVV, DSANNVV, DDSSNVI, DNGRVLL, VGRKPKV, IGKTPKI, VGRTPKV, RIKPHQGQH, EYVRKKPKL, EIVRKKPIF, EYVRKKP, EIVRKKP, polyalanine (A₁₋₉) and polyglycine (G₁₋₉).

[0434] For example, in certain embodiments, the covalent interaction between an end (i.e. one end or the other end) of LINKER or PEP(A) or PEP12 and an N-terminal amino acid, such as AA¹³ or AA²¹, may be created through the chemical reaction between the free amine moiety of the N-terminal amino acid (—NH₂ or —NH₃X, X generally being a halide anion selected from the group consisting of F⁻, Cl⁻ and Br⁻), typically acting as a nucleophile, and an electrophile moiety of LINKER. Such an electrophile moiety includes, but is not limited to, alkyl halides (—CR₂—X), alcohols (—CR₂—OH), acid chlorides (—C(═O)X), esters, (—C(═O)OR), phosphate (—OP(OR)₃), phosphinate (—OP(OR)R₂), phosphonates (—OP(OR)₂R), phosphonite (—P(OR)₂R) or sulfonic esters (—SO₂OR). More particularly, this covalent interaction is an amide bond (in particular a peptide bond) formed through conventional peptide synthesis using conventional coupling reagents as already defined herein.

[0435] For example, in certain embodiments, the covalent interaction between an end (i.e. one end or the other end) of LINKER or PEP(B) or PEP2 and a C-terminal amino acid such as AA²⁵ or AA²⁰, may be created through the chemical reaction between the free carboxylic acid moiety of the C-terminal amino acid (—CO₂H or —CO₂X, X generally being an inorganic cation such as alkaline cations (e.g. Li⁺, Na⁺ or K⁺) or an organic cation such as ammonium cations, typically acting as an electrophile, and a nucleophile moiety of LINKER. Such a nucleophile moiety includes, but is not limited to, alcohols (—OH), amines (—NH₂), phosphines (—PR₃), thiols (—SH). More particularly, this covalent interaction is a peptide bond formed through conventional peptide synthesis using conventional coupling reagents as already defined herein.

### Bone

[0436] Certain embodiments of the invention are particularly useful for inducing differentiation of mensenchymal or progenitor stem cells from the bone cell lineage, regenerating bone tissues, repairing bone and protecting from osteoporosis.

[0437] In certain embodiments useful for inducing differentiation of mensenchymal or progenitor stem cells from the bone cell lineage, regenerating bone tissues, repairing bone and protecting from osteoporosis, PEP1 is selected from the group consisting of SAIS, NAIS, SATS and SPIS.

[0438] In certain embodiments useful for inducing differentiation of mensenchymal or progenitor stem cells from the bone cell lineage, regenerating bone tissues, repairing bone and protecting from osteoporosis, PEP2 is selected from the group consisting of LKNYQ, LKKYR, LRKHR and LKYHY.

[0439] In certain embodiments useful for inducing differentiation of mensenchymal or progenitor stem cells from the bone cell lineage, regenerating bone tissues, repairing bone and protecting from osteoporosis, PEP3 is selected from the group consisting of VPT, APT, VPQ, VSQ and TQV.

[0440] In certain embodiments useful for inducing differentiation of mensenchymal or progenitor stem cells from the bone cell lineage, regenerating bone tissues, repairing bone and protecting from osteoporosis, PEP4 is selected from the group consisting of VVE, VVR, VVK, VAE, VRS, VKS and EDH.

[0441] In certain embodiments useful for inducing differentiation of mensenchymal or progenitor stem cells from the bone cell lineage, regenerating bone tissues, repairing bone and protecting from osteoporosis, PEP5 is a peptide of general formula PEP3-AA¹¹-AA¹²; wherein PEP3 is selected from the group consisting of VPT, APT, VPQ, VSQ and TQV; wherein AA¹¹ is selected from the group consisting of E, K, Q, R, A, D, G and H, in particular E, K, Q, A and D; wherein AA¹² is selected from the group consisting of L, M, T, E, Q and H, in particular L. In one particular example, PEP5 is selected from the group consisting of VPTEL, APTKL, APTQL, VPTKL, VPQAL, VSQDL, VPQDL and TQVQL.

[0442] In certain embodiments useful for inducing differentiation of mensenchymal or progenitor stem cells from the bone cell lineage, regenerating bone tissues, repairing bone and protecting from osteoporosis, PEP6 is a peptide of general formula AA²⁶-AA²⁷-AA²⁸-AA²⁹-PEP4; wherein PEP4 is selected from the group consisting of VVE, VVR, VVK, VAE, VRS, VKS and EDH; wherein AA²⁶ is absent or selected from the group consisting of AA^{III} amino acids, preferably is absent or E; wherein AA²⁷ and AA²⁸ are independently selected from the group consisting of AA^{III} and AA^{V} amino acids, preferably AA²⁷ is selected from the group consisting of D, E, N, G, M and T, preferably AA²⁸ is selected from the group consisting of M, I, V and L; wherein AA²⁹ is absent or selected from the group consisting of AA^{II} amino acids, preferably absent or S. In one particular example, PEP6 is selected from the group consisting of DMVVE, EMVVE, NMVVR, NMVVK, EGMSVAE, MIVRS, MIVKS, MVVKS and TLEDH.

[0443] In certain embodiments useful for inducing differentiation of mensenchymal or progenitor stem cells from the bone cell lineage, regenerating bone tissues, repairing bone and protecting from osteoporosis, PEP7 is an amino acid or a peptide with between two and seven amino acids of general formula AA¹-AA²-AA³-AA⁴-AA⁵-AA⁶-AA⁷; wherein AA¹, AA², AA³, AA⁴, and AA⁵ are independently absent or AA^{I} as defined herein; wherein AA⁶ is absent or selected from the group consisting of S, T, C, E, Q, P and R, preferably C, S, T or R; wherein AA⁷ is absent or is selected from the group consisting of S, T, C, E, Q, P and R, preferably is selected from the group consisting of C, S and P; and wherein at least one of AA¹, AA², AA³, AA⁴, AA⁵, AA⁶ or AA⁷ is not absent. In one particular example, PEP7 is selected from the group consisting of KIPKAXX, SIPKAXX, HVTKPTX, YVPKPXX, TVPKPXX, AVPKAXX, KVGKAXX, ASAAPXX, ASASPXX and RNVQXRP.

[0444] In certain embodiments useful for inducing differentiation of mensenchymal or progenitor stem cells from the bone cell lineage, regenerating bone tissues, repairing bone and protecting from osteoporosis, PEP8 is an amino acid or a peptide with between two and six amino acids of general formula AA³³-AA³⁴-AA³⁵-AA³⁶-AA³⁷-AA³⁸; wherein AA³³ is absent or is selected from the group consisting of AA^{I} amino acids at the exception of AA^{VI} amino acids; AA³⁴ is absent or is selected from the group consisting of AA^{III} and AA^{IV} amino acids; wherein AA³⁵ is absent or is selected from the group consisting of AA^{II} amino acids, preferably is S or C; wherein AA³⁶ is absent or is selected from the group consisting of AA^{III} and AA^{IV} amino acids; wherein AA³⁷ is absent or is selected from the group consisting of AA^{II} amino acids, preferably is S or C; wherein AA³⁸ is absent or is selected from the group consisting of AA^{I}; and wherein at least one of AA³³, AA³⁴, AA³⁵, AA³⁶, AA³⁷ or AA³⁸ is not absent. In one particular example, PEP8 is selected from the group consisting of GXGXR, SXGXH, AXGXH, XGXR, XKXS and LAXKXE.

[0445] In certain embodiments useful for inducing differentiation of mensenchymal or progenitor stem cells from the bone cell lineage, regenerating bone tissues, repairing bone and protecting from osteoporosis, PEP9 is a peptide of general formula AA¹-AA²-AA³-AA⁴-AA⁵-AA⁶-AA⁷-PEP5; wherein PEP5 is a peptide of formula PEP3-AA¹¹-AA¹²; wherein PEP3 is selected from the group consisting of VPT, APT, VPQ, VSQ and TQV; wherein AA¹¹ is selected from the group consisting of E, K, Q, R, A, D, G and H, in particular E, K, Q, A and D; wherein AA¹² is selected from the group consisting of L, M, T, E, Q and H, in particular L; wherein AA¹, AA², AA³, AA⁴, and AA⁵ are independently absent or AA^{I} as defined herein; wherein AA⁶ is absent or selected from the group consisting of S, T, C, E, Q, P and R, preferably C, S, T or R; wherein AA⁷ is selected from the group consisting of S, T, C, E, Q, P and R, preferably is selected from the group consisting of C, S and P. In one particular example, PEP9 is selected from the group consisting of KIPKAXXVPTEL, SIPKAXXVPTEL, HVTKPTXAPTKL, YVPKPXXAPTKL, TVPKPXXAPTQL, AVPKAXXAPTKL, KVGKAXXVPTKL, ASAAPXXVPQAL, ASASPXXVSQDL, ASASPXXVPQDL and RNVQXRPTQVQL.

[0446] In certain embodiments useful for inducing differentiation of mensenchymal or progenitor stem cells from the bone cell lineage, regenerating bone tissues, repairing bone and protecting from osteoporosis, PEP10 is a peptide of general formula PEP6-AA³³-AA³⁴-AA³⁵-AA³⁶-AA³⁷-AA³⁸; wherein PEP6 is a peptide of formula AA²⁶-AA²⁷-AA²⁸-AA²⁹-PEP4; wherein PEP4 is selected from the group consisting of VVE, VVR, VVK, VAE, VRS, VKS and EDH; wherein AA²⁶ is absent or selected from the group consisting of AA^{III} amino acids, preferably E; wherein AA²⁷ and AA²⁸ are independently selected from the group consisting of AA^{III} and AA^{V} amino acids, preferably AA²⁷ is selected from the group consisting of D, E, N, G, M and T, preferably AA²⁸ is selected from the group consisting of M, I, V and L; wherein AA²⁹ is absent or selected from the group consisting of AA^{II} amino acids, preferably absent or S; wherein AA³³ is absent or is selected from the group consisting of AA^{I} amino acids at the exception of AA^{VI} amino acids; AA³⁴ is absent or is selected from the group consisting of AA^{III} and AA^{IV} amino acids; wherein AA³⁵ is absent or is selected from the group consisting of AA^{II} amino acids, preferably is S or C; wherein AA³⁶ is absent or is selected from the group consisting of AA^{III} and AA^{IV} amino acids; wherein AA³⁷ is absent or is selected from the group consisting of AA^{II} amino acids, preferably is S or C; wherein AA³⁸ is absent or is selected from the group consisting of AA^{I}. In one particular example, PEP10 is selected from the group consisting of DMVVEGXGXR, EMVVEGXGXR, NMVVRSXGXH, NMVVRAXGXH, NMVVKAXGXH, EGMSVAEXGXR, MIVRSXKXS, MIVKSXKXS, MVVKSXKXS and TLEDHLAXKXE.

[0447] In certain embodiments useful for inducing differentiation of mensenchymal or progenitor stem cells from the bone cell lineage, regenerating bone tissues, repairing bone and protecting from osteoporosis, PEP12 is a peptide of general formula PEP1-AA¹⁷-PEP11; wherein AA¹⁷ is selected from the group consisting of G, A, V, L, I, P, F, M, W, T and S (in particular is selected from the group consisting of M, I, L, V and T); wherein PEP1 is selected from the group consisting of SAIS, NAIS, SATS and SPIS.

[0448] In certain embodiments useful for inducing differentiation of mensenchymal or progenitor stem cells from the bone cell lineage, regenerating bone tissues, repairing bone and protecting from osteoporosis, PEP11 is a peptide with 3 amino acids of general formula AA¹⁸-AA¹⁹-AA²⁰; wherein AA¹⁸ is selected from the group consisting of L, V, Q, A and R, in particular is L; wherein AA¹⁹ is selected from the group consisting of F, W, H and Y (in particular is an aromatic, polar amino acid such as Y); wherein AA²⁰ is selected from the group consisting of L, F, Y, K, I, V and M, in particular is selected from the group consisting of L, F, Y, and K. In one particular example, PEP11 is selected from the group consisting of LYL, LYF, LYY and LYK.

[0449] The definitions of “PEP” pairs, quadruplets, hexaplets and heptuplet e.g. PEP1:PEP2, PEP12:PEP2, or PEP7:PEP5:PEP12:LINKER:PEP2:PEP6:PEP8, most particularly useful for inducing differentiation of mensenchymal or progenitor stem cells from the bone cell lineage, regenerating bone tissues, repairing bone and protecting from osteoporosis, are as already defined herein to the extent that PEP1 to PEP12 are particularly useful for these applications as defined in the present bone section. For instances: In certain embodiments, useful for inducing differentiation of mensenchymal or progenitor stem cells from the bone cell lineage, regenerating bone tissues, repairing bone and protecting from osteoporosis, the pair PEP1:PEP2 is selected from the group consisting of SAIS:LKNYQ, NAIS:LKKYR, SATS:LRKHR and SPIS:LKYHY.

[0450] In certain embodiments, useful for inducing differentiation of mensenchymal or progenitor stem cells from the bone cell lineage, regenerating bone tissues, repairing bone and protecting from osteoporosis, the pair PEP12:PEP2 is selected from the group consisting of SAIS-AA¹⁷-LYL:LKNYQ, NAIS-AA¹⁷-LYF:LKKYR, SATS-AA¹⁷-LYY:LRKHR and SPIS-AA¹⁷-LYK:LKYHY; wherein AA¹⁷ is selected from the group consisting of G, A, V, L, I, P, F, M, W, T and S (in particular is selected from the group consisting of M, V and T).

[0451] In certain embodiments useful for inducing differentiation of mensenchymal or progenitor stem cells from the bone cell lineage, regenerating bone tissues, repairing bone and protecting from osteoporosis, PEP3 is selected from the group consisting of VPT, APT, VPQ, VSQ and TQV; PEP4 is selected from the group consisting of VVE, VVR, VVK, VAE, VRS, VKS and EDH; and wherein the pair PEP3:PEP4 is selected from the group consisting of VPT:VVE, APT:VVR, APT:VVK, VPT:VAE, VPQ:VRS, VSQ:VKS, VPQ:VKS and TQV:EDH.

[0452] In certain embodiments useful for inducing differentiation of mensenchymal or progenitor stem cells from the bone cell lineage, regenerating bone tissues, repairing bone and protecting from osteoporosis, PEP5 is selected from the group consisting of VPTEL, APTKL, APTQL, VPTKL, VPQAL, VSQDL, VPQDL and TQVQL; PEP6 is selected from the group consisting of DMVVE, EMVVE, NMVVR, NMVVK, EGMSVAE, MIVRS, MIVKS, MVVKS and TLEDH; and wherein the pair PEP5:PEP6 is selected from the group consisting of VPTEL:DMVVE, VPTEL:EMVVE, APTKL:NMVVR, APTQL:NMVVR, APTKL:NMVVK, VPTKL:EGMSVAE, VPQAL:MIVRS, VSQDL:MIVKS, VPQDL:MVVKS and TQVQL:TLEDH.

[0453] In certain embodiments useful for inducing differentiation of mensenchymal or progenitor stem cells from the bone cell lineage, regenerating bone tissues, repairing bone and protecting from osteoporosis, PEP7 is selected from the group consisting of KIPKAXX, SIPKAXX, HVTKPTX, YVPKPXX, TVPKPXX, AVPKAXX, KVGKAXX, ASAAPXX, ASASPXX and RNVQXRP; wherein PEP8 is selected from the group consisting of GXGXR, SXGXH, AXGXH, XGXR, XKXS and LAXKXE; and wherein the pair PEP7:PEP8 is selected from the group consisting of KIPKAXX:GXGXR, SIPKAXX:GXGXR, HVTKPTX:SXGXH, YVPKPXX:SXGXH, KVGKAXX:XGXR, ASAAPXX:XKXS, ASASPXX:XKXS and RNVQXRP:LAXKXE.

[0454] In certain embodiments useful for inducing differentiation of mensenchymal or progenitor stem cells from the bone cell lineage, regenerating bone tissues, repairing bone and protecting from osteoporosis, PEP9 is selected from the group consisting of KIPKAXXVPTEL, SIPKAXXVPTEL, HVTKPTXAPTKL, YVPKPXXAPTKL, TVPKPXXAPTQL, AVPKAXXAPTKL, KVGKAXXVPTKL, ASAAPXXVPQAL, ASASPXXVSQDL, ASASPXXVPQDL and RNVQXRPTQVQL; PEP10 is selected from the group consisting of DMVVEGXGXR, EMVVEGXGXR, NMVVRSXGXH, NMVVRAXGXH, NMVVKAXGXH, EGMSVAEXGXR, MIVRSXKXS, MIVKSXKXS, MVVKSXKXS and TLEDHLAXKXE; and wherein the pair PEP9:PEP10 is selected from the group consisting of KIPKAXXVPTEL:DMVVEGXGXR, SIPKAXXVPTEL:EMVVEGXGXR, HVTKPTXAPTKL:NMVVRSXGXH, YVPKPXXAPTKL:NMVVRSXGXH, KVGKAXXVPTKL:EGMSVAEXGXR, ASAAPXXVPQAL:MIVRSXKXS, ASASPXXVSQDL:MIVKSXKXS, ASASPXXVPQDL:MVVKSXKXS and RNVQXRPTQVQL:TLEDHLAXKXE.

[0455] In certain embodiments useful for inducing differentiation of mensenchymal or progenitor stem cells from the bone cell lineage, regenerating bone tissues, repairing bone and protecting from osteoporosis, PEP5 is selected from the group consisting of VPTEL, APTKL, APTQL, VPTKL, VPQAL, VSQDL, VPQDL and TQVQL; PEP6 is selected from the group consisting of DMVVE, EMVVE, NMVVR, NMVVK, EGMSVAE, MIVRS, MIVKS, MVVKS and TLEDH; and wherein the pair PEP5:PEP6 is selected from the group consisting of VPTEL:DMVVE, VPTEL:EMVVE, APTKL:NMVVR, APTQL:NMVVR, APTKL:NMVVK, VPTKL:EGMSVAE, VPQAL:MIVRS, VSQDL:MIVKS, VPQDL:MVVKS and TQVQL:TLEDH; and wherein the pair PEP5:PEP6 is not VPTEL:DMVVE when PEP1 is SAIS and PEP2 is LKNYQ; wherein the pair PEP5:PEP6 is not VPTEL:EMVVE when PEP1 is SAIS and PEP2 is LKNYQ; wherein the pair PEP5:PEP6 is not APTKL:NMVVR when PEP1 is NAIS and PEP2 is LKKYR; wherein the pair PEP5:PEP6 is not APTQL:NMVVR when PEP1 is NAIS and PEP2 is LKKYR; wherein the pair PEP5:PEP6 is not APTKL:NMVVK when PEP1 is SATS and PEP2 is LRKHR; wherein the pair PEP5:PEP6 is not VPTKL:EGMSVAE when PEP1 is SPIS and PEP2 is LKYHY.

[0456] In certain embodiments useful for inducing differentiation of mensenchymal or progenitor stem cells from the bone cell lineage, regenerating bone tissues, repairing bone and protecting from osteoporosis, PEP9 is selected from the group consisting of KIPKAXXVPTEL, SIPKAXXVPTEL, HVTKPTXAPTKL, YVPKPXXAPTKL, TVPKPXXAPTQL, AVPKAXXAPTKL, KVGKAXXVPTKL, ASAAPXXVPQAL, ASASPXXVSQDL, ASASPXXVPQDL and RNVQXRPTQVQL; PEP10 is selected from the group consisting of DMVVEGXGXR, EMVVEGXGXR, NMVVRSXGXH, NMVVRAXGXH, NMVVKAXGXH, EGMSVAEXGXR, MIVRSXKXS, MIVKSXKXS, MVVKSXKXS and TLEDHLAXKXE; and wherein the pair PEP9:PEP10 is selected from the group consisting of KIPKAXXVPTEL:DMVVEGXGXR, SIPKAXXVPTEL:EMVVEGXGXR, HVTKPTXAPTKL:NMVVRSXGXH, YVPKPXXAPTKL:NMVVRSXGXH, KVGKAXXVPTKL:EGMSVAEXGXR, ASAAPXXVPQAL:MIVRSXKXS, ASASPXXVSQDL:MIVKSXKXS, ASASPXXVPQDL:MVVKSXKXS and RNVQXRPTQVQL:TLEDHLAXKXE; and wherein PEP9:PEP10 is not KIPKAXXVPTEL:DMVVEGXGXR when PEP1 is SAIS and PEP2 is LKNYQ; wherein PEP9:PEP10 is not SIPKAXXVPTEL:EMVVEGXGXR when PEP1 is SAIS and PEP2 is LKNYQ; wherein PEP9:PEP10 is not HVTKPTXAPTKL:NMVVRSXGXH when PEP1 is NAIS and PEP2 is LKKYR; wherein PEP9:PEP10 is not YVPKPXXAPTKL:NMVVRSXGXH when PEP1 is NAIS and PEP2 is LKKYR; wherein PEP9:PEP10 is not TVPKPXXAPTQL:NMVVRAXGXH when PEP1 is NAIS and PEP2 is LKKYR; wherein PEP9:PEP10 is not AVPKAXXAPTKL:NMVVKAXGXH when PEP1 is SATS and PEP2 is LRKHR; wherein PEP9:PEP10 is not KVGKAXXVPTKL:EGMSVAEXGXR when PEP1 is SPIS and PEP2 is LKYHY.

[0457] In certain embodiments useful for inducing differentiation of mensenchymal or progenitor stem cells from the bone cell lineage, regenerating bone tissues, repairing bone and protecting from osteoporosis, PEP1 is selected from the group consisting of SAIS, NAIS, SATS and SPIS; PEP11 is selected from the group consisting of LYL, LFF, LYF, LYY, LYK, LYI, LFI, LYV, VYY, QIM, AKV and RKI; and the pair PEP1:PEP11 is selected from the group consisting of SAIS:LYL, NAIS:LYF, SATS:LYY and SPIS:LYK.

[0458] In one aspect, the present disclosure provides a GFR-binding compound, wherein said GFR-binding compound is a peptide, a variant or analog thereof, or a peptidomimetic as defined herein, with between 20 and 60 (in particular between 20 and 50, and more particularly, between 20 and 45) amino acids, comprising a peptide with four amino acids (PEP1) or a peptide with eight amino acids (PEP12), a peptide with five amino acids (PEP2), and optionally a pair of peptides selected form the group consisting of PEP3:PEP4, PEP3:PEP6, PEP3:PEP10, PEP5:PEP4, PEP9:PEP4, PEP5:PEP6, PEP5:PEP10, PEP9:PEP6 and PEP9:PEP10; wherein said GFR-binding compound does not comprise the pair of peptides VPTEL:DMVVE when PEP1 is SAIS and PEP2 is LKNYQ; wherein said GFR-binding compound does not comprise the pair of peptides VPTEL:EMVVE when PEP1 is SAIS and PEP2 is LKNYQ; wherein said GFR-binding compound does not comprise the pair of peptides APTKL:NMVVR when PEP1 is NAIS and PEP2 is LKKYR; wherein said GFR-binding compound does not comprise the pair of peptides APTQL:NMVVR when PEP1 is NAIS and PEP2 is LKKYR; wherein said GFR-binding compound does not comprise the pair of peptides APTKL:NMVVK when PEP1 is SATS and PEP2 is LRKHR; wherein said GFR-binding compound does not comprise the pair of peptides VPTKL:EGMSVAE when PEP1 is SPIS and PEP2 is LKYHY; and wherein the RMSD is 2.45 Å or less.

[0459] In one aspect, the present disclosure provides a GFR-binding compound, wherein said GFR-binding compound is a peptide, a variant or analog thereof, or a peptidomimetic as defined herein, with between 20 and 60 (in particular between 20 and 50, and more particularly, between 20 and 45) amino acids, comprising a peptide with four amino acids (PEP1) or a peptide with eight amino acids (PEP12), a peptide with five amino acids (PEP2), and optionally a pair of peptides selected form the group consisting of PEP3:PEP4, PEP3:PEP6, PEP3:PEP10, PEP5:PEP4, PEP9:PEP4, PEP5:PEP6, PEP5:PEP10, PEP9:PEP6 and PEP9:PEP10; wherein said GFR-binding compound does not comprise the pair of peptides KIPKAXXVPTEL:DMVVEGXGXR when PEP1 is SAIS and PEP2 is LKNYQ; wherein said GFR-binding compound does not comprise the pair of peptides SIPKAXXVPTEL:EMVVEGXGXR when PEP1 is SAIS and PEP2 is LKNYQ; wherein said GFR-binding compound does not comprise the pair of peptides HVTKPTXAPTKL:NMVVRSXGXH when PEP1 is NAIS and PEP2 is LKKYR; wherein said GFR-binding compound does not comprise the pair of peptides YVPKPXXAPTKL:NMVVRSXGXH when PEP1 is NAIS and PEP2 is LKKYR; wherein said GFR-binding compound does not comprise the pair of peptides TVPKPXXAPTQL:NMVVRAXGXH when PEP1 is NAIS and PEP2 is LKKYR; wherein said GFR-binding compound does not comprise the pair of peptides AVPKAXXAPTKL:NMVVKAXGXH when PEP1 is SATS and PEP2 is LRKHR; wherein said GFR-binding compound does not comprise the pair of peptides KVGKAXXVPTKL:EGMSVAEXGXR when PEP1 is SPIS and PEP2 is LKYHY; and wherein the RMSD is 2.45 Å or less.

[0460] In certain embodiments useful for inducing differentiation of mensenchymal or progenitor stem cells from the bone cell lineage, regenerating bone tissues, repairing bone and protecting from osteoporosis, said GFR-binding compound is a synthetic molecule as defined herein in the definition section.

[0461] In certain embodiments useful for inducing differentiation of mensenchymal or progenitor stem cells from the bone cell lineage, regenerating bone tissues, repairing bone and protecting from osteoporosis, said GFR-binding compound is a synthetic peptide, or a variant or analog thereof, or a peptidomimetic.

### Cartilage

[0462] Certain embodiments of the invention are particularly useful for inducing differentiation of mensenchymal or progenitor stem cells from the cartilage cell lineage, regenerating cartilage tissues, repairing cartilage and protecting from, for instance, osteoarthritis, costochondritis, Herniation, achondroplasia or relapsing polychondritis.

[0463] In certain embodiments useful for inducing differentiation of mensenchymal or progenitor stem cells from the cartilage cell lineage, regenerating cartilage tissues, repairing cartilage and protecting from, for instance, osteoarthritis, costochondritis, Herniation, achondroplasia or relapsing polychondritis, PEP1 is selected from the group consisting of SAIS, NAIS, SPIS, EPLP and EPLT.

[0464] In certain embodiments useful for inducing differentiation of mensenchymal or progenitor stem cells from the cartilage cell lineage, regenerating cartilage tissues, repairing cartilage and protecting from, for instance, osteoarthritis, costochondritis, Herniation, achondroplasia or relapsing polychondritis, PEP2 is selected from the group consisting of LKNYQ, LKKYR, YKQYE and EQLSN.

[0465] In certain embodiments useful for inducing differentiation of mensenchymal or progenitor stem cells from the cartilage cell lineage, regenerating cartilage tissues, repairing cartilage and protecting from, for instance, osteoarthritis, costochondritis, Herniation, achondroplasia or relapsing polychondritis, PEP3 is selected from the group consisting of VPT, APT, VPQ and VSQ.

[0466] In certain embodiments useful for inducing differentiation of mensenchymal or progenitor stem cells from the cartilage cell lineage, regenerating cartilage tissues, repairing cartilage and protecting from, for instance, osteoarthritis, costochondritis, Herniation, achondroplasia or relapsing polychondritis, PEP4 is selected from the group consisting of VVE, VVR, VRS and VKS.

[0467] In certain embodiments useful for inducing differentiation of mensenchymal or progenitor stem cells from the cartilage cell lineage, regenerating cartilage tissues, repairing cartilage and protecting from, for instance, osteoarthritis, costochondritis, Herniation, achondroplasia or relapsing polychondritis, PEP5 is a peptide of general formula PEP3-AA¹¹-AA¹²; wherein PEP3 is selected from the group consisting of VPT, APT, VPQ and VSQ; wherein AA¹¹ is selected from the group consisting of E, K, Q, R, A, D, G and H, in particular E, K, Q, R, A and D; wherein AA¹² is selected from the group consisting of L, M, T, E, Q and H, in particular is L. In one particular example, PEP5 is selected from the group consisting of VPTEL, APTKL, APTQL, VPTRL, VPQAL, VSQDL and VPQDL.

[0468] In certain embodiments useful for inducing differentiation of mensenchymal or progenitor stem cells from the cartilage cell lineage, regenerating cartilage tissues, repairing cartilage and protecting from, for instance, osteoarthritis, costochondritis, Herniation, achondroplasia or relapsing polychondritis, PEP6 is a peptide of general formula AA²⁶-AA²⁷-AA²⁸-AA²⁹-PEP4; wherein PEP4 is selected from the group consisting of VVE, VVR, VRS and VKS; wherein AA²⁶ is absent or selected from the group consisting of AA^{III} amino acids, preferably is absent; wherein AA²⁷ and AA²⁸ are independently selected from the group consisting of AA^{III} and AA^{V} amino acids, preferably AA²⁷ is selected from the group consisting of D, E, N and M, preferably AA²⁸ is selected from the group consisting of M, I and V; wherein AA²⁹ is absent or selected from the group consisting of AA^{II} amino acids, preferably absent. In one particular example, PEP6 is selected from the group consisting of DMVVE, EMVVE, NMVVR, DMVVE, MIVRS, MIVKS and MVVKS.

[0469] In certain embodiments useful for inducing differentiation of mensenchymal or progenitor stem cells from the cartilage cell lineage, regenerating cartilage tissues, repairing cartilage and protecting from, for instance, osteoarthritis, costochondritis, Herniation, achondroplasia or relapsing polychondritis, PEP7 is an amino acid or a peptide with between two and seven amino acids of general formula AA¹-AA²-AA³-AA⁴-AA⁵-AA⁶-AA⁷; wherein AA¹, AA², AA³, AA⁴, and AA⁵ are independently absent or AA^{I} as defined herein; wherein AA⁶ is absent or selected from the group consisting of S, T, C, E, Q, P and R, preferably is S, C or T; wherein AA⁷ is absent or is selected from the group consisting of S, T, C, E, Q, P and R, preferably is S or C; and wherein at least one of AA¹, AA², AA³, AA⁴, AA⁵, AA⁶ or AA⁷ is not absent. In one particular example, PEP7 is selected from the group consisting of KIPKAXX, SIPKAXX, HVTKPTX, YVPKPXX, TVPKPXX, STPPTXX, ASAAPXX and ASASPXX.

[0470] In certain embodiments useful for inducing differentiation of mensenchymal or progenitor stem cells from the cartilage cell lineage, regenerating cartilage tissues, repairing cartilage and protecting from, for instance, osteoarthritis, costochondritis, Herniation, achondroplasia or relapsing polychondritis, PEP8 is an amino acid or a peptide with between two and six amino acids of general formula AA³³-AA³⁴-AA³⁵-AA³⁶-AA³⁷-AA³⁸; wherein AA³³ is absent or is selected from the group consisting of AA^{I} amino acids at the exception of AA^{VI} amino acids, preferably absent, G, S or A; AA³⁴ is absent or is selected from the group consisting of AA^{III} and AA^{IV} amino acids, preferably absent; wherein AA³⁵ is absent or is selected from the group consisting of AA^{II} amino acids, preferably is S or C; wherein AA³⁶ is absent or is selected from the group consisting of AA^{III} and AA^{IV} amino acids, preferably is G or K; wherein AA³⁷ is absent or is selected from the group consisting of AA^{II} amino acids, preferably is S or C; wherein AA³⁸ is absent or is selected from the group consisting of AA^{I}; and wherein at least one of AA³³, AA³⁴, AA³⁵, AA³⁶, AA³⁷ or AA³⁸ is not absent. In one particular example, PEP8 is selected from the group consisting of GXGXR, SXGXH, AXGXH, SXGXR and XKXS.

[0471] In certain embodiments useful for inducing differentiation of mensenchymal or progenitor stem cells from the cartilage cell lineage, regenerating cartilage tissues, repairing cartilage and protecting from, for instance, osteoarthritis, costochondritis, Herniation, achondroplasia or relapsing polychondritis, PEP9 is a peptide of general formula AA¹-AA²-AA³-AA⁴-AA⁵-AA⁶-AA⁷-PEP5; wherein PEP5 is a peptide of formula PEP3-AA¹¹-AA¹²; wherein PEP3 is selected from the group consisting of VPT, APT, VPQ and VSQ; wherein AA¹ is selected from the group consisting of E, K, Q, R, A, D, G and H, in particular E, K, Q, R, A and D; wherein AA¹² is selected from the group consisting of L, M, T, E, Q and H, in particular is L; wherein AA¹, AA², AA³, AA⁴, and AA⁵ are independently absent or AA^{I} as defined herein; wherein AA⁶ is absent or selected from the group consisting of S, T, C, E, Q, P and R, preferably is S, C or T; wherein AA⁷ is selected from the group consisting of S, T, C, E, Q, P and R, preferably is S or C. In one particular example, PEP9 is selected from the group consisting of KIPKAXXVPTEL, SIPKAXXVPTEL, HVTKPTXAPTKL, YVPKPXXAPTKL, TVPKPXXAPTQL, STPPTXXVPTRL, ASAAPXXVPQAL, ASASPXXVSQDL and ASASPXXVPQDL.

[0472] In certain embodiments useful for inducing differentiation of mensenchymal or progenitor stem cells from the cartilage cell lineage, regenerating cartilage tissues, repairing cartilage and protecting from, for instance, osteoarthritis, costochondritis, Herniation, achondroplasia or relapsing polychondritis, PEP10 is a peptide of general formula PEP6-AA³³-AA³⁴-AA³⁵-AA³⁶-AA³⁷-AA³⁸; wherein PEP6 is a peptide of formula AA²⁶-AA²⁷-AA²⁸-AA²⁹-PEP4; wherein PEP4 is selected from the group consisting of VVE, VVR, VRS and VKS; wherein AA²⁶ is absent or selected from the group consisting of AA^{III} amino acids, preferably absent; wherein AA²⁷ and AA²⁸ are independently selected from the group consisting of AA^{III} and AA^{V} amino acids, preferably AA²⁷ is selected from the group consisting of D, E, N and M, preferably AA²⁸ is selected from the group consisting of M, I and V; wherein AA²⁹ is absent or selected from the group consisting of AA^{II} amino acids, preferably absent; wherein AA³³ is absent or is selected from the group consisting of AA^{I} amino acids at the exception of AA^{VI} amino acids, preferably absent, G, S or A; AA³⁴ is absent or is selected from the group consisting of AA^{III} and AA^{IV} amino acids, preferably absent; wherein AA³⁵ is absent or is selected from the group consisting of AA^{II} amino acids, preferably is S or C; wherein AA³⁶ is absent or is selected from the group consisting of AA^{III} and AA^{IV} amino acids, preferably is G or K; wherein AA³⁷ is absent or is selected from the group consisting of AA^{II} amino acids, preferably is S or C; wherein AA³⁸ is absent or is selected from the group consisting of AA^{I}. In one particular example, PEP10 is selected from the group consisting of DMVVEGXGXR, EMVVEGXGXR, NMVVRSXGXH, NMVVRAXGXH, DMVVESXGXR, MIVRSXKXS, MIVKSXKXS and MVVKSXKXS.

[0473] In certain embodiments useful for inducing differentiation of mensenchymal or progenitor stem cells from the cartilage cell lineage, regenerating cartilage tissues, repairing cartilage and protecting from, for instance, osteoarthritis, costochondritis, Herniation, achondroplasia or relapsing polychondritis, PEP12 is a peptide of general formula PEP1-AA¹⁷-PEP11; wherein AA¹⁷ is selected from the group consisting of G, A, V, L, I, P, F, M, W, T and S (in particular is selected from the group consisting of M, I, L, V and T); wherein PEP1 is selected from the group consisting of SAIS, NAIS, SPIS, EPLP and EPLT.

[0474] In certain embodiments useful for inducing differentiation of mensenchymal or progenitor stem cells from the cartilage cell lineage, regenerating cartilage tissues, repairing cartilage and protecting from, for instance, osteoarthritis, costochondritis, Herniation, achondroplasia or relapsing polychondritis, PEP11 is a peptide with 3 amino acids of general formula AA¹⁸-AA¹⁹-AA²⁰; wherein AA¹⁸ is selected from the group consisting of L, V, Q, A and R, in particular is L or V; wherein AA¹⁹ is selected from the group consisting of F, W, H and Y, in particular is Y or F; wherein AA²⁰ is selected from the group consisting of L, F, Y and I. In one particular example, PEP11 is selected from the group consisting of LYL, LYF, LFI, VYY and LYY.

[0475] The definitions of “PEP” pairs, quadruplets, hexaplets and heptuplet e.g. PEP1:PEP2, PEP12:PEP2, or PEP7:PEP5:PEP12:LINKER:PEP2:PEP6:PEP8, most particularly useful for inducing differentiation of mensenchymal or progenitor stem cells from the cartilage cell lineage, regenerating cartilage tissues, repairing cartilage and protecting from, for instance, osteoarthritis, costochondritis, Herniation, achondroplasia or relapsing polychondritis, are as already defined herein to the extent that PEP1 to PEP12 are particularly useful for these applications. For instances:

[0476] In certain embodiments useful for inducing differentiation of mensenchymal or progenitor stem cells from the cartilage cell lineage, regenerating cartilage tissues, repairing cartilage and protecting from, for instance, osteoarthritis, costochondritis, Herniation, achondroplasia or relapsing polychondritis, the pair PEP1:PEP2 is selected from the group consisting of SAIS:LKNYQ, NAIS:LKKYR, SPIS:YKQYE, EPLP:EQLSN and EPLT:EQLSN.

[0477] In certain embodiments useful for inducing differentiation of mensenchymal or progenitor stem cells from the cartilage cell lineage, regenerating cartilage tissues, repairing cartilage and protecting from, for instance, osteoarthritis, costochondritis, Herniation, achondroplasia or relapsing polychondritis, the pair PEP12:PEP2 is selected from the group consisting of SAIS-AA¹⁷-LYL:LKNYQ, NAIS-AA¹⁷-LYF:LKKYR, SPIS-AA¹⁷-LFI:YKQYE, EPLP-AA¹⁷-VYY:EQLSN and EPLT-AA¹⁷-LYY:EQLSN; wherein AA¹⁷ is selected from the group consisting of G, A, V, L, I, P, F, M, W, T and S (in particular is selected from the group consisting of M, I, V and T).

[0478] In certain embodiments useful for inducing differentiation of mensenchymal or progenitor stem cells from the cartilage cell lineage, regenerating cartilage tissues, repairing cartilage and protecting from, for instance, osteoarthritis, costochondritis, Herniation, achondroplasia or relapsing polychondritis, PEP3 is selected from the group consisting of VPT, APT, VPQ and VSQ; PEP4 is selected from the group consisting of VVE, VVR, VRS and VKS; and wherein the pair PEP3:PEP4 is selected from the group consisting of VPT:VVE, APT:VVR, VPQ:VRS, VSQ:VKS and VPQ:VKS.

[0479] In certain embodiments useful for inducing differentiation of mensenchymal or progenitor stem cells from the cartilage cell lineage, regenerating cartilage tissues, repairing cartilage and protecting from, for instance, osteoarthritis, costochondritis, Herniation, achondroplasia or relapsing polychondritis, PEP5 is selected from the group consisting of VPTEL, APTKL, APTQL, VPTRL, VPQAL, VSQDL and VPQDL; PEP6 is selected from the group consisting of DMVVE, EMVVE, NMVVR, DMVVE, MIVRS, MIVKS and MVVKS; and wherein the pair PEP5:PEP6 is selected from the group consisting of VPTEL:DMVVE, VPTEL:EMVVE, APTKL:NMVVR, APTQL:NMVVR, VPTRL:DMVVE, VPQAL:MIVRS, VSQDL:MIVKS and VPQDL:MVVKS.

[0480] In certain embodiments useful for inducing differentiation of mensenchymal or progenitor stem cells from the cartilage cell lineage, regenerating cartilage tissues, repairing cartilage and protecting from, for instance, osteoarthritis, costochondritis, Herniation, achondroplasia or relapsing polychondritis, PEP7 is selected from the group consisting of KIPKAXX, SIPKAXX, HVTKPTX, YVPKPXX, TVPKPXX, STPPTXX, ASAAPXX and ASASPXX; wherein PEP8 is selected from the group consisting of GXGXR, SXGXH, AXGXH, SXGXR and XKXS; and wherein the pair PEP7:PEP8 is selected from the group consisting of KIPKAXX: GXGXR, SIPKAXX:GXGXR, HVTKPTX:SXGXH, YVPKPXX:SXGXH, TVPKPXX:AXGXH, STPPTXX:SXGSR, ASAAPXX:XKXS and ASASPXX:XKXS.

[0481] In certain embodiments useful for inducing differentiation of mensenchymal or progenitor stem cells from the cartilage cell lineage, regenerating cartilage tissues, repairing cartilage and protecting from, for instance, osteoarthritis, costochondritis, Herniation, achondroplasia or relapsing polychondritis, PEP9 is selected from the group consisting of KIPKAXXVPTEL, SIPKAXXVPTEL, HVTKPTXAPTKL, YVPKPXXAPTKL, TVPKPXXAPTQL, STPPTXXVPTRL, ASAAPXXVPQAL, ASASPXXVSQDL and ASASPXXVPQDL; PEP10 is selected from the group consisting of DMVVEGXGXR, EMVVEGXGXR, NMVVRSXGXH, NMVVRAXGXH, DMVVESXGXR, MIVRSXKXS, MIVKSXKXS and MVVKSXKXS; and wherein the pair PEP9:PEP10 is selected from the group consisting of KIPKAXXVPTEL:DMVVEGXGXR, SIPKAXXVPTEL:EMVVEGXGXR, HVTKPTXAPTKL:NMVVRSXGXH, YVPKPXXAPTKL:NMVVRSXGXH, TVPKPXXAPTQL:NMVVRAXGXH, STPPTXXVPTRL:DMVVESXGSR, ASAAPXXVPQAL:MIVRSXKXS, ASASPXXVSQDL:MIVKSXKXS and ASASPXXVPQDL:MVVKSXKXS.

[0482] In certain embodiments useful for inducing differentiation of mensenchymal or progenitor stem cells from the cartilage cell lineage, regenerating cartilage tissues, repairing cartilage and protecting from, for instance, osteoarthritis, costochondritis, Herniation, achondroplasia or relapsing polychondritis, PEP5 is selected from the group consisting of VPTEL, APTKL, APTQL, VPTRL, VPQAL, VSQDL and VPQDL; PEP6 is selected from the group consisting of DMVVE, EMVVE, NMVVR, DMVVE, MIVRS, MIVKS and MVVKS; and wherein the pair PEP5:PEP6 is selected from the group consisting of VPTEL:DMVVE, VPTEL:EMVVE, APTKL:NMVVR, APTQL:NMVVR, VPTRL:DMVVE, VPQAL:MIVRS, VSQDL:MIVKS and VPQDL:MVVKS; wherein the pair PEP5:PEP6 is not VPTEL:DMVVE when PEP1 is SAIS and PEP2 is LKNYQ; wherein the pair PEP5:PEP6 is not VPTEL:EMVVE when PEP1 is SAIS and PEP2 is LKNYQ; wherein the pair PEP5:PEP6 is not APTKL:NMVVR when PEP1 is NAIS and PEP2 is LKKYR; wherein the pair PEP5:PEP6 is not APTQL:NMVVR when PEP1 is NAIS and PEP2 is LKKYR; wherein the pair PEP5:PEP6 is not VPTRL:DMVVE when PEP1 is SPIS and PEP2 is YKQYE; wherein the pair PEP5:PEP6 is not VPQAL:MIVRS when PEP1 is EPLP and PEP2 is EQLSN; wherein the pair PEP5:PEP6 is not VSQDL:MIVKS when PEP1 is EPLT and PEP2 is EQLSN; wherein the pair PEP5:PEP6 is not VPQDL:MVVKS when PEP1 is EPLT and PEP2 is EQLSN.

[0483] In certain embodiments useful for inducing differentiation of mensenchymal or progenitor stem cells from the cartilage cell lineage, regenerating cartilage tissues, repairing cartilage and protecting from, for instance, osteoarthritis, costochondritis, Herniation, achondroplasia or relapsing polychondritis, PEP9 is selected from the group consisting of KIPKAXXVPTEL, SIPKAXXVPTEL, HVTKPTXAPTKL, YVPKPXXAPTKL, TVPKPXXAPTQL, STPPTXXVPTRL, ASAAPXXVPQAL, ASASPXXVSQDL and ASASPXXVPQDL; PEP10 is selected from the group consisting of DMVVEGXGXR, EMVVEGXGXR, NMVVRSXGXH, NMVVRAXGXH, DMVVESXGXR, MIVRSXKXS, MIVKSXKXS and MVVKSXKXS; and wherein the pair PEP9:PEP10 is selected from the group consisting of KIPKAXXVPTEL:DMVVEGXGXR, SIPKAXXVPTEL:EMVVEGXGXR, HVTKPTXAPTKL:NMVVRSXGXH, YVPKPXXAPTKL:NMVVRSXGXH, TVPKPXXAPTQL:NMVVRAXGXH, STPPTXXVPTRL:DMVVESXGSR, ASAAPXXVPQAL:MIVRSXKXS, ASASPXXVSQDL:MIVKSXKXS and ASASPXXVPQDL:MVVKSXKXS; wherein PEP9:PEP10 is not KIPKAXXVPTEL:DMVVEGXGXR when PEP1 is SAIS and PEP2 is LKNYQ; wherein PEP9:PEP10 is not SIPKAXXVPTEL:EMVVEGXGXR when PEP1 is SAIS and PEP2 is LKNYQ; wherein PEP9:PEP10 is not HVTKPTXAPTKL:NMVVRSXGXH when PEP1 is NAIS and PEP2 is LKKYR; wherein PEP9:PEP10 is not YVPKPXXAPTKL:NMVVRSXGXH when PEP1 is NAIS and PEP2 is LKKYR; wherein PEP9:PEP10 is not TVPKPXXAPTQL:NMVVRAXGXH when PEP1 is NAIS and PEP2 is LKKYR; wherein PEP9:PEP10 is not STPPTXXVPTRL:DMVVESXGSR when PEP1 is SPIS; wherein PEP9:PEP10 is not ASAAPXXVPQAL:MIVRSXKXS when PEP1 is EPLP and PEP2 is EQLSN; wherein PEP9:PEP10 is not ASASPXXVSQDL:MIVKSXKXS when PEP1 is EPLT and PEP2 is EQLSN; wherein PEP9:PEP10 is not ASASPXXVPQDL:MVVKSXKXS when PEP1 is EPLT and PEP2 is EQLSN.

[0484] In certain embodiments useful for inducing differentiation of mensenchymal or progenitor stem cells from the cartilage cell lineage, regenerating cartilage tissues, repairing cartilage and protecting from, for instance, osteoarthritis, costochondritis, Herniation, achondroplasia or relapsing polychondritis, PEP1 is selected from the group consisting of SAIS, NAIS, SPIS, EPLP and EPLT; PEP11 is selected from the group consisting of LYL, LYF, LFI, VYY and LYY; and the pair PEP1:PEP11 is selected from the group consisting of SAIS:LYL, NAIS:LYF, SPIS:LFI, EPLP:VYY and EPLT:LYY.

[0485] In one aspect, the present disclosure provides a GFR-binding compound, wherein said GFR-binding compound is a peptide, a variant or analog thereof, or a peptidomimetic as defined herein, with between 20 and 60 (in particular between 20 and 50, and more particularly, between 20 and 45) amino acids, comprising a peptide with four amino acids (PEP1) or a peptide with eight amino acids (PEP12), a peptide with five amino acids (PEP2), and optionally a pair of peptides selected form the group consisting of PEP3:PEP4, PEP3:PEP6, PEP3:PEP10, PEP5:PEP4, PEP9:PEP4, PEP5:PEP6, PEP5:PEP10, PEP9:PEP6 and PEP9:PEP10; wherein said GFR-binding compound does not comprise the pair of peptides VPTEL:DMVVE when PEP1 is SAIS and PEP2 is LKNYQ; wherein said GFR-binding compound does not comprise the pair of peptides VPTEL:EMVVE when PEP1 is SAIS and PEP2 is LKNYQ; wherein said GFR-binding compound does not comprise the pair of peptides APTKL:NMVVR when PEP1 is NAIS and PEP2 is LKKYR; wherein said GFR-binding compound does not comprise the pair of peptides APTQL:NMVVR when PEP1 is NAIS and PEP2 is LKKYR; wherein said GFR-binding compound does not comprise the pair of peptides VPTRL:DMVVE when PEP1 is SPIS and PEP2 is YKQYE; wherein said GFR-binding compound does not comprise the pair of peptides VPQAL:MIVRS when PEP1 is EPLP and PEP2 is EQLSN; wherein said GFR-binding compound does not comprise the pair of peptides VSQDL:MIVKS when PEP1 is EPLT and PEP2 is EQLSN; wherein said GFR-binding compound does not comprise the pair of peptides VPQDL:MVVKS when PEP1 is EPLT and PEP2 is EQLSN; and wherein the RMSD is 2.45 Å or less.

[0486] In one aspect, the present disclosure provides a GFR-binding compound, wherein said GFR-binding compound is a peptide, a variant or analog thereof, or a peptidomimetic as defined herein, with between 20 and 60 (in particular between 20 and 50, and more particularly, between 20 and 45) amino acids, comprising a peptide with four amino acids (PEP1) or a peptide with eight amino acids (PEP12), a peptide with five amino acids (PEP2), and optionally a pair of peptides selected form the group consisting of PEP3:PEP4, PEP3:PEP6, PEP3:PEP10, PEP5:PEP4, PEP9:PEP4, PEP5:PEP6, PEP5:PEP10, PEP9:PEP6 and PEP9:PEP10; wherein said GFR-binding compound does not comprise the pair of peptides KIPKAXXVPTEL:DMVVEGXGXR when PEP1 is SAIS and PEP2 is LKNYQ; wherein said GFR-binding compound does not comprise the pair of peptides SIPKAXXVPTEL:EMVVEGXGXR when PEP1 is SAIS and PEP2 is LKNYQ; wherein said GFR-binding compound does not comprise the pair of peptides HVTKPTXAPTKL:NMVVRSXGXH when PEP1 is NAIS and PEP2 is LKKYR; wherein said GFR-binding compound does not comprise the pair of peptides YVPKPXXAPTKL:NMVVRSXGXH when PEP1 is NAIS and PEP2 is LKKYR; wherein said GFR-binding compound does not comprise the pair of peptides TVPKPXXAPTQL:NMVVRAXGXH when PEP1 is NAIS and PEP2 is LKKYR; wherein said GFR-binding compound does not comprise the pair of peptides STPPTXXVPTRL:DMVVESXGSR when PEP1 is SPIS; wherein said GFR-binding compound does not comprise the pair of peptides ASAAPXXVPQAL:MIVRSXKXS when PEP1 is EPLP and PEP2 is EQLSN; wherein said GFR-binding compound does not comprise the pair of peptides ASASPXXVSQDL:MIVKSXKXS when PEP1 is EPLT and PEP2 is EQLSN; wherein said GFR-binding compound does not comprise the pair of peptides ASASPXXVPQDL:MVVKSXKXS when PEP1 is EPLT and PEP2 is EQLSN; and wherein the RMSD is 2.45 Å or less.

[0487] In certain embodiments useful for inducing differentiation of mensenchymal or progenitor stem cells from the cartilage cell lineage, regenerating cartilage tissues, repairing cartilage and protecting from, for instance, osteoarthritis, costochondritis, Herniation, achondroplasia or relapsing polychondritis, said GFR-binding compound is a synthetic molecule as defined herein in the definition section.

[0488] In certain embodiments useful for inducing differentiation of mensenchymal or progenitor stem cells from the cartilage cell lineage, regenerating cartilage tissues, repairing cartilage and protecting from, for instance, osteoarthritis, costochondritis, Herniation, achondroplasia or relapsing polychondritis, said GFR-binding compound is a synthetic peptide, or a variant or analog thereof, or a peptidomimetic.

### Vascular Tissues

[0489] Certain embodiments of the invention are particularly useful for inducing differentiation of mensenchymal or progenitor stem cells from the vascular cell lineage, enhancing of endothelization, vascularization/angiogenesis, protecting a subject from heart tissue degeneration-related diseases, disorders, conditions or pathologies.

[0490] In other embodiments also useful for inducing differentiation of mensenchymal or progenitor stem cells from the vascular cell lineage, enhancing of endothelization, vascularization/angiogenesis, protecting a subject from heart tissue degeneration-related diseases, disorders, conditions or pathologies, PEP1 is selected from the group consisting of SNIT, RPVQ and RSVK.

[0491] In other embodiments also useful for inducing differentiation of mensenchymal or progenitor stem cells from the vascular cell lineage, enhancing of endothelization, vascularization/angiogenesis, protecting a subject from heart tissue degeneration-related diseases, disorders, conditions or pathologies, PEP2 is selected from the group consisting of IGEMS, LGEMS, KEVQV and KKATV.

[0492] In other embodiments also useful for inducing differentiation of mensenchymal or progenitor stem cells from the vascular cell lineage, enhancing of endothelization, vascularization/angiogenesis, protecting a subject from heart tissue degeneration-related diseases, disorders, conditions or pathologies, PEP3 is selected from the group consisting of VPT, SRV and TQV.

[0493] In other embodiments also useful for inducing differentiation of mensenchymal or progenitor stem cells from the vascular cell lineage, enhancing of endothelization, vascularization/angiogenesis, protecting a subject from heart tissue degeneration-related diseases, disorders, conditions or pathologies, PEP4 is selected from the group consisting of QHN, EHS, EEH and EDH.

[0494] In other embodiments also useful for inducing differentiation of mensenchymal or progenitor stem cells from the vascular cell lineage, enhancing of endothelization, vascularization/angiogenesis, protecting a subject from heart tissue degeneration-related diseases, disorders, conditions or pathologies, PEP5 is a peptide of general formula PEP3-AA¹¹-AA¹²; wherein PEP3 is selected from the group consisting of VPT, SRV and TQV; wherein AA¹¹ is selected from the group consisting of E, K, Q, R, A, D, G and H, in particular is E, G, H and Q; wherein AA¹² is selected from the group consisting of L, M, T, E, Q and H, in particular is selected from the group consisting of E, Q, H and L. In one particular example, PEP5 is selected from the group consisting of VPTGQ, VPTEE, SRVHH and TQVQL.

[0495] In other embodiments also useful for inducing differentiation of mensenchymal or progenitor stem cells from the vascular cell lineage, enhancing of endothelization, vascularization/angiogenesis, protecting a subject from heart tissue degeneration-related diseases, disorders, conditions or pathologies, PEP6 is a peptide of general formula AA²⁶-AA²⁷-AA²⁸-AA²⁹-PEP4; wherein PEP4 is selected from the group consisting of QHN, EHS, EEH and EDH; wherein AA²⁶ is absent or selected from the group consisting of AA^{III} amino acids, preferably is absent; wherein AA²⁷ and AA²⁸ are independently selected from the group consisting of AA^{III} and AA^{V} amino acids, preferably AA²⁷ is selected from the group consisting of F, L, R and T, preferably AA²⁸ is L or E; wherein AA²⁹ is absent or selected from the group consisting of AA^{II} amino acids, preferably is absent. In one particular example, PEP6 is selected from the group consisting of LEEHS, FLQHN, RLEEH and TLEDH.

[0496] In other embodiments also useful for inducing differentiation of mensenchymal or progenitor stem cells from the vascular cell lineage, enhancing of endothelization, vascularization/angiogenesis, protecting a subject from heart tissue degeneration-related diseases, disorders, conditions or pathologies, PEP7 is an amino acid or a peptide with between two and seven amino acids of general formula AA¹-AA²-AA³-AA⁴-AA⁵-AA⁶-AA⁷; wherein AA¹, AA², AA³, AA⁴, and AA⁵ are independently absent or AA^{I} as defined herein; wherein AA⁶ is absent or selected from the group consisting of S, T, C, E, Q, P and R, preferably is selected from the group consisting of E, Q and R; wherein AA⁷ is absent or is selected from the group consisting of S, T, C, E, Q, P and R, preferably is selected from the group consisting of S, C and P; and wherein at least one of AA¹, AA², AA³, AA⁴, AA⁵, AA⁶ or AA⁷ is not absent. In one particular example, PEP7 is selected from the group consisting of NDEGLEX, SSVKXQP and RNVQXRP.

[0497] In other embodiments also useful for inducing differentiation of mensenchymal or progenitor stem cells from the vascular cell lineage, enhancing of endothelization, vascularization/angiogenesis, protecting a subject from heart tissue degeneration-related diseases, disorders, conditions or pathologies, PEP8 is an amino acid or a peptide with between two and six amino acids of general formula AA³³-AA³⁴-AA³⁵-AA³⁶-AA³⁷-AA³⁸; wherein AA³³ is absent or is selected from the group consisting of AA^{I} amino acids at the exception of AA^{VI} amino acids, in particular is selected from the group consisting of K, Q and L; AA³⁴ is absent or is selected from the group consisting of AA^{III} and AA^{IV} amino acids, in particular is absent, E or A; wherein AA³⁵ is absent or is selected from the group consisting of AA^{II} amino acids, preferably is S or C; wherein AA³⁶ is absent or is selected from the group consisting of AA^{III} and AA^{IV} amino acids, in particular is selected from the group consisting of E, A and K; wherein AA³⁷ is absent or is selected from the group consisting of AA^{II} amino acids, preferably is S or C; wherein AA³⁸ is absent or is selected from the group consisting of AA^{I}, in particular is selected from the group consisting of R, A and E; and wherein at least one of AA³³, AA³⁴, AA³⁵, AA³⁶, AA³⁷ or AA³⁸ is not absent. In one particular example, PEP8 is selected from the group consisting of KXEXR, QXEXR, LEXAXA and LAXKXE.

[0498] In other embodiments also useful for inducing differentiation of mensenchymal or progenitor stem cells from the vascular cell lineage, enhancing of endothelization, vascularization/angiogenesis, protecting a subject from heart tissue degeneration-related diseases, disorders, conditions or pathologies, PEP9 is a peptide of general formula AA¹-AA²-AA³-AA⁴-AA⁵-AA⁶-AA⁷-PEP5; wherein PEP5 is a peptide of formula PEP3-AA¹-AA¹²; wherein PEP3 is selected from the group consisting of VPT, SRV and TQV; wherein AA¹¹ is selected from the group consisting of E, K, Q, R, A, D, G and H, in particular is E, G, H and Q; wherein AA¹² is selected from the group consisting of L, M, T, E, Q and H, in particular is selected from the group consisting of E, Q, H and L; wherein AA¹, AA², AA³, AA⁴, and AA⁵ are independently absent or AA^{I} as defined herein; wherein AA⁶ is absent or selected from the group consisting of S, T, C, E, Q, P and R, preferably is selected from the group consisting of E, Q and R; wherein AA⁷ is selected from the group consisting of S, T, C, E, Q, P and R, preferably is selected from the group consisting of S, C and P. In one particular example, PEP9 is selected from the group consisting of NDEGLEXVPTEE, NDEGLEXVPTGQ, SSVKXQPSRVHH and RNVQXRPTQVQL.

[0499] In other embodiments also useful for inducing differentiation of mensenchymal or progenitor stem cells from the vascular cell lineage, enhancing of endothelization, vascularization/angiogenesis, protecting a subject from heart tissue degeneration-related diseases, disorders, conditions or pathologies, PEP10 is a peptide of general formula PEP6-AA³³-AA³⁴-AA³A3-AA³⁶-AA³⁷-AA³⁸; wherein PEP6 is a peptide of formula AA²⁶-AA²⁷-AA²⁸-AA²⁹-PEP4; wherein PEP4 is selected from the group consisting of QHN, EHS, EEH and EDH; wherein AA²⁶ is absent or selected from the group consisting of AA^{III} amino acids, preferably is absent; wherein AA²⁷ and AA²⁸ are independently selected from the group consisting of AA^{III} and AA^{V} amino acids, preferably AA²⁷ is selected from the group consisting of F, L, R and T, preferably AA²⁸ is L or E; wherein AA²⁹ is absent or selected from the group consisting of AA^{II} amino acids, preferably is absent; wherein AA³³ is absent or is selected from the group consisting of AA^{I} amino acids at the exception of AA^{VI} amino acids, in particular is selected from the group consisting of K, Q and L; AA³⁴ is absent or is selected from the group consisting of AA^{III} and AA^{V} amino acids, in particular is absent, E or A; wherein AA³⁵ is absent or is selected from the group consisting of AA^{II} amino acids, preferably is S or C; wherein AA³⁶ is absent or is selected from the group consisting of AA^{III} and AA^{V} amino acids, in particular is selected from the group consisting of E, A and K; wherein AA³⁷ is absent or is selected from the group consisting of AA^{II} amino acids, preferably is S or C; wherein AA³⁸ is absent or is selected from the group consisting of AA^{I}, in particular is selected from the group consisting of R, A and E. In one particular example, PEP10 is selected from the group consisting of FLQHNKXEXR, LEEHSQXEXR, RLEEHLEXAXA and TLEDHLAXKXE.

[0500] In other embodiments also useful for inducing differentiation of mensenchymal or progenitor stem cells from the vascular cell lineage, enhancing of endothelization, vascularization/angiogenesis, protecting a subject from heart tissue degeneration-related diseases, disorders, conditions or pathologies, PEP12 is a peptide of general formula PEP1-AA¹⁷-PEP11; wherein AA¹⁷ is selected from the group consisting of G, A, V, L, I, P, F, M, W, T and S (in particular is selected from the group consisting of M, I, L, V and T); wherein PEP1 is selected from the group consisting of SNIT, RPVQ and RSVK.

[0501] In other embodiments also useful for inducing differentiation of mensenchymal or progenitor stem cells from the vascular cell lineage, enhancing of endothelization, vascularization/angiogenesis, protecting a subject from heart tissue degeneration-related diseases, disorders, conditions or pathologies, PEP11 is a peptide with 3 amino acids of general formula AA¹⁸-AA¹⁹-AA²⁰; wherein AA¹⁸ is selected from the group consisting of L, V, Q, A and R, in particular is selected from the group consisting of Q, A and R; wherein AA¹⁹ is selected from the group consisting of F, W, H, Y, I and K, in particular is I or K; wherein AA²⁰ is selected from the group consisting of L, F, Y, K, I, V and M, in particular is selected from the group consisting of M, V and I. In one particular example, PEP11 is selected from the group consisting of QIM, AKV and RKI.

[0502] The definitions of “PEP” pairs, quadruplets, hexaplets and heptuplet e.g. PEP1:PEP2, PEP12:PEP2, or PEP7:PEP5:PEP12:LINKER:PEP2:PEP6:PEP8, most particularly useful for inducing differentiation of mensenchymal or progenitor stem cells from the vascular cell lineage, enhancing of endothelization, vascularization/angiogenesis, protecting a subject from heart tissue degeneration-related diseases, disorders, conditions or pathologies, are as already defined herein to the extent that PEP1 to PEP12 are particularly useful for these applications. For instances:

[0503] In other embodiments also useful for inducing differentiation of mensenchymal or progenitor stem cells from the vascular cell lineage, enhancing of endothelization, vascularization/angiogenesis, protecting a subject from heart tissue degeneration-related diseases, disorders, conditions or pathologies, the pair PEP1:PEP2 is selected from the group consisting of SNIT:IGEMS, SNIT:LGEMS, RSVK:KEVQV and RPVQ:KKATV.

[0504] In other embodiments also useful for inducing differentiation of mensenchymal or progenitor stem cells from the vascular cell lineage, enhancing of endothelization, vascularization/angiogenesis, protecting a subject from heart tissue degeneration-related diseases, disorders, conditions or pathologies, the pair PEP12:PEP2 is selected from the group consisting of SNIT-AA¹⁷-QIM:IGEMS, SNIT-AA¹⁷-QIM:LGEMS, RSVK-AA¹⁷-AKV:KEVQV and RPVQ-AA¹⁷-RKI:KKATV; wherein AA¹⁷ is selected from the group consisting of G, A, V, L, I, P, F, M, W, T and S (in particular is selected from the group consisting of M, V and T).

[0505] In other embodiments also useful for inducing differentiation of mensenchymal or progenitor stem cells from the vascular cell lineage, enhancing of endothelization, vascularization/angiogenesis, protecting a subject from heart tissue degeneration-related diseases, disorders, conditions or pathologies, PEP3 is selected from the group consisting of VPT, SRV and TQV; PEP4 is selected from the group consisting of QHN, EHS, EEH and EDH; and wherein the pair PEP3:PEP4 is selected from the group consisting of VPT:QHN, VPT:EHS, SRV:EEH and TQV:EDH.

[0506] In other embodiments also useful for inducing differentiation of mensenchymal or progenitor stem cells from the vascular cell lineage, enhancing of endothelization, vascularization/angiogenesis, protecting a subject from heart tissue degeneration-related diseases, disorders, conditions or pathologies, PEP5 is selected from the group consisting of VPTGQ, VPTEE, SRVHH and TQVQL; PEP6 is selected from the group consisting of LEEHS, FLQHN, RLEEH and TLEDH; and wherein the pair PEP5:PEP6 is selected from the group consisting of VPTGQ:LEEHS, VPTEE:FLQHN, SRVHH:RLEEH and TQVQL:TLEDH.

[0507] In other embodiments also useful for inducing differentiation of mensenchymal or progenitor stem cells from the vascular cell lineage, enhancing of endothelization, vascularization/angiogenesis, protecting a subject from heart tissue degeneration-related diseases, disorders, conditions or pathologies, PEP7 is selected from the group consisting of NDEGLEX, SSVKXQP and RNVQXRP; wherein PEP8 is selected from the group consisting of KXEXR, QXEXR, LEXAXA and LAXKXE; and wherein the pair PEP7:PEP8 is selected from the group consisting of NDEGLEX:KXEXR, NDEGLEX:QXEXR, SSVKXQP:LEXAXA and RNVQXRP:LAXKXE.

[0508] In other embodiments also useful for inducing differentiation of mensenchymal or progenitor stem cells from the vascular cell lineage, enhancing of endothelization, vascularization/angiogenesis, protecting a subject from heart tissue degeneration-related diseases, disorders, conditions or pathologies, PEP9 is selected from the group consisting of NDEGLEXVPTEE, NDEGLEXVPTGQ, SSVKXQPSRVHH and RNVQXRPTQVQL; PEP10 is selected from the group consisting of FLQHNKXEXR, LEEHSQXEXR, RLEEHLEXAXA and TLEDHLAXKXE; and wherein the pair PEP9:PEP10 is selected from the group consisting of NDEGLEXVPTEE:FLQHNKXEXR, NDEGLEXVPTGQ:LEEHSQXEXR, SSVKXQPSRVHH:RLEEHLEXAXA and RNVQXRPTQVQL:TLEDHLAXKXE.

[0509] In other embodiments also useful for inducing differentiation of mensenchymal or progenitor stem cells from the vascular cell lineage, enhancing of endothelization, vascularization/angiogenesis, protecting a subject from heart tissue degeneration-related diseases, disorders, conditions or pathologies, PEP5 is selected from the group consisting of VPTGQ, VPTEE, SRVHH and TQVQL; PEP6 is selected from the group consisting of LEEHS, FLQHN, RLEEH and TLEDH; and wherein the pair PEP5:PEP6 is selected from the group consisting of VPTGQ:LEEHS, VPTEE:FLQHN, SRVHH:RLEEH and TQVQL:TLEDH; wherein the pair PEP5:PEP6 is not VPTEE:FLQHN when PEP1 is SNIT and PEP2 is IGEMS; wherein the pair PEP5:PEP6 is not VPTGQ:LEEHS when PEP1 is SNIT and PEP2 is LGEMS; wherein the pair PEP5:PEP6 is not SRVHH:RLEEH when PEP1 is RSVK and PEP2 is KEVQV; and wherein the pair PEP5:PEP6 is not TQVQL:TLEDH when PEP1 is RPVQ and PEP2 is KKATV.

[0510] In other embodiments also useful for inducing differentiation of mensenchymal or progenitor stem cells from the vascular cell lineage, enhancing of endothelization, vascularization/angiogenesis, protecting a subject from heart tissue degeneration-related diseases, disorders, conditions or pathologies, PEP9 is selected from the group consisting of NDEGLEXVPTEE, NDEGLEXVPTGQ, SSVKXQPSRVHH and RNVQXRPTQVQL; PEP10 is selected from the group consisting of FLQHNKXEXR, LEEHSQXEXR, RLEEHLEXAXA and TLEDHLAXKXE; and wherein the pair PEP9:PEP10 is selected from the group consisting of NDEGLEXVPTEE:FLQHNKXEXR, NDEGLEXVPTGQ:LEEHSQXEXR, SSVKXQPSRVHH:RLEEHLEXAXA and RNVQXRPTQVQL:TLEDHLAXKXE; wherein the pair PEP9:PEP10 is not NDEGLEXVPTEE:FLQHNKXEXR when PEP1 is SNIT and PEP2 is IGEMS; wherein the pair PEP9:PEP10 is not NDEGLEXVPTGQ:LEEHSQXEXR when PEP1 is SNIT and PEP2 is LGEMS; wherein the pair PEP9:PEP10 is not SSVKXQPSRVHH:RLEEHLEXAXA when PEP1 is RSVK and PEP2 is KEVQV; and wherein the pair PEP9:PEP10 is not RNVQXRPTQVQL:TLEDHLAXKXE when PEP1 is RPVQ and PEP2 is KKATV.

[0511] In other embodiments also useful for inducing differentiation of mensenchymal or progenitor stem cells from the vascular cell lineage, enhancing of endothelization, vascularization/angiogenesis, protecting a subject from heart tissue degeneration-related diseases, disorders, conditions or pathologies, PEP1 is selected from the group consisting of SNIT, RPVQ and RSVK; PEP11 is selected from the group consisting of QIM, AKV and RKI; and the pair PEP1:PEP11 is selected from the group consisting of SNIT:QIM, RSVK:KEVQV and RPVQ:KKATV.

[0512] In one aspect, the present disclosure provides a GFR-binding compound, wherein said GFR-binding compound is a peptide, a variant or analog thereof, or a peptidomimetic as defined herein, with between 20 and 60 (in particular between 20 and 50, and more particularly, between 20 and 45) amino acids, comprising a peptide with four amino acids (PEP1) or a peptide with eight amino acids (PEP12), a peptide with five amino acids (PEP2), and optionally a pair of peptides selected form the group consisting of PEP3:PEP4, PEP3:PEP6, PEP3:PEP10, PEP5:PEP4, PEP9:PEP4, PEP5:PEP6, PEP5:PEP10, PEP9:PEP6 and PEP9:PEP10; wherein said GFR-binding compound does not comprise the pair of peptides VPTEE:FLQHN when PEP1 is SNIT and PEP2 is IGEMS; wherein said GFR-binding compound does not comprise the pair of peptides VPTGQ:LEEHS when PEP1 is SNIT and PEP2 is LGEMS; wherein said GFR-binding compound does not comprise the pair of peptides SRVHH:RLEEH when PEP1 is RSVK and PEP2 is KEVQV; and wherein said GFR-binding compound does not comprise the pair of peptides TQVQL:TLEDH when PEP1 is RPVQ and PEP2 is KKATV; and wherein the RMSD is 2.45 Å or less.

[0513] In one aspect, the present disclosure provides a GFR-binding compound, wherein said GFR-binding compound is a peptide, a variant or analog thereof, or a peptidomimetic as defined herein, with between 20 and 60 (in particular between 20 and 50, and more particularly, between 20 and 45) amino acids, comprising a peptide with four amino acids (PEP1) or a peptide with eight amino acids (PEP12), a peptide with five amino acids (PEP2), and optionally a pair of peptides selected form the group consisting of PEP3:PEP4, PEP3:PEP6, PEP3:PEP10, PEP5:PEP4, PEP9:PEP4, PEP5:PEP6, PEP5:PEP10, PEP9:PEP6 and PEP9:PEP10; wherein said GFR-binding compound does not comprise the pair of peptides NDEGLEXVPTEE:FLQHNKXEXR when PEP1 is SNIT and PEP2 is IGEMS; wherein said GFR-binding compound does not comprise the pair of peptides NDEGLEXVPTGQ:LEEHSQXEXR when PEP1 is SNIT and PEP2 is LGEMS; wherein said GFR-binding compound does not comprise the pair of peptides SSVKXQPSRVHH:RLEEHLEXAXA when PEP1 is RSVK and PEP2 is KEVQV; and wherein said GFR-binding compound does not comprise the pair of peptides RNVQXRPTQVQL:TLEDHLAXKXE when PEP1 is RPVQ and PEP2 is KKATV; and wherein the RMSD is 2.45 Å or less.

[0514] In other embodiments also useful for inducing differentiation of mensenchymal or progenitor stem cells from the vascular cell lineage, enhancing of endothelization, vascularization/angiogenesis, protecting a subject from heart tissue degeneration-related diseases, disorders, conditions or pathologies, said GFR-binding compound is a synthetic molecule as defined herein in the definition section.

[0515] In other embodiments also useful for inducing differentiation of mensenchymal or progenitor stem cells from the vascular cell lineage, enhancing of endothelization, vascularization/angiogenesis, protecting a subject from heart tissue degeneration-related diseases, disorders, conditions or pathologies, said GFR-binding compound is a synthetic peptide, or a variant or analog thereof, or a peptidomimetic.

### Neuroregeneration

[0516] Certain embodiments of the invention are particularly useful for inducing differentiation of mensenchymal or progenitor stem cells from the neuronal cell lineage, promoting neuron-regeneration, and protecting from neuron degeneration-related conditions and diseases.

[0517] In certain embodiments useful for inducing differentiation of mensenchymal or progenitor stem cells from the neuronal cell lineage, promoting neuron-regeneration, and protecting from neuron degeneration-related conditions and diseases, PEP1 is selected from the group consisting of NAIS, SPIS and EPIS.

[0518] In certain embodiments useful for inducing differentiation of mensenchymal or progenitor stem cells from the neuronal cell lineage, promoting neuron-regeneration, and protecting from neuron degeneration-related conditions and diseases, PEP2 is selected from the group consisting of LKKYR, LKYHY, YKQYE and KFKYE.

[0519] In certain embodiments useful for inducing differentiation of mensenchymal or progenitor stem cells from the neuronal cell lineage, promoting neuron-regeneration, and protecting from neuron degeneration-related conditions and diseases, PEP3 is selected from the group consisting of VPT, APT, VPA, VPQ and VSQ.

[0520] In certain embodiments useful for inducing differentiation of mensenchymal or progenitor stem cells from the neuronal cell lineage, promoting neuron-regeneration, and protecting from neuron degeneration-related conditions and diseases, PEP4 is selected from the group consisting of VVE, VVR, VVK, VAE, AVS, VRS and VKS.

[0521] In certain embodiments useful for inducing differentiation of mensenchymal or progenitor stem cells from the neuronal cell lineage, promoting neuron-regeneration, and protecting from neuron degeneration-related conditions and diseases, PEP5 is a peptide of general formula PEP3-AA¹¹-AA¹²; wherein PEP3 is selected from the group consisting of VPT, APT, VPA, VPQ and VSQ; wherein AA¹¹ is selected from the group consisting of E, K, Q, R, A, D, G and H, in particular E, K, Q, R, A and D; wherein AA¹² is selected from the group consisting of L, M, T, E, Q and H, in particular L. In one particular example, PEP5 is selected from the group consisting of VPTEL, APTKL, APTQL, VPTKL, VPARL, VPQAL, VSQDL and VPQDL.

[0522] In certain embodiments useful for inducing differentiation of mensenchymal or progenitor stem cells from the neuronal cell lineage, promoting neuron-regeneration, and protecting from neuron degeneration-related conditions and diseases, PEP6 is a peptide of general formula AA²⁶-AA²⁷-AA²⁸-AA²⁹-PEP4; wherein PEP4 is selected from the group consisting of VVE, VVR, VVK, VAE, AVS, VRS and VKS; wherein AA²⁶ is absent or selected from the group consisting of AA^{III} amino acids, preferably absent or E; wherein AA²⁷ and AA²⁸ are independently selected from the group consisting of AA^{II} and AA^{V} amino acids, preferably AA²⁷ is selected from the group consisting of D, E, N, G and M, preferably AA²⁸ is selected from the group consisting of M, I and V; wherein AA²⁹ is absent or selected from the group consisting of AA^{II} amino acids, preferably absent or S. In one particular example, PEP6 is selected from the group consisting of DMVVE, EMVVE, NMVVR, NMVVK, EGMSVAE, GMAVS, DMVVE, MIVRS, MIVKS and MVVKS.

[0523] In certain embodiments useful for inducing differentiation of mensenchymal or progenitor stem cells from the neuronal cell lineage, promoting neuron-regeneration, and protecting from neuron degeneration-related conditions and diseases, PEP7 is an amino acid or a peptide with between two and seven amino acids of general formula AA¹-AA²-AA³-AA⁴-AA⁵-AA⁶-AA⁷; wherein AA¹, AA², AA³, AA⁴, and AA⁵ are independently absent or AA^{I} as defined herein; wherein AA⁶ is absent or selected from the group consisting of S, T, C, E, Q, P and R, preferably S or C; wherein AA⁷ is absent or is selected from the group consisting of S, T, C, E, Q, P and R, preferably is S or C; and wherein at least one of AA¹, AA², AA³, AA⁴, AA⁵, AA⁶ or AA⁷ is not absent. In one particular example, PEP7 is selected from the group consisting of KIPKAXX, SIPKAXX, HVTKPTX, YVPKPXX, TVPKPXX, AVPKAXX, KVGKAXX, ASAAPXX, ASASPXX and RNVQXRP.

[0524] In certain embodiments useful for inducing differentiation of mensenchymal or progenitor stem cells from the neuronal cell lineage, promoting neuron-regeneration, and protecting from neuron degeneration-related conditions and diseases, PEP8 is an amino acid or a peptide with between two and six amino acids of general formula AA³³-AA³⁴-AA³⁵-AA³⁶-AA³⁷-AA³⁸; wherein AA³³ is absent or is selected from the group consisting of AA^{I} amino acids at the exception of AA^{VI} amino acids, in particular is absent or is selected from the group consisting of G, S, A and E; AA³⁴ is absent or is selected from the group consisting of AA^{III} and AA^{V} amino acids, in particular is absent; wherein AA³⁵ is absent or is selected from the group consisting of AA^{II} amino acids, preferably is S or C; wherein AA³⁶ is absent or is selected from the group consisting of AA^{III} and AA^{V} amino acids, in particular is G or K; wherein AA³⁷ is absent or is selected from the group consisting of AA^{II} amino acids, preferably is S or C; wherein AA³⁸ is absent or is selected from the group consisting of AA^{I}, in particular is selected from the group consisting of R, H and S; and wherein at least one of AA³³, AA³⁴, AA³⁵, AA³⁶, AA³⁷ or AA³⁸ is not absent. In one particular example, PEP8 is selected from the group consisting of GXGXR, SXGXH, AXGXH, XGXR, XKXS and LAXKXE.

[0525] In certain embodiments useful for inducing differentiation of mensenchymal or progenitor stem cells from the neuronal cell lineage, promoting neuron-regeneration, and protecting from neuron degeneration-related conditions and diseases, PEP9 is a peptide of general formula AA¹-AA²-AA³-AA⁴-AA⁵-AA⁶-AA⁷-PEP5; wherein PEP5 is a peptide of formula PEP3-AA¹¹-AA¹²; wherein PEP3 is selected from the group consisting of VPT, APT, VPA, VPQ and VSQ; wherein AA¹¹ is selected from the group consisting of E, K, Q, R, A, D, G and H, in particular E, K, Q, R, A and D; wherein AA¹² is selected from the group consisting of L, M, T, E, Q and H, in particular L; wherein AA¹, AA², AA³, AA⁴, and AA⁵ are independently absent or AA^{I} as defined herein; wherein AA⁶ is absent or selected from the group consisting of S, T, C, E, Q, P and R, preferably S or C; wherein AA⁷ is selected from the group consisting of S, T, C, E, Q, P and R, preferably is S or C. In one particular example, PEP9 is selected from the group consisting of KIPKAXXVPTEL, SIPKAXXVPTEL, HVTKPTXAPTKL, YVPKPXXAPTKL, TVPKPXXAPTQL, AVPKAXXAPTKL, KVGKAXXVPTKL, ASAAPXXVPQAL, ASASPXXVSQDL, ASASPXXVPQDL and RNVQXRPTQVQL.

[0526] In certain embodiments useful for inducing differentiation of mensenchymal or progenitor stem cells from the neuronal cell lineage, promoting neuron-regeneration, and protecting from neuron degeneration-related conditions and diseases, PEP10 is a peptide of general formula PEP6-AA³³-AA³⁴-AA³⁵-AA³⁶-AA³⁷-AA³⁸, wherein PEP6 is a peptide of formula AA²⁶-AA²⁷-AA²⁸-AA²⁹-PEP4; wherein PEP4 is selected from the group consisting of VVE, VVR, VVK, VAE, AVS, VRS and VKS; wherein AA²⁶ is absent or selected from the group consisting of AA^{III} amino acids, preferably absent or E; wherein AA²⁷ and AA²⁸ are independently selected from the group consisting of AA^{III} and AA^{V} amino acids, preferably AA²⁷ is selected from the group consisting of D, E, N, G and M, preferably AA²⁸ is selected from the group consisting of M, I and V; wherein AA²⁹ is absent or selected from the group consisting of AA^{II} amino acids, preferably absent or S; wherein AA³³ is absent or is selected from the group consisting of AA^{I} amino acids at the exception of AA^{VI} amino acids, in particular is absent or is selected from the group consisting of G, S, A and E; AA³⁴ is absent or is selected from the group consisting of AA^{II} and AA^{IV} amino acids, in particular is absent; wherein AA³⁵ is absent or is selected from the group consisting of AA^{II} amino acids, preferably is S or C; wherein AA³⁶ is absent or is selected from the group consisting of AA^{II} and AA^{IV} amino acids, in particular is G or K; wherein AA³⁷ is absent or is selected from the group consisting of AA^{II} amino acids, preferably is S or C; wherein AA³⁸ is absent or is selected from the group consisting of AA^{I}, in particular is selected from the group consisting of R, H and S. In one particular example, PEP10 is selected from the group consisting of DMVVEGXGXR, EMVVEGXGXR, NMVVRSXGXH, NMVVRAXGXH, NMVVKAXGXH, EGMSVAEXGXR, MIVRSXKXS, MIVKSXKXS, MVVKSXKXS and TLEDHLAXKXE.

[0527] In certain embodiments useful for inducing differentiation of mensenchymal or progenitor stem cells from the neuronal cell lineage, promoting neuron-regeneration, and protecting from neuron degeneration-related conditions and diseases, PEP12 is a peptide of general formula PEP1-AA¹⁷-PEP11; wherein AA¹⁷ is selected from the group consisting of G, A, V, L, I, P, F, M, W, T and S (in particular is selected from the group consisting of M, I, L, V and T); wherein PEP1 is selected from the group consisting of NAIS, SPIS and EPIS.

[0528] In certain embodiments useful for inducing differentiation of mensenchymal or progenitor stem cells from the neuronal cell lineage, promoting neuron-regeneration, and protecting from neuron degeneration-related conditions and diseases, PEP11 is a peptide with 3 amino acids of general formula AA¹⁸-AA¹⁹-AA²⁰; wherein AA¹⁸ is selected from the group consisting of L, V, Q, A and R, in particular is L; wherein AA¹⁹ is selected from the group consisting of F, W, H and Y (in particular is an aromatic, polar amino acid such as Y); wherein AA²⁰ is selected from the group consisting of L, F, Y, K, I, V and M, in particular is selected from the group consisting of L, F, I, and K. In one particular example, PEP11 is selected from the group consisting of LYL, LYF, LYI and LYK.

[0529] The definitions of “PEP” pairs, quadruplets, hexaplets and heptuplet e.g. PEP1:PEP2, PEP12:PEP2, or PEP7:PEP5:PEP12:LINKER:PEP2:PEP6:PEP8, most particularly useful for inducing differentiation of mensenchymal or progenitor stem cells from the neuronal cell lineage, promoting neuron-regeneration, and protecting from neuron degeneration-related conditions and diseases, are as already defined herein to the extent that PEP1 to PEP12 are particularly useful for these applications. For instances:

[0530] In certain embodiments useful for inducing differentiation of mensenchymal or progenitor stem cells from the neuronal cell lineage, promoting neuron-regeneration, and protecting from neuron degeneration-related conditions and diseases, the pair PEP1:PEP2 is selected from the group consisting of NAIS:LKKYR, SPIS:LKYHY, EPIS:KFKYE and SPIS:YKQYE.

[0531] In certain embodiments useful for inducing differentiation of mensenchymal or progenitor stem cells from the neuronal cell lineage, promoting neuron-regeneration, and protecting from neuron degeneration-related conditions and diseases, the pair PEP12:PEP2 is selected from the group consisting of NAIS-AA¹⁷-LYF:LKKYR, SPIS-AA¹⁷-LYK:LKYHY, EPIS-AA¹⁷-LYL:KFKYE and SPIS-AA¹⁷-LYI:YKQYE; wherein AA¹⁷ is selected from the group consisting of G, A, V, L, I, P, F, M, W, T and S (in particular is selected from the group consisting of V, I and T).

[0532] In certain embodiments useful for inducing differentiation of mensenchymal or progenitor stem cells from the neuronal cell lineage, promoting neuron-regeneration, and protecting from neuron degeneration-related conditions and diseases, PEP3 is selected from the group consisting of VPT, APT, VPA, VPQ and VSQ; PEP4 is selected from the group consisting of VVE, VVR, VVK, VAE, AVS, VRS and VKS; and wherein the pair PEP3:PEP4 is selected from the group consisting of VPT:VVE, APT:VVR, APT:VVK, VPT:VAE, VPT:AVS, VPA:VVE, VPQ:VRS, VSQ:VKS and VPQ:VKS.

[0533] In certain embodiments useful for inducing differentiation of mensenchymal or progenitor stem cells from the neuronal cell lineage, promoting neuron-regeneration, and protecting from neuron degeneration-related conditions and diseases, PEP5 is selected from the group consisting of VPTEL, APTKL, APTQL, VPTKL, VPARL, VPQAL, VSQDL and VPQDL; PEP6 is selected from the group consisting of DMVVE, EMVVE, NMVVR, NMVVK, EGMSVAE, GMAVS, DMVVE, MIVRS, MIVKS and MVVKS; and wherein the pair PEP5:PEP6 is selected from the group consisting of VPTEL:DMVVE, VPTEL:EMVVE, APTKL:NMVVR, APTQL:NMVV, APTKL:NMVVK, VPTKL:EGMSVAE, VPTKL:EGMAVS, VPARL:DMVVE, VPQAL:MIVRS, VSQDL:MIVKS and VPQDL:MVVKS.

[0534] In certain embodiments useful for inducing differentiation of mensenchymal or progenitor stem cells from the neuronal cell lineage, promoting neuron-regeneration, and protecting from neuron degeneration-related conditions and diseases, PEP7 is selected from the group consisting of KIPKAXX, SIPKAXX, HVTKPTX, YVPKPXX, TVPKPXX, AVPKAXX, KVGKAXX, ASAAPXX, ASASPXX and RNVQXRP; wherein PEP8 is selected from the group consisting of GXGXR, SXGXH, AXGXH, XGXR, XKXS and LAXKXE; and wherein the pair PEP7:PEP8 is selected from the group consisting of KIPKAXX:GXGXR, SIPKAXX:GXGXR, HVTKPTX:SXGXH, YVPKPXX:SXGXH, TVPKPXX:AXGXH, AVPKAXX:AXGXH, KVGKAXX:XGXR, KASKAXX:EXGXR, AAPASXX:AXGXR, ASAAPXX:XKXS, ASASPXX:XKXS and ASASPXX:XKXS.

[0535] In certain embodiments useful for inducing differentiation of mensenchymal or progenitor stem cells from the neuronal cell lineage, promoting neuron-regeneration, and protecting from neuron degeneration-related conditions and diseases, PEP9 is selected from the group consisting of KIPKAXXVPTEL, SIPKAXXVPTEL, HVTKPTXAPTKL, YVPKPXXAPTKL, TVPKPXXAPTQL, AVPKAXXAPTKL, KVGKAXXVPTKL, ASAAPXXVPQAL, ASASPXXVSQDL, ASASPXXVPQDL and RNVQXRPTQVQL; PEP10 is selected from the group consisting of DMVVEGXGXR, EMVVEGXGXR, NMVVRSXGXH, NMVVRAXGXH, NMVVKAXGXH, EGMSVAEXGXR, MIVRSXKXS, MIVKSXKXS, MVVKSXKXS and TLEDHLAXKXE; and wherein the pair PEP9:PEP10 is selected from the group consisting of KIPKAXXVPTEL:DMVVEGXGXR, SIPKAXXVPTEL:EMVVEGXGXR, HVTKPTXAPTKL:NMVVRSXGXH, YVPKPXXAPTKL:NMVVRSXGXH, TVPKPXXAPTQL:NMVVRAXGXH, AVPKAXXAPTKL:NMVVKAXGXH, KVGKAXXVPTKL:EGMSVAEXGXR, KASKAXXVPTKL:GMAVSEXGXR, AAPASXXVPARL:DMVVEAXGXR, ASAAPXXVPQAL:MIVRSXKXS, ASASPXXVSQDL:MIVKSXKXS and ASASPXXVPQDL:MVVKSXKXS.

[0536] In certain embodiments useful for inducing differentiation of mensenchymal or progenitor stem cells from the neuronal cell lineage, promoting neuron-regeneration, and protecting from neuron degeneration-related conditions and diseases, PEP5 is selected from the group consisting of VPTEL, APTKL, APTQL, VPTKL, VPARL, VPQAL, VSQDL and VPQDL; PEP6 is selected from the group consisting of DMVVE, EMVVE, NMVVR, NMVVK, EGMSVAE, GMAVS, DMVVE, MIVRS, MIVKS and MVVKS; and wherein the pair PEP5:PEP6 is selected from the group consisting of VPTEL:DMVVE, VPTEL:EMVVE, APTKL:NMVVR, APTQL:NMVV, APTKL:NMVVK, VPTKL:EGMSVAE, VPTKL:EGMAVS, VPARL:DMVVE, VPQAL:MIVRS, VSQDL:MIVKS and VPQDL:MVVKS; wherein the pair PEP5:PEP6 is not APTQL:NMVVR when PEP1 is NAIS and PEP2 is LKKYR; wherein the pair PEP5:PEP6 is not VPTKL:EGMSVAE when PEP1 is SPIS and PEP2 is LKYHY; wherein the pair PEP5:PEP6 is not VPTKL:GMAVS when PEP1 is EPIS and PEP2 is KFKYE; and wherein the pair PEP5:PEP6 is not VPARL:DMVVE when PEP1 is SPIS and PEP2 is YKQYE.

[0537] In certain embodiments useful for inducing differentiation of mensenchymal or progenitor stem cells from the neuronal cell lineage, promoting neuron-regeneration, and protecting from neuron degeneration-related conditions and diseases, PEP9 is selected from the group consisting of KIPKAXXVPTEL, SIPKAXXVPTEL, HVTKPTXAPTKL, YVPKPXXAPTKL, TVPKPXXAPTQL, AVPKAXXAPTKL, KVGKAXXVPTKL, ASAAPXXVPQAL, ASASPXXVSQDL, ASASPXXVPQDL and RNVQXRPTQVQL; PEP10 is selected from the group consisting of DMVVEGXGXR, EMVVEGXGXR, NMVVRSXGXH, NMVVRAXGXH, NMVVKAXGXH, EGMSVAEXGXR, MIVRSXKXS, MIVKSXKXS, MVVKSXKXS and TLEDHLAXKXE; and wherein the pair PEP9:PEP10 is selected from the group consisting of KIPKAXXVPTEL:DMVVEGXGXR, SIPKAXXVPTEL:EMVVEGXGXR, HVTKPTXAPTKL:NMVVRSXGXH, YVPKPXXAPTKL:NMVVRSXGXH, TVPKPXXAPTQL:NMVVRAXGXH, AVPKAXXAPTKL:NMVVKAXGXH, KVGKAXXVPTKL:EGMSVAEXGXR, KASKAXXVPTKL:GMAVSEXGXR, AAPASXXVPARL:DMVVEAXGXR, ASAAPXXVPQAL:MIVRSXKXS, ASASPXXVSQDL:MIVKSXKXS and ASASPXXVPQDL:MVVKSXKXS; wherein PEP9:PEP10 is not TVPKPXXAPTQL:NMVVRAXGXH when PEP1 is NAIS and PEP2 is LKKYR; wherein PEP9:PEP10 is not KVGKAXXVPTKL:EGMSVAEXGXR when PEP1 is SPIS and PEP2 is LKYHY; wherein PEP9:PEP10 is not KASKAXXVPTKL:GMAVSEXGXR when PEP1 is EPIS and PEP2 is KFKYE; wherein PEP9:PEP10 is not AAPASXXVPARL:DMVVEAXGXR when PEP1 is SPIS.

[0538] In certain embodiments useful for inducing differentiation of mensenchymal or progenitor stem cells from the neuronal cell lineage, promoting neuron-regeneration, and protecting from neuron degeneration-related conditions and diseases, PEP1 is selected from the group consisting of NAIS, SPIS and EPIS; PEP11 is selected from the group consisting of LYF, LYK, LYL and LYI; and the pair PEP1:PEP11 is selected from the group consisting of NAIS:LYF, SPIS:LYK, EPIS:LYL and SPIS:LYI.

[0539] In one aspect, the present disclosure provides a GFR-binding compound, wherein said GFR-binding compound is a peptide, a variant or analog thereof, or a peptidomimetic as defined herein, with between 20 and 60 (in particular between 20 and 50, and more particularly, between 20 and 45) amino acids, comprising a peptide with four amino acids (PEP1) or a peptide with eight amino acids (PEP12), a peptide with five amino acids (PEP2), and optionally a pair of peptides selected form the group consisting of PEP3:PEP4, PEP3:PEP6, PEP3:PEP10, PEP5:PEP4, PEP9:PEP4, PEP5:PEP6, PEP5:PEP10, PEP9:PEP6 and PEP9:PEP10; wherein said GFR-binding compound does not comprise the pair of peptides APTQL:NMVVR when PEP1 is NAIS and PEP2 is LKKYR; wherein said GFR-binding compound does not comprise the pair of peptides VPTKL:EGMSVAE when PEP1 is SPIS and PEP2 is LKYHY; wherein said GFR-binding compound does not comprise the pair of peptides VPTKL:GMAVS when PEP1 is EPIS and PEP2 is KFKYE; and wherein said GFR-binding compound does not comprise the pair of peptides VPARL:DMVVE when PEP1 is SPIS and PEP2 is YKQYE; and wherein the RMSD is 2.45 Å or less.

[0540] In one aspect, the present disclosure provides a GFR-binding compound, wherein said GFR-binding compound is a peptide, a variant or analog thereof, or a peptidomimetic as defined herein, with between 20 and 60 (in particular between 20 and 50, and more particularly, between 20 and 45) amino acids, comprising a peptide with four amino acids (PEP1) or a peptide with eight amino acids (PEP12), a peptide with five amino acids (PEP2), and optionally a pair of peptides selected form the group consisting of PEP3:PEP4, PEP3:PEP6, PEP3:PEP10, PEP5:PEP4, PEP9:PEP4, PEP5:PEP6, PEP5:PEP10, PEP9:PEP6 and PEP9:PEP10; wherein said GFR-binding compound does not comprise the pair of peptides TVPKPXXAPTQL:NMVVRAXGXH when PEP1 is NAIS and PEP2 is LKKYR; wherein said GFR-binding compound does not comprise the pair of peptides KVGKAXXVPTKL:EGMSVAEXGXR when PEP1 is SPIS and PEP2 is LKYHY; wherein said GFR-binding compound does not comprise the pair of peptides KASKAXXVPTKL:GMAVSEXGXR when PEP1 is EPIS and PEP2 is KFKYE; wherein said GFR-binding compound does not comprise the pair of peptides AAPASXXVPARL:DMVVEAXGXR when PEP1 is SPIS; and wherein the RMSD is 2.45 Å or less.

[0541] In certain embodiments useful for inducing differentiation of mensenchymal or progenitor stem cells from the neuronal cell lineage, promoting neuron-regeneration, and protecting from neuron degeneration-related conditions and diseases, said GFR-binding compound is a synthetic molecule as defined herein in the definition section.

[0542] In certain embodiments useful for inducing differentiation of mensenchymal or progenitor stem cells from the neuronal cell lineage, promoting neuron-regeneration, and protecting from neuron degeneration-related conditions and diseases, said GFR-binding compound is a synthetic peptide, or a variant or analog thereof, or a peptidomimetic.

### Eye Retina

[0543] Certain embodiments of the invention are particularly useful for inducing differentiation of mensenchymal or progenitor stem cells from the retinal cell lineage, promoting eye retina cell regeneration and protecting from eye retina cell degeneration-related conditions or diseases such as macular degeneration.

[0544] In certain embodiments useful for inducing differentiation of mensenchymal or progenitor stem cells from the retinal cell lineage, promoting eye retina cell regeneration and protecting from eye retina cell degeneration-related conditions or diseases, PEP1 is SPIN.

[0545] In certain embodiments useful for inducing differentiation of mensenchymal or progenitor stem cells from the retinal cell lineage, promoting eye retina cell regeneration and protecting from eye retina cell degeneration-related conditions or diseases, PEP2 is YGKIP.

[0546] In certain embodiments useful for inducing differentiation of mensenchymal or progenitor stem cells from the retinal cell lineage, promoting eye retina cell regeneration and protecting from eye retina cell degeneration-related conditions or diseases, PEP3 is selected from the group consisting of VPT, APT, TPT, VPA and APV.

[0547] In certain embodiments useful for inducing differentiation of mensenchymal or progenitor stem cells from the retinal cell lineage, promoting eye retina cell regeneration and protecting from eye retina cell degeneration-related conditions or diseases, PEP4 is selected from the group consisting of VVE, VVR, VVK, VAE, AVS, VVD and VEE.

[0548] In certain embodiments useful for inducing differentiation of mensenchymal or progenitor stem cells from the retinal cell lineage, promoting eye retina cell regeneration and protecting from eye retina cell degeneration-related conditions or diseases, PEP5 is a peptide of general formula PEP3-AA¹¹-AA¹²; wherein PEP3 is selected from the group consisting of VPT, APT, TPT, VPA and APV; wherein AA¹¹ is selected from the group consisting of E, K, Q, R, A, D, G and H, in particular is E, K, Q and R; wherein AA¹² is selected from the group consisting of L, M, T, E, Q and H, in particular is L, M or T. In one particular example, PEP5 is selected from the group consisting of VPTEL, APTKL, APTQL, VPTKL, TPTKM, VPARL, VPTRL and APVKT.

[0549] In certain embodiments useful for inducing differentiation of mensenchymal or progenitor stem cells from the retinal cell lineage, promoting eye retina cell regeneration and protecting from eye retina cell degeneration-related conditions or diseases, PEP6 is a peptide of general formula AA²⁶-AA²⁷-AA²⁸-AA²⁹-PEP4; wherein PEP4 is selected from the group consisting of VVE, VVR, VVK, VAE, AVS, VVD and VEE; wherein AA²⁶ is absent or selected from the group consisting of AA^{III} amino acids, preferably absent or E; wherein AA²⁷ and AA²⁸ are independently selected from the group consisting of AA^{III} and AA^{V} amino acids, preferably AA²⁷ is selected from the group consisting of D, E, N, G and M, preferably AA²⁸ is M or I; wherein AA²⁹ is absent or selected from the group consisting of AA^{II} amino acids, preferably absent or S. In one particular example, PEP6 is selected from the group consisting of DMVVE, EMVVE, NMVVR, NMVVK, EGMSVAE, EGMAVS, GMVVD and DMIVEE.

[0550] In certain embodiments useful for inducing differentiation of mensenchymal or progenitor stem cells from the retinal cell lineage, promoting eye retina cell regeneration and protecting from eye retina cell degeneration-related conditions or diseases, PEP7 is an amino acid or a peptide with between two and seven amino acids of general formula AA¹-AA²-AA³-AA⁴-AA⁵-AA⁶-AA⁷; wherein AA¹, AA², AA³, AA⁴, and AA⁵ are independently absent or AA^{I} as defined herein; wherein AA⁶ is absent or selected from the group consisting of S, T, C, E, Q, P and R, preferably is S or C; wherein AA⁷ is absent or is selected from the group consisting of S, T, C, E, Q, P and R, preferably is S or C; and wherein at least one of AA¹, AA², AA³, AA⁴, AA⁵, AA⁶ or AA⁷ is not absent. In one particular example, PEP7 is selected from the group consisting of KIPKAXX, SIPKAXX, HVTKPTX, YVPKPXX, TVPKPXX, AVPKAXX, KVGKAXX, KASKAXX, GSAGPXX, AAPAXXS, STPPTXX, HVPKPXX and RVPSTXX.

[0551] In certain embodiments useful for inducing differentiation of mensenchymal or progenitor stem cells from the retinal cell lineage, promoting eye retina cell regeneration and protecting from eye retina cell degeneration-related conditions or diseases, PEP8 is an amino acid or a peptide with between two and six amino acids of general formula AA³³-AA³⁴-AA³⁵-AA³-AA³⁷-AA³⁸; wherein AA³³ is absent or is selected from the group consisting of AA^{I} amino acids at the exception of AA^{VI} amino acids, in particular is absent or is selected from the group consisting of G, S, A, E and R; AA³⁴ is absent or is selected from the group consisting of AA^{III} and AA^{IV} amino acids, in particular is absent; wherein AA³⁵ is absent or is selected from the group consisting of AA^{II} amino acids, preferably is S or C; wherein AA³⁶ is absent or is selected from the group consisting of AA^{II} and AA^{V} amino acids; wherein AA³⁷ is absent or is selected from the group consisting of AA^{II} amino acids, preferably is S or C; wherein AA³⁸ is absent or is selected from the group consisting of AA^{I}, in particular is selected from the group consisting of R, H, S and L; and wherein at least one of AA³³, AA³⁴, AA³⁵, AA³⁶, AA³⁷ or AA³⁸ is not absent. In one particular example, PEP8 is selected from the group consisting of GXGXR, SXGXH, AXGXH, XGXR, EXGXR, RXGXS, AXGXR, SXGXR and XGXL.

[0552] In certain embodiments useful for inducing differentiation of mensenchymal or progenitor stem cells from the retinal cell lineage, promoting eye retina cell regeneration and protecting from eye retina cell degeneration-related conditions or diseases, PEP9 is a peptide of general formula AA¹-AA²-AA³-AA⁴-AA⁵-AA⁶-AA⁷-PEP5; wherein PEP5 is a peptide of formula PEP3-AA¹¹-AA¹²; wherein PEP3 is selected from the group consisting of VPT, APT, TPT, VPA and APV; wherein AA¹¹ is selected from the group consisting of E, K, Q, R, A, D, G and H, in particular is E, K, Q and R; wherein AA¹² is selected from the group consisting of L, M, T, E, Q and H, in particular is L, M or T; wherein AA¹, AA², AA³, AA⁴, and AA⁵ are independently absent or AA^{I} as defined herein; wherein AA⁶ is absent or selected from the group consisting of S, T, C, E, Q, P and R, preferably is S or C; wherein AA⁷ is selected from the group consisting of S, T, C, E, Q, P and R, preferably is S or C. In one particular example, PEP9 is selected from the group consisting of KIPKAXXVPTEL, SIPKAXXVPTEL, HVTKPTXAPTKL, YVPKPXXAPTKL, TVPKPXXAPTQL, AVPKAXXAPTKL, KVGKAXXVPTKL, KASKAXXVPTKL, GSAGPXXTPTKL, AAPASXXVPARL, STPPTXXVPTRL, HVPKPXXAPTKL and RVPSTXXAPVKT.

[0553] In certain embodiments useful for inducing differentiation of mensenchymal or progenitor stem cells from the retinal cell lineage, promoting eye retina cell regeneration and protecting from eye retina cell degeneration-related conditions or diseases, PEP10 is a peptide of general formula PEP6-AA³³-AA³⁴-AA³⁵-AA³⁶-AA³⁷-AA³⁸; wherein PEP6 is a peptide of formula AA²⁶-AA²⁷-AA²⁸-AA²⁹-PEP4; wherein PEP4 is selected from the group consisting of VVE, VVR, VVK, VAE, AVS, VVD and VEE; wherein AA²⁶ is absent or selected from the group consisting of AA^{III} amino acids, preferably absent or E; wherein AA²⁷ and AA²⁸ are independently selected from the group consisting of AA^{III} and AA^{V} amino acids, preferably AA²⁷ is selected from the group consisting of D, E, N, G and M, preferably AA²⁸ is M or I; wherein AA²⁹ is absent or selected from the group consisting of AA^{II} amino acids, preferably absent or S; wherein AA³³ is absent or is selected from the group consisting of AA^{I} amino acids at the exception of AA^{VI} amino acids, in particular is absent or is selected from the group consisting of G, S, A, E and R; AA³⁴ is absent or is selected from the group consisting of AA^{III} and AA^{IV} amino acids, in particular is absent; wherein AA³⁵ is absent or is selected from the group consisting of AA^{II} amino acids, preferably is S or C; wherein AA³⁶ is absent or is selected from the group consisting of AA^{III} and AA^{IV} amino acids; wherein AA³⁷ is absent or is selected from the group consisting of AA^{II} amino acids, preferably is S or C; wherein AA³⁸ is absent or is selected from the group consisting of AA^{I}, in particular is selected from the group consisting of R, H, S and L. In one particular example, PEP10 is selected from the group consisting of DMVVEGXGXR, EMVVEGXGXR, NMVVRSXGXH, NMVVRAXGXH, NMVVKAXGXH, EGMSVAEXGXR, GMAVSEXGXR, GMVVDRXGXS, DMVVEAXGXR, DMVVESXGXR, NMVVRSXGXH and MIVEEXGXL.

[0554] In certain embodiments useful for inducing differentiation of mensenchymal or progenitor stem cells from the retinal cell lineage, promoting eye retina cell regeneration and protecting from eye retina cell degeneration-related conditions or diseases, PEP12 is a peptide of general formula PEP1-AA¹⁷-PEP11; wherein AA¹⁷ is selected from the group consisting of G, A, V, L, I, P, F, M, W, T and S (in particular is selected from the group consisting of M, I, L, V and T); wherein PEP1 is SPIN.

[0555] In certain embodiments useful for inducing differentiation of mensenchymal or progenitor stem cells from the retinal cell lineage, promoting eye retina cell regeneration and protecting from eye retina cell degeneration-related conditions or diseases, PEP11 is a peptide with 3 amino acids of general formula AA¹⁸-AA¹⁹-AA²⁰; wherein AA¹⁸ is selected from the group consisting of L, V, Q, A and R, in particular is L; wherein AA¹⁹ is selected from the group consisting of F, W, H and Y, in particular is Y or F; wherein AA²⁰ is selected from the group consisting of L, F, Y, K, I, V and M, in particular is selected from the group consisting of L, F, Y, K, I and V. In one particular example, PEP11 is LYF.

[0556] The definitions of “PEP” pairs, quadruplets, hexaplets and heptuplet e.g. PEP1:PEP2, PEP12:PEP2, or PEP7:PEP5:PEP12:LINKER:PEP2:PEP6:PEP8, most particularly useful for inducing differentiation of mensenchymal or progenitor stem cells from the retinal cell lineage, promoting eye retina cell regeneration and protecting from eye retina cell degeneration-related conditions or diseases, are as already defined herein to the extent that PEP1 to PEP12 are particularly useful for these applications. For instances:

[0557] In certain embodiments useful for inducing differentiation of mensenchymal or progenitor stem cells from the retinal cell lineage, promoting eye retina cell regeneration and protecting from eye retina cell degeneration-related conditions or diseases, PEP3 is selected from the group consisting of VPT, APT, TPT, VPA and APV; PEP4 is selected from the group consisting of VVE, VVR, VVK, VAE, AVS, VVD and VEE; and wherein the pair PEP3:PEP4 is selected from the group consisting of VPT:VVE, APT:VVR, APT:VVK, VPT:VAE, VPT:AVS, TPT:VVD, VPA:VVE and APV:VEE.

[0558] In certain embodiments useful for inducing differentiation of mensenchymal or progenitor stem cells from the retinal cell lineage, promoting eye retina cell regeneration and protecting from eye retina cell degeneration-related conditions or diseases, PEP5 is selected from the group consisting of VPTEL, APTKL, APTQL, VPTKL, TPTKM, VPARL, VPTRL and APVKT; PEP6 is selected from the group consisting of DMVVE, EMVVE, NMVVR, NMVVK, EGMSVAE, EGMAVS, GMVVD and DMIVEE; and wherein the pair PEP5:PEP6 is selected from the group consisting of VPTEL:DMVVE, VPTEL:EMVVE, APTKL:NMVVR, APTQL:NMVVR, APTKL:NMVVK, VPTKL:EGMSVAE, VPTKL:EGMAVS, TPTKM:GMVVD, VPARL:DMVVE, VPTRL:DMVVE, APTKL:NMVVR and APVKT:DMIVEE.

[0559] In certain embodiments useful for inducing differentiation of mensenchymal or progenitor stem cells from the retinal cell lineage, promoting eye retina cell regeneration and protecting from eye retina cell degeneration-related conditions or diseases, PEP7 is selected from the group consisting of KIPKAXX, SIPKAXX, HVTKPTX, YVPKPXX, TVPKPXX, AVPKAXX, KVGKAXX, KASKAXX, GSAGPXX, AAPAXXS, STPPTXX, HVPKPXX and RVPSTXX; wherein PEP8 is selected from the group consisting of GXGXR, SXGXH, AXGXH, XGXR, EXGXR, RXGXS, AXGXR, SXGXR and XGXL; and wherein the pair PEP7:PEP8 is selected from the group consisting of KIPKAXX:GXGXR, SIPKAXX:GXGXR, HVTKPTX:SXGXH, YVPKPXX:SXGSH, TVPKPXX:AXGXH, AVPKAXX:AXGXH, KVGKAXX:XGXR, KASKAXX:EXGXR, GSAGPXX:RXGXS, AAPASXX:AXGXR, STPPTXX:SXGXR, HVPKPXX:SXGXH and RVPSTXX:XGXL.

[0560] In certain embodiments useful for inducing differentiation of mensenchymal or progenitor stem cells from the retinal cell lineage, promoting eye retina cell regeneration and protecting from eye retina cell degeneration-related conditions or diseases, PEP9 is selected from the group consisting of KIPKAXXVPTEL, SIPKAXXVPTEL, HVTKPTXAPTKL, YVPKPXXAPTKL, TVPKPXXAPTQL, AVPKAXXAPTKL, KVGKAXXVPTKL, KASKAXXVPTKL, GSAGPXXTPTKL, AAPASXXVPARL, STPPTXXVPTRL, HVPKPXXAPTKL and RVPSTXXAPVKT; PEP10 is selected from the group consisting of DMVVEGXGXR, EMVVEGXGXR, NMVVRSXGXH, NMVVRAXGXH, NMVVKAXGXH, EGMSVAEXGXR, GMAVSEXGXR, GMVVDRXGXS, DMVVEAXGXR, DMVVESXGXR, NMVVRSXGXH and MIVEEXGXL; and wherein the pair PEP9:PEP10 is selected from the group consisting of KIPKAXXVPTEL:DMVVEGXGXR, SIPKAXXVPTEL:EMVVEGXGXR, HVTKPTXAPTKL:NMVVRSXGXH, YVPKPXXAPTKL:NMVVRSXGXH, TVPKPXXAPTQL:NMVVRAXGXH, AVPKAXXAPTKL:NMVVKAXGXH, KVGKAXXVPTKL:EGMSVAEXGXR, KASKAXXVPTKL:GMAVSEXGXR, GSAGPXXTPTKM:GMVVDRXGXS, AAPASXXVPARL:DMVVEAXGXR, STPPTXXVPTRL:DMVVESXGXR, HVPKPXXAPTKL:NMVVRSXGXH and RVPSTXXAPVKT:MIVEEXGXL.

[0561] In certain embodiments useful for inducing differentiation of mensenchymal or progenitor stem cells from the retinal cell lineage, promoting eye retina cell regeneration and protecting from eye retina cell degeneration-related conditions or diseases, PEP5 is selected from the group consisting of VPTEL, APTKL, APTQL, VPTKL, VPARL, VPQAL, VSQDL and VPQDL; PEP6 is selected from the group consisting of DMVVE, EMVVE, NMVVR, NMVVK, EGMSVAE, GMAVS, DMVVE, MIVRS, MIVKS and MVVKS; and wherein the pair PEP5:PEP6 is selected from the group consisting of VPTEL:DMVVE, VPTEL:EMVVE, APTKL:NMVVR, APTQL:NMVVR, APTKL:NMVVK, VPTKL:EGMSVAE, VPTKL:EGMAVS, TPTKM:GMVVD, VPARL:DMVVE, VPTRL:DMVVE, APTKL:NMVVR and APVKT:DMIVEE; and wherein the pair PEP5:PEP6 is not TPTKM:GMVVD when PEP1 is SPIN and PEP2 is YGKIP.

[0562] In certain embodiments useful for inducing differentiation of mensenchymal or progenitor stem cells from the retinal cell lineage, promoting eye retina cell regeneration and protecting from eye retina cell degeneration-related conditions or diseases, PEP9 is selected from the group consisting of KIPKAXXVPTEL, SIPKAXXVPTEL, HVTKPTXAPTKL, YVPKPXXAPTKL, TVPKPXXAPTQL, AVPKAXXAPTKL, KVGKAXXVPTKL, KASKAXXVPTKL, GSAGPXXTPTKL, AAPASXXVPARL, STPPTXXVPTRL, HVPKPXXAPTKL and RVPSTXXAPVKT; PEP10 is selected from the group consisting of DMVVEGXGXR, EMVVEGXGXR, NMVVRSXGXH, NMVVRAXGXH, NMVVKAXGXH, EGMSVAEXGXR, GMAVSEXGXR, GMVVDRXGXS, DMVVEAXGXR, DMVVESXGXR, NMVVRSXGXH and MIVEEXGXL; and wherein the pair PEP9:PEP10 is selected from the group consisting of KIPKAXXVPTEL:DMVVEGXGXR, SIPKAXXVPTEL:EMVVEGXGXR, HVTKPTXAPTKL:NMVVRSXGXH, YVPKPXXAPTKL:NMVVRSXGXH, TVPKPXXAPTQL:NMVVRAXGXH, AVPKAXXAPTKL:NMVVKAXGXH, KVGKAXXVPTKL:EGMSVAEXGXR, KASKAXXVPTKL:GMAVSEXGXR, GSAGPXXTPTKM:GMVVDRXGXS, AAPASXXVPARL:DMVVEAXGXR, STPPTXXVPTRL:DMVVESXGXR, HVPKPXXAPTKL:NMVVRSXGXH and RVPSTXXAPVKT:MIVEEXGXL; and wherein PEP9:PEP10 is not GSAGPXXTPTKM:GMVVDRXGXS when PEP1 is SPIN and PEP2 is YGKIP.

[0563] In certain embodiments useful for inducing differentiation of mensenchymal or progenitor stem cells from the retinal cell lineage, promoting eye retina cell regeneration and protecting from eye retina cell degeneration-related conditions or diseases, PEP1 is SPIN and PEP11 is LYF.

[0564] In one aspect, the present disclosure provides a GFR-binding compound, wherein said GFR-binding compound is a peptide, a variant or analog thereof, or a peptidomimetic as defined herein, with between 20 and 60 (in particular between 20 and 50, and more particularly, between 20 and 45) amino acids, comprising a peptide with four amino acids (PEP1) or a peptide with eight amino acids (PEP12), a peptide with five amino acids (PEP2), and optionally a pair of peptides selected form the group consisting of PEP3:PEP4, PEP3:PEP6, PEP3:PEP10, PEP5:PEP4, PEP9:PEP4, PEP5:PEP6, PEP5:PEP10, PEP9:PEP6 and PEP9:PEP10; wherein said GFR-binding compound does not comprise the pair of peptides TPTKM:GMVVD when PEP1 is SPIN and PEP2 is YGKIP; and wherein the RMSD is 2.45 Å or less.

[0565] In one aspect, the present disclosure provides a GFR-binding compound, wherein said GFR-binding compound is a peptide, a variant or analog thereof, or a peptidomimetic as defined herein, with between 20 and 60 (in particular between 20 and 50, and more particularly, between 20 and 45) amino acids, comprising a peptide with four amino acids (PEP1) or a peptide with eight amino acids (PEP12), a peptide with five amino acids (PEP2), and optionally a pair of peptides selected form the group consisting of PEP3:PEP4, PEP3:PEP6, PEP3:PEP10, PEP5:PEP4, PEP9:PEP4, PEP5:PEP6, PEP5:PEP10, PEP9:PEP6 and PEP9:PEP10; wherein said GFR-binding compound does not comprise the pair of peptides GSAGPXXTPTKM:GMVVDRXGXS when PEP1 is SPIN and PEP2 is YGKIP; and wherein the RMSD is 2.45 Å or less.

[0566] In certain embodiments useful for inducing differentiation of mensenchymal or progenitor stem cells from the retinal cell lineage, promoting eye retina cell regeneration and protecting from eye retina cell degeneration-related conditions or diseases, said GFR-binding compound is a synthetic molecule as defined herein in the definition section.

[0567] In certain embodiments useful for inducing differentiation of mensenchymal or progenitor stem cells from the retinal cell lineage, promoting eye retina cell regeneration and protecting from eye retina cell degeneration-related conditions or diseases, said GFR-binding compound is a synthetic peptide, or a variant or analog thereof, or a peptidomimetic.

### Renal Tissues

[0568] Certain embodiments of the invention are particularly useful for inducing differentiation of mensenchymal or progenitor stem cells from the renal cell lineage, promoting renal cell regeneration and/or renal functions and protecting from renal cell degeneration-related conditions or diseases such as chronic kidney disease or renal fibrosis.

[0569] In certain embodiments useful for inducing differentiation of mensenchymal or progenitor stem cells from the renal cell lineage, promoting renal cell regeneration and/or renal functions and protecting from renal cell degeneration-related conditions or diseases, PEP1 is SPIN.

[0570] In certain embodiments useful for inducing differentiation of mensenchymal or progenitor stem cells from the renal cell lineage, promoting renal cell regeneration and/or renal functions and protecting from renal cell degeneration-related conditions or diseases, PEP2 is YGKIP.

[0571] In certain embodiments useful for inducing differentiation of mensenchymal or progenitor stem cells from the renal cell lineage, promoting renal cell regeneration and/or renal functions and protecting from renal cell degeneration-related conditions or diseases, PEP3 is selected from the group consisting of VPT, APT, TPT, VPA and APV.

[0572] In certain embodiments useful for inducing differentiation of mensenchymal or progenitor stem cells from the renal cell lineage, promoting renal cell regeneration and/or renal functions and protecting from renal cell degeneration-related conditions or diseases, PEP4 is selected from the group consisting of VVE, VVR, VVK, VAE, AVS, VVD and VEE.

[0573] In certain embodiments useful for inducing differentiation of mensenchymal or progenitor stem cells from the renal cell lineage, promoting renal cell regeneration and/or renal functions and protecting from renal cell degeneration-related conditions or diseases, PEP5 is a peptide of general formula PEP3-AA¹¹-AA¹²; wherein PEP3 is selected from the group consisting of VPT, APT, TPT, VPA and APV; wherein AA¹¹ is selected from the group consisting of E, K, Q, R, A, D, G and H, in particular is E, K, Q and R; wherein AA¹² is selected from the group consisting of L, M, T, E, Q and H, in particular is L, M or T. In one particular example, PEP5 is selected from the group consisting of VPTEL, APTKL, APTQL, VPTKL, TPTKM, VPARL, VPTRL and APVKT.

[0574] In certain embodiments useful for inducing differentiation of mensenchymal or progenitor stem cells from the renal cell lineage, promoting renal cell regeneration and/or renal functions and protecting from renal cell degeneration-related conditions or diseases, PEP6 is a peptide of general formula AA²⁶-AA²⁷-AA²⁸-AA²⁹-PEP4; wherein PEP4 is selected from the group consisting of VVE, VVR, VVK, VAE, AVS, VVD and VEE; wherein AA²⁶ is absent or selected from the group consisting of AA^{II} amino acids, preferably absent or E; wherein AA²⁷ and AA²⁸ are independently selected from the group consisting of AA^{III} and AA^{V} amino acids, preferably AA²⁷ is selected from the group consisting of D, E, N, G and M, preferably AA²⁸ is M or I; wherein AA²⁹ is absent or selected from the group consisting of AA^{II} amino acids, preferably absent or S. In one particular example, PEP6 is selected from the group consisting of DMVVE, EMVVE, NMVVR, NMVVK, EGMSVAE, EGMAVS, GMVVD and DMIVEE.

[0575] In certain embodiments useful for inducing differentiation of mensenchymal or progenitor stem cells from the renal cell lineage, promoting renal cell regeneration and/or renal functions and protecting from renal cell degeneration-related conditions or diseases, PEP7 is an amino acid or a peptide with between two and seven amino acids of general formula AA¹-AA²-AA³-AA⁴-AA⁵-AA⁶-AA⁷; wherein AA¹, AA², AA³, AA⁴, and AA⁵ are independently absent or AA^{I} as defined herein; wherein AA⁶ is absent or selected from the group consisting of S, T, C, E, Q, P and R, preferably is S or C; wherein AA⁷ is absent or is selected from the group consisting of S, T, C, E, Q, P and R, preferably is S or C; and wherein at least one of AA¹, AA², AA³, AA⁴, AA⁵, AA⁶ or AA⁷ is not absent. In one particular example, PEP7 is selected from the group consisting of KIPKAXX, SIPKAXX, HVTKPTX, YVPKPXX, TVPKPXX, AVPKAXX, KVGKAXX, KASKAXX, GSAGPXX, AAPAXXS, STPPTXX, HVPKPXX and RVPSTXX.

[0576] In certain embodiments useful for inducing differentiation of mensenchymal or progenitor stem cells from the renal cell lineage, promoting renal cell regeneration and/or renal functions and protecting from renal cell degeneration-related conditions or diseases, PEP8 is an amino acid or a peptide with between two and six amino acids of general formula AA³³-AA³⁴-AA³⁵-AA³⁶-AA³⁷-AA³⁸; wherein AA³³ is absent or is selected from the group consisting of AA^{I} amino acids at the exception of AA^{VI} amino acids, in particular is absent or is selected from the group consisting of G, S, A, E and R; AA³⁴ is absent or is selected from the group consisting of AA^{III} and AA^{V} amino acids, in particular is absent; wherein AA³⁵ is absent or is selected from the group consisting of AA^{II} amino acids, preferably is S or C; wherein AA³⁶ is absent or is selected from the group consisting of AA^{II} and AA^{IV} amino acids; wherein AA³⁷ is absent or is selected from the group consisting of AA^{II} amino acids, preferably is S or C; wherein AA³⁸ is absent or is selected from the group consisting of AA^{I}, in particular is selected from the group consisting of R, H, S and L; and wherein at least one of AA³³, AA³⁴, AA³⁵, AA³⁶, AA³⁷ or AA³⁸ is not absent. In one particular example, PEP8 is selected from the group consisting of GXGXR, SXGXH, AXGXH, XGXR, EXGXR, RXGXS, AXGXR, SXGXR and XGXL.

[0577] In certain embodiments useful for inducing differentiation of mensenchymal or progenitor stem cells from the renal cell lineage, promoting renal cell regeneration and/or renal functions and protecting from renal cell degeneration-related conditions or diseases, PEP9 is a peptide of general formula AA¹-AA²-AA³-AA⁴-AA⁵-AA⁶-AA⁷-PEP5; wherein PEP5 is a peptide of formula PEP3-AA¹¹-AA¹²; wherein PEP3 is selected from the group consisting of VPT, APT, TPT, VPA and APV; wherein AA¹¹ is selected from the group consisting of E, K, Q, R, A, D, G and H, in particular is E, K, Q and R; wherein AA¹² is selected from the group consisting of L, M, T, E, Q and H, in particular is L, M or T; wherein AA¹, AA², AA³, AA⁴, and AA⁵ are independently absent or AA^{I} as defined herein; wherein AA⁶ is absent or selected from the group consisting of S, T, C, E, Q, P and R, preferably is S or C; wherein AA⁷ is selected from the group consisting of S, T, C, E, Q, P and R, preferably is S or C. In one particular example, PEP9 is selected from the group consisting of KIPKAXXVPTEL, SIPKAXXVPTEL, HVTKPTXAPTKL, YVPKPXXAPTKL, TVPKPXXAPTQL, AVPKAXXAPTKL, KVGKAXXVPTKL, KASKAXXVPTKL, GSAGPXXTPTKL, AAPASXXVPARL, STPPTXXVPTRL, HVPKPXXAPTKL and RVPSTXXAPVKT.

[0578] In certain embodiments useful for inducing differentiation of mensenchymal or progenitor stem cells from the renal cell lineage, promoting renal cell regeneration and/or renal functions and protecting from renal cell degeneration-related conditions or diseases, PEP10 is a peptide of general formula PEP6-AA³³-AA³⁴-A³⁵-AA³⁶-AA³⁷-AA³⁸; wherein PEP6 is a peptide of formula AA²⁶-AA²⁷-AA²⁸-AA²⁹-PEP4; wherein PEP4 is selected from the group consisting of VVE, VVR, VVK, VAE, AVS, VVD and VEE; wherein AA²⁶ is absent or selected from the group consisting of AA^{II} amino acids, preferably absent or E; wherein AA²⁷ and AA²⁸ are independently selected from the group consisting of AA^{II} and AA^{V} amino acids, preferably AA²⁷ is selected from the group consisting of D, E, N, G and M, preferably AA²⁸ is M or I; wherein AA²⁹ is absent or selected from the group consisting of AA^{II} amino acids, preferably absent or S; wherein AA³³ is absent or is selected from the group consisting of AA^{I} amino acids at the exception of AA^{VI} amino acids, in particular is absent or is selected from the group consisting of G, S, A, E and R; AA³⁴ is absent or is selected from the group consisting of AA^{II} and AA^{V} amino acids, in particular is absent; wherein AA³⁵ is absent or is selected from the group consisting of AA^{II} amino acids, preferably is S or C; wherein AA³⁶ is absent or is selected from the group consisting of AA^{III} and AA^{V} amino acids; wherein AA³⁷ is absent or is selected from the group consisting of AA^{II} amino acids, preferably is S or C; wherein AA³⁸ is absent or is selected from the group consisting of AA^{I}, in particular is selected from the group consisting of R, H, S and L. In one particular example, PEP10 is selected from the group consisting of DMVVEGXGXR, EMVVEGXGXR, NMVVRSXGXH, NMVVRAXGXH, NMVVKAXGXH, EGMSVAEXGXR, GMAVSEXGXR, GMVVDRXGXS, DMVVEAXGXR, DMVVESXGXR, NMVVRSXGXH and MIVEEXGXL.

[0579] In certain embodiments useful for inducing differentiation of mensenchymal or progenitor stem cells from the renal cell lineage, promoting renal cell regeneration and/or renal functions and protecting from renal cell degeneration-related conditions or diseases, PEP12 is a peptide of general formula PEP1-AA¹⁷-PEP11; wherein AA¹⁷ is selected from the group consisting of G, A, V, L, I, P, F, M, W, T and S (in particular is selected from the group consisting of M, I, L, V and T); wherein PEP1 is SPIN.

[0580] In certain embodiments useful for inducing differentiation of mensenchymal or progenitor stem cells from the renal cell lineage, promoting renal cell regeneration and/or renal functions and protecting from renal cell degeneration-related conditions or diseases, PEP11 is a peptide with 3 amino acids of general formula AA¹⁸-AA¹⁹-AA²⁰; wherein AA¹⁸ is selected from the group consisting of L, V, Q, A and R, in particular is L; wherein AA¹⁹ is selected from the group consisting of F, W, H and Y, in particular is Y or F; wherein AA²⁰ is selected from the group consisting of L, F, Y, K, I, V and M, in particular is selected from the group consisting of L, F, Y, K, I and V. In one particular example, PEP11 is LYF.

[0581] The definitions of “PEP” pairs, quadruplets, hexaplets and heptuplet e.g. PEP1:PEP2, PEP12:PEP2, or PEP7:PEP5:PEP12:LINKER:PEP2:PEP6:PEP8, most particularly useful for inducing differentiation of mensenchymal or progenitor stem cells from the renal cell lineage, promoting renal cell regeneration and/or renal functions and protecting from renal cell degeneration-related conditions or diseases, are as already defined herein to the extent that PEP1 to PEP12 are particularly useful for these applications. For instances:

[0582] In certain embodiments useful for inducing differentiation of mensenchymal or progenitor stem cells from the renal cell lineage, promoting renal cell regeneration and/or renal functions and protecting from renal cell degeneration-related conditions or diseases, PEP3 is selected from the group consisting of VPT, APT, TPT, VPA and APV; PEP4 is selected from the group consisting of VVE, VVR, VVK, VAE, AVS, VVD and VEE; and wherein the pair PEP3:PEP4 is selected from the group consisting of VPT:VVE, APT:VVR, APT:VVK, VPT:VAE, VPT:AVS, TPT:VVD, VPA:VVE and APV:VEE.

[0583] In certain embodiments useful for inducing differentiation of mensenchymal or progenitor stem cells from the renal cell lineage, promoting renal cell regeneration and/or renal functions and protecting from renal cell degeneration-related conditions or diseases, PEP5 is selected from the group consisting of VPTEL, APTKL, APTQL, VPTKL, TPTKM, VPARL, VPTRL and APVKT; PEP6 is selected from the group consisting of DMVVE, EMVVE, NMVVR, NMVVK, EGMSVAE, EGMAVS, GMVVD and DMIVEE; and wherein the pair PEP5:PEP6 is selected from the group consisting of VPTEL:DMVVE, VPTEL:EMVVE, APTKL:NMVVR, APTQL:NMVVR, APTKL:NMVVK, VPTKL:EGMSVAE, VPTKL:EGMAVS, TPTKM:GMVVD, VPARL:DMVVE, VPTRL:DMVVE, APTKL:NMVVR and APVKT:DMIVEE.

[0584] In certain embodiments useful for inducing differentiation of mensenchymal or progenitor stem cells from the renal cell lineage, promoting renal cell regeneration and/or renal functions and protecting from renal cell degeneration-related conditions or diseases, PEP7 is selected from the group consisting of KIPKAXX, SIPKAXX, HVTKPTX, YVPKPXX, TVPKPXX, AVPKAXX, KVGKAXX, KASKAXX, GSAGPXX, AAPAXXS, STPPTXX, HVPKPXX and RVPSTXX; wherein PEP8 is selected from the group consisting of GXGXR, SXGXH, AXGXH, XGXR, EXGXR, RXGXS, AXGXR, SXGXR and XGXL; and wherein the pair PEP7:PEP8 is selected from the group consisting of KIPKAXX:GXGXR, SIPKAXX:GXGXR, HVTKPTX:SXGXH, YVPKPXX:SXGXH, TVPKPXX:AXGXH, AVPKAXX:AXGXH, KVGKAXX:XGXR, KASKAXX:EXGXR, GSAGPXX:RXGXS, AAPASXX:AXGXR, STPPTXX:SXGXR, HVPKPXX:SXGXH and RVPSTXX:XGXL.

[0585] In certain embodiments useful for inducing differentiation of mensenchymal or progenitor stem cells from the renal cell lineage, promoting renal cell regeneration and/or renal functions and protecting from renal cell degeneration-related conditions or diseases, PEP9 is selected from the group consisting of KIPKAXXVPTEL, SIPKAXXVPTEL, HVTKPTXAPTKL, YVPKPXXAPTKL, TVPKPXXAPTQL, AVPKAXXAPTKL, KVGKAXXVPTKL, KASKAXXVPTKL, GSAGPXXTPTKL, AAPASXXVPARL, STPPTXXVPTRL, HVPKPXXAPTKL and RVPSTXXAPVKT; PEP10 is selected from the group consisting of DMVVEGXGXR, EMVVEGXGXR, NMVVRSXGXH, NMVVRAXGXH, NMVVKAXGXH, EGMSVAEXGXR, GMAVSEXGXR, GMVVDRXGXS, DMVVEAXGXR, DMVVESXGXR, NMVVRSXGXH and MIVEEXGXL; and wherein the pair PEP9:PEP10 is selected from the group consisting of KIPKAXXVPTEL:DMVVEGXGXR, SIPKAXXVPTEL:EMVVEGXGXR, HVTKPTXAPTKL:NMVVRSXGXH, YVPKPXXAPTKL:NMVVRSXGXH, TVPKPXXAPTQL:NMVVRAXGXH, AVPKAXXAPTKL:NMVVKAXGXH, KVGKAXXVPTKL:EGMSVAEXGXR, KASKAXXVPTKL:GMAVSEXGXR, GSAGPXXTPTKM:GMVVDRXGXS, AAPASXXVPARL:DMVVEAXGXR, STPPTXXVPTRL:DMVVESXGXR, HVPKPXXAPTKL:NMVVRSXGXH and RVPSTXXAPVKT:MIVEEXGXL.

[0586] In certain embodiments useful for inducing differentiation of mensenchymal or progenitor stem cells from the renal cell lineage, promoting renal cell regeneration and/or renal functions and protecting from renal cell degeneration-related conditions or diseases, PEP5 is selected from the group consisting of VPTEL, APTKL, APTQL, VPTKL, VPARL, VPQAL, VSQDL and VPQDL; PEP6 is selected from the group consisting of DMVVE, EMVVE, NMVVR, NMVVK, EGMSVAE, GMAVS, DMVVE, MIVRS, MIVKS and MVVKS; and wherein the pair PEP5:PEP6 is selected from the group consisting of VPTEL:DMVVE, VPTEL:EMVVE, APTKL:NMVVR, APTQL:NMVVR, APTKL:NMVVK, VPTKL:EGMSVAE, VPTKL:EGMAVS, TPTKM:GMVVD, VPARL:DMVVE, VPTRL:DMVVE, APTKL:NMVVR and APVKT:DMIVEE; and wherein the pair PEP5:PEP6 is not TPTKM:GMVVD when PEP1 is SPIN and PEP2 is YGKIP.

[0587] In certain embodiments useful for inducing differentiation of mensenchymal or progenitor stem cells from the renal cell lineage, promoting renal cell regeneration and/or renal functions and protecting from renal cell degeneration-related conditions or diseases, PEP9 is selected from the group consisting of KIPKAXXVPTEL, SIPKAXXVPTEL, HVTKPTXAPTKL, YVPKPXXAPTKL, TVPKPXXAPTQL, AVPKAXXAPTKL, KVGKAXXVPTKL, KASKAXXVPTKL, GSAGPXXTPTKL, AAPASXXVPARL, STPPTXXVPTRL, HVPKPXXAPTKL and RVPSTXXAPVKT; PEP10 is selected from the group consisting of DMVVEGXGXR, EMVVEGXGXR, NMVVRSXGXH, NMVVRAXGXH, NMVVKAXGXH, EGMSVAEXGXR, GMAVSEXGXR, GMVVDRXGXS, DMVVEAXGXR, DMVVESXGXR, NMVVRSXGXH and MIVEEXGXL; and wherein the pair PEP9:PEP10 is selected from the group consisting of KIPKAXXVPTEL:DMVVEGXGXR, SIPKAXXVPTEL:EMVVEGXGXR, HVTKPTXAPTKL:NMVVRSXGXH, YVPKPXXAPTKL:NMVVRSXGXH, TVPKPXXAPTQL:NMVVRAXGXH, AVPKAXXAPTKL:NMVVKAXGXH, KVGKAXXVPTKL:EGMSVAEXGXR, KASKAXXVPTKL:GMAVSEXGXR, GSAGPXXTPTKM:GMVVDRXGXS, AAPASXXVPARL:DMVVEAXGXR, STPPTXXVPTRL:DMVVESXGXR, HVPKPXXAPTKL:NMVVRSXGXH and RVPSTXXAPVKT:MIVEEXGXL; and wherein PEP9:PEP10 is not GSAGPXXTPTKM:GMVVDRXGXS when PEP1 is SPIN and PEP2 is YGKIP.

[0588] In certain embodiments useful for inducing differentiation of mensenchymal or progenitor stem cells from the renal cell lineage, promoting renal cell regeneration and/or renal functions and protecting from renal cell degeneration-related conditions or diseases, PEP1 is SPIN and PEP11 is LYF.

[0589] In one aspect, the present disclosure provides a GFR-binding compound, wherein said GFR-binding compound is a peptide, a variant or analog thereof, or a peptidomimetic as defined herein, with between 20 and 60 (in particular between 20 and 50, and more particularly, between 20 and 45) amino acids, comprising a peptide with four amino acids (PEP1) or a peptide with eight amino acids (PEP12), a peptide with five amino acids (PEP2), and optionally a pair of peptides selected form the group consisting of PEP3:PEP4, PEP3:PEP6, PEP3:PEP10, PEP5:PEP4, PEP9:PEP4, PEP5:PEP6, PEP5:PEP10, PEP9:PEP6 and PEP9:PEP10; wherein said GFR-binding compound does not comprise the pair of peptides TPTKM:GMVVD when PEP1 is SPIN and PEP2 is YGKIP; and wherein the RMSD is 2.45 Å or less.

[0590] In one aspect, the present disclosure provides a GFR-binding compound, wherein said GFR-binding compound is a peptide, a variant or analog thereof, or a peptidomimetic as defined herein, with between 20 and 60 (in particular between 20 and 50, and more particularly, between 20 and 45) amino acids, comprising a peptide with four amino acids (PEP1) or a peptide with eight amino acids (PEP12), a peptide with five amino acids (PEP2), and optionally a pair of peptides selected form the group consisting of PEP3:PEP4, PEP3:PEP6, PEP3:PEP10, PEP5:PEP4, PEP9:PEP4, PEP5:PEP6, PEP5:PEP10, PEP9:PEP6 and PEP9:PEP10; wherein said GFR-binding compound does not comprise the pair of peptides GSAGPXXTPTKM:GMVVDRXGXS when PEP1 is SPIN and PEP2 is YGKIP; and wherein the RMSD is 2.45 Å or less.

[0591] In certain embodiments useful for inducing differentiation of mensenchymal or progenitor stem cells from the renal cell lineage, promoting renal cell regeneration and/or renal functions and protecting from renal cell degeneration-related conditions or diseases, said GFR-binding compound is a synthetic molecule as defined herein in the definition section.

[0592] In certain embodiments useful for inducing differentiation of mensenchymal or progenitor stem cells from the renal cell lineage, promoting renal cell regeneration and/or renal functions and protecting from renal cell degeneration-related conditions or diseases, said GFR-binding compound is a synthetic peptide, or a variant or analog thereof, or a peptidomimetic.

### Ligaments and Tendons

[0593] Certain embodiments of the invention are particularly useful for inducing differentiation of mensenchymal or progenitor stem cells from the ligament and tendon (L/T) cell lineage, promoting fibrous tissue formation and T/L regeneration and protecting from L/T cell degeneration and L/T cell degeneration-related diseases, conditions, disorders or pathologies.

[0594] In certain embodiments useful for inducing differentiation of mensenchymal or progenitor stem cells from the ligament and tendon (L/T) cell lineage, promoting fibrous tissue formation and T/L regeneration and protecting from L/T cell degeneration and L/T cell degeneration-related diseases, conditions, disorders or pathologies, PEP1 is selected from the group consisting of NAIS, SPIS, EPLP and EPLT.

[0595] In certain embodiments useful for inducing differentiation of mensenchymal or progenitor stem cells from the ligament and tendon (L/T) cell lineage, promoting fibrous tissue formation and T/L regeneration and protecting from L/T cell degeneration and L/T cell degeneration-related diseases, conditions, disorders or pathologies, PEP2 is selected from the group consisting of LKKYR, YKQYE and EQLSN.

[0596] In certain embodiments useful for inducing differentiation of mensenchymal or progenitor stem cells from the ligament and tendon (L/T) cell lineage, promoting fibrous tissue formation and T/L regeneration and protecting from L/T cell degeneration and L/T cell degeneration-related diseases, conditions, disorders or pathologies, PEP3 is selected from the group consisting of VPT, APT, VPQ and VSQ.

[0597] In certain embodiments useful for inducing differentiation of mensenchymal or progenitor stem cells from the ligament and tendon (L/T) cell lineage, promoting fibrous tissue formation and T/L regeneration and protecting from L/T cell degeneration and L/T cell degeneration-related diseases, conditions, disorders or pathologies, PEP4 is selected from the group consisting of VVE, VVR, VRS, VKS and VVK.

[0598] In certain embodiments useful for inducing differentiation of mensenchymal or progenitor stem cells from the ligament and tendon (L/T) cell lineage, promoting fibrous tissue formation and T/L regeneration and protecting from L/T cell degeneration and L/T cell degeneration-related diseases, conditions, disorders or pathologies, PEP5 is a peptide of general formula PEP3-AA¹¹-AA¹²; wherein PEP3 is selected from the group consisting of VPT, APT, VPQ and VSQ; wherein AA¹¹ is selected from the group consisting of E, K, Q, R, A, D, G and H, in particular is E, K, Q, R, A and D; wherein AA¹² is selected from the group consisting of L, M, T, E, Q and H, in particular is L. In one particular example, PEP5 is selected from the group consisting of VPTEL, APTKL, APTQL, VPTRL, VPQAL, VSQDL and VPQDL.

[0599] In certain embodiments useful for inducing differentiation of mensenchymal or progenitor stem cells from the ligament and tendon (L/T) cell lineage, promoting fibrous tissue formation and T/L regeneration and protecting from L/T cell degeneration and L/T cell degeneration-related diseases, conditions, disorders or pathologies, PEP6 is a peptide of general formula AA²⁶-AA²⁷-AA²⁸-AA²⁹-PEP4; wherein PEP4 is selected from the group consisting of VVE, VVR, VRS, VKS and VVK; wherein AA²⁶ is absent or selected from the group consisting of AA^{III} amino acids, preferably is absent; wherein AA²⁷ and AA²⁸ are independently selected from the group consisting of AA^{III} and AA^{V} amino acids, preferably AA²⁷ is selected from the group consisting of D, E, N and M, preferably AA²⁸ is selected from the group consisting of M, I and V; wherein AA²⁹ is absent or selected from the group consisting of AA^{II} amino acids, preferably is absent. In one particular example, PEP6 is selected from the group consisting of DMVVE, EMVVE, NMVVR, DMVVE, MIVRS, MIVKS and NMVVK.

[0600] In certain embodiments useful for inducing differentiation of mensenchymal or progenitor stem cells from the ligament and tendon (L/T) cell lineage, promoting fibrous tissue formation and T/L regeneration and protecting from L/T cell degeneration and L/T cell degeneration-related diseases, conditions, disorders or pathologies, PEP7 is an amino acid or a peptide with between two and seven amino acids of general formula AA¹-AA²-AA³-AA⁴-AA⁵-AA⁶-AA⁷; wherein AA¹, AA², AA³, AA⁴, and AA⁵ are independently absent or AA^{I} as defined herein; wherein AA⁶ is absent or selected from the group consisting of S, T, C, E, Q, P and R, preferably is selected from the group consisting of T, S and C; wherein AA⁷ is absent or is selected from the group consisting of S, T, C, E, Q, P and R, preferably S or C; and wherein at least one of AA¹, AA², AA³, AA⁴, AA⁵, AA⁶ or AA⁷ is not absent. In one particular example, PEP7 is selected from the group consisting of KIPKAXX, SIPKAXX, HVTKPTX, YVPKPXX, TVPKPXX, STPPTXX, ASAAPXX and ASASPXX.

[0601] In certain embodiments useful for inducing differentiation of mensenchymal or progenitor stem cells from the ligament and tendon (L/T) cell lineage, promoting fibrous tissue formation and T/L regeneration and protecting from L/T cell degeneration and L/T cell degeneration-related diseases, conditions, disorders or pathologies, PEP8 is an amino acid or a peptide with between two and six amino acids of general formula AA³³-AA³⁴-AA³⁵-AA³⁶-AA³⁷-AA³⁸; wherein AA³³ is absent or is selected from the group consisting of AA^{I} amino acids at the exception of AA^{VI} amino acids, in particular is absent or is selected from the group consisting of G, S and A; AA³⁴ is absent or is selected from the group consisting of AA^{III} and AA^{IV} amino acids, in particular is absent; wherein AA³⁵ is absent or is selected from the group consisting of AA^{II} amino acids, preferably is S or C; wherein AA³⁶ is absent or is selected from the group consisting of AA^{III} and AA^{IV} amino acids, in particular is G or K; wherein AA³⁷ is absent or is selected from the group consisting of AA^{II} amino acids, preferably is S or C; wherein AA³⁸ is absent or is selected from the group consisting of AA^{I}, in particular is selected from the group consisting of R, H and S; and wherein at least one of AA³³, AA³⁴, AA³⁵, AA³⁶, AA³⁷ or AA³⁸ is not absent. In one particular example, PEP8 is selected from the group consisting of GXGXR, SXGXH, AXGXH, SXGXR, XKXS and SXKXS.

[0602] In certain embodiments useful for inducing differentiation of mensenchymal or progenitor stem cells from the ligament and tendon (L/T) cell lineage, promoting fibrous tissue formation and T/L regeneration and protecting from L/T cell degeneration and L/T cell degeneration-related diseases, conditions, disorders or pathologies, PEP9 is a peptide of general formula AA¹-AA²-AA³-AA⁴-AA⁵-AA⁶-AA⁷-PEP5; wherein PEP5 is a peptide of formula PEP3-AA-AA¹²; wherein PEP3 is selected from the group consisting of VPT, APT, VPQ and VSQ; wherein AA¹¹ is selected from the group consisting of E, K, Q, R, A, D, G and H, in particular is E, K, Q, R, A and D; wherein AA¹² is selected from the group consisting of L, M, T, E, Q and H, in particular is L; wherein AA¹, AA², AA³, AA⁴, and AA⁵ are independently absent or AA^{I} as defined herein; wherein AA⁶ is absent or selected from the group consisting of S, T, C, E, Q, P and R, preferably is selected from the group consisting of T, S and C; wherein AA⁷ is selected from the group consisting of S, T, C, E, Q, P and R, preferably S or C. In one particular example, PEP9 is selected from the group consisting of KIPKAXXVPTEL, SIPKAXXVPTEL, HVTKPTXAPTKL, YVPKPXXAPTKL, TVPKPXXAPTQL, STPPTXXVPTRL, ASAAPXXVPQAL, ASASPXXVSQDL and ASASPXXVPQDL.

[0603] In certain embodiments useful for inducing differentiation of mensenchymal or progenitor stem cells from the ligament and tendon (L/T) cell lineage, promoting fibrous tissue formation and T/L regeneration and protecting from L/T cell degeneration and L/T cell degeneration-related diseases, conditions, disorders or pathologies, PEP10 is a peptide of general formula PEP6-AA³³-AA³⁴-AA³⁵-AA³⁶-AA³⁷-AA³⁸; wherein PEP6 is a peptide of formula AA²⁶-AA²⁷-AA²⁸-AA²⁹-PEP4; wherein PEP4 is selected from the group consisting of VVE, VVR, VRS, VKS and VVK; wherein AA²⁶ is absent or selected from the group consisting of AA^{II} amino acids, preferably is absent; wherein AA²⁷ and AA²⁸ are independently selected from the group consisting of AA^{III} and AA^{V} amino acids, preferably AA²⁷ is selected from the group consisting of D, E, N and M, preferably AA²⁸ is selected from the group consisting of M, I and V; wherein AA²⁹ is absent or selected from the group consisting of AA^{II} amino acids, preferably is absent; wherein AA³³ is absent or is selected from the group consisting of AA^{I} amino acids at the exception of AA^{VI} amino acids, in particular is absent or is selected from the group consisting of G, S and A; AA³⁴ is absent or is selected from the group consisting of AA^{II} and AA^{IV} amino acids, in particular is absent; wherein AA³⁵ is absent or is selected from the group consisting of AA^{II} amino acids, preferably is S or C; wherein AA³⁶ is absent or is selected from the group consisting of AA^{III} and AA^{V} amino acids, in particular is G or K; wherein AA³⁷ is absent or is selected from the group consisting of AA^{II} amino acids, preferably is S or C; wherein AA³⁸ is absent or is selected from the group consisting of AA^{I}, in particular is selected from the group consisting of R, H and S. In one particular example, PEP10 is selected from the group consisting of DMVVEGXGXR, EMVVEGXGXR, NMVVRSXGXH, NMVVRAXGXH, DMVVESXGXR, MIVRSXKXS, MIVKSXKXS and MVVKSXKXS.

[0604] In certain embodiments useful for inducing differentiation of mensenchymal or progenitor stem cells from the ligament and tendon (L/T) cell lineage, promoting fibrous tissue formation and T/L regeneration and protecting from L/T cell degeneration and L/T cell degeneration-related diseases, conditions, disorders or pathologies, PEP12 is a peptide of general formula PEP1-AA¹⁷-PEP11; wherein AA¹⁷ is selected from the group consisting of G, A, V, L, I, P, F, M, W, T and S (in particular is selected from the group consisting of M, I, L, V and T); wherein PEP1 is selected from the group consisting of NAIS, SPIS, EPLP and EPLT.

[0605] In certain embodiments useful for inducing differentiation of mensenchymal or progenitor stem cells from the ligament and tendon (L/T) cell lineage, promoting fibrous tissue formation and T/L regeneration and protecting from L/T cell degeneration and L/T cell degeneration-related diseases, conditions, disorders or pathologies, PEP11 is a peptide with 3 amino acids of general formula AA¹⁸-AA¹⁹-AA²⁰; wherein AA¹⁸ is selected from the group consisting of L, V, Q, A and R, in particular is L or V; wherein AA¹⁹ is selected from the group consisting of F, W, H and Y, in particular is Y or F; wherein AA²⁰ is selected from the group consisting of L, F, Y, K, I, V and M, in particular is selected from the group consisting of F, I and Y. In one particular example, PEP11 is selected from the group consisting of LYF, LFI, VYY and LYY.

[0606] The definitions of “PEP” pairs, quadruplets, hexaplets and heptuplet e.g. PEP1:PEP2, PEP12:PEP2, or PEP7:PEP5:PEP12:LINKER:PEP2:PEP6:PEP8, most particularly useful for inducing differentiation of mensenchymal or progenitor stem cells from the ligament and tendon (L/T) cell lineage, promoting fibrous tissue formation and T/L regeneration and protecting from L/T cell degeneration and L/T cell degeneration-related diseases, conditions, disorders or pathologies, are as already defined herein to the extent that PEP1 to PEP12 are particularly useful for these applications. For instances:

[0607] In certain embodiments useful for inducing differentiation of mensenchymal or progenitor stem cells from the ligament and tendon (L/T) cell lineage, promoting fibrous tissue formation and T/L regeneration and protecting from L/T cell degeneration and L/T cell degeneration-related diseases, conditions, disorders or pathologies, the pair PEP1:PEP2 is selected from the group consisting of NAIS:LKKYR, SPIS:YKQYE, EPLP:EQLSN and EPLT:EQLSN.

[0608] In certain embodiments useful for inducing differentiation of mensenchymal or progenitor stem cells from the ligament and tendon (L/T) cell lineage, promoting fibrous tissue formation and T/L regeneration and protecting from L/T cell degeneration and L/T cell degeneration-related diseases, conditions, disorders or pathologies, the pair PEP12:PEP2 is selected from the group consisting of NAIS-AA¹⁷-LYF:LKKYR, SPIS-AA¹⁷-LFI:YKQYE, EPLP-AA¹⁷-VYY:EQLSN and EPLT-AA¹⁷-LYY:EQLSN; wherein AA¹⁷ is selected from the group consisting of G, A, V, L, I, P, F, M, W, T and S (in particular is selected from the group consisting of V, I and T).

[0609] In certain embodiments useful for inducing differentiation of mensenchymal or progenitor stem cells from the ligament and tendon (L/T) cell lineage, promoting fibrous tissue formation and T/L regeneration and protecting from L/T cell degeneration and L/T cell degeneration-related diseases, conditions, disorders or pathologies, PEP3 is selected from the group consisting of VPT, APT, VPQ and VSQ; PEP4 is selected from the group consisting of VVE, VVR, VRS, VKS and VVK; and wherein the pair PEP3:PEP4 is selected from the group consisting of VPT:VVE, APT:VVR, VPT:VVE, VPQ:VRS, VSQ:VKS and VPQ:VVK.

[0610] In certain embodiments useful for inducing differentiation of mensenchymal or progenitor stem cells from the ligament and tendon (L/T) cell lineage, promoting fibrous tissue formation and T/L regeneration and protecting from L/T cell degeneration and L/T cell degeneration-related diseases, conditions, disorders or pathologies, PEP5 is selected from the group consisting of VPTEL, APTKL, APTQL, VPTRL, VPQAL, VSQDL and VPQDL; PEP6 is selected from the group consisting of DMVVE, EMVVE, NMVVR, DMVVE, MIVRS, MIVKS and NMVVK; and wherein the pair PEP5:PEP6 is selected from the group consisting of VPTEL:DMVVE, VPTEL:EMVVE, APTKL:NMVVR, APTQL:NMVVR, VPTRL:DMVVE, VPQAL:MIVRS, VSQDL:MIVKS and VPQDL:NMVVK.

[0611] In certain embodiments useful for inducing differentiation of mensenchymal or progenitor stem cells from the ligament and tendon (L/T) cell lineage, promoting fibrous tissue formation and T/L regeneration and protecting from L/T cell degeneration and L/T cell degeneration-related diseases, conditions, disorders or pathologies, PEP7 is selected from the group consisting of KIPKAXX, SIPKAXX, HVTKPTX, YVPKPXX, TVPKPXX, STPPTXX, ASAAPXX and ASASPXX; wherein PEP8 is selected from the group consisting of GXGXR, SXGXH, AXGXH, SXGXR, XKXS and SXKXS; and wherein the pair PEP7:PEP8 is selected from the group consisting of KIPKAXX:GXGXR, SIPKAXX:GXGXR, HVTKPTX:SXGXH, YVPKPXX:SXGXH, TVPKPXX:AXGXH, STPPTXX:SXGXR, ASAAPXX:XKXS and ASASPXX:XKXS.

[0612] In certain embodiments useful for inducing differentiation of mensenchymal or progenitor stem cells from the ligament and tendon (L/T) cell lineage, promoting fibrous tissue formation and T/L regeneration and protecting from L/T cell degeneration and L/T cell degeneration-related diseases, conditions, disorders or pathologies, PEP9 is selected from the group consisting of KIPKAXXVPTEL, SIPKAXXVPTEL, HVTKPTXAPTKL, YVPKPXXAPTKL, TVPKPXXAPTQL, STPPTXXVPTRL, ASAAPXXVPQAL, ASASPXXVSQDL and ASASPXXVPQDL; PEP10 is selected from the group consisting of DMVVEGXGXR, EMVVEGXGXR, NMVVRSXGXH, NMVVRAXGXH, DMVVESXGXR, MIVRSXKXS, MIVKSXKXS and MVVKSXKXS; and wherein the pair PEP9:PEP10 is selected from the group consisting of KIPKAXXVPTEL:DMVVEGXGXR, SIPKAXXVPTEL:EMVVEGXGXR, HVTKPTXAPTKL:NMVVRSXGXH, YVPKPXXAPTKL:NMVVRSXGXH, TVPKPXXAPTQL:NMVVRAXGXH, STPPTXXVPTRL:DMVVESXGXR, ASAAPXXVPQAL:MIVRSXKXS, ASASPXXVSQDL:MIVKSXKXS and ASASPXXVPQDL:MVVKSXKXS.

[0613] In certain embodiments useful for inducing differentiation of mensenchymal or progenitor stem cells from the ligament and tendon (L/T) cell lineage, promoting fibrous tissue formation and T/L regeneration and protecting from L/T cell degeneration and L/T cell degeneration-related diseases, conditions, disorders or pathologies, PEP5 is selected from the group consisting of VPTEL, APTKL, APTQL, VPTRL, VPQAL, VSQDL and VPQDL; PEP6 is selected from the group consisting of DMVVE, EMVVE, NMVVR, DMVVE, MIVRS, MIVKS and NMVVK; and wherein the pair PEP5:PEP6 is selected from the group consisting of VPTEL:DMVVE, VPTEL:EMVVE, APTKL:NMVVR, APTQL:NMVVR, VPTRL:DMVVE, VPQAL:MIVRS, VSQDL:MIVKS and VPQDL:NMVVK; wherein the pair PEP5:PEP6 is not APTQL:NMVVR when PEP1 is NAIS and PEP2 is LKKYR; wherein the pair PEP5:PEP6 is not VPTRL:DMVVE when PEP1 is SPIS and PEP2 is YKQYE; wherein the pair PEP5:PEP6 is not VPQAL:MIVRS when PEP1 is EPLP and PEP2 is EQLSN; wherein the pair PEP5:PEP6 is not VSQDL:MIVKS when PEP1 is EPLT and PEP2 is EQLSN; and wherein the pair PEP5:PEP6 is not VPQDL:NMVVK when PEP1 is EPLT and PEP2 is EQLSN.

[0614] In certain embodiments useful for inducing differentiation of mensenchymal or progenitor stem cells from the ligament and tendon (L/T) cell lineage, promoting fibrous tissue formation and T/L regeneration and protecting from L/T cell degeneration and L/T cell degeneration-related diseases, conditions, disorders or pathologies, PEP9 is selected from the group consisting of KIPKAXXVPTEL, SIPKAXXVPTEL, HVTKPTXAPTKL, YVPKPXXAPTKL, TVPKPXXAPTQL, STPPTXXVPTRL, ASAAPXXVPQAL, ASASPXXVSQDL and ASASPXXVPQDL; PEP10 is selected from the group consisting of DMVVEGXGXR, EMVVEGXGXR, NMVVRSXGXH, NMVVRAXGXH, DMVVESXGXR, MIVRSXKXS, MIVKSXKXS and MVVKSXKXS; and wherein the pair PEP9:PEP10 is selected from the group consisting of KIPKAXXVPTEL:DMVVEGXGXR, SIPKAXXVPTEL:EMVVEGXGXR, HVTKPTXAPTKL:NMVVRSXGXH, YVPKPXXAPTKL:NMVVRSXGXH, TVPKPXXAPTQL:NMVVRAXGXH, STPPTXXVPTRL:DMVVESXGXR, ASAAPXXVPQAL:MIVRSXKXS, ASASPXXVSQDL:MIVKSXKXS and ASASPXXVPQDL:MVVKSXKXS;

wherein the pair PEP9:PEP10 is not TVPKPXXAPTQL:NMVVRAXGXH when PEP1 is NAIS and PEP2 is LKKYR; wherein the pair PEP9:PEP10 is not STPPTXXVPTRL:DMVVESXGXR when PEP1 is SPIS and PEP2 is YKQYE; wherein the pair PEP9:PEP10 is not ASAAPXXVPQAL:MIVRSXKXS when PEP1 is EPLP and PEP2 is EQLSN; wherein the pair PEP9:PEP10 is not ASASPXXVSQDL:MIVKSXKXS when PEP1 is EPLT and PEP2 is EQLSN; and wherein the pair PEP9:PEP10 is not ASASPXXVPQDL:MVVKSXKXS when PEP1 is EPLT and PEP2 is EQLSN.

[0615] In certain embodiments useful for inducing differentiation of mensenchymal or progenitor stem cells from the ligament and tendon (L/T) cell lineage, promoting fibrous tissue formation and T/L regeneration and protecting from L/T cell degeneration and L/T cell degeneration-related diseases, conditions, disorders or pathologies, PEP1 is selected from the group consisting of NAIS, SPIS, EPLP and EPLT; PEP11 is selected from the group consisting of LYF, LFI, VYY and LYY; and the pair PEP1:PEP11 is selected from the group consisting of NAIS:LYF, SPIS:LFI, EPLP:VYY and EPLT:LYY.

[0616] In one aspect, the present disclosure provides a GFR-binding compound, wherein said GFR-binding compound is a peptide, a variant or analog thereof, or a peptidomimetic as defined herein, with between 20 and 60 (in particular between 20 and 50, and more particularly, between 20 and 45) amino acids, comprising a peptide with four amino acids (PEP1) or a peptide with eight amino acids (PEP12), a peptide with five amino acids (PEP2), and optionally a pair of peptides selected form the group consisting of PEP3:PEP4, PEP3:PEP6, PEP3:PEP10, PEP5:PEP4, PEP9:PEP4, PEP5:PEP6, PEP5:PEP10, PEP9:PEP6 and PEP9:PEP10; wherein said GFR-binding compound does not comprise the pair of peptides APTQL:NMVVR when PEP1 is NAIS and PEP2 is LKKYR; wherein said GFR-binding compound does not comprise the pair of peptides VPTRL:DMVVE when PEP1 is SPIS and PEP2 is YKQYE; wherein said GFR-binding compound does not comprise the pair of peptides VPQAL:MIVRS when PEP1 is EPLP and PEP2 is EQLSN; wherein said GFR-binding compound does not comprise the pair of peptides VSQDL:MIVKS when PEP1 is EPLT and PEP2 is EQLSN; and wherein said GFR-binding compound does not comprise the pair of peptides VPQDL:NMVVK when PEP1 is EPLT and PEP2 is EQLSN; and wherein the RMSD is 2.45 Å or less.

[0617] In one aspect, the present disclosure provides a GFR-binding compound, wherein said GFR-binding compound is a peptide, a variant or analog thereof, or a peptidomimetic as defined herein, with between 20 and 60 (in particular between 20 and 50, and more particularly, between 20 and 45) amino acids, comprising a peptide with four amino acids (PEP1) or a peptide with eight amino acids (PEP12), a peptide with five amino acids (PEP2), and optionally a pair of peptides selected form the group consisting of PEP3:PEP4, PEP3:PEP6, PEP3:PEP10, PEP5:PEP4, PEP9:PEP4, PEP5:PEP6, PEP5:PEP10, PEP9:PEP6 and PEP9:PEP10; wherein said GFR-binding compound does not comprise the pair of peptides TVPKPXXAPTQL:NMVVRAXGXH when PEP1 is NAIS and PEP2 is LKKYR; wherein said GFR-binding compound does not comprise the pair of peptides STPPTXXVPTRL:DMVVESXGXR when PEP1 is SPIS and PEP2 is YKQYE; wherein said GFR-binding compound does not comprise the pair of peptides ASAAPXXVPQAL:MIVRSXKXS when PEP1 is EPLP and PEP2 is EQLSN; wherein said GFR-binding compound does not comprise the pair of peptides ASASPXXVSQDL:MIVKSXKXS when PEP1 is EPLT and PEP2 is EQLSN; and wherein said GFR-binding compound does not comprise the pair of peptides ASASPXXVPQDL:MVVKSXKXS when PEP1 is EPLT and PEP2 is EQLSN; and wherein the RMSD is 2.45 Å or less.

[0618] In certain embodiments useful for inducing differentiation of mensenchymal or progenitor stem cells from the ligament and tendon (L/T) cell lineage, promoting fibrous tissue formation and T/L regeneration and protecting from L/T cell degeneration and L/T cell degeneration-related diseases, conditions, disorders or pathologies, said GFR-binding compound is a synthetic molecule as defined herein in the definition section.

[0619] In certain embodiments useful for inducing differentiation of mensenchymal or progenitor stem cells from the ligament and tendon (L/T) cell lineage, promoting fibrous tissue formation and T/L regeneration and protecting from L/T cell degeneration and L/T cell degeneration-related diseases, conditions, disorders or pathologies, said GFR-binding compound is a synthetic peptide, or a variant or analog thereof, or a peptidomimetic.

[0620] In other embodiments also useful for inducing differentiation of mensenchymal or progenitor stem cells from the ligament and tendon (L/T) cell lineage, promoting fibrous tissue formation and T/L regeneration and protecting from L/T cell degeneration and L/T cell degeneration-related diseases, conditions, disorders or pathologies, PEP1 is SPIS.

[0621] In other embodiments also useful for inducing differentiation of mensenchymal or progenitor stem cells from the ligament and tendon (L/T) cell lineage, promoting fibrous tissue formation and T/L regeneration and protecting from L/T cell degeneration and L/T cell degeneration-related diseases, conditions, disorders or pathologies, PEP2 is YKQYE.

[0622] In other embodiments also useful for inducing differentiation of mensenchymal or progenitor stem cells from the ligament and tendon (L/T) cell lineage, promoting fibrous tissue formation and T/L regeneration and protecting from L/T cell degeneration and L/T cell degeneration-related diseases, conditions, disorders or pathologies, PEP3 is selected from the group consisting of VPT, APT, TPT, VPA and APV.

[0623] In other embodiments also useful for inducing differentiation of mensenchymal or progenitor stem cells from the ligament and tendon (L/T) cell lineage, promoting fibrous tissue formation and T/L regeneration and protecting from L/T cell degeneration and L/T cell degeneration-related diseases, conditions, disorders or pathologies, PEP4 is selected from the group consisting of VVE, VVR, VVK, VAE, AVS, VVD and VEE.

[0624] In other embodiments also useful for inducing differentiation of mensenchymal or progenitor stem cells from the ligament and tendon (L/T) cell lineage, promoting fibrous tissue formation and T/L regeneration and protecting from L/T cell degeneration and L/T cell degeneration-related diseases, conditions, disorders or pathologies, PEP5 is a peptide of general formula PEP3-AA¹¹-AA¹²; wherein PEP3 is selected from the group consisting of VPT, APT, TPT, VPA and APV; wherein AA¹¹ is selected from the group consisting of E, K, Q, R, A, D, G and H, in particular is selected from the group consisting of E, K, Q and R; wherein AA¹² is selected from the group consisting of L, M, T, E, Q and H, in particular is selected from the group consisting of L, M and T. In one particular example, PEP5 is selected from the group consisting of VPTEL, APTKL, APTQL, VPTKL, TPTKM, VPARL, VPTRL and APVKT.

[0625] In other embodiments also useful for inducing differentiation of mensenchymal or progenitor stem cells from the ligament and tendon (L/T) cell lineage, promoting fibrous tissue formation and T/L regeneration and protecting from L/T cell degeneration and L/T cell degeneration-related diseases, conditions, disorders or pathologies, PEP6 is a peptide of general formula AA²⁶-AA²⁷-AA²⁸-AA²⁹-PEP4; wherein PEP4 is selected from the group consisting of VVE, VVR, VVK, VAE, AVS, VVD and VEE; wherein AA²⁶ is absent or selected from the group consisting of AA^{III} amino acids, preferably absent or E; wherein AA²⁷ and AA²⁸ are independently selected from the group consisting of AA^{III} and AA^{V} amino acids, preferably AA²⁷ is selected from the group consisting of D, E, N, G and M, preferably AA²⁸ is M or I; wherein AA²⁹ is absent or selected from the group consisting of AA^{II} amino acids, preferably absent or S. In one particular example, PEP6 is selected from the group consisting of DMVVE, EMVVE, NMVVR, NMVVK, EGMSVAE, EGMAVS, GMVVD and DMIVEE.

[0626] In other embodiments also useful for inducing differentiation of mensenchymal or progenitor stem cells from the ligament and tendon (L/T) cell lineage, promoting fibrous tissue formation and T/L regeneration and protecting from L/T cell degeneration and L/T cell degeneration-related diseases, conditions, disorders or pathologies, PEP7 is an amino acid or a peptide with between two and seven amino acids of general formula AA¹-AA²-AA³-AA⁴-AA⁵-AA⁶-AA⁷; wherein AA¹, AA², AA³, AA⁴, and AA⁵ are independently absent or AA^{I} as defined herein; wherein AA⁶ is absent or selected from the group consisting of S, T, C, E, Q, P and R, preferably is S or C; wherein AA⁷ is absent or is selected from the group consisting of S, T, C, E, Q, P and R, preferably is S or C; and wherein at least one of AA¹, AA², AA³, AA⁴, AA⁵, AA⁶ or AA⁷ is not absent. In one particular example, PEP7 is selected from the group consisting of KIPKAXX, SIPKAXX, HVTKPTX, YVPKPXX, TVPKPXX, AVPKAXX, KVGKAXX, KASKAXX, GSAGPXX, AAPAXXS, STPPTXX, HVPKPXX and RVPSTXX.

[0627] In other embodiments also useful for inducing differentiation of mensenchymal or progenitor stem cells from the ligament and tendon (L/T) cell lineage, promoting fibrous tissue formation and T/L regeneration and protecting from L/T cell degeneration and L/T cell degeneration-related diseases, conditions, disorders or pathologies, PEP8 is an amino acid or a peptide with between two and six amino acids of general formula AA³³-AA³⁴-AA³⁵-AA³⁶-AA³⁷-AA³⁸; wherein AA³³ is absent or is selected from the group consisting of AA^{I} amino acids at the exception of AA^{VI} amino acids, in particular is absent or is selected from the group consisting of G, S, A, E and R; AA³⁴ is absent or is selected from the group consisting of AA^{III} and AA^{IV} amino acids, in particular is absent; wherein AA³⁵ is absent or is selected from the group consisting of AA^{II} amino acids, preferably is S or C; wherein AA³⁶ is absent or is selected from the group consisting of AA^{III} and AA^{IV} amino acids; wherein AA³⁷ is absent or is selected from the group consisting of AA^{II} amino acids, preferably is S or C; wherein AA³⁸ is absent or is selected from the group consisting of AA^{I}, in particular is selected from the group consisting of R, H, S and L; and wherein at least one of AA³³, AA³⁴, AA³⁵, AA³⁶, AA³⁷ or AA³⁸ is not absent. In one particular example, PEP8 is selected from the group consisting of GXGXR, SXGXH, AXGXH, XGXR, EXGXR, RXGXS, AXGXR, SXGXR and XGXL.

[0628] In other embodiments also useful for inducing differentiation of mensenchymal or progenitor stem cells from the ligament and tendon (L/T) cell lineage, promoting fibrous tissue formation and T/L regeneration and protecting from L/T cell degeneration and L/T cell degeneration-related diseases, conditions, disorders or pathologies, PEP9 is a peptide of general formula AA¹-AA²-AA³-AA⁴-AA⁵-AA⁶-AA⁷-PEP5; wherein PEP5 is a peptide of formula PEP3-AA¹¹-AA¹²; wherein PEP3 is selected from the group consisting of VPT, APT, TPT, VPA and APV; wherein AA¹ is selected from the group consisting of E, K, Q, R, A, D, G and H, in particular is E, K, Q and R; wherein AA¹² is selected from the group consisting of L, M, T, E, Q and H, in particular is L, M or T; wherein AA¹, AA², AA³, AA⁴, and AA⁵ are independently absent or AA^{I} as defined herein; wherein AA⁶ is absent or selected from the group consisting of S, T, C, E, Q, P and R, preferably is S or C; wherein AA⁷ is selected from the group consisting of S, T, C, E, Q, P and R, preferably is S or C. In one particular example, PEP9 is selected from the group consisting of KIPKAXXVPTEL, SIPKAXXVPTEL, HVTKPTXAPTKL, YVPKPXXAPTKL, TVPKPXXAPTQL, AVPKAXXAPTKL, KVGKAXXVPTKL, KASKAXXVPTKL, GSAGPXXTPTKL, AAPASXXVPARL, STPPTXXVPTRL, HVPKPXXAPTKL and RVPSTXXAPVKT.

[0629] In other embodiments also useful for inducing differentiation of mensenchymal or progenitor stem cells from the ligament and tendon (L/T) cell lineage, promoting fibrous tissue formation and T/L regeneration and protecting from L/T cell degeneration and L/T cell degeneration-related diseases, conditions, disorders or pathologies, PEP10 is a peptide of general formula PEP6-AA³³-AA³⁴-AA³⁵-AA³⁶-AA³⁷-AA³⁸; wherein PEP6 is a peptide of formula AA²⁶-AA²⁷-AA²⁸-AA²⁹-PEP4; wherein PEP4 is selected from the group consisting of VVE, VVR, VVK, VAE, AVS, VVD and VEE; wherein AA²⁶ is absent or selected from the group consisting of AA^{II} amino acids, preferably absent or E; wherein AA²⁷ and AA²⁸ are independently selected from the group consisting of AA^{III} and AA^{V} amino acids, preferably AA²⁷ is selected from the group consisting of D, E, N, G and M, preferably AA²⁸ is M or I; wherein AA²⁹ is absent or selected from the group consisting of AA^{II} amino acids, preferably absent or S; wherein AA³³ is absent or is selected from the group consisting of AA^{I} amino acids at the exception of AA^{VI} amino acids, in particular is absent or is selected from the group consisting of G, S, A, E and R; AA³⁴ is absent or is selected from the group consisting of AA^{III} and AA^{I}v amino acids, in particular is absent; wherein AA³⁵ is absent or is selected from the group consisting of AA^{II} amino acids, preferably is S or C; wherein AA³⁶ is absent or is selected from the group consisting of AA^{II} and AA^{IV} amino acids; wherein AA³⁷ is absent or is selected from the group consisting of AA^{II} amino acids, preferably is S or C; wherein AA³⁸ is absent or is selected from the group consisting of AA^{I}, in particular is selected from the group consisting of R, H, S and L. In one particular example, PEP10 is selected from the group consisting of DMVVEGXGXR, EMVVEGXGXR, NMVVRSXGXH, NMVVRAXGXH, NMVVKAXGXH, EGMSVAEXGXR, GMAVSEXGXR, GMVVDRXGXS, DMVVEAXGXR, DMVVESXGXR, NMVVRSXGXH and MIVEEXGXL.

[0630] In other embodiments also useful for inducing differentiation of mensenchymal or progenitor stem cells from the ligament and tendon (L/T) cell lineage, promoting fibrous tissue formation and T/L regeneration and protecting from L/T cell degeneration and L/T cell degeneration-related diseases, conditions, disorders or pathologies, PEP12 is a peptide of general formula PEP1-AA¹⁷-PEP11; wherein AA¹⁷ is selected from the group consisting of G, A, V, L, I, P, F, M, W, T and S (in particular is selected from the group consisting of M, I, L, V and T); wherein PEP1 is SPIS.

[0631] In other embodiments also useful for inducing differentiation of mensenchymal or progenitor stem cells from the ligament and tendon (L/T) cell lineage, promoting fibrous tissue formation and T/L regeneration and protecting from L/T cell degeneration and L/T cell degeneration-related diseases, conditions, disorders or pathologies, PEP11 is a peptide with 3 amino acids of general formula AA¹⁸-AA¹⁹-AA²⁰; wherein AA¹⁸ is selected from the group consisting of L, V, Q, A and R, in particular is L; wherein AA¹⁹ is selected from the group consisting of F, W, H and Y, in particular is a polar aromatic amino acid such as Y; wherein AA²⁰ is selected from the group consisting of L, F, Y, K, I, V and M, in particular is I. In one particular example, PEP11 is LYI.

[0632] The definitions of “PEP” pairs, quadruplets, hexaplets and heptuplet e.g. PEP1:PEP2, PEP12:PEP2, or PEP7:PEP5:PEP12:LINKER:PEP2:PEP6:PEP8, also useful for inducing differentiation of mensenchymal or progenitor stem cells from the ligament and tendon (L/T) cell lineage, promoting fibrous tissue formation and T/L regeneration and protecting from L/T cell degeneration and L/T cell degeneration-related diseases, conditions, disorders or pathologies, are as already defined herein to the extent that PEP1 to PEP12 are particularly useful for these applications. For instances:

[0633] In other embodiments also useful for inducing differentiation of mensenchymal or progenitor stem cells from the ligament and tendon (L/T) cell lineage, promoting fibrous tissue formation and T/L regeneration and protecting from L/T cell degeneration and L/T cell degeneration-related diseases, conditions, disorders or pathologies, PEP3 is selected from the group consisting of VPT, APT, TPT, VPA and APV; PEP4 is selected from the group consisting of VVE, VVR, VVK, VAE, AVS, VVD and VEE; and wherein the pair PEP3:PEP4 is selected from the group consisting of VPT:VVE, APT:VVR, APT:VVK, VPT:VAE, VPT:AVS, TPT:VVD, VPA:VVE and APV:VEE.

[0634] In other embodiments also useful for inducing differentiation of mensenchymal or progenitor stem cells from the ligament and tendon (L/T) cell lineage, promoting fibrous tissue formation and T/L regeneration and protecting from L/T cell degeneration and L/T cell degeneration-related diseases, conditions, disorders or pathologies, PEP5 is selected from the group consisting of VPTEL, APTKL, APTQL, VPTKL, TPTKM, VPARL, VPTRL and APVKT; PEP6 is selected from the group consisting of DMVVE, EMVVE, NMVVR, NMVVK, EGMSVAE, EGMAVS, GMVVD and DMIVEE; and wherein the pair PEP5:PEP6 is selected from the group consisting of VPTEL:DMVVE, VPTEL:EMVVE, APTKL:NMVVR, APTQL:NMVVR, APTKL:NMVVK, VPTKL:EGMSVAE, VPTKL:EGMAVS, TPTKM:GMVVD, VPARL:DMVVE, VPTRL:DMVVE, APTKL:NMVVR and APVKT:DMIVEE.

[0635] In other embodiments also useful for inducing differentiation of mensenchymal or progenitor stem cells from the ligament and tendon (L/T) cell lineage, promoting fibrous tissue formation and T/L regeneration and protecting from L/T cell degeneration and L/T cell degeneration-related diseases, conditions, disorders or pathologies, PEP7 is selected from the group consisting of KIPKAXX, SIPKAXX, HVTKPTX, YVPKPXX, TVPKPXX, AVPKAXX, KVGKAXX, KASKAXX, GSAGPXX, AAPAXXS, STPPTXX, HVPKPXX and RVPSTXX; wherein PEP8 is selected from the group consisting of GXGXR, SXGXH, AXGXH, XGXR, EXGXR, RXGXS, AXGXR, SXGXR and XGXL; and wherein the pair PEP7:PEP8 is selected from the group consisting of KIPKAXX:GXGXR, SIPKAXX:GXGXR, HVTKPTX:SXGXH, YVPKPXX:SXGXH, TVPKPXX:AXGXH, AVPKAXX:AXGXH, KVGKAXX:XGXR, KASKAXX:EXGXR, GSAGPXX:RXGXS, AAPASXX:AXGXR, STPPTXX:SXGXR, HVPKPXX:SXGXH and RVPSTXX:XGXL.

[0636] In other embodiments also useful for inducing differentiation of mensenchymal or progenitor stem cells from the ligament and tendon (L/T) cell lineage, promoting fibrous tissue formation and T/L regeneration and protecting from L/T cell degeneration and L/T cell degeneration-related diseases, conditions, disorders or pathologies, PEP9 is selected from the group consisting of KIPKAXXVPTEL, SIPKAXXVPTEL, HVTKPTXAPTKL, YVPKPXXAPTKL, TVPKPXXAPTQL, AVPKAXXAPTKL, KVGKAXXVPTKL, KASKAXXVPTKL, GSAGPXXTPTKL, AAPASXXVPARL, STPPTXXVPTRL, HVPKPXXAPTKL and RVPSTXXAPVKT; PEP10 is selected from the group consisting of DMVVEGXGXR, EMVVEGXGXR, NMVVRSXGXH, NMVVRAXGXH, NMVVKAXGXH, EGMSVAEXGXR, GMAVSEXGXR, GMVVDRXGXS, DMVVEAXGXR, DMVVESXGXR, NMVVRSXGXH and MIVEEXGXL; and wherein the pair PEP9:PEP10 is selected from the group consisting of KIPKAXXVPTEL:DMVVEGXGXR, SIPKAXXVPTEL:EMVVEGXGXR, HVTKPTXAPTKL:NMVVRSXGXH, YVPKPXXAPTKL:NMVVRSXGXH, TVPKPXXAPTQL:NMVVRAXGXH, AVPKAXXAPTKL:NMVVKAXGXH, KVGKAXXVPTKL:EGMSVAEXGXR, KASKAXXVPTKL:GMAVSEXGXR, GSAGPXXTPTKM:GMVVDRXGXS, AAPASXXVPARL:DMVVEAXGXR, STPPTXXVPTRL:DMVVESXGXR, HVPKPXXAPTKL:NMVVRSXGXH and RVPSTXXAPVKT:MIVEEXGXL.

[0637] In other embodiments also useful for inducing differentiation of mensenchymal or progenitor stem cells from the ligament and tendon (L/T) cell lineage, promoting fibrous tissue formation and T/L regeneration and protecting from L/T cell degeneration and L/T cell degeneration-related diseases, conditions, disorders or pathologies, PEP5 is selected from the group consisting of VPTEL, APTKL, APTQL, VPTKL, VPARL, VPQAL, VSQDL and VPQDL; PEP6 is selected from the group consisting of DMVVE, EMVVE, NMVVR, NMVVK, EGMSVAE, GMAVS, DMVVE, MIVRS, MIVKS and MVVKS; and wherein the pair PEP5:PEP6 is selected from the group consisting of VPTEL:DMVVE, VPTEL:EMVVE, APTKL:NMVVR, APTQL:NMVVR, APTKL:NMVVK, VPTKL:EGMSVAE, VPTKL:EGMAVS, TPTKM:GMVVD, VPARL:DMVVE, VPTRL:DMVVE, APTKL:NMVVR and APVKT:DMIVEE; and wherein the pair PEP5:PEP6 is not VPARL:DMVVE when PEP1 is SPIS and PEP2 is YKQYE.

[0638] In other embodiments also useful for inducing differentiation of mensenchymal or progenitor stem cells from the ligament and tendon (L/T) cell lineage, promoting fibrous tissue formation and T/L regeneration and protecting from L/T cell degeneration and L/T cell degeneration-related diseases, conditions, disorders or pathologies, PEP9 is selected from the group consisting of KIPKAXXVPTEL, SIPKAXXVPTEL, HVTKPTXAPTKL, YVPKPXXAPTKL, TVPKPXXAPTQL, AVPKAXXAPTKL, KVGKAXXVPTKL, KASKAXXVPTKL, GSAGPXXTPTKL, AAPASXXVPARL, STPPTXXVPTRL, HVPKPXXAPTKL and RVPSTXXAPVKT; PEP10 is selected from the group consisting of DMVVEGXGXR, EMVVEGXGXR, NMVVRSXGXH, NMVVRAXGXH, NMVVKAXGXH, EGMSVAEXGXR, GMAVSEXGXR, GMVVDRXGXS, DMVVEAXGXR, DMVVESXGXR, NMVVRSXGXH and MIVEEXGXL; and wherein the pair PEP9:PEP10 is selected from the group consisting of KIPKAXXVPTEL:DMVVEGXGXR, SIPKAXXVPTEL:EMVVEGXGXR, HVTKPTXAPTKL:NMVVRSXGXH, YVPKPXXAPTKL:NMVVRSXGXH, TVPKPXXAPTQL:NMVVRAXGXH, AVPKAXXAPTKL:NMVVKAXGXH, KVGKAXXVPTKL:EGMSVAEXGXR, KASKAXXVPTKL:GMAVSEXGXR, GSAGPXXTPTKM:GMVVDRXGXS, AAPASXXVPARL:DMVVEAXGXR, STPPTXXVPTRL:DMVVESXGXR, HVPKPXXAPTKL:NMVVRSXGXH and RVPSTXXAPVKT:MIVEEXGXL; and wherein PEP9:PEP10 is not AAPASXXVPARL:DMVVEAXGXR when PEP1 is SPIS and PEP2 is YKQYE.

[0639] In other embodiments also useful for inducing differentiation of mensenchymal or progenitor stem cells from the ligament and tendon (L/T) cell lineage, promoting fibrous tissue formation and T/L regeneration and protecting from L/T cell degeneration and L/T cell degeneration-related diseases, conditions, disorders or pathologies, PEP1 is SPIS and PEP11 is LYI.

[0640] In one aspect, the present disclosure provides a GFR-binding compound, wherein said GFR-binding compound is a peptide, a variant or analog thereof, or a peptidomimetic as defined herein, with between 20 and 60 (in particular between 20 and 50, and more particularly, between 20 and 45) amino acids, comprising a peptide with four amino acids (PEP1) or a peptide with eight amino acids (PEP12), a peptide with five amino acids (PEP2), and optionally a pair of peptides selected form the group consisting of PEP3:PEP4, PEP3:PEP6, PEP3:PEP10, PEP5:PEP4, PEP9:PEP4, PEP5:PEP6, PEP5:PEP10, PEP9:PEP6 and PEP9:PEP10; wherein said GFR-binding compound does not comprise the pair of peptides VPARL:DMVVE when PEP1 is SPIS and PEP2 is YKQYE; and wherein the RMSD is 2.45 Å or less.

[0641] In one aspect, the present disclosure provides a GFR-binding compound, wherein said GFR-binding compound is a peptide, a variant or analog thereof, or a peptidomimetic as defined herein, with between 20 and 60 (in particular between 20 and 50, and more particularly, between 20 and 45) amino acids, comprising a peptide with four amino acids (PEP1) or a peptide with eight amino acids (PEP12), a peptide with five amino acids (PEP2), and optionally a pair of peptides selected form the group consisting of PEP3:PEP4, PEP3:PEP6, PEP3:PEP10, PEP5:PEP4, PEP9:PEP4, PEP5:PEP6, PEP5:PEP10, PEP9:PEP6 and PEP9:PEP10; wherein said GFR-binding compound does not comprise the pair of peptides AAPASXXVPARL:DMVVEAXGXR when PEP1 is SPIS and PEP2 is YKQYE; and wherein the RMSD is 2.45 Å or less.

[0642] In other embodiments also useful for inducing differentiation of mensenchymal or progenitor stem cells from the ligament and tendon (L/T) cell lineage, promoting fibrous tissue formation and T/L regeneration and protecting from L/T cell degeneration and L/T cell degeneration-related diseases, conditions, disorders or pathologies, said GFR-binding compound is a synthetic molecule as defined herein in the definition section.

[0643] In other embodiments also useful for inducing differentiation of mensenchymal or progenitor stem cells from the ligament and tendon (L/T) cell lineage, promoting fibrous tissue formation and T/L regeneration and protecting from L/T cell degeneration and L/T cell degeneration-related diseases, conditions, disorders or pathologies, said GFR-binding compound is a synthetic peptide, or a variant or analog thereof, or a peptidomimetic.

### Wound Healing

[0644] Certain embodiments of the invention are particularly useful for inducing differentiation of mensenchymal or progenitor stem cells involved in the process of wound healing as defined herein, promoting wound healing, skin repair and cellular migration.

[0645] In certain embodiments useful for inducing differentiation of mensenchymal or progenitor stem cells involved in the process of wound healing as defined herein, promoting wound healing, skin repair and cellular migration, PEP1 is selected from the group consisting of SNIT, RPVQ and RSVK.

[0646] In certain embodiments useful for inducing differentiation of mensenchymal or progenitor stem cells involved in the process of wound healing as defined herein, promoting wound healing, skin repair and cellular migration, PEP2 is selected from the group consisting of IGEMS, LGEMS, KEVQV and KKATV.

[0647] In certain embodiments useful for inducing differentiation of mensenchymal or progenitor stem cells involved in the process of wound healing as defined herein, promoting wound healing, skin repair and cellular migration, PEP3 is selected from the group consisting of VPT, SRV and TQV.

[0648] In certain embodiments useful for inducing differentiation of mensenchymal or progenitor stem cells involved in the process of wound healing as defined herein, promoting wound healing, skin repair and cellular migration, PEP4 is selected from the group consisting of QHN, EHS, EEH and EDH.

[0649] In certain embodiments useful for inducing differentiation of mensenchymal or progenitor stem cells involved in the process of wound healing as defined herein, promoting wound healing, skin repair and cellular migration, PEP5 is a peptide of general formula PEP3-AA¹¹-AA¹²; wherein PEP3 is selected from the group consisting of VPT, SRV and TQV; wherein AA¹¹ is selected from the group consisting of E, K, Q, R, A, D, G and H, in particular is selected from the group consisting of E, G, H and Q; wherein AA¹² is selected from the group consisting of L, M, T, E, Q and H, in particular is selected from the group consisting of E, Q, H and L. In one particular example, PEP5 is selected from the group consisting of VPTGQ, VPTEE, SRVHH and TQVQL.

[0650] In certain embodiments useful for inducing differentiation of mensenchymal or progenitor stem cells involved in the process of wound healing as defined herein, promoting wound healing, skin repair and cellular migration, PEP6 is a peptide of general formula AA²⁶-AA²⁷-AA²⁸-AA²⁹-PEP4; wherein PEP4 is selected from the group consisting of QHN, EHS, EEH and EDH; wherein AA²⁶ is absent or selected from the group consisting of AA^{II} amino acids, preferably is absent; wherein AA²⁷ and AA²⁸ are independently selected from the group consisting of AA^{II} and AA^{V} amino acids, preferably AA²⁷ is selected from the group consisting of F, L, R and T, preferably AA²⁸ is L or E; wherein AA²⁹ is absent or selected from the group consisting of AA^{II} amino acids, preferably is absent. In one particular example, PEP6 is selected from the group consisting of LEEHS, FLQHN, RLEEH and TLEDH.

[0651] In certain embodiments useful for inducing differentiation of mensenchymal or progenitor stem cells involved in the process of wound healing as defined herein, promoting wound healing, skin repair and cellular migration, PEP7 is an amino acid or a peptide with between two and seven amino acids of general formula AA¹-AA²-AA³-AA⁴-AA⁵-AA⁶-AA⁷; wherein AA¹, AA², AA³, AA⁴, and AA⁵ are independently absent or AA^{I} as defined herein; wherein AA⁶ is absent or selected from the group consisting of S, T, C, E, Q, P and R, preferably is selected from the group consisting of E, Q and R; wherein AA⁷ is absent or is selected from the group consisting of S, T, C, E, Q, P and R, preferably is selected from the group consisting of S, C and P; and wherein at least one of AA¹, AA², AA³, AA⁴, AA⁵, AA⁶ or AA⁷ is not absent. In one particular example, PEP7 is selected from the group consisting of NDEGLEX, SSVKXQP and RNVQXRP.

[0652] In certain embodiments useful for inducing differentiation of mensenchymal or progenitor stem cells involved in the process of wound healing as defined herein, promoting wound healing, skin repair and cellular migration, PEP8 is an amino acid or a peptide with between two and six amino acids of general formula AA³³-AA³⁴-AA³⁵-AA³⁶-AA³⁷-AA³⁸; wherein AA³³ is absent or is selected from the group consisting of AA^{I} amino acids at the exception of AA^{VI} amino acids, in particular is selected from the group consisting of K, Q and L; AA³⁴ is absent or is selected from the group consisting of AA^{II} and AA^{IV} amino acids, in particular is absent, E or A; wherein AA³⁵ is absent or is selected from the group consisting of AA^{II} amino acids, preferably is S or C; wherein AA³⁶ is absent or is selected from the group consisting of AA^{II} and AA^{IV} amino acids, in particular is selected from the group consisting of E, A and K; wherein AA³⁷ is absent or is selected from the group consisting of AA^{II} amino acids, preferably is S or C; wherein AA³⁸ is absent or is selected from the group consisting of AA^{I}, in particular is selected from the group consisting of R, A and E; and wherein at least one of AA³³, AA³⁴, AA³⁵, AA³⁶, AA³⁷ or AA³⁸ is not absent. In one particular example, PEP8 is selected from the group consisting of KXEXR, QXEXR, LEXAXA and LAXKXE.

[0653] In certain embodiments useful for inducing differentiation of mensenchymal or progenitor stem cells involved in the process of wound healing as defined herein, promoting wound healing, skin repair and cellular migration, PEP9 is a peptide of general formula AA¹-AA²-AA³-AA⁴-AA⁵-AA⁶-AA⁷-PEP5; wherein PEP5 is a peptide of formula PEP3-AA¹¹-AA¹²; wherein PEP3 is selected from the group consisting of VPT, SRV and TQV; wherein AA¹¹ is selected from the group consisting of E, K, Q, R, A, D, G and H, in particular is E, G, H and Q; wherein AA¹² is selected from the group consisting of L, M, T, E, Q and H, in particular is selected from the group consisting of E, Q, H and L; wherein AA¹, AA², AA³, AA⁴, and AA⁵ are independently absent or AA^{I} as defined herein; wherein AA⁶ is absent or selected from the group consisting of S, T, C, E, Q, P and R, preferably is selected from the group consisting of E, Q and R; wherein AA⁷ is selected from the group consisting of S, T, C, E, Q, P and R, preferably is selected from the group consisting of S, C and P. In one particular example, PEP9 is selected from the group consisting of NDEGLEXVPTEE, NDEGLEXVPTGQ, SSVKXQPSRVHH and RNVQXRPTQVQL.

[0654] In certain embodiments useful for inducing differentiation of mensenchymal or progenitor stem cells involved in the process of wound healing as defined herein, promoting wound healing, skin repair and cellular migration, PEP10 is a peptide of general formula PEP6-AA³³-AA³⁴-AA³⁵-AA³⁶-AA³⁷-AA³⁸; wherein PEP6 is a peptide of formula AA²⁶-AA²⁷-AA²⁸-AA²⁹-PEP4; wherein PEP4 is selected from the group consisting of QHN, EHS, EEH and EDH; wherein AA²⁶ is absent or selected from the group consisting of AA^{III} amino acids, preferably is absent; wherein AA²⁷ and AA²⁸ are independently selected from the group consisting of AA^{III} and AA^{V} amino acids, preferably AA²⁷ is selected from the group consisting of F, L, R and T, preferably AA²⁸ is L or E; wherein AA²⁹ is absent or selected from the group consisting of AA^{II} amino acids, preferably is absent; wherein AA³³ is absent or is selected from the group consisting of AA^{I} amino acids at the exception of AA^{VI} amino acids, in particular is selected from the group consisting of K, Q and L; AA³⁴ is absent or is selected from the group consisting of AA^{II} and AA^{IV} amino acids, in particular is absent, E or A; wherein AA³⁵ is absent or is selected from the group consisting of AA^{II} amino acids, preferably is S or C; wherein AA³⁶ is absent or is selected from the group consisting of AA^{II} and AA^{IV} amino acids, in particular is selected from the group consisting of E, A and K; wherein AA³⁷ is absent or is selected from the group consisting of AA^{II} amino acids, preferably is S or C; wherein AA³⁸ is absent or is selected from the group consisting of AA^{I}, in particular is selected from the group consisting of R, A and E. In one particular example, PEP10 is selected from the group consisting of FLQHNKXEXR, LEEHSQXEXR, RLEEHLEXAXA and TLEDHLAXKXE.

[0655] In certain embodiments useful for inducing differentiation of mensenchymal or progenitor stem cells involved in the process of wound healing as defined herein, promoting wound healing, skin repair and cellular migration, PEP12 is a peptide of general formula PEP1-AA¹⁷-PEP11; wherein AA¹⁷ is selected from the group consisting of G, A, V, L, I, P, F, M, W, T and S (in particular is selected from the group consisting of M, I, L, V and T); wherein PEP1 is selected from the group consisting of SNIT, RPVQ and RSVK.

[0656] In certain embodiments useful for inducing differentiation of mensenchymal or progenitor stem cells involved in the process of wound healing as defined herein, promoting wound healing, skin repair and cellular migration, PEP11 is a peptide with 3 amino acids of general formula AA¹⁸-AA¹⁹-AA²⁰; wherein AA¹⁸ is selected from the group consisting of L, V, Q, A and R, in particular is selected from the group consisting of Q, A and R; wherein AA¹⁹ is selected from the group consisting of F, W, H, Y, I and K, in particular is I or K; wherein AA²⁰ is selected from the group consisting of L, F, Y, K, I, V and M, in particular is selected from the group consisting of M, V and I. In one particular example, PEP11 is selected from the group consisting of QIM, AKV and RKI.

[0657] The definitions of “PEP” pairs, quadruplets, hexaplets and heptuplet e.g. PEP1:PEP2, PEP12:PEP2, or PEP7:PEP5:PEP12:LINKER:PEP2:PEP6:PEP8, useful for inducing differentiation of mensenchymal or progenitor stem cells involved in the process of wound healing as defined herein, promoting wound healing, skin repair and cellular migration, are as already defined herein to the extent that PEP1 to PEP12 are particularly useful for these applications. For instances:

[0658] In other embodiments also useful for inducing differentiation of mensenchymal or progenitor stem cells from the vascular cell lineage, enhancing of endothelization, vascularization/angiogenesis, protecting from heart diseases, the pair PEP1:PEP2 is selected from the group consisting of SNIT:IGEMS, SNIT:LGEMS, RSVK:KEVQV and RPVQ:KKATV.

[0659] In other embodiments also useful for inducing differentiation of mensenchymal or progenitor stem cells from the vascular cell lineage, enhancing of endothelization, vascularization/angiogenesis, protecting from heart diseases, the pair PEP12:PEP2 is selected from the group consisting of SNIT-AA¹⁷-QIM:IGEMS, SNIT-AA¹⁷-QIM:LGEMS, RSVK-AA¹⁷-AKV:KEVQV and RPVQ-AA¹⁷-RKI:KKATV; wherein AA¹⁷ is selected from the group consisting of G, A, V, L, I, P, F, M, W, T and S (in particular is selected from the group consisting of M, V and T).

[0660] In certain embodiments useful for inducing differentiation of mensenchymal or progenitor stem cells involved in the process of wound healing as defined herein, promoting wound healing, skin repair and cellular migration, PEP3 is selected from the group consisting of VPT, SRV and TQV; PEP4 is selected from the group consisting of QHN, EHS, EEH and EDH; and wherein the pair PEP3:PEP4 is selected from the group consisting of VPT:QHN, VPT:EHS, SRV:EEH and TQV:EDH.

[0661] In certain embodiments useful for inducing differentiation of mensenchymal or progenitor stem cells involved in the process of wound healing as defined herein, promoting wound healing, skin repair and cellular migration, PEP5 is selected from the group consisting of VPTGQ, VPTEE, SRVHH and TQVQL; PEP6 is selected from the group consisting of LEEHS, FLQHN, RLEEH and TLEDH; and wherein the pair PEP5:PEP6 is selected from the group consisting of VPTGQ:LEEHS, VPTEE:FLQHN, SRVHH:RLEEH and TQVQL:TLEDH.

[0662] In certain embodiments useful for inducing differentiation of mensenchymal or progenitor stem cells involved in the process of wound healing as defined herein, promoting wound healing, skin repair and cellular migration, PEP7 is selected from the group consisting of NDEGLEX, SSVKXQP and RNVQXRP; wherein PEP8 is selected from the group consisting of KXEXR, QXEXR, LEXAXA and LAXKXE; and wherein the pair PEP7:PEP8 is selected from the group consisting of NDEGLEX:KXEXR, NDEGLEX:QXEXR, SSVKXQP:LEXAXA and RNVQXRP:LAXKXE.

[0663] In certain embodiments useful for inducing differentiation of mensenchymal or progenitor stem cells involved in the process of wound healing as defined herein, promoting wound healing, skin repair and cellular migration, PEP9 is selected from the group consisting of NDEGLEXVPTEE, NDEGLEXVPTGQ, SSVKXQPSRVHH and RNVQXRPTQVQL; PEP10 is selected from the group consisting of FLQHNKXEXR, LEEHSQXEXR, RLEEHLEXAXA and TLEDHLAXKXE; and wherein the pair PEP9:PEP10 is selected from the group consisting of NDEGLEXVPTEE:FLQHNKXEXR, NDEGLEXVPTGQ:LEEHSQXEXR, SSVKXQPSRVHH:RLEEHLEXAXA and RNVQXRPTQVQL:TLEDHLAXKXE.

[0664] In certain embodiments useful for inducing differentiation of mensenchymal or progenitor stem cells involved in the process of wound healing as defined herein, promoting wound healing, skin repair and cellular migration, PEP5 is selected from the group consisting of VPTGQ, VPTEE, SRVHH and TQVQL; PEP6 is selected from the group consisting of LEEHS, FLQHN, RLEEH and TLEDH; and wherein the pair PEP5:PEP6 is selected from the group consisting of VPTGQ:LEEHS, VPTEE:FLQHN, SRVHH:RLEEH and TQVQL:TLEDH; wherein the pair PEP5:PEP6 is not VPTEE:FLQHN when PEP1 is SNIT and PEP2 is IGEMS; wherein the pair PEP5:PEP6 is not VPTGQ:LEEHS when PEP1 is SNIT and PEP2 is LGEMS; wherein the pair PEP5:PEP6 is not SRVHH:RLEEH when PEP1 is RSVK and PEP2 is KEVQV; and wherein the pair PEP5:PEP6 is not TQVQL:TLEDH when PEP1 is RPVQ and PEP2 is KKATV.

[0665] In certain embodiments useful for inducing differentiation of mensenchymal or progenitor stem cells involved in the process of wound healing as defined herein, promoting wound healing, skin repair and cellular migration, PEP9 is selected from the group consisting of NDEGLEXVPTEE, NDEGLEXVPTGQ, SSVKXQPSRVHH and RNVQXRPTQVQL; PEP10 is selected from the group consisting of FLQHNKXEXR, LEEHSQXEXR, RLEEHLEXAXA and TLEDHLAXKXE; and wherein the pair PEP9:PEP10 is selected from the group consisting of NDEGLEXVPTEE:FLQHNKXEXR, NDEGLEXVPTGQ:LEEHSQXEXR, SSVKXQPSRVHH:RLEEHLEXAXA and RNVQXRPTQVQL:TLEDHLAXKXE; wherein the pair PEP9:PEP10 is not NDEGLEXVPTEE:FLQHNKXEXR when PEP1 is SNIT and PEP2 is IGEMS; wherein the pair PEP9:PEP10 is not NDEGLEXVPTGQ:LEEHSQXEXR when PEP1 is SNIT and PEP2 is LGEMS; wherein the pair PEP9:PEP10 is not SSVKXQPSRVHH:RLEEHLEXAXA when PEP1 is RSVK and PEP2 is KEVQV; and wherein the pair PEP9:PEP10 is not RNVQXRPTQVQL:TLEDHLAXKXE when PEP1 is RPVQ and PEP2 is KKATV.

[0666] In certain embodiments useful for inducing differentiation of mensenchymal or progenitor stem cells involved in the process of wound healing as defined herein, promoting wound healing, skin repair and cellular migration, PEP1 is selected from the group consisting of SNIT, RPVQ and RSVK; PEP11 is selected from the group consisting of QIM, AKV and RKI; and the pair PEP1:PEP11 is selected from the group consisting of SNIT:QIM, RSVK:KEVQV and RPVQ:KKATV.

[0667] In one aspect, the present disclosure provides a GFR-binding compound, wherein said GFR-binding compound is a peptide, a variant or analog thereof, or a peptidomimetic as defined herein, with between 20 and 60 (in particular between 20 and 50, and more particularly, between 20 and 45) amino acids, comprising a peptide with four amino acids (PEP1) or a peptide with eight amino acids (PEP12), a peptide with five amino acids (PEP2), and optionally a pair of peptides selected form the group consisting of PEP3:PEP4, PEP3:PEP6, PEP3:PEP10, PEP5:PEP4, PEP9:PEP4, PEP5:PEP6, PEP5:PEP10, PEP9:PEP6 and PEP9:PEP10; wherein said GFR-binding compound does not comprise the pair of peptides VPTEE:FLQHN when PEP1 is SNIT and PEP2 is IGEMS; wherein said GFR-binding compound does not comprise the pair of peptides VPTGQ:LEEHS when PEP1 is SNIT and PEP2 is LGEMS; wherein said GFR-binding compound does not comprise the pair of peptides SRVHH:RLEEH when PEP1 is RSVK and PEP2 is KEVQV; and wherein said GFR-binding compound does not comprise the pair of peptides TQVQL:TLEDH when PEP1 is RPVQ and PEP2 is KKATV; and wherein the RMSD is 2.45 Å or less.

[0668] In one aspect, the present disclosure provides a GFR-binding compound, wherein said GFR-binding compound is a peptide, a variant or analog thereof, or a peptidomimetic as defined herein, with between 20 and 60 (in particular between 20 and 50, and more particularly, between 20 and 45) amino acids, comprising a peptide with four amino acids (PEP1) or a peptide with eight amino acids (PEP12), a peptide with five amino acids (PEP2), and optionally a pair of peptides selected form the group consisting of PEP3:PEP4, PEP3:PEP6, PEP3:PEP10, PEP5:PEP4, PEP9:PEP4, PEP5:PEP6, PEP5:PEP10, PEP9:PEP6 and PEP9:PEP10; wherein said GFR-binding compound does not comprise the pair of peptides NDEGLEXVPTEE:FLQHNKXEXR when PEP1 is SNIT and PEP2 is IGEMS; wherein said GFR-binding compound does not comprise the pair of peptides NDEGLEXVPTGQ:LEEHSQXEXR when PEP1 is SNIT and PEP2 is LGEMS; wherein said GFR-binding compound does not comprise the pair of peptides SSVKXQPSRVHH:RLEEHLEXAXA when PEP1 is RSVK and PEP2 is KEVQV; and wherein said GFR-binding compound does not comprise the pair of peptides RNVQXRPTQVQL:TLEDHLAXKXE when PEP1 is RPVQ and PEP2 is KKATV; and wherein the RMSD is 2.45 Å or less.

[0669] In certain embodiments useful for inducing differentiation of mensenchymal or progenitor stem cells involved in the process of wound healing as defined herein, promoting wound healing, skin repair and cellular migration, said GFR-binding compound is a synthetic molecule as defined herein in the definition section.

[0670] In certain embodiments useful for inducing differentiation of mensenchymal or progenitor stem cells involved in the process of wound healing as defined herein, promoting wound healing, skin repair and cellular migration, said GFR-binding compound is a synthetic peptide, or a variant or analog thereof, or a peptidomimetic.

### Skin Regeneration and Anti-Aging

[0671] Certain embodiments of the invention are particularly useful for inducing differentiation of mensenchymal or progenitor stem cells from the fibroblast lineage, inducing skin tissue regeneration and tubular formation, preventing, attenuating, masking or removing wrinkles, firming the skin, preventing, decreasing or suppressing skin pigmentation, and protecting patients from skin tissue degeneration-related diseases, disorders, conditions or pathologies.

[0672] In certain embodiments useful for inducing differentiation of mensenchymal or progenitor stem cells from the fibroblast lineage, inducing skin tissue regeneration and tubular formation, preventing, attenuating, masking or removing wrinkles, firming the skin, preventing, decreasing or suppressing skin pigmentation, and protecting patients from skin tissue degeneration-related diseases, disorders, conditions or pathologies, PEP1 is selected from the group consisting of EPLP, EPLT, SNIT, RSVK and RPVQ.

[0673] In certain embodiments useful for inducing differentiation of mensenchymal or progenitor stem cells from the fibroblast lineage, inducing skin tissue regeneration and tubular formation, preventing, attenuating, masking or removing wrinkles, firming the skin, preventing, decreasing or suppressing skin pigmentation, and protecting patients from skin tissue degeneration-related diseases, disorders, conditions or pathologies, PEP2 is selected from the group consisting of EQLSN, IGEMS, KEVQV and KKATV.

[0674] In certain embodiments useful for inducing differentiation of mensenchymal or progenitor stem cells from the fibroblast lineage, inducing skin tissue regeneration and tubular formation, preventing, attenuating, masking or removing wrinkles, firming the skin, preventing, decreasing or suppressing skin pigmentation, and protecting patients from skin tissue degeneration-related diseases, disorders, conditions or pathologies, PEP3 is selected from the group consisting of VPT, APT, VPQ, VSQ, SRV and TQV.

[0675] In certain embodiments useful for inducing differentiation of mensenchymal or progenitor stem cells from the fibroblast lineage, inducing skin tissue regeneration and tubular formation, preventing, attenuating, masking or removing wrinkles, firming the skin, preventing, decreasing or suppressing skin pigmentation, and protecting patients from skin tissue degeneration-related diseases, disorders, conditions or pathologies, PEP4 is selected from the group consisting of VVE, VVR, VRS, VKS, VVK, QHN, EEH and EDH.

[0676] In certain embodiments useful for inducing differentiation of mensenchymal or progenitor stem cells from the fibroblast lineage, inducing skin tissue regeneration and tubular formation, preventing, attenuating, masking or removing wrinkles, firming the skin, preventing, decreasing or suppressing skin pigmentation, and protecting patients from skin tissue degeneration-related diseases, disorders, conditions or pathologies, PEP5 is a peptide of general formula PEP3-AA¹¹-AA¹²; wherein PEP3 is selected from the group consisting of VPT, APT, VPQ, VSQ, SRV and TQV; wherein AA¹¹ is selected from the group consisting of E, K, Q, R, A, D, G and H, in particular is selected from the group consisting of E, K, Q, A, D and H; wherein AA¹² is selected from the group consisting of L, M, T, E, Q and H, in particular is selected from the group consisting of L, E and H. In one particular example, PEP5 is selected from the group consisting of VPTEL, APTKL, APTQL, VPQAL, VSQDL, VPQDL, VPTEE, SRVHH and TQVQL.

[0677] In certain embodiments useful for inducing differentiation of mensenchymal or progenitor stem cells from the fibroblast lineage, inducing skin tissue regeneration and tubular formation, preventing, attenuating, masking or removing wrinkles, firming the skin, preventing, decreasing or suppressing skin pigmentation, and protecting patients from skin tissue degeneration-related diseases, disorders, conditions or pathologies, PEP6 is a peptide of general formula AA²⁶-AA²⁷-AA²⁸-AA²⁹-PEP4; wherein PEP4 is selected from the group consisting of VVE, VVR, VRS, VKS, VVK, QHN, EEH and EDH; wherein AA²⁶ is absent or selected from the group consisting of AA^{III} amino acids, preferably is absent; wherein AA²⁷ and AA²⁸ are independently selected from the group consisting of AA^{II} and AA^{V} amino acids, preferably AA²⁷ is selected from the group consisting of D, N, E, M, F, T and R, preferably AA²⁸ is selected from the group consisting of M, I, V and L; wherein AA²⁹ is absent or selected from the group consisting of AA^{II} amino acids, preferably is absent. In one particular example, PEP6 is selected from the group consisting of DMVVE, EMVVE, NMVVR, MIVRS, MIVKS, NMVVK, FLQHN, RLEEH and TLEDH.

[0678] In certain embodiments useful for inducing differentiation of mensenchymal or progenitor stem cells from the fibroblast lineage, inducing skin tissue regeneration and tubular formation, preventing, attenuating, masking or removing wrinkles, firming the skin, preventing, decreasing or suppressing skin pigmentation, and protecting patients from skin tissue degeneration-related diseases, disorders, conditions or pathologies, PEP7 is an amino acid or a peptide with between two and seven amino acids of general formula AA¹-AA²-AA³-AA⁴-AA⁵-AA⁶-AA⁷; wherein AA¹, AA², AA³, AA⁴, and AA⁵ are independently absent or AA^{I} as defined herein; wherein AA⁶ is absent or selected from the group consisting of S, T, C, E, Q, P and R, preferably is selected from the group consisting of C, S, T, E, R and Q; wherein AA⁷ is absent or is selected from the group consisting of S, T, C, E, Q, P and R, preferably is selected from the group consisting of S, C and P; and wherein at least one of AA¹, AA², AA³, AA⁴, AA⁵, AA⁶ or AA⁷ is not absent. In one particular example, PEP7 is selected from the group consisting of KIPKAXX, SIPKAXX, HVTKPTX, YVPKPXX, TVPKPXX, ASAAPXX, ASASPXX, NDEGLEX, SSVKXQP and RNVQXRP.

[0679] In certain embodiments useful for inducing differentiation of mensenchymal or progenitor stem cells from the fibroblast lineage, inducing skin tissue regeneration and tubular formation, preventing, attenuating, masking or removing wrinkles, firming the skin, preventing, decreasing or suppressing skin pigmentation, and protecting patients from skin tissue degeneration-related diseases, disorders, conditions or pathologies, PEP8 is an amino acid or a peptide with between two and six amino acids of general formula AA³³-AA³⁴-AA³⁵-AA³⁶-AA³⁷-AA³⁸; wherein AA³³ is absent or is selected from the group consisting of AA^{I} amino acids at the exception of AA^{VI} amino acids, in particular is absent or is selected from the group consisting of G, S, A, K and L; AA³⁴ is absent or is selected from the group consisting of AA^{III} and AA^{IV} amino acids, in particular is absent, A or E; wherein AA³⁵ is absent or is selected from the group consisting of AA^{II} amino acids, preferably is S or C; wherein AA³⁶ is absent or is selected from the group consisting of AA^{III} and AA^{IV} amino acids, in particular is selected from the group consisting of G, A, K and E; wherein AA³⁷ is absent or is selected from the group consisting of AA^{II} amino acids, preferably is S or C; wherein AA³⁸ is absent or is selected from the group consisting of AA^{I}, in particular is selected from the group consisting of R, H, S, E and A; and wherein at least one of AA³³, AA³⁴, AA³⁵, AA³⁶, AA³⁷ or AA³⁸ is not absent. In one particular example, PEP8 is selected from the group consisting of GXGXR, SXGXH, AXGXH, XKXS, KXEXR, LEXAXA and LAXKXE.

[0680] In certain embodiments useful for inducing differentiation of mensenchymal or progenitor stem cells from the fibroblast lineage, inducing skin tissue regeneration and tubular formation, preventing, attenuating, masking or removing wrinkles, firming the skin, preventing, decreasing or suppressing skin pigmentation, and protecting patients from skin tissue degeneration-related diseases, disorders, conditions or pathologies, PEP9 is a peptide of general formula AA¹-AA²-AA³-AA⁴-AA⁵-AA⁶-AA⁷-PEP5; wherein PEP5 is a peptide of formula PEP3-AA-AA¹²; wherein PEP3 is selected from the group consisting of VPT, APT, VPQ, VSQ, SRV and TQV; wherein AA¹¹ is selected from the group consisting of E, K, Q, R, A, D, G and H, in particular is selected from the group consisting of E, K, Q, A, D and H; wherein AA¹² is selected from the group consisting of L, M, T, E, Q and H, in particular is selected from the group consisting of L, E and H; wherein AA¹, AA², AA³, AA⁴, and AA⁵ are independently absent or AA^{I} as defined herein; wherein AA⁶ is absent or selected from the group consisting of S, T, C, E, Q, P and R, preferably is selected from the group consisting of C, S, T, E, R and Q; wherein AA⁷ is selected from the group consisting of S, T, C, E, Q, P and R, preferably is selected from the group consisting of S, C and P. In one particular example, PEP9 is selected from the group consisting of KIPKAXXVPTEL, SIPKAXXVPTEL, HVTKPTXAPTKL, YVPKPXXAPTKL, TVPKPXXAPTQL, ASAAPXXVPQAL, ASASPXXVSQDL, ASASPXXVPQDL, NDEGLEXVPTEE, SSVKXQPSRVHH and RNVQXRPTQVQL.

[0681] In certain embodiments useful for inducing differentiation of mensenchymal or progenitor stem cells from the fibroblast lineage, inducing skin tissue regeneration and tubular formation, preventing, attenuating, masking or removing wrinkles, firming the skin, preventing, decreasing or suppressing skin pigmentation, and protecting patients from skin tissue degeneration-related diseases, disorders, conditions or pathologies, PEP10 is a peptide of general formula PEP6-AA³³-AA³⁴-AA³⁵-AA³⁶-AA³⁷-AA³⁸; wherein PEP6 is a peptide of formula AA²⁶-AA²⁷-AA²⁸-AA²⁹-PEP4; wherein PEP4 is selected from the group consisting of VVE, VVR, VRS, VKS, VVK, QHN, EEH and EDH; wherein AA²⁶ is absent or selected from the group consisting of AA^{III} amino acids, preferably is absent; wherein AA²⁷ and AA²⁸ are independently selected from the group consisting of AA^{III} and AA^{V} amino acids, preferably AA²⁷ is selected from the group consisting of D, N, E, M, F, T and R, preferably AA²⁸ is selected from the group consisting of M, I, V and L; wherein AA²⁹ is absent or selected from the group consisting of AA^{II} amino acids, preferably is absent; wherein AA³³ is absent or is selected from the group consisting of AA^{I} amino acids at the exception of AA^{VI} amino acids, in particular is absent or is selected from the group consisting of G, S, A, K and L; AA³⁴ is absent or is selected from the group consisting of AA^{III} and AA^{IV} amino acids, in particular is absent, A or E; wherein AA³⁵ is absent or is selected from the group consisting of AA^{II} amino acids, preferably is S or C; wherein AA³⁶ is absent or is selected from the group consisting of AA^{II} and AA^{V} amino acids, in particular is selected from the group consisting of G, A, K and E; wherein AA³⁷ is absent or is selected from the group consisting of AA^{II} amino acids, preferably is S or C; wherein AA³⁸ is absent or is selected from the group consisting of AA^{I}, in particular is selected from the group consisting of R, H, S, E and A. In one particular example, PEP10 is selected from the group consisting of DMVVEGXGXR, EMVVEGXGXR, NMVVRSXGXH, NMVVRAXGXH, MIVRSXKXS, MIVKSXKXS, MVVKSXKXS, FLQHNKXEXR, RLEEHLEXAXA and TLEDHLAXKXE.

[0682] In certain embodiments useful for inducing differentiation of mensenchymal or progenitor stem cells from the fibroblast lineage, inducing skin tissue regeneration and tubular formation, preventing, attenuating, masking or removing wrinkles, firming the skin, preventing, decreasing or suppressing skin pigmentation, and protecting patients from skin tissue degeneration-related diseases, disorders, conditions or pathologies, PEP12 is a peptide of general formula PEP1-AA¹⁷-PEP11; wherein AA¹⁷ is selected from the group consisting of G, A, V, L, I, P, F, M, W, T and S (in particular is selected from the group consisting of M, I, L, V and T); wherein PEP1 is selected from the group consisting of EPLP, EPLT, SNIT, RSVK and RPVQ.

[0683] In certain embodiments useful for inducing differentiation of mensenchymal or progenitor stem cells from the fibroblast lineage, inducing skin tissue regeneration and tubular formation, preventing, attenuating, masking or removing wrinkles, firming the skin, preventing, decreasing or suppressing skin pigmentation, and protecting patients from skin tissue degeneration-related diseases, disorders, conditions or pathologies, PEP11 is a peptide with 3 amino acids of general formula AA¹⁸-AA¹⁹-AA²⁰; wherein AA¹⁸ is selected from the group consisting of L, V, Q, A and R; wherein AA¹⁹ is selected from the group consisting of F, W, H, Y, I and K, in particular is selected from the group consisting of Y, I and K; wherein AA²⁰ is selected from the group consisting of L, F, Y, K, I, V and M, in particular is selected from the group consisting of Y, M, V and I. In one particular example, PEP11 is selected from the group consisting of VYY, LYY, QIM, AKV and RKI.

[0684] The definitions of “PEP” pairs, quadruplets, hexaplets and heptuplet e.g. PEP1:PEP2, PEP12:PEP2, or PEP7:PEP5:PEP12:LINKER:PEP2:PEP6:PEP8, useful for inducing differentiation of mensenchymal or progenitor stem cells from the fibroblast lineage, inducing skin tissue regeneration and tubular formation, preventing, attenuating, masking or removing wrinkles, firming the skin, preventing, decreasing or suppressing skin pigmentation, and protecting patients from skin tissue degeneration-related diseases, disorders, conditions or pathologies, are as already defined herein to the extent that PEP1 to PEP12 are particularly useful for these applications. For instances:

[0685] In certain embodiments useful for inducing differentiation of mensenchymal or progenitor stem cells from the fibroblast lineage, inducing skin tissue regeneration and tubular formation, preventing, attenuating, masking or removing wrinkles, firming the skin, preventing, decreasing or suppressing skin pigmentation, and protecting patients from skin tissue degeneration-related diseases, disorders, conditions or pathologies, the pair PEP1:PEP2 is selected from the group consisting of EPLP:EQLSN, EPLT:EQLSN and SNIT:IGEMS.

[0686] In certain embodiments useful for inducing differentiation of mensenchymal or progenitor stem cells from the fibroblast lineage, inducing skin tissue regeneration and tubular formation, preventing, attenuating, masking or removing wrinkles, firming the skin, preventing, decreasing or suppressing skin pigmentation, and protecting patients from skin tissue degeneration-related diseases, disorders, conditions or pathologies, the pair PEP12:PEP2 is selected from the group consisting of EPLP-AA¹⁷-VYY:EQLSN, EPLT-AA¹⁷-LYY:EQLSN and SNIT-AA¹⁷-QIM:IGEMS; wherein AA¹⁷ is selected from the group consisting of G, A, V, L, I, P, F, M, W, T and S (in particular is selected from the group consisting of M, I, V and T).

[0687] In certain embodiments useful for inducing differentiation of mensenchymal or progenitor stem cells from the fibroblast lineage, inducing skin tissue regeneration and tubular formation, preventing, attenuating, masking or removing wrinkles, firming the skin, preventing, decreasing or suppressing skin pigmentation, and protecting patients from skin tissue degeneration-related diseases, disorders, conditions or pathologies, PEP3 is selected from the group consisting of VPT, APT, VPQ, VSQ, SRV and TQV; PEP4 is selected from the group consisting of VVE, VVR, VRS, VKS, VVK, QHN, EEH and EDH; and wherein the pair PEP3:PEP4 is selected from the group consisting of VPT:VVE, APT:VVR, VPQ:VRS, VSQ:VKS, VPQ:VVK, VPT:QHN, SRV:EEH and TQV:EDH.

[0688] In certain embodiments useful for inducing differentiation of mensenchymal or progenitor stem cells from the fibroblast lineage, inducing skin tissue regeneration and tubular formation, preventing, attenuating, masking or removing wrinkles, firming the skin, preventing, decreasing or suppressing skin pigmentation, and protecting patients from skin tissue degeneration-related diseases, disorders, conditions or pathologies, PEP5 is selected from the group consisting of VPTEL, APTKL, APTQL, VPQAL, VSQDL, VPQDL, VPTEE, SRVHH and TQVQL; PEP6 is selected from the group consisting of DMVVE, EMVVE, NMVVR, MIVRS, MIVKS, NMVVK, FLQHN, RLEEH and TLEDH; and wherein the pair PEP5:PEP6 is selected from the group consisting of VPTEL:DMVVE, VPTEL:EMVVE, APTKL:NMVVR, APTQL:NMVVR, VPQAL:MIVRS, VSQDL:MIVKS, VPQDL:NMVVK, VPTEE:FLQHN, SRVHH:RLEEH and TQVQL:TLEDH.

[0689] In certain embodiments useful for inducing differentiation of mensenchymal or progenitor stem cells from the fibroblast lineage, inducing skin tissue regeneration and tubular formation, preventing, attenuating, masking or removing wrinkles, firming the skin, preventing, decreasing or suppressing skin pigmentation, and protecting patients from skin tissue degeneration-related diseases, disorders, conditions or pathologies, PEP7 is selected from the group consisting of KIPKAXX, SIPKAXX, HVTKPTX, YVPKPXX, TVPKPXX, ASAAPXX, ASASPXX, NDEGLEX, SSVKXQP and RNVQXRP; wherein PEP8 is selected from the group consisting of GXGXR, SXGXH, AXGXH, XKXS, KXEXR, LEXAXA and LAXKXE; and wherein the pair PEP7:PEP8 is selected from the group consisting of KIPKAXX:GXGXR, SIPKAXX:GXGXR, HVTKPTX:SXGXH, YVPKPXX:SXGXH, TVPKPXX:AXGXH, ASAAPXX:XKXS, ASASPXX:XKXS, NDEGLEX:KXEXR, SSVKXQP:LEXAXA and RNVQXRP:LAXKXE.

[0690] In certain embodiments useful for inducing differentiation of mensenchymal or progenitor stem cells from the fibroblast lineage, inducing skin tissue regeneration and tubular formation, preventing, attenuating, masking or removing wrinkles, firming the skin, preventing, decreasing or suppressing skin pigmentation, and protecting patients from skin tissue degeneration-related diseases, disorders, conditions or pathologies, PEP9 is selected from the group consisting of KIPKAXXVPTEL, SIPKAXXVPTEL, HVTKPTXAPTKL, YVPKPXXAPTKL, TVPKPXXAPTQL, ASAAPXXVPQAL, ASASPXXVSQDL, ASASPXXVPQDL, NDEGLEXVPTEE, SSVKXQPSRVHH and RNVQXRPTQVQL; PEP10 is selected from the group consisting of DMVVEGXGXR, EMVVEGXGXR, NMVVRSXGXH, NMVVRAXGXH, MIVRSXKXS, MIVKSXKXS, MVVKSXKXS, FLQHNKXEXR, RLEEHLEXAXA and TLEDHLAXKXE; and wherein the pair PEP9:PEP10 is selected from the group consisting of KIPKAXXVPTEL:DMVVEGXGXR, SIPKAXXVPTEL:EMVVEGXGXR, HVTKPTXAPTKL:NMVVRSXGXH, YVPKPXXAPTKL:NMVVRSXGXH, TVPKPXXAPTQL:NMVVRAXGXH, ASAAPXXVPQAL:MIVRSXKXS, ASASPXXVSQDL:MIVKSXKXS, ASASPXXVPQDL:MVVKSXKXS, NDEGLEXVPTEE:FLQHNKXEXR, SSVKXQPSRVHH:RLEEHLEXAXA and RNVQXRPTQVQL:TLEDHLAXKXE.

[0691] In certain embodiments useful for inducing differentiation of mensenchymal or progenitor stem cells from the fibroblast lineage, inducing skin tissue regeneration and tubular formation, preventing, attenuating, masking or removing wrinkles, firming the skin, preventing, decreasing or suppressing skin pigmentation, and protecting patients from skin tissue degeneration-related diseases, disorders, conditions or pathologies, PEP5 is selected from the group consisting of VPTEL, APTKL, APTQL, VPQAL, VSQDL, VPQDL, VPTEE, SRVHH and TQVQL; PEP6 is selected from the group consisting of DMVVE, EMVVE, NMVVR, MIVRS, MIVKS, NMVVK, FLQHN, RLEEH and TLEDH; and wherein the pair PEP5:PEP6 is selected from the group consisting of VPTEL:DMVVE, VPTEL:EMVVE, APTKL:NMVVR, APTQL:NMVVR, VPQAL:MIVRS, VSQDL:MIVKS, VPQDL:NMVVK, VPTEE:FLQHN, SRVHH:RLEEH and TQVQL:TLEDH; wherein the pair PEP5:PEP6 is not VPQAL:MIVRS when PEP1 is EPLP and PEP2 is EQLSN; wherein the pair PEP5:PEP6 is not VSQDL:MIVKS when PEP1 is EPLT and PEP2 is EQLSN; wherein the pair PEP5:PEP6 is not VPQDL:MVVVK when PEP1 is EPLT and PEP2 is EQLSN; wherein the pair PEP5:PEP6 is not VPTEE:FLQHN when PEP1 is SNIT and PEP2 is IGEMS; wherein the pair PEP5:PEP6 is not SRVHH:RLEEH when PEP1 is RSVK and PEP2 is KEVQV; and wherein the pair PEP5:PEP6 is not TQVQL:TLEDH when PEP1 is RPVQ and PEP2 is KKATV.

[0692] In certain embodiments useful for inducing differentiation of mensenchymal or progenitor stem cells from the fibroblast lineage, inducing skin tissue regeneration and tubular formation, preventing, attenuating, masking or removing wrinkles, firming the skin, preventing, decreasing or suppressing skin pigmentation, and protecting patients from skin tissue degeneration-related diseases, disorders, conditions or pathologies, PEP9 is selected from the group consisting of KIPKAXXVPTEL, SIPKAXXVPTEL, HVTKPTXAPTKL, YVPKPXXAPTKL, TVPKPXXAPTQL, ASAAPXXVPQAL, ASASPXXVSQDL, ASASPXXVPQDL, NDEGLEXVPTEE, SSVKXQPSRVHH and RNVQXRPTQVQL; PEP10 is selected from the group consisting of DMVVEGXGXR, EMVVEGXGXR, NMVVRSXGXH, NMVVRAXGXH, MIVRSXKXS, MIVKSXKXS, MVVKSXKXS, FLQHNKXEXR, RLEEHLEXAXA and TLEDHLAXKXE; and wherein the pair PEP9:PEP10 is selected from the group consisting of KIPKAXXVPTEL:DMVVEGXGXR, SIPKAXXVPTEL:EMVVEGXGXR, HVTKPTXAPTKL:NMVVRSXGXH, YVPKPXXAPTKL:NMVVRSXGXH, TVPKPXXAPTQL:NMVVRAXGXH, ASAAPXXVPQAL:MIVRSXKXS, ASASPXXVSQDL:MIVKSXKXS, ASASPXXVPQDL:MVVKSXKXS, NDEGLEXVPTEE:FLQHNKXEXR, SSVKXQPSRVHH:RLEEHLEXAXA and RNVQXRPTQVQL:TLEDHLAXKXE; wherein the pair PEP9:PEP10 is not ASAAPXXVPQAL:MIVRSXKXS when PEP1 is EPLP and PEP2 is EQLSN; wherein the pair PEP9:PEP10 is not ASASPXXVSQDL:MIVKSXKXS when PEP1 is EPLT and PEP2 is EQLSN; wherein the pair PEP9:PEP10 is not ASASPXXVPQDL:MVVKSXKXS when PEP1 is EPLT and PEP2 is EQLSN; wherein the pair PEP9:PEP10 is not NDEGLEXVPTEE:FLQHNKXEXR when PEP1 is SNIT and PEP2 is IGEMS; wherein the pair PEP9:PEP10 is not SSVKXQPSRVHH:RLEEHLEXAXA when PEP1 is RSVK and PEP2 is KEVQV; and wherein the pair PEP9:PEP10 is not RNVQXRPTQVQL:TLEDHLAXKXE when PEP1 is RPVQ and PEP2 is KKATV.

[0693] In certain embodiments useful for inducing differentiation of mensenchymal or progenitor stem cells from the fibroblast lineage, inducing skin tissue regeneration and tubular formation, preventing, attenuating, masking or removing wrinkles, firming the skin, preventing, decreasing or suppressing skin pigmentation, and protecting patients from skin tissue degeneration-related diseases, disorders, conditions or pathologies, PEP1 is selected from the group consisting of EPLP, EPLT, SNIT, RSVK and RPVQ; PEP11 is selected from the group consisting of VYY, LYY, QIM, AKV and RKI; ; and the pair PEP1:PEP11 is selected from the group consisting of EPLP:VYY, EPLT:LYY, SNIT:QIM, RSVK:KEVQV and RPVQ:KKATV.

[0694] In one aspect, the present disclosure provides a GFR-binding compound, wherein said GFR-binding compound is a peptide, a variant or analog thereof, or a peptidomimetic as defined herein, with between 20 and 60 (in particular between 20 and 50, and more particularly, between 20 and 45) amino acids, comprising a peptide with four amino acids (PEP1) or a peptide with eight amino acids (PEP12), a peptide with five amino acids (PEP2), and optionally a pair of peptides selected form the group consisting of PEP3:PEP4, PEP3:PEP6, PEP3:PEP10, PEP5:PEP4, PEP9:PEP4, PEP5:PEP6, PEP5:PEP10, PEP9:PEP6 and PEP9:PEP10; wherein said GFR-binding compound does not comprise the pair of peptides VPQAL:MIVRS when PEP1 is EPLP and PEP2 is EQLSN; wherein said GFR-binding compound does not comprise the pair of peptides VSQDL:MIVKS when PEP1 is EPLT and PEP2 is EQLSN; wherein said GFR-binding compound does not comprise the pair of peptides VPQDL:MVVVK when PEP1 is EPLT and PEP2 is EQLSN; wherein said GFR-binding compound does not comprise the pair of peptides VPTEE:FLQHN when PEP1 is SNIT and PEP2 is IGEMS; wherein said GFR-binding compound does not comprise the pair of peptides SRVHH:RLEEH when PEP1 is RSVK and PEP2 is KEVQV; and wherein said GFR-binding compound does not comprise the pair of peptides TQVQL:TLEDH when PEP1 is RPVQ and PEP2 is KKATV; and wherein the RMSD is 2.45 Å or less.

[0695] In one aspect, the present disclosure provides a GFR-binding compound, wherein said GFR-binding compound is a peptide, a variant or analog thereof, or a peptidomimetic as defined herein, with between 20 and 60 (in particular between 20 and 50, and more particularly, between 20 and 45) amino acids, comprising a peptide with four amino acids (PEP1) or a peptide with eight amino acids (PEP12), a peptide with five amino acids (PEP2), and optionally a pair of peptides selected form the group consisting of PEP3:PEP4, PEP3:PEP6, PEP3:PEP10, PEP5:PEP4, PEP9:PEP4, PEP5:PEP6, PEP5:PEP10, PEP9:PEP6 and PEP9:PEP10; wherein said GFR-binding compound does not comprise the pair of peptides ASAAPXXVPQAL:MIVRSXKXS when PEP1 is EPLP and PEP2 is EQLSN; wherein said GFR-binding compound does not comprise the pair of peptides ASASPXXVSQDL:MIVKSXKXS when PEP1 is EPLT and PEP2 is EQLSN; wherein said GFR-binding compound does not comprise the pair of peptides ASASPXXVPQDL:MVVKSXKXS when PEP1 is EPLT and PEP2 is EQLSN; wherein said GFR-binding compound does not comprise the pair of peptides NDEGLEXVPTEE:FLQHNKXEXR when PEP1 is SNIT and PEP2 is IGEMS; wherein said GFR-binding compound does not comprise the pair of peptides SSVKXQPSRVHH:RLEEHLEXAXA when PEP1 is RSVK and PEP2 is KEVQV; and wherein said GFR-binding compound does not comprise the pair of peptides RNVQXRPTQVQL:TLEDHLAXKXE when PEP1 is RPVQ and PEP2 is KKATV; and wherein the RMSD is 2.45 Å or less.

[0696] In certain embodiments useful for inducing differentiation of mensenchymal or progenitor stem cells from the fibroblast lineage, inducing skin tissue regeneration and tubular formation, preventing, attenuating, masking or removing wrinkles, firming the skin, preventing, decreasing or suppressing skin pigmentation, and protecting patients from skin tissue degeneration-related diseases, disorders, conditions or pathologies, said GFR-binding compound is a synthetic molecule as defined herein in the definition section.

[0697] In certain embodiments useful for inducing differentiation of mensenchymal or progenitor stem cells from the fibroblast lineage, inducing skin tissue regeneration and tubular formation, preventing, attenuating, masking or removing wrinkles, firming the skin, preventing, decreasing or suppressing skin pigmentation, and protecting patients from skin tissue degeneration-related diseases, disorders, conditions or pathologies, said GFR-binding compound is a synthetic peptide, or a variant or analog thereof, or a peptidomimetic.

### Hair

[0698] Certain embodiments of the invention are particularly useful for inducing differentiation of mensenchymal or progenitor stem cells from the hair follicle cell lineage, hair follicle tissue regeneration and formation (hair growth), and for protecting from hair follicle-related diseases, disorders, conditions or pathologies.

[0699] In certain embodiments useful for inducing differentiation of mensenchymal or progenitor stem cells from the hair follicle cell lineage, hair follicle tissue regeneration and formation (hair growth), and for protecting from hair follicle-related diseases, disorders, conditions or pathologies, PEP1 is SSLS.

[0700] In certain embodiments useful for inducing differentiation of mensenchymal or progenitor stem cells from the hair follicle cell lineage, hair follicle tissue regeneration and formation (hair growth), and for protecting from hair follicle-related diseases, disorders, conditions or pathologies, PEP2 is LKVYP.

[0701] In certain embodiments useful for inducing differentiation of mensenchymal or progenitor stem cells from the hair follicle cell lineage, hair follicle tissue regeneration and formation (hair growth), and for protecting from hair follicle-related diseases, disorders, conditions or pathologies, PEP3 is selected from the group consisting of VPT, VPE, APT, TPT, VPA, APV, VPQ, VSQ and SRV.

[0702] In certain embodiments useful for inducing differentiation of mensenchymal or progenitor stem cells from the hair follicle cell lineage, hair follicle tissue regeneration and formation (hair growth), and for protecting from hair follicle-related diseases, disorders, conditions or pathologies, PEP4 is selected from the group consisting of VVE, TVE, VVR, VVK, VAE, AVS, VVD, VEE, VRS, VKS, QHN and EEH.

[0703] In certain embodiments useful for inducing differentiation of mensenchymal or progenitor stem cells from the hair follicle cell lineage, hair follicle tissue regeneration and formation (hair growth), and for protecting from hair follicle-related diseases, disorders, conditions or pathologies, PEP5 is a peptide of general formula PEP3-AA¹¹-AA¹²; wherein PEP3 is selected from the group consisting of VPT, VPE, APT, TPT, VPA, APV, VPQ, VSQ and SRV; wherein AA¹¹ is selected from the group consisting of E, K, Q, R, A, D, G and H, in particular is selected from the group consisting of E, K, Q, R, A, D and H; wherein AA¹² is selected from the group consisting of L, M, T, E, Q and H, in particular is selected from the group consisting of L, M, T, E and H. In one particular example, PEP5 is selected from the group consisting of VPTEL, VPEKM, APTKL, APTQL, VPTKL, TPTKM, VPARL, VPTRL, APVKT, VPQAL, VSQDL, VPQDL, VPTEE and SRVHH.

[0704] In certain embodiments useful for inducing differentiation of mensenchymal or progenitor stem cells from the hair follicle cell lineage, hair follicle tissue regeneration and formation (hair growth), and for protecting from hair follicle-related diseases, disorders, conditions or pathologies, PEP6 is a peptide of general formula AA²⁶-AA²⁷-AA²⁸-AA²⁹-PEP4; wherein PEP4 is selected from the group consisting of VVE, TVE, VVR, VVK, VAE, AVS, VVD, VEE, VRS, VKS, QHN and EEH; wherein AA²⁶ is absent or selected from the group consisting of AA^{III} amino acids, preferably is absent or is E; wherein AA²⁷ and AA²⁸ are independently selected from the group consisting of AA^{III} and AA^{V} amino acids, preferably AA²⁷ is selected from the group consisting of D, N, E, G, M, F and R, preferably AA²⁸ is selected from the group consisting of M, I, V and L; wherein AA²⁹ is absent or selected from the group consisting of AA^{II} amino acids, preferably is absent or is S. In one particular example, PEP6 is selected from the group consisting of DMVVE, NMTVE, EMVVE, NMVVR, NMVVK, EGMSVAE, GMAVS, GMVVD, MIVEE, MIVRS, MIVKS, MVVKS, FLQHN and RLEEH.

[0705] In certain embodiments useful for inducing differentiation of mensenchymal or progenitor stem cells from the hair follicle cell lineage, hair follicle tissue regeneration and formation (hair growth), and for protecting from hair follicle-related diseases, disorders, conditions or pathologies, PEP7 is an amino acid or a peptide with between two and seven amino acids of general formula AA¹-AA²-AA³-AA⁴-AA⁵-AA⁶-AA⁷; wherein AA¹, AA², AA³, AA⁴, and AA⁵ are independently absent or AA^{I} as defined herein; wherein AA⁶ is absent or selected from the group consisting of S, T, C, E, Q, P and R, preferably is selected from the group consisting of C, S, T, E and Q; wherein AA⁷ is absent or is selected from the group consisting of S, T, C, E, Q, P and R, preferably is selected from the group consisting of S, C and P; and wherein at least one of AA¹, AA², AA³, AA⁴, AA⁵, AA⁶ or AA⁷ is not absent. In one particular example, PEP7 is selected from the group consisting of KIPKAXX, GIPEPXX, SIPKAXX, HVTKPTX, YVPKPXX, TVPKPXX, AVPKAXX, KVGKAXX, KASKAXX, GSAGPXX, AAPASXX, STPPTXX, HVPKPXX, RVPSTXX, ASAAPXX, ASASPXX, NDEGLEX and SSVKXQP.

[0706] In certain embodiments useful for inducing differentiation of mensenchymal or progenitor stem cells from the hair follicle cell lineage, hair follicle tissue regeneration and formation (hair growth), and for protecting from hair follicle-related diseases, disorders, conditions or pathologies, PEP8 is an amino acid or a peptide with between two and six amino acids of general formula AA³³-AA³⁴-AA³⁵-AA³⁶-AA³⁷-AA³⁸; wherein AA³³ is absent or is selected from the group consisting of AA^{I} amino acids at the exception of AA^{VI} amino acids, in particular is absent or is selected from the group consisting of G, S, A, E, R, K and L; AA³⁴ is absent or is selected from the group consisting of AA^{III} and AA^{V} amino acids, in particular is absent or E; wherein AA³⁵ is absent or is selected from the group consisting of AA^{II} amino acids, preferably is S or C; wherein AA³⁶ is absent or is selected from the group consisting of AA^{III} and AA^{V} amino acids, in particular is selected from the group consisting of G, A, K and E; wherein AA³⁷ is absent or is selected from the group consisting of AA^{II} amino acids, preferably is S or C; wherein AA³⁸ is absent or is selected from the group consisting of AA^{I}, in particular is selected from the group consisting of R, H, S, L and A; and wherein at least one of AA³³, AA³⁴, AA³⁵, AA³⁶, AA³⁷ or AA³⁸ is not absent. In one particular example, PEP8 is selected from the group consisting of GXGXR, SXASR, SXGXH, AXGXH, XGXR, EXGXR, RXGXS, AXGXR, SXGXR, XGXL, XKXS, KXEXR and LEXAXA.

[0707] In certain embodiments useful for inducing differentiation of mensenchymal or progenitor stem cells from the hair follicle cell lineage, hair follicle tissue regeneration and formation (hair growth), and for protecting from hair follicle-related diseases, disorders, conditions or pathologies, PEP9 is a peptide of general formula AA¹-AA²-AA³-AA⁴-AA⁵-AA⁶-AA⁷-PEP5; wherein PEP5 is a peptide of formula PEP3-AA¹¹-AA¹²; wherein PEP3 is selected from the group consisting of VPT, VPE, APT, TPT, VPA, APV, VPQ, VSQ and SRV; wherein AA¹ is selected from the group consisting of E, K, Q, R, A, D, G and H, in particular is selected from the group consisting of E, K, Q, R, A, D and H; wherein AA¹² is selected from the group consisting of L, M, T, E, Q and H, in particular is selected from the group consisting of L, M, T, E and H; wherein AA¹, AA², AA³, AA⁴, and AA⁵ are independently absent or AA^{I} as defined herein; wherein AA⁶ is absent or selected from the group consisting of S, T, C, E, Q, P and R, preferably is selected from the group consisting of C, S, T, E and Q; wherein AA⁷ is selected from the group consisting of S, T, C, E, Q, P and R, preferably is selected from the group consisting of S, C and P. In one particular example, PEP9 is selected from the group consisting of KIPKAXXVPTEL, GIPEPXXVPEKM, SIPKAXXVPTEL, HVTKPTXAPTKL, YVPKPXXAPTKL, TVPKPXXAPTQL, AVPKAXXAPTKL, KVGKAXXVPTKL, KASKAXXVPTKL, GSAGPXXTPTKM, AAPASXXVPARL, STPPTXXVPTRL, HVPKPXXAPTKL, RVPSTXXAPVKT, ASAAPXXVPQAL, ASASPXXVSQDL, ASASPXXVPQDL, NDEGLEXVPTEE and SSVKXQPSRVHH.

[0708] In certain embodiments useful for inducing differentiation of mensenchymal or progenitor stem cells from the hair follicle cell lineage, hair follicle tissue regeneration and formation (hair growth), and for protecting from hair follicle-related diseases, disorders, conditions or pathologies, PEP10 is a peptide of general formula PEP6-AA³³-AA³⁴-AA³⁵-AA³⁶-AA³⁷-AA³⁸; wherein PEP6 is a peptide of formula AA²⁶-AA²⁷-AA²⁸-AA²⁹-PEP4; wherein PEP4 is selected from the group consisting of VVE, TVE, VVR, VVK, VAE, AVS, VVD, VEE, VRS, VKS, QHN and EEH; wherein AA²⁶ is absent or selected from the group consisting of AA^{III} amino acids, preferably is absent or is E; wherein AA²⁷ and AA²⁸ are independently selected from the group consisting of AA^{III} and AA^{V} amino acids, preferably AA²⁷ is selected from the group consisting of D, N, E, G, M, F and R, preferably AA²⁸ is selected from the group consisting of M, I, V and L; wherein AA²⁹ is absent or selected from the group consisting of AA^{II} amino acids, preferably is absent or is S; wherein AA³³ is absent or is selected from the group consisting of AA^{I} amino acids at the exception of AA^{VI} amino acids, in particular is absent or is selected from the group consisting of G, S, A, E, R, K and L; AA³⁴ is absent or is selected from the group consisting of AA^{III} and AA^{IV} amino acids, in particular is absent or E; wherein AA³⁵ is absent or is selected from the group consisting of AA^{II} amino acids, preferably is S or C; wherein AA³⁶ is absent or is selected from the group consisting of AA^{III} and AA^{IV} amino acids, in particular is selected from the group consisting of G, A, K and E; wherein AA³⁷ is absent or is selected from the group consisting of AA^{II} amino acids, preferably is S or C; wherein AA³⁸ is absent or is selected from the group consisting of AA^{I}, in particular is selected from the group consisting of R, H, S, L and A. In one particular example, PEP10 is selected from the group consisting of DMVVEGXGXR, NMTVESXASR, EMVVEGXGXR, NMVVRSXGXH, NMVVRAXGXH, NMVVKAXGXH, EGMSVAEXGXR, GMAVSEXGXR, GMVVDRXGXS, DMVVEAXGXR, DMVVESXGXR, MIVEEXGXL, MIVRSXKXS, MIVKSXKXS, MVVKSXKXS, FLQHNKXEXR and RLEEHLEXAXA.

[0709] In certain embodiments useful for inducing differentiation of mensenchymal or progenitor stem cells from the hair follicle cell lineage, hair follicle tissue regeneration and formation (hair growth), and for protecting from hair follicle-related diseases, disorders, conditions or pathologies, PEP12 is a peptide of general formula PEP1-AA¹⁷-PEP11; wherein AA¹⁷ is selected from the group consisting of G, A, V, L, I, P, F, M, W, T and S (in particular is selected from the group consisting of M, I, L, V and T); wherein PEP1 is SSLS.

[0710] In certain embodiments useful for inducing differentiation of mensenchymal or progenitor stem cells from the hair follicle cell lineage, hair follicle tissue regeneration and formation (hair growth), and for protecting from hair follicle-related diseases, disorders, conditions or pathologies, PEP11 is a peptide with 3 amino acids of general formula AA¹⁸-AA¹⁹-AA²⁰; wherein AA¹⁸ is selected from the group consisting of L, V, Q, A and R, in particular is L; wherein AA¹⁹ is selected from the group consisting of F, W, H, Y, I and K, in particular is F; wherein AA²⁰ is selected from the group consisting of L, F, Y, K, I, V and M, in particular is F. In one particular example, PEP11 is LFF.

[0711] The definitions of “PEP” pairs, quadruplets, hexaplets and heptuplet e.g. PEP1:PEP2, PEP12:PEP2, or PEP7:PEP5:PEP12:LINKER:PEP2:PEP6:PEP8, useful for inducing differentiation of mensenchymal or progenitor stem cells from the hair follicle cell lineage, hair follicle tissue regeneration and formation (hair growth), and for protecting from hair follicle-related diseases, disorders, conditions or pathologies, are as already defined herein to the extent that PEP1 to PEP12 are particularly useful for these applications. For instances:

[0712] In certain embodiments useful for inducing differentiation of mensenchymal or progenitor stem cells from the hair follicle cell lineage, hair follicle tissue regeneration and formation (hair growth), and for protecting from hair follicle-related diseases, disorders, conditions or pathologies, PEP3 is selected from the group consisting of VPT, VPE, APT, TPT, VPA, APV, VPQ, VSQ and SRV; PEP4 is selected from the group consisting of VVE, TVE, VVR, VVK, VAE, AVS, VVD, VEE, VRS, VKS, QHN and EEH; and wherein the pair PEP3:PEP4 is selected from the group consisting of VPT:VVE, VPE:TVE, APT:VVR, APT:VVK, VPT:VAE, VPT:AVS, TPT:VVD, VPA:VVE, APV:VEE, VPQ:VRS, VSQ:VKS, VPQ:VKS, VPT:QHN and SRV:EEH.

[0713] In certain embodiments useful for inducing differentiation of mensenchymal or progenitor stem cells from the hair follicle cell lineage, hair follicle tissue regeneration and formation (hair growth), and for protecting from hair follicle-related diseases, disorders, conditions or pathologies, PEP5 is selected from the group consisting of VPTEL, VPEKM, APTKL, APTQL, VPTKL, TPTKM, VPARL, VPTRL, APVKT, VPQAL, VSQDL, VPQDL, VPTEE and SRVHH; PEP6 is selected from the group consisting of DMVVE, NMTVE, EMVVE, NMVVR, NMVVK, EGMSVAE, GMAVS, GMVVD, MIVEE, MIVRS, MIVKS, MVVKS, FLQHN and RLEEH; and wherein the pair PEP5:PEP6 is selected from the group consisting of VPTEL:DMVVE, VPEKM:NMTVE, VPTEL:EMVVE, APTKL:NMVVR, APTQL:NMVVR, APTKL:NMVVK, VPTKL:EGMSVAE, VPTKL:GMAVS, TPTKM:GMVVD, VPARL:DMVVE, VPTRL:DMVVE, APVKT:MIVEE, VPQAL:MIVRS, VSQDL:MIVKS, VPQDL:NMVVK, VPTEE:FLQHN and SRVHH:RLEEH.

[0714] In certain embodiments useful for inducing differentiation of mensenchymal or progenitor stem cells from the hair follicle cell lineage, hair follicle tissue regeneration and formation (hair growth), and for protecting from hair follicle-related diseases, disorders, conditions or pathologies, PEP7 is selected from the group consisting of KIPKAXX, GIPEPXX, SIPKAXX, HVTKPTX, YVPKPXX, TVPKPXX, AVPKAXX, KVGKAXX, KASKAXX, GSAGPXX, AAPASXX, STPPTXX, HVPKPXX, RVPSTXX, ASAAPXX, ASASPXX, NDEGLEX and SSVKXQP; wherein PEP8 is selected from the group consisting of GXGXR, SXASR, SXGXH, AXGXH, XGXR, EXGXR, RXGXS, AXGXR, SXGXR, XGXL, XKXS, KXEXR and LEXAXA; and wherein the pair PEP7:PEP8 is selected from the group consisting of KIPKAXX:GXGXR, GIPEPXX:SXASR, SIPKAXX:GXGXR, HVTKPTX:SXGXH, YVPKPXX:SXGXH, TVPKPXX:AXGXH, AVPKAXX:AXGXH, KVGKAXX:XGXR, KASKAXX:EXGXR, GSAGPXX:RXGXS, AAPASXX:AXGXR, STPPTXX:SXGXR, HVPKPXX:SXGXH, RVPSTXX:XGXL, ASAAPXX:XKXS, ASASPXX:XKXS, NDEGLEX:KXEXR and SSVKXQP:LEXAXA.

[0715] In certain embodiments useful for inducing differentiation of mensenchymal or progenitor stem cells from the hair follicle cell lineage, hair follicle tissue regeneration and formation (hair growth), and for protecting from hair follicle-related diseases, disorders, conditions or pathologies, PEP9 is selected from the group consisting of KIPKAXXVPTEL, GIPEPXXVPEKM, SIPKAXXVPTEL, HVTKPTXAPTKL, YVPKPXXAPTKL, TVPKPXXAPTQL, AVPKAXXAPTKL, KVGKAXXVPTKL, KASKAXXVPTKL, GSAGPXXTPTKM, AAPASXXVPARL, STPPTXXVPTRL, HVPKPXXAPTKL, RVPSTXXAPVKT, ASAAPXXVPQAL, ASASPXXVSQDL, ASASPXXVPQDL, NDEGLEXVPTEE and SSVKXQPSRVHH; PEP10 is selected from the group consisting of DMVVEGXGXR, NMTVESXASR, EMVVEGXGXR, NMVVRSXGXH, NMVVRAXGXH, NMVVKAXGXH, EGMSVAEXGXR, GMAVSEXGXR, GMVVDRXGXS, DMVVEAXGXR, DMVVESXGXR, MIVEEXGXL, MIVRSXKXS, MIVKSXKXS, MVVKSXKXS, FLQHNKXEXR and RLEEHLEXAXA; and wherein the pair PEP9:PEP10 is selected from the group consisting of KIPKAXXVPTEL:DMVVEGXGXR, GIPEPXXVPEKM:NMTVESXASR, SIPKAXXVPTEL:EMVVEGXGXR, HVTKPTXAPTKL:NMVVRSXGXH, YVPKPXXAPTKL:NMVVRSXGXH, TVPKPXXAPTQL:NMVVRAXGXH, AVPKAXXAPTKL:NMVVKAXGXH, KVGKAXXVPTKL:EGMSVAEXGXR, KASKAXXVPTKL:GMAVSEXGXR, GSAGPXXTPTKM:GMVVDRXGXS, AAPASXXVPARL:DMVVEAXGXR, STPPTXXVPTRL:DMVVESXGXR, HVPKPXXAPTKL:NMVVRSXGXH, RVPSTXXAPVKT:MIVEEXGXL, ASAAPXXVPQAL:MIVRSXKXS, ASASPXXVSQDL:MIVKSXKXS, ASASPXXVPQDL:MVVKSXKXS, NDEGLEXVPTEE:FLQHNKXEXR and SSVKXQPSRVHH:RLEEHLEXAXA.

[0716] In certain embodiments useful for inducing differentiation of mensenchymal or progenitor stem cells from the hair follicle cell lineage, hair follicle tissue regeneration and formation (hair growth), and for protecting from hair follicle-related diseases, disorders, conditions or pathologies, PEP5 is selected from the group consisting of VPTEL, VPEKM, APTKL, APTQL, VPTKL, TPTKM, VPARL, VPTRL, APVKT, VPQAL, VSQDL, VPQDL, VPTEE and SRVHH; PEP6 is selected from the group consisting of DMVVE, NMTVE, EMVVE, NMVVR, NMVVK, EGMSVAE, GMAVS, GMVVD, MIVEE, MIVRS, MIVKS, MVVKS, FLQHN and RLEEH; and wherein the pair PEP5:PEP6 is selected from the group consisting of VPTEL:DMVVE, VPEKM:NMTVE, VPTEL:EMVVE, APTKL:NMVVR, APTQL:NMVVR, APTKL:NMVVK, VPTKL:EGMSVAE, VPTKL:GMAVS, TPTKM:GMVVD, VPARL:DMVVE, VPTRL:DMVVE, APVKT:MIVEE, VPQAL:MIVRS, VSQDL:MIVKS, VPQDL:NMVVK, VPTEE:FLQHN and SRVHH:RLEEH; and wherein the pair PEP5:PEP6 is not VPEKM:NMTVE when PEP1 is SSLS and PEP2 is LKVYP.

[0717] In certain embodiments useful for inducing differentiation of mensenchymal or progenitor stem cells from the hair follicle cell lineage, hair follicle tissue regeneration and formation (hair growth), and for protecting from hair follicle-related diseases, disorders, conditions or pathologies, PEP9 is selected from the group consisting of KIPKAXXVPTEL, GIPEPXXVPEKM, SIPKAXXVPTEL, HVTKPTXAPTKL, YVPKPXXAPTKL, TVPKPXXAPTQL, AVPKAXXAPTKL, KVGKAXXVPTKL, KASKAXXVPTKL, GSAGPXXTPTKM, AAPASXXVPARL, STPPTXXVPTRL, HVPKPXXAPTKL, RVPSTXXAPVKT, ASAAPXXVPQAL, ASASPXXVSQDL, ASASPXXVPQDL, NDEGLEXVPTEE and SSVKXQPSRVHH; PEP10 is selected from the group consisting of DMVVEGXGXR, NMTVESXASR, EMVVEGXGXR, NMVVRSXGXH, NMVVRAXGXH, NMVVKAXGXH, EGMSVAEXGXR, GMAVSEXGXR, GMVVDRXGXS, DMVVEAXGXR, DMVVESXGXR, MIVEEXGXL, MIVRSXKXS, MIVKSXKXS, MVVKSXKXS, FLQHNKXEXR and RLEEHLEXAXA; and wherein the pair PEP9:PEP10 is selected from the group consisting of KIPKAXXVPTEL:DMVVEGXGXR, GIPEPXXVPEKM:NMTVESXASR, SIPKAXXVPTEL:EMVVEGXGXR, HVTKPTXAPTKL:NMVVRSXGXH, YVPKPXXAPTKL:NMVVRSXGXH, TVPKPXXAPTQL:NMVVRAXGXH, AVPKAXXAPTKL:NMVVKAXGXH, KVGKAXXVPTKL:EGMSVAEXGXR, KASKAXXVPTKL:GMAVSEXGXR, GSAGPXXTPTKM:GMVVDRXGXS, AAPASXXVPARL:DMVVEAXGXR, STPPTXXVPTRL:DMVVESXGXR, HVPKPXXAPTKL:NMVVRSXGXH, RVPSTXXAPVKT:MIVEEXGXL, ASAAPXXVPQAL:MIVRSXKXS, ASASPXXVSQDL:MIVKSXKXS, ASASPXXVPQDL:MVVKSXKXS, NDEGLEXVPTEE:FLQHNKXEXR and SSVKXQPSRVHH:RLEEHLEXAXA; and wherein the pair PEP9:PEP10 is not GIPEPXXVPEKM:NMTVESXASR when PEP1 is SSLS and PEP2 is LKVYP.

[0718] In certain embodiments useful for inducing differentiation of mensenchymal or progenitor stem cells from the hair follicle cell lineage, hair follicle tissue regeneration and formation (hair growth), and for protecting from hair follicle-related diseases, disorders, conditions or pathologies, PEP1 is SSLS and PEP11 is LFF.

[0719] In one aspect, the present disclosure provides a GFR-binding compound, wherein said GFR-binding compound is a peptide, a variant or analog thereof, or a peptidomimetic as defined herein, with between 20 and 60 (in particular between 20 and 50, and more particularly, between 20 and 45) amino acids, comprising a peptide with four amino acids (PEP1) or a peptide with eight amino acids (PEP12), a peptide with five amino acids (PEP2), and optionally a pair of peptides selected form the group consisting of PEP3:PEP4, PEP3:PEP6, PEP3:PEP10, PEP5:PEP4, PEP9:PEP4, PEP5:PEP6, PEP5:PEP10, PEP9:PEP6 and PEP9:PEP10; wherein said GFR-binding compound does not comprise the pair of peptides VPEKM:NMTVE when PEP1 is SSLS and PEP2 is LKVYP; and wherein the RMSD is 2.45 Å or less.

[0720] In one aspect, the present disclosure provides a GFR-binding compound, wherein said GFR-binding compound is a peptide, a variant or analog thereof, or a peptidomimetic as defined herein, with between 20 and 60 (in particular between 20 and 50, and more particularly, between 20 and 45) amino acids, comprising a peptide with four amino acids (PEP1) or a peptide with eight amino acids (PEP12), a peptide with five amino acids (PEP2), and optionally a pair of peptides selected form the group consisting of PEP3:PEP4, PEP3:PEP6, PEP3:PEP10, PEP5:PEP4, PEP9:PEP4, PEP5:PEP6, PEP5:PEP10, PEP9:PEP6 and PEP9:PEP10; wherein said GFR-binding compound does not comprise the pair of peptides GIPEPXXVPEKM:NMTVESXASR when PEP1 is SSLS and PEP2 is LKVYP; and wherein the RMSD is 2.45 Å or less.

[0721] In certain embodiments useful for inducing differentiation of mensenchymal or progenitor stem cells from the hair follicle cell lineage, hair follicle tissue regeneration and formation (hair growth), and for protecting from hair follicle-related diseases, disorders, conditions or pathologies, said GFR-binding compound is a synthetic molecule as defined herein in the definition section.

[0722] In certain embodiments useful for inducing differentiation of mensenchymal or progenitor stem cells from the hair follicle cell lineage, hair follicle tissue regeneration and formation (hair growth), and for protecting from hair follicle-related diseases, disorders, conditions or pathologies, said GFR-binding compound is a synthetic peptide, or a variant or analog thereof, or a peptidomimetic.

### Fertility and Reproduction

[0723] Certain embodiments of the invention are particularly useful for inducing differentiation of mensenchymal or progenitor stem cells from the reproduction system lineage, enhancing female fertility, treating, preventing, decreasing or suppressing female infertility or any diseases, conditions, disorders or pathologies related thereof.

[0724] In certain embodiments useful for inducing differentiation of mensenchymal or progenitor stem cells from the reproduction system lineage, enhancing female fertility, treating, preventing, decreasing or suppressing female infertility or any diseases, conditions, disorders or pathologies related thereof, PEP1 is NAIS.

[0725] In certain embodiments useful for inducing differentiation of mensenchymal or progenitor stem cells from the reproduction system lineage, enhancing female fertility, treating, preventing, decreasing or suppressing female infertility or any diseases, conditions, disorders or pathologies related thereof, PEP2 is LKKYR.

[0726] In certain embodiments useful for inducing differentiation of mensenchymal or progenitor stem cells from the reproduction system lineage, enhancing female fertility, treating, preventing, decreasing or suppressing female infertility or any diseases, conditions, disorders or pathologies related thereof, PEP3 is selected from the group consisting of VPT, APT, TPT, VPA and APV.

[0727] In certain embodiments useful for inducing differentiation of mensenchymal or progenitor stem cells from the reproduction system lineage, enhancing female fertility, treating, preventing, decreasing or suppressing female infertility or any diseases, conditions, disorders or pathologies related thereof, PEP4 is selected from the group consisting of VVE, VVR, VVK, VAE, AVS, VVD and VEE.

[0728] In certain embodiments useful for inducing differentiation of mensenchymal or progenitor stem cells from the reproduction system lineage, enhancing female fertility, treating, preventing, decreasing or suppressing female infertility or any diseases, conditions, disorders or pathologies related thereof, PEP5 is a peptide of general formula PEP3-AA¹¹-AA¹²; wherein PEP3 is selected from the group consisting of VPT, APT, TPT, VPA and APV; wherein AA¹¹ is selected from the group consisting of E, K, Q, R, A, D, G and H, in particular is selected from the group consisting of E, K, Q and R; wherein AA¹² is selected from the group consisting of L, M, T, E, Q and H, in particular is selected from the group consisting of L, M and T. In one particular example, PEP5 is selected from the group consisting of VPTEL, APTKL, APTQL, VPTKL, TPTKM, VPARL, VPTRL and APVKT.

[0729] In certain embodiments useful for inducing differentiation of mensenchymal or progenitor stem cells from the reproduction system lineage, enhancing female fertility, treating, preventing, decreasing or suppressing female infertility or any diseases, conditions, disorders or pathologies related thereof, PEP6 is a peptide of general formula AA²⁶-AA²⁷-AA²⁸-AA²⁹-PEP4; wherein PEP4 is selected from the group consisting of VVE, VVR, VRS, VKS, VVK, QHN, EEH and EDH; wherein AA²⁶ is absent or selected from the group consisting of AA^{III} amino acids, preferably is absent or E; wherein AA²⁷ and AA²⁸ are independently selected from the group consisting of AA^{III} and AA^{V} amino acids, preferably AA²⁷ is selected from the group consisting of D, N, E, M and G, preferably AA²⁸ is M or I; wherein AA²⁹ is absent or selected from the group consisting of AA^{II} amino acids, preferably is absent or S. In one particular example, PEP6 is selected from the group consisting of DMVVE, EMVVE, NMVVR, NMVVK, EGMSVAE, GMAVS, GMVVD and MIVEE.

[0730] In certain embodiments useful for inducing differentiation of mensenchymal or progenitor stem cells from the reproduction system lineage, enhancing female fertility, treating, preventing, decreasing or suppressing female infertility or any diseases, conditions, disorders or pathologies related thereof, PEP7 is an amino acid or a peptide with between two and seven amino acids of general formula AA¹-AA²-AA³-AA⁴-AA⁵-AA⁶-AA⁷; wherein AA¹, AA², AA³, AA⁴, and AA⁵ are independently absent or AA^{I} as defined herein; wherein AA⁶ is absent or selected from the group consisting of S, T, C, E, Q, P and R, preferably is selected from the group consisting of C, S and T; wherein AA⁷ is absent or is selected from the group consisting of S, T, C, E, Q, P and R, preferably is selected from the group consisting of S and C; and wherein at least one of AA¹, AA², AA³, AA⁴, AA⁵, AA⁶ or AA⁷ is not absent. In one particular example, PEP7 is selected from the group consisting of KIPKAXX, SIPKAXX, HVTKPTX, YVPKPXX, TVPKPXX, AVPKAXX, KVGKAXX, KASKAXX, GSAGPXX, AAPASXX, STPPTXX, HVPKPXX and RVPSTXX.

[0731] In certain embodiments useful for inducing differentiation of mensenchymal or progenitor stem cells from the reproduction system lineage, enhancing female fertility, treating, preventing, decreasing or suppressing female infertility or any diseases, conditions, disorders or pathologies related thereof, PEP8 is an amino acid or a peptide with between two and six amino acids of general formula AA³³-AA³⁴-AA³⁵-AA³⁶-AA³⁷-AA³⁸; wherein AA³³ is absent or is selected from the group consisting of AA^{I} amino acids at the exception of AA^{VI} amino acids, in particular is absent or is selected from the group consisting of G, S, A, E and R; AA³⁴ is absent or is selected from the group consisting of AA^{III} and AA^{IV} amino acids, in particular is absent; wherein AA³⁵ is absent or is selected from the group consisting of AA^{II} amino acids, preferably is S or C; wherein AA³⁶ is absent or is selected from the group consisting of AA^{III} and AA^{IV} amino acids, in particular is G; wherein AA³⁷ is absent or is selected from the group consisting of AA^{II} amino acids, preferably is S or C; wherein AA³⁸ is absent or is selected from the group consisting of AA^{I}, in particular is selected from the group consisting of R, H, S and L; and wherein at least one of AA³³, AA³⁴, AA³⁵, AA³⁶, AA³⁷ or AA³⁸ is not absent. In one particular example, PEP8 is selected from the group consisting of GXGXR, SXGXH, AXGXH, XGXR, EXGXR, RXGXS, AXGXR, SXGXR and XGXL.

[0732] In certain embodiments useful for inducing differentiation of mensenchymal or progenitor stem cells from the reproduction system lineage, enhancing female fertility, treating, preventing, decreasing or suppressing female infertility or any diseases, conditions, disorders or pathologies related thereof, PEP9 is a peptide of general formula AA¹-AA²-AA³-AA⁴-AA⁵-AA⁶-AA⁷-PEP5; wherein PEP5 is a peptide of formula PEP3-AA¹¹-AA¹²; wherein PEP3 is selected from the group consisting of VPT, APT, TPT, VPA and APV; wherein AA¹ is selected from the group consisting of E, K, Q, R, A, D, G and H, in particular is selected from the group consisting of E, K, Q and R; wherein AA¹² is selected from the group consisting of L, M, T, E, Q and H, in particular is selected from the group consisting of L, M and T; wherein AA¹, AA², AA³, AA⁴, and AA⁵ are independently absent or AA^{I} as defined herein; wherein AA⁶ is absent or selected from the group consisting of S, T, C, E, Q, P and R, preferably is selected from the group consisting of C, S and T; wherein AA⁷ is selected from the group consisting of S, T, C, E, Q, P and R, preferably is selected from the group consisting of S and C. In one particular example, PEP9 is selected from the group consisting of KIPKAXXVPTEL, SIPKAXXVPTEL, HVTKPTXAPTKL, YVPKPXXAPTKL, TVPKPXXAPTQL, AVPKAXXAPTKL, KVGKAXXVPTKL, KASKAXXVPTKL, GSAGPXXTPTKM, AAPASXXVPARL, STPPTXXVPTRL, HVPKPXXAPTKL and RVPSTXXAPVKT.

[0733] In certain embodiments useful for inducing differentiation of mensenchymal or progenitor stem cells from the reproduction system lineage, enhancing female fertility, treating, preventing, decreasing or suppressing female infertility or any diseases, conditions, disorders or pathologies related thereof, PEP10 is a peptide of general formula PEP6-AA³³-AA³⁴-AA³⁵-AA³⁶-AA³⁷-AA³⁸; wherein PEP6 is a peptide of formula AA²⁶-AA²⁷-AA²⁸-AA²⁹-PEP4; wherein PEP4 is selected from the group consisting of VVE, VVR, VVK, VAE, AVS, VVD and VEE; wherein AA²⁶ is absent or selected from the group consisting of AA^{III} amino acids, preferably is absent or E; wherein AA²⁷ and AA²⁸ are independently selected from the group consisting of AA^{III} and AA^{V} amino acids, preferably AA²⁷ is selected from the group consisting of D, N, E, M and G, preferably AA²⁸ is M or I; wherein AA²⁹ is absent or selected from the group consisting of AA^{II} amino acids, preferably is absent or is S; wherein AA³³ is absent or is selected from the group consisting of AA^{I} amino acids at the exception of AA^{VI} amino acids, in particular is absent or is selected from the group consisting of G, S, A, E and R; AA³⁴ is absent or is selected from the group consisting of AA^{III} and AA^{IV} amino acids, in particular is absent; wherein AA³⁵ is absent or is selected from the group consisting of AA^{II} amino acids, preferably is S or C; wherein AA³⁶ is absent or is selected from the group consisting of AA^{III} and AA^{IV} amino acids, in particular is G; wherein AA³⁷ is absent or is selected from the group consisting of AA^{II} amino acids, preferably is S or C; wherein AA³⁸ is absent or is selected from the group consisting of AA^{I}, in particular is selected from the group consisting of R, H, S and L. In one particular example, PEP10 is selected from the group consisting of DMVVEGXGXR, EMVVEGXGXR, NMVVRSXGXH, NMVVRSXGXH, NMVVRAXGXH, NMVVKAXGXH, EGMSVAEXGXR, GMAVSEXGXR, GMVVDRXGXS, DMVVEAXGXR, DMVVESXGXR, NMVVRSXGXH and MIVEEXGXL.

[0734] In certain embodiments useful for inducing differentiation of mensenchymal or progenitor stem cells from the reproduction system lineage, enhancing female fertility, treating, preventing, decreasing or suppressing female infertility or any diseases, conditions, disorders or pathologies related thereof, PEP12 is a peptide of general formula PEP1-AA¹⁷-PEP11; wherein AA¹⁷ is selected from the group consisting of G, A, V, L, I, P, F, M, W, T and S (in particular is selected from the group consisting of M, I, L, V and T); wherein PEP1 is NAIS.

[0735] In certain embodiments useful for inducing differentiation of mensenchymal or progenitor stem cells from the reproduction system lineage, enhancing female fertility, treating, preventing, decreasing or suppressing female infertility or any diseases, conditions, disorders or pathologies related thereof, PEP11 is a peptide with 3 amino acids of general formula AA¹⁸-AA¹⁹-AA²⁰; wherein AA¹⁸ is selected from the group consisting of L, V, Q, A and R, in particular is L; wherein AA¹⁹ is selected from the group consisting of F, W, H, Y, I and K, in particular is Y; wherein AA²⁰ is selected from the group consisting of L, F, Y, K, I, V and M, in particular is F. In one particular example, PEP11 is LYF.

[0736] The definitions of “PEP” pairs, quadruplets, hexaplets and heptuplet e.g. PEP1:PEP2, PEP12:PEP2, or PEP7:PEP5:PEP12:LINKER:PEP2:PEP6:PEP8, useful for inducing differentiation of mensenchymal or progenitor stem cells from the reproduction system lineage, enhancing female fertility, treating, preventing, decreasing or suppressing female infertility or any diseases, conditions, disorders or pathologies related thereof, are as already defined herein to the extent that PEP1 to PEP12 are particularly useful for these applications. For instances:

[0737] In certain embodiments useful for inducing differentiation of mensenchymal or progenitor stem cells from the reproduction system lineage, enhancing female fertility, treating, preventing, decreasing or suppressing female infertility or any diseases, conditions, disorders or pathologies related thereof, PEP3 is selected from the group consisting of VPT, APT, TPT, VPA and APV; PEP4 is selected from the group consisting of VVE, VVR, VVK, VAE, AVS, VVD and VEE; and wherein the pair PEP3:PEP4 is selected from the group consisting of VPT:VVE, APT:VVR, APT:VVK, VPT:VAE, VPT:AVS, TPT:VVD, VPA:VVE and APV:VEE.

[0738] In certain embodiments useful for inducing differentiation of mensenchymal or progenitor stem cells from the reproduction system lineage, enhancing female fertility, treating, preventing, decreasing or suppressing female infertility or any diseases, conditions, disorders or pathologies related thereof, PEP5 is selected from the group consisting of VPTEL, APTKL, APTQL, VPTKL, TPTKM, VPARL, VPTRL and APVKT; PEP6 is selected from the group consisting of DMVVE, EMVVE, NMVVR, NMVVK, EGMSVAE, GMAVS, GMVVD and MIVEE; and wherein the pair PEP5:PEP6 is selected from the group consisting of VPTEL:DMVVE, VPTEL:EMVVE, APTKL:NMVVR, APTQL:NMVVR, APTKL:NMVVK, VPTKL:EGMSVAE, VPTKL:GMAVS, TPTKM:GMVVD, VPARL:DMVVE, VPTRL:DMVVE and APVKT:MIVEE.

[0739] In certain embodiments useful for inducing differentiation of mensenchymal or progenitor stem cells from the reproduction system lineage, enhancing female fertility, treating, preventing, decreasing or suppressing female infertility or any diseases, conditions, disorders or pathologies related thereof, PEP7 is selected from the group consisting of KIPKAXX, SIPKAXX, HVTKPTX, YVPKPXX, TVPKPXX, AVPKAXX, KVGKAXX, KASKAXX, GSAGPXX, AAPASXX, STPPTXX, HVPKPXX and RVPSTXX; wherein PEP8 is selected from the group consisting of GXGXR, SXGXH, AXGXH, XGXR, EXGXR, RXGXS, AXGXR, SXGXR and XGXL; and wherein the pair PEP7:PEP8 is selected from the group consisting of KIPKAXX:GXGXR, SIPKAXX:GXGXR, HVTKPTX:SXGXH, YVPKPXX:SXGXH, TVPKPXX:AXGXH, AVPKAXX:AXGXH, KVGKAXX:XGXR, KASKAXX:EXGXR, GSAGPXX:RXGXS, AAPASXX:AXGXR, STPPTXX:SXGXR, HVPKPXX:SXGXH and RVPSTXX:XGXL.

[0740] In certain embodiments useful for inducing differentiation of mensenchymal or progenitor stem cells from the reproduction system lineage, enhancing female fertility, treating, preventing, decreasing or suppressing female infertility or any diseases, conditions, disorders or pathologies related thereof, PEP9 is selected from the group consisting of KIPKAXXVPTEL, SIPKAXXVPTEL, HVTKPTXAPTKL, YVPKPXXAPTKL, TVPKPXXAPTQL, AVPKAXXAPTKL, KVGKAXXVPTKL, KASKAXXVPTKL, GSAGPXXTPTKM, AAPASXXVPARL, STPPTXXVPTRL, HVPKPXXAPTKL and RVPSTXXAPVKT; PEP10 is selected from the group consisting of DMVVEGXGXR, EMVVEGXGXR, NMVVRSXGXH, NMVVRSXGXH, NMVVRAXGXH, NMVVKAXGXH, EGMSVAEXGXR, GMAVSEXGXR, GMVVDRXGXS, DMVVEAXGXR, DMVVESXGXR, NMVVRSXGXH and MIVEEXGXL; and wherein the pair PEP9:PEP10 is selected from the group consisting of KIPKAXXVPTEL:DMVVEGXGXR, SIPKAXXVPTEL:EMVVEGXGXR, HVTKPTXAPTKL:NMVVRSXGXH, YVPKPXXAPTKL:NMVVRSXGXH, TVPKPXXAPTQL:NMVVRAXGXH, AVPKAXXAPTKL:NMVVKAXGXH, KVGKAXXVPTKL:EGMSVAEXGXR, KASKAXXVPTKL:GMAVSEXGXR, GSAGPXXTPTKM:GMVVDRXGXS, AAPASXXVPARL:DMVVEAXGXR, STPPTXXVPTRL:DMVVESXGXR, HVPKPXXAPTKL:NMVVRSXGXH and RVPSTXXAPVKT:MIVEEXGXL.

[0741] In certain embodiments useful for inducing differentiation of mensenchymal or progenitor stem cells from the reproduction system lineage, enhancing female fertility, treating, preventing, decreasing or suppressing female infertility or any diseases, conditions, disorders or pathologies related thereof, PEP5 is selected from the group consisting of VPTEL, APTKL, APTQL, VPTKL, TPTKM, VPARL, VPTRL and APVKT; PEP6 is selected from the group consisting of DMVVE, EMVVE, NMVVR, NMVVK, EGMSVAE, GMAVS, GMVVD and MIVEE; and wherein the pair PEP5:PEP6 is selected from the group consisting of VPTEL:DMVVE, VPTEL:EMVVE, APTKL:NMVVR, APTQL:NMVVR, APTKL:NMVVK, VPTKL:EGMSVAE, VPTKL:GMAVS, TPTKM:GMVVD, VPARL:DMVVE, VPTRL:DMVVE and APVKT:MIVEE; and wherein the pair PEP5:PEP6 is not APTKL:NMVVR when PEP1 is NAIS and PEP2 is LKKYR.

[0742] In certain embodiments useful for inducing differentiation of mensenchymal or progenitor stem cells from the reproduction system lineage, enhancing female fertility, treating, preventing, decreasing or suppressing female infertility or any diseases, conditions, disorders or pathologies related thereof, PEP9 is selected from the group consisting of KIPKAXXVPTEL, SIPKAXXVPTEL, HVTKPTXAPTKL, YVPKPXXAPTKL, TVPKPXXAPTQL, AVPKAXXAPTKL, KVGKAXXVPTKL, KASKAXXVPTKL, GSAGPXXTPTKM, AAPASXXVPARL, STPPTXXVPTRL, HVPKPXXAPTKL and RVPSTXXAPVKT; PEP10 is selected from the group consisting of DMVVEGXGXR, EMVVEGXGXR, NMVVRSXGXH, NMVVRSXGXH, NMVVRAXGXH, NMVVKAXGXH, EGMSVAEXGXR, GMAVSEXGXR, GMVVDRXGXS, DMVVEAXGXR, DMVVESXGXR, NMVVRSXGXH and MIVEEXGXL; and wherein the pair PEP9:PEP10 is selected from the group consisting of KIPKAXXVPTEL:DMVVEGXGXR, SIPKAXXVPTEL:EMVVEGXGXR, HVTKPTXAPTKL:NMVVRSXGXH, YVPKPXXAPTKL:NMVVRSXGXH, TVPKPXXAPTQL:NMVVRAXGXH, AVPKAXXAPTKL:NMVVKAXGXH, KVGKAXXVPTKL:EGMSVAEXGXR, KASKAXXVPTKL:GMAVSEXGXR, GSAGPXXTPTKM:GMVVDRXGXS, AAPASXXVPARL:DMVVEAXGXR, STPPTXXVPTRL:DMVVESXGXR, HVPKPXXAPTKL:NMVVRSXGXH and RVPSTXXAPVKT:MIVEEXGXL; and wherein the pair PEP9:PEP10 is not HVPKPXXAPTKL:NMVVRSXGXH when PEP1 is NAIS and PEP2 is LKKYR.

[0743] In certain embodiments useful for inducing differentiation of mensenchymal or progenitor stem cells from the reproduction system lineage, enhancing female fertility, treating, preventing, decreasing or suppressing female infertility or any diseases, conditions, disorders or pathologies related thereof, PEP1 is NAIS and PEP11 is LYF.

[0744] In one aspect, the present disclosure provides a GFR-binding compound, wherein said GFR-binding compound is a peptide, a variant or analog thereof, or a peptidomimetic as defined herein, with between 20 and 60 (in particular between 20 and 50, and more particularly, between 20 and 45) amino acids, comprising a peptide with four amino acids (PEP1) or a peptide with eight amino acids (PEP12), a peptide with five amino acids (PEP2), and optionally a pair of peptides selected form the group consisting of PEP3:PEP4, PEP3:PEP6, PEP3:PEP10, PEP5:PEP4, PEP9:PEP4, PEP5:PEP6, PEP5:PEP10, PEP9:PEP6 and PEP9:PEP10; wherein said GFR-binding compound does not comprise the pair of peptides APTKL:NMVVR when PEP1 is NAIS and PEP2 is LKKYR; and wherein the RMSD is 2.45 Å or less.

[0745] In one aspect, the present disclosure provides a GFR-binding compound, wherein said GFR-binding compound is a peptide, a variant or analog thereof, or a peptidomimetic as defined herein, with between 20 and 60 (in particular between 20 and 50, and more particularly, between 20 and 45) amino acids, comprising a peptide with four amino acids (PEP1) or a peptide with eight amino acids (PEP12), a peptide with five amino acids (PEP2), and optionally a pair of peptides selected form the group consisting of PEP3:PEP4, PEP3:PEP6, PEP3:PEP10, PEP5:PEP4, PEP9:PEP4, PEP5:PEP6, PEP5:PEP10, PEP9:PEP6 and PEP9:PEP10; wherein said GFR-binding compound does not comprise the pair of peptides HVPKPXXAPTKL:NMVVRSXGXH when PEP1 is NAIS and PEP2 is LKKYR; and wherein the RMSD is 2.45 Å or less.

[0746] In certain embodiments useful for inducing differentiation of mensenchymal or progenitor stem cells from the reproduction system lineage, enhancing female fertility, treating, preventing, decreasing or suppressing female infertility or any diseases, conditions, disorders or pathologies related thereof, said GFR-binding compound is a synthetic molecule as defined herein in the definition section.

[0747] In certain embodiments useful for inducing differentiation of mensenchymal or progenitor stem cells from the reproduction system lineage, enhancing female fertility, treating, preventing, decreasing or suppressing female infertility or any diseases, conditions, disorders or pathologies related thereof, said GFR-binding compound is a synthetic peptide, or a variant or analog thereof, or a peptidomimetic.

### Lung

[0748] Certain embodiments of the invention are particularly useful for inducing differentiation of mensenchymal or progenitor stem cells from the lung cell lineage, regenerating lung tissues, and protecting patients from lung tissue degeneration-related diseases, conditions, disorders or pathologies.

[0749] In certain embodiments useful for inducing differentiation of mensenchymal or progenitor stem cells from the lung cell lineage, regenerating lung tissues, and protecting patients from lung tissue degeneration-related diseases, conditions, disorders or pathologies, PEP1 is selected from the group consisting of NAIS, SATS, SPIS, EPIS and SPIN.

[0750] In certain embodiments useful for inducing differentiation of mensenchymal or progenitor stem cells from the lung cell lineage, regenerating lung tissues, and protecting patients from lung tissue degeneration-related diseases, conditions, disorders or pathologies, PEP2 is selected from the group consisting of LKKYR, LRKHR, LKYHY, KFKYE and YGKIP.

[0751] In certain embodiments useful for inducing differentiation of mensenchymal or progenitor stem cells from the lung cell lineage, regenerating lung tissues, and protecting patients from lung tissue degeneration-related diseases, conditions, disorders or pathologies, PEP3 is selected from the group consisting of VPT, VPE, APT, TPT, VPA, APV, VPQ and VSQ.

[0752] In certain embodiments useful for inducing differentiation of mensenchymal or progenitor stem cells from the lung cell lineage, regenerating lung tissues, and protecting patients from lung tissue degeneration-related diseases, conditions, disorders or pathologies, PEP4 is selected from the group consisting of VVE, TVE, VVR, VVK, VAE, AVS, VVD, VEE, VRS and VKS.

[0753] In certain embodiments useful for inducing differentiation of mensenchymal or progenitor stem cells from the lung cell lineage, regenerating lung tissues, and protecting patients from lung tissue degeneration-related diseases, conditions, disorders or pathologies, PEP5 is a peptide of general formula PEP3-AA¹¹-AA¹²; wherein PEP3 is selected from the group consisting of VPT, VPE, APT, TPT, VPA, APV, VPQ and VSQ; wherein AA¹¹ is selected from the group consisting of E, K, Q, R, A, D, G and H, in particular is selected from the group consisting of E, K, Q, R, A and D; wherein AA¹² is selected from the group consisting of L, M, T, E, Q and H, in particular selected from the group consisting of L, M and T. In one particular example, PEP5 is selected from the group consisting of VPTEL, VPEKM, APTKL, APTQL, VPTKL, TPTKM, VPARL, VPTRL, APVKT, VPQAL, VSQDL and VPQDL.

[0754] In certain embodiments useful for inducing differentiation of mensenchymal or progenitor stem cells from the lung cell lineage, regenerating lung tissues, and protecting patients from lung tissue degeneration-related diseases, conditions, disorders or pathologies, PEP6 is a peptide of general formula AA²⁶-AA²⁷-AA²⁸-AA²⁹-PEP4; wherein PEP4 is selected from the group consisting of VVE, TVE, VVR, VVK, VAE, AVS, VVD, VEE, VRS and VKS; wherein AA²⁶ is absent or selected from the group consisting of AA^{III} amino acids, preferably is absent or E; wherein AA²⁷ and AA²⁸ are independently selected from the group consisting of AA^{III} and AA^{V} amino acids, preferably AA²⁷ is selected from the group consisting of D, E, N, G and M, preferably AA²⁸ is selected from the group consisting of M, I and V; wherein AA²⁹ is absent or selected from the group consisting of AA^{II} amino acids, preferably absent or S. In one particular example, PEP6 is selected from the group consisting of DMVVE, NMTVE, EMVVE, NMVVR, NMVVK, EGMSVAE, GMAVS, GMVVD, DMVVE, MIVEE, MIVRS, MIVKS and MVVKS.

[0755] In certain embodiments useful for inducing differentiation of mensenchymal or progenitor stem cells from the lung cell lineage, regenerating lung tissues, and protecting patients from lung tissue degeneration-related diseases, conditions, disorders or pathologies, PEP7 is an amino acid or a peptide with between two and seven amino acids of general formula AA¹-AA²-AA³-AA⁴-AA⁵-AA⁶-AA⁷; wherein AA¹, AA², AA³, AA⁴, and AA⁵ are independently absent or AA^{I} as defined herein; wherein AA⁶ is absent or selected from the group consisting of S, T, C, E, Q, P and R, preferably is selected from the group consisting of C, S and T; wherein AA⁷ is absent or is selected from the group consisting of S, T, C, E, Q, P and R, preferably is C or S; and wherein at least one of AA¹, AA², AA³, AA⁴, AA⁵, AA⁶ or AA⁷ is not absent. In one particular example, PEP7 is selected from the group consisting of KIPKAXX, GIPEPXX, SIPKAXX, HVTKPTX, YVPKPXX, TVPKPXX, AVPKAXX, KVGKAXX, KASKAXX, GSAGPXX, AAPASXX, STPPTXX, HVPKPXX, RVPSTXX, ASAAPXX and ASASPXX.

[0756] In certain embodiments useful for inducing differentiation of mensenchymal or progenitor stem cells from the lung cell lineage, regenerating lung tissues, and protecting patients from lung tissue degeneration-related diseases, conditions, disorders or pathologies, PEP8 is an amino acid or a peptide with between two and six amino acids of general formula AA³³-AA³⁴-AA³⁵-AA³⁶-AA³⁷-AA³⁸; wherein AA³³ is absent or is selected from the group consisting of AA^{I} amino acids at the exception of AA^{VI} amino acids; AA³⁴ is absent or is selected from the group consisting of AA^{III} and AA^{IV} amino acids; wherein AA³⁵ is absent or is selected from the group consisting of AA^{II} amino acids, preferably is S or C; wherein AA³⁶ is absent or is selected from the group consisting of AA^{III} and AA^{IV} amino acids; wherein AA³⁷ is absent or is selected from the group consisting of AA^{II} amino acids, preferably is S or C; wherein AA³⁸ is absent or is selected from the group consisting of AA^{I}; and wherein at least one of AA³³, AA³⁴, AA³⁵, AA³⁶, AA³⁷ or AA³⁸ is not absent. In one particular example, PEP8 is selected from the group consisting of GXGXR, SXAXR, SXGXH, AXGXH, XGXR, EXGXR, RXGXS, AXGXR, SXGXR, XGXL and XKXS.

[0757] In certain embodiments useful for inducing differentiation of mensenchymal or progenitor stem cells from the lung cell lineage, regenerating lung tissues, and protecting patients from lung tissue degeneration-related diseases, conditions, disorders or pathologies, PEP9 is a peptide of general formula AA¹-AA²-AA³-AA⁴-AA⁵-AA⁶-AA⁷-PEP5; wherein PEP5 is a peptide of formula PEP3-AA¹¹-AA¹²; wherein PEP3 is selected from the group consisting of VPT, VPE, APT, TPT, VPA, APV, VPQ and VSQ; wherein AA¹ is selected from the group consisting of E, K, Q, R, A, D, G and H, in particular E, K, Q, R, A and D; wherein AA¹² is selected from the group consisting of L, M, T, E, Q and H, in particular selected from the group consisting of L, M and T; wherein AA¹, AA², AA³, AA⁴, and AA⁵ are independently absent or AA^{I} as defined herein; wherein AA⁶ is absent or selected from the group consisting of S, T, C, E, Q, P and R, preferably is selected from the group consisting of C, S and T; wherein AA⁷ is selected from the group consisting of S, T, C, E, Q, P and R, preferably is C or S. In one particular example, PEP9 is selected from the group consisting of KIPKAXXVPTEL, GIPEPXXVPEKM, SIPKAXXVPTEL, HVTKPTXAPTKL, YVPKPXXAPTKL, TVPKPXXAPTQL, AVPKAXXAPTKL, KVGKAXXVPTKL, KASKAXXVPTKL, GSAGPXXTPTKM, AAPASXXVPARL, STPPTXXVPTRL, HVPKPXXAPTKL, RVPSTXXAPVKT, ASAAPXXVPQAL, ASASPXXVSQDL and ASASPXXVPQDL.

[0758] In certain embodiments useful for inducing differentiation of mensenchymal or progenitor stem cells from the lung cell lineage, regenerating lung tissues, and protecting patients from lung tissue degeneration-related diseases, conditions, disorders or pathologies, PEP10 is a peptide of general formula PEP6-AA³³-AA³⁴-AA³⁵-AA³⁶-AA³⁷-AA³⁸; wherein PEP6 is a peptide of formula AA²⁶-AA²⁷-AA²⁸-AA²⁹-PEP4; wherein PEP4 is selected from the group consisting of VVE, TVE, VVR, VVK, VAE, AVS, VVD, VEE, VRS and VKS; wherein AA²⁶ is absent or selected from the group consisting of AA^{III} amino acids, preferably is absent or E; wherein AA²⁷ and AA²⁸ are independently selected from the group consisting of AA^{III} and AA^{V} amino acids, preferably AA²⁷ is selected from the group consisting of D, E, N, G and M, preferably AA²⁸ is selected from the group consisting of M, I and V; wherein AA²⁹ is absent or selected from the group consisting of AA^{II} amino acids, preferably absent or S; wherein AA³³ is absent or is selected from the group consisting of AA^{I} amino acids at the exception of AA^{VI} amino acids; AA³⁴ is absent or is selected from the group consisting of AA^{III} and AA^{IV} amino acids; wherein AA³⁵ is absent or is selected from the group consisting of AA^{II} amino acids, preferably is S or C; wherein AA³⁶ is absent or is selected from the group consisting of AA^{III} and AA^{IV} amino acids; wherein AA³⁷ is absent or is selected from the group consisting of AA^{II} amino acids, preferably is S or C; wherein AA³⁸ is absent or is selected from the group consisting of AA^{I}. In one particular example, PEP10 is selected from the group consisting of DMVVEGXGXR, NMTVESXAXR, EMVVEGXGXR, NMVVRSXGXH, NMVVRSXGXH, NMVVRAXGXH, NMVVKAXGXH, EGMSVAEXGXR, GMAVSEXGXR, GMVVDRXGXS, DMVVEAXGXR, DMVVESXGXR, NMVVRSXGXH, MIVEEXGXL, MIVRSXKXS, MIVKSXKXS and MVVKSXKXS.

[0759] In certain embodiments useful for inducing differentiation of mensenchymal or progenitor stem cells from the lung cell lineage, regenerating lung tissues, and protecting patients from lung tissue degeneration-related diseases, conditions, disorders or pathologies, PEP12 is a peptide of general formula PEP1-AA¹⁷-PEP11; wherein AA¹⁷ is selected from the group consisting of G, A, V, L, I, P, F, M, W, T and S (in particular is selected from the group consisting of M, I, L, V and T); wherein PEP1 is selected from the group consisting of NAIS, SATS, SPIS, EPIS and SPIN.

[0760] In certain embodiments useful for inducing differentiation of mensenchymal or progenitor stem cells from the lung cell lineage, regenerating lung tissues, and protecting patients from lung tissue degeneration-related diseases, conditions, disorders or pathologies, PEP11 is a peptide with 3 amino acids of general formula AA¹⁸-AA¹⁹-AA²⁰; wherein AA¹⁸ is selected from the group consisting of L, V, Q, A and R, in particular is L; wherein AA¹⁹ is selected from the group consisting of F, W, H and Y (in particular is a polar aromatic amino acid such as Y); wherein AA²⁰ is selected from the group consisting of L, F, Y, K, I, V and M, in particular is selected from the group consisting of L, F, Y, and K. In one particular example, PEP11 is selected from the group consisting of LYF, LYY, LYK and LYL.

[0761] The definitions of “PEP” pairs, quadruplets, hexaplets and heptuplet e.g. PEP1:PEP2, PEP12:PEP2, or PEP7:PEP5:PEP12:LINKER:PEP2:PEP6:PEP8, useful for inducing differentiation of mensenchymal or progenitor stem cells from the lung cell lineage, regenerating lung tissues, and protecting patients from lung tissue degeneration-related diseases, conditions, disorders or pathologies, are as already defined herein to the extent that PEP1 to PEP12 are particularly useful for these applications. For instances:

[0762] In certain embodiments useful for inducing differentiation of mensenchymal or progenitor stem cells from the lung cell lineage, regenerating lung tissues, and protecting patients from lung tissue degeneration-related diseases, conditions, disorders or pathologies, the pair PEP1:PEP2 is selected from the group consisting of NAIS:LKKYR, SATS:LRKHR, SPIS:LKYHY, EPIS:KFKYE and SPIN:YGKIP.

[0763] In certain embodiments useful for inducing differentiation of mensenchymal or progenitor stem cells from the lung cell lineage, regenerating lung tissues, and protecting patients from lung tissue degeneration-related diseases, conditions, disorders or pathologies, the pair PEP12:PEP2 is selected from the group consisting of NAIS-AA¹⁷-LYF:LKKYR, SATS-AA¹⁷-LYY:LRKHR, SPIS-AA¹⁷-LYK:LKYHY, EPIS-AA¹⁷-LYL:KFKYE and SPIN-AA¹⁷-LYF:YGKIP; wherein AA¹⁷ is selected from the group consisting of G, A, V, L, I, P, F, M, W, T and S (in particular is selected from the group consisting of M, I, V and T).

[0764] In certain embodiments useful for inducing differentiation of mensenchymal or progenitor stem cells from the lung cell lineage, regenerating lung tissues, and protecting patients from lung tissue degeneration-related diseases, conditions, disorders or pathologies, PEP3 is selected from the group consisting of VPT, VPE, APT, TPT, VPA, APV, VPQ and VSQ; PEP4 is selected from the group consisting of VVE, TVE, VVR, VVK, VAE, AVS, VVD, VEE, VRS and VKS; and wherein the pair PEP3:PEP4 is selected from the group consisting of VPT:VVE, VPE:TVE, APT:VVR, APT:VVK, VPT:VAE, VPT:AVS, TPT:VVD, VPA:VVE, APV:VEE, VPQ:VRS, VSQ:VKS and VPQ:VKS.

[0765] In certain embodiments useful for inducing differentiation of mensenchymal or progenitor stem cells from the lung cell lineage, regenerating lung tissues, and protecting patients from lung tissue degeneration-related diseases, conditions, disorders or pathologies, PEP5 is selected from the group consisting of VPTEL, VPEKM, APTKL, APTQL, VPTKL, TPTKM, VPARL, VPTRL, APVKT, VPQAL, VSQDL and VPQDL; PEP6 is selected from the group consisting of DMVVE, NMTVE, EMVVE, NMVVR, NMVVK, EGMSVAE, GMAVS, GMVVD, DMVVE, MIVEE, MIVRS, MIVKS and MVVKS; and wherein the pair PEP5:PEP6 is selected from the group consisting of VPTEL:DMVVE, VPEKM:NMTVE, VPTEL:EMVVE, APTKL:NMVVR, APTQL:NMVVR, APTKL:NMVVK, VPTKL:EGMSVAE, VPTKL:GMAVS, TPTKM:GMVVD, VPARL:DMVVE, VPTRL:DMVVE, APVKT:MIVEE, VPQAL:MIVRS, VSQDL:MIVKS and VPQDL:MVVKS.

[0766] In certain embodiments useful for inducing differentiation of mensenchymal or progenitor stem cells from the lung cell lineage, regenerating lung tissues, and protecting patients from lung tissue degeneration-related diseases, conditions, disorders or pathologies, PEP7 is selected from the group consisting of KIPKAXX, GIPEPXX, SIPKAXX, HVTKPTX, YVPKPXX, TVPKPXX, AVPKAXX, KVGKAXX, KASKAXX, GSAGPXX, AAPASXX, STPPTXX, HVPKPXX, RVPSTXX, ASAAPXX and ASASPXX; wherein PEP8 is selected from the group consisting of GXGXR, SXAXR, SXGXH, AXGXH, XGXR, EXGXR, RXGXS, AXGXR, SXGXR, XGXL and XKXS; and wherein the pair PEP7:PEP8 is selected from the group consisting of KIPKAXX:GXGXR, GIPEPXX:SXAXR, SIPKAXX:GXGXR, HVTKPTX:SXGXH, YVPKPXX:SXGXH, TVPKPXX:AXGXH, AVPKAXX:AXGXH, KVGKAXX:XGXR, KASKAXX:EXGXR, GSAGPXX:RXGXS, AAPASXX:AXGXR, STPPTXX:SXGXR, HVPKPXX:SXGXH, RVPSTXX:XGXL, ASAAPXX:XKXS and ASASPXX:XKXS.

[0767] In certain embodiments useful for inducing differentiation of mensenchymal or progenitor stem cells from the lung cell lineage, regenerating lung tissues, and protecting patients from lung tissue degeneration-related diseases, conditions, disorders or pathologies, PEP9 is selected from the group consisting of KIPKAXXVPTEL, GIPEPXXVPEKM, SIPKAXXVPTEL, HVTKPTXAPTKL, YVPKPXXAPTKL, TVPKPXXAPTQL, AVPKAXXAPTKL, KVGKAXXVPTKL, KASKAXXVPTKL, GSAGPXXTPTKM, AAPASXXVPARL, STPPTXXVPTRL, HVPKPXXAPTKL, RVPSTXXAPVKT, ASAAPXXVPQAL, ASASPXXVSQDL and ASASPXXVPQDL; PEP10 is selected from the group consisting of DMVVEGXGXR, NMTVESXAXR, EMVVEGXGXR, NMVVRSXGXH, NMVVRSXGXH, NMVVRAXGXH, NMVVKAXGXH, EGMSVAEXGXR, GMAVSEXGXR, GMVVDRXGXS, DMVVEAXGXR, DMVVESXGXR, NMVVRSXGXH, MIVEEXGXL, MIVRSXKXS, MIVKSXKXS and MVVKSXKXS; and wherein the pair PEP9:PEP10 is selected from the group consisting of KIPKAXXVPTEL:DMVVEGXGXR, GIPEPXXVPEKM:NMTVESXAXR, SIPKAXXVPTEL:EMVVEGXGXR, HVTKPTXAPTKL:NMVVRSXGXH, YVPKPXXAPTKL:NMVVRSXGXH, TVPKPXXAPTQL:NMVVRAXGXH, AVPKAXXAPTKL:NMVVKAXGXH, KVGKAXXVPTKL:EGMSVAEXGXR, KASKAXXVPTKL:GMAVSEXGXR, GSAGPXXTPTKM:GMVVDRXGXS, AAPASXXVPARL:DMVVEAXGXR, STPPTXXVPTRL:DMVVESXGXR, HVPKPXXAPTKL:NMVVRSXGXH, RVPSTXXAPVKT:MIVEEXGXL, ASAAPXXVPQAL:MIVRSXKXS, ASASPXXVSQDL:MIVKSXKXS and ASASPXXVPQDL:MVVKSXKXS.

[0768] In certain embodiments useful for inducing differentiation of mensenchymal or progenitor stem cells from the lung cell lineage, regenerating lung tissues, and protecting patients from lung tissue degeneration-related diseases, conditions, disorders or pathologies, PEP5 is selected from the group consisting of VPTEL, VPEKM, APTKL, APTQL, VPTKL, TPTKM, VPARL, VPTRL, APVKT, VPQAL, VSQDL and VPQDL; PEP6 is selected from the group consisting of DMVVE, NMTVE, EMVVE, NMVVR, NMVVK, EGMSVAE, GMAVS, GMVVD, DMVVE, MIVEE, MIVRS, MIVKS and MVVKS; and wherein the pair PEP5:PEP6 is selected from the group consisting of VPTEL:DMVVE, VPEKM:NMTVE, VPTEL:EMVVE, APTKL:NMVVR, APTQL:NMVVR, APTKL:NMVVK, VPTKL:EGMSVAE, VPTKL:GMAVS, TPTKM:GMVVD, VPARL:DMVVE, VPTRL:DMVVE, APVKT:MIVEE, VPQAL:MIVRS, VSQDL:MIVKS and VPQDL:MVVKS; wherein the pair PEP5:PEP6 is not APTKL:NMVVR when PEP1 is NAIS and PEP2 is LKKYR; wherein the pair PEP5:PEP6 is not APTQL:NMVVR when PEP1 is NAIS and PEP2 is LKKYR; wherein the pair PEP5:PEP6 is not APTKL:NMVVK when PEP1 is SATS and PEP2 is LRKHR; wherein the pair PEP5:PEP6 is not VPTKL:EGMSVAE when PEP1 is SPIS and PEP2 is LKYHY; wherein the pair PEP5:PEP6 is not VPTKL:GMAVS when PEP1 is EPIS and PEP2 is KFKYE; and wherein the pair PEP5:PEP6 is not TPTKM:GMVVD when PEP1 is SPIN and PEP2 is YGKIP.

[0769] In certain embodiments useful for inducing differentiation of mensenchymal or progenitor stem cells from the lung cell lineage, regenerating lung tissues, and protecting patients from lung tissue degeneration-related diseases, conditions, disorders or pathologies, PEP9 is selected from the group consisting of KIPKAXXVPTEL, GIPEPXXVPEKM, SIPKAXXVPTEL, HVTKPTXAPTKL, YVPKPXXAPTKL, TVPKPXXAPTQL, AVPKAXXAPTKL, KVGKAXXVPTKL, KASKAXXVPTKL, GSAGPXXTPTKM, AAPASXXVPARL, STPPTXXVPTRL, HVPKPXXAPTKL, RVPSTXXAPVKT, ASAAPXXVPQAL, ASASPXXVSQDL and ASASPXXVPQDL; PEP10 is selected from the group consisting of DMVVEGXGXR, NMTVESXAXR, EMVVEGXGXR, NMVVRSXGXH, NMVVRSXGXH, NMVVRAXGXH, NMVVKAXGXH, EGMSVAEXGXR, GMAVSEXGXR, GMVVDRXGXS, DMVVEAXGXR, DMVVESXGXR, NMVVRSXGXH, MIVEEXGXL, MIVRSXKXS, MIVKSXKXS and MVVKSXKXS; and wherein the pair PEP9:PEP10 is selected from the group consisting of KIPKAXXVPTEL:DMVVEGXGXR, GIPEPXXVPEKM:NMTVESXAXR, SIPKAXXVPTEL:EMVVEGXGXR, HVTKPTXAPTKL:NMVVRSXGXH, YVPKPXXAPTKL:NMVVRSXGXH, TVPKPXXAPTQL:NMVVRAXGXH, AVPKAXXAPTKL:NMVVKAXGXH, KVGKAXXVPTKL:EGMSVAEXGXR, KASKAXXVPTKL:GMAVSEXGXR, GSAGPXXTPTKM:GMVVDRXGXS, AAPASXXVPARL:DMVVEAXGXR, STPPTXXVPTRL:DMVVESXGXR, HVPKPXXAPTKL:NMVVRSXGXH, RVPSTXXAPVKT:MIVEEXGXL, ASAAPXXVPQAL:MIVRSXKXS, ASASPXXVSQDL:MIVKSXKXS and ASASPXXVPQDL:MVVKSXKXS; wherein the pair PEP9:PEP10 is not YVPKPXXAPTKL:NMVVRSXGXH when PEP1 is NAIS and PEP2 is LKKYR; wherein the pair PEP9:PEP10 is not TVPKPXXAPTQL:NMVVRAXGXH when PEP1 is NAIS and PEP2 is LKKYR; wherein the pair PEP9:PEP10 is not AVPKAXXAPTKL:NMVVKAXGXH when PEP1 is SATS and PEP2 is LRKHR; wherein the pair PEP9:PEP10 is not KVGKAXXVPTKL:EGMSVAEXGXR when PEP1 is SPIS and PEP2 is LKYHY; wherein the pair PEP9:PEP10 is not KASKAXXVPTKL:GMAVSEXGXR when PEP1 is EPIS and PEP2 is KFKYE; and wherein the pair PEP9:PEP10 is not GSAGPXXTPTKM:GMVVDRXGXS when PEP1 is SPIN and PEP2 is YGKIP.

[0770] In certain embodiments useful for inducing differentiation of mensenchymal or progenitor stem cells from the lung cell lineage, regenerating lung tissues, and protecting patients from lung tissue degeneration-related diseases, conditions, disorders or pathologies, PEP1 is selected from the group consisting of NAIS, SATS, SPIS, EPIS and SPIN; PEP11 is selected from the group consisting of LYF, LYY, LYK and LYL; and the pair PEP1:PEP11 is selected from the group consisting of NAIS:LYF, SATS:LYY, SPIS:LYK, EPIS:LYL and SPIN:LYF.

[0771] In one aspect, the present disclosure provides a GFR-binding compound, wherein said GFR-binding compound is a peptide, a variant or analog thereof, or a peptidomimetic as defined herein, with between 20 and 60 (in particular between 20 and 50, and more particularly, between 20 and 45) amino acids, comprising a peptide with four amino acids (PEP1) or a peptide with eight amino acids (PEP12), a peptide with five amino acids (PEP2), and optionally a pair of peptides selected form the group consisting of PEP3:PEP4, PEP3:PEP6, PEP3:PEP10, PEP5:PEP4, PEP9:PEP4, PEP5:PEP6, PEP5:PEP10, PEP9:PEP6 and PEP9:PEP10; wherein said GFR-binding compound does not comprise the pair of peptides APTKL:NMVVR when PEP1 is NAIS and PEP2 is LKKYR; wherein said GFR-binding compound does not comprise the pair of peptides APTQL:NMVVR when PEP1 is NAIS and PEP2 is LKKYR; wherein said GFR-binding compound does not comprise the pair of peptides APTKL:NMVVK when PEP1 is SATS and PEP2 is LRKHR; wherein said GFR-binding compound does not comprise the pair of peptides VPTKL:EGMSVAE when PEP1 is SPIS and PEP2 is LKYHY; wherein said GFR-binding compound does not comprise the pair of peptides VPTKL:GMAVS when PEP1 is EPIS and PEP2 is KFKYE; and wherein said GFR-binding compound does not comprise the pair of peptides TPTKM:GMVVD when PEP1 is SPIN and PEP2 is YGKIP; and wherein the RMSD is 2.45 Å or less.

[0772] In one aspect, the present disclosure provides a GFR-binding compound, wherein said GFR-binding compound is a peptide, a variant or analog thereof, or a peptidomimetic as defined herein, with between 20 and 60 (in particular between 20 and 50, and more particularly, between 20 and 45) amino acids, comprising a peptide with four amino acids (PEP1) or a peptide with eight amino acids (PEP12), a peptide with five amino acids (PEP2), and optionally a pair of peptides selected form the group consisting of PEP3:PEP4, PEP3:PEP6, PEP3:PEP10, PEP5:PEP4, PEP9:PEP4, PEP5:PEP6, PEP5:PEP10, PEP9:PEP6 and PEP9:PEP10; wherein said GFR-binding compound does not comprise the pair of peptides YVPKPXXAPTKL:NMVVRSXGXH when PEP1 is NAIS and PEP2 is LKKYR; wherein said GFR-binding compound does not comprise the pair of peptides TVPKPXXAPTQL:NMVVRAXGXH when PEP1 is NAIS and PEP2 is LKKYR; wherein said GFR-binding compound does not comprise the pair of peptides AVPKAXXAPTKL:NMVVKAXGXH when PEP1 is SATS and PEP2 is LRKHR; wherein said GFR-binding compound does not comprise the pair of peptides KVGKAXXVPTKL:EGMSVAEXGXR when PEP1 is SPIS and PEP2 is LKYHY; wherein said GFR-binding compound does not comprise the pair of peptides KASKAXXVPTKL:GMAVSEXGXR when PEP1 is EPIS and PEP2 is KFKYE; and wherein said GFR-binding compound does not comprise the pair of peptides GSAGPXXTPTKM:GMVVDRXGXS when PEP1 is SPIN and PEP2 is YGKIP; and wherein the RMSD is 2.45 Å or less.

[0773] In certain embodiments useful for inducing differentiation of mensenchymal or progenitor stem cells from the lung cell lineage, regenerating lung tissues, and protecting patients from lung tissue degeneration-related diseases, conditions, disorders or pathologies, said GFR-binding compound is a synthetic molecule as defined herein in the definition section.

[0774] In certain embodiments useful for inducing differentiation of mensenchymal or progenitor stem cells from the lung cell lineage, regenerating lung tissues, and protecting patients from lung tissue degeneration-related diseases, conditions, disorders or pathologies, said GFR-binding compound is a synthetic peptide, or a variant or analog thereof, or a peptidomimetic.

### Muscle

[0775] Certain embodiments of the invention are particularly useful for inducing differentiation of mensenchymal or progenitor stem cells from the muscle cell lineage, regenerating muscle tissues, enhancing of myogenesis, reinforcing muscle tissues, repairing damaged muscles, and protecting a subject from one or more muscle tissue degeneration-related diseases, disorders, conditions or pathologies.

[0776] In certain embodiments useful for inducing differentiation of mensenchymal or progenitor stem cells from the muscle cell lineage, regenerating muscle tissues, enhancing of myogenesis, reinforcing muscle tissues, repairing damaged muscles, and protecting a subject from one or more muscle tissue degeneration-related diseases, disorders, conditions or pathologies, PEP1 is RSVK or RPVQ.

[0777] In certain embodiments useful for inducing differentiation of mensenchymal or progenitor stem cells from the muscle cell lineage, regenerating muscle tissues, enhancing of myogenesis, reinforcing muscle tissues, repairing damaged muscles, and protecting a subject from one or more muscle tissue degeneration-related diseases, disorders, conditions or pathologies, PEP2 is KEVQV or KKATV.

[0778] In certain embodiments useful for inducing differentiation of mensenchymal or progenitor stem cells from the muscle cell lineage, regenerating muscle tissues, enhancing of myogenesis, reinforcing muscle tissues, repairing damaged muscles, and protecting a subject from one or more muscle tissue degeneration-related diseases, disorders, conditions or pathologies, PEP3 is selected from the group consisting of VPQ, VSQ and VPT.

[0779] In certain embodiments useful for inducing differentiation of mensenchymal or progenitor stem cells from the muscle cell lineage, regenerating muscle tissues, enhancing of myogenesis, reinforcing muscle tissues, repairing damaged muscles, and protecting a subject from one or more muscle tissue degeneration-related diseases, disorders, conditions or pathologies, PEP4 is selected from the group consisting of VRS, VKS, QHN and EHS.

[0780] In certain embodiments useful for inducing differentiation of mensenchymal or progenitor stem cells from the muscle cell lineage, regenerating muscle tissues, enhancing of myogenesis, reinforcing muscle tissues, repairing damaged muscles, and protecting a subject from one or more muscle tissue degeneration-related diseases, disorders, conditions or pathologies, PEP5 is a peptide of general formula PEP3-AA¹¹-AA¹²; wherein PEP3 is selected from the group consisting of VPQ, VSQ and VPT; wherein AA¹¹ is selected from the group consisting of E, K, Q, R, A, D, G and H, in particular A, D, E and G; wherein AA¹² is selected from the group consisting of L, M, T, E, Q and H, in particular L, E and Q. In one particular example, PEP5 is selected from the group consisting of VPQAL, VSQDL, VPQDL, VPTEE and VPTGQ.

[0781] In certain embodiments useful for inducing differentiation of mensenchymal or progenitor stem cells from the muscle cell lineage, regenerating muscle tissues, enhancing of myogenesis, reinforcing muscle tissues, repairing damaged muscles, and protecting a subject from one or more muscle tissue degeneration-related diseases, disorders, conditions or pathologies, PEP6 is a peptide of general formula AA²⁶-AA²⁷-AA²⁸-AA²⁹-PEP4; wherein PEP4 is selected from the group consisting of VRS, VKS, QHN and EHS; wherein AA²⁶ is absent or selected from the group consisting of AA^{III} amino acids, preferably is absent; wherein AA²⁷ and AA²⁸ are independently selected from the group consisting of AA^{III} and AA^{V} amino acids, preferably AA²⁷ is selected from the group consisting of M, F and L, preferably AA²⁸ is selected from the group consisting of I, V, L and E; wherein AA²⁹ is absent or selected from the group consisting of AA^{II} amino acids, preferably absent. In one particular example, PEP6 is selected from the group consisting of MIVRS, MIVKS, MVVKS, FLQHN and LEEHS.

[0782] In certain embodiments useful for inducing differentiation of mensenchymal or progenitor stem cells from the muscle cell lineage, regenerating muscle tissues, enhancing of myogenesis, reinforcing muscle tissues, repairing damaged muscles, and protecting a subject from one or more muscle tissue degeneration-related diseases, disorders, conditions or pathologies, PEP7 is an amino acid or a peptide with between two and seven amino acids of general formula AA¹-AA²-AA³-AA⁴-AA⁵-AA⁶-AA⁷; wherein AA¹, AA², AA³, AA⁴, and AA⁵ are independently absent or AA^{I} as defined herein; wherein AA⁶ is absent or selected from the group consisting of S, T, C, E, Q, P and R, preferably C, S, or E; wherein AA⁷ is absent or is selected from the group consisting of S, T, C, E, Q, P and R, preferably is S or C; and wherein at least one of AA¹, AA², AA³, AA⁴, AA⁵, AA⁶ or AA⁷ is not absent. In one particular example, PEP7 is selected from the group consisting of ASAAPXX, ASASPXX and NDEGLEX.

[0783] In certain embodiments useful for inducing differentiation of mensenchymal or progenitor stem cells from the muscle cell lineage, regenerating muscle tissues, enhancing of myogenesis, reinforcing muscle tissues, repairing damaged muscles, and protecting a subject from one or more muscle tissue degeneration-related diseases, disorders, conditions or pathologies, PEP8 is an amino acid or a peptide with between two and six amino acids of general formula AA³³-AA³⁴-AA³⁵-AA³⁶-AA³⁷-AA³⁸; wherein AA³³ is absent or is selected from the group consisting of AA^{I} amino acids at the exception of AA^{VI} amino acids; AA³⁴ is absent or is selected from the group consisting of AA^{III} and AA^{IV} amino acids; wherein AA³⁵ is absent or is selected from the group consisting of AA^{II} amino acids, preferably is S or C; wherein AA³⁶ is absent or is selected from the group consisting of AA^{III} and AA^{IV} amino acids; wherein AA³⁷ is absent or is selected from the group consisting of AA^{II} amino acids, preferably is S or C; wherein AA³⁸ is absent or is selected from the group consisting of AA^{I}; and wherein at least one of AA³³, AA³⁴, AA³⁵, AA³⁶, AA³⁷ or AA³⁸ is not absent. In one particular example, PEP8 is selected from the group consisting of XKXS, KXEXR and QXEXR.

[0784] In certain embodiments useful for inducing differentiation of mensenchymal or progenitor stem cells from the muscle cell lineage, regenerating muscle tissues, enhancing of myogenesis, reinforcing muscle tissues, repairing damaged muscles, and protecting a subject from one or more muscle tissue degeneration-related diseases, disorders, conditions or pathologies, PEP9 is a peptide of general formula AA¹-AA²-AA³-AA⁴-AA⁵-AA⁶-AA⁷-PEP5; wherein PEP5 is a peptide of formula PEP3-AA¹¹-AA¹²; wherein PEP3 is selected from the group consisting of VPQ, VSQ and VPT; wherein AA¹ is selected from the group consisting of E, K, Q, R, A, D, G and H, in particular A, D, E and G; wherein AA¹² is selected from the group consisting of L, M, T, E, Q and H, in particular L, E and Q; wherein AA¹, AA², AA³, AA⁴, and AA⁵ are independently absent or AA^{I} as defined herein; wherein AA⁶ is absent or selected from the group consisting of S, T, C, E, Q, P and R, preferably C, S, or E; wherein AA⁷ is selected from the group consisting of S, T, C, E, Q, P and R, preferably is S or C. In one particular example, PEP9 is selected from the group consisting of ASAAPXXVPQAL, ASASPXXVSQDL, ASASPXXVPQDL, NDEGLEXVPTEE and NDEGLEXVPTGQ.

[0785] In certain embodiments useful for inducing differentiation of mensenchymal or progenitor stem cells from the muscle cell lineage, regenerating muscle tissues, enhancing of myogenesis, reinforcing muscle tissues, repairing damaged muscles, and protecting a subject from one or more muscle tissue degeneration-related diseases, disorders, conditions or pathologies, PEP10 is a peptide of general formula PEP6-AA³³-AA³⁴-AA³⁵-AA³⁶-AA³⁷-AA³⁸; wherein PEP6 is a peptide of formula AA²⁶-AA²⁷-AA²⁸-AA²⁹-PEP4; wherein PEP4 is selected from the group consisting of VRS, VKS, QHN and EHS; wherein AA²⁶ is absent or selected from the group consisting of AA^{III} amino acids, preferably is absent; wherein AA²⁷ and AA²⁸ are independently selected from the group consisting of AA^{III} and AA^{V} amino acids, preferably AA²⁷ is selected from the group consisting of M, F and L, preferably AA²⁸ is selected from the group consisting of I, V, L and E; wherein AA²⁹ is absent or selected from the group consisting of AA^{II} amino acids, preferably absent; wherein AA³³ is absent or is selected from the group consisting of AA^{I} amino acids at the exception of AA^{VI} amino acids; AA³⁴ is absent or is selected from the group consisting of AA^{III} and AA^{IV} amino acids; wherein AA³⁵ is absent or is selected from the group consisting of AA^{II} amino acids, preferably is S or C; wherein AA³⁶ is absent or is selected from the group consisting of AA^{III} and AA^{IV} amino acids; wherein AA³⁷ is absent or is selected from the group consisting of AA^{II} amino acids, preferably is S or C; wherein AA³⁸ is absent or is selected from the group consisting of AA^{I}. In one particular example, PEP10 is selected from the group consisting of MIVRSXKXS, MIVKSXKXS, MVVKSXKXS, FLQHNKXEXR and LEEHSQXEXR.

[0786] In certain embodiments useful for inducing differentiation of mensenchymal or progenitor stem cells from the muscle cell lineage, regenerating muscle tissues, enhancing of myogenesis, reinforcing muscle tissues, repairing damaged muscles, and protecting a subject from one or more muscle tissue degeneration-related diseases, disorders, conditions or pathologies, PEP12 is a peptide of general formula PEP1-AA¹⁷-PEP11; wherein AA¹⁷ is selected from the group consisting of G, A, V, L, I, P, F, M, W, T and S (in particular is I or M); wherein PEP1 is RSVK or RPVQ.

[0787] In certain embodiments useful for inducing differentiation of mensenchymal or progenitor stem cells from the muscle cell lineage, regenerating muscle tissues, enhancing of myogenesis, reinforcing muscle tissues, repairing damaged muscles, and protecting a subject from one or more muscle tissue degeneration-related diseases, disorders, conditions or pathologies, PEP11 is a peptide with 3 amino acids of general formula AA¹⁸-AA¹⁹-AA²⁰; wherein AA¹⁸ is selected from the group consisting of L, V, Q, A and R, in particular is A or R; wherein AA¹⁹ is selected from the group consisting of AA^{VI} amino acids (in particular is K); wherein AA²⁰ is selected from the group consisting of L, F, Y, K, I, V and M, in particular is V or I. In one particular example, PEP11 is AKV or RKI.

[0788] The definitions of “PEP” pairs, quadruplets, hexaplets and heptuplet e.g. PEP1:PEP2, PEP12:PEP2, or PEP7:PEP5:PEP12:LINKER:PEP2:PEP6:PEP8, useful for inducing differentiation of mensenchymal or progenitor stem cells from the muscle cell lineage, regenerating muscle tissues, enhancing of myogenesis, reinforcing muscle tissues, repairing damaged muscles, and protecting a subject from one or more muscle tissue degeneration-related diseases, disorders, conditions or pathologies, are as already defined herein to the extent that PEP1 to PEP12 are particularly useful for these applications. For instances:

[0789] In certain embodiments useful for inducing differentiation of mensenchymal or progenitor stem cells from the muscle cell lineage, regenerating muscle tissues, enhancing of myogenesis, reinforcing muscle tissues, repairing damaged muscles, and protecting a subject from one or more muscle tissue degeneration-related diseases, disorders, conditions or pathologies, the pair PEP1:PEP2 is RSVK:KEVQV or RPVQ:KKATV.

[0790] In certain embodiments, useful for inducing differentiation of mensenchymal or progenitor stem cells from the muscle cell lineage, regenerating muscle tissues, enhancing of myogenesis, reinforcing muscle tissues, repairing damaged muscles, and protecting a subject from one or more muscle tissue degeneration-related diseases, disorders, conditions or pathologies, the pair PEP12:PEP2 is RSVK-AA¹⁷-AKV:KEVQV or RPVQ-AA¹⁷-RKI:KKATV; wherein AA¹⁷ is selected from the group consisting of G, A, V, L, I, P, F, M, W, T and S (in particular is I or M).

[0791] In certain embodiments useful for inducing differentiation of mensenchymal or progenitor stem cells from the muscle cell lineage, regenerating muscle tissues, enhancing of myogenesis, reinforcing muscle tissues, repairing damaged muscles, and protecting a subject from one or more muscle tissue degeneration-related diseases, disorders, conditions or pathologies, PEP3 is selected from the group consisting of VPQ, VSQ and VPT; PEP4 is selected from the group consisting of VRS, VKS, QHN and EHS; and wherein the pair PEP3:PEP4 is selected from the group consisting of VPQ:VRS, VSQ:VKS, VPQ:VKS, VPT:QHN and VPT:EHS.

[0792] In certain embodiments useful for inducing differentiation of mensenchymal or progenitor stem cells from the muscle cell lineage, regenerating muscle tissues, enhancing of myogenesis, reinforcing muscle tissues, repairing damaged muscles, and protecting a subject from one or more muscle tissue degeneration-related diseases, disorders, conditions or pathologies, PEP5 is selected from the group consisting of VPQAL, VSQDL, VPQDL, VPTEE and VPTGQ; PEP6 is selected from the group consisting of MIVRS, MIVKS, MVVKS, FLQHN and LEEHS; and wherein the pair PEP5:PEP6 is selected from the group consisting of VPQAL:MIVRS, VSQDL:MIVKS, VPQDL:MVVKS, VPTEE:FLQHN and VPTGQ:LEEHS.

[0793] In certain embodiments useful for inducing differentiation of mensenchymal or progenitor stem cells from the muscle cell lineage, regenerating muscle tissues, enhancing of myogenesis, reinforcing muscle tissues, repairing damaged muscles, and protecting a subject from one or more muscle tissue degeneration-related diseases, disorders, conditions or pathologies, PEP7 is selected from the group consisting of ASAAPXX, ASASPXX and NDEGLEX; wherein PEP8 is selected from the group consisting of XKXS, KXEXR and QXEXR; and wherein the pair PEP7:PEP8 is selected from the group consisting of ASAAPXX:XKXS, ASASPXX:XKXS, NDEGLEX:KXEXR and NDEGLEX:QXEXR.

[0794] In certain embodiments useful for inducing differentiation of mensenchymal or progenitor stem cells from the muscle cell lineage, regenerating muscle tissues, enhancing of myogenesis, reinforcing muscle tissues, repairing damaged muscles, and protecting a subject from one or more muscle tissue degeneration-related diseases, disorders, conditions or pathologies, PEP9 is selected from the group consisting of ASAAPXXVPQAL, ASASPXXVSQDL, ASASPXXVPQDL, NDEGLEXVPTEE and NDEGLEXVPTGQ; PEP10 is selected from the group consisting of MIVRSXKXS, MIVKSXKXS, MVVKSXKXS, FLQHNKXEXR and LEEHSQXEXR; and wherein the pair PEP9:PEP10 is selected from the group consisting of ASAAPXXVPQAL:MIVRSXKXS, ASASPXXVSQDL:MIVKSXKXS, ASASPXXVPQDL:MVVKSXKXS, NDEGLEXVPTEE:FLQHNKXEXR and NDEGLEXVPTGQ:LEEHSQXEXR.

[0795] In certain embodiments useful for inducing differentiation of mensenchymal or progenitor stem cells from the muscle cell lineage, regenerating muscle tissues, enhancing of myogenesis, reinforcing muscle tissues, repairing damaged muscles, and protecting a subject from one or more muscle tissue degeneration-related diseases, disorders, conditions or pathologies, PEP1 is RSVK or RPVQ; PEP11 is is AKV or RKI; and the pair PEP1:PEP11 is RSVK:AKV or RPVQ:RKI.

[0796] In certain embodiments useful for inducing differentiation of mensenchymal or progenitor stem cells from the muscle cell lineage, regenerating muscle tissues, enhancing of myogenesis, reinforcing muscle tissues, repairing damaged muscles, and protecting a subject from one or more muscle tissue degeneration-related diseases, disorders, conditions or pathologies, said GFR-binding compound is a synthetic molecule as defined herein in the definition section.

[0797] In certain embodiments useful for inducing differentiation of mensenchymal or progenitor stem cells from the muscle cell lineage, regenerating muscle tissues, enhancing of myogenesis, reinforcing muscle tissues, repairing damaged muscles, and protecting a subject from one or more muscle tissue degeneration-related diseases, disorders, conditions or pathologies, said GFR-binding compound is a synthetic peptide, or a variant or analog thereof, or a peptidomimetic.

### Blood

[0798] Certain embodiments of the invention are particularly useful for inducing differentiation of mensenchymal or progenitor stem cells from the blood cell lineage, regenerating blood tissues, and protecting patients from blood cell degeneration-related disease, conditions, disorders or pathologies.

[0799] In certain embodiments useful for inducing differentiation of mensenchymal or progenitor stem cells from the blood cell lineage, regenerating blood tissues, and protecting patients from blood cell degeneration-related disease, conditions, disorders or pathologies, PEP1 is SNIT.

[0800] In certain embodiments useful for inducing differentiation of mensenchymal or progenitor stem cells from the blood cell lineage, regenerating blood tissues, and protecting patients from blood cell degeneration-related disease, conditions, disorders or pathologies, PEP2 is IGEMS or LGEMS.

[0801] In certain embodiments useful for inducing differentiation of mensenchymal or progenitor stem cells from the blood cell lineage, regenerating blood tissues, and protecting patients from blood cell degeneration-related disease, conditions, disorders or pathologies, PEP3 is selected from the group consisting of TPT, VPA, VPT, APT, APV, VPQ, VSQ, SRV and TQV.

[0802] In certain embodiments useful for inducing differentiation of mensenchymal or progenitor stem cells from the blood cell lineage, regenerating blood tissues, and protecting patients from blood cell degeneration-related disease, conditions, disorders or pathologies, PEP4 is selected from the group consisting of VVD, VVE, VVR, VEE, VRS, VKS, EEH and EDH.

[0803] In certain embodiments useful for inducing differentiation of mensenchymal or progenitor stem cells from the blood cell lineage, regenerating blood tissues, and protecting patients from blood cell degeneration-related disease, conditions, disorders or pathologies, PEP5 is a peptide of general formula PEP3-AA¹¹-AA¹²; wherein PEP3 is selected from the group consisting of TPT, VPA, VPT, APT, APV, VPQ, VSQ, SRV and TQV; wherein AA¹¹ is selected from the group consisting of E, K, Q, R, A, D, G and H, in particular is selected from the group consisting of K, R, A, D, H and Q; wherein AA¹² is selected from the group consisting of L, M, T, E, Q and H, in particular is selected from the group consisting of M, L, T and H. In one particular example, PEP5 is selected from the group consisting of TPTKM, VPARL, VPTRL, APTKL, APVKT, VPQAL, VSQDL, VPQDL, SRVHH and TQVQL.

[0804] In certain embodiments useful for inducing differentiation of mensenchymal or progenitor stem cells from the blood cell lineage, regenerating blood tissues, and protecting patients from blood cell degeneration-related disease, conditions, disorders or pathologies, PEP6 is a peptide of general formula AA²⁶-AA²⁷-AA²⁸-AA²⁹-PEP4; wherein PEP4 is selected from the group consisting of VVD, VVE, VVR, VEE, VRS, VKS, EEH and EDH; wherein AA²⁶ is absent or selected from the group consisting of AA^{II} amino acids, preferably is absent; wherein AA²⁷ and AA²⁸ are independently selected from the group consisting of AA^{III} and AA^{V} amino acids, preferably AA²⁷ is selected from the group consisting of G, D, N, M, R and T, preferably AA²⁸ is selected from the group consisting of M, I, V and L; wherein AA²⁹ is absent or selected from the group consisting of AA^{II} amino acids, preferably is absent. In one particular example, PEP6 is selected from the group consisting of GMVVD, DMVVE, NMVVR, MIVEE, MIVRS, MIVKS, MVVKS, RLEEH and TLEDH.

[0805] In certain embodiments useful for inducing differentiation of mensenchymal or progenitor stem cells from the blood cell lineage, regenerating blood tissues, and protecting patients from blood cell degeneration-related disease, conditions, disorders or pathologies, PEP7 is an amino acid or a peptide with between two and seven amino acids of general formula AA¹-AA²-AA³-AA⁴-AA⁵-AA⁶-AA⁷; wherein AA¹, AA², AA³, AA⁴, and AA⁵ are independently absent or AA^{I} as defined herein; wherein AA⁶ is absent or selected from the group consisting of S, T, C, E, Q, P and R, preferably is selected from the group consisting of S, C, Q and R; wherein AA⁷ is absent or is selected from the group consisting of S, T, C, E, Q, P and R, preferably is selected from the group consisting of C, S and P; and wherein at least one of AA¹, AA², AA³, AA⁴, AA⁵, AA⁶ or AA⁷ is not absent. In one particular example, PEP7 is selected from the group consisting of GSAGPXX, AAPASXX, STPPTXX, HVPKPXX, RVPSTXX, ASAAPXX, ASASPXX, SSVKXQP and RNVQXRP.

[0806] In certain embodiments useful for inducing differentiation of mensenchymal or progenitor stem cells from the blood cell lineage, regenerating blood tissues, and protecting patients from blood cell degeneration-related disease, conditions, disorders or pathologies, PEP8 is an amino acid or a peptide with between two and six amino acids of general formula AA³³-AA³⁴-AA³⁵-AA³⁶-AA³⁷-AA³⁸; wherein AA³³ is absent or is selected from the group consisting of AA^{I} amino acids at the exception of AA^{VI} amino acids; AA³⁴ is absent or is selected from the group consisting of AA^{III} and AA^{IV} amino acids; wherein AA³⁵ is absent or is selected from the group consisting of AA^{II} amino acids, preferably is S or C; wherein AA³⁶ is absent or is selected from the group consisting of AA^{III} and AA^{IV} amino acids; wherein AA³⁷ is absent or is selected from the group consisting of AA^{II} amino acids, preferably is S or C; wherein AA³⁸ is absent or is selected from the group consisting of AA^{I}; and wherein at least one of AA³³, AA³⁴, AA³⁵, AA³⁶, AA³⁷ or AA³⁸ is not absent. In one particular example, PEP8 is selected from the group consisting of RXGXS, AXGXR, SXGXR, SXGXH, XGXL, XKXS, LEXAXA and LAXKXE.

[0807] In certain embodiments useful for inducing differentiation of mensenchymal or progenitor stem cells from the blood cell lineage, regenerating blood tissues, and protecting patients from blood cell degeneration-related disease, conditions, disorders or pathologies, PEP9 is a peptide of general formula AA¹-AA²-AA³-AA⁴-AA⁵-AA⁶-AA⁷-PEP5; wherein PEP5 is a peptide of formula PEP3-AA¹¹-AA¹²; wherein PEP3 is selected from the group consisting of TPT, VPA, VPT, APT, APV, VPQ, VSQ, SRV and TQV; wherein AA¹¹ is selected from the group consisting of E, K, Q, R, A, D, G and H, in particular is selected from the group consisting of K, R, A, D, H and Q; wherein AA¹² is selected from the group consisting of L, M, T, E, Q and H, in particular is selected from the group consisting of M, L, T and H; wherein AA¹, AA², AA³, AA⁴, and AA⁵ are independently absent or AA^{I} as defined herein; wherein AA⁶ is absent or selected from the group consisting of S, T, C, E, Q, P and R, preferably is selected from the group consisting of S, C, Q and R; wherein AA⁷ is selected from the group consisting of S, T, C, E, Q, P and R, preferably is selected from the group consisting of C, S and P. In one particular example, PEP9 is selected from the group consisting of GSAGPXXTPTKM, AAPASXXVPARL, STPPTXXVPTRL, HVPKPXXAPTKL, RVPSTXXAPVKT, ASAAPXXVPQAL, ASASPXXVSQDL, ASASPXXVPQDL, SSVKXQPSRVHH and RNVQXRPTQVQL.

[0808] In certain embodiments useful for inducing differentiation of mensenchymal or progenitor stem cells from the blood cell lineage, regenerating blood tissues, and protecting patients from blood cell degeneration-related disease, conditions, disorders or pathologies, PEP10 is a peptide of general formula PEP6-AA³³-AA³⁴-AA³⁵-AA³⁶-AA³⁷-AA³⁸; wherein PEP6 is a peptide of formula AA²⁶-AA²⁷-AA²⁸-AA²⁹-PEP4; wherein PEP4 is selected from the group consisting of VVD, VVE, VVR, VEE, VRS, VKS, EEH and EDH; wherein AA²⁶ is absent or selected from the group consisting of AA^{II} amino acids, preferably is absent; wherein AA²⁷ and AA²⁸ are independently selected from the group consisting of AA^{III} and AA^{V} amino acids, preferably AA²⁷ is selected from the group consisting of G, D, N, M, R and T, preferably AA²⁸ is selected from the group consisting of M, I, V and L; wherein AA²⁹ is absent or selected from the group consisting of AA^{II} amino acids, preferably is absent; wherein AA³³ is absent or is selected from the group consisting of AA^{I} amino acids at the exception of AA^{VI} amino acids; AA³⁴ is absent or is selected from the group consisting of AA^{III} and AA^{IV} amino acids; wherein AA³⁵ is absent or is selected from the group consisting of AA^{II} amino acids, preferably is S or C; wherein AA³⁶ is absent or is selected from the group consisting of AA^{III} and AA^{IV} amino acids; wherein AA³⁷ is absent or is selected from the group consisting of AA^{II} amino acids, preferably is S or C; wherein AA³⁸ is absent or is selected from the group consisting of AA^{I}. In one particular example, PEP10 is selected from the group consisting of GMVVDRXGXS, DMVVEAXGXR, DMVVESXGXR, NMVVRSXGXH, MIVEEXGXL, MIVRSXKXS, MIVKSXKXS, MVVKSXKXS, RLEEHLEXAXA and TLEDHLAXKXE.

[0809] In certain embodiments useful for inducing differentiation of mensenchymal or progenitor stem cells from the blood cell lineage, regenerating blood tissues, and protecting patients from blood cell degeneration-related disease, conditions, disorders or pathologies, PEP12 is a peptide of general formula PEP1-AA¹⁷-PEP11; wherein AA¹⁷ is selected from the group consisting of G, A, V, L, I, P, F, M, W, T and S (in particular is selected from the group consisting of M, I, V and T); wherein PEP1 is SNIT.

[0810] In certain embodiments useful for inducing differentiation of mensenchymal or progenitor stem cells from the blood cell lineage, regenerating blood tissues, and protecting patients from blood cell degeneration-related disease, conditions, disorders or pathologies, PEP11 is a peptide with 3 amino acids of general formula AA¹⁸-AA¹⁹-AA²⁰; wherein AA¹⁸ is selected from the group consisting of L, V, Q, A and R, in particular is Q; wherein AA¹⁹ is selected from the group consisting of F, W, H, I and Y (in particular is I); wherein AA²⁰ is selected from the group consisting of L, F, Y, K, I, V and M, in particular is M. In one particular example, PEP11 is QIM.

[0811] In certain embodiments useful for inducing differentiation of mensenchymal or progenitor stem cells from the blood cell lineage, regenerating blood tissues, and protecting patients from blood cell degeneration-related disease, conditions, disorders or pathologies, the pair PEP1:PEP2 is SNIT:IGEMS or SNIT:LGEMS.

[0812] In certain embodiments useful for inducing differentiation of mensenchymal or progenitor stem cells from the blood cell lineage, regenerating blood tissues, and protecting patients from blood cell degeneration-related disease, conditions, disorders or pathologies, the pair PEP12:PEP2 is SNIT-AA¹⁷-QIM:IGEMS or SNIT-AA¹⁷-QIM:LGEMS; wherein AA¹⁷ is selected from the group consisting of G, A, V, L, I, P, F, M, W, T and S (in particular is selected from the group consisting of M, I, V and T).

[0813] The definitions of “PEP” pairs, quadruplets, hexaplets and heptuplet e.g. PEP1:PEP2, PEP12:PEP2, or PEP7:PEP5:PEP12:LINKER:PEP2:PEP6:PEP8, useful for inducing differentiation of mensenchymal or progenitor stem cells from the blood cell lineage, regenerating blood tissues, and protecting patients from blood cell degeneration-related disease, conditions, disorders or pathologies, are as already defined herein to the extent that PEP1 to PEP12 are particularly useful for these applications. For instances:

[0814] In certain embodiments useful for inducing differentiation of mensenchymal or progenitor stem cells from the blood cell lineage, regenerating blood tissues, and protecting patients from blood cell degeneration-related disease, conditions, disorders or pathologies, PEP3 is selected from the group consisting of TPT, VPA, VPT, APT, APV, VPQ, VSQ, SRV and TQV; PEP4 is selected from the group consisting of VVD, VVE, VVR, VEE, VRS, VKS, EEH and EDH; and wherein the pair PEP3:PEP4 is selected from the consisting of TPT:VVD, VPA:VVE, VPT:VVE, APT:VVR, APV:VEE, VPQ:VRS, VSQ:VKS, VPQ:VKS, SRV:EEH and TQV:EDH.

[0815] In certain embodiments useful for inducing differentiation of mensenchymal or progenitor stem cells from the blood cell lineage, regenerating blood tissues, and protecting patients from blood cell degeneration-related disease, conditions, disorders or pathologies, PEP5 is selected from the group consisting of TPTKM, VPARL, VPTRL, APTKL, APVKT, VPQAL, VSQDL, VPQDL, SRVHH and TQVQL; PEP6 is selected from the group consisting of GMVVD, DMVVE, NMVVR, MIVEE, MIVRS, MIVKS, MVVKS, RLEEH and TLEDH; and wherein the pair PEP5:PEP6 is selected from the group consisting of TPTKM:GMVVD, VPARL:DMVVE, VPTRL:DMVVE, APTKL:NMVVR, APVKT:MIVEE, VPQAL:MIVRS, VSQDL:MIVKS, VPQDL:MVVKS, SRVHH:RLEEH and TQVQL:TLEDH.

[0816] In certain embodiments useful for inducing differentiation of mensenchymal or progenitor stem cells from the blood cell lineage, regenerating blood tissues, and protecting patients from blood cell degeneration-related disease, conditions, disorders or pathologies, PEP7 is selected from the group consisting of GSAGPXX, AAPASXX, STPPTXX, HVPKPXX, RVPSTXX, ASAAPXX, ASASPXX, SSVKXQP and RNVQXRP; wherein PEP8 is selected from the group consisting of RXGXS, AXGXR, SXGXR, SXGXH, XGXL, XKXS, LEXAXA and LAXKXE; and wherein the pair PEP7:PEP8 is selected from the group consisting of GSAGPXX:RXGXS, AAPASXX:AXGXR, STPPTXX:SXGXR, HVPKPXX:SXGXH, RVPSTXX:XGXL, ASAAPXX:XKXS, ASASPXX:XKXS, SSVKXQP:LEXAXA and RNVQXRP:LAXKXE.

[0817] In certain embodiments useful for inducing differentiation of mensenchymal or progenitor stem cells from the blood cell lineage, regenerating blood tissues, and protecting patients from blood cell degeneration-related disease, conditions, disorders or pathologies, PEP9 is selected from the group consisting of GSAGPXXTPTKM, AAPASXXVPARL, STPPTXXVPTRL, HVPKPXXAPTKL, RVPSTXXAPVKT, ASAAPXXVPQAL, ASASPXXVSQDL, ASASPXXVPQDL, SSVKXQPSRVHH and RNVQXRPTQVQL; PEP10 is selected from the group consisting of GMVVDRXGXS, DMVVEAXGXR, DMVVESXGXR, NMVVRSXGXH, MIVEEXGXL, MIVRSXKXS, MIVKSXKXS, MVVKSXKXS, RLEEHLEXAXA and TLEDHLAXKXE; and wherein the pair PEP9:PEP10 is selected from the group consisting of GSAGPXXTPTKM:GMVVDRXGXS, AAPASXXVPARL:DMVVEAXGXR, STPPTXXVPTRL:DMVVESXGXR, HVPKPXXAPTKL:NMVVRSXGXH, RVPSTXXAPVKT:MIVEEXGXL, ASAAPXXVPQAL:MIVRSXKXS, ASASPXXVSQDL:MIVKSXKXS, ASASPXXVPQDL:MVVKSXKXS, SSVKXQPSRVHH:RLEEHLEXAXA and RNVQXRPTQVQL:TLEDHLAXKXE.

[0818] In certain embodiments useful for inducing differentiation of mensenchymal or progenitor stem cells from the blood cell lineage, regenerating blood tissues, and protecting patients from blood cell degeneration-related disease, conditions, disorders or pathologies, PEP1 is SNIT and PEP11 is QIM.

[0819] In one aspect, the present disclosure provides a GFR-binding compound, wherein said GFR-binding compound is a peptide, a variant or analog thereof, or a peptidomimetic as defined herein, with between 20 and 60 (in particular between 20 and 50, and more particularly, between 20 and 45) amino acids, comprising a peptide with four amino acids (PEP1) or a peptide with eight amino acids (PEP12), a peptide with five amino acids (PEP2), and optionally a pair of peptides selected form the group consisting of PEP3:PEP4, PEP3:PEP6, PEP3:PEP10, PEP5:PEP4, PEP9:PEP4, PEP5:PEP6, PEP5:PEP10, PEP9:PEP6 and PEP9:PEP10; and wherein the RMSD is 2.45 Å or less.

[0820] In certain embodiments useful for inducing differentiation of mensenchymal or progenitor stem cells from the blood cell lineage, regenerating blood tissues, and protecting patients from blood cell degeneration-related disease, conditions, disorders or pathologies, said GFR-binding compound is a synthetic molecule as defined herein in the definition section.

[0821] In certain embodiments useful for inducing differentiation of mensenchymal or progenitor stem cells from the blood cell lineage, regenerating blood tissues, and protecting patients from blood cell degeneration-related disease, conditions, disorders or pathologies, said GFR-binding compound is a synthetic peptide, or a variant or analog thereof, or a peptidomimetic.

### Adipose Tissues

[0822] Certain embodiments of the invention are particularly useful for inducing differentiation of mensenchymal or progenitor stem cells from the adipocyte lineage, regenerating adipose tissues and protecting patients from adipose tissue degeneration-related diseases, conditions, disorders or pathologies.

[0823] In certain embodiments useful for inducing differentiation of mensenchymal or progenitor stem cells from the adipocyte lineage, regenerating adipose tissues and protecting patients from adipose tissue degeneration-related diseases, conditions, disorders or pathologies, PEP1 is SAIS or NAIS.

[0824] In certain embodiments useful for inducing differentiation of mensenchymal or progenitor stem cells from the adipocyte lineage, regenerating adipose tissues and protecting patients from adipose tissue degeneration-related diseases, conditions, disorders or pathologies, PEP2 is LKNYQ or LKKYR.

[0825] In certain embodiments useful for inducing differentiation of mensenchymal or progenitor stem cells from the adipocyte lineage, regenerating adipose tissues and protecting patients from adipose tissue degeneration-related diseases, conditions, disorders or pathologies, PEP3 is selected from the group consisting of VPT, VPE, APT, TPT, VPA, APV, VPQ and VSQ.

[0826] In certain embodiments useful for inducing differentiation of mensenchymal or progenitor stem cells from the adipocyte lineage, regenerating adipose tissues and protecting patients from adipose tissue degeneration-related diseases, conditions, disorders or pathologies, PEP4 is selected from the group consisting of VVE, TVE, VVR, VVK, VAE, AVS, VVD, VEE, VRS and VKS.

[0827] In certain embodiments useful for inducing differentiation of mensenchymal or progenitor stem cells from the adipocyte lineage, regenerating adipose tissues and protecting patients from adipose tissue degeneration-related diseases, conditions, disorders or pathologies, PEP5 is a peptide of general formula PEP3-AA¹¹-AA¹²; wherein PEP3 is selected from the group consisting of VPT, VPE, APT, TPT, VPA, APV, VPQ and VSQ; wherein AA¹¹ is selected from the group consisting of E, K, Q, R, A, D, G and H, in particular is selected from the group consisting of E, K, Q, R, A and D; wherein AA¹² is selected from the group consisting of L, M, T, E, Q and H, in particular selected from the group consisting of L, M and T. In one particular example, PEP5 is selected from the group consisting of VPTEL, VPEKM, APTKL, APTQL, VPTKL, TPTKM, VPARL, VPTRL, APVKT, VPQAL, VSQDL and VPQDL.

[0828] In certain embodiments useful for inducing differentiation of mensenchymal or progenitor stem cells from the adipocyte lineage, regenerating adipose tissues and protecting patients from adipose tissue degeneration-related diseases, conditions, disorders or pathologies, PEP6 is a peptide of general formula AA²⁶-AA²⁷-AA²⁸-AA²⁹-PEP4; wherein PEP4 is selected from the group consisting of VVE, TVE, VVR, VVK, VAE, AVS, VVD, VEE, VRS and VKS; wherein AA²⁶ is absent or selected from the group consisting of AA^{III} amino acids, preferably is absent or E; wherein AA²⁷ and AA²⁸ are independently selected from the group consisting of AA^{III} and AA^{V} amino acids, preferably AA²⁷ is selected from the group consisting of D, E, N, G and M, preferably AA²⁸ is selected from the group consisting of M, I and V; wherein AA²⁹ is absent or selected from the group consisting of AA^{II} amino acids, preferably absent or S. In one particular example, PEP6 is selected from the group consisting of DMVVE, NMTVE, EMVVE, NMVVR, NMVVK, EGMSVAE, GMAVS, GMVVD, DMVVE, MIVEE, MIVRS, MIVKS and MVVKS.

[0829] In certain embodiments useful for inducing differentiation of mensenchymal or progenitor stem cells from the adipocyte lineage, regenerating adipose tissues and protecting patients from adipose tissue degeneration-related diseases, conditions, disorders or pathologies, PEP7 is an amino acid or a peptide with between two and seven amino acids of general formula AA¹-AA²-AA³-AA⁴-AA⁵-AA⁶-AA⁷; wherein AA¹, AA², AA³, AA⁴, and AA⁵ are independently absent or AA^{I} as defined herein; wherein AA⁶ is absent or selected from the group consisting of S, T, C, E, Q, P and R, preferably is selected from the group consisting of C, S and T; wherein AA⁷ is absent or is selected from the group consisting of S, T, C, E, Q, P and R, preferably is C or S; and wherein at least one of AA¹, AA², AA³, AA⁴, AA⁵, AA⁶ or AA⁷ is not absent. In one particular example, PEP7 is selected from the group consisting of KIPKAXX, GIPEPXX, SIPKAXX, HVTKPTX, YVPKPXX, TVPKPXX, AVPKAXX, KVGKAXX, KASKAXX, GSAGPXX, AAPASXX, STPPTXX, HVPKPXX, RVPSTXX, ASAAPXX and ASASPXX.

[0830] In certain embodiments useful for inducing differentiation of mensenchymal or progenitor stem cells from the adipocyte lineage, regenerating adipose tissues and protecting patients from adipose tissue degeneration-related diseases, conditions, disorders or pathologies, PEP8 is an amino acid or a peptide with between two and six amino acids of general formula AA³³-AA³⁴-AA³⁵-AA³⁶-AA³⁷-AA³⁸; wherein AA³³ is absent or is selected from the group consisting of AA^{I} amino acids at the exception of AA^{VI} amino acids; AA³⁴ is absent or is selected from the group consisting of AA^{III} and AA^{IV} amino acids; wherein AA³⁵ is absent or is selected from the group consisting of AA^{II} amino acids, preferably is S or C; wherein AA³⁶ is absent or is selected from the group consisting of AA^{III} and AA^{IV} amino acids; wherein AA³⁷ is absent or is selected from the group consisting of AA^{II} amino acids, preferably is S or C; wherein AA³⁸ is absent or is selected from the group consisting of AA^{I}; and wherein at least one of AA³³, AA³⁴, AA³⁵, AA³⁶, AA³⁷ or AA³⁸ is not absent. In one particular example, PEP8 is selected from the group consisting of GXGXR, SXAXR, SXGXH, AXGXH, XGXR, EXGXR, RXGXS, AXGXR, SXGXR, XGXL and XKXS.

[0831] In certain embodiments useful for inducing differentiation of mensenchymal or progenitor stem cells from the adipocyte lineage, regenerating adipose tissues and protecting patients from adipose tissue degeneration-related diseases, conditions, disorders or pathologies, PEP9 is a peptide of general formula AA¹-AA²-AA³-AA⁴-AA⁵-AA⁶-AA⁷-PEP5; wherein PEP5 is a peptide of formula PEP3-AA¹¹-AA¹²; wherein PEP3 is selected from the group consisting of VPT, VPE, APT, TPT, VPA, APV, VPQ and VSQ; wherein AA¹ is selected from the group consisting of E, K, Q, R, A, D, G and H, in particular E, K, Q, R, A and D; wherein AA¹² is selected from the group consisting of L, M, T, E, Q and H, in particular selected from the group consisting of L, M and T; wherein AA¹, AA², AA³, AA⁴, and AA⁵ are independently absent or AA^{I} as defined herein; wherein AA⁶ is absent or selected from the group consisting of S, T, C, E, Q, P and R, preferably is selected from the group consisting of C, S and T; wherein AA⁷ is selected from the group consisting of S, T, C, E, Q, P and R, preferably is C or S. In one particular example, PEP9 is selected from the group consisting of KIPKAXXVPTEL, GIPEPXXVPEKM, SIPKAXXVPTEL, HVTKPTXAPTKL, YVPKPXXAPTKL, TVPKPXXAPTQL, AVPKAXXAPTKL, KVGKAXXVPTKL, KASKAXXVPTKL, GSAGPXXTPTKM, AAPASXXVPARL, STPPTXXVPTRL, HVPKPXXAPTKL, RVPSTXXAPVKT, ASAAPXXVPQAL, ASASPXXVSQDL and ASASPXXVPQDL.

[0832] In certain embodiments useful for inducing differentiation of mensenchymal or progenitor stem cells from the adipocyte lineage, regenerating adipose tissues and protecting patients from adipose tissue degeneration-related diseases, conditions, disorders or pathologies, PEP10 is a peptide of general formula PEP6-AA³³-AA³⁴-AA³⁵-AA³⁶-AA³⁷-AA³⁸; wherein PEP6 is a peptide of formula AA²⁶-AA²⁷-AA²⁸-AA²⁹-PEP4; wherein PEP4 is selected from the group consisting of VVE, TVE, VVR, VVK, VAE, AVS, VVD, VEE, VRS and VKS; wherein AA²⁶ is absent or selected from the group consisting of AA^{III} amino acids, preferably is absent or E; wherein AA²⁷ and AA²⁸ are independently selected from the group consisting of AA^{III} and AA^{V} amino acids, preferably AA²⁷ is selected from the group consisting of D, E, N, G and M, preferably AA²⁸ is selected from the group consisting of M, I and V; wherein AA²⁹ is absent or selected from the group consisting of AA^{II} amino acids, preferably absent or S; wherein AA³³ is absent or is selected from the group consisting of AA^{I} amino acids at the exception of AA^{VI} amino acids; AA³⁴ is absent or is selected from the group consisting of AA^{III} and AA^{IV} amino acids; wherein AA³⁵ is absent or is selected from the group consisting of AA^{II} amino acids, preferably is S or C; wherein AA³⁶ is absent or is selected from the group consisting of AA^{III} and AA^{IV} amino acids; wherein AA³⁷ is absent or is selected from the group consisting of AA^{II} amino acids, preferably is S or C; wherein AA³⁸ is absent or is selected from the group consisting of AA^{I}. In one particular example, PEP10 is selected from the group consisting of DMVVEGXGXR, NMTVESXAXR, EMVVEGXGXR, NMVVRSXGXH, NMVVRSXGXH, NMVVRAXGXH, NMVVKAXGXH, EGMSVAEXGXR, GMAVSEXGXR, GMVVDRXGXS, DMVVEAXGXR, DMVVESXGXR, NMVVRSXGXH, MIVEEXGXL, MIVRSXKXS, MIVKSXKXS and MVVKSXKXS.

[0833] In certain embodiments useful for inducing differentiation of mensenchymal or progenitor stem cells from the adipocyte lineage, regenerating adipose tissues and protecting patients from adipose tissue degeneration-related diseases, conditions, disorders or pathologies, PEP12 is a peptide of general formula PEP1-AA¹⁷-PEP11; wherein AA¹⁷ is selected from the group consisting of G, A, V, L, I, P, F, M, W, T and S (in particular is selected from the group consisting of M, V and T); wherein PEP1 is SAIS or NAIS.

[0834] In certain embodiments useful for inducing differentiation of mensenchymal or progenitor stem cells from the adipocyte lineage, regenerating adipose tissues and protecting patients from adipose tissue degeneration-related diseases, conditions, disorders or pathologies, PEP11 is a peptide with 3 amino acids of general formula AA¹⁸-AA¹⁹-AA²⁰; wherein AA¹⁸ is selected from the group consisting of L, V, Q, A and R, in particular is L; wherein AA¹⁹ is selected from the group consisting of F, W, H and Y (in particular is a polar aromatic amino acid such as Y); wherein AA²⁰ is selected from the group consisting of L, F, Y, K, I, V and M, in particular is L or F. In one particular example, PEP11 is LYL or LYF.

[0835] The definitions of “PEP” pairs, quadruplets, hexaplets and heptuplet e.g. PEP1:PEP2, PEP12:PEP2, or PEP7:PEP5:PEP12:LINKER:PEP2:PEP6:PEP8, useful for inducing differentiation of mensenchymal or progenitor stem cells from the adipocyte lineage, regenerating adipose tissues and protecting patients from adipose tissue degeneration-related diseases, conditions, disorders or pathologies, are as already defined herein to the extent that PEP1 to PEP12 are particularly useful for these applications. For instances:

[0836] In certain embodiments useful for inducing differentiation of mensenchymal or progenitor stem cells from the adipocyte lineage, regenerating adipose tissues and protecting patients from adipose tissue degeneration-related diseases, conditions, disorders or pathologies, the pair PEP1:PEP2 is SAIS:LKNYQ or NAIS:LKKYR.

[0837] In certain embodiments useful for inducing differentiation of mensenchymal or progenitor stem cells from the adipocyte lineage, regenerating adipose tissues and protecting patients from adipose tissue degeneration-related diseases, conditions, disorders or pathologies, the pair PEP12:PEP2 is SAIS-AA¹⁷-LYL:LKNYQ or NAIS-AA¹⁷-LYF:LKKYR; wherein AA¹⁷ is selected from the group consisting of G, A, V, L, I, P, F, M, W, T and S (in particular is selected from the group consisting of M, V and T).

[0838] In certain embodiments useful for inducing differentiation of mensenchymal or progenitor stem cells from the adipocyte lineage, regenerating adipose tissues and protecting patients from adipose tissue degeneration-related diseases, conditions, disorders or pathologies, PEP3 is selected from the group consisting of VPT, VPE, APT, TPT, VPA, APV, VPQ and VSQ; PEP4 is selected from the group consisting of VVE, TVE, VVR, VVK, VAE, AVS, VVD, VEE, VRS and VKS; and wherein the pair PEP3:PEP4 is selected from the group consisting of VPT:VVE, VPE:TVE, APT:VVR, APT:VVK, VPT:VAE, VPT:AVS, TPT:VVD, VPA:VVE, APV:VEE, VPQ:VRS, VSQ:VKS and VPQ:VKS.

[0839] In certain embodiments useful for inducing differentiation of mensenchymal or progenitor stem cells from the adipocyte lineage, regenerating adipose tissues and protecting patients from adipose tissue degeneration-related diseases, conditions, disorders or pathologies, PEP5 is selected from the group consisting of VPTEL, VPEKM, APTKL, APTQL, VPTKL, TPTKM, VPARL, VPTRL, APVKT, VPQAL, VSQDL and VPQDL; PEP6 is selected from the group consisting of DMVVE, NMTVE, EMVVE, NMVVR, NMVVK, EGMSVAE, GMAVS, GMVVD, DMVVE, MIVEE, MIVRS, MIVKS and MVVKS; and wherein the pair PEP5:PEP6 is selected from the group consisting of VPTEL:DMVVE, VPEKM:NMTVE, VPTEL:EMVVE, APTKL:NMVVR, APTQL:NMVVR, APTKL:NMVVK, VPTKL:EGMSVAE, VPTKL:GMAVS, TPTKM:GMVVD, VPARL:DMVVE, VPTRL:DMVVE, APVKT:MIVEE, VPQAL:MIVRS, VSQDL:MIVKS and VPQDL:MVVKS.

[0840] In certain embodiments useful for inducing differentiation of mensenchymal or progenitor stem cells from the adipocyte lineage, regenerating adipose tissues and protecting patients from adipose tissue degeneration-related diseases, conditions, disorders or pathologies, PEP7 is selected from the group consisting of KIPKAXX, GIPEPXX, SIPKAXX, HVTKPTX, YVPKPXX, TVPKPXX, AVPKAXX, KVGKAXX, KASKAXX, GSAGPXX, AAPASXX, STPPTXX, HVPKPXX, RVPSTXX, ASAAPXX and ASASPXX; wherein PEP8 is selected from the group consisting of GXGXR, SXAXR, SXGXH, AXGXH, XGXR, EXGXR, RXGXS, AXGXR, SXGXR, XGXL and XKXS; and wherein the pair PEP7:PEP8 is selected from the group consisting of KIPKAXX:GXGXR, GIPEPXX:SXAXR, SIPKAXX:GXGXR, HVTKPTX:SXGXH, YVPKPXX:SXGXH, TVPKPXX:AXGXH, AVPKAXX:AXGXH, KVGKAXX:XGXR, KASKAXX:EXGXR, GSAGPXX:RXGXS, AAPASXX:AXGXR, STPPTXX:SXGXR, HVPKPXX:SXGXH, RVPSTXX:XGXL, ASAAPXX:XKXS and ASASPXX:XKXS.

[0841] In certain embodiments useful for inducing differentiation of mensenchymal or progenitor stem cells from the adipocyte lineage, regenerating adipose tissues and protecting patients from adipose tissue degeneration-related diseases, conditions, disorders or pathologies, PEP9 is selected from the group consisting of KIPKAXXVPTEL, GIPEPXXVPEKM, SIPKAXXVPTEL, HVTKPTXAPTKL, YVPKPXXAPTKL, TVPKPXXAPTQL, AVPKAXXAPTKL, KVGKAXXVPTKL, KASKAXXVPTKL, GSAGPXXTPTKM, AAPASXXVPARL, STPPTXXVPTRL, HVPKPXXAPTKL, RVPSTXXAPVKT, ASAAPXXVPQAL, ASASPXXVSQDL and ASASPXXVPQDL; PEP10 is selected from the group consisting of DMVVEGXGXR, NMTVESXAXR, EMVVEGXGXR, NMVVRSXGXH, NMVVRSXGXH, NMVVRAXGXH, NMVVKAXGXH, EGMSVAEXGXR, GMAVSEXGXR, GMVVDRXGXS, DMVVEAXGXR, DMVVESXGXR, NMVVRSXGXH, MIVEEXGXL, MIVRSXKXS, MIVKSXKXS and MVVKSXKXS; and wherein the pair PEP9:PEP10 is selected from the group consisting of KIPKAXXVPTEL:DMVVEGXGXR, GIPEPXXVPEKM:NMTVESXAXR, SIPKAXXVPTEL:EMVVEGXGXR, HVTKPTXAPTKL:NMVVRSXGXH, YVPKPXXAPTKL:NMVVRSXGXH, TVPKPXXAPTQL:NMVVRAXGXH, AVPKAXXAPTKL:NMVVKAXGXH, KVGKAXXVPTKL:EGMSVAEXGXR, KASKAXXVPTKL:GMAVSEXGXR, GSAGPXXTPTKM:GMVVDRXGXS, AAPASXXVPARL:DMVVEAXGXR, STPPTXXVPTRL:DMVVESXGXR, HVPKPXXAPTKL:NMVVRSXGXH, RVPSTXXAPVKT:MIVEEXGXL, ASAAPXXVPQAL:MIVRSXKXS, ASASPXXVSQDL:MIVKSXKXS and ASASPXXVPQDL:MVVKSXKXS.

[0842] In certain embodiments useful for inducing differentiation of mensenchymal or progenitor stem cells from the adipocyte lineage, regenerating adipose tissues and protecting patients from adipose tissue degeneration-related diseases, conditions, disorders or pathologies, PEP5 is selected from the group consisting of VPTEL, VPEKM, APTKL, APTQL, VPTKL, TPTKM, VPARL, VPTRL, APVKT, VPQAL, VSQDL and VPQDL; PEP6 is selected from the group consisting of DMVVE, NMTVE, EMVVE, NMVVR, NMVVK, EGMSVAE, GMAVS, GMVVD, DMVVE, MIVEE, MIVRS, MIVKS and MVVKS; and wherein the pair PEP5:PEP6 is selected from the group consisting of VPTEL:DMVVE, VPEKM:NMTVE, VPTEL:EMVVE, APTKL:NMVVR, APTQL:NMVVR, APTKL:NMVVK, VPTKL:EGMSVAE, VPTKL:GMAVS, TPTKM:GMVVD, VPARL:DMVVE, VPTRL:DMVVE, APVKT:MIVEE, VPQAL:MIVRS, VSQDL:MIVKS and VPQDL:MVVKS; wherein the pair PEP5:PEP6 is not VPTEL:DMVVE when PEP1 is SAIS and PEP2 is LKNYQ; wherein the pair PEP5:PEP6 is not VPTEL:EMVVE when PEP1 is SAIS and PEP2 is LKNYQ; wherein the pair PEP5:PEP6 is not APTQL:NMVVR when PEP1 is NAIS and PEP2 is LKKYR; and wherein the pair PEP5:PEP6 is not APTKL:NMVVR when PEP1 is NAIS and PEP2 is LKKYR.

[0843] In certain embodiments useful for inducing differentiation of mensenchymal or progenitor stem cells from the adipocyte lineage, regenerating adipose tissues and protecting patients from adipose tissue degeneration-related diseases, conditions, disorders or pathologies, PEP9 is selected from the group consisting of KIPKAXXVPTEL, GIPEPXXVPEKM, SIPKAXXVPTEL, HVTKPTXAPTKL, YVPKPXXAPTKL, TVPKPXXAPTQL, AVPKAXXAPTKL, KVGKAXXVPTKL, KASKAXXVPTKL, GSAGPXXTPTKM, AAPASXXVPARL, STPPTXXVPTRL, HVPKPXXAPTKL, RVPSTXXAPVKT, ASAAPXXVPQAL, ASASPXXVSQDL and ASASPXXVPQDL; PEP10 is selected from the group consisting of DMVVEGXGXR, NMTVESXAXR, EMVVEGXGXR, NMVVRSXGXH, NMVVRSXGXH, NMVVRAXGXH, NMVVKAXGXH, EGMSVAEXGXR, GMAVSEXGXR, GMVVDRXGXS, DMVVEAXGXR, DMVVESXGXR, NMVVRSXGXH, MIVEEXGXL, MIVRSXKXS, MIVKSXKXS and MVVKSXKXS; and wherein the pair PEP9:PEP10 is selected from the group consisting of KIPKAXXVPTEL:DMVVEGXGXR, GIPEPXXVPEKM:NMTVESXAXR, SIPKAXXVPTEL:EMVVEGXGXR, HVTKPTXAPTKL:NMVVRSXGXH, YVPKPXXAPTKL:NMVVRSXGXH, TVPKPXXAPTQL:NMVVRAXGXH, AVPKAXXAPTKL:NMVVKAXGXH, KVGKAXXVPTKL:EGMSVAEXGXR, KASKAXXVPTKL:GMAVSEXGXR, GSAGPXXTPTKM:GMVVDRXGXS, AAPASXXVPARL:DMVVEAXGXR, STPPTXXVPTRL:DMVVESXGXR, HVPKPXXAPTKL:NMVVRSXGXH, RVPSTXXAPVKT:MIVEEXGXL, ASAAPXXVPQAL:MIVRSXKXS, ASASPXXVSQDL:MIVKSXKXS and ASASPXXVPQDL:MVVKSXKXS; wherein the pair PEP9:PEP10 is not KIPKAXXVPTEL:DMVVEGXGXR when PEP1 is SAIS and PEP2 is LKNYQ; wherein the pair PEP9:PEP10 is not SIPKAXXVPTEL:EMVVEGXGXR when PEP1 is SAIS and PEP2 is LKNYQ; wherein the pair PEP9:PEP10 is not HVTKPTXAPTKL:NMVVRSXGXH when PEP1 is NAIS and PEP2 is LKKYR; wherein the pair PEP9:PEP10 is not YVPKPXXAPTKL:NMVVRSXGXH when PEP1 is NAIS and PEP2 is LKKYR; wherein the pair PEP9:PEP10 is not TVPKPXXAPTQL:NMVVRAXGXH when PEP1 is NAIS and PEP2 is LKKYR; and wherein the pair PEP9:PEP10 is not HVPKPXXAPTKL:NMVVRSXGXH when PEP1 is NAIS and PEP2 is LKKYR.

[0844] In certain embodiments useful for inducing differentiation of mensenchymal or progenitor stem cells from the adipocyte lineage, regenerating adipose tissues and protecting patients from adipose tissue degeneration-related diseases, conditions, disorders or pathologies, PEP1 is SAIS or NAIS; PEP11 is LYL or LYF; and the pair PEP1:PEP11 is SAIS:LYL or NAIS:LYF.

[0845] In one aspect, the present disclosure provides a GFR-binding compound, wherein said GFR-binding compound is a peptide, a variant or analog thereof, or a peptidomimetic as defined herein, with between 20 and 60 (in particular between 20 and 50, and more particularly, between 20 and 45) amino acids, comprising a peptide with four amino acids (PEP1) or a peptide with eight amino acids (PEP12), a peptide with five amino acids (PEP2), and optionally a pair of peptides selected form the group consisting of PEP3:PEP4, PEP3:PEP6, PEP3:PEP10, PEP5:PEP4, PEP9:PEP4, PEP5:PEP6, PEP5:PEP10, PEP9:PEP6 and PEP9:PEP10; wherein said GFR-binding compound does not comprise the pair of peptides VPTEL:DMVVE when PEP1 is SAIS and PEP2 is LKNYQ; wherein said GFR-binding compound does not comprise the pair of peptides VPTEL:EMVVE when PEP1 is SAIS and PEP2 is LKNYQ; wherein said GFR-binding compound does not comprise the pair of peptides APTQL:NMVVR when PEP1 is NAIS and PEP2 is LKKYR; and wherein said GFR-binding compound does not comprise the pair of peptides APTKL:NMVVR when PEP1 is NAIS and PEP2 is LKKYR; and wherein the RMSD is 2.45 Å or less.

[0846] In one aspect, the present disclosure provides a GFR-binding compound, wherein said GFR-binding compound is a peptide, a variant or analog thereof, or a peptidomimetic as defined herein, with between 20 and 60 (in particular between 20 and 50, and more particularly, between 20 and 45) amino acids, comprising a peptide with four amino acids (PEP1) or a peptide with eight amino acids (PEP12), a peptide with five amino acids (PEP2), and optionally a pair of peptides selected form the group consisting of PEP3:PEP4, PEP3:PEP6, PEP3:PEP10, PEP5:PEP4, PEP9:PEP4, PEP5:PEP6, PEP5:PEP10, PEP9:PEP6 and PEP9:PEP10; wherein said GFR-binding compound does not comprise the pair of peptides KIPKAXXVPTEL:DMVVEGXGXR when PEP1 is SAIS and PEP2 is LKNYQ; wherein said GFR-binding compound does not comprise the pair of peptides SIPKAXXVPTEL:EMVVEGXGXR when PEP1 is SAIS and PEP2 is LKNYQ; wherein said GFR-binding compound does not comprise the pair of peptides HVTKPTXAPTKL:NMVVRSXGXH when PEP1 is NAIS and PEP2 is LKKYR; wherein said GFR-binding compound does not comprise the pair of peptides YVPKPXXAPTKL:NMVVRSXGXH when PEP1 is NAIS and PEP2 is LKKYR; wherein said GFR-binding compound does not comprise the pair of peptides TVPKPXXAPTQL:NMVVRAXGXH when PEP1 is NAIS and PEP2 is LKKYR; and wherein said GFR-binding compound does not comprise the pair of peptides HVPKPXXAPTKL:NMVVRSXGXH when PEP1 is NAIS and PEP2 is LKKYR; and wherein the RMSD is 2.45 Å or less.

[0847] In certain embodiments useful for inducing differentiation of mensenchymal or progenitor stem cells from the adipocyte lineage, regenerating adipose tissues and protecting patients from adipose tissue degeneration-related diseases, conditions, disorders or pathologies, said GFR-binding compound is a synthetic molecule as defined herein in the definition section.

[0848] In certain embodiments useful for inducing differentiation of mensenchymal or progenitor stem cells from the adipocyte lineage, regenerating adipose tissues and protecting patients from adipose tissue degeneration-related diseases, conditions, disorders or pathologies, said GFR-binding compound is a synthetic peptide, or a variant or analog thereof, or a peptidomimetic.

### Tissue Closure

[0849] In certain embodiments useful for promoting tissue closure, the choice of PEP1, PEP2, PEP3, PEP4, PEP5, PEP6, PEP7, PEP8, PEP9, PEP10, PEP12, PEP11 and AA¹⁷ will depend on the type of specific tissue closure to be performed and may include any of the suitable amino acids, peptides, analog or variant thereof, or peptidomimetic, already disclosed herein with respect to the bone, cartilage, vascular, wound healing, neuronal, eye-retinal, kidneys, liver, L/T and skin applications. For instance, in certain embodiments, during bone repair surgery, different layers of tissue such as skin, muscle and blood vessel are incised in order to reach the damaged bone part. Thus, suitable PEP1, PEP2, PEP3, PEP4, PEP5, PEP6, PEP7, PEP8, PEP9, PEP10, PEP12, PEP11 and AA¹⁷ for implementing embodiments of the invention in this specific situation may include such amino acids, peptides, analog or variant thereof, or peptidomimetic, already described herein with respect to skin, muscle, vascular and bone tissue regeneration/formation and cell migration. Likewise, for example, in certain embodiments, during heart surgery, different layers of tissue such as skin, muscle and blood vessel, are incised in order to reach the patient's heart. Thus, suitable PEP1, PEP2, PEP3, PEP4, PEP5, PEP6, PEP7, PEP8, PEP9, PEP10, PEP12, PEP11 and AA¹⁷ for implementing embodiments of the invention in this specific situation include such amino acids, peptides, analog or variant thereof, or peptidomimetic, already described herein with respect to the skin, muscle and blood vessel tissue regeneration/formation and cell migration.

### Interactions

[0850] GFR-binding compounds may form at least one intramolecular non-covalent interaction. Such interactions may be one of electrostatic interactions, i-interactions, van der Waals forces, hydrophobic interactions or any combinations thereof. Such interactions may be formed between 2 or more amino acids' side chains, between 2 or more amino acids' backbones or between amino acids' side chains and backbones. Such interactions may increase the stability of the GFR-binding compounds in vitro and/or in vivo thus reducing or preventing physiological degradation. In one example, GFR-binding compounds may form at least one, preferably more than one, of the following intramolecular non-covalent interactions: AA²⁰ /// AA²⁰⁶, AA¹⁹ ///AA²⁰⁷, AA¹⁸ /// AA²¹, AA¹⁷ /// AA²², AA¹⁶ /// AA²³, AA¹⁵ /// AA²⁴, AA¹⁵ /// AA²⁵, wherein /// represents a non-covalent interaction.

### III. Bioactive Carriers

[0851] The present invention may achieve its intended therapeutic and/or cosmetic action(s) e.g. through efficient tissue induction, by functional combination (or association) with a bioactive carrier.

[0852] In one example, said GFR-binding compound and said bioactive carrier are thus operably associated, combined, linked or connected as defined herein and thus may form a pharmaceutical, dermatological, prophylactic, diagnostic, imaging or cosmetic association or combination for uses and methods as defined herein.

[0853] As may be used herein, the term “bioactive carrier”, “biocompatible carrier”, “bioactive material”, “biocompatible material”, “bioactive substance”, “bio-substance”, “biocompatible substance”, are used interchangeably.

[0854] A suitable bioactive carrier is compatible with living cells, tissues, organs or systems posing little to no risk of injury, toxicity or rejection by the immune system. Bioactive carriers suitable for implementing embodiments of the present invention include, but are not limited to, (a) a biopolymer such as (a1) collagen, (a2) fibrin; (b) a synthetic polymer such as (b1) ultra-high molecular weight polyethylene (UHMWPE), (b2) polyurethane (PE), (b3) polyurethane (PU), (b4) polytetrafuoroethylene (PTFE), (b5) polyacetal (PA), (b6) polymethylmethacrylate (PMMA), (b7) polyethylene terepthalate (PET), (b8) silicone rubber (SR), (b9) polyetheretherketone (PEEK), (b10) poly(lactic acid) (PLA), (b11) polysulfone (PS), (b12) PLLA, (b13) PLGA or (b14) PLDA; (c) metals and metal oxides such as (c1) gold and gold alloys, (c2) silver and silver alloys, (c3) platinum and platinum alloys, (c4) tantalum, (c5) Ti6Al4V, (c6) 316L stainless steel, (c7) Co—Cr Alloys, (c8) titanium alloys such as such as □-type, β-type, □+□-type Ti alloy, Ti—Nb alloys such as Ti29Nb13Ta4.6Zr or Ti35Nb4Sn); (d) metallic glasses; (e) amorphous alloys such as Zr-based alloys; (f) porous metals such as the ones reported in Ryan et a1., 2006, Biomaterials, 27, 2651; Lopez-Heredia et al. 2008, Biomaterials, 29, 2608; Ryan et a1., 2008, Biomaterials, 29, 3625; Li et a1., 2007, Biomaterials, 28, 2810; or Hollander et a1., 2006, Biomaterials, 27, 955; all being incorporated herein in their entirety; (g) gel or solid ceramics such as (g1) alumina, (g2) zirconia, (g3) carbon, (g4) titania, (g5) bioglass, or (g6) hydroxyapatite (HA); (h) composites such as (h1) silica/SR, (h2) CF/UHMWPE, (h3) CF/PTFE, (h4) HA/PE, (h5) CF/epoxy, (h6) CF/PEEK, (h7) CF/C or (h8) Al₂O₃/PTFE; (i) hydrogels such as (i1) polyisocyanopeptide hydrogels such as oligo(ethylene)glycol polyisocyanopeptides as described, for instance, in Van Buul, et a1.; Chem. Sci. 4, 2357-2363 (2013), incorporated herein by reference in its entirety, (i2) polysaccharides such as alginates, chitosans, chitins, guar gums, pectins, gellan gums, heparins, carrageenans, hyaluronans, starches, agars, xanthan gums, methylcellulose, carboxymethylcellulose, hydroxypropyl methyl cellulose, (i3) polyglycols such as polyethyleneglycol or polypropyleneglycol, (i4) polyvinylpyrrolidone, (i5) poly(vinylalcohol), (i6) polyacrylic acids, (i7) glycerophosphates, (i8) 2-acrylamido-2-methylpropanesulfonic acid, (i9) polyphosphazenes; (j) other suitable materials such as demineralized bone matrix; and any combinations thereof.

[0855] Suitable sources of bioactive carriers for implementing embodiments of the present invention include, but are not limited to, autographs, allographs, xenographs, plants, solutions, excipients, ceramics, metals, metal alloys, organic and inorganic polymers, bioglasses, carbon-containing structures, or combination thereof.

[0856] Particularly suitable as bioactive carriers for implementing embodiments of the present invention include bioactive carriers comprising at least one naturally occurring hydroxyl group on at least one surface thereof and bioactive carriers which do not naturally comprise at least one hydroxyl group on a surface thereof but which have been modified using conventional surface treatment techniques such that at least one hydroxyl group is present on a surface of the bioactive carrier. In one example, said hydroxyl group is an available hydroxyl group i.e. it is not prevented from interacting and/or reacting with a compound of the present disclosure. Suitable as bioactive carriers naturally containing hydroxyl groups on a surface thereof for implementing embodiments of the invention specifically include metal oxides such as titanium oxides and non-metal oxides such ceramics. Also suitable as bioactive carriers for implementing embodiments of the invention include bioactive carriers comprising at least one naturally occurring carboxylate group (—COOH) or amine group (—NH₂) on at least one of a surface thereof and bioactive carriers which do not naturally comprise at least one carboxylate group (—COOH) or amine group (—NH₂) onto a surface thereof but which have been modified using conventional surface treatment techniques such that at least one carboxylate group (—COOH) or amine group (—NH₂) is present on a surface of the bioactive carrier.

[0857] In one example, said bioactive carrier includes a biomaterial. Suitable biomaterials for implementing certain embodiments of the present disclosure may be derived from nature or synthesized in the laboratory using a variety of chemical approaches utilizing metallic components, polymers, ceramics or composite materials. They are often used and/or adapted for a medical application, and thus comprise whole or part of a living structure or biomedical device. Suitable biomaterials for implementing certain embodiments of the present disclosure are commonly used in joint replacements, bone plates, bone cement, artificial ligaments and tendons, dental implants for tooth fixation, blood vessel prostheses, heart valves, skin repair devices (artificial tissue), cochlear replacements, contact lenses, breast implants, drug delivery mechanisms, sustainable materials, vascular grafts, stents, nerve conduits. Particularly suitable biomaterials for implementing certain embodiments of the present disclosure such as metals and alloys (pages 94-95), ceramics (pages 95-97), polymeric biomaterials (pages 97-98) and biocomposite materials (pages 98-99) are described in Nitesh et a1., International Journal of Emerging Technology and Advanced Engineering, ISSN 2250-2459, Volume 2, Issue 4, 2012, which is herein incorporated by reference in its entirety.

[0858] In one particular example, said bioactive carrier is a biomaterial.

[0859] In certain embodiments, particularly suitable bioactive carriers are selected from the group consisting of bioinert biomaterials, bioactive biomaterials and bioresorbable biomaterials.

[0860] The nature of the biomaterial is an important parameter. Particularly good results have been obtained using bioactive carriers composed mostly with the main material component of the tissue to be regenerated and/or repaired. This generally allows for a better integration of the bioactive carrier, a better resorption from the surrounding cells already present and therefore a better regeneration or repair of the targeted tissue to be achieved. For example, it was discovered that particularly good results may be obtained when a solid ceramic component (granulated ceramic powder or ceramic scaffolds) or a gel ceramic component is used in combination of a GFR-binding peptide of the present disclosure to regenerate bone and protect from osteoporosis. For example, it was also discovered that particularly good results may be obtained when collagen, in particular collagen types I, II, III and XI, is used in combination of a GFR-binding peptide of the present disclosure to regenerate cartilage. For example, it was also discovered that particularly good results may be obtained when collagen, in particular collagen types I and III, or a biodegradable hydrogel is used in combination of a GFR-binding peptide of the present disclosure to regenerate muscle, skin, tendons and ligaments. For example, it was also discovered that particularly good results may be obtained when a collagen or a biodegradable hydrogel is used in combination of a GFR-binding peptide of the present disclosure to regenerate tissues and/or functions of vascular, neuron, eye retina, renal, wound healing, hair, fertility and reproduction, lung, and adipose tissues.

[0861] Bioinert Biomaterials:

[0862] As used herein, unless indicated otherwise or contradictory in context, the term “bioinert biomaterials” refers to any material that once placed in the human body has minimal interaction with its surrounding tissue. Examples of these are stainless steel, titanium, alumina, partially stabilised zirconia, and ultra-high molecular weight polyethylene. Generally a fibrous capsule might form around bioinert implants hence its biofunctionality relies on tissue integration through the implant.

[0863] Bioactive Biomaterial:

[0864] As used herein, unless indicated otherwise or contradictory in context, the term “bioactive biomaterial” refers to a material which, upon being placed within the human body, interacts with the surrounding bone and in some cases, even soft tissue. This occurs through a time-dependent kinetic modification of the surface, triggered by their implantation within the living bone. An ion-exchange reaction between the bioactive implant and surrounding body fluids, results in the formation of a biologically active carbonate apatite (CHAp) layer on the implant that is chemically and crystallographically equivalent to the mineral phase in bone. Examples of these materials are synthetic hydroxyapatite [Ca₁₀(PO₄)₆(OH)₂], glass ceramic A-W and Bioglass®.

[0865] Bioresorbable Biomaterials:

[0866] As used herein, unless indicated otherwise or contradictory in context, the term “bioresorbable biomaterials” refers to a material which, upon placement within the human body, starts to dissolve (resorbed) and slowly replaced by advancing tissue (such as bone). Examples of bioresorbable materials include, but are not limited to, tricalcium phosphate [Ca₃(PO₄)₂], polylactic-polyglycolic acid copolymers, calcium oxide, calcium carbonate and gypsum.

[0867] Therefore, no particular limitation should be ascribed to the substance, material or molecule suitable as being bioactive carriers for implementing embodiments of the present invention insofar as said substance, material or molecule is (a) biocompatible as defined herein and (b) combinable or associable with a GFR-binding compound as defined herein. In one preferred example, said bioactive carrier has a stiffness of at least 5 kPa, more preferably at least 35 kPa and preferably not more than 3 or 5 GPa as measured using conventional Dynamic Mechanical Analysis such as described in details in Gong J P et a1., Double-network hydrogels with extremely high mechanical strength, Adv Mater 2003, 15(14), 1155e8, which is incorporated herein by reference.

[0868] In one particular example, a biomaterial as defined herein for use in neuron-related applications has a stiffness comprised between about 0.01 kPa and about 3 kPa, preferably between about 0.01 kPa and about 1 kPa. In one particular example, a biomaterial as defined herein for use in muscle, cartilage and tendon/ligament -related applications has a stiffness comprised between about 3 kPa and about 200 kPa, preferably between about 10 kPa and about 30 kPa. In one particular example, a biomaterial as defined herein for use in bone-related applications has a stiffness comprised between about 30 kPa and about 3 GPa, preferably between about 70 kPa and about 200 kPa for instance in applications such as the treatment or prevention of osteoporosis and bone tissue regeneration. In one particular example, a biomaterial as defined herein for use in hair-related applications has a stiffness comprised between about 0.01 kPa and about 200 kPa, preferably between about 3 kPa and about 70 kPa. In one particular example, a biomaterial as defined herein for use in endothelization-related applications has a stiffness comprised between about 500 kPa and about 2.5 GPa. In one particular example, a biomaterial as defined herein for use in angiogenesis-related applications has a stiffness comprised between about 0.01 kPa and about 100 kPa. In one particular example, a biomaterial as defined herein for use in wound healing and skin-related applications has a stiffness comprised between about 0.01 kPa and about 70 kPa.

[0869] Available Hydroxyl Groups:

[0870] As used herein, unless indicated otherwise or contradictory in context, the term “free hydroxyl” or “available hydroxyl” means an hydroxyl group, which may be —OH or a radical (—O.) or an anion (—O⁻) fully or partially ionised, which is able to/free to act as a nucleophile in a reaction with an electrophile such as compound (A) or compound (B) defined below.

[0871] Available Hydroxyl-Containing Surface:

[0872] As used herein, unless indicated otherwise or contradictory in context, the term “available hydroxyl-containing surface” or “free hydroxyl-containing surface” means a surface containing at least one free or available hydroxyl group as defined herein.

[0873] Ceramics:

[0874] As used herein, unless indicated otherwise or contradictory in context, the term “ceramic” refers to an inorganic material with a high melting point, above 1000° C. Most typically, materials referred to as “ceramics” are obtained by a process in which raw material solid particles are heated in order to sinter them. Materials referred to as “ceramics” may broadly be split into two groups, these being “oxide ceramics” and “non-oxide ceramics”. “Oxide ceramics” include, but are not limited to, alkaline earth oxides such as MgO and BaO, Al₂O₃ and aluminates, TiO₂ and titanates, ZrO₂ and zirconates, silicates such as clays and clay-derived materials. Since the term “ceramics” may encompass crystalline, partially amorphous and fully amorphous materials, the term “oxide ceramics” may also be interpreted as covering fully amorphous silicate glasses. “Non-oxide ceramics” include, but are not limited to, carbides and nitrides, and also borides and silicides, for example silicon carbide and silicon nitride, and also metal carbides and nitrides. In one particular example, solid ceramics e.g. in granulated powder or as a scaffold, is used as a bioactive carrier in the meaning of the present disclosure in bone-related applications. In one particular example, gel ceramics is used as a bioactive carrier in the meaning of the present disclosure in bone-related applications.

[0875] Metal Oxides:

[0876] As used herein, unless indicated otherwise or contradictory in context, the term “metal oxide” means a chemical compound that contains at least one oxygen atom and one other element in its chemical formula. Metal oxides typically contain an anion of oxygen in the oxidation state of −2. They can be obtained by hydrolysis or air/oxygen oxidation. Examples of such metal oxides are titanium oxides (e.g. TiO, Ti₂O₃, TiO₂), silicon oxide (SiO₂), aluminum oxide (Al₂O₃), iron (II, III) oxides such as Fe₂O₃, and zinc oxide (ZnO).

[0877] Biopolymer:

[0878] As used herein, unless indicated otherwise or contradictory in context, the term “biopolymer” refers to a polymer produced by living organisms and includes, but is not limited to, polypeptides and proteins (such as collagen and fibrin), polysaccharides (such as cellulose, starch, chitin and chitosan), nucleic acids (such as DNA and RNA), and hydrides thereof.

[0879] Hydrogel:

[0880] As used herein, unless indicated otherwise or contradictory in context, the term “hydrogel” refers to “Hydrogel” refers to a class of polymeric materials which are swollen in an aqueous medium, but which do not dissolve in water. Hydrogels are highly absorbent (they can contain over 99% water) natural or synthetic polymers. Hydrogels also possess a degree of flexibility very similar to natural tissue, due to their significant water content. U.S. Pat. No. 6,475,516, for example, provides hydrogels being covalently bound to the surface of an in-dwelling medical device such as an implant, which may be functionalized with a GFR-binding compound of the present disclosure using, for instance, a process as described herein. In one particular example, biodegradable hydrogels are used as bioactive carriers in the meaning of the present disclosure.

[0881] Collagen:

[0882] As used herein, unless indicated otherwise or contradictory in context, the term “collagen” refers to the main structural protein of the various connective tissues in animals which is mostly found in fibrous tissues such as tendons, ligaments and skin, and is also abundant in corneas, cartilage, bones, blood vessels, the gut, and intervertebral discs. Collagen is typically composed of a triple helix and generally contains high hydroxyproline content. The most common motifs in its amino acid sequence glycine-proline-X and glycine-X-hydroxyproline, where X is any amino acid other than glycine, proline or hydroxyproline. 28 types of collagen have been identified and described in the literature, which are all presently contemplated to be suitable for implementing embodiments of the invention. The five most common types are: Collagen I which may be found in skin, tendon, vascular ligature, organs, bone (main component of the organic part of bone); Collagen II which may be found in cartilage (main component of cartilage); Collagen III which may be found in reticulate (main component of reticular fibers); Collagen IV which may be found in the basal lamina, the epithelium-secreted layer of the basement membrane; Collagen V which may be found on cell surfaces, hair and placenta. For example, in certain embodiments, suitable collagens for implementing embodiments of the present invention particularly include collagen type-I and type-IV. In one particular example, collagen, in particular collagen types I, II, III and XI, is used as a bioactive carrier in the meaning of the present disclosure in cartilage-related applications. In one particular example, collagen, in particular collagen types I and III, is used as a bioactive carrier in the meaning of the present disclosure in muscle-related applications, skin-related applications, and T/L-related applications. In one particular example, any type of collagen is used as a bioactive carrier in the meaning of the present disclosure in vascular, neuron, eye retina, renal, wound healing, hair, fertility and reproduction, lung, adipose -related applications.

[0883] In certain embodiments, said association, combination, linkage or connection between said GFR-binding compound and a bioactive carrier may occur via a bioactive carrier-affinity-containing group as defined herein.

### IV. Bioactive Carrier-Affinity-Containing Group

[0884] In one aspect, the present disclosure provides a GFR-binding compound as already defined herein modified or functionalised with at least one bioactive carrier-affinity-containing group. Said at least one bioactive carrier-affinity-containing group provides said GFR-binding compound with the ability to, covalently or non-covalently, interact with, or be connected to, a bioactive carrier as defined herein (in particular, a biomaterial as defined herein).

[0885] In such embodiments where affinity is required via covalent interaction or binding, said bioactive carrier-affinity-containing group may be a thiol (SH)-containing group or a cysteine-containing group, in particular, a thiol (SH)-containing peptide or a cysteine-containing peptide. In such embodiments where affinity is required via covalent interaction or binding, said bioactive carrier-affinity-containing group may particularly be a cysteine.

[0886] In such embodiments where affinity is required via non-covalent interaction or binding, said bioactive carrier-affinity-containing group may comprise (or be) a peptide group such as any one of the peptide groups disclosed in US patent application No. 2008/0268015 A1, which is hereby incorporated by reference in its entirety. In particular, peptides containing amino acid sequences rich in large aromatic amino acid residues (aromatic amino acid-containing peptides or peptidomimetics) that include one or more of Phe, Trp, Tyr such as sequences no: 1 to 45 described in US 2008/0268015 A1 are suitable as a biomaterial-affinity-containing fragment for implementing embodiments of the present invention. Said fragment may also be a peptide fragment such as any one of the peptide fragments disclosed in U.S. Pat. No. 6,818,620 B2, which is hereby incorporated by reference in its entirety. In particular, peptides of sequences no: 1 to 7 described in U.S. Pat. No. 6,818,620 B2 are suitable as a biomaterial-affinity-containing fragment for implementing embodiments of the present invention.

[0887] In one particular example, said bioactive carrier-affinity-containing group is a bioactive carrier high-affinity-containing group such as a biomaterial high-affinity-containing group.

[0888] In certain embodiments, said bioactive carrier-affinity-containing group has some affinity (preferably high affinity) with a given bioactive carrier (in particular, a biomaterial) such as collagen, apatite, titanium or any of those listed in e.g. US patent application No. 2008/0268015 A1, which is incorporated herein by reference. For instance, a group having some affinity with a biomaterial is any group capable to non-covalently interact/bind to a biomaterial with an affinity/specificity selected from at least 10%, at least 20%, at least 30%, at least 40%, at least 50%, at least 60%, at least 70%, at least 80%, at least 90%, at least 100%, at least 200%, at least 300%, at least 400%, at least 500%, or a higher percentage, with respect to an affinity where said group binds to an appropriate control such as, for example, a different material or surface, or a protein typically used for such comparisons such as bovine serum albumin. In one example, a biomaterial-affinity-containing group has a binding specificity that is characterized by a relative binding affinity as measured by an EC50 of 10 □M or less, and in certain embodiments, less than 1 □M. In certain embodiments, a relative affinity comprised between 1 pM and 100 □M, between 1 pM and 10 □M, or between 1 pM and 1 □M is particularly suitable. The EC50 is determined using any number of methods known in the art. In this case, the EC50 represents the concentration of fragment producing 50% of the maximal binding observed for that fragment in the assay.

[0889] In one particular example, said bioactive carrier-affinity-containing group is selected from the group consisting of GTPGP, which may preferably non-covalently interact with a bioactive carrier such as an apatite, and WWFWG, which may preferably non-covalently interact with a bioactive carrier such as a collagen.

[0890] In one particular example, said bioactive carrier-affinity-containing group is covalently or non-covalently (in particular, covalently) attached at an end (or extremity) of said GFR-binding compound.

### V. Modified GFR-Binding Compound

[0891] Thus, in one aspect, the present disclosure provides a modified GFR-binding compound comprising a GFR-binding compound as defined in the present disclosure and a bioactive carrier-affinity-containing group; and wherein the RMSD of the GFR-binding compound is 2.45 Å or less.

[0892] For example, in certain embodiments, the present disclosure provides a modified GFR-binding compound comprising a GFR-binding compound as defined in the present disclosure and a bioactive carrier-affinity-containing group; wherein said bioactive carrier-affinity-containing group is selected from the group consisting of a thiol-containing group (in particular, a thiol-containing peptide), a cysteine-containing group (in particular, a cysteine-containing peptide and more particularly, a cysteine), and an aromatic amino acid-containing peptide or peptidomimetic; and wherein the RMSD of the GFR-binding compound is 2.45 Å or less.

[0893] For example, in certain embodiments, the present disclosure provides a modified GFR-binding compound comprising a GFR-binding compound and a bioactive carrier-affinity-containing group; wherein said GFR-binding compound is a peptide, a variant or analog thereof, or a peptidomimetic as defined herein, with (comprising, or exclusively consisting of, or constituted of) between 20 and 60 (in particular between 20 and 50, and more particularly, between 20 and 45) amino acids, comprising a peptide with four amino acids (PEP1) selected from the group consisting of SAIS, SSLS, NAIS, SATS, SPIS, EPIS, SPIN, KPLS, EPLP, EPLT, SNIT, RSVK and RPVQ; and a peptide with five amino acids (PEP2) selected from the group consisting of LKNYQ, LKVYP, LKKYR, LRKHR, LKYHY, KFKYE, YGKIP, YKQYE, DHHKD, EQLSN, IGEMS, LGEMS, KEVQV and KKATV; wherein said bioactive carrier-affinity-containing group is selected from the group consisting of a thiol-containing group (in particular, a thiol-containing peptide), a cysteine-containing group (in particular, a cysteine-containing peptide and more particularly, a cysteine), and an aromatic amino acid-containing peptide or peptidomimetic; and wherein the RMSD of the GFR-binding compound is 2.45 Å or less.

[0894] For example, in certain embodiments, the present disclosure provides a modified GFR-binding compound comprising a GFR-binding compound and a bioactive carrier-affinity-containing group; wherein said GFR-binding compound is a peptide, a variant or analog thereof, or a peptidomimetic as defined herein, with (comprising, or exclusively consisting of, or constituted of) between 20 and 60 (in particular between 20 and 50, and more particularly, between 20 and 45) amino acids, comprising a peptide with height amino acids of general formula (PEP12): PEP1-AA¹⁷-PEP11, and a peptide with five amino acids (PEP2) selected from the group consisting of LKNYQ, LKVYP, LKKYR, LRKHR, LKYHY, KFKYE, YGKIP, YKQYE, DHHKD, EQLSN, IGEMS, LGEMS, KEVQV and KKATV; wherein PEP1 is a peptide with four amino acids selected from the group consisting of SAIS, SSLS, NAIS, SATS, SPIS, EPIS, SPIN, KPLS, EPLP, EPLT, SNIT, RSVK and RPVQ; wherein PEP11 is a peptide with 3 amino acids of formula AA¹⁸-AA¹⁹-AA²⁰; wherein AA¹⁷ is selected from the group consisting of G, A, V, L, I, P, F, M, W, T and S (in particular is selected from the group consisting of M, I, L, V and T); wherein AA¹⁸ is selected from the group consisting of L, V, Q, A and R; wherein AA¹⁹ is selected from the group consisting of F, W, H and Y (in particular is an aromatic, polar amino acid such as Y); wherein AA²⁰ is selected from the group consisting of L, F, Y, K, I, V and M; wherein said bioactive carrier-affinity-containing group is selected from the group consisting of a thiol-containing group (in particular, a thiol-containing peptide), a cysteine-containing group (in particular, a cysteine-containing peptide and more particularly, a cysteine), and an aromatic amino acid-containing peptide or peptidomimetic; and wherein the RMSD of the GFR-binding compound is 2.45 Å or less.

[0895] For example, in certain embodiments, the present disclosure provides a modified GFR-binding compound comprising a GFR-binding compound and a bioactive carrier-affinity-containing group; wherein said GFR-binding compound is a peptide, a variant or analog thereof, or a peptidomimetic as defined herein, with (comprising, or exclusively consisting of, or constituted of) between 20 and 60 (in particular between 20 and 50, and more particularly, between 20 and 45) amino acids, having the following general formula (I) (hereinafter may also be referred to as compound (I) or peptide (I)):

PEP(A)-LINKER-PEP(B) (I)

wherein one end of LINKER interacts covalently with one end of PEP(A); wherein another end of LINKER interacts covalently with one end of PEP(B); wherein PEP(A) comprises PEP1 or PEP12; wherein PEP(B) comprises PEP2; wherein LINKER is a linear or branched organic divalent radical, moiety or compound having a molecular weight (Mw) comprised between about 28 and about 2,000 Da, in particular, between about 300 and about 1000 Da; wherein said bioactive carrier-affinity-containing group is covalently or non-covalently attached to PEP(A) or PEP(B); wherein said bioactive carrier-affinity-containing group is selected from the group consisting of a thiol-containing group (in particular, a thiol-containing peptide), a cysteine-containing group (in particular, a cysteine-containing peptide and more particularly, a cysteine), and an aromatic amino acid-containing peptide or peptidomimetic; and wherein the RMSD of the GFR-binding compound is 2.45 Å or less.

[0896] For example, in certain embodiments, the present disclosure provides a modified GFR-binding compound comprising a GFR-binding compound and a bioactive carrier-affinity-containing group; wherein said GFR-binding compound is a peptide, a variant or analog thereof, or a peptidomimetic as defined herein, with (comprising, or exclusively consisting of, or constituted of) between 20 and 60 (in particular between 20 and 50, and more particularly, between 20 and 45) amino acids, having the following general formula (II) (hereinafter may also be referred to as compound (II) or peptide (II)):

PEP(C)-PEP12-LINKER-PEP2-PEP(D) (II)

wherein LINKER is a linear or branched organic divalent radical, moiety or compound having a molecular weight (Mw) comprised between about 28 and about 2,000 Da, in particular, between about 300 and about 1000 Da; wherein PEP12 is a peptide with 8 amino acids of formula PEP1-AA¹⁷-PEP11; wherein AA¹⁷, PEP1, PEP2, PEP12 and PEP11 are as already defined herein; wherein one end of PEP(C) interacts covalently with PEP12 via AA¹³; wherein one end of PEP(D) interacts covalently with PEP2 via AA²⁵; wherein one end of LINKER interacts covalently with one end of PEP12 via AA²⁰; wherein another end of LINKER interacts covalently with PEP2 via AA²¹; wherein AA¹³ and AA²¹ may be both N-terminal amino acids or both C-terminal amino acids; wherein AA²⁵ and AA²⁰ may be both N-terminal amino acids or both C-terminal amino acids; wherein PEP(C) is a peptide with at least 5 amino acids, in particular a peptide with between 5 and 12 amino acids; wherein PEP(D) is a peptide with at least 5 amino acids, in particular a peptide with between 5 and 12 amino acids; wherein said bioactive carrier-affinity-containing group is covalently or non-covalently attached to PEP(C) or PEP(D), in particular is covalently or non-covalently attached to PEP3 through AA⁸, PEP4 through AA³², PEP5 through AA⁸, PEP⁶ through AA³², PEP9 through AA¹, AA², AA³, AA⁴, AA⁵ or AA⁶, or PEP10 through AA³³, AA³⁴, AA³⁵, AA³⁶, AA³⁷ or AA³⁸; wherein said bioactive carrier-affinity-containing group is selected from the group consisting of a thiol-containing group (in particular, a thiol-containing peptide), a cysteine-containing group (in particular, a cysteine-containing peptide and more particularly, a cysteine), and an aromatic amino acid-containing peptide or peptidomimetic; and wherein the RMSD of the GFR-binding compound is 2.45 Å or less.

### VI. Functionalised Bioactive Carriers

[0897] In one aspect, the present disclosure provides a functionalised bioactive carrier, which may be used for inducing, in-vitro, ex-vivo or in-vivo, tissue regeneration, comprising at least one GFR-binding compound (in particular, at least one modified GFR-binding compound) as defined in the present disclosure. In one example, said (modified) GFR-binding compound and bioactive carrier are both active principles/ingredients. In certain embodiments, said functionalised bioactive carrier is a modified, functionalised, coated or grafted biomaterial as defined herein, in particular, a modified, functionalised, coated or grafted tissue regeneration compatible-biomaterial.

[0898] In one example, said functionalised bioactive carrier comprises one (modified) GFR-binding compound. In one example, said functionalised bioactive carrier comprises two or more distinct (modified) GFR-binding compounds. In one example, said functionalised bioactive carrier comprises three or more distinct (modified) GFR-binding compounds. In one example, said functionalised bioactive carrier comprises four or more distinct (modified) GFR-binding compounds.

[0899] Active or Bioactive Principles or Ingredients:

[0900] In the present description and unless otherwise indicated or contradictory in context, the term “(bio)active principle” or “(bio)active ingredient” generally refers to a molecule, compound or substance which is responsible for providing the desired biological effect. Without said active ingredient, the formulation or composition containing it, would not provide the desired biological effect. For example, in certain embodiments, formulation excipients are not considered as active ingredients in the pharmaceutical composition as defined herein.

[0901] In one example, said functionalised bioactive carrier is formed using a method comprising, or exclusively consisting of, contacting a bioactive carrier as defined herein and a (modified) GFR-binding compound under reacting conditions thereby functionalizing at least one part (or at least one part of a surface) of said bioactive carrier and thus forming a functional association, interaction or bond between said bioactive carrier and said (modified) GFR-binding compound.

[0902] In the present description and unless otherwise indicated or contradictory in context, the terms “functionally associated”, “functionally combined”, “functionalized”, “immobilized”, “deposited”, “coated”, or “grafted” all refer to the action of associating or functionalizing at least one part of a bioactive carrier with a (modified) GFR-binding compound so that the desired biological, therapeutic and/or cosmetic effect e.g. inducing tissue formation, is obtained. The association or combination may be covalent and form, between said (modified) GFR-binding compound and said bioactive carrier, a covalent interaction as already defined herein, or, the association or combination may be non-covalent and form, between said (modified) GFR-binding compound and said bioactive carrier, a non-covalent interaction as already defined herein.

[0903] For example, in certain embodiments, a (modified) GFR-binding compound interacts covalently (makes at least one functional covalent interaction) with said bioactive carrier.

[0904] In one aspect, the present disclosure thus provides a functionalised bioactive carrier comprising a (modified) GFR-binding compound, wherein said GFR-binding compound (before any modifications) is a peptide, or a variant or analog thereof, having growth factor receptor-binding capability or capabilities, exclusively consisting of (or constituted of) between 25-60 amino acids, in particular between 25-50 amino acids, and more particularly between 25-45 amino acids; and wherein the RMSD is 2.45 Å or less.

[0905] In one aspect, the present disclosure provides a functionalised bioactive carrier comprising a (modified) GFR-binding compound, wherein said GFR-binding compound (before any modifications) is a peptidomimetic as defined herein, having growth factor receptor-binding capability or capabilities, comprising between 20-60 amino acids, in particular between 20-50 or 20-45 amino acids, and more particularly, between 23-60, 23-50 or 23-45 amino acids; wherein said GFR-binding compound has a molecular weight comprised between 2,000 and 8,000 Daltons; and wherein the RMSD is 2.45 Å or less.

[0906] In one aspect, the present disclosure provides a functionalised bioactive carrier comprising a (modified) GFR-binding compound, wherein said GFR-binding compound (before any modifications) is a peptide, a variant or analog thereof, or a peptidomimetic as defined herein, having growth factor receptor-binding capability or capabilities, with between 20 and 60 (in particular between 20 and 50, and more particularly, between 20 and 45) amino acids, comprising a peptide with four amino acids (PEP1) and a peptide with five amino acids (PEP2); and wherein the RMSD is 2.45 Å or less.

[0907] In one aspect, the present disclosure provides a functionalised bioactive carrier comprising a (modified) GFR-binding compound, wherein said GFR-binding compound (before any modifications) is a peptide, a variant or analog thereof, or a peptidomimetic as defined herein, with between 20 and 60 (in particular between 20 and 50, and more particularly, between 20 and 45) amino acids, comprising a peptide with eight amino acids (PEP12) and a peptide with five amino acids (PEP2); and wherein the RMSD is 2.45 Å or less.

[0908] In one aspect, the present disclosure provides a functionalised bioactive carrier comprising a (modified) GFR-binding compound, wherein said GFR-binding compound (before any modifications) is a peptide, a variant or analog thereof, or a peptidomimetic as defined herein, with between 20 and 60 (in particular between 20 and 50, and more particularly, between 20 and 45) amino acids, comprising a peptide with four amino acids (PEP1) and a peptide with five amino acids (PEP2); wherein said GFR-binding compound further comprises a peptide with three amino acids (PEP3) and a peptide with three amino acids (PEP4); and wherein the RMSD is 2.45 Å or less.

[0909] In one aspect, the present disclosure provides a functionalised bioactive carrier comprising a (modified) GFR-binding compound, wherein said GFR-binding compound (before any modifications) is a peptide, a variant or analog thereof, or a peptidomimetic as defined herein, with between 20 and 60 (in particular between 20 and 50, and more particularly, between 20 and 45) amino acids, comprising a peptide with eight amino acids (PEP12) and a peptide with five amino acids (PEP2); wherein said GFR-binding compound further comprises a peptide with three amino acids (PEP3) and a peptide with three amino acids (PEP4); and wherein the RMSD is 2.45 Å or less.

[0910] In one aspect, the present disclosure provides a functionalised bioactive carrier comprising a (modified) GFR-binding compound, wherein said GFR-binding compound (before any modifications) is a peptide, a variant or analog thereof, or a peptidomimetic as defined herein, with between 20 and 60 (in particular between 20 and 50, and more particularly, between 20 and 45) amino acids, comprising a peptide with four amino acids (PEP1) and a peptide with five amino acids (PEP2); wherein said GFR-binding compound further comprises a peptide with five amino acids (PEP5) and a peptide with between five and seven amino acids (PEP6); and wherein the RMSD is 2.45 Å or less.

[0911] In one aspect, the present disclosure provides a functionalised bioactive carrier comprising a (modified) GFR-binding compound, wherein said GFR-binding compound (before any modifications) is a peptide, a variant or analog thereof, or a peptidomimetic as defined herein, with between 20 and 60 (in particular between 20 and 50, and more particularly, between 20 and 45) amino acids, comprising a peptide with eight amino acids (PEP12) and a peptide with five amino acids (PEP2); wherein said GFR-binding compound further comprises a peptide with five amino acids (PEP5) and a peptide with between five and seven amino acids (PEP6); and wherein the RMSD is 2.45 Å or less.

[0912] In one aspect, the present disclosure provides a functionalised bioactive carrier comprising a (modified) GFR-binding compound, wherein said GFR-binding compound (before any modifications) is a peptide, a variant or analog thereof, or a peptidomimetic as defined herein, with between 20 and 60 (in particular between 20 and 50, and more particularly, between 20 and 45) amino acids, comprising a peptide with four amino acids (PEP1) and a peptide with five amino acids (PEP2); wherein said GFR-binding compound further comprises a peptide with between six and twelve amino acids (PEP9) and a peptide with between six and eleven amino acids (PEP10); and wherein the RMSD is 2.45 Å or less.

[0913] In one aspect, the present disclosure provides a functionalised bioactive carrier comprising a (modified) GFR-binding compound, wherein said GFR-binding compound (before any modifications) is a peptide, a variant or analog thereof, or a peptidomimetic as defined herein, with between 20 and 60 (in particular between 20 and 50, and more particularly, between 20 and 45) amino acids, comprising a peptide with eight amino acids (PEP12) and a peptide with five amino acids (PEP2); wherein said GFR-binding compound further comprises a peptide with between six and twelve amino acids (PEP9) and a peptide with between six and eleven amino acids (PEP10); and wherein the RMSD is 2.45 Å or less.

[0914] In one aspect, the present disclosure provides a functionalised bioactive carrier comprising a (modified) GFR-binding compound, wherein said GFR-binding compound (before any modifications) is a peptide, a variant or analog thereof, or a peptidomimetic as defined herein, with between 20 and 60 (in particular between 20 and 50, and more particularly, between 20 and 45) amino acids, comprising a peptide with four amino acids (PEP1) and a peptide with five amino acids (PEP2); wherein said GFR-binding compound further comprises a peptide with three amino acids (PEP3) and a peptide with between five and seven amino acids (PEP6); and wherein the RMSD is 2.45 Å or less.

[0915] In one aspect, the present disclosure provides a functionalised bioactive carrier comprising a (modified) GFR-binding compound, wherein said GFR-binding compound (before any modifications) is a peptide, a variant or analog thereof, or a peptidomimetic as defined herein, with between 20 and 60 (in particular between 20 and 50, and more particularly, between 20 and 45) amino acids, comprising a peptide with eight amino acids (PEP12) and a peptide with five amino acids (PEP2); wherein said GFR-binding compound further comprises a peptide with three amino acids (PEP3) and a peptide with between five and seven amino acids (PEP6); and wherein the RMSD is 2.45 Å or less.

[0916] In one aspect, the present disclosure provides a functionalised bioactive carrier comprising a (modified) GFR-binding compound, wherein said GFR-binding compound (before any modifications) is a peptide, a variant or analog thereof, or a peptidomimetic as defined herein, with between 20 and 60 (in particular between 20 and 50, and more particularly, between 20 and 45) amino acids, comprising a peptide with four amino acids (PEP1) and a peptide with five amino acids (PEP2); wherein said GFR-binding compound further comprises a peptide with three amino acids (PEP3) and a peptide with between six and eleven amino acids (PEP10); and wherein the RMSD is 2.45 Å or less.

[0917] In one aspect, the present disclosure provides a functionalised bioactive carrier comprising a (modified) GFR-binding compound, wherein said GFR-binding compound (before any modifications) is a peptide, a variant or analog thereof, or a peptidomimetic as defined herein, with between 20 and 60 (in particular between 20 and 50, and more particularly, between 20 and 45) amino acids, comprising a peptide with eight amino acids (PEP12) and a peptide with five amino acids (PEP2); wherein said GFR-binding compound further comprises a peptide with three amino acids (PEP3) and a peptide with between six and eleven amino acids (PEP10); and wherein the RMSD is 2.45 Å or less.

[0918] In one aspect, the present disclosure provides a functionalised bioactive carrier comprising a (modified) GFR-binding compound, wherein said GFR-binding compound (before any modifications) is a peptide, a variant or analog thereof, or a peptidomimetic as defined herein, with between 20 and 60 (in particular between 20 and 50, and more particularly, between 20 and 45) amino acids, comprising a peptide with four amino acids (PEP1) and a peptide with five amino acids (PEP2); wherein said GFR-binding compound further comprises a peptide with five amino acids (PEP5) and a peptide with three amino acids (PEP4); and wherein the RMSD is 2.45 Å or less.

[0919] In one aspect, the present disclosure provides a functionalised bioactive carrier comprising a (modified) GFR-binding compound, wherein said GFR-binding compound (before any modifications) is a peptide, a variant or analog thereof, or a peptidomimetic as defined herein, with between 20 and 60 (in particular between 20 and 50, and more particularly, between 20 and 45) amino acids, comprising a peptide with four amino acids (PEP12) and a peptide with five amino acids (PEP2); wherein said GFR-binding compound further comprises a peptide with five amino acids (PEP5) and a peptide with three amino acids (PEP4); and wherein the RMSD is 2.45 Å or less.

[0920] In one aspect, the present disclosure provides a functionalised bioactive carrier comprising a (modified) GFR-binding compound, wherein said GFR-binding compound (before any modifications) is a peptide, a variant or analog thereof, or a peptidomimetic as defined herein, with between 20 and 60 (in particular between 20 and 50, and more particularly, between 20 and 45) amino acids, comprising a peptide with four amino acids (PEP1) and a peptide with five amino acids (PEP2); wherein said GFR-binding compound further comprises a peptide with between six and twelve amino acids (PEP9) and a peptide with three amino acids (PEP4); and wherein the RMSD is 2.45 Å or less.

[0921] In one aspect, the present disclosure provides a functionalised bioactive carrier comprising a (modified) GFR-binding compound, wherein said GFR-binding compound (before any modifications) is a peptide, a variant or analog thereof, or a peptidomimetic as defined herein, with between 20 and 60 (in particular between 20 and 50, and more particularly, between 20 and 45) amino acids, comprising a peptide with four amino acids (PEP12) and a peptide with five amino acids (PEP2); wherein said GFR-binding compound further comprises a peptide with between six and twelve amino acids (PEP9) and a peptide with three amino acids (PEP4); and wherein the RMSD is 2.45 Å or less.

[0922] In one aspect, the present disclosure provides a functionalised bioactive carrier comprising a (modified) GFR-binding compound, wherein said GFR-binding compound (before any modifications) is a peptide, a variant or analog thereof, or a peptidomimetic as defined herein, with between 20 and 60 (in particular between 20 and 50, and more particularly, between 20 and 45) amino acids, comprising a peptide with four amino acids (PEP1) and a peptide with five amino acids (PEP2); wherein said GFR-binding compound further comprises a peptide with five amino acids (PEP5) and a peptide with three amino acids (PEP4); and wherein the RMSD is 2.45 Å or less.

[0923] In one aspect, the present disclosure provides a functionalised bioactive carrier comprising a (modified) GFR-binding compound, wherein said GFR-binding compound (before any modifications) is a peptide, a variant or analog thereof, or a peptidomimetic as defined herein, with between 20 and 60 (in particular between 20 and 50, and more particularly, between 20 and 45) amino acids, comprising a peptide with four amino acids (PEP12) and a peptide with five amino acids (PEP2); wherein said GFR-binding compound further comprises a peptide with five amino acids (PEP5) and a peptide with three amino acids (PEP4); and wherein the RMSD is 2.45 Å or less.

[0924] In one aspect, the present disclosure provides a functionalised bioactive carrier comprising a (modified) GFR-binding compound, wherein said GFR-binding compound (before any modifications) is a peptide, a variant or analog thereof, or a peptidomimetic as defined herein, with between 20 and 60 (in particular between 20 and 50, and more particularly, between 20 and 45) amino acids, comprising a peptide with four amino acids (PEP1) and a peptide with five amino acids (PEP2); wherein said GFR-binding compound further comprises a peptide with five amino acids (PEP5) and a peptide with between six and eleven amino acids (PEP10); and wherein the RMSD is 2.45 Å or less.

[0925] In one aspect, the present disclosure provides a functionalised bioactive carrier comprising a (modified) GFR-binding compound, wherein said GFR-binding compound (before any modifications) is a peptide, a variant or analog thereof, or a peptidomimetic as defined herein, with between 20 and 60 (in particular between 20 and 50, and more particularly, between 20 and 45) amino acids, comprising a peptide with four amino acids (PEP12) and a peptide with five amino acids (PEP2); wherein said GFR-binding compound further comprises a peptide with five amino acids (PEP5) and a peptide with between six and eleven amino acids (PEP10); and wherein the RMSD is 2.45 Å or less.

[0926] In one aspect, the present disclosure provides a functionalised bioactive carrier comprising a (modified) GFR-binding compound, wherein said GFR-binding compound (before any modifications) is a peptide, a variant or analog thereof, or a peptidomimetic as defined herein, with between 20 and 60 (in particular between 20 and 50, and more particularly, between 20 and 45) amino acids, comprising a peptide with four amino acids (PEP1) and a peptide with five amino acids (PEP2); wherein said GFR-binding compound further comprises a peptide with between six and twelve amino acids (PEP9) and a peptide with between five and seven amino acids (PEP6); and wherein the RMSD is 2.45 Å or less.

[0927] In one aspect, the present disclosure provides a functionalised bioactive carrier comprising a (modified) GFR-binding compound, wherein said GFR-binding compound (before any modifications) is a peptide, a variant or analog thereof, or a peptidomimetic as defined herein, with between 20 and 60 (in particular between 20 and 50, and more particularly, between 20 and 45) amino acids, comprising a peptide with four amino acids (PEP12) and a peptide with five amino acids (PEP2); wherein said GFR-binding compound further comprises a peptide with between six and twelve amino acids (PEP9) and a peptide with between five and seven amino acids (PEP6); and wherein the RMSD is 2.45 Å or less.

[0928] In one aspect, the present disclosure provides a functionalised bioactive carrier comprising a (modified) GFR-binding compound, wherein said GFR-binding compound (before any modifications) is a peptide, a variant or analog thereof, or a peptidomimetic as defined herein, with between 20 and 60 (in particular between 20 and 50, and more particularly, between 20 and 45) amino acids, having the following general formula (I) (hereinafter may also be referred to as compound (I) or peptide (I)):

PEP(A)-LINKER-PEP(B) (I)

wherein one end of LINKER interacts covalently with one end of PEP(A); wherein another end of LINKER interacts covalently with one end of PEP(B); wherein PEP(A) comprises PEP1; wherein PEP(B) comprises PEP2; wherein LINKER is a linear or branched organic divalent radical, moiety or compound having a molecular weight (Mw) comprised between about 28 and about 2,000 Da, in particular, between about 300 and about 1000 Da; and wherein the RMSD is 2.45 Å or less.

[0929] In one aspect, the present disclosure provides a functionalised bioactive carrier comprising a (modified) GFR-binding compound, wherein said GFR-binding compound (before any modifications) is a peptide, a variant or analog thereof, or a peptidomimetic as defined herein, with between 20 and 60 (in particular between 20 and 50, and more particularly, between 20 and 45) amino acids, having the following general formula (II) (hereinafter may also be referred to as compound (II) or peptide (II)):

PEP(C)-PEP12-LINKER-PEP2-PEP(D) (II)

wherein LINKER is a linear or branched organic divalent radical, moiety or compound having a molecular weight (Mw) comprised between about 28 and about 2,000 Da, in particular, between about 300 and about 1000 Da; wherein PEP12 is a peptide with 8 amino acids of formula PEP1-AA¹⁷-PEP11 as defined herein; wherein PEP2 is a peptide with five amino acids as already defined herein; wherein one end of PEP(C) interacts covalently with PEP12 via one end of PEP1; wherein one end of PEP(D) interacts covalently with PEP2; wherein one end of LINKER interacts covalently with one end of PEP12 via one end of PEP11; wherein another end of LINKER interacts covalently with PEP2; wherein PEP(C) is a peptide with at least 5 amino acids, in particular a peptide with between 5 and 12 amino acids; wherein PEP(D) is a peptide with at least 5 amino acids, in particular a peptide with between 5 and 11 amino acids; and wherein the RMSD is 2.45 Å or less.

[0930] In one aspect, the present disclosure provides a GFR-binding compound, wherein said GFR-binding compound is a peptide, a variant or analog thereof, or a peptidomimetic as defined herein, with between 20 and 60 (in particular between 20 and 50, and more particularly, between 20 and 45) amino acids, having the following general formula (III) (hereinafter may also be referred to as compound (III) or peptide (III)):

PEP7-PEP5-PEP12-LINKER-PEP2-PEP6-PEP8 (III)

wherein LINKER is a linear or branched organic divalent radical, moiety or compound having a molecular weight (Mw) comprised between about 28 and about 2,000 Da, in particular, between about 300 and about 1000 Da; wherein PEP12 is a peptide with 8 amino acids of formula PEP1-AA¹⁷-PEP11 as defined herein; wherein PEP2 is a peptide with five amino acids as already defined herein; wherein PEP5 is a peptide with five amino acids as already defined herein; wherein PEP6 is a peptide with between five and seven amino acids as already defined herein; wherein PEP7 an amino acid or a peptide with between two and seven amino acids as already defined herein; wherein PEP8 an amino acid or a peptide with between two and six amino acids as already defined herein; wherein one end of LINKER interacts covalently with one end of PEP12 via AA²⁰; wherein another end of LINKER interacts covalently with one end of PEP2 via AA²¹; wherein one end of PEP5 interacts covalently with another end of PEP12 via AA¹²; wherein another end of PEP5 interacts covalently with one end of PEP7 via AA⁸; wherein one end of PEP6 interacts covalently with another end of PEP2 via AA²⁶; wherein another end of PEP6 interacts covalently with one end of PEP8 via AA³²; and wherein the RMSD is 2.45 Å or less.

[0931] In one aspect, the present disclosure provides a GFR-binding compound, wherein said GFR-binding compound is a peptide, a variant or analog thereof, or a peptidomimetic as defined herein, with between 20 and 60 (in particular between 20 and 50, and more particularly, between 20 and 45) amino acids, having the following general formula (IV) (hereinafter may also be referred to as compound (IV) or peptide (IV)):

AA¹-AA²-AA³-AA⁴-AA⁵-AA⁶-AA⁷-AA⁸-AA⁹-AA¹⁰-AA¹¹-AA¹²-AA¹³-AA¹⁴-AA¹⁵-AA¹⁶-AA¹⁷-AA¹⁸-AA¹⁹-AA²⁰-LINKER-AA²¹-AA²²-AA²³-AA²⁴-AA²⁵-AA²⁶-AA²⁷-AA²⁸-AA²⁹-AA³⁰-AA³¹-AA³²-AA³³-AA³⁴-AA³⁵-AA³⁶-AA³⁷-AA³⁸ (IV)

wherein LINKER is a linear or branched organic divalent radical, moiety or compound having a molecular weight (Mw) comprised between about 28 and about 2,000 Da, in particular, between about 300 and about 1000 Da; wherein AA¹-AA²-AA³-AA⁴-AA⁵-AA⁶-AA⁷ is PEP7 as defined herein; wherein AA¹³-AA¹⁴-AA¹⁵-AA¹⁶-AA¹⁷-AA¹⁸-AA¹⁹-AA²⁰ is PEP12 as defined herein; wherein AA²¹-AA²²-AA²³-AA²⁴-AA²⁵ is PEP2 as already defined herein; wherein AA⁸-AA⁹-AA¹⁰ is PEP3 as defined herein; wherein AA³⁰-AA³¹-AA³² is PEP4 as defined herein; wherein AA³³-AA³⁴-AA³⁵-AA³⁶-AA³⁷-AA³⁸ is PEP8 as defined herein; wherein AA¹¹, AA¹², AA²⁶, AA²⁷, AA²⁸, and AA²⁹ are as defined herein; wherein one end of LINKER interacts covalently with AA²⁰; wherein another end of LINKER interacts covalently with AA²¹; wherein AA¹ and AA²¹ may be both N-terminal amino acids or both C-terminal amino acids; wherein AA³⁸ and AA²⁰ may be both N-terminal amino acids or both C-terminal amino acids; and wherein the RMSD is 2.45 Å or less.

[0932] In one aspect, the present disclosure provides a functionalised bioactive carrier comprising a (modified) GFR-binding compound, wherein said GFR-binding compounds may be any one of or a plurality of peptides of SEQ ID NO: 1 to 2157 and 2242 to 84108.

[0933] The present disclosure provides a functionalised bioactive carrier comprising a (modified) GFR-binding compound, wherein all of PEP1, PEP2, PEP3, PEP4, PEP5, PEP6, PEP9, PEP10, PEP12, PEP11 and AA¹⁷, pairs, quadruplets, hexaplets and heptuplets thereof, disclaimers and provisos, are as already defined herein.

[0934] Suitable covalent association or functionalization techniques for implementing embodiments of the present invention include, but are not limited to, reductive amination coupling or photo-grafting such as described in H. Freichel et a1., Macromol. Rapid Commun. 2011, 32, 616-621 and V. Pourcelle et a1., Biomacromol. 2009, 10, 966-974, the content of which is hereby incorporated by reference in its entirety.

[0935] In one aspect, the present disclosure provides a production method or process useful for producing a functionalised bioactive carrier according to the present disclosure wherein said bioactive carrier is a biomaterial such as a ceramic or a titanium, comprising, or exclusively consisting of, the contacting of a compound of formula (C-I) and a bioactive carrier as defined herein under suitable covalent-bond formation conditions thereby forming at least one covalent bond between said compound (C-I) and said bioactive carrier thus forming a functionalised bioactive carrier according to the present disclosure:

[chemical structure]

wherein X is Si; wherein Y is a divalent organic linker; wherein A is a (modified) GFR-binding compound according to the present disclosure, wherein R¹ and R² are both independently an organic spacing-compound other than a leaving group as defined herein, and wherein R³ is a leaving group as defined herein; In one particular example, a process or method which may be used to functionally associate or combine a (modified) GFR-binding compound with a bioactive carrier such as a ceramic or a titanium is shown in Scheme 1:

[chemical structure]

[0936] Such syntheses involve the formation of a covalent interaction (or association) between a (modified) GFR-binding compound (represented as (A)-SH in Scheme 1) and a bioactive carrier as defined herein.

[0937] In one particular example, a process or method which may be used to functionally associate or combine a (modified) GFR-binding compound with a bioactive carrier is a method for covalent functionalization or depositing of a (modified) GFR-binding compound onto a polyetheretherketone polymer (PEEK) surface wherein (i) the polymer is treated with ethylene diamine (NH₂═NH₂) to create NH₂ functions on a PEEK surface from ketone (═O) functions and (ii) the hereby modified PEEK-NH₂ polymer is immersed in a solution of a chosen hetero-bifunctional cross-linker such as 3-succinimidyl-3-maleimidopropionate thereby reacting the maleimide group with a (modified) GFR-binding compound through e.g. a thiol group thereof.

[0938] In one particular example, a process or method which may be used to functionally associate or combine a (modified) GFR-binding compound with a bioactive carrier is a method for covalent functionalization or depositing of a (modified) GFR-binding compound onto a polylactic acid (PLLA) polymer wherein (i) the polymer is immersed in a solution containing, for instance, (dimethylaminopropyl)-3-ethylcarbodiimide hydrochloride+N-hydroxysuccinimide in (2-(N-morpholino)-ethanesulfonic acid and then (ii) rinsed using e.g. MilliQ water.

[0939] Leaving Groups:

[0940] As used herein, unless indicated otherwise or contradictory in context, the term “leaving group” means a molecular fragment which possesses the ability to depart with a pair of electrons in a heterolytic bond cleavage. Leaving groups are anions or neutral molecules and possess the ability to stabilize the additional electron density that results from bond heterolysis. Common anionic leaving groups are halogen atoms such as chlorine (Cl), bromine (Br), and iodine (I), which leaves as a chloride ion (Cl⁻), a bromide ion (Br⁻) and an iodide ion (I⁻), respectively. Other leaving groups include sulfonate esters, such as tosylate (TsO⁻). Conventional neutral molecule leaving groups are water and ammonia. Suitable as leaving groups for implementing embodiments of the invention preferably include the group consisting of a halogen, a substituted or unsubstituted alkoxy group (—OR), a substituted or unsubstituted aryloxy or heteroaryloxy group (—OAr), a substituted or unsubstituted alkylcarbonyloxy group (—O₂CR), a substituted or unsubstituted arylcarbonyloxy or heteroarylcarbonyloxy group (—O₂CAr), a substituted or unsubstituted alkylsulfonyloxy group (—O₃SR), a substituted or unsubstituted arylsulfonyloxy or heteroarylsulfonyloxy group (—O₃SAr). Substituents of leaving groups include halogens, alkyl (preferably C1 to C5-alkyl) groups and alkoxy (preferably C1 to C5-alkoxy) groups.

### Y Group

[0941] In the present disclosure, the Y group is not aimed at being particularly limited and any moiety comprising at least one atom and having the ability to covalently or non-covalently, preferably covalently, link or interact with the X and A groups as defined herein thereby providing a stable connection between an active substance A and the X group as defined herein, is, unless contradictory or non-adapted in context, suitable for implementing embodiments of the present disclosure and is comprised within the scope of the invention.

[0942] Thus, in the present description and unless otherwise indicated, the term “linker”, when used in relation to a Y group, means any organic moiety comprising at least one atom and having the ability to interact covalently or non-covalently with an active substance A and covalently interact with an X group as defined herein.

[0943] In one example, Y groups include divalent organic radicals selected from the group consisting of a saturated or unsaturated, preferably saturated, hydrocarbon chain comprising between 1 and 30 carbon atoms, wherein said hydrocarbon chain is optionally interrupted by one or more non-carbon atom, preferably between 1 and 16, between 1 and 12 or between 1 and 8 non-carbon atoms as appropriate, wherein said non-carbon atom is selected, for instance, from the group consisting of —O—, —S—, —C(═O), —SO₂—, —N(Ri)(C═O)—, —N(Ri)-, and the following radical:

[chemical structure]

wherein Ri is selected from the group consisting of a hydrogen atom, a C1-C6 alkyl group and a aryl group, and wherein said hydrocarbon chain is non-substituted or substituted, by at least one radical selected from the group consisting of a halogen, a hydroxyl group, a C1-C20 alkyl group and a aryl group.

[0944] Suitable as Y groups for implementing embodiments of the invention include saturated or unsaturated hydrocarbon chains comprising between 1 and 20 carbon atoms, saturated or unsaturated hydrocarbon chains comprising between 1 and 10 carbon atoms, saturated or unsaturated hydrocarbon chains comprising between 1 and 5 carbon atoms, saturated or unsaturated hydrocarbon chains comprising 1, 2 or 3 carbon atoms, all of which being specifically and individually preferred.

[0945] Also suitable as Y groups for implementing embodiments of the invention include saturated or unsaturated hydrocarbon chains comprising between 1 and 20 carbon atoms, saturated or unsaturated hydrocarbon chains comprising between 1 and 10 carbon atoms, saturated or unsaturated hydrocarbon chains comprising between 1 and 5 carbon atoms, saturated or unsaturated hydrocarbon chains comprising 1, 2 or 3 carbon atoms, and in which said hydrocarbon chain is optionally interrupted by one or more, preferably between 1 and 16, between 1 and 12 or between 1 and 8, non-carbon atom, selected from the group consisting of an oxygen atom, a nitrogen atom, a carbonyl group and/or the following radical:

[chemical structure]

all of which being specifically preferred and individually contemplated.

[0946] Also suitable as Y groups for implementing embodiments of the invention is:

[chemical structure]

wherein n is comprised between 1 and 29, in particular between 1 and 5; and wherein m is comprised between 1 and 29, in particular between 1 and 5.

[0947] Suitable Covalent-Bond Formation Conditions:

[0948] As used herein, unless indicated otherwise or contradictory in context, the term “suitable covalent-bond formation conditions” means reaction conditions such as pressure, temperature, reagent quantities, solvent's type and quantity, or stirring, under which starting materials may contact and provide at least one further material resulting from the formation of at least one covalent bond between said starting materials. Suitable as covalent-bond formation conditions for implementing embodiments of the present invention preferably include substantially atmospheric conditions.

[0949] Organic Spacing-Compound:

[0950] In the present description and unless otherwise indicated, the term “organic spacing compound” means an organic chemical radical (preferably monofunctional radical) having the ability to create a steric effect/hindrance and/or electronic effect/hindrance in a direct vicinity of a (modified) GFR-binding compound of the present disclosure. Suitable organic spacing compounds include, but are not limited to, monovalent organic radicals independently selected from the group consisting of a saturated or unsaturated hydrocarbon chain of at most 20 nanometres (nm) in length, preferably at most 10 nm, 5 nm, 1 nm, 0.5 nm, 0.1 nm, 0.05 nm or 0.01 nm, wherein said hydrocarbon chain is optionally interrupted by one or more, preferably between 1 and 16, between 1 and 12 or between 1 and 8 non-carbon atoms as appropriate, wherein said non-carbon atom is selected from the group consisting of —O—, —S—, —C(═O), —SO₂—, —N(Ri)(C═O)—, and —N(Ri)-, wherein R¹ is selected from the group consisting of a hydrogen atom, a C1-C6 alkyl group and an aryl group, and wherein said hydrocarbon chain is non-substituted or substituted by at least one radical selected from the group consisting of a halogen, a hydroxyl group, a C1-C20 alkyl group and an aryl group. In particular, organic spacing compounds include saturated or unsaturated hydrocarbon chains comprising between 1 and 80 carbon atoms, saturated or unsaturated hydrocarbon chains comprising between 1 and 60 carbon atoms, saturated or unsaturated hydrocarbon chains comprising between 1 and 40 carbon atoms, saturated or unsaturated hydrocarbon chains comprising between 1 and 20 carbon atoms, saturated or unsaturated hydrocarbon chains comprising between 1 and 10 carbon atoms, saturated hydrocarbon chains comprising 1, 2, 3, 4, 5 or 6 carbon atoms, all of which being specifically and individually preferred. In one example, the saturated hydrocarbon chain may be methyl, ethyl, propyl, butyl or pentyl. In one example, said unsaturated hydrocarbon chain may be ethylene, propene, 1- or 2-butene, 1-, 2- or 3-pentene, acetylene, propyne, 1- or 2-butyne, 1-, 2- or 3-pentyne.

[0951] Saturated Hydrocarbon Chain:

[0952] In the present description and unless otherwise indicated, the terms “saturated hydrocarbon chain” means a chain of carbon atoms linked together by single bonds and has hydrogen atoms filling all of the other bonding orbitals of the carbon atoms.

[0953] Unsaturated Hydrocarbon Chain:

[0954] In the present description and unless otherwise indicated, the terms “unsaturated hydrocarbon chain” means a chain of carbon that contains carbon-carbon double bonds or triple bonds, such as those found in alkenes or alkynes, respectively.

[0955] Atmospheric Conditions:

[0956] As used herein, unless indicated otherwise or contradictory in context, the term “atmospheric conditions” or “ambient conditions”, which are interchangeably used, refers to conditions which may be found naturally at an experimentation location. For example, in certain embodiments, typical atmospheric conditions in a chemistry/biology laboratory are a temperature of between about 15° C. and about 35° C. and a pressure of about 1 atm.

[0957] Solution:

[0958] As used herein, unless indicated otherwise or contradictory in context, the term “solution” means a homogeneous mixture composed of only one phase, which is stable, which does not allow beam of light to scatter, in which the particles of solute cannot be seen by naked eye and from which a solute cannot be separated by filtration.

[0959] Suspension:

[0960] As used herein, unless indicated otherwise or contradictory in context, the term “suspension” means a heterogeneous mixture containing solid particles that are sufficiently large for sedimentation. Typically, said solid particles are larger than one micrometer. In general, the internal phase (solid) is dispersed throughout the external phase (fluid) through mechanical agitation, with the use of certain excipients or suspending agents.

[0961] Suitable non-covalent association or functionalization techniques for implementing embodiments of the present invention include, but are not limited to, association(s) between a bioactive carrier-affinity containing group as already defined herein and at least part of a bioactive carrier. Such association(s) involves the formation of at least one non-covalent interaction (or attachment) between a (modified) GFR-binding compound and a bioactive carrier as defined herein.

[0962] In one example, said functionalised bioactive carrier is functionally associated with at least two, at least three, at least four, at least five, at least six, at least seven, at least eight, at least nine or at least ten (modified) GFR-binding compounds, each possessing a different and distinct chemical structure.

[0963] In one example, said functionalised bioactive carrier does not comprise a layer of polysiloxane.

[0964] For example, in certain embodiments, a functionalised bioactive carrier as defined herein comprises at least one (modified) GFR-binding compound, and at least one bioactive carrier, wherein said bioactive carrier:
[0965] has a porosity (or average pore diameter) comprised between 1 nm and 1000 μm, as measured by scanning electronic microscopy for pore sizes within the supra-nanometre range and by atomic force microscopy for pore sizes within the nanometre range, and/or
[0966] comprises a stiffness of at least 5 kPa, preferably at least 35 kPa, as measured by Dynamic Mechanical Analysis, and/or
[0967] is selected from the group consisting of biopolymers (collagen, fibrin, . . . etc), synthetic polymers (PEEK, PET, . . . etc), solid materials (Titanium, Metals . . . etc) and ceramics (Hydroxyapatite, Beta-tricalcium Phosphate, Biphasic Calcium Phosphate . . . etc), and/or
[0968] comprises a density or concentration of associated compound (I) comprised between 0.05×10⁻¹² mol/mm² and 50×10⁻¹² mol/mm², as measured by conventional fluorescence microscopy or calculated theoretically on the basis of the peptide size, and/or
[0969] does not comprise a layer of polysiloxane.

[0970] Porosity:

[0971] As used herein, unless indicated otherwise or contradictory in context, the term “porosity” refers to the measure of the void spaces in a substance or material, and is a fraction of the volume of voids over the total volume, between 0 and 1, or as a percentage between 0 and 100%. There are many ways to test and measure the porosity of a substance or material, but for the purpose of the present disclosure, and for the avoidance of any doubts, porosity values are provided in manometers (nm) as obtained using atomic force microscopy for small pore diameters (up to 100 nm) and scanning electron microscopy for larger pore sizes.

[0972] Stiffness:

[0973] As used herein, unless indicated otherwise or contradictory in context, the term “stiffness” refers to the rigidity of a substance or material i.e. the extent to which it resists deformation in response to an applied force. There are many ways to test and measure the stiffness of a substance or material, but for the purpose of the present disclosure, and for the avoidance of any doubts, stiffness values are provided in Pascal (Pa) as obtained using Dynamic Mechanical Analysis (DMA). Particularly preferred stiffness values are comprised between 1 kPa and 100 kPa and not more than 5 GPa depending on the tissue to be regenerated or repaired.

[0974] As already stated, the nature of the biomaterial is an important parameter. Particularly good results have been obtained using bioactive carriers composed mostly with the main material component of the tissue to be regenerated and/or repaired. This generally allows for a better integration of the bioactive carrier, a better resorption from the surrounding cells already present and therefore a better regeneration or repair of the targeted tissue to be achieved.

[0975] In one example, said bioactive carrier for use in neuroregeneration-related applications has a stiffness comprised between about 0.01 kPa and about 3 kPa, preferably between about 0.01 kPa and about 1 kPa. In one example, said bioactive carrier for use in muscle, cartilage and T/L -related applications has a stiffness comprised between about 3 kPa and about 200 kPa, preferably between about 10 kPa and about 30 kPa. In one example, said bioactive carrier for use in bone-related applications has a stiffness comprised between about 30 kPa and about 3 GPa, preferably between about 70 kPa and about 200 kPa for instance in applications such as the treatment or prevention of osteoporosis and bone tissue regeneration. In one example, said bioactive carrier for use in hair-related applications has a stiffness comprised between about 0.01 kPa and about 200 kPa, preferably between about 3 kPa and about 70 kPa. In one example, said bioactive carrier for use in endothelization-related applications has a stiffness comprised between about 500 kPa and about 2.5 GPa. In one example, said bioactive carrier for use in angiogenesis-related applications has a stiffness comprised between about 0.01 kPa and about 100 kPa. In one example, said bioactive carrier for use in wound healing and skin -related applications has a stiffness comprised between about 0.01 kPa and about 70 kPa. For example, in certain embodiments, a pharmaceutical, dermatological or cosmetic association or combination of the present invention may be in the form of a dry, sterile powder.

[0976] In one particular example, the concentration or density (as defined herein) of a (modified) GFR-binding compound in, or on the surface of, a bioactive carrier as defined herein is comprised between 0.05 and 50 pmol/mm², in particular comprised between 0.1 and 30 pmol/mm², comprised between 0.1 and 10 pmol/mm², comprised between 0.1 and 5 pmol/mm², or comprised between 0.1 and 2 pmol/mm², each range being preferred and specifically contemplated to be combined with any other numerical or non-numerical ranges as described herein. Most particularly, the density is comprised between 0.2 and 2 pmol/mm².

### VII. MEDICAL DEVICES

[0977] For in-vivo administration, GFR-binding compounds, modified GFR-binding compounds or functionalised bioactive carriers of the present invention may be injected e.g. using an appropriate syringe, to a specific target site so that they may be delivered directly to the interior of e.g. a body articulation or under the skin in close proximity with the cells to be treated via, for instance, a PTD or cell-permeable peptide. Alternately, a medical device or implant (or implantable medical device) comprising such GFR-binding compounds, modified GFR-binding compounds or functionalised bioactive carriers may be used. Implants may contain reservoirs in which to place the GFR-binding compound, modified GFR-binding compound or functionalised bioactive carrier of the invention for release into the surrounding tissue, or may comprise a porous composition which may be soaked in a solution containing one or more GFR-binding compounds or modified GFR-binding compounds of the present disclosure prior to implantation.

[0978] Hydrogels, time-release capsules or spheres, liposomes, microspheres, nanospheres, biodegradable polymers, or other such drug delivery systems may also be employed to deliver GFR-binding compounds of the present invention to target cells and tissues. U.S. Pat. No. 6,475,516, for example, provides hydrogels being covalently bound to the surface of an in-dwelling medical device such as an implant, which may be used with GFR-binding compounds of the present disclosure.

[0979] In one aspect, the present disclosure provides a medical device comprising at least one GFR-compound, modified GFR-binding compound or functionalised bioactive carrier as defined herein. In one particular example, the medical device of the invention may be, partly or entirely, made of a functionalised bioactive carrier as defined herein or contain, for example, in certain embodiments, within a cavity thereof, said functionalised bioactive carrier.

[0980] In one example, said medical device may comprise between 1 wt % and 100 wt % of a functionalised bioactive carrier of the invention with respect to the total weight of the medical device. In one example, said medical device comprises between about 50 wt % and 100 wt %, between about 60 wt % and 100 wt %, between about 70 wt % and 100 wt %, between about 80 wt % and 100 wt %, between about 90 wt % and 100 wt % of a functionalised bioactive carrier of the invention with respect to the total weight of the medical device, all of which being specifically and individually preferred.

[0981] In an example, at least one part of a surface of said medical device comprises a GFR-binding compound, a modified GFR-binding compound or a functionalised bioactive carrier of the invention. For example, in certain embodiments, said medical device is preferably an implantable medical device.

[0982] Also suitable as medical devices for implementing embodiments of the present invention include stents, stiches, powders, granules, sponges, putties, injectable and non-injectable liquids, curable compositions, moldable compositions, membranes, glues, sprays, pills, filaments, prosthesis, or combinations thereof.

[0983] In one aspect, the present disclosure provides a bone graft material comprising a GFR-binding compound or a modified GFR-binding compound of the invention and a collagen as defined herein. In the present description and unless otherwise indicated, the term “bone graft material” means a material suitable for bone grafting.

### VIII. Antibody:Gfr-Binding Compound Complex

[0984] In one aspect, the present disclosure provides an antibody:GFR-binding compound complex comprising at least one (modified) GFR-binding compound and at least one antibody or any functional fragment thereof; wherein said (modified) GFR-binding compound is as defined herein.

[0985] Antibody:

[0986] As used herein, unless indicated otherwise or contradictory in context, the terms “antibody” or “antibodies” refer to a light chain and heavy chain protein of an antibody that are encoded by a gene or genes that are either a naturally occurring gene or a codon-optimized gene. The antibody light chain and heavy chain genes may be human antibody light chain and heavy chain genes. Antibodies, or immunoglobulins, are proteins produced by cells of the immune system to identify and neutralize foreign substances, such as bacteria, viruses, or improperly proliferating native cells. Immunoglobulins are one class of desired globulin molecules and include, but are not limited to, IgG, IgM, IgA, IgD, IgE, IgY, lambda chains, kappa chains and fragments thereof; bi-specific antibodies, and fragments thereof; scFv fragments, Fc fragments, and Fab fragments as well as dimeric, trimeric and oligomeric forms of antibody fragments. Suitable antibodies include, but are not limited to, naturally occurring antibodies, animal-specific antibodies, human antibodies, humanized antibodies, autoantibodies and hybrid antibodies. Suitable antibodies also include antibodies with the ability to bind specific ligands. Suitable antibodies also include, but are not limited to, primary antibodies, secondary antibodies, designer antibodies, anti-protein antibodies, anti-peptide antibodies, anti-DNA antibodies, anti-RNA antibodies, anti-hormone antibodies, anti-hypophysiotropic peptides, antibodies against non-natural antigens, anti-anterior pituitary hormone antibodies, anti-posterior pituitary hormone antibodies, anti-venom antibodies, anti-tumor marker antibodies, antibodies directed against epitopes associated with infectious disease, including, anti-viral, anti-bacterial, anti-protozoal, anti-fungal, anti-parasitic, anti-receptor, anti-lipid, anti-phospholipid, anti-growth factor, anti-cytokine, anti-monokine, antiidiotype, and anti-accessory (presentation) protein antibodies. Suitable antibodies also include, but are not limited to, 3F8, 8H9, Abagovomab, Abciximab, Abituzumab, Abrilumab, Actoxumab, Adalimumab, Adecatumumab, Aducanumab, Afelimomab, Afutuzumab, Alacizumab pegol, ALD518, Alemtuzumab, Alirocumab, Altumomab pentetate, Amatuximab, Anatumomab mafenatox, Anetumab ravtansine, Anifrolumab, Anrukinzumab, Apolizumab, Arcitumomab, Ascrinvacumab, Aselizumab, Atezolizumab, Atinumab, Atlizumab, Atorolimumab, Bapineuzumab, Basiliximab, Bavituximab, Bectumomab, Begelomab, Belimumab, Benralizumab, Bertilimumab, Besilesomab, Bevacizumab, Bezlotoxumab, Biciromab, Bimagrumab, Bimekizumab, Bivatuzumab mertansine, Blinatumomab, Blosozumab, Bococizumab, Brentuximab vedotin, Briakinumab, Brodalumab, Brolucizumab, Brontictuzumab, Canakinumab, Cantuzumab mertansine, Cantuzumab ravtansine, Caplacizumab, Capromab pendetide, Carlumab, Catumaxomab, cBR96-doxorubicin immunoconjugate, CC49, Cedelizumab, Certolizumab pegol, Cetuximab, Ch.14.18, Citatuzumab bogatox, Cixutumumab, Clazakizumab, Clenoliximab, Clivatuzumab tetraxetan, Codrituzumab, Coltuximab ravtansine, Conatumumab, Concizumab, CR6261, Crenezumab, Dacetuzumab, Daclizumab, Dalotuzumab, Dapirolizumab pegol, Daratumumab, Dectrekumab, Demcizumab, Denintuzumab mafodotin, Denosumab, Derlotuximab biotin, Detumomab, Dinutuximab, Diridavumab, Dorlimomab aritox, Drozitumab, Duligotumab, Dupilumab, Durvalumab, Dusigitumab, Ecromeximab, Eculizumab, Edobacomab, Edrecolomab, Efalizumab, Efungumab, Eldelumab, Elgemtumab, Elotuzumab, Elsilimomab, Emactuzumab, Emibetuzumab, Enavatuzumab, Enfortumab vedotin, Enlimomab pegol, Enoblituzumab, Enokizumab, Enoticumab, Ensituximab, Epitumomab cituxetan, Epratuzumab, Erlizumab, Ertumaxomab, Etaracizumab, Etrolizumab, Evinacumab, Evolocumab, Exbivirumab, Fanolesomab, Faralimomab, Farletuzumab, Fasinumab, FBTA05, Felvizumab, Fezakinumab, Ficlatuzumab, Figitumumab, Firivumab, Flanvotumab, Fletikumab, Fontolizumab, Foralumab, Foravirumab, Fresolimumab, Fulranumab, Futuximab, Galiximab, Ganitumab, Gantenerumab, Gavilimomab, Gemtuzumab ozogamicin, Gevokizumab, Girentuximab, Glembatumumab vedotin, Golimumab, Gomiliximab, Guselkumab, Ibalizumab, Ibritumomab tiuxetan, Icrucumab, Idarucizumab, Igovomab, IMAB362, Imalumab, Imciromab, Imgatuzumab, Inclacumab, Indatuximab ravtansine, Indusatumab vedotin, Infliximab, Inolimomab, Inotuzumab ozogamicin, Intetumumab, Ipilimumab, Iratumumab, Isatuximab, Itolizumab, Ixekizumab, Keliximab, Labetuzumab, Lambrolizumab, Lampalizumab, Lebrikizumab, Lemalesomab, Lenzilumab, Lerdelimumab, Lexatumumab, Libivirumab, Lifastuzumab vedotin, Ligelizumab, Lilotomab satetraxetan, Lintuzumab, Lirilumab, Lodelcizumab, Lokivetmab, Lorvotuzumab mertansine, Lucatumumab, Lulizumab pegol, Lumiliximab, Lumretuzumab, Mapatumumab, Margetuximab, Maslimomab, Matuzumab, Mavrilimumab, Mepolizumab, Metelimumab, Milatuzumab, Minretumomab, Mirvetuximab soravtansine, Mitumomab, Mogamulizumab, Morolimumab, Motavizumab, Moxetumomab pasudotox, Muromonab-CD3, Nacolomab tafenatox, Namilumab, Naptumomab estafenatox, Narnatumab, Natalizumab, Nebacumab, Necitumumab, Nemolizumab, Nerelimomab, Nesvacumab, Nimotuzumab, Nivolumab, Nofetumomab merpentan, Obiltoxaximab, Ocaratuzumab, Ocrelizumab, Odulimomab, Ofatumumab, Olaratumab, Olokizumab, Omalizumab, Onartuzumab, Ontuxizumab, Opicinumab, Oportuzumab monatox, Oregovomab, Orticumab, Otelixizumab, Otlertuzumab, Oxelumab, Ozanezumab, Ozoralizumab, Pagibaximab, Palivizumab, Panitumumab, Pankomab, Panobacumab, Parsatuzumab, Pascolizumab, Pasotuxizumab, Pateclizumab, Patritumab, Pembrolizumab, Pemtumomab, Perakizumab, Pertuzumab, Pexelizumab, Pidilizumab, Pinatuzumab vedotin, Pintumomab, Placulumab, Polatuzumab vedotin, Ponezumab, Priliximab, Pritoxaximab, Pritumumab, PRO 140, Quilizumab, Racotumomab, Radretumab, Rafivirumab, Ralpancizumab, Ramucirumab, Ranibizumab, Raxibacumab, Refanezumab, Regavirumab, Reslizumab, Rilotumumab, Rinucumab, Rituximab, Robatumumab, Roledumab, Romosozumab, Rontalizumab, Rovelizumab, Ruplizumab, Sacituzumab govitecan, Samalizumab, Sarilumab, Satumomab pendetide, Secukinumab, Seribantumab, Setoxaximab, Sevirumab, SGN-CD19A, SGN-CD33A, Sibrotuzumab, Sifalimumab, Siltuximab, Simtuzumab, Siplizumab, Sirukumab, Sofituzumab vedotin, Solanezumab, Solitomab, Sonepcizumab, Sontuzumab, Stamulumab, Sulesomab, Suvizumab, Tabalumab, Tacatuzumab tetraxetan, Tadocizumab, Talizumab, Tanezumab, Taplitumomab paptox, Tarextumab, Tefibazumab, Telimomab aritox, Tenatumomab, Teneliximab, Teplizumab, Teprotumumab, Tesidolumab, TGN1412, Ticilimumab, Tigatuzumab, Tildrakizumab, TNX-650, Tocilizumab, Toralizumab, Tosatoxumab, Tositumomab, Tovetumab, Tralokinumab, Trastuzumab, TRBS07, Tregalizumab, Tremelimumab, Trevogrumab, Tucotuzumab celmoleukin, Tuvirumab, Ublituximab, Ulocuplumab, Urelumab, Urtoxazumab, Ustekinumab, Vandortuzumab vedotin, Vantictumab, Vanucizumab, Vapaliximab, Varlilumab, Vatelizumab, Vedolizumab, Veltuzumab, Vepalimomab, Vesencumab, Visilizumab, Volociximab, Vorsetuzumab mafodotin, Votumumab, Zalutumumab, Zanolimumab, Zatuximab, Ziralimumab, or Zolimomab aritox.

[0987] In certain embodiments, said antibody:GFR-binding compound complex is a covalent complex. In certain embodiments, said antibody:GFR-binding compound complex is a non-covalent complex.

### IX. Dendrimer:GFR-Binding Compound Complex

[0988] In one aspect, the present disclosure provides a dendrimer:GFR-binding compound complex comprising at least one (modified) GFR-binding compound and at least one dendrimer or any functional fragment thereof; wherein said (modified) GFR-binding compound is as defined herein; and wherein said dendrimer is as already defined herein.

[0989] In certain embodiments, said dendrimer:GFR-binding compound complex is a covalent complex. In certain embodiments, said dendrimer:GFR-binding compound complex is a non-covalent complex.

### X. Polynucleotides

[0990] The extracellular biological action of the GFR-binding peptides may also be conveyed via expression, by a cell, of the appropriate polynucleotide sequence engineered to encode a particular GFR-binding peptide of interest. One may thus inject or administer, to a mammal subject, a GFR-binding-peptide-encoding polynucleotide (such as a messenger RNA), wherein said polynucleotide would enable the intracellular production of the encoded GFR-binding peptide, which may, once released outside the host cell, exert its extracellular action on the host cell and/or on neighbouring cells and/or distant cells. In other words, GFR-binding peptides may be produced ex-vivo (e.g. using a peptide synthesizer) or in-vivo (e.g. via cell expression of a GFR-binding-peptide-encoding polynucleotide), and in all cases have an extracellular biological action of activation of growth factor receptors to induce cell differentiation and/or tissue regeneration.

[0991] Thus, in one aspect, the present disclosure provides a polynucleotide encoding at least one peptide as disclosed herein. In one particular example, said polynucleotide is a messenger RNA or a primary construct thereof. Said messenger RNA may additionally have a 5′ cap structure chosen from the group consisting of m⁷G(5′)ppp (5′)A,G(5′)ppp(5′)A and G(5′)ppp(5′)G. In one example, the messenger RNA additionally has a poly-A tail of from about 10 to 200 adenosine nucleotides. In one example, the messenger RNA additionally has a poly-C tail of from about 10 to 200 cytosine nucleotides. In one example, the messenger RNA additionally codes a tag for purification chosen from the group consisting of a hexahistidine tag (HIS tag, polyhistidine tag), a streptavidin tag (Strep tag), an SBP tag (streptavidin-binding tag) or a GST (glutathione S-transferase) tag, or codes for a tag for purification via an antibody epitope chosen from the group consisting of antibody-binding tags, a Myc tag, a SwaI 1 epitope, a FLAG tag or an HA tag. In one example, the messenger RNA additionally codes a signal peptide and/or a localization sequence, in particular a secretion sequence. In one example, said polynucleotide is a complementary DNA of said messenger RNA or a primary construct thereof.

[0992] In one aspect, the present disclosure also provides a vector comprising a polynucleotide as defined in the present disclosure.

[0993] In one aspect, the present disclosure also provides a cultured cell comprising a vector as defined in the present disclosure.

[0994] In one aspect, the present disclosure also provides a method of expressing a peptide of interest, variant or analog thereof, in a mammalian cell, said method comprising: (i) providing an mRNA as defined in the present disclosure; and (ii) introducing said mRNA to a mammalian cell under conditions that permit the expression of the peptide of interest by the mammalian cell.

[0995] In one aspect, the present disclosure also provides a mRNA as disclosed herein for use in a medical treatment or prophylactic method. In one example, said medical treatment method is a therapeutic, surgical, or diagnostic method. In one particular example, said method is a method for treating or preventing cell-degeneration-associated diseases, disorders, conditions, or pathologies as defined in the present disclosure. In one particular example, said method is a method for regenerating mammalian tissues as disclosed herein.

[0996] In one aspect, the present disclosure also provides a use of a RNA or mRNA as defined in the present disclosure for the preparation of a pharmaceutical composition for the treatment or prevention of cell-degeneration-associated diseases, disorders, conditions, or pathologies as disclosed herein.

[0997] In one aspect, the present disclosure also provides a medical composition comprising a polynucleotide, a vector, or a transfected cel, all as defined in the present disclosure, and a medically acceptable excipient or carrier.

[0998] Expression: As used herein, “expression” of a nucleic acid sequence refers to one or more of the following events: (1) production of an RNA template from a DNA sequence (e.g., by transcription); (2) processing of an RNA transcript (e.g., by splicing, editing, 5′ cap formation, and/or 3′ end processing); (3) translation of an RNA into a polypeptide or protein; and (4) post-translational modification of a polypeptide or protein. mRNA: As used herein, the term “mRNA” refers to messenger RNA. Traditionally, the basic components of an mRNA molecule include at least a coding region, a 5′UTR, a 3′UTR, a 5′cap and a poly-A tail. Whereas the 5′UTR, 3′UTR, 5′cap and the poly-A tail are usually required to improve e.g. stability, translation and/or recognition by the ribosome, it is the coding region which comprises the sequence encoding the protein(s), polypeptide(s), or peptide(s) of (therapeutic) interest. Therefore, when the mRNA molecule as disclosed herein is conventionally described with reference to its coding region, any mRNA molecule also comprising at least one of a 5′UTR, a 3′UTR, a 5′cap or a poly-A tail forms an integral part of the present disclosure.

[0999] Coding Region:

[1000] As used herein, the term “coding region” or “coding sequence” refers to a portion of a polynucleotide that codes for a peptide or peptides of interest.

[1001] Primary RNA Construct or Transcript:

[1002] As used herein, unless indicated otherwise or contradictory in context, the term “Primary RNA construct” or “Primary RNA transcript” refers to any precursor RNA molecule from a mature and functional (i.e. translatable) RNA molecule may be obtained. For instance, a precursor messenger RNA (pre-mRNA) is a type of primary transcript that becomes a messenger RNA (mRNA) after processing. Newly synthesized primary transcripts are modified in several ways to yield their mature form before they can be translated into a protein of interest. Such modifications include, but are not limited to, excision of introns, splicing of exons, addition of 5′cap and poly-A tail. Therefore, when reference is made to an RNA molecule, it shall be understood that it aims to cover all RNA molecules including, but not limited to, primary RNA transcripts or constructs at any stage of the modification process leading to a mature and functional RNA molecule e.g. with or without introns, exons, 5′cap, poly-A tail and/or any other conventional modifications, insofar as the RNA molecule contains a coding region or a precursor thereof allowing for a peptide of interest encoded by said coding region or precursor thereof to be expressed.

[1003] 5′ Capping: As used herein, unless indicated otherwise or contradictory in context, the term “5′ Capping” ou “5′ Cap” refers to a 5′ cap structure of an mRNA that is involved in nuclear export, increasing mRNA stability and binds the mRNA Cap Binding Protein (CBP), which is responsible for mRNA stability in the cell and translation competency through the association of CBP with poly(A) binding protein to form the mature cyclic mRNA species. The cap further assists the removal of 5′ proximal introns removal during mRNA splicing. Endogenous mRNA molecules may be 5′-end capped generating a 5′-ppp-5′-triphosphate linkage between a terminal guanosine cap residue and the 5′-terminal transcribed sense nucleotide of the mRNA molecule. This 5′-guanylate cap may then be methylated to generate an N7-methyl-guanylate residue.

[1004] Poly-A Tails:

[1005] During RNA processing, a long chain of adenine nucleotides (poly-A tail) may be added to a polynucleotide such as an mRNA molecules in order to increase stability. Immediately after transcription, the 3′ end of the transcript may be cleaved to free a 3′ hydroxyl. Then poly-A polymerase adds a chain of adenine nucleotides to the RNA. The process, called polyadenylation, adds a poly-A tail that can be between, for example, approximately 100 and 250 residues long.

[1006] Untranslated Regions:

[1007] As used herein, the term “Untranslated regions” or UTRs of a gene refers to regions that are transcribed but not translated. The 5′UTR starts at the transcription start site and continues to the start codon but does not include the start codon; whereas, the 3′UTR starts immediately following the stop codon and continues until the transcriptional termination signal. The regulatory features of a UTR can be incorporated into the polynucleotides, primary constructs and/or mRNA of the present disclosure to enhance the stability of the molecule.

[1008] 3′UTR:

[1009] As used herein, unless indicated otherwise or contradictory in context, the term “3′UTR” or “three prime untranslated region” refers to the section of messenger RNA that immediately follows the translation termination codon. The 3′-UTR often contains regulatory regions that post-transcriptionally influence gene expression.

[1010] 5′UTR:

[1011] As used herein, unless indicated otherwise or contradictory in context, the term “5′UTR” or “five prime untranslated region” refers to the section of mRNA that starts at the transcription start site and continues to the start codon but does not include the start codon. There is growing body of evidence about the regulatory roles played by the UTRs in terms of stability of the nucleic acid molecule and translation. Natural 5′UTRs bear features which play roles in for translation initiation. 5′UTR also have been known to form secondary structures which are involved in elongation factor binding.

[1012] Complementary DNA:

[1013] As used herein, the term “complementary DNA” or “cDNA” refers to a DNA molecule containing an eukaryote gene which has been tailored or engineered to be expressed in a prokaryote host cell. cDNA is also called “intron-free” DNA as it lacks the gene regions encoding introns, its transcription yielding an intron-free mRNA molecule.

[1014] In one aspect, the present disclosure provides a vector comprising a polynucleotide encoding at least one peptide, variant or analog thereof, having growth factor receptor-binding capability or capabilities, as defined herein.

[1015] Vector:

[1016] As used herein, unless indicated otherwise or contradictory in context, the term “vector” is used in its most general meaning and refers to any intermediary vehicle for a nucleic acid which enables said nucleic acid, for example, to be introduced into prokaryotic and/or eukaryotic cells and, where appropriate, to be integrated into a genome. Vectors of this kind are preferably replicated and/or expressed in the cells. Vectors may comprise plasmids, phagemids, bacteriophages or viral genomes.

[1017] Plasmid:

[1018] As used herein, unless indicated otherwise or contradictory in context, the term “plasmid” refers to a double-stranded (which may be circular) DNA sequence that is capable of automatically replicating in a host cell.

[1019] In one aspect, the present disclosure provides a cultured cell (or transfected cell) comprising a polynucleotide encoding at least one peptide, variant or analog thereof, having growth factor receptor-binding capability or capabilities, as defined herein.

[1020] In one aspect, the present disclosure provides a medical composition comprising at least one of a polynucleotide encoding at least one peptide, variant or analog thereof, having growth factor receptor-binding capability or capabilities, as defined herein, a vector comprising such a polynucleotide, or a transfected cell comprising such a vector, and a medically acceptable carrier.

[1021] In one aspect, the present disclosure provides methods and uses for inducing cell differentiation, regenerating tissues and protecting a patient from cell-degeneration-related diseases, conditions, disorders or pathologies, using at least one of a polynucleotide encoding at least one peptide, variant or analog thereof, having growth factor receptor-binding capability or capabilities, as defined herein, a vector comprising such a polynucleotide, a transfected cell comprising such a vector, or a medical composition comprising them.

### XI. Pharmaceutical Compositions

[1022] The present disclosure provides GFR-binding compounds, modified GFR-binding compounds and functionalised bioactive carrier, which may be used for inducing stem cell differentiation and tissue regeneration.

[1023] In one aspect, the present disclosure provides a composition such as a pharmaceutical, prophylactic, surgical, diagnostic, or imaging composition (hereinafter shorten as pharmaceutical or medical composition) comprising at least one (modified) GFR-binding compound or a functionalised bioactive carrier as defined herein and further comprising at least one pharmaceutically acceptable excipient carriers and/or vehicles.

[1024] Formulations of the pharmaceutical compositions described herein may be prepared by any method known or hereafter developed in the art of pharmacology. Generally, such methods of preparation include the step of bringing the active ingredient(s) into association with an excipient and/or one or more other accessory ingredients, and then, if necessary and/or desirable, shaping and/or packaging the product into a desired single- or multi-dose unit.

[1025] For example, in certain embodiments, a pharmaceutical composition as defined herein may contain between 0.01% and 100% by weight (over the total weight of the pharmaceutical composition) of a (modified) GFR-binding compound or a functionalised bioactive carrier, both as defined herein, as a pharmaceutically effective amount. The pharmaceutical composition particularly comprises between 0.01% and 95%, between 0.01% and 90%, between 0.01% and 85%, between 0.01% and 80%, between 0.01% and 75%, between 0.01% and 70%, between 0.01% and 65%, between 0.01% and 60%, between 0.01% and 55%, between 0.01% and 50%, between 0.01% and 45%, between 0.01% and 40%, between 0.01% and 35%, between 0.01% and 30%, between 0.01% and 25%, between 0.01% and 20%, between 0.01% and 15%, between 0.01% and 10%, between 0.01% and 5%, between 0.1% and 100%, between 0.1% and 95%, between 0.1% and 90%, between 0.1% and 85%, between 0.1% and 80%, between 0.1% and 75%, between 0.1% and 70%, between 0.1% and 65%, between 0.1% and 60%, between 0.1% and 55%, between 0.1% and 50%, between 0.1% and 45%, between 0.1% and 40%, between 0.1% and 35%, between 0.1% and 30%, between 0.1% and 25%, between 0.1% and 20%, between 0.1% and 15%, between 0.1% and 10%, and between 0.1% and 5% by weight (over the total weight of the pharmaceutical composition) of any one of a (modified) GFR-binding compound or a functionalised bioactive carrier as defined herein.

[1026] Generally, the (modified) GFR-binding compounds or functionalised bioactive carriers as defined herein may thus be administered as such or as part of a formulation in association with one or more pharmaceutically acceptable excipients, carriers and/or vehicles so as to form what is generally referred to as a pharmaceutical composition or pharmaceutical formulation.

[1027] Pharmaceutical Effective Amount:

[1028] As used herein, unless indicated otherwise or contradictory in context, the term “pharmaceutical effective amount” or “therapeutically effective amount” refers to an amount of an agent to be delivered (e.g., nucleic acid, protein, peptide, drug, therapeutic agent, diagnostic agent, prophylactic agent, etc.) that is sufficient, when administered to a subject suffering from or susceptible to an infection, disease, disorder, condition and/or pathology, to produce/provide a therapeutically effective outcome. Thus, a “pharmaceutical effective amount” depends upon the context in which it is being applied. A pharmaceutical effective amount of a composition is provided based, at least in part, on the target tissue, target cell type, means of administration, physical characteristics of the pharmaceutical association or composition (e.g., size, 3D shape, etc.), and other determinants. For example, in certain embodiments, in the context of providing an agent that induces tissue regeneration, a pharmaceutical effective amount of an agent is, for example, in certain embodiments, an amount sufficient to achieve tissue regeneration, as compared to the response obtained without provision of the agent. For example, in certain embodiments, a therapeutically effective amount as used herein is any of the herein disclosed weight or molar amounts, ratios or ranges of the (modified) GFR-binding compound or functionalised bioactive carrier.

[1029] Therapeutically Effective Outcome:

[1030] As used herein, unless indicated otherwise or contradictory in context, the term “therapeutically effective outcome” refers to an outcome that is sufficient in a subject suffering from or susceptible to an infection, disease, disorder, condition and/or pathology, to treat, improve symptoms of, diagnose, prevent, and/or delay the onset of the infection, disease, disorder, condition and/or pathology.

[1031] Therapeutic Agent:

[1032] As used herein, unless indicated otherwise or contradictory in context, the term “therapeutic agent” refers to any agent that, when administered to a subject/patient/individual, has a therapeutic, diagnostic, and/or prophylactic effect and/or elicits a desired biological and/or pharmacological effect.

[1033] Pharmaceutically Acceptable:

[1034] As used herein, unless indicated otherwise or contradictory in context, the term “pharmaceutically acceptable” refers to those compounds, materials, compositions, and/or dosage forms which are, within the ambit of sound medical judgment, suitable for use in contact with the tissues of human beings and animals without excessive toxicity, irritation, allergic response, or other problem or complication, commensurate with a reasonable benefit/risk ratio.

[1035] Pharmaceutically Acceptable Excipients:

[1036] As used herein, unless indicated otherwise or contradictory in context, the term “pharmaceutically acceptable excipient” refers to any ingredient other than the compounds described herein (i.e. GFR-binding compounds, bioactive carriers as defined herein or any further active principles) and satisfying to the herein defined definition of pharmaceutically acceptable for a patient. Excipients may include, for example: inert diluents, dispersing and/or granulating agents, surface active agents and/or emulsifiers, disintegrating agents, binding agents, preservatives, buffering agents, lubricating agents, oils, printing inks, sweeteners, and/or waters of hydration. The choice of excipient(s) will largely depend on factors such as the particular mode of administration, the effect of the excipient(s) on solubility and stability, and the nature of the dosage form. In one embodiment, the pharmaceutically acceptable excipient is not a naturally occurring excipient.

[1037] Diluents:

[1038] As used herein, unless indicated otherwise or contradictory in context, diluents include, but are not limited to, calcium carbonate, sodium carbonate, calcium phosphate, dicalcium phosphate, calcium sulfate, calcium hydrogen phosphate, sodium phosphate lactose, sucrose, cellulose, microcrystalline cellulose, kaolin, mannitol, sorbitol, inositol, sodium chloride, dry starch, powdered sugar and/or any combinations thereof.

[1039] Buffering Agents:

[1040] As used herein, unless indicated otherwise or contradictory in context, buffering agents include, but are not limited to, citrate buffer solutions, acetate buffer solutions, phosphate buffer solutions, ammonium chloride, potassium acetate, potassium chloride, monobasic potassium phosphate, calcium carbonate, calcium chloride, calcium citrate, calcium gluconate, calcium lactate, propanoic acid, calcium levulinate, pentanoic acid, phosphoric acid, calcium hydroxide phosphate, sodium acetate, sodium bicarbonate, sodium chloride, sodium citrate, sodium lactate, magnesium hydroxide, aluminum hydroxide, alginic acid, pyrogen-free water, isotonic saline, Ringer's solution, ethyl alcohol and any combinations thereof.

[1041] Granulating and/or Dispersing Agents:

[1042] As used herein, unless indicated otherwise or contradictory in context, granulating and/or dispersing agents include, but are not limited to, potato starch, corn starch, tapioca starch, sodium starch glycolate, clays, alginic acid, guar gum, citrus pulp, agar, bentonite, cellulose and wood products, natural sponge, cation-exchange resins, calcium carbonate, silicates, sodium carbonate, cross-linked poly(vinyl-pyrrolidone), sodium carboxymethyl starch, carboxymethyl cellulose, cross-linked sodium carboxymethyl cellulose, methylcellulose, pregelatinized starch, microcrystalline starch, water insoluble starch, calcium carboxymethyl cellulose, magnesium aluminum silicate, sodium lauryl sulfate, quaternary ammonium compounds and/or any combinations thereof.

[1043] Surface Active Agents and/or Emulsifiers:

[1044] As used herein, unless indicated otherwise or contradictory in context, surface active agents and/or emulsifiers include, but are not limited to, colloidal clays (such as aluminum silicates and magnesium aluminum silicates), natural emulsifiers (such as acacia, agar, sodium alginate, cholesterol, xanthan, pectin, gelatin, egg yolk, casein, cholesterol, wax, and lecithin), long chain amino acid derivatives, high molecular weight alcohols (such as stearyl, cetyl and oleyl alcohols, triacetin monostearate, ethylene glycol distearate and glyceryl monostearate), carbomers (such as carboxy polymethylene, polyacrylic acid, acrylic acid polymer, and carboxyvinyl polymer), diethylene glycol monolaurate, triethanolamine oleate, sodium oleate, potassium oleate, ethyl oleate, oleic acid, ethyl laurate, sodium lauryl sulfate, cetrimonium bromide, cetylpyridinium chloride, benzalkonium chloride, docusate sodium, carrageenan, cellulosic derivatives (such as carboxymethylcellulose sodium, hydroxymethyl cellulose, hydroxypropyl methylcellulose and methylcellulose), sorbitan fatty acid esters (such as polyoxyethylene sorbitan monolaurate, polyoxyethylene sorbitan, polyoxyethylene sorbitan monooleate, sorbitan monopalmitate and glyceryl monooleate), polyoxyethylene esters, sucrose fatty acid esters, polyethylene glycol fatty acid esters, polyoxyethylene ethers, poly(vinyl-pyrrolidone), and any combinations thereof.

[1045] Binding Agents:

[1046] As used herein, unless indicated otherwise or contradictory in context, binding agents include, but are not limited to, natural and synthetic gums (such as acacia, sodium alginate, carboxymethylcellulose, methylcellulose, ethylcellulose, hydroxyethylcellulose, hydroxypropyl cellulose, hydroxypropyl methylcellulose, microcrystalline cellulose, cellulose acetate and poly(vinyl-pyrrolidone), gelatin, starch, sugars (such as sucrose, dextrose, glucose, dextrin, lactose, and mannitol), alignates, magnesium aluminum silicates, polyethylene glycol, polyethylene oxide, inorganic calcium salts, water, alcohol, silicic acid, waxes, and any combinations thereof.

[1047] Preservatives:

[1048] As used herein, unless indicated otherwise or contradictory in context, preservatives include, but are not limited to, antioxidants, chelating agents, antifungal preservatives, antimicrobial preservatives, acidic preservatives, and alcohol preservatives.

[1049] Antioxidants:

[1050] As used herein, unless indicated otherwise or contradictory in context, antioxidants include, but are not limited to, alpha tocopherol, ascorbic acid, acorbyl palmitate, butylated hydroxyanisole, propionic acid, potassium metabisulfite, propyl gallate, sodium metabisulfite, sodium ascorbate, and sodium sulfite.

[1051] Chelating Agents:

[1052] As used herein, unless indicated otherwise or contradictory in context, chelating agents include ethylenediaminetetraacetic acid (EDTA), fumaric acid, malic acid, phosphoric acid, citric acid monohydrate and tartaric acid.

[1053] Antimicrobial Preservatives:

[1054] As used herein, unless indicated otherwise or contradictory in context, antimicrobial preservatives include, but are not limited to, benzalkonium chloride, benzethonium chloride, chlorhexidine, chlorobutanol, chlorocresol, chloroxylenol, benzyl alcohol, bronopol, cetylpyridinium chloride, cresol, ethyl alcohol, glycerin, hexetidine, imidurea, phenoxyethanol, phenylmercuric nitrate, phenylethyl alcohol, phenol, and propylene glycol.

[1055] Antifungal Preservatives:

[1056] As used herein, unless indicated otherwise or contradictory in context, antifungal preservatives include, but are not limited to, benzoic acid, hydroxybenzoic acid, butyl paraben, methyl paraben, ethyl paraben, propyl paraben, potassium benzoate, sodium propionate, potassium sorbate, and/or sorbic acid.

[1057] Alcohol Preservatives:

[1058] As used herein, unless indicated otherwise or contradictory in context, alcohol preservatives include, but are not limited to, phenol, phenolic compounds, bisphenol, ethanol, polyethylene glycol, chlorobutanol and hydroxybenzoate.

[1059] Acidic Preservatives:

[1060] As used herein, unless indicated otherwise or contradictory in context, acidic preservatives include, but are not limited to, vitamin A, vitamin C, vitamin E, beta-carotene, acetic acid, citric acid, dehydroacetic acid, and sorbic acid.

[1061] Lubricating Agents:

[1062] As used herein, unless indicated otherwise or contradictory in context, lubricating agents include, but are not limited to, magnesium stearate, calcium stearate, stearic acid, sodium benzoate, sodium acetate, sodium chloride, silica, talc, malt, glyceryl behanate, hydrogenated vegetable oils, polyethylene glycol, magnesium lauryl sulphate and any combinations thereof.

[1063] Sweeteners:

[1064] As used herein, unless indicated otherwise or contradictory in context, sweeteners include, but are not limited to, any natural or synthetic sugar substitutes. Natural sugar substitutes include, but are not limited to, brazzein, curculin, erythritol, glycyrrhizin, glycerol, hydrogenated starch hydrolysates, inulin, isomalt, lactitol, mogroside mix, mabinlin, maltitol, malto-oligosaccharide, mannitol, miraculin, monatin, monellin, osladin, pentadin, sorbitol, stevia, tagatose, thaumatin, and xylitol. Synthetic sugar substitutes include, but are not limited to, acesulfame potassium, advantame, alitame, aspartame, salt of aspartame-acesulfame, sodium cyclamate, dulcin, glucin, neohesperidin dihydrochalcone, neotame, P-4000, saccharin, Sucralose.

[1065] Exemplary excipients include, but are not limited to: butylated hydroxytoluene (BHT), calcium carbonate, calcium phosphate (dibasic), calcium stearate, croscarmellose, crosslinked polyvinyl pyrrolidone, citric acid, crospovidone, cysteine, ethylcellulose, gelatin, hydroxypropyl cellulose, hydroxypropyl methylcellulose, lactose, magnesium stearate, maltitol, mannitol, methionine, methylcellulose, methyl paraben, microcrystalline cellulose, polyethylene glycol, polyvinyl pyrrolidone, povidone, pregelatinized starch, propyl paraben, retinyl palmitate, shellac, silicon dioxide, sodium carboxymethyl cellulose, sodium citrate, sodium starch glycolate, sorbitol, starch, stearic acid, sucrose, talc, titanium dioxide, vitamin A, vitamin E, vitamin C, and xylitol. Suitable excipients for use in the present invention also include, but are not limited to, water, phosphate buffered saline (PBS), Ringer's solution, dextrose solution, serum-containing solutions, Hank's solution, other aqueous physiologically balanced solutions, oils, esters and glycols. Aqueous excipients can contain suitable auxiliary substances required to approximate the physiological conditions of the recipient, for example, in certain embodiments, by enhancing chemical stability and isotonicity.

[1066] Pharmaceutically/Medically Acceptable Carriers:

[1067] As used herein, unless indicated otherwise or contradictory in context, the term “pharmaceutically acceptable carriers”, “medically acceptable carrier” or “carriers” refers to pharmaceutically acceptable excipients and/or delivery vehicles suitable for delivering a pharmaceutical or therapeutic composition useful in a therapeutic method and uses of the present invention to a suitable in-vivo or ex-vivo site. Preferred pharmaceutically acceptable carriers are capable of maintaining a composition containing an active combination or association of a (modified) GFR-binding compound and a bioactive carrier as defined herein, in a form that, upon arrival of the combination to a target cell, site or tissue, the active combination is capable of performing one or more biological functions thereof the protein at the cell or tissue site. One type of pharmaceutically acceptable carrier includes a controlled release formulation that is capable of slowly releasing a composition or combination into an animal. In one example, a controlled release formulation comprises an active combination or association as defined herein in a controlled release vehicle. Suitable controlled release vehicles include, but are not limited to, microparticles, biocompatible polymers, other polymeric matrices, capsules, microcapsules, osmotic pumps, bolus preparations, diffusion devices, liposomes, lipospheres, and transdermal delivery systems. Such suitable controlled release vehicle may be combined with at least one targeting moiety. In one embodiment, the pharmaceutically acceptable carrier is not a naturally occurring carrier.

[1068] Targeting Moieties:

[1069] In one example, the functionalised bioactive carrier disclosed herein includes at least one binding partner which functions to target the cell to a specific tissue space or to interact with a specific moiety, either in-vivo, ex-vivo or in-vitro. Suitable binding partners include antibodies and functional fragments thereof, scaffold proteins, or peptides.

[1070] In one example, said excipients, carriers or vehicles are compatible with the (modified) GFR-binding compounds or functionalised bioactive carriers defined herein so that they do not disrupt, tamper, modify, de-organise, de-combine or de-associate said the (modified) GFR-binding compounds or functionalised bioactive carriers. In contrast, said excipients, carriers or vehicles preserves, maintains or reinforces the stability of the (modified) GFR-binding compounds or functionalised bioactive carriers so as to preserve their biological activity.

[1071] In one example, the present pharmaceutical compositions also include pharmaceutically acceptable salts and/or solvates and/or prodrugs and/or isotopically-labelled derivatives of the substances and compounds described herein such as the (modified) GFR-binding compounds or any other active principles.

[1072] Pharmaceutically Acceptable Salts:

[1073] As used herein, unless indicated otherwise or contradictory in context, the term “pharmaceutically acceptable salts” refers to derivatives of the disclosed substances and compounds wherein the parent substance or compound is modified by converting an existing acid or base moiety to its salt form (e.g., by reacting the free base group with a suitable organic acid). The degree of ionization in the salt may vary from completely ionized to almost non-ionized. Examples of pharmaceutically acceptable salts include, but are not limited to, mineral or organic acid salts of basic residues such as amines; alkali or organic salts of acidic residues such as carboxylic acids; and the like. Representative acid addition salts include acetate, adipate, alginate, ascorbate, aspartate, benzenesulfonate, benzoate, bisulfate, borate, butyrate, camphorate, camphorsulfonate, citrate, cyclopentanepropionate, digluconate, dodecylsulfate, ethanesulfonate, fumarate, glucoheptonate, glycerophosphate, hemisulfate, heptonate, hexanoate, hydrobromide, hydrochloride, hydroiodide, 2-hydroxy-ethanesulfonate, lactobionate, lactate, laurate, lauryl sulfate, malate, maleate, malonate, methanesulfonate, 2-naphthalenesulfonate, nicotinate, nitrate, oleate, oxalate, palmitate, pamoate, pectinate, persulfate, 3-phenylpropionate, phosphate, picrate, pivalate, propionate, stearate, succinate, sulfate, tartrate, thiocyanate, toluenesulfonate, undecanoate, valerate salts, and the like. Representative alkali or alkaline earth metal salts include sodium, lithium, potassium, calcium, magnesium, and the like, as well as nontoxic ammonium, quaternary ammonium, and amine cations, including, but not limited to ammonium, tetramethylammonium, tetraethylammonium, methylamine, dimethylamine, trimethylamine, triethylamine, ethylamine, and the like. The pharmaceutically acceptable salts of the present disclosure include the conventional non-toxic salts of the parent compound formed, for example, in certain embodiments, from non-toxic inorganic or organic acids. The pharmaceutically acceptable salts of the present disclosure can be synthesized from the parent compound which contains a basic or acidic moiety by conventional chemical methods. Generally, such salts can be prepared by reacting the free acid or base forms of these compounds with a stoichiometric amount of the appropriate base or acid in water or in an organic solvent, or in a mixture of the two; generally, non-aqueous media like ether, ethyl acetate, ethanol, isopropanol, or acetonitrile are preferred. Lists of suitable salts are generally found in Remington's Pharmaceutical Sciences, 17th ed., Mack Publishing Company, Easton, Pa., 1985, p. 1418 and in Pharmaceutical Salts: Properties, Selection, and Use, P. H. Stahl and C. G. Wermuth (eds.), Wiley—VCH, 2008, each of which being incorporated herein by reference in its entirety. In one embodiment, the pharmaceutically acceptable salt is not a naturally occurring salt.

[1074] Pharmaceutically Acceptable Solvate:

[1075] As used herein, unless indicated otherwise or contradictory in context, the term “pharmaceutically acceptable solvate,” refers to a compound, substance, association or combination wherein molecules of a suitable solvent are incorporated in the crystal lattice. A suitable solvent is physiologically tolerable at the dosage administered. For example, in certain embodiments, solvates may be prepared by crystallization, recrystallization, or precipitation from a solution that includes organic solvents, water, or a mixture thereof. Examples of suitable solvents are ethanol, water (For example, in certain embodiments, mono-, di-, and tri-hydrates), N-methylpyrrolidinone (NMP), dimethyl sulfoxide (DMSO), dimethylformamide (DMF), [Nu],[Nu]′-dimethylacetamide (DMAC), 1,3-dimethyl-2-imidazolidinone (DMEU), 1,3-dimethyl-3,4,5,6-tetrahydro-2-(1H)-pyrimidinone (DMPU), acetonitrile (ACN), propylene glycol, ethyl acetate, benzyl alcohol, 2-pyrrolidone, benzyl benzoate, and the like. When water is the solvent, the solvate is referred to as a “hydrate”. In one embodiment, the pharmaceutically acceptable solvate is not a naturally occurring solvate.

[1076] Pharmaceutically Acceptable Isotopically-Labelled Compounds:

[1077] In one example, the present invention also includes all pharmaceutically acceptable isotopically-labelled derivatives, which are identical to the compounds, substances, combinations or associations described herein but wherein one or more atoms are replaced by atoms having an atomic mass or mass number different from the atomic mass or mass number usually found in nature. Examples of isotopes that may be incorporated into GFR-binding compound(s) as defined herein include isotopes of hydrogen, carbon, chlorine, fluorine, iodine, nitrogen, oxygen, and sulfur, such as ²H, ³H, ¹¹C, ¹³C, ¹⁴C, ³⁶Cl, ¹⁸F, ¹²³I, ¹³N, ¹⁵N, ¹⁷O, ¹⁸O, and ³⁵S, respectively. It should be understood that compounds, substances, combinations, associations, prodrugs, and pharmaceutical acceptable salts thereof described herein which contain the aforementioned isotopes and/or other isotopes of other atoms are within the scope of the invention. Certain isotopically labeled of the compounds, substances, combinations, associations, prodrugs, and salts thereof such as, for example, in certain embodiments, those incorporating a radioactive isotope such as ³H and ¹⁴C, are useful in drug and/or substrate tissue distribution studies. Tritium, i.e. ³H, and carbon-14, i.e. ¹⁴C, are particularly preferred due to their ease of preparation and detection. Further, substitution with heavier isotopes such as deuterium, i.e. ²H, can afford certain therapeutic advantages resulting from greater metabolic stability, for example, in certain embodiments, increased in vivo half-life or reduced dosage requirements, and hence may be preferred in some circumstances. Isotopically labeled compounds, substances, combinations, associations, prodrugs, and salts thereof can generally be prepared by carrying out the procedures disclosed in the Schemes and/or in the Examples by substituting a readily available non-isotopically labeled reagent for an isotopically labeled reagent.

[1078] Prodrugs:

[1079] As used herein, unless indicated otherwise or contradictory in context, the term “prodrug” refers to a compound, substance, combination or association that is transformed in vivo to yield a compound, substance, combination or association as defined herein or a pharmaceutically acceptable salt or solvate thereof. The transformation may occur by various mechanisms, such as via hydrolysis in blood. A prodrug of a compound, substance, combination or association defined herein may be formed in a conventional manner with one or more functional groups in the compound, such as an amino, hydroxyl or carboxyl group. For example, in certain embodiments, if a compound defined herein contains a carboxylic acid functional group, a prodrug can comprise: (1) an ester formed by the replacement of a hydrogen of the acid group with a group such as (C1-C6)alkyl or (C6-C10) aryl; (2) an activated ester formed by the replacement of the hydrogen of the acid group with groups such as —(CR²)COOR′, where CR² is a spacer and R can be groups such as H or methyl and R′ can be groups such as (C1-C6)alkyl or (C6-C10) aryl; and/or (3) a carbonate formed by the replacement of the hydrogen of the acid with groups such as CHROCOOR′ where R can be groups such as H or methyl and R′ can be groups such as (C1-C6)alkyl or (C6-C10)aryl. Similarly, if a compound defined herein contains an alcohol functional group, a prodrug can be formed via the replacement of the hydrogen of the alcohol with groups such as (C1-C6)alkanoyloxymethyl or (C1-C6)alkanoyloxyaryl or by forming an ester via condensation with, for example, in certain embodiments, an amino acid. Where a compound defined herein contains a primary or secondary amino group, a prodrug may comprise, for example, in certain embodiments, an amide formed by the replacement of one or both of the hydrogen atoms of the amino group with (C1-C10)alkanoyl or (C6-C10)aroyl. Other prodrugs of amines are well known to those skilled in the art. Alternatively, certain compounds defined herein may themselves act as prodrugs of other compounds defined herein. Discussions regarding prodrugs and their use can be found in, for example, in certain embodiments, “Prodrugs as Novel Delivery Systems,” T. Higuchi and W. Stella, Vol. 14 of the ACS Symposium Series, and Bioreversible Carriers in Drug Design, Pergamon Press, 1987 (ed. E B Roche, American Pharmaceutical Association). Examples of other prodrug types may be found in the aforementioned reference which is hereby incorporated by reference.

### XII. Administration Routes and Procedures

[1080] (Modified) GFR-binding compounds, substances, functionalised bioactive carrier to be delivered and/or pharmaceutical, dermatological, prophylactic, diagnostic, or imaging compositions or formulations thereof in accordance with the present disclosure may be administered by any route of administration effective for preventing, treating, diagnosing, or imaging a disease, disorder, or condition and/or treating or alleviating at least one symptoms thereof and/or inducing tissue formation/regeneration and/or reducing or preventing tissue degeneration.

[1081] Suitable administration protocols include any in-vitro, in-vivo or ex-vivo administration protocol. The preferred types and routes of administration will be apparent to those of skill in the art, depending on the type of condition or disease to be prevented or treated or the nature of tissue to regenerate; whether the composition is nucleic acid based, protein based, cell based or combinations or mixtures thereof; and/or the target cell/tissue.

[1082] Ex-Vivo and In-Vitro Administration:

[1083] As used herein, unless indicated otherwise or contradictory in context, the term “ex-vivo administration” refers to performing the regulatory step outside of the subject/patient, such as administering a (modified) GFR-binding compounds, functionalised bioactive carrier or medical compositions as defined herein to a population of cells (e.g., mesenchymal stem cells) removed from a subject/patient for e.g. diagnostic, analysis and/or academic purposes.

[1084] Cells, tissues or organs can be contacted ex vivo or in vitro with a (modified) GFR-binding compound or a functionalised bioactive carrier by any suitable method, including mixing or the use of a delivery vehicle. Effective in vitro or ex vivo culture conditions include, but are not limited to, effective media, bioreactor, temperature, pH and oxygen conditions that permit cell culture. An effective medium refers to any medium in which a given host cell or tissue is typically cultured. Such medium typically comprises an aqueous medium having assimilable carbon, nitrogen and phosphate sources, and appropriate salts, minerals, metals and other nutrients, such as vitamins. Cells can be cultured in conventional fermentation bioreactors, shake flasks, test tubes, microtiter dishes, and petri plates. Culturing can be carried out at a temperature, pH and oxygen content appropriate for a cell or tissue. Such culturing conditions are within the expertise of one of ordinary skill in the art.

[1085] In one aspect, the present disclosure thus also provides a method for inducing tissue formation, in-vitro or ex-vivo, said method comprising the administration to a cell (e.g. a non-fully differentiated cell) of an effective amount of a GFR-binding compound, a functionalised bioactive carrier or a composition thereof as defined herein.

[1086] In-Vivo Administration:

[1087] In one example, (modified) GFR-binding compounds, functionalised bioactive carriers or pharmaceutical, prophylactic, diagnostic, or imaging compositions are administered by one or more of a variety of routes, including oral, intravenous, intramuscular, intra-arterial, intramedullary, rectal, intravaginal, intrathecal, subcutaneous, intraventricular, transdermal, intradermal, intraperitoneal, topical (e.g. by ointments, creams, powders, lotions, gels, and/or drops), buccal, enteral, mucosal, nasal, vitreal, sublingual, by intra-tracheal instillation, bronchial instillation, and/or inhalation, as an oral spray, nasal spray, and/or aerosol, and/or through a portal vein catheter. In one example, (modified) GFR-binding compounds, functionalised bioactive carrier or pharmaceutical, prophylactic, diagnostic, or imaging compositions are administered by systemic intravenous injection. In one example, (modified) GFR-binding compounds, functionalised bioactive carrier or pharmaceutical, prophylactic, diagnostic, or imaging compositions may be administered in a way which allows them to cross the blood-brain barrier, vascular barrier, or other epithelial barrier.

[1088] Delivery:

[1089] As used herein, unless indicated otherwise or contradictory in context, the term “delivery” refers to the act or manner of delivering a compound, substance, composition, entity, moiety, cargo or payload.

[1090] Delivery Agent:

[1091] As used herein, unless indicated otherwise or contradictory in context, the term “delivery agent” refers to any substance which facilitates, at least in part, the in vivo delivery of a (modified) GFR-binding compounds, functionalised bioactive carriers or pharmaceutical, prophylactic, diagnostic, or imaging compositions defined herein to targeted cells.

[1092] Forms Suitable for Oral Administration:

[1093] A (modified) GFR-binding compound, functionalised bioactive carrier or pharmaceutical, prophylactic, diagnostic, or imaging compositions of the invention, for example, in certain embodiments, includes forms suitable for oral administration as a tablet, capsule, pill, powder, sustained release formulations, solution, suspension, or for parenteral injection as a sterile solution, suspension or emulsion. Pharmaceutical compositions suitable for the delivery of (modified) GFR-binding compounds, functionalised bioactive carrier or pharmaceutical, prophylactic, diagnostic, or imaging compositions defined herein and methods for their preparation will be readily apparent to those skilled in the art. Such compositions and methods for their preparation may be found, for example, in certain embodiments, in ‘Remington's Pharmaceutical Sciences’, 19th Edition (Mack Publishing Company, 1995), which is hereby incorporated by reference in its entirety. Oral administration may involve swallowing, so that the compounds or associations enters the gastrointestinal tract, or buccal or sublingual administration may be employed by which the compound enters the blood stream directly from the mouth. Formulations suitable for oral administration include solid formulations, such as tablets, capsules containing particulates, liquids, or powders; lozenges (including liquid-filled), chews; multi- and nano-particulates; gels, solid solution, liposome, films (including muco-adhesive), ovules, sprays and liquid formulations. Liquid formulations include suspensions, solutions, syrups and elixirs. Such formulations may be employed as fillers in soft or hard capsules and typically comprise a carrier, for example, in certain embodiments, water, ethanol, polyethylene glycol, propylene glycol, methylcellulose, or a suitable oil, and one or more emulsifying agents and/or suspending agents. Liquid formulations may also be prepared by the reconstitution of a solid, for example, in certain embodiments, from a sachet. The pharmaceutical associations or compositions defined herein may also be used in fast-dissolving, fast-disintegrating dosage forms such as those described in the art.

[1094] Forms Suitable for Parenteral Administration:

[1095] In one example, (modified) GFR-binding compounds, functionalised bioactive carriers or pharmaceutical, prophylactic, diagnostic, or imaging compositions of the invention may be administered by parenteral injection. Exemplary parenteral administration forms include sterile solutions, suspensions or emulsions of the pharmaceutical association defined herein in sterile aqueous media, for example, in certain embodiments, aqueous propylene glycol or dextrose. In another embodiment, the parenteral administration form is a solution. Such parenteral dosage forms can be suitably buffered, if desired. Preferred sterile solutions include sodium chloride, 0.9%, UPS solution. Injectable formulations can be sterilized, for example, in certain embodiments, by filtration through a bacterial-retaining filter, and/or by incorporating sterilizing agents in the form of sterile solid compositions which can be dissolved or dispersed in sterile water or other sterile injectable medium prior to use.

[1096] Forms Suitable for Rectal and Vaginal Administration:

[1097] Compositions for rectal or vaginal administration are typically suppositories which can be prepared by mixing compositions with suitable non-irritating excipients such as cocoa butter, polyethylene glycol or a suppository wax which are solid at ambient temperature but liquid at body temperature and therefore melt in the rectum or vaginal cavity and release the active ingredient.

[1098] Forms Suitable for Topical and/or Transdermal Administration:

[1099] Dosage forms for topical and/or transdermal administration of a composition may include ointments, pastes, creams, lotions, gels, powders, solutions, sprays, inhalants and/or patches. Generally, an active ingredient is admixed under sterile conditions with a pharmaceutically acceptable excipient and/or any needed preservatives and/or buffers as may be required.

[1100] Forms Suitable for Pulmonary Administration:

[1101] Dosage forms for pulmonary administration via the buccal cavity may comprise dry particles which comprise the active ingredient (e.g. the pharmaceutical association defined herein) and which have a diameter in the range from about 0.5 nm to about 7 nm. Such compositions are conveniently in the form of dry powders for administration using a device comprising a dry powder reservoir to which a stream of propellant may be directed to disperse the powder and/or using a self-propelling solvent/powder dispensing container such as a device comprising the active ingredient dissolved and/or suspended in a low-boiling propellant in a sealed container. Pharmaceutical compositions formulated for pulmonary delivery may provide an active ingredient in the form of droplets of a solution and/or suspension. Such formulations may be prepared, packaged, and/or sold as aqueous and/or dilute alcoholic solutions and/or suspensions, optionally sterile, comprising active ingredient, and may conveniently be administered using any nebulization and/or atomization device. Such formulations may further comprise one or more additional ingredients including, but not limited to, a flavoring agent such as saccharin sodium, a volatile oil, a buffering agent, a surface active agent, and/or a preservative such as methylhydroxybenzoate.

[1102] Forms Suitable for Nasal Administration:

[1103] Formulations described herein as being useful for pulmonary delivery are also useful for intranasal delivery of a pharmaceutical composition. Formulations suitable for nasal administration may, for example, in certain embodiments, comprise from about as little as 0.1% (w/w) and as much as 100% (w/w) of active ingredient (e.g. the pharmaceutical association defined herein), and may comprise one or more of the additional ingredients described herein. A pharmaceutical composition may be prepared, packaged, and/or sold in a formulation suitable for buccal administration. Such formulations may, for example, in certain embodiments, be in the form of tablets and/or lozenges made using conventional methods, and may, for example, in certain embodiments, 0.1% to 20% (w/w) active ingredient, the balance comprising an orally dissolvable and/or degradable composition and, optionally, one or more of the additional ingredients described herein. Alternately, formulations suitable for buccal administration may comprise a powder and/or an aerosolized and/or atomized solution and/or suspension comprising active ingredient. Such powdered, aerosolized, and/or aerosolized formulations, when dispersed, may have an average particle and/or droplet size in the range from about 0.1 nm to about 200 nm, and may further comprise one or more of any additional ingredients described herein.

[1104] Forms Suitable for Ophthalmic Administration:

[1105] Dosage forms for ophthalmic administration include, for example, in certain embodiments, eye drops including, for example, in certain embodiments, a 0.1/1.0% (w/w) solution and/or suspension of the active ingredient (e.g. the pharmaceutical association defined herein) in an aqueous or oily liquid excipient. Such drops may further comprise buffering agents, salts, and/or one or more other of any additional ingredients described herein. Other opthalmically-administrable formulations which are useful include those which comprise the active ingredient in microcrystalline form and/or in a liposomal preparation. Ear drops and/or eye drops are contemplated as being within the scope of this present disclosure.

[1106] Direct Injection:

[1107] One preferred administration method for delivering (modified) GFR-binding compounds, functionalised bioactive carriers or pharmaceutical, prophylactic, diagnostic, or imaging compositions as defined herein is by local administration, in particular, by direct injection. Direct injection techniques are particularly useful for administering a composition to a cell or tissue that is accessible by surgery, and particularly, on or near the surface of the body. Administration of a composition locally within the area of a target cell refers to injecting the composition centimeters and preferably, millimeters from the target cell or tissue.

[1108] Dosage Regimens:

[1109] The dosage regimen of the (modified) GFR-binding compounds, functionalised bioactive carriers or pharmaceutical, prophylactic, diagnostic, or imaging compositions as defined herein may be adjusted to provide the optimum desired response. For example, in certain embodiments, a single bolus may be administered, several divided doses may be administered over time or the dose may be proportionally reduced or increased as indicated by the exigencies of the therapeutic situation. The appropriate dosing regimen, the amount of each dose administered and/or the intervals between doses will depend upon the pharmaceutical association being used, the type of pharmaceutical composition, the characteristics of the subject in need of treatment and the severity of the condition being treated. Thus, the skilled artisan would appreciate, based upon the disclosure provided herein, that the dose and dosing regimen is adjusted in accordance with methods well-known in the therapeutic arts. That is, the maximum tolerable dose can be readily established, and the effective amount providing a detectable therapeutic benefit to a patient may also be determined, as can the temporal requirements for administering each agent to provide a detectable therapeutic benefit to the patient. Accordingly, while certain dose and administration regimens are exemplified herein, these examples in no way limit the dose and administration regimen that may be provided to a patient in practicing the present invention. In general, pharmaceutical compositions in accordance with the present disclosure may be administered at dosage levels sufficient to deliver from about 0.0001 mg/kg to about 100 mg/kg, from about 0.01 mg/kg to about 50 mg/kg, from about 0.1 mg/kg to about 40 mg/kg, from about 0.5 mg/kg to about 30 mg/kg, from about 0.01 mg/kg to about 10 mg/kg, from about 0.1 mg/kg to about 10 mg/kg, or from about 1 mg/kg to about 25 mg/kg, of subject body weight per day, one or more times a day, to obtain the desired therapeutic, diagnostic, prophylactic, or imaging effect. The desired dosage may be delivered three times a day, two times a day, once a day, every other day, every third day, every week, every two weeks, every three weeks, or every four weeks. In certain embodiments, the desired dosage may be delivered using multiple administrations (e.g., two, three, four, five, six, seven, eight, nine, ten, eleven, twelve, thirteen, fourteen, or more administrations). It is to be further understood that for any particular subject, specific dosage regimens should be adjusted over time according to the individual need and the professional judgment of the person administering or supervising the administration of the compositions, and that dosage ranges set forth herein are exemplary only and are not intended to limit the scope or practice of the present invention. For example, in certain embodiments, doses may be adjusted based on pharmacokinetic or pharmacodynamic parameters, which may include clinical effects such as toxic effects and/or laboratory values. Thus, the present invention encompasses intra-patient dose-escalation as determined by the skilled artisan. Determining appropriate dosages and regiments for administration of the chemotherapeutic agent are well-known in the relevant art and would be understood to be encompassed by the skilled artisan once provided the teachings disclosed herein.

[1110] Effective Dose Parameters:

[1111] The dosage regimen of the (modified) GFR-binding compounds or functionalised bioactive carriers and/or pharmaceutical compositions as defined herein may be adjusted to obtain effective dose parameters. Effective dose parameters can be determined using methods standard in the art for a particular disease or condition. In particular, the effectiveness of dose parameters of a therapeutic composition as defined herein can be determined by assessing response rates. Such response rates refer to the percentage of treated patients in a population of patients that respond with either partial or complete remission.

[1112] A pharmaceutical composition as defined herein may be prepared, packaged, or sold in bulk, as a single unit dose, or as a plurality of single unit doses.

[1113] Unit Dose:

[1114] As used herein, unless indicated otherwise or contradictory in context, the term “unit dose” refers to a discrete amount of the pharmaceutical composition comprising a predetermined amount of the active ingredient. The amount of the active ingredient is generally equal to the dosage of the active ingredient which would be administered to a subject or a convenient fraction of such a dosage such as, for example, in certain embodiments, one-half or one-third of such a dosage.

[1115] Single Unit Dose:

[1116] As used herein, unless indicated otherwise or contradictory in context, the term “single unit dose” refers to a dose of any therapeutic association or composition administered in one dose/at one time/single route/single point of contact, i.e., single administration event.

[1117] Split Dose:

[1118] As used herein, unless indicated otherwise or contradictory in context, the term “split dose” refers to the division of single unit dose or total daily dose into two or more doses.

[1119] Total Daily Dose:

[1120] As used herein, unless indicated otherwise or contradictory in context, the term “total daily dose” refers to an amount given or prescribed in 24 hr period. It may be administered as a single unit dose.

[1121] The relative amounts of the active ingredient(s), the pharmaceutically acceptable excipients, carriers or vehicles, and any additional ingredients in a pharmaceutical composition defined herein will vary, depending upon the identity, size, and condition of the subject treated and further depending upon the route by which the composition is to be administered. In addition to the active ingredient, a pharmaceutical composition of the invention may further comprise one or more additional pharmaceutically active agents.

[1122] Combination Therapy:

[1123] Compounds, associations, compositions or formulations defined herein may be used in combination with one or more other therapeutic, prophylactic, diagnostic, or imaging agents. As used herein, the term “in combination with” is not intended to imply that the agents must be administered at the same time and/or formulated for delivery together, although these methods of delivery are within the scope of the present disclosure. Compositions can be administered concurrently with, prior to, or subsequent to, one or more other desired therapeutics or medical procedures. In some embodiments, they are administered within about 90, 60, 30, 15, 10, 5, or 1 minute of one another. In some embodiments, the administrations of the agents are spaced sufficiently closely together such that a combinatorial (e.g., a synergistic) effect is achieved. In general, each agent will be administered at a dose and/or on a time schedule determined for that agent. In one example, the present disclosure encompasses the delivery of pharmaceutical, prophylactic, diagnostic, or imaging compositions in combination with agents that improve their bioavailability, reduce and/or modify their metabolism, inhibit their excretion, and/or modify their distribution within the body. It will further be appreciated that therapeutically, prophylactically, diagnostically, or imaging active agents used in combination may be administered together in a single composition or administered separately in different compositions. In general, it is expected that agents used in combination with be used at levels that do not exceed the levels at which they are used individually. In one example, the levels used in combination will be lower than those utilized individually. The particular combination of therapies to employ in a combination regimen will take into account compatibility of the desired therapeutics and/or procedures and the desired therapeutic effect to be achieved. It will also be appreciated that the therapies employed may achieve a desired effect for the same disorder, or they may achieve different effects (e.g., control of any adverse effects).

[1124] Although the descriptions of pharmaceutical compositions provided herein are principally directed to pharmaceutical compositions which are suitable for administration to mammals, in particular humans, it will be understood by the skilled artisan that such compositions are generally suitable for administration to animals of all sorts, in particular to any member of the Vertebrate class. Modification of pharmaceutical compositions suitable for administration to humans in order to render the compositions suitable for administration to various animals is well understood, and the ordinarily skilled veterinary pharmacologist can design and/or perform such modification with merely ordinary, if any, experimentation. Subjects to which administration of the pharmaceutical compositions is contemplated include, but are not limited to, humans and/or other primates; mammals, including commercially relevant mammals such as cattle, pigs, horses, sheep, cats, dogs, mice, and/or rats; and/or birds, including commercially relevant birds such as chickens, ducks, geese, and/or turkeys.

### XIII. Dermatological Applications

[1125] When the cell or tissue to be regenerated, repaired or treated is a skin cell or tissue (mainly from the fibroblast lineage), the pharmaceutical composition defined herein may be a dermatological composition comprising at least one (modified) GFR-binding compound or at least one functionalised bioactive carrier, as all defined herein, and at least one dermatologically acceptable excipient.

[1126] For example, in certain embodiments, a dermatological composition for the uses of the invention may contain between 0.01% and 100% by weight (over the total weight of the dermatological composition) of a GFR-binding compound or functionalised bioactive carrier, both as defined herein, as a dermatological effective amount. The dermatological composition particularly comprises between 0.01% and 95%, between 0.01% and 90%, between 0.01% and 85%, between 0.01% and 80%, between 0.01% and 75%, between 0.01% and 70%, between 0.01% and 65%, between 0.01% and 60%, between 0.01% and 55%, between 0.01% and 50%, between 0.01% and 45%, between 0.01% and 40%, between 0.01% and 35%, between 0.01% and 30%, between 0.01% and 25%, between 0.01% and 20%, between 0.01% and 15%, between 0.01% and 10%, between 0.01% and 5%, between 0.1% and 100%, between 0.1% and 95%, between 0.1% and 90%, between 0.1% and 85%, between 0.1% and 80%, between 0.1% and 75%, between 0.1% and 70%, between 0.1% and 65%, between 0.1% and 60%, between 0.1% and 55%, between 0.1% and 50%, between 0.1% and 45%, between 0.1% and 40%, between 0.1% and 35%, between 0.1% and 30%, between 0.1% and 25%, between 0.1% and 20%, between 0.1% and 15%, between 0.1% and 10%, and between 0.1% and 5% by weight (over the total weight of the dermatological composition) of any one of a GFR-binding compound or a functionalised bioactive carrier.

[1127] Dermatologically Acceptable:

[1128] As used herein, unless indicated otherwise or contradictory in context, the term “dermatologically acceptable” means that the compound(s) or pharmaceutical association(s) used are adapted for use in contact with human skin without undue toxicity, incompatibility, instability, allergic response, or their equivalents.

[1129] Dermatological Formulations:

[1130] Suitable formulation for implementing dermatological embodiments of the invention include an aqueous or oil-based solution, a water-based cream or gel or an oily gel, usually in a jar or a tube, particularly a shower gel, shampoo, milk, emulsion, microemulsion or nanoemulsion, particularly oil-in-water or water-in-oil or multiple of silicone-based; a lotion, particularly in a glass or plastic bottle of a spray or aerosol bottle, a blister-pack, liquid soap, a dermatological bar of soap, a pomade, mousse, an anhydrous product, preferably liquid, cream or solid, for example in the form of a stick, particularly in the form of lipstick, a cataplasm or a patch.

[1131] Preferred administration routes include, but are not limited to, oral, topical or intradermal as already defined herein.

[1132] Dermatologically Acceptable Excipients:

[1133] Suitable dermatologically acceptable excipients for implementing embodiments of the invention include, but are not limited to, preservatives, emollients, emulsifiers, surfactants, moisturizers, thickeners, conditioners, mattifying agents, stabilizers, antioxidants, texturizing agents, shine agents, filmogenic agents, solubilizers, pigments, colorants, perfumes, and solar filters. These excipients are preferably chosen from among the group consisting of amino acids and their derivatives, polyglycerols, esters, polymers and cellulose derivatives, lanoline derivatives, phospholipids, lactoferrins, lactoperoxidases, sucrose-based stabilizers, vitamin E and its derivatives, natural and synthetic waxes, vegetable oils, triglycerides, insaponifiables, phytosterols, plant esters, silicones and their derivatives, protein hydrolysates, jojoba oil and its derivatives, lipo/hydrosoluble esters, betaines, aminoxides, saccharose ester plant extracts, titanium dioxides, glycines, parabens, and even more preferably from among the group consisting of butylene glycol, glycol-15 stearyl ether, cetearyl alcohol, phenoxyethanol, methylparaben, propylparaben, butylparaben, butylenes glycol, natural tocopherols, glycerine, dihydroxycetyl sodium phosphate, isopropyl hydroxycetyl ether, le glycol stearate, triisononanoin, octyl cocoate, polyacrylamide, isoparaffin, laureth-7, carbomer, propylene glycol, glycerol, bisabolol, dimethicone, sodium hydroxide, PEG 30-dipolyhydroxysterate, capric/caprylic triglycerides, cetearyl octanoate, dibutyl adipate, grapeseed oil, jojoba oil, magnesium sulfate, EDTA, cyclomethicone, xanthan gum, citric acid, sodium lauryl sulfate, mineral waxes and oils, isostearyl isostearate, dipelargonate of propylene glycol, isostearate of propylene glycol, PEG 8, beeswax, glyceride of hydrogenated palm kernel oil, lanolin oil, sesame oil, cetyl lactate, lanolin alcohol, titanium dioxide, lactose, saccharose, low-density polyethylene, and isotonic salt solution.

[1134] In one example, the dermatological composition as defined herein may contain at least one other active agents and/or excipients and/or additives of pharmaceutical, especially dermatological, interest such as agents with the following properties:
[1135] wound-healing properties; such as panthenol and derivatives thereof, for example ethyl panthenol, aloe vera, pantothenic acid and derivatives thereof, allantoin, bisabolol, and dipotassium glycyrrhizinate;
[1136] anti-inflammatory properties: such as steroidal and non-steroidal antiinflammatories, in particular Inhibitors of the production of cytokines and chemokines, of cyclooxygenase, of nitric oxide (NO) and nitric oxide synthase (NOS). As an example of anti-inflammatory products, mention may be made of extracts of Ginkgo biloba, trilactone terpenes such as ginkgolides, especially ginkgolide B and bilobalide known for their platelet-activating factor (PAF) antagonist properties.

[1137] The CTFA Cosmetic Ingredient Handbook, Second Edition (1992), which is hereby incorporated by reference in its entirety, describes different cosmetic and pharmaceutical ingredients currently used in the cosmetic and pharmaceutical industry that are particularly adapted to topical use and which may be used in a dermatological composition of the invention. Examples of these types of ingredients include but are not limited to the following compounds: abrasives, absorbent compounds, compounds with aesthetic purposes such as perfumes, pigments, colorants, essential oils, astringents, etc. (for example: clove oil, menthol, camphor, eucalyptus oil, eugenol, menthyl lactate, and hamelis distillate), anti-acne agents, anti-flocculant agents, anti-foaming agents, anti-microbial agents (for example iodopropyl butylcarbamate), les antioxidants, bonding agents, biological additives, tampon agents, swelling agents, chelatants, additives, biocidal agents, denaturants, external analgesics, film-forming materials, polymers, opacifying agents, pH adjusters, reducing agents, depigmenting or lightening agents (for example: hydroquinone, kojic acid, ascorbic acid, magnesium ascorbyl phosphate, ascorbyl glucosamine), conditioning agents (for example: humectants), calming agents for the skin and/or scarring agents (for example: panthenol and its derivatives, for example ethyl panthenol), aloe vera, pantothenic acid and its derivatives, allantoin, bisabolol and dipotassium glycyrrhizinate), thickeners, vitamins, and the derivatives or equivalents of these.

[1138] In one aspect, the present disclosure provides a (modified) GFR-binding compound, a functionalised bioactive carrier, or a dermatological composition, all as defined herein, for use in preventing and/or treating scars and/or inflammations such as gingivitis.

[1139] In one particular example, the dermatological composition is intended for treating skin in which the dermis is at least partially damaged, especially in subjects who have undergone a surgical operation, or who have been burned and/or injured. This treatment makes it possible to stimulate the proliferation and/or the activity of fibroblasts, in order to stimulate tissue repair and/or dermal reconstruction.

[1140] In one aspect, the present disclosure provides a (modified) GFR-binding compound, a functionalised bioactive carrier, or a dermatological composition, all as defined herein, for use in preventing and/or treating at least one of acne, alopecia areata, bowen's disease, congenital erythropoietic porphyria, contact dermatitis, darier's disease, eczema (atopic eczema), epidermolysis bullosa simplex, erythropoietic protoporphyria, fungal infections of nails, hailey-hailey disease, herpes simplex, hidradenitis suppurativa, hirsutism, hyperhidrosis, ichthyosis, impetigo, keloids, keratosis pilaris, lichen planus, lichen sclerosus, melasma, pemphigus vulgaris, plantar warts (verrucas), pityriasis lichenoides, polymorphic light eruption, psoriasis, pyoderma gangrenosum, rosacea, scabies, shingles and vitiligo.

[1141] In one aspect, the present disclosure also provides a dermatological care or treatment method for a subject having need thereof, said method comprising the topical application, intradermal injection or oral administration, preferably the topical application or the intradermal injection, of a (suitable amount of) at least one (modified) GFR-binding compound, functionalised bioactive carrier, or dermatological composition, all as defined herein.

[1142] Such a dermatological care or treatment method includes the applications cited herein.

[1143] Suitable as amounts of (modified) GFR-binding compounds or functionalised bioactive carrier for implementing embodiments of the invention in the dermatological field include the group consisting of between about 0.0001 μg/day to about 5000 mg/day, between about 0.0001 μg/day to about 1000 mg/day, between about 0.0001 μg/day to about 10 mg/day, between about 0.0001 μg/day to about 1 mg/day, or between about 0.0001 μg/day to about 100 μg/day, all being preferred for implementing embodiments of the invention.

[1144] Advantageously, the subject who has need thereof is a subject chosen from a population having an average age of more than 30 years old or who has had sunlight over-exposure, has a family history of skin conditions.

### XIV. Ophthalmic Applications

[1145] Preferable dosage forms for the (modified) GFR-binding compound functionalised bioactive carrier or pharmaceutical composition, all as defined herein, for treating eye retina diseases, disorders or conditions include, for example, in certain embodiments, eye drops and eye ointments. These can be prepared using conventional techniques. For instance, eye drops may be prepared, using isotonic agents such as sodium chloride, buffers such as sodium phosphate, and preservatives such as benzalkonium chloride. A suitable pH is within an ophthalmologically acceptable range. Preferred pH is within pH 4 to 8.

[1146] Particularly preferred administration routes include vitreal and intraocular.

[1147] A suitable dose of (modified) GFR-binding compound, functionalised bioactive carrier, or pharmaceutical composition for treating eye disorders is appropriately selected, depending on the symptoms, age of patients, dosage form and the like. For eye drops, suitable concentration may be 0.0001 to 10 w/v %, preferably 0.0001 to 0.01 w/v % for administration into eyes once or several times a day.

### XV. Surgical Treatments

[1148] The (modified) GFR-binding compounds, functionalised bioactive carriers, and pharmaceutical compositions, all as defined herein, may be used in surgical methods suitable for protecting (e.g. treating or preventing) a patient or subject from a disease, condition, disorder or pathology to whom a surgical intervention would be beneficial.

[1149] For example, in certain embodiments, said surgical method may be selected from the group consisting of bone-repair surgery, cartilage-repair surgery, heart surgery, kidneys or lung surgery, eye surgery, muscle-repair surgery, and tendon/ligament -repair surgery.

[1150] In one aspect, the present invention thus discloses a surgical method for surgical treatment comprising the contacting of at least one (modified) GFR-binding compound, at least one functionalised bioactive carrier, a pharmaceutical, prophylactic, diagnostic or imaging composition thereof, or medical device, all as defined herein, with a body part of a patient to be treated, wherein said contacting induces stem cell differentiation and tissue formation.

[1151] In one example, said surgical method comprises the placement or implantation of an implantable medical device comprising a (modified) GFR-binding compound, a functionalised bioactive carrier, or a pharmaceutical, prophylactic, diagnostic or imaging composition thereof, all as defined herein, inside a patient or subject in need of such a surgical treatment.

[1152] For example, in certain embodiments, the surgical treatment of the invention may include the use of a placement, insertion or depositing device for contacting said GFR-binding compound, said functionalised bioactive carrier, or a pharmaceutical, prophylactic, diagnostic or imaging composition thereof with a body part of a patient or subject in need of such a treatment. In one example, said placement, insertion or depositing device comprises an injection device such as a syringe.

[1153] In certain embodiments, said surgical method comprises the positioning of a GFR-binding compound, a functionalised bioactive carrier, or a pharmaceutical, prophylactic, diagnostic or imaging composition thereof, all as defined herein, inside said injection device for injection into a patient or into a body part of a patient.

[1154] In one example, said medical device comprises titanium and/or PEEK and/or PET and/or hydrogel and/or ceramic. In one particular example, said medical device replaces part of or all of a body part of a patient or subject. In one example, said body part is a malfunctioning or damaged body part such as, for instance, a bone, the skin, the hair scalp, an eye, etc.

### XVI. Pharmaceutical Applications, Uses and Methods

[1155] Some growth factors interact with type I and II growth factor receptors belonging to the serine threonine kinase family. Conventionally, to mediate signaling pathways, growth factors interact with these receptors by forming specific dimeric or oligomeric structures. The type-II receptor, which is constitutively active, phosphorylates the type-I receptor, which then activates the transduction pathway Smad1/5/8. Receptors of both types are thus conventionally needed to form a functional complex in order to initiate further signaling events. Phosphorylated Smads then dissociate from the receptors and bind Smad4, a common mediator, leading to nuclear translocation, regulation of specific genes, and eventually may induce tissue regeneration.

[1156] Prior in-vitro and in-vivo scientific studies have reported that influencing the natural/conventional biology of human mesenchymal stem cells using exogenous entity or molecules such as recombinant growth factor proteins or peptide fragments thereof, may have an effect on cell differentiation and tissue regeneration. A (modified) GFR-binding compound or a functionalised bioactive carrier of the present disclosure may be one such exogenous entity or molecule.

[1157] For example, in certain embodiments, medical treatments may demonstrate the effect of the influence of an exogenous entity or molecule on human mesenchymal stem cells using a medical device onto or into which such an exogenous entity or molecule has been reversibly or irreversibly incorporated or deposited, both being equally preferred, and placed into a patient in need thereof.

[1158] In one example, medical treatments may provide the effect of the influence of an exogenous entity or molecule on human mesenchymal stem cells using a pharmaceutical composition containing such an exogenous entity or molecule and a pharmaceutically acceptable excipient or carrier, administered, for instance, orally, enterically, intravenously, peritoneally, subcutaneously, transdermally, parenterally, or rectally, to a patient in need of such a treatment.

[1159] As already stated herein, for in-vivo administration, compounds or compositions of the present invention may be injected at a target site so that they can be delivered in close proximity to the cells to be treated via, e.g. a PTD or cell-permeable peptide. Alternately, an implant (or medical device or implantable medical device) comprising a PTD/GFR-binding compound complex may be used.

[1160] The present invention generally provides for uses and methods of inducing mesenchymal stem cell or progenitor cell (at any stage of differentiation) differentiation and/or inducing, promoting, enhancing, controlling or regulating tissue regeneration/formation in-vitro, ex-vivo and in-vivo.

[1161] Conveniently, such a tissue formation process is generally achieved within less than 7 days. In particular, such a tissue formation process is generally achieved within less than 6 days. In particular, such a tissue formation process is generally achieved within less than 5 days. In particular, such a tissue formation process is generally achieved within less than 4 days. In particular, such a tissue formation process is generally achieved within less than 3 days. In particular, such a tissue formation process is generally achieved within less than 2 days. In particular, such a tissue formation process is generally achieved within less than 24 hours. In particular, such a tissue formation process is generally achieved within less than 18 hours.

[1162] In one aspect, the present disclosure provides a pharmaceutical (therapeutic, dermatologic, ophthalmologic, diagnostic, etc.) composition as defined herein for use in a method of non-mutagenically inducing tissue formation i.e. without modifying or altering the genome of the treated cells, in-vitro, ex-vivo or in-vivo. Also provided is a method of inducing tissue formation i.e. without modifying or altering the genome of the treated cells, comprising the in-vitro, ex-vivo or in-vivo administration of an effective amount of a (modified) GFR-binding compound, a functionalised bioactive carrier, or a pharmaceutical (therapeutic, dermatologic, ophthalmologic, diagnostic, etc.) composition as defined herein.

[1163] In one aspect, the present disclosure provides a pharmaceutical (therapeutic, dermatologic, ophthalmologic, diagnostic, etc.) composition as defined herein for use in a method of extracellular induction of tissue formation. Also provided is a method of extracellular tissue formation induction, comprising the in-vitro, ex-vivo or in-vivo administration of an effective amount of a (modified) GFR-binding compound, a functionalised bioactive carrier, or a pharmaceutical (therapeutic, dermatologic, ophthalmologic, diagnostic, etc.) composition as defined herein.

[1164] An extracellular treatment as used herein implies a biological action/effect to be provided or to occur outside the cell to be treated (i.e. a mesenchymal stem cell). In other words, the biologically active agent (e.g. the GFR-binding compound or the pharmaceutical composition as defined herein) delivers/provides its biological/pharmaceutical effect to the outside of the cell (e.g. on the cell's surface) without the need to penetrate through the cell membrane, inside the cell to be treated. Once the extracellular action/effect has been administered/delivered to the cell to be treated, said active agent may be, for instance, excreted from the host organism with or without being metabolised, and/or tagged to be destroyed through apoptotic routes, and/or internalised by nearby cells, etc.

[1165] In one aspect, the present disclosure provides a method of producing a physiologically functional and healthy cell, comprising the administration in-vitro, ex-vivo or in-vivo to a mesenchymal stem cell or progenitor cell (at any stage of differentiation) of an effective amount of a (modified) GFR-binding compound, a functionalised bioactive carrier, or a pharmaceutical (therapeutic, dermatologic, ophthalmologic, diagnostic, etc.) composition as defined herein and wherein said physiologically functional and healthy cell is selected from the group consisting of an osteoblast, osteocyte, chondroblast, chondrocyte, neuroblast, neurocyte, Sertoli cells, Leydig cell, Germ cell, Myoblast, Myocyte, keratinocyte, endothelial cells, angioblast, fibroblast, fibrocyte, podocyte, areolar connective cells, adipocytes, pre-adipocytes/lipoblasts, epithelial cells, erythrocytes, alveolar cells, hematopoietic stem cells (HSC), myeloid progenitors, lymphoid progenitors, mast cells, myeloblasts, monocytes, macrophages, neutrophils, basophils, eosinophils, erythrocytes, megakaryocytes, thrombocytes, dendritic cells, small lymphocytes, T-lymphocytes (T-cells), B-lymphocytes (B-cells), and natural killer (NK)-cells.

[1166] In one aspect, the present disclosure provides methods to activate a growth factor receptor present on the surface of a mesenchymal stem cell or progenitor cell (at any stage of differentiation), said method comprising administering to said mesenchymal stem cell or progenitor cell (at any stage of differentiation) an effective amount of a (modified) GFR-binding compound, a functionalised bioactive carrier, or a pharmaceutical (therapeutic, dermatologic, ophthalmologic, diagnostic, etc.) composition as defined herein, wherein administering said GFR-binding compound, a functionalised bioactive carrier, or a pharmaceutical (therapeutic, dermatologic, ophthalmologic, diagnostic, etc.) composition as defined herein activates the growth factor receptor present on the surface of the mesenchymal stem cell or progenitor cell (at any stage of differentiation).

[1167] In one aspect, the present disclosure provides methods of delivering a (modified) GFR-binding compound, a functionalised bioactive carrier, or a pharmaceutical (therapeutic, dermatologic, ophthalmologic, diagnostic, etc.) composition, all as defined herein, in-vitro, ex-vivo or in-vivo to a mesenchymal stem cell or progenitor cell (at any stage of differentiation), comprising the contacting of said mesenchymal stem cell or progenitor cell (at any stage of differentiation) with said (modified) GFR-binding compound, a functionalised bioactive carrier, or a pharmaceutical (therapeutic, dermatologic, ophthalmologic, diagnostic, etc.) composition.

[1168] In one aspect, the present disclosure provides methods of administering a (modified) GFR-binding compound, a functionalised bioactive carrier, or a pharmaceutical (therapeutic, dermatologic, ophthalmologic, diagnostic, etc.) composition, all as defined herein, to a patient or subject comprising the contacting of at least one body part of said patient or subject with said (modified) GFR-binding compound, a functionalised bioactive carrier, or a pharmaceutical (therapeutic, dermatologic, ophthalmologic, diagnostic, etc.) composition.

[1169] In one example, the (modified) GFR-binding compound, functionalised bioactive carrier, or pharmaceutical (therapeutic, dermatologic, ophthalmologic, diagnostic, etc.) composition, all as defined herein, may be a mammal (preferably a human) tissue-inductive compound, bioactive carrier or composition, which has demonstrated the ability to induce tissue formation in vitro and/or in vivo.

[1170] In one aspect, the present disclosure provides an effective amount of at least one (modified) GFR-binding compound, at least one functionalised bioactive carrier, or at least one pharmaceutical (therapeutic, dermatologic, ophthalmologic, diagnostic, etc.) composition, all as defined herein, for use in a medical method such as in therapy, surgery or in diagnostic methods.

[1171] In one aspect, the present disclosure provides a method of inducing or promoting or enhancing mesenchymal stem cell or progenitor cell (at any stage of differentiation) differentiation, the method comprising administering to the cell an effective amount of at least one (modified) GFR-binding compound, at least one functionalised bioactive carrier, or at least one pharmaceutical (therapeutic, dermatologic, ophthalmologic, diagnostic, etc.) composition, all as defined herein. In one aspect, the present invention discloses an effective amount of at least one (modified) GFR-binding compound, at least one functionalised bioactive carrier, or at least one pharmaceutical (therapeutic, dermatologic, ophthalmologic, diagnostic, etc.) composition, all as defined herein, for use in a method of inducing or promoting or enhancing mesenchymal stem cell or progenitor cell (at any stage of differentiation) differentiation

[1172] In one aspect, the present disclosure provides a method of inducing or promoting or enhancing or controlling or regulating tissue regeneration/formation, the method comprising administering to a mesenchymal stem cell or to a progenitor cell at any stage of differentiation or to a mature cell an effective amount of at least one (modified) GFR-binding compound, at least one functionalised bioactive carrier, or at least one pharmaceutical (therapeutic, dermatologic, ophthalmologic, diagnostic, etc.) composition, all as defined herein. In one aspect, the present invention discloses an effective amount of at least one (modified) GFR-binding compound, at least one functionalised bioactive carrier, or at least one pharmaceutical (therapeutic, dermatologic, ophthalmologic, diagnostic, etc.) composition, all as defined herein, for use in a method of inducing or promoting or enhancing or controlling or regulating tissue regeneration/formation.

[1173] In one aspect, the present disclosure provides a method of inducing and/or promoting and/or enhancing cell motility or single/collective cell migration, the method comprising administering to a mesenchymal stem cell or to a progenitor cell at any stage of differentiation or to a mature cell an effective amount of at least one (modified) GFR-binding compound, at least one functionalised bioactive carrier, or at least one pharmaceutical (therapeutic, dermatologic, ophthalmologic, diagnostic, etc.) composition, all as defined herein. In one aspect, the present invention discloses an effective amount of at least one (modified) GFR-binding compound, at least one functionalised bioactive carrier, or at least one pharmaceutical (therapeutic, dermatologic, ophthalmologic, diagnostic, etc.) composition, all as defined herein, for use in a method of inducing and/or promoting and/or enhancing cell motility or single/collective cell migration.

[1174] In one aspect, the present invention discloses a method of inducing and/or promoting and/or enhancing cell maturation, the method comprising administering to a differentiated cell or to a mature cell an effective amount of at least one (modified) GFR-binding compound, at least one functionalised bioactive carrier, or at least one pharmaceutical (therapeutic, dermatologic, ophthalmologic, diagnostic, etc.) composition, all as defined herein. In one aspect, the present invention discloses an effective amount of at least one (modified) GFR-binding compound, at least one functionalised bioactive carrier, or at least one pharmaceutical (therapeutic, dermatologic, ophthalmologic, diagnostic, etc.) composition, all as defined herein, for use in a method of inducing and/or promoting and/or enhancing cell maturation.

[1175] In one example, the (modified) GFR-binding compound, functionalised bioactive carrier, or pharmaceutical (therapeutic, dermatologic, ophthalmologic, diagnostic, etc.) composition, all as defined herein, may be combined/mixed with adult stem cells and/or multipotent progenitor cells prior to be administered or implanted into a mammal (preferably a human) to promote tissue regeneration.

[1176] In one example, the (modified) GFR-binding compound, functionalised bioactive carrier, or pharmaceutical (therapeutic, dermatologic, ophthalmologic, diagnostic, etc.) composition, all as defined herein, may be administered as such and may be combined/mixed with adult stem cells and/or multipotent progenitor cells prior to administration to a mammal (preferably a human) to promote tissue regeneration.

[1177] In particular, medical applications which may result from the mediation of type I and II growth factor receptors by a (modified) GFR-binding compound, functionalised bioactive carrier, or pharmaceutical (therapeutic, dermatologic, ophthalmologic, diagnostic, etc.) composition, all as defined herein, include, but are not limited to, enhancing of osteogenesis, inducing bone formation, inducing osteocyte maturation, and/or treating and/or preventing osteoporosis.

[1178] In one example, a (modified) GFR-binding compound, functionalised bioactive carrier, or pharmaceutical (therapeutic, dermatologic, ophthalmologic, diagnostic, etc.) composition, all as defined herein, may thus be an osteoinductive compound, bioactive carrier or composition which has demonstrated an ability to induce bone formation in vitro and/or ex-vivo and/or in vivo.

[1179] In one aspect, the present disclosure thus provides:
[1180] a method of inducing or promoting or enhancing mesenchymal stem cell, progenitor osteoblast (at any stage of differentiation of the Osteoblast cell lineage) differentiation, the method comprising administering to the cell an effective amount of at least one (modified) GFR-binding compound, at least one functionalised bioactive carrier, or at least one pharmaceutical composition, all as defined herein;
[1181] a method of inducing or promoting or enhancing or controlling or regulating bone tissue regeneration/formation, the method comprising administering to a mesenchymal stem cell or to a progenitor osteoblast at any stage of differentiation of the osteoblast cell lineage or to a mature osteoblast, an effective amount of at least one (modified) GFR-binding compound, at least one functionalised bioactive carrier, or at least one pharmaceutical composition, all as defined herein;
[1182] a method of inducing and/or promoting and/or enhancing osteocyte maturation, the method comprising administering to a differentiated osteoblast or to a mature osteoblast (e.g. an osteocyte) an effective amount of at least one (modified) GFR-binding compound, at least one functionalised bioactive carrier, or at least one pharmaceutical composition, all as defined herein;
[1183] an effective amount of at least one (modified) GFR-binding compound, at least one functionalised bioactive carrier, or at least one pharmaceutical composition, all as defined herein for use in a method of inducing or promoting or enhancing mesenchymal stem cell or progenitor osteoblast (at any stage of differentiation of the osteoblast cell lineage) differentiation;
[1184] an effective amount of at least one (modified) GFR-binding compound, at least one functionalised bioactive carrier, or at least one pharmaceutical composition, all as defined herein for use in a method of inducing or promoting or enhancing or controlling or regulating bone tissue regeneration/formation;
[1185] an effective amount of at least one (modified) GFR-binding compound, at least one functionalised bioactive carrier, or at least one pharmaceutical composition, all as defined herein for use in a method of inducing and/or promoting and/or enhancing osteoblast maturation.

[1186] In particular, medical applications which may result from the mediation of type I and II growth factor receptors by a (modified) GFR-binding compound, functionalised bioactive carrier, or pharmaceutical (therapeutic, dermatologic, ophthalmologic, diagnostic, etc.) composition, all as defined herein, include, but are not limited to, enhancing of chondrogenesis and/or inducing cartilage formation, and/or inducing chondrocyte maturation and/or treating and/or preventing at least one of osteoarthritis, costochondritis, Herniation, achondroplasia or relapsing polychondritis.

[1187] In one example, a (modified) GFR-binding compound, functionalised bioactive carrier, or pharmaceutical (therapeutic, dermatologic, ophthalmologic, diagnostic, etc.) composition, all as defined herein, may be a chondroinductive compound, bioactive carrier or composition which has demonstrated the ability to induce cartilage formation in vitro and/or ex-vivo and/or in vivo.

[1188] In one aspect, the present disclosure thus provides:
[1189] a method of inducing or promoting or enhancing mesenchymal stem cell, progenitor chondroblast (at any stage of differentiation of the chondrocytic cell lineage) differentiation, the method comprising administering to the cell an effective amount of at least one (modified) GFR-binding compound, at least one functionalised bioactive carrier, or at least one pharmaceutical composition, all as defined herein;
[1190] a method of inducing or promoting or enhancing or controlling or regulating cartilage tissue regeneration/formation, the method comprising administering to a mesenchymal stem cell or to a progenitor chondroblast (at any stage of differentiation of the chondrocytic cell lineage) or to a mature chondroblast, an effective amount of at least one (modified) GFR-binding compound, at least one functionalised bioactive carrier, or at least one pharmaceutical composition, all as defined herein;
[1191] a method of inducing and/or promoting and/or enhancing chondrocyte maturation, the method comprising administering to a differentiated chondroblast or to a mature osteoblast (e.g. a chondrocyte) an effective amount of at least one GFR-binding compound, at least one functionalised bioactive carrier, or at least one pharmaceutical composition, all as defined herein;
[1192] an effective amount of at least one (modified) GFR-binding compound, at least one functionalised bioactive carrier, or at least one pharmaceutical composition, all as defined herein for use in a method of inducing or promoting or enhancing mesenchymal stem cell or progenitor chondroblast (at any stage of differentiation of the chondrocytic cell lineage) differentiation;
[1193] an effective amount of at least one (modified) GFR-binding compound, at least one functionalised bioactive carrier, or at least one pharmaceutical composition, all as defined herein for use in a method of inducing or promoting or enhancing or controlling or regulating cartilage tissue regeneration/formation;
[1194] an effective amount of at least one (modified) GFR-binding compound, at least one functionalised bioactive carrier, or at least one pharmaceutical composition, all as defined herein for use in a method of inducing and/or promoting and/or enhancing chondroblast maturation.

[1195] In particular, medical applications which may result from the mediation of type I and II growth factor receptors by a GFR-binding compound, functionalised bioactive carrier, or pharmaceutical (therapeutic, dermatologic, ophthalmologic, diagnostic, etc.) composition, all as defined herein, include, but are not limited to, enhancing of endothelization and/or vascularization/angiogenesis and/or treating and/or preventing at least one of coronary artery disease (also known as coronary heart disease and ischemic heart disease), cardiomyopathy, hypertensive heart disease, heart failure, cor pulmonale, cardiac dysrhythmias, inflammatory heart disease, endocarditis, inflammatory cardiomegaly, myocarditis, valvular heart disease, cerebrovascular disease, peripheral arterial disease, congenital heart disease, or rheumatic heart disease.

[1196] In one example, a GFR-binding compound, functionalised bioactive carrier, or pharmaceutical (therapeutic, dermatologic, ophthalmologic, diagnostic, etc.) composition, all as defined herein, may be an endothelization/vascularization/angiogenesis -promoting compound, bioactive carrier or composition which has demonstrated the ability to induce vascular tissue formation in vitro and/or ex-vivo and/or in vivo.

[1197] In one aspect, the present disclosure thus provides:
[1198] a method of inducing or promoting or enhancing mesenchymal stem cell, progenitor endothelial cell (at any stage of differentiation of the vascular cell lineage) differentiation, the method comprising administering to the cell an effective amount of at least one (modified) GFR-binding compound, at least one functionalised bioactive carrier, or at least one pharmaceutical composition, all as defined herein;
[1199] a method of inducing or promoting or enhancing or controlling or regulating vascular tissue regeneration/formation and/or tubular formation, the method comprising administering to a mesenchymal stem cell or to a progenitor endothelial cell at any stage of differentiation of the vascular cell lineage or to a mature endothelial cell, an effective amount of at least one (modified) GFR-binding compound, at least one functionalised bioactive carrier, or at least one pharmaceutical composition, all as defined herein;
[1200] a method of inducing and/or promoting and/or enhancing cell motility or single/collective endothelial cell migration and/or angiogenesis, the method comprising administering to a mesenchymal stem cell or to a progenitor endothelial cell at any stage of differentiation of the vascular cell lineage or to a mature endothelial cell an effective amount of at least one (modified) GFR-binding compound, at least one functionalised bioactive carrier, or at least one pharmaceutical composition, all as defined herein.
[1201] a method of inducing and/or promoting and/or enhancing endothelial cell maturation, the method comprising administering to a differentiated endothelial cell or to a mature endothelial cell an effective amount of at least one (modified) GFR-binding compound, at least one functionalised bioactive carrier, or at least one pharmaceutical composition, all as defined herein;
[1202] an effective amount of at least one (modified) GFR-binding compound, at least one functionalised bioactive carrier, or at least one pharmaceutical composition, all as defined herein for use in a method of inducing or promoting or enhancing mesenchymal stem cell, progenitor endothelial cell (at any stage of differentiation of the vascular cell lineage) differentiation;
[1203] an effective amount of at least one (modified) GFR-binding compound, at least one functionalised bioactive carrier, or at least one pharmaceutical composition, all as defined herein for use in a method of inducing or promoting or enhancing or controlling or regulating vascular tissue regeneration/formation and/or tubular formation;
[1204] an effective amount of at least one (modified) GFR-binding compound, at least one functionalised bioactive carrier, or at least one pharmaceutical composition, all as defined herein for use in a method of inducing and/or promoting and/or enhancing cell motility or single/collective endothelial cell migration and/or angiogenesis,
[1205] an effective amount of at least one (modified) GFR-binding compound, at least one functionalised bioactive carrier, or at least one pharmaceutical composition, all as defined herein for use in a method of inducing and/or promoting and/or enhancing endothelial cell maturation.

[1206] In particular, medical applications which may result from the mediation of type I and II growth factor receptors by a GFR-binding compound, functionalised bioactive carrier, or pharmaceutical (therapeutic, dermatologic, ophthalmologic, diagnostic, etc.) composition, all as defined herein, include, but are not limited to, enhancing axonal dendritic neuron growth thus promoting neuron-regeneration and/or treating and/or preventing and/or decreasing or suppressing neuron degeneration-related conditions and diseases.

[1207] In the present description and unless otherwise indicated, the term “neuron-regeneration” or “neuroregeneration” means the regrowth or repair of nervous tissues, cells or cell products involving the participation of stem cells. Such mechanisms may include generation of new neurons, glia, axons, myelin, or synapses. Neurological disorders in which the present invention may thus be useful include, but are not limited to, ALS, Agraphia Alzheimer's disease, Amyotrophic lateral sclerosis, Angle man syndrome, Aphasia Apraxia, Arachnoiditis, Ataxia Telangiectasia, Attention deficit hyperactivity disorder, Auditory processing disorder, Autism, Alcoholism, asperger's syndrome, Bipolar disorder, Bell's palsy, Brachial plexus injury, Brain damage, Brain injury, Canavan disease, Capgras delusion, Causalgia, Central pain syndrome, Central pontine myelinolysis, Centronuclear myopathy, Cephalic disorder, Cerebral aneurysm, Cerebral arteriosclerosis, Cerebral atrophy, Cerebral gigantism, Cerebral palsy, Cerebral vasculitis, Cervical spinal stenosis, Charcot-Marie-Tooth disease, Chiari malformation, Chorea, Chronic fatigue syndrome, Chronic inflammatory demyelinating polyneuropathy (CIDP), Chronic pain, Coffin-Lowry syndrome, Coma, Complex regional pain syndrome, Compression neuropathy, Congenital facial diplegia, Corticobasal degeneration, Cranial arteritis, Craniosynostosis, Creutzfeldt-Jakob disease, Cumulative trauma disorders, Cushing's syndrome, Cytomegalic inclusion body disease (CIBD), Cytomegalovirus Infection, Dandy-Walker syndrome, Dawson disease, De Morsier's syndrome, Dejerine-Klumpke palsy, Dejerine-Sottas disease, Delayed sleep phase syndrome, Dementia, Dermatomyositis, Developmental coordination disorder, Diabetic neuropathy, Diffuse sclerosis, Downs syndrome, Dravet syndrome, Dysautonomia, Dyscalculia, Dysgraphia, Dyslexia, Dystonia, Empty sella syndrome, Encephalitis, Encephalocele, Encephalotrigeminal angiomatosis, Encopresis, Epilepsy, Erb's palsy, Erythromelalgia, Essential tremor, Fabry's disease, Fahr's syndrome, Fainting, Familial spastic paralysis, Febrile seizures, Fisher syndrome, Friedreich's ataxia, Fibromyalgia, Foville's syndrome, Fetal alcohol syndrome, Fragile X Tremor Ataxia Syndrome, Gaucher's disease, Gerstmann's syndrome, Giant cell arteritis, Giant cell inclusion disease, Globoid Cell Leukodystrophy, Gray matter heterotopia, Guillain-Barré syndrome, HTLV-1 associated myelopathy, Hallervorden-Spatz disease, Head injury, Headache, Hemifacial Spasm, Hereditary Spastic Paraplegia, Heredopathia atactica polyneuritiformis, Herpes zoster oticus, Herpes zoster, Hirayama syndrome, Holoprosencephaly, Huntington's disease, Hydranencephaly, Hydrocephalus, Hypercortisolism, Hypoxia, Immune-Mediated encephalomyelitis, Inclusion body myositis, Incontinentia pigmenti, Infantile Refsum disease, Infantile spasms, Inflammatory myopathy, Intracranial cyst, Intracranial hypertension, Joubert syndrome, Karak syndrome, Kearns-Sayre syndrome, Kennedy disease, Kinsbourne syndrome, Kleine-Levin Syndrome, Klippel Feil syndrome, Krabbe disease, Kugelberg-Welander disease, Lafora disease, Lambert-Eaton myasthenic syndrome, Landau-Kleffner syndrome, Lateral medullary (Wallenberg) syndrome, Learning disabilities, Leigh's disease, Lennox-Gastaut syndrome, Lesch-Nyhan syndrome, Leukodystrophy, Lewy body dementia, Lissencephaly, Locked-In syndrome, Lou Gehrig's disease (See amyotrophic lateral sclerosis), Lumbar disc disease, Lumbar spinal stenosis, Lyme disease—Neurological Sequelae, Machado-Joseph disease (Spinocerebellar ataxia type 3), Macrencephaly, Macropsia, Megalencephaly, Melkersson-Rosenthal syndrome, Menieres disease, Meningitis, Menkes disease, Metachromatic leukodystrophy, Microcephaly, Micropsia, Migraine, Miller Fisher syndrome, Mini-stroke (transient ischemic attack), Misophonia, Mitochondrial myopathy, Mobius syndrome, Monomelic amyotrophy, Motor Neurone Disease—see amyotrophic lateral sclerosis, Motor skills disorder, Moyamoya disease, Mucopolysaccharidoses, Multi-infarct dementia, Multifocal motor neuropathy, Multiple sclerosis, Multiple system atrophy, Muscular dystrophy, Myalgic encephalomyelitis, Myasthenia gravis, Myelinoclastic diffuse sclerosis, Myoclonic Encephalopathy of infants, Myoclonus, Myopathy, Myotubular myopathy, Myotonia congenital, Narcolepsy, Neuro-Behget's disease, Neurofibromatosis, Neuroleptic malignant syndrome, Neurological manifestations of AIDS, Neurological sequelae of lupus, Neuromyotonia, Neuronal ceroid lipofuscinosis, Neuronal migration disorders, Neuropathy, Neurosis, Niemann-Pick disease, Non-24-hour sleep-wake disorder, Nonverbal learning disorder, O'Sullivan-McLeod syndrome, Occipital Neuralgia, Occult Spinal Dysraphism Sequence, Ohtahara syndrome, Olivopontocerebellar atrophy, Opsoclonus myoclonus syndrome, Optic neuritis, Orthostatic Hypotension, Otosclerosis, Overuse syndrome, Palinopsia, Paresthesia, Parkinson's disease, Paramyotonia Congenita, Paroxysmal attacks, Parry-Romberg syndrome, Pelizaeus-Merzbacher disease, Periodic Paralyses, Peripheral neuropathy, Pervasive developmental disorders, Photic sneeze reflex, Phytanic acid storage disease, Pick's disease, Pinched nerve, PMG, Polyneuropathy, Polio, Polymicrogyria, Polymyositis, Porencephaly, Post-Polio syndrome, Postherpetic Neuralgia (PHN), Postural Hypotension, Prader-Willi syndrome, Primary Lateral Sclerosis, Prion diseases, Progressive hemifacial atrophy, Progressive multifocal leukoencephalopathy, Progressive Supranuclear Palsy, Quadriplegia, Rabies, Ramsay Hunt syndrome type I, Ramsay Hunt syndrome type II, Ramsay Hunt syndrome type III, Rasmussen's encephalitis, Reflex neurovascular dystrophy, Refsum disease, Repetitive stress injury, Restless legs syndrome, Retrovirus-associated myelopathy, Rett syndrome, Reye's syndrome, Rhythmic Movement Disorder, Romberg syndrome, Saint Vitus dance, Sandhoff disease, Schizencephaly, Sensory processing disorder, Septo-optic dysplasia, Shaken baby syndrome, Shingles, Shy-Drager syndrome, Sjigren's syndrome, Sleep apnea, Sleeping sickness, Snatiation, Sotos syndrome, Spasticity, Spina bifida, Spinal cord injury, Spinal muscular atrophy, Spinocerebellar ataxia, Split-brain, Steele-Richardson-Olszewski syndrome, Stiff-person syndrome, Stroke, Sturge-Weber syndrome, Subacute sclerosing panencephalitis, Subcortical arteriosclerotic encephalopathy, Superficial siderosis, Sydenham's chorea, Syncope, Synesthesia, Syringomyelia, Tarsal tunnel syndrome, Tardive dyskinesia, Tardive dysphrenia, Tarlov cyst, Tay-Sachs disease, Temporal arteritis, Tetanus, Tethered spinal cord syndrome, Thomsen disease, Thoracic outlet syndrome, Tic Douloureux, Todd's paralysis, Tourette syndrome, Toxic encephalopathy, Transient ischemic attack, Transmissible spongiform encephalopathies, Transverse myelitis, Traumatic brain injury, Tremor, Trigeminal neuralgia, Tropical spastic paraparesis, Trypanosomiasis, Tuberous sclerosis, Ubisiosis, Von Hippel-Lindau disease (VHL), Viliuisk Encephalomyelitis (VE), Wallenberg's syndrome, Werdnig-Hoffman disease, West syndrome, Whiplash, Williams syndrome, Wilson's disease and Zellweger syndrome.

[1208] In one example, a GFR-binding compound, functionalised bioactive carrier, or pharmaceutical (therapeutic, dermatologic, ophthalmologic, diagnostic, etc.) composition, all as defined herein, may be a neuroregenerative or neurodegeneration regulator/modulator/inhibitor compound, bioactive carrier or composition which has demonstrated the ability to induce neuroregeneration and/or prevention, decrease or suppression of neuron degeneration in vitro and/or ex-vivo and/or in vivo.

[1209] In one aspect, the present disclosure thus provides:
[1210] a method of inducing or promoting or enhancing mesenchymal stem cell, progenitor neuronal cell (at any stage of differentiation of the neuronal cell lineage) differentiation, the method comprising administering to the cell an effective amount of at least one (modified) GFR-binding compound, at least one functionalised bioactive carrier, or at least one pharmaceutical composition, all as defined herein;
[1211] a method of inducing or promoting or enhancing or controlling or regulating neuron regeneration/formation, the method comprising administering to a mesenchymal stem cell or to a progenitor neuronal cell at any stage of differentiation of the neuronal cell lineage or to a mature neuron, an effective amount of at least one (modified) GFR-binding compound, at least one functionalised bioactive carrier, or at least one pharmaceutical composition, all as defined herein;
[1212] a method of inducing and/or promoting and/or enhancing neuronal cell maturation, the method comprising administering to a differentiated neuronal cell or to a mature neuronal cell an effective amount of at least one (modified) GFR-binding compound, at least one functionalised bioactive carrier, or at least one pharmaceutical composition, all as defined herein;
[1213] an effective amount of at least one (modified) GFR-binding compound, at least one functionalised bioactive carrier, or at least one pharmaceutical composition, all as defined herein for use in a method of inducing or promoting or enhancing mesenchymal stem cell or progenitor neuronal cell (at any stage of differentiation of the neuronal cell lineage) differentiation;
[1214] an effective amount of at least one (modified) GFR-binding compound, at least one functionalised bioactive carrier, or at least one pharmaceutical composition, all as defined herein for use in a method of inducing or promoting or enhancing or controlling or regulating neuron regeneration/formation;
[1215] an effective amount of at least one (modified) GFR-binding compound, at least one functionalised bioactive carrier, or at least one pharmaceutical composition, all as defined herein for use in a method of inducing and/or promoting and/or enhancing neuronal cell maturation.

[1216] In particular, medical applications which may result from the mediation of type I and II growth factor receptors by a GFR-binding compound, functionalised bioactive carrier, or pharmaceutical (therapeutic, dermatologic, ophthalmologic, diagnostic, etc.) composition, all as defined herein, include, but are not limited to, enhancing/promoting eye retina cell regeneration and/or treating and/or preventing and/or decreasing or suppressing eye retina cell degeneration-related conditions or diseases.

[1217] Eye-related diseases or disorders in which the present invention may thus be useful include, but are not limited to, Focal chorioretinal inflammation Focal such chorioretinitis, choroiditis, retinitis and retinochoroiditis, Disseminated chorioretinal inflammation, Posterior cyclitis, Harada's disease, Chorioretinal scars such as Macula scars of posterior pole and Solar retinopathy, Choroidal degeneration such as Atrophy and Sclerosis, Hereditary choroidal dystrophy such as Choroideremia, Gyrate atrophy, Choroidal haemorrhage, Choroidal detachment, Chorioretinitis, Retinal detachment, Retinoschisis, Retinal vascular occlusions, Hypertensive retinopathy, Diabetic retinopathy, Retinopathy, Retinopathy of prematurity, Age-related macular degeneration, Macular degeneration, Epiretinal membrane, Peripheral retinal degeneration, Hereditary retinal dystrophy, Retinitis pigmentosa, Retinal haemorrhage, Central serous retinopathy, Retinal detachment and Macular edema.

[1218] In one example, a GFR-binding compound, functionalised bioactive carrier, or pharmaceutical (therapeutic, dermatologic, ophthalmologic, diagnostic, etc.) composition, all as defined herein, may be an eye tissue-regenerative or eye tissue-degeneration regulator/modulator/inhibitor compound, bioactive carrier or composition which has demonstrated the ability to induce eye retina cell regeneration and/or prevent and/or decrease or suppress eye retina cell degeneration in vitro and/or ex-vivo and/or in vivo.

[1219] In one aspect, the present disclosure thus provides:
[1220] a method of inducing or promoting or enhancing mesenchymal stem cell, progenitor eye retina cell (at any stage of differentiation of the retinal cell lineage) differentiation, the method comprising administering to the cell an effective amount of at least one (modified) GFR-binding compound, at least one functionalised bioactive carrier, or at least one pharmaceutical composition, all as defined herein;
[1221] a method of inducing or promoting or enhancing or controlling or regulating eye retina cell regeneration/formation, the method comprising administering to a mesenchymal stem cell or to a progenitor eye retina cell at any stage of differentiation of the retinal cell lineage or to a mature eye retina cell, an effective amount of at least one (modified) GFR-binding compound, at least one functionalised bioactive carrier, or at least one pharmaceutical composition, all as defined herein;
[1222] a method of inducing and/or promoting and/or enhancing eye retina cell maturation, the method comprising administering to a differentiated eye retina cell or to a mature eye retina cell an effective amount of at least one (modified) GFR-binding compound, at least one functionalised bioactive carrier, or at least one pharmaceutical composition, all as defined herein;
[1223] an effective amount of at least one (modified) GFR-binding compound, at least one functionalised bioactive carrier, or at least one pharmaceutical composition, all as defined herein for use in a method of inducing or promoting or enhancing mesenchymal stem cell or progenitor eye retina cell (at any stage of differentiation of the retinal cell lineage) differentiation;
[1224] an effective amount of at least one (modified) GFR-binding compound, at least one functionalised bioactive carrier, or at least one pharmaceutical composition, all as defined herein for use in a method of inducing or promoting or enhancing or controlling or regulating eye retina cell regeneration/formation;
[1225] an effective amount of at least one (modified) GFR-binding compound, at least one functionalised bioactive carrier, or at least one pharmaceutical composition, all as defined herein for use in a method of inducing and/or promoting and/or enhancing eye retina cell maturation.

[1226] In particular, medical applications which may result from the mediation of type I and II growth factor receptors by a GFR-binding compound, functionalised bioactive carrier, or pharmaceutical (therapeutic, dermatologic, ophthalmologic, diagnostic, etc.) composition, all as defined herein, include, but are not limited to, enhancing/promoting renal functions such as enhancing/improving waste removal, body's fluid balance control and electrolytes balance control and/or preventing/treating kidneys failure and/or chronic kidney disease (CKD) and/or renal fibrosis.

[1227] In one example, a GFR-binding compound, functionalised bioactive carrier, or pharmaceutical (therapeutic, dermatologic, ophthalmologic, diagnostic, etc.) composition, all as defined herein, may be a kidneys-function enhancing compound, bioactive carrier or composition which has demonstrated the ability to promote/improve kidneys functions and/or preventing/treating kidneys failure and/or chronic kidney disease (CKD) and/or renal fibrosis in vitro and/or ex-vivo and/or in vivo.

[1228] In one aspect, the present disclosure thus provides:
[1229] a method of inducing or promoting or enhancing mesenchymal stem cell, progenitor renal cell (at any stage of differentiation of the renal cell lineage) differentiation, the method comprising administering to the cell an effective amount of at least one (modified) GFR-binding compound, at least one functionalised bioactive carrier, or at least one pharmaceutical composition, all as defined herein;
[1230] a method of inducing or promoting or enhancing or controlling or regulating renal cell regeneration/formation, the method comprising administering to a mesenchymal stem cell or to a progenitor renal cell at any stage of differentiation of the renal cell lineage or to a mature renal cell, an effective amount of at least one (modified) GFR-binding compound, at least one functionalised bioactive carrier, or at least one pharmaceutical composition, all as defined herein;
[1231] a method of inducing and/or promoting and/or enhancing renal cell maturation, the method comprising administering to a differentiated renal cell or to a mature renal cell an effective amount of at least one (modified) GFR-binding compound, at least one functionalised bioactive carrier, or at least one pharmaceutical composition, all as defined herein;
[1232] an effective amount of at least one (modified) GFR-binding compound, at least one functionalised bioactive carrier, or at least one pharmaceutical composition, all as defined herein for use in a method of inducing or promoting or enhancing mesenchymal stem cell or progenitor renal cell (at any stage of differentiation of the renal cell lineage) differentiation;
[1233] an effective amount of at least one (modified) GFR-binding compound, at least one functionalised bioactive carrier, or at least one pharmaceutical composition, all as defined herein for use in a method of inducing or promoting or enhancing or controlling or regulating renal cell regeneration/formation;
[1234] an effective amount of at least one (modified) GFR-binding compound, at least one functionalised bioactive carrier, or at least one pharmaceutical composition, all as defined herein for use in a method of inducing and/or promoting and/or enhancing renal cell maturation.

[1235] In particular, medical applications which may result from the mediation of type I and II growth factor receptors by a GFR-binding compound, functionalised bioactive carrier, or pharmaceutical (therapeutic, dermatologic, ophthalmologic, diagnostic, etc.) composition, all as defined herein, include, but are not limited to, enhancing/promoting fibrous tissue formation and tendon and ligament regeneration and/or preventing and/or decreasing or suppressing tendon/ligament cell degeneration.

[1236] In one example, a GFR-binding compound, functionalised bioactive carrier, or pharmaceutical (therapeutic, dermatologic, ophthalmologic, diagnostic, etc.) composition, all as defined herein, may be a fibrous tissue formation promoting compound, bioactive carrier or composition which has demonstrated the ability to induce fibrous tissue formation in vitro and/or ex-vivo and/or in vivo.

[1237] In one aspect, the present disclosure thus provides:
[1238] a method of inducing or promoting or enhancing mesenchymal stem cell, progenitor tendon/ligament cell (at any stage of differentiation of the T/L cell lineage) differentiation, the method comprising administering to the cell an effective amount of at least one (modified) GFR-binding compound, at least one functionalised bioactive carrier, or at least one pharmaceutical composition, all as defined herein;
[1239] a method of inducing or promoting or enhancing or controlling or regulating tendon/ligament cell regeneration/formation, the method comprising administering to a mesenchymal stem cell or to a progenitor tendon/ligament cell at any stage of differentiation of the T/L cell lineage or to a mature tendon/ligament cell, an effective amount of at least one (modified) GFR-binding compound, at least one functionalised bioactive carrier, or at least one pharmaceutical composition, all as defined herein;
[1240] a method of inducing and/or promoting and/or enhancing tendon/ligament cell maturation, the method comprising administering to a differentiated tendon/ligament cell or to a mature tendon/ligament cell an effective amount of at least one (modified) GFR-binding compound, at least one functionalised bioactive carrier, or at least one pharmaceutical composition, all as defined herein;
[1241] an effective amount of at least one (modified) GFR-binding compound, at least one functionalised bioactive carrier, or at least one pharmaceutical composition, all as defined herein for use in a method of inducing or promoting or enhancing mesenchymal stem cell or progenitor tendon/ligament cell (at any stage of differentiation of the T/L cell lineage) differentiation;
[1242] an effective amount of at least one (modified) GFR-binding compound, at least one functionalised bioactive carrier, or at least one pharmaceutical composition, all as defined herein for use in a method of inducing or promoting or enhancing or controlling or regulating tendon/ligament cell regeneration/formation;
[1243] an effective amount of at least one (modified) GFR-binding compound, at least one functionalised bioactive carrier, or at least one pharmaceutical composition, all as defined herein for use in a method of inducing and/or promoting and/or enhancing tendon/ligament cell maturation.

[1244] In particular, medical applications which may result from the mediation of type I and II growth factor receptors by a GFR-binding compound, functionalised bioactive carrier, or pharmaceutical (therapeutic, dermatologic, ophthalmologic, diagnostic, etc.) composition, all as defined herein, include, but are not limited to, hair follicle tissue regeneration and formation (hair growth), hair follicle stem cell activation (loss of quiescence state) and/or preventing/treating alopecia areata, alopecia totalis, alopecia universalis, androgenic alopecia (male pattern baldness), telogen effluvium, anagen effluvium or chemotherapy-induced alopecia.

[1245] In one example, a GFR-binding compound, functionalised bioactive carrier, or pharmaceutical (therapeutic, dermatologic, ophthalmologic, diagnostic, etc.) composition, all as defined herein, may be a hair follicle growth activation promoting compound, bioactive carrier or composition which has demonstrated the ability to induce hair follicle formation and/or hair follicle stem cell activation in vitro and/or ex-vivo and/or in vivo.

[1246] In one aspect, the present disclosure thus provides:
[1247] a method of inducing or promoting or enhancing mesenchymal stem cell, progenitor hair follicle cell (at any stage of differentiation of the hair follicle cell lineage) differentiation, the method comprising administering to the cell an effective amount of at least one (modified) GFR-binding compound, at least one functionalised bioactive carrier, or at least one pharmaceutical composition, all as defined herein;
[1248] a method of inducing or promoting or enhancing or controlling or regulating hair follicle cell regeneration/formation, the method comprising administering to a mesenchymal stem cell or to a progenitor hair follicle cell at any stage of differentiation of the hair follicle cell lineage or to a mature hair follicle cell, an effective amount of at least one (modified) GFR-binding compound, at least one functionalised bioactive carrier, or at least one pharmaceutical composition, all as defined herein;
[1249] a method of inducing and/or promoting and/or enhancing hair follicle cell maturation, the method comprising administering to a differentiated hair follicle cell or to a mature hair follicle cell an effective amount of at least one (modified) GFR-binding compound, at least one functionalised bioactive carrier, or at least one pharmaceutical composition, all as defined herein;
[1250] a method of activating hair follicle stem cells, the method comprising administering to a quiescent hair follicle stem cell an effective amount of at least one (modified) GFR-binding compound, at least one functionalised bioactive carrier, or at least one pharmaceutical composition, all as defined herein;
[1251] an effective amount of at least one (modified) GFR-binding compound, at least one functionalised bioactive carrier, or at least one pharmaceutical composition, all as defined herein for use in a method of inducing or promoting or enhancing mesenchymal stem cell or progenitor hair follicle cell (at any stage of differentiation of the hair follicle cell lineage) differentiation;
[1252] an effective amount of at least one (modified) GFR-binding compound, at least one functionalised bioactive carrier, or at least one pharmaceutical composition, all as defined herein for use in a method of inducing or promoting or enhancing or controlling or regulating hair follicle cell regeneration/formation;
[1253] an effective amount of at least one (modified) GFR-binding compound, at least one functionalised bioactive carrier, or at least one pharmaceutical composition, all as defined herein for use in a method of inducing and/or promoting and/or enhancing tendon/ligament cell maturation;
[1254] an effective amount of at least one (modified) GFR-binding compound, at least one functionalised bioactive carrier, or at least one pharmaceutical composition, all as defined herein for use in a method of activating hair follicle stem cells.

[1255] In particular, medical applications which may result from the mediation of type I and II growth factor receptors by a GFR-binding compound, functionalised bioactive carrier, or pharmaceutical (therapeutic, dermatologic, ophthalmologic, diagnostic, etc.) composition, all as defined herein, include, but are not limited to, enhancing tissue closure.

[1256] In one example, a GFR-binding compound, functionalised bioactive carrier, or pharmaceutical (therapeutic, dermatologic, ophthalmologic, diagnostic, etc.) composition, all as defined herein, may be a tissue-closure-promoting compound or biomaterial which has demonstrated the ability to induce tissue closure in vitro and/or ex-vivo and/or in vivo.

[1257] In one aspect, the present disclosure thus provides:
[1258] a method of inducing or promoting or enhancing tissue closure, the method comprising administering to an incised/opened tissue an effective amount of at least one (modified) GFR-binding compound, at least one functionalised bioactive carrier, or at least one pharmaceutical composition, all as defined herein;
[1259] an effective amount of at least one (modified) GFR-binding compound, at least one functionalised bioactive carrier, or at least one pharmaceutical composition, all as defined herein for use in a method of inducing or promoting or enhancing tissue closure.

[1260] In particular, medical applications which may result from the mediation of type I and II growth factor receptors by a GFR-binding compound, functionalised bioactive carrier, or pharmaceutical (therapeutic, dermatologic, ophthalmologic, diagnostic, etc.) composition, all as defined herein, include, but are not limited to, enhancing/promoting female fertility and/or preventing and/or decreasing or suppressing female infertility.

[1261] In one example, a GFR-binding compound, functionalised bioactive carrier, or pharmaceutical (therapeutic, dermatologic, ophthalmologic, diagnostic, etc.) composition, all as defined herein, may be a female fertility enhancing or a female infertility regulator/modulator/inhibitor compound, bioactive carrier or composition which has demonstrated the ability to enhance/promote female fertility and/or prevent and/or decrease or suppress female infertility in vitro and/or ex-vivo and/or in vivo.

[1262] In one aspect, the present disclosure thus provides:
[1263] a method of inducing or promoting or enhancing mesenchymal stem cell, progenitor ovarian cell (at any stage of differentiation of the reproduction system lineage) differentiation, the method comprising administering to the cell an effective amount of at least one (modified) GFR-binding compound, at least one functionalised bioactive carrier, or at least one pharmaceutical composition, all as defined herein;
[1264] a method of inducing or promoting or enhancing or controlling or regulating ovarian cell regeneration/formation, the method comprising administering to a mesenchymal stem cell or to a progenitor ovarian cell at any stage of differentiation of the reproduction system lineage or to a mature ovarian cell, an effective amount of at least one (modified) GFR-binding compound, at least one functionalised bioactive carrier, or at least one pharmaceutical composition, all as defined herein;
[1265] a method of inducing and/or promoting and/or enhancing ovarian cell maturation, the method comprising administering to a differentiated ovarian cell or to a mature ovarian cell an effective amount of at least one (modified) GFR-binding compound, at least one functionalised bioactive carrier, or at least one pharmaceutical composition, all as defined herein;
[1266] an effective amount of at least one (modified) GFR-binding compound, at least one functionalised bioactive carrier, or at least one pharmaceutical composition, all as defined herein for use in a method of inducing or promoting or enhancing mesenchymal stem cell or progenitor ovarian cell (at any stage of differentiation of the reproduction system lineage) differentiation;
[1267] an effective amount of at least one (modified) GFR-binding compound, at least one functionalised bioactive carrier, or at least one pharmaceutical composition, all as defined herein for use in a method of inducing or promoting or enhancing or controlling or regulating ovarian cell regeneration/formation;
[1268] an effective amount of at least one (modified) GFR-binding compound, at least one functionalised bioactive carrier, or at least one pharmaceutical composition, all as defined herein for use in a method of inducing and/or promoting and/or enhancing ovarian cell maturation.

[1269] In particular, medical applications which may result from the mediation of type I and II growth factor receptors by a (modified) GFR-binding compound, functionalised bioactive carrier, or pharmaceutical (therapeutic, dermatologic, ophthalmologic, diagnostic, etc.) composition, all as defined herein, include, but are not limited to, enhancing of myogenesis, inducing muscle tissue formation, reinforcing muscle tissues, inducing myocyte maturation, repairing damaged muscles, preventing muscle tissue degeneration or damages, and/or protecting a subject from one or more muscle tissue degenerative-related diseases, disorders, conditions or pathologies such as myopathies, muscular atrophy, disuse atrophy, denervation atrophy, muscular dystrophies such as the Duchenne muscular dystrophy (DMD), and the Becker muscular dystrophy (BMD), fibrosis, fibrositis, muscle weakness, fatigue, cramps, fibromyalgia, or chronic muscle pain syndrome.

[1270] In one example, a (modified) GFR-binding compound, functionalised bioactive carrier, or pharmaceutical (therapeutic, dermatologic, ophthalmologic, diagnostic, etc.) composition, all as defined herein, may thus be an myoinductive compound, bioactive carrier or composition which has demonstrated an ability to induce muscle tissue formation in vitro and/or ex-vivo and/or in vivo.

[1271] In one aspect, the present disclosure thus provides:
[1272] a method of inducing or promoting or enhancing mesenchymal stem cell, progenitor myoblast (at any stage of differentiation of the muscle cell lineage) differentiation, the method comprising administering to the cell an effective amount of at least one (modified) GFR-binding compound, at least one functionalised bioactive carrier, or at least one pharmaceutical composition, all as defined herein;
[1273] a method of inducing or promoting or enhancing or controlling or regulating muscle tissue regeneration/formation, the method comprising administering to a mesenchymal stem cell or to a progenitor myoblast at any stage of differentiation of the muscle cell lineage or to a mature myoblast, an effective amount of at least one (modified) GFR-binding compound, at least one functionalised bioactive carrier, or at least one pharmaceutical composition, all as defined herein;
[1274] a method of inducing and/or promoting and/or enhancing myocyte maturation, the method comprising administering to a differentiated myoblast or to a mature myoblast (e.g. an myocyte) an effective amount of at least one (modified) GFR-binding compound, at least one functionalised bioactive carrier, or at least one pharmaceutical composition, all as defined herein;
[1275] an effective amount of at least one (modified) GFR-binding compound, at least one functionalised bioactive carrier, or at least one pharmaceutical composition, all as defined herein for use in a method of inducing or promoting or enhancing mesenchymal stem cell or progenitor myoblast (at any stage of differentiation of the muscle cell lineage) differentiation;
[1276] an effective amount of at least one (modified) GFR-binding compound, at least one functionalised bioactive carrier, or at least one pharmaceutical composition, all as defined herein for use in a method of inducing or promoting or enhancing or controlling or regulating muscle tissue regeneration/formation;
[1277] an effective amount of at least one (modified) GFR-binding compound, at least one functionalised bioactive carrier, or at least one pharmaceutical composition, all as defined herein for use in a method of inducing and/or promoting and/or enhancing myoblast maturation.

[1278] In particular, medical applications which may result from the mediation of type I and II growth factor receptors by a (modified) GFR-binding compound, functionalised bioactive carrier, or pharmaceutical (therapeutic, dermatologic, ophthalmologic, diagnostic, etc.) composition, all as defined herein, include, but are not limited to, enhancing blood tissue regeneration, inducing blood cell differentiation, or protecting a patient from a blood cell degeneration-related disease, condition, disorder, or pathology.

[1279] In one example, a (modified) GFR-binding compound, functionalised bioactive carrier, or pharmaceutical (therapeutic, dermatologic, ophthalmologic, diagnostic, etc.) composition, all as defined herein, may thus be a blood cell degeneration inhibitor, bioactive carrier or composition which has demonstrated an ability to induce blood cell formation in vitro and/or ex-vivo and/or in vivo.

[1280] In one aspect, the present disclosure thus provides:
[1281] a method of inducing or promoting or enhancing mesenchymal stem cell, progenitor blood cell (at any stage of differentiation of the Osteoblast cell lineage) differentiation, the method comprising administering to the cell an effective amount of at least one (modified) GFR-binding compound, at least one functionalised bioactive carrier, or at least one pharmaceutical composition, all as defined herein;
[1282] a method of inducing or promoting or enhancing or controlling or regulating blood cell regeneration/formation, the method comprising administering to a mesenchymal stem cell or to a progenitor blood cell at any stage of differentiation of the blood cell lineage or to a mature blood cell, an effective amount of at least one (modified) GFR-binding compound, at least one functionalised bioactive carrier, or at least one pharmaceutical composition, all as defined herein;
[1283] a method of inducing and/or promoting and/or enhancing blood cell maturation, the method comprising administering to a differentiated blood cell or to a mature blood cell (e.g. a mature red blood cell) an effective amount of at least one (modified) GFR-binding compound, at least one functionalised bioactive carrier, or at least one pharmaceutical composition, all as defined herein;
[1284] an effective amount of at least one (modified) GFR-binding compound, at least one functionalised bioactive carrier, or at least one pharmaceutical composition, all as defined herein for use in a method of inducing or promoting or enhancing mesenchymal stem cell or progenitor blood cell (at any stage of differentiation of the blood cell lineage) differentiation;
[1285] an effective amount of at least one (modified) GFR-binding compound, at least one functionalised bioactive carrier, or at least one pharmaceutical composition, all as defined herein for use in a method of inducing or promoting or enhancing or controlling or regulating blood cell regeneration/formation;
[1286] an effective amount of at least one (modified) GFR-binding compound, at least one functionalised bioactive carrier, or at least one pharmaceutical composition, all as defined herein for use in a method of inducing and/or promoting and/or enhancing blood cell maturation.

[1287] In particular, medical applications which may result from the mediation of type I and II growth factor receptors by a (modified) GFR-binding compound, functionalised bioactive carrier, or pharmaceutical (therapeutic, dermatologic, ophthalmologic, diagnostic, etc.) composition, all as defined herein, include, but are not limited to, enhancing of lung tissue regeneration, inducing lung cell differentiation, or protecting a patient from a lung cell degeneration-related disease, condition, disorder, or pathology.

[1288] In one example, a (modified) GFR-binding compound, functionalised bioactive carrier, or pharmaceutical (therapeutic, dermatologic, ophthalmologic, diagnostic, etc.) composition, all as defined herein, may thus be a lung cell degeneration inhibitor, bioactive carrier or composition which has demonstrated an ability to induce lung cell formation in vitro and/or ex-vivo and/or in vivo.

[1289] In one aspect, the present disclosure thus provides:
[1290] a method of inducing or promoting or enhancing mesenchymal stem cell, progenitor lung cell (at any stage of differentiation of the Osteoblast cell lineage) differentiation, the method comprising administering to the cell an effective amount of at least one (modified) GFR-binding compound, at least one functionalised bioactive carrier, or at least one pharmaceutical composition, all as defined herein;
[1291] a method of inducing or promoting or enhancing or controlling or regulating lung cell regeneration/formation, the method comprising administering to a mesenchymal stem cell or to a progenitor lung cell at any stage of differentiation of the lung cell lineage or to a mature lung cell, an effective amount of at least one (modified) GFR-binding compound, at least one functionalised bioactive carrier, or at least one pharmaceutical composition, all as defined herein;
[1292] a method of inducing and/or promoting and/or enhancing lung cell maturation, the method comprising administering to a differentiated lung cell or to a mature lung cell an effective amount of at least one (modified) GFR-binding compound, at least one functionalised bioactive carrier, or at least one pharmaceutical composition, all as defined herein;
[1293] an effective amount of at least one (modified) GFR-binding compound, at least one functionalised bioactive carrier, or at least one pharmaceutical composition, all as defined herein for use in a method of inducing or promoting or enhancing mesenchymal stem cell or progenitor lung cell (at any stage of differentiation of the lung cell lineage) differentiation;
[1294] an effective amount of at least one (modified) GFR-binding compound, at least one functionalised bioactive carrier, or at least one pharmaceutical composition, all as defined herein for use in a method of inducing or promoting or enhancing or controlling or regulating lung cell regeneration/formation;
[1295] an effective amount of at least one (modified) GFR-binding compound, at least one functionalised bioactive carrier, or at least one pharmaceutical composition, all as defined herein for use in a method of inducing and/or promoting and/or enhancing lung cell maturation.

[1296] In particular, medical applications which may result from the mediation of type I and II growth factor receptors by a (modified) GFR-binding compound, functionalised bioactive carrier, or pharmaceutical (therapeutic, dermatologic, ophthalmologic, diagnostic, etc.) composition, all as defined herein, include, but are not limited to, enhancing adipose tissue regeneration, inducing adipocyte differentiation, or protecting a patient from a adipose tissue degeneration-related disease, condition, disorder, or pathology.

[1297] In one example, a (modified) GFR-binding compound, functionalised bioactive carrier, or pharmaceutical (therapeutic, dermatologic, ophthalmologic, diagnostic, etc.) composition, all as defined herein, may thus be an adipose tissue degeneration inhibitor, bioactive carrier or composition which has demonstrated an ability to induce adipose tissue formation in vitro and/or ex-vivo and/or in vivo.

[1298] In one aspect, the present disclosure thus provides:
[1299] a method of inducing or promoting or enhancing mesenchymal stem cell, progenitor adipocyte (at any stage of differentiation of the Osteoblast cell lineage) differentiation, the method comprising administering to the cell an effective amount of at least one (modified) GFR-binding compound, at least one functionalised bioactive carrier, or at least one pharmaceutical composition, all as defined herein;
[1300] a method of inducing or promoting or enhancing or controlling or regulating adipose tissue regeneration/formation, the method comprising administering to a mesenchymal stem cell or to a progenitor adipocyte at any stage of differentiation of the adipocyte lineage or to a mature adipocyte, an effective amount of at least one (modified) GFR-binding compound, at least one functionalised bioactive carrier, or at least one pharmaceutical composition, all as defined herein;
[1301] a method of inducing and/or promoting and/or enhancing adipocyte maturation, the method comprising administering to a differentiated adipocyte or to a mature adipocyte an effective amount of at least one (modified) GFR-binding compound, at least one functionalised bioactive carrier, or at least one pharmaceutical composition, all as defined herein;
[1302] an effective amount of at least one (modified) GFR-binding compound, at least one functionalised bioactive carrier, or at least one pharmaceutical composition, all as defined herein for use in a method of inducing or promoting or enhancing mesenchymal stem cell or progenitor adipocyte (at any stage of differentiation of the adipocyte lineage) differentiation;
[1303] an effective amount of at least one (modified) GFR-binding compound, at least one functionalised bioactive carrier, or at least one pharmaceutical composition, all as defined herein for use in a method of inducing or promoting or enhancing or controlling or regulating adipose tissue regeneration/formation;
[1304] an effective amount of at least one (modified) GFR-binding compound, at least one functionalised bioactive carrier, or at least one pharmaceutical composition, all as defined herein for use in a method of inducing and/or promoting and/or enhancing adipocyte maturation.

[1305] Protected from a disease, condition, disorder or pathology refers to the treatment of the underlying cause of the disease, condition, disorder or pathology as well as reducing the symptoms of the disease, condition, disorder or pathology; and/or reducing the occurrence of the disease, condition, disorder or pathology; and/or reducing the severity of the disease, condition, disorder or pathology. Protecting a patient can refer to the ability of a therapeutic composition of the present invention, when administered to a patient, to prevent a disease, condition, disorder or pathology from occurring and/or to cure or to alleviate disease, condition, disorder or pathology symptoms, signs or causes. As such, to protect a patient from a disease, condition, disorder or pathology includes both preventing disease, condition, disorder or pathology occurrence (prophylactic treatment) and treating a patient that has a disease, condition, disorder or pathology or that is experiencing initial symptoms or later stage symptoms of a disease, condition, disorder or pathology (therapeutic treatment).

[1306] Treating:

[1307] As used herein, unless indicated otherwise or contradictory in context, the term “treating” or “treatment” refers to partially or completely alleviating, ameliorating, improving, relieving, delaying onset of, inhibiting progression of, reducing severity of, and/or reducing incidence of one or more symptoms or features of a particular disease, disorder, pathology and/or condition. Treatment may be administered to a subject who does not exhibit signs of a disease, disorder, and/or condition and/or to a subject who exhibits only early signs of a disease, disorder, pathology and/or condition for the purpose of decreasing the risk of developing pathology associated with the disease, disorder, and/or condition.

[1308] Preventing:

[1309] As used herein, unless indicated otherwise or contradictory in context, the term “preventing” refers to partially or completely delaying onset of an infection, disease, disorder and/or condition; partially or completely delaying onset of one or more symptoms, features, or clinical manifestations of a particular infection, disease, disorder, and/or condition; partially or completely delaying onset of one or more symptoms, features, or manifestations of a particular infection, disease, disorder, and/or condition; partially or completely delaying progression from an infection, a particular disease, disorder and/or condition; and/or decreasing the risk of developing pathology associated with the infection, the disease, disorder, and/or condition.

[1310] Disease:

[1311] As used herein, unless indicated otherwise or contradictory in context, the term “disease” refers to any deviation from the normal health of a patient and includes a state when disease symptoms are present, as well as conditions in which a deviation has occurred, but symptoms are not yet manifested. The same applies to “condition”, “disorder” and “pathology”.

[1312] In one aspect, the present disclosure provides methods of determining the effectiveness of a (modified) GFR-binding compound, a functionalised bioactive carrier or a pharmaceutical composition as defined herein for inducing cell differentiation, or inducing, promoting, enhancing, controlling or regulating tissue regeneration/formation in-vitro, ex-vivo and in-vivo comprising the administration of said (modified) GFR-binding compound, a functionalised bioactive carrier or a pharmaceutical composition to a cell; the measurement of the expression of specific differentiation markers as defined herein in the cell; the comparison of the expression of said specific differentiation markers in the cell to the expression of said specific differentiation markers in a cell treated with a reference (or control) functionalised bioactive carrier, compound or solvent; and determining the effectiveness of the (modified) GFR-binding compound, a functionalised bioactive carrier or a pharmaceutical composition relative to the reference pharmaceutical association or compound.

[1313] In one aspect, the present disclosure provides methods to activate, promote, support, improve, or increase the activity of a growth factor receptor present in, on the surface of a mesenchymal stem cell or progenitor cell (at any stage of differentiation thereof) such that said cell may undergo efficient cell differentiation.

[1314] In one aspect, the present disclosure provides methods of identifying, diagnosing, and optionally classifying subjects on these bases, which may include clinical diagnosis, biomarker levels, and other methods known in the art.

### XVII. Wound Healing Applications

[1315] Specific applications of the invention in dermatology relate to wound healing and skin repair.

[1316] Thus, dermatological applications which may result from the mediation of type I and II growth factor receptors by a compound, functionalised bioactive carrier, or composition of the invention include, but are not limited to, enhancing wound healing, skin repair and cellular migration.

[1317] Skin Repair:

[1318] In the present description and unless otherwise indicated, the term “skin repair” means dermal and epidermal cells regeneration, collagen and other skin protein synthesis by epithelial cells.

[1319] Cellular Migration:

[1320] In the present description and unless otherwise indicated, the term “cellular migration” means a central process in the development and maintenance of multicellular organisms. Tissue formation during embryonic development, wound healing and immune responses all require the orchestrated movement of cells in particular directions to specific locations. The cells involved in cellular migration include the cells of the epithelial and dermal cell lineages forming the connective tissue i.e. the fibroblasts, fibrocytes, myofibroblasts, adipocytes, synoviocytes, macrophages, histiocytes, granulocytes, plasmocytes and mastocytes.

[1321] In one example, a (modified) GFR-binding compound, functionalised bioactive carrier, or pharmaceutical (therapeutic, dermatologic, ophthalmologic, diagnostic, etc.) composition, all as defined herein, may be a wound-healing-promoting compound, bioactive carrier, or composition which has demonstrated the ability to induce wound healing, skin repair and/or cellular migration in vitro, ex-vivo and/or in vivo.

[1322] In one aspect, the present disclosure thus provides:
[1323] a method of inducing or promoting or enhancing mesenchymal stem cell, progenitor epithelial cell (at any stage of differentiation of the epithelial and dermal cell lineage) differentiation, the method comprising administering to the cell an effective amount of at least one (modified) GFR-binding compound, at least one functionalised bioactive carrier, or at least one pharmaceutical composition of the invention;
[1324] a method of inducing or promoting or enhancing or controlling or regulating skin tissue regeneration/formation and/or tubular formation, the method comprising administering to a mesenchymal stem cell or to a progenitor epithelial cell at any stage of differentiation of the epithelial and dermal cell lineage or to a mature epithelial cell, an effective amount of at least one (modified) GFR-binding compound, at least one functionalised bioactive carrier, or at least one pharmaceutical composition of the invention;
[1325] a method of inducing and/or promoting and/or enhancing cell motility or single/collective epithelial cell migration, the method comprising administering to a mesenchymal stem cell or to a progenitor epithelial cell at any stage of differentiation of the epithelial and dermal cell lineage or to a mature epithelial cell an effective amount of at least one (modified) GFR-binding compound, at least one functionalised bioactive carrier, or at least one pharmaceutical composition of the invention;
[1326] a method of inducing and/or promoting and/or enhancing epithelial cell maturation, the method comprising administering to a differentiated epithelial cell or to a mature epithelial cell an effective amount of at least one (modified) GFR-binding compound, at least one functionalised bioactive carrier, or at least one pharmaceutical composition of the invention;
[1327] an effective amount of at least one (modified) GFR-binding compound, at least one functionalised bioactive carrier, or at least one pharmaceutical composition of the invention for use in a method of inducing or promoting or enhancing mesenchymal stem cell, progenitor epithelial cell (at any stage of differentiation of the epithelial and dermal cell lineage) differentiation;
[1328] an effective amount of at least one (modified) GFR-binding compound, at least one functionalised bioactive carrier, or at least one pharmaceutical composition of the invention for use in a method of inducing or promoting or enhancing or controlling or regulating skin tissue regeneration/formation;
[1329] an effective amount of at least one (modified) GFR-binding compound, at least one functionalised bioactive carrier, or at least one pharmaceutical composition of the invention for use in a method of inducing and/or promoting and/or enhancing cell motility or single/collective epithelial cell migration,
[1330] an effective amount of at least one (modified) GFR-binding compound, at least one functionalised bioactive carrier, or at least one pharmaceutical composition of the invention for use in a method of inducing and/or promoting and/or enhancing epithelial cell maturation.

### XVIII. Cosmetic Applications

[1331] Skin aging is typically associated with a deregulation of the metabolism of cutaneous cells characterized by a diminishing of the proliferation of keratinocytes, a deregulation of the differentiation of keratinocytes, an accumulation of dead cells, and a diminishing of the innervation of the skin.

[1332] Cosmetic, non-therapeutic, applications which may result from the mediation of type I and II growth factor receptors by a GFR-binding compound, functionalised bioactive carrier, or compositions thereof, all as defined herein, include, but are not limited to, enhancing/promoting skin regeneration, preventing and/or attenuating and/or masking and/or removing wrinkles, firming the skin, preventing and/or decreasing or suppressing skin pigmentation.

[1333] In one example, a GFR-binding compound, functionalised bioactive carrier, or compositions thereof, all as defined herein, may be an anti-wrinkle/aging and/or skin-firming and/or skin regeneration-promoting compound, bioactive carrier or composition which has demonstrated the ability to enhance/promote skin cosmetic regeneration, prevent and/or attenuate and/or mask and/or remove wrinkles, firm the skin, prevent and/or decrease or suppress skin pigmentation in vitro and/or in vivo.

[1334] In one aspect, the present disclosure provides a cosmetic or functional food composition comprising at least one GFR-binding compound or at least one functionalised bioactive carrier, all as defined herein, in combination with at least one suitable cosmetic carrier, preferably suitable for topical application.

[1335] Suitable Cosmetic Carrier:

[1336] The terms “suitable cosmetic carrier” used here, mean that the composition or the components of the latter are suitable for use in contact with human skin without undue toxicity, incompatibility, instability, allergic response or their equivalents.

[1337] In one aspect, the present disclosure provides a use of a GFR-binding compound, or functionalised bioactive carrier, all as defined herein, in cosmetics or as a functional food.

[1338] In one aspect, the present disclosure provides a use of a GFR-binding compound, functionalised bioactive carrier, or composition thereof, all as defined herein, or a cosmetic or functional food composition as defined herein as an anti-wrinkle/aging agent. For example, in certain embodiments, the GFR-binding compound, functionalised bioactive carrier, or composition thereof, all as defined herein, is used as active ingredient to prevent or treat skin-aging in a cosmetic composition or a functional food composition.

[1339] In one aspect, the present disclosure provides a use of a GFR-binding compound or functionalised bioactive carrier, all as defined herein, or a cosmetic composition thereof as defined herein in a method of cosmetic care, wherein said method of cosmetic care comprises the administration or the application of between about 0.0001 □g/day to about 5000 mg/day, between about 0.0001 □g/day to about 1000 mg/day, between about 0.0001 □g/day to about 10 mg/day, between about 0.0001 □g/day to about 1 mg/day, or between about 0.0001 □g/day to about 100 □g/day of said compound, bioactive carrier or composition, all being preferred and specifically contemplated for implementing embodiments of the invention.

[1340] In one example, the administration comprises the oral administration of a tablet, capsule, pill, powder, sustained release formulations, solution or suspension containing said GFR-binding compound or functionalised bioactive carrier, all as defined herein, or cosmetic or functional food compositions thereof as defined herein.

[1341] In one preferred example, said use comprises the topical application of a GFR-binding compound or functionalised bioactive carrier, all as defined herein, or cosmetic composition thereof as defined herein.

[1342] Suitable formulations for use in cosmetic care treatment include, for instance, the ones described in U.S. Pat. No. 8,497,241 B2, which is hereby incorporated by reference.

[1343] In one example, said cosmetic use of the invention is a non-therapeutic cosmetic use.

[1344] In one aspect, the present disclosure provides a cosmetic care or treatment method in which the GFR-binding compound, the functionalised bioactive carrier, or the cosmetic composition, all as defined herein, is used via topical application to stimulate the proliferation and/or activity of the fibroblasts.

[1345] For example, in certain embodiments, said cosmetic care method of the invention include treatment of skin aging, especially unaesthetic and/or uncomfortable manifestations of skin aging, such as slackness of the tissues, loss of firmness of the tissues, the appearance of wrinkles, fine lines, and grooves, and/or for the cosmetic treatment and/or care of stretch marks and/or scars.

[1346] In one example, the cosmetic care method of the invention is preferably for protecting the skin against skin aging.

[1347] Topical Application:

[1348] In the present description and unless otherwise indicated, the term “topical application” means to apply or spray the composition of the present invention onto the surface of the skin.

[1349] Cosmetic compositions of the invention may comprise other active agents of cosmetic interest especially the conventional agents for anti-aging compositions especially those chosen from hyaluronic acid, ascorbic acid, retinol, alpha-hydroxy acids (AHAs) and/or ursolic acid.

[1350] In one example, the cosmetic composition of the invention may contain at least one of the following agents:
[1351] an agent that stimulates the fibronectin synthesis, in particular a maize extract;
[1352] an agent that stimulates the laminin synthesis, in particular an extract of malt;
[1353] an agent that stimulates the expression and/or the activity of hyaluronan synthase 2 (HAS2);
[1354] an agent that stimulates the synthesis of lysyl oxidase-like (LOXL);
[1355] an agent that stimulates the synthesis of intracellular ATP;
[1356] an agent that protects the degradation of FGF2.

[1357] GFR-binding compounds, or functionalised bioactive carrier in their cosmetic applications, optionally in the form of cosmetic compositions, are particularly suitable for protecting the skin against skin ageing that is natural and/or caused by climatic and environmental factors, especially the wind, pollution, UV rays, cigarette smoke and/or physiological factors, especially stress.

[1358] In one aspect, the present disclosure provides a cosmetic care or treatment method, for a subject having need thereof, said method comprising the application, preferably topical application, or administration of a cosmetic composition as defined herein.

[1359] In one example, the subject who has need of the cosmetic care of the invention is a subject chosen from a population having an average age of more than 30 years old, preferably of more than 40 years old, more preferably of more than 50 years old.

### XIX. Hair Treatment Applications

[1360] Hair is subjected to a wide variety of severe stress, for example as a result of environmental influences, such as UV irradiation or weathering, mechanical stresses, such as combing, or various hair treatments, such as washing, drying with hot air, bleaching, coloring, perming, etc., which can lead to hair damage. Said damage includes e.g. dryness, reduced elasticity, brittleness, split ends, dullness, matt appearance, reduced fullness, rough surface and reduced mechanical strength. This leads to impaired combability, reduced shine, increased electrostatic charging, tendency to break and may go as far as hair loss in some cases. The hair wearer feels uneasy. Hair loss may be due to aging as through time, hair naturally tends to gradually thin. Other causes of hair loss include hormonal factors, medical conditions and medications. The most common cause of hair loss is a hereditary condition called male-pattern baldness or female-pattern baldness. In genetically susceptible people, certain sex hormones trigger a particular pattern of permanent hair loss. Most common in men, this type of hair thinning can begin as early as puberty. Hormonal changes and imbalances can also cause temporary hair loss. This could be due to pregnancy, childbirth, discontinuation of birth control pills or the onset of menopause. A variety of medical conditions may also cause hair loss, including, but not limited to, thyroid problems, alopecia areata, and scalp infections. Hair loss may further be caused by drugs used to treat Arthritis, depression, heart problems, high blood pressure, etc.

[1361] Medical or cosmetic applications which may result from the mediation of type I and II growth factor receptors by a (modified) GFR-binding compound, functionalised bioactive carrier or composition of the invention also include enhancing/promoting hair growth and/or preventing and/or decreasing or suppressing hair loss. Without wishing to be bound to any specific theories, this effect is thought to be achieved through activation of dormant (or quiescent) hair follicle stem cells by displacement of natural binding ligands such as BMP-6, strongly bound to their growth factor receptors.

[1362] In one example, a (modified) GFR-binding compound, or functionalised bioactive carrier as defined herein may be a hair growth-promoting or a hair loss -regulator/modulator/inhibitor compound or functionalised bioactive carrier which has demonstrated the ability to enhance/promote hair growth and/or prevent and/or decrease or suppress hair loss in vitro, ex-vivo and/or in vivo.

[1363] In one aspect, the present disclosure provides a hair cosmetic or functional food composition comprising at least one (modified) GFR-binding compound, or at least one functionalised bioactive carrier, all as defined herein, in combination with at least one suitable hair-cosmetic carrier, preferably suitable for topical application.

[1364] Topical applications may be performed by any end-user by, for instance, applying and optionally rubbing the hair scalp with a hair cosmetic composition of the invention e.g. formulated as a shampoo or conditioner.

[1365] In one aspect, the present disclosure provides a hair medical (pharmaceutical, prophylactic, diagnostic, imaging, etc.) composition comprising at least one (modified) GFR-binding compound, or at least one functionalised bioactive carrier, all as defined herein, in combination with at least one suitable hair-medical carrier, preferably suitable for scalp injection application.

[1366] Scalp injection applications may preferably be performed by experienced end-users such as dermatologists and/or surgeons, preferably in clinical/medical settings in clean or sterile environment. Several subcutaneous injections may be carried out under the scalp where needed and renewed every few weeks, preferably months if required.

[1367] In one aspect, the present invention discloses a use of a (modified) GFR-binding compound, or a functionalised bioactive carrier as defined herein, in hair cosmetics or as a functional food. In one aspect, the present invention discloses a (modified) GFR-binding compound, or a functionalised bioactive carrier as defined herein, for use in a hair medical method.

[1368] In one aspect, the present disclosure provides a use of a (modified) GFR-binding compound, a functionalised bioactive carrier, or a hair cosmetic or functional food composition, all as defined herein, as a hair growth-promoting agent or hair-loss-preventing agent. For example, in certain embodiments, the (modified) GFR-binding compound, or functionalised bioactive carrier as defined herein, is used as active ingredient to promote (enhance, regulate, modulate, improve) hair growth and/or prevent or treat hair-loss and/or embellish hair in a hair cosmetic composition or a functional food composition. In one aspect, the present disclosure provides a (modified) GFR-binding compound, a functionalised bioactive carrier, or a hair medical composition, all as defined herein, as a hair growth-promoting agent or hair-loss-preventing agent. For example, in certain embodiments, the (modified) GFR-binding compound, or functionalised bioactive carrier as defined herein, is used as active ingredient to promote (enhance, regulate, modulate, improve) hair growth and/or prevent or treat hair-loss and/or embellish hair in a hair medical composition.

[1369] In one aspect, the present disclosure provides a use of a (modified) GFR-binding compound, a functionalised bioactive carrier, or a hair cosmetic composition, all as defined herein, in a method of hair cosmetic care, wherein said method of hair cosmetic care comprises the administration or the application of between about 0.0001 to about 100 Og per day, more specifically between about 0.001 to about 10 Og per day or between about 0.0001 to about 100 Og per day of said compound, bioactive carrier or composition.

[1370] In one example, a (modified) GFR-binding compound, functionalised bioactive carrier, or hair-cosmetic composition, all as defined herein, may be combined/mixed with mesenchymal stem cells and/or follicle progenitor cells prior to be administered to, contacted with, or implanted into a mammal (preferably a human) to promote hair growth and/or prevent and/or decrease or suppress hair-loss.

[1371] In one example, the administration comprises the oral administration of a tablet, capsule, pill, powder, sustained release formulations, solution or suspension containing said (modified) GFR-binding compound, functionalised bioactive carrier, or hair-cosmetic composition, all as defined herein.

[1372] Suitable as forms of hair cosmetic compositions for implementing embodiments of the invention include hair rinse, hair mask, shampoo, conditioner, hair spray, hair foam, hair mousse, hair gel, hair tonic, hair setting composition, end fluid, neutralizer for permanent waves, hair colorant and bleach or hot-oil treatment.

[1373] Suitable formulations for use in hair treatment include, for instance, the ones described in US patent application No. 2011/0312884 A1, which is hereby incorporated by reference.

[1374] In one example, said hair cosmetic use of the invention is a non-therapeutic hair cosmetic use.

[1375] Hair cosmetic compositions of the invention may comprise at least one other active agent of hair cosmetic interest especially the conventional agents for hair treatment compositions especially at least one of the following agents:
[1376] anionic surfactants such as soaps, alkylsulfonates, alkylbenzenesulfonates, olefinsulfonates, alkyl ether sulfonates, glycerol ether sulfonates, methyl ester sulfonates, sulfo fatty acids, alkyl sulfates, fatty alcohol ether sulfates, glycerol ether sulfates, fatty acid ether sulfates, hydroxyl mixed ether sulfates, monoglyceride (ether) sulfates, fatty acid amide (ether) sulfates, mono- and dialkyl sulfosuccinates, mono and dialkyl sulfosuccinamates, sulfotriglycerides, amide soaps, ethercarboxylic acids and salts thereof, fatty acid isethionates, fatty acid sarcosinates, fatty acid taurides, N-acylaminoacids, such as, for example, acyl lactylates, acyl tartrates, acyl glutamates and acyl aspartates, alkyl oligoglucosidesulfat. Suitable soaps are e.g. alkali metal, alkaline earth metal and ammonium salts of fatty acids, such as potassium stearate.

[1377] Suitable olefinsulfonates may be present as alkali metal, alkaline earth metal, ammonium, alkylammonium, alkanolammonium or glucammonium salts. Preferably, the olefinsulfonates are present as sodium salts. The hydrolyzed alpha-olefinsulfonation product, i.e. the alpha-olefinsulfonates, are composed of ca. 60% by weight of alkanesulfonates and ca. 40% by weight of hydroxyalkanesulfonat.es; of these, about 80 to 85% by weight are monosulfonates and 15 to 20% by weight are disulfonates. Preferred methyl ester sulfonates (MES) are obtained by sulfonation of the fatty acid methyl esters of plant or animal fats or oils. Preference is given to methyl ester sulfonates from plant fats and oils, e.g. from rapeseed oil, sunflower oil, soya oil, palm oil, coconut fat, etc. Preferred sarcosinates are sodium lauroyl sarcosinate or sodium stearoyl sarcosinate. Preferred protein fatty acid condensates are plant products based on wheat. Preferred alkyl phosphates are mono- and diphosphoric acid alkyl esters.
[1378] Fatty alcohols having preferably 8 to 30 carbon atoms, particularly preferably 10 to 22 carbon atoms, in particular 12 to 20 carbon atoms. The hydrocarbon radical of the fatty alcohols can in principle be linear or branched, saturated or unsaturated. Typical examples of fatty alcohols are caproic alcohol, caprylic alcohol, 2-ethylhexyl alcohol, capric alcohol, lauryl alcohol, isotridecyl alcohol, myristyl alcohol, cetyl alcohol, palmoleyl alcohol, stearyl alcohol, isostearyl alcohol, oleyl alcohol, elaidyl alcohol, petroselinyl alcohol, linolyl alcohol, linolenyl alcohol, elaeostearyl alcohol and mixtures thereof. Preferred mixtures of the fatty alcohols are based on technical-grade alcohol mixtures which are produced e.g. during the high-pressure hydrogenation of technical-grade methyl esters based on fats and oils or during the hydrogenation of aldehydes from the oxo synthesis or during the dimerization of unsaturated fatty alcohols.
[1379] phospholipids, nonionic surfactants, amphoteric surfactants, cationic surfactants and mixtures thereof. Phospholipids are phosphorus-containing amphiphilic lipids such as phosphatidylserines, sphingomyelins and plasmalogens. Also suitable are the so-called lysophospholipids in which a fatty acid radical has been separated off from the phospholipid molecule to give an OH group, e.g. with the help of a phospholipase. The nonionic surfactants include, for example: fatty alcohol polyoxyalkylene esters, for example lauryl alcohol polyoxyethylene acetate, alkyl polyoxyalkylene ethers which are derived from low molecular weight C1-C6-alkohols or from C7-C30-fatty alcohols. Here, the ether component can be derived from ethylene oxide units, propylene oxide units, 1,2-butylene oxide units, 1,4-butylene oxide units and random copolymers and block copolymers thereof. These include specifically fatty alcohol alkoxylates and oxo alcohol alkoxylates such as isotridecyl alcohol and oleyl alcohol polyoxyethylene ethers, alkylaryl alcohol polyoxyethylene ethers, e.g. octylphenol polyoxyethylene ethers, alkoxylated animal and/or plant fats and/or oils, for example corn oil ethoxylates, castor oil ethoxylates, tallow fat ethoxylates, glycerol esters, such as, for example, glycerol monostearate, alkylphenol alkoxylates, such as, for example, ethoxylated isooctyl-, octyl- or nonylphenol, tributylphenol polyoxyethylene ether, fatty amine alkoxylates, fatty acid amide and fatty acid diethanolamide alkoxylates, in particular ethoxylates thereof, sugar surfactants, sorbitol esters, such as, for example, sorbitan fatty acid esters (sorbitan monooleate, sorbitan tristearate), polyoxyethylene sorbitan fatty acid esters, alkyl polyglycosides, N-alkylgluconamides, alkyl methyl sulfoxides, alkyl dimethyl phosphine oxides, such as, for example, tetradecyl dimethyl phosphine oxide. Suitable amphoteric surfactants are e.g. alkylbetaines, alkylamidopropylbetaines, alkylsulfobetaines, alkyl glycinates, alkyl carboxyglycinates, alkyl amphoacetates or propionates, alkyl amphodiacetates or dipropionates. For example, it is possible to use cocodimethylsulfopropylbetaine, laurylbetaine, cocamidopropylbetaine, sodium cocamphopropionate or tetradecyldimethylamine oxide. The cationic surfactants include, for example, quaternized ammonium compounds, in particular alkyltrimethylammonium and dialkyldimethylammonium halides and alkyl sulfates, and pyridine and imidazoline derivatives, in particular alkylpyridinium halides. For example, behenyl or cetyltrimethylammonium chloride may suitably be used.
[1380] an antidandruff active ingredient. Suitable antidandruff active ingredients are piroctone olamine (1-hydroxy-4-methyl-6-(2,4,4-trimethylpentyl)-2-(1H)-pyridinonemonoethanolamine salt), crinipan AD (climbazole), ketoconazole, elubiol, selenium disulfide, sulfur colloidal, sulfur polyethylene glycol sorbitan monooleate, sulfur ricinol polyethoxylate, sulfur tar distillates, salicylic acid (or in combination with hexachlorophene), undecylenic acid monoethanolamide sulfosuccinate Na salt, lamepon UD (protein-undecylenic acid condensate), zinc pyrithione, aluminum pyrithione and magnesium pyrithione/dipyrithione magnesium sulfate.
[1381] proteins and protein derivatives, cosmetically active polymers, hair pigmentation agents, bleaches, keratin-hardening substances, antimicrobial active ingredients, light filter active ingredients, repellent active ingredients, hyperemic substances, antiphlogistics, keratinizing substances, antioxidative active ingredient and/or free radical active ingredients, sebostatic active ingredients, plant extracts, antierythematous or antiallergic active ingredients and mixtures thereof.
[1382] a cosmetically acceptable auxiliary such as oil bodies, fats, waxes, pearlescent waxes, propellants, consistency regulators, thickeners, superfatting agents, stabilizers, polymers, silicone compounds, UV stabilizers, antioxidants, film formers, swelling agents, hydrotropes, solubilizers, preservatives, perfume oils, dyes, etc. and mixtures thereof.

[1383] In one aspect, the invention discloses a hair cosmetic care or treatment method, for a subject having need thereof, said method comprising the application, preferably topical or scalp injection applications, or administration of a hair cosmetic composition according to the present invention.

[1384] In one aspect, the present invention discloses a hair cosmetic care or treatment method in which the (modified) GFR-binding compound, functionalised bioactive carrier, or hair cosmetic composition, all as defined herein, is used to stimulate/activate hair follicle stem cells.

[1385] In one example, the subject who has need of the hair cosmetic care of the invention is a subject chosen from a population having an average age of more than 30 years old, preferably of more than 40 years old, more preferably of more than 50 years old.

### XX. Diagnostic Methods

[1386] In one aspect, the present disclosure provides a (modified) GFR-binding compound, a functionalised bioactive carrier or a medical or cosmetic composition as defined herein for use in a diagnostic method of a disease or condition which may require mesenchymal stem cells or progenitor cells (at any stage of differentiation thereof) to be differentiated.

[1387] In one aspect, the present disclosure provides a diagnostic method for diagnosing of a disease or condition which may require mesenchymal stem cells or progenitor cells (at any stage of differentiation thereof) to be differentiated comprising the provision of a (modified) GFR-binding compound or a pharmaceutical association, combination or composition as defined herein, and the contacting or administration of said GFR-binding compound or pharmaceutical association, combination or composition with a body part of a subject to be diagnosed.

[1388] A method for the diagnosis of a disease or condition which may require mesenchymal stem cells or progenitor cells (at any stage of differentiation thereof) to be differentiated in a patient, comprising obtaining a biological sample from a patient and apply fluorescent and/or radiolabeled (modified) GFR binding compounds, wherein high localisation of these compounds indicates a disease or condition which may require mesenchymal stem cells or progenitor cells (at any stage of differentiation thereof) to be differentiated in the patient.

### XXI. Screening Methods

[1389] In one aspect, the present disclosure provides a screening method for selecting a peptide or a peptidomimetic having the ability to induce tissue regeneration and cell differentiation.

[1390] In one aspect, the present disclosure provides a screening method for selecting a peptide or peptidomimetic having the ability to induce tissue regeneration and cell differentiation, the method comprising the steps of (a) providing a molecular model of the following 3D structure coordinates of PEPREF and (b) identifying a candidate analog having a RMSD value of 2.45 Å or less. In particular example, step (b) is performed using the method of RMSD calculation as already defined herein

[1391] In certain embodiments, the method can be performed using a computer (i.e., in silico). In some embodiments, the method can include providing the three-dimensional models of a plurality of peptides or peptidomimetics (i.e., a library or database of peptides or peptidomimetics) and screening each compound individually. Thus, in one aspect, the method of screening peptides or peptidomimetics generally includes computationally evaluating the potential of a selected peptide(s) or peptidomimetic(s) to structurally match with the computational model of the three-dimensional structure of PEPREF. For example, this method can include the steps of (a) employing a computational approach to perform a fitting operation between the selected peptide(s) or peptidomimetic(s) and the three-dimensional structure of PEPREF; and (b) analyzing the results of the fitting operation to quantify the three-dimensional structural similarities between the peptide(s) or peptidomimetic(s) and PEPREF using the RMSD procedure as defined herein.

[1392] In one aspect, the present disclosure provides a method of producing a peptide or peptidomimetic having the ability to induce tissue regeneration and cell differentiation, the method comprising the steps of (a) providing a molecular model of the following 3D structure coordinates of PEPREF; b) identifying a candidate analog having a RMSD as defined herein of 2.45 Å or less (in particular 2, more particularly 1.79); and (c) producing the candidate analog identified in step (b). In one particular example, said method further comprising the step of determining whether the compound produced in step (c) has a cell differentiation and tissue regeneration activity. In one particular example, steps (a) and (b) are performed by means of an electronic processor. In certain embodiments, step (a) comprises storing a representation of the atomic co-ordinates of PEPREF in a computer memory.

[1393] In one aspect, the present disclosure provides a method of producing a peptide or peptidomimetic having the ability to induce tissue regeneration and cell differentiation, the method comprising the steps of: (a) providing in a computer memory atomic X-ray crystallographic co-ordinates of PEPREF; (b) generating with a processor a molecular model having a three-dimensional shape of PEPREF; (c) identifying a candidate analog having a RMSD of 2.45 Å or less (in particular 2, more particularly 1.79); (d) producing the candidate analog identified in step (c); and (e) determining whether the candidate analog produced in step (d) induces tissue regeneration and cell differentiation. In one particular example, said method comprises the additional step of producing the peptide or peptidomimetic in a commercially useful quantity.

[1394] In one aspect, the present disclosure provides a computer system comprising: (a) a memory comprising atomic X-ray crystallographic coordinates of PEPREF; and (b) a processor in electrical communication with the memory; wherein the processor generates a molecular model having a three dimensional shape representative of PEPREF. In one particular example, said coordinates are stored on a computer readable diskette.

### XXII. Kits

[1395] The present disclosure provides a variety of kits for conveniently and/or effectively carrying out methods and uses of the present invention. Typically, kits will comprise sufficient amounts and/or numbers of components to allow a user to perform multiple treatments of a subject(s) and/or to perform multiple experiments.

[1396] In one aspect, the present disclosure provides kits for pharmaceutical, dermatological, prophylactic, diagnostic, imaging or cosmetic functional association, combination or composition production, comprising at least one (modified) GFR-binding compound as defined herein, at least one bioactive carrier (such as a biomaterial or medical device) as defined herein, optionally a pharmaceutically, dermatologically, prophylactically, diagnostically, imaging or cosmetically acceptable excipient, carrier, vehicle or solvent, each and every one of them provided in an amount effective to produce a pharmaceutical, dermatological, prophylactic, diagnostic, imaging or cosmetic association to induce cell differentiation, promote tissue regeneration or protect a subject from a disease, disorder or condition as defined herein, when administered in-vitro, ex-vivo or in-vivo to a mesenchymal stem cell, progenitor cell (at any stage of differentiation thereof) or to a subject carrying such a cell, and packaging and instructions.

[1397] Suitable as solvents for use in kits of the invention include physiologically acceptable solvents, PBS, filtered and deionised water such as Milli-Q® water, alpha-MEM, DMEM and/or IMDM. All physiologically acceptable solvents suitable for implementing embodiments of the present invention are preferably deoxygenated before use.

[1398] In one example, said kit further comprises an administration device. In one example, said administration device is a dispensing device such as a syringe.

[1399] In one example, said kit comprises a first container containing a (modified) GFR-binding compound as defined herein and a second container containing a bioactive carrier such as a biomaterial or a medical device and a third container containing stem cells, preferably MSCs.

[1400] In one preferred example, a kit of the invention comprises (i) a first, preferably suitable, sterile, individual, container containing a (modified) GFR-binding compound as defined herein preferably in lyophilised form, (ii) a second, preferably suitable, sterile, individual, container containing a physiologically acceptable, sterile liquid (e.g. a solvent), (iii) a third, preferably suitable, sterile, individual, container containing a conventional biomaterial/medical device such as an orthopaedic or dental implant and, (iv) optionally, a fourth, preferably suitable, sterile, individual, container containing suitable stem cells, in particular adult stem cells or mesenchymal stem cells. In practice, said kit may be provided to an end-user (e.g. a surgeon). Said end-user may firstly pour the content of the second container into the first container, optionally provide a form of agitation to solubilise or suspend the (modified) GFR-binding compound of the invention in the physiologically acceptable, sterile liquid, then pour (or immerse) the resulting solution or suspension in the third container containing the conventional biomaterial/medical device (optionally with prior activation of said biomaterial/medical device if required), optionally followed by the contacting of the resulting functionalised biomaterial/medical device with the content of the fourth container containing the stem cells prior to placement onto or into a patient's body, preferably at a defect site.

[1401] Alternatively, a kit of the invention may comprise a first, preferably suitable, sterile, individual, container containing an already functionalised biomaterial/medical device e.g. a biomaterial/medical device functioanlised with a (modified) GFR-binding compound as defined herein, optionally in a physiologically acceptable liquid, and a second, preferably suitable, sterile, individual, container containing suitable stem cells, in particular adult stem cells or mesenchymal stem cells. In practice, an end-user such as a surgeon may apply the stem cells onto the coated biomaterial by pouring the content of the second container into the first containing (and optionally apply a form of agitation) prior to placement onto or into a patient's body, preferably at a defect site.

[1402] In one particular example, said kits of the invention may suitably be provided in the form of a sterile packaging.

[1403] For example, in certain embodiments, said kits of the invention comprises more than 2, between 2 and 25, between 2 and 15, or between 2 and 10 of (modified) GFR-binding compound as defined herein, and more than 2, between 2 and 25, between 2 and 15, or between 2 and 10 (modified) GFR-binding compound as defined herein.

[1404] In one example, each (modified) GFR-binding compound and each conventional or functionalised bioactive carrier is conditioned in distinct and separated compartments, in lyophilised form, in solution or in suspension in a pharmaceutically dermatologically, prophylactically, diagnostically, imaging or cosmetically acceptable excipient, carrier or vehicle.

[1405] In one aspect, the invention discloses kit-of-parts comprising a bioactive carrier and a (modified) GFR-binding compound both as defined herein for uses and methods as defined herein.

### XXIII. Sequence Listing

[1406] Examples of (modified) GFR-binding compounds as defined herein are listed in the appended sequence listing which forms an integral part of the present application.

[1407] (Modified) GFR-binding compounds, functionalised bioactive carriers and compositions, all as defined in the present disclosure, has been found to lead to multiple and distinct advantages in terms of cell differentiation induction and tissue regeneration.

[1408] As supported by the examples of the present application, (modified) GFR-binding compounds, functionalised bioactive carriers or compositions thereof, all as defined herein, display advantages over (modified) GFR-binding compounds, functionalised bioactive carrier or compositions that do not contain it, such as:
[1409] Enhanced and/or more practical and/or more efficient and/or more cost-effective and/or more adapted to the end-user needs and/or tissue regeneration in mammals, preferably humans;
[1410] Modifying and/or enhancing and/or modulating and/or promoting and/or activating bone and/or cartilage and/or vascular and/or muscle and/or neuronal and/or blood and/or retinal and/or organs such as kidneys and lung and/or ligament/tendon and/or hair follicle and/or skin and/or adipose, tissue regeneration;
[1411] Modifying and/or enhancing and/or modulating and/or promoting and/or activating embryonic patterning;
[1412] Modifying and/or enhancing and/or modulating and/or promoting and/or activating cellular migration and wound healing;
[1413] Modifying and/or enhancing and/or modulating and/or promoting and/or activating the closure of any type of living tissue;
[1414] Modifying and/or enhancing and/or modulating and/or promoting and/or activating female fertility;
[1415] Preventing and/or suppressing or avoiding or reducing tissue degeneration in mammals, preferably humans;
[1416] Preventing and/or suppressing or avoiding or reducing bone and/or cartilage and/or vascular and/or muscle and/or neuronal and/or blood and/or retinal and/or organs such as kidneys or lungs and/or ligament/tendon and/or hair follicle and/or skin and/or adipose, tissue degeneration;
[1417] Preventing and/or suppressing or avoiding or reducing embryonic mispatterning;
[1418] Preventing and/or suppressing or avoiding or reducing cellular immobilisation and wound formation and/or progression;
[1419] Preventing and/or suppressing or avoiding or reducing the misclosure of any type of living tissue;
[1420] Preventing and/or suppressing or avoiding or reducing female infertility;
[1421] Preventing and/or suppressing or avoiding or reducing hair-loss;
[1422] Preventing/treating alopecia areata, alopecia totalis, alopecia universalis, androgenic alopecia (male pattern baldness), telogen effluvium, anagen effluvium or chemotherapy-induced alopecia;
[1423] Modifying and/or enhancing and/or modulating and/or promoting and/or activating the osteogenicity, and/or the chondrogenecity, and/or the myogenecity, and/or the endothelization and vascularization ability, and/or hair growth ability, and/or the wound healing ability, and/or the skin repair ability, and/or the tissue defect closure ability, and/or lung tissue regeneration ability, and/or renal tissue regeneration ability, and/or the neuroregeneration ability, and/or the ligament/tendon regeneration ability, and/or the female fertility ability, of a biomaterial which may be useful in the manufacturing of medical devices;
[1424] Modifying and/or enhancing and/or activating anti-ageing/anti-wrinkle effects/properties in cosmetic products;
[1425] Modifying and/or enhancing and/or activating hair growth effects/properties in pharmaceutical or cosmetic products;
[1426] Modifying and/or enhancing and/or modulating and/or promoting and/or inducing and/or activating stem cells, preferably adult stem cells, more preferably mesenchymal stem cells, commitment and/or differentiation in a specific lineage of cells;
[1427] Modifying and/or enhancing and/or modulating and/or promoting and/or inducing and/or activating progenitor cells differentiation and/or maturation.
[1428] Obtaining/producing functional differentiated cells;
[1429] Obtaining/producing differentiated cells with modified and/or improved functionality and/or physiological activity;
[1430] Increasing amount of osteoblast cells whilst (highly) reducing bone resorption activity;
[1431] Increasing bone mineralization speed, rate and surface;
[1432] Having the ability to decouple bone resorption from bone formation;
[1433] Achieving efficient bone strengthening in osteoporosis patients;
[1434] Reduced or low or substantially inexistent organ toxicity, in particular in the liver.

[1435] For example, in certain embodiments, (modified) GFR-binding compounds, functionalised bioactive carriers, or compositions according to the present disclosure in which PEP1 is a peptide selected from the group consisting of SAIS, NAIS, SATS and SPIS, in which PEP2 is a peptide selected from the group consisting of LKNYQ, LKKYR, LRKHR and LKYHY, and in which the RMSD is 2.45 Å or less, have been found to lead to unexpectedly fast and qualitatively and quantitatively important osteoinduction, producing highly functional differentiated cells.

[1436] For example, in certain embodiments, (modified) GFR-binding compounds, functionalised bioactive carriers, or compositions according to the present disclosure in which PEP1 is a peptide selected from the group consisting of SAIS, NAIS, SPIS, EPLP, and EPLT, in which PEP2 is a peptide selected from the group consisting of LKNYQ, LKKYR, YKQYE and EQLSN, and in which the RMSD is 2.45 Å or less, have been found to lead to unexpectedly fast and qualitatively and quantitatively important chondroinduction, producing highly functional differentiated cells.

[1437] For example, in certain embodiments, (modified) GFR-binding compounds, functionalised bioactive carriers, or compositions according to the present disclosure in which PEP1 is a peptide selected from the group consisting of SNIT, RPVQ and RSVK, in which PEP2 is a peptide selected from the group consisting of IGEMS, LGEMS, KEVQV and KKATV, and in which the RMSD is 2.45 Å or less, have been found to lead to unexpectedly fast and qualitatively and quantitatively important vascular tissue induction, producing highly functional differentiated cells.

[1438] For example, in certain embodiments, (modified) GFR-binding compounds, functionalised bioactive carriers, or compositions according to the present disclosure in which PEP1 is selected from the group consisting of NAIS, SPIS and EPIS, wherein PEP2 is selected from the group consisting of LKKYR, LKYHY, YKQYE and KFKYE, and in which the RMSD is 2.45 Å or less, have been found to lead to unexpectedly fast and qualitatively and quantitatively important neuronal induction, producing highly functional differentiated cells.

[1439] For example, in certain embodiments, (modified) GFR-binding compounds, functionalised bioactive carriers, or compositions according to the present disclosure in which PEP1 is SPIN, in which PEP2 is YGKIP, and in which the RMSD is 2.45 Å or less, have been found to lead to unexpectedly fast and qualitatively and quantitatively important eye-retina cells induction, producing highly functional differentiated cells.

[1440] For example, in certain embodiments, (modified) GFR-binding compounds, functionalised bioactive carriers, or compositions according to the present disclosure in which PEP1 is SPIN, and in which PEP2 is selected from the group consisting of is YGKIP, and in which the RMSD is 2.45 Å or less, have been found to lead to unexpectedly fast and qualitatively and quantitatively important renal cells induction, producing highly functional differentiated cells.

[1441] For example, in certain embodiments, (modified) GFR-binding compounds, functionalised bioactive carriers, or compositions according to the present disclosure in which PEP1 is a peptide selected from the group consisting of NAIS, SPIS, EPLP and EPLT, in which PEP2 is selected from the group consisting of LKKYR, YKQYE and EQLSN, and in which the RMSD is 2.45 Å or less, have been found to lead to unexpectedly fast and qualitatively and quantitatively important tenocytes and/or fibrous cells induction, producing highly functional differentiated cells.

[1442] For example, in certain embodiments, (modified) GFR-binding compounds, functionalised bioactive carriers, or compositions according to the present disclosure in which PEP1 is selected from the group consisting of SNIT, RPVQ and RSVK, wherein PEP2 is selected from the group consisting of IGEMS, LGEMS, KEVQV and KKATV, and in which the RMSD is 2.45 Å or less, have been found to lead to unexpectedly fast and qualitatively and quantitatively important wound healing induction, producing highly functional differentiated cells.

[1443] For example, in certain embodiments, (modified) GFR-binding compounds, functionalised bioactive carriers, or compositions according to the present disclosure in which PEP1 is a peptide selected from the group consisting of EPLP, EPLT, RSVK and RPVQ, in which PEP2 is a peptide selected from the group consisting of EQLSN, IGEMS, KEVQV and KKATV, and in which the RMSD is 2.45 Å or less, have been found to lead to unexpectedly fast and qualitatively and quantitatively important skin cells induction, producing highly functional differentiated cells.

[1444] For example, in certain embodiments, (modified) GFR-binding compounds, functionalised bioactive carriers, or compositions according to the present disclosure in which PEP1 is SSLS, in which PEP2 is LKVYP, and in which the RMSD is 2.45 Å or less, have been found to lead to unexpectedly fast and qualitatively and quantitatively important hair follicle cells induction, producing highly functional differentiated cells.

[1445] For example, in certain embodiments, (modified) GFR-binding compounds, functionalised bioactive carriers, or compositions according to the present disclosure in which PEP1 is NAIS, in which PEP2 is LKKYR, and in which the RMSD is 2.45 Å or less, have been found to lead to unexpectedly fast and qualitatively and quantitatively important ovarian cells induction, producing highly functional differentiated cells.

[1446] For example, in certain embodiments, (modified) GFR-binding compounds, functionalised bioactive carriers, or compositions according to the present disclosure in which PEP1 is selected from the group consisting of NAIS, SATS, SPIS, EPIS and SPIN, in which PEP2 is selected from the group consisting of LKKYR, LRKHR, LKYHY, KFKYE and YGKIP, and in which the RMSD is 2.45 Å or less, have been found to lead to unexpectedly fast and qualitatively and quantitatively important lung cells induction, producing highly functional differentiated cells.

[1447] For example, in certain embodiments, (modified) GFR-binding compounds, functionalised bioactive carriers, or compositions according to the present disclosure in which PEP1 is selected from the group consisting of RSVK or RPVQ, in which PEP2 is selected from the group consisting of KEVQV or KKATV, and in which the RMSD is 2.45 Å or less, have been found to lead to unexpectedly fast and qualitatively and quantitatively important muscle cells induction, producing highly functional differentiated cells.

[1448] For example, in certain embodiments, (modified) GFR-binding compounds, functionalised bioactive carriers, or compositions according to the present disclosure in which PEP1 is SNIT, in which PEP2 is IGEMS or LGEMS, and in which the RMSD is 2.45 Å or less, have been found to lead to unexpectedly fast and qualitatively and quantitatively important blood cells induction, producing highly functional differentiated cells.

[1449] For example, in certain embodiments, (modified) GFR-binding compounds, functionalised bioactive carriers, or compositions according to the present disclosure in which PEP1 is SAIS or NAIS, in which PEP2 is LKNYQ or LKKYR, and in which the RMSD is 2.45 Å or less, have been found to lead to unexpectedly fast and qualitatively and quantitatively important adipocytes induction, producing highly functional differentiated cells.

[1450] For example, in certain embodiments, microenvironments comprising a plurality of structurally distinct/different (modified) GFR-binding compounds, functionalised bioactive carriers, or compositions according to the present disclosure in which each PEP1 is a peptide which may be selected from the group consisting of SAIS, SSLS, NAIS, SATS, SPIS, EPIS, SPIN, KPLS, EPLP, EPLT, SNIT, RSVK and RPVQ, and wherein PEP2 is a peptide selected from the group consisting of LKNYQ, LKVYP, LKKYR, LRKHR, LKYHY, KFKYE, YGKIP, YKQYE, DHHKD, EQLSN, IGEMS, LGEMS, KEVQV and KKATV, and in which the RMSD is 2.45 Å or less, have been found to lead to unexpectedly fast and qualitatively and quantitatively important tissue closure induction, producing highly functional differentiated cells.

[1451] Accordingly, it is possible to achieve tissue (bone, cartilage, vascular, endothelial, blood, neuronal, eye-retina, kidneys, lung, adipose, ligament, tendon, hair follicle, skin, ovary, etc.) regeneration using e.g. orthopedic, dental implants, matrix injections or administrable compositions, efficiently and rapidly thus reducing the costs associated with such treatments, improving and accelerating tissue healing and patient recovery.

[1452] In addition, it has been found that using the compounds, bioactive carrier and compositions of the present disclosure also permits a quasi-complete or complete control over the final chemical structure of the compounds, bioactive carrier and compositions of the present disclosure, thereby avoiding any unwanted (e.g. post-translational) modifications and unpredicted short half-life and quick metabolization.

[1453] Remarkably, it has also been found that using the compounds, bioactive carier and compositions of the present disclosure allows for reduction (in most cases, important reduction) of the administered doses to provide a beneficial treatment to a patient in comparison with known technologies, thus decreasing or eliminating the risks of immune responses and reduce or eliminate drug/treatment toxicity.

[1454] It is another aspect of the present invention to solve the technical problem of providing a tissue regeneration environment/system being completely or at least partially devoid of one or more, preferably a plurality of the disadvantages of known treatments.

[1455] All combinations of any of the above-mentioned features described in all above part of the present description are specifically contemplated by the Applicant to be within the scope of the present invention unless contradictory in context. Examples of such combinations are detailed throughout the present description.

[1456] Further embodiments and advantages will become apparent to a skilled reader in light of the examples provided below.

### EXAMPLES

[1457] Disclosed and described, it is to be understood that this invention is not limited to the particular examples, process steps, and materials disclosed herein as such process steps and materials may vary somewhat. It is also to be understood that the terminology used herein is used for the purpose of describing particular embodiments only and not intended to be limiting since the scope of the present invention will be limited only by the appended claims and equivalents thereof.

[1458] The following Examples are representative of techniques employed by the inventor in carrying out aspects of the present invention. It should be appreciated that while these techniques are exemplary of preferred embodiments for the practice of the invention, those of skill in the art, in light of the present disclosure, will recognize that numerous modifications can be made without departing from the spirit and intended scope of the invention.

[1459] The following starting materials and reagents were used:
[1460] Apatite ceramics (also called apatite or ceramic in the present invention) were synthesized as described in Mater Res. 2004; 7(4): 625-630.
[1461] Titanium was obtained from Goodfellow®.
[1462] Hydrogel (poly(acrylamide-co-acrylic acid) gel) was synthesized as described in Langmuir 2011; 27(22):13635-42.
[1463] PEEK was obtained from Goodfellow®.
[1464] PET (Poly(ethylene terephthtalate) was obtained from Goodfellow®.
[1465] Type-I collagen sponge was obtained from Sigma®.
[1466] Hexane was obtained from Sigma®.
[1467] 3-succinimidyl-3-maleimidopropionate (SMP) was obtained from Sigma®.
[1468] DMF was obtained from Sigma®.
[1469] PBS 1× was obtained from Gibco®.
[1470] 3-(ethoxydimethylsilyl)propylamine was obtained from Sigma®.
[1471] Ammonium persulfate was obtained from Biorad®.
[1472] N,N,N′,N′-tetramethylethylenediamine was obtained from Aldrich®.
[1473] Acrylamid was obtained from Merck®.
[1474] Acrylic acid was obtained from Merck®.
[1475] N,N-methylene-bis-acrylamide was obtained from Merck®.
[1476] NaOH was obtained from Aldrich®.
[1477] N,N,N′,N′-tetramethylethylenediamine was obtained from Aldrich®.
[1478] Dimethylaminopropyl-3-ethylcarbodiimide hydrochloride was obtained from Aldrich®.
[1479] N-hydroxysuccinimide was obtained from Aldrich®.
[1480] 2-(N-morpholino)-ethane sulfonic acid was obtained from Aldrich®.
[1481] MilliQ water: is water characterised in terms of resistivity (typically 18.2 MΩ·cm at 25° C.).
[1482] Low glucose Dulbecco's Modified Eagle Medium (DMEM) was obtained from Invitrogen®
[1483] Minimum Essential Medium Eagle without ascorbic acid (αMEM) was obtained from Invitrogen®.
[1484] All of the cell culture experiments were carried out without any serum in the medium for the first 8 hours of culture.
[1485] Osteoblast progenitors or precursor osteoblasts: MC3T3-E1 cells were obtained from ATCC®. These cells were cultured in Alpha-MEM medium supplemented with 10% fetal calf serum (FCS) and 1% penicillin/streptomycin. All cells were used at a low passage number (passage 7), were subconfluently cultured and were seeded at 10⁴ cells/cm² for the purpose of the experiments.
[1486] Human bone marrow Mesenchymal Stem Cells (hMSCs) were obtained from Lonza®. These cells were cultured in Alpha-MEM supplemented with 10% (v/v) FBS and 1% penicillin/streptomycin and incubated in a humidified atmosphere containing 5% (v/v) CO₂ at 37° C. All cells were used at a low passage number (passage 2 to 4), were subconfluently cultured and were seeded at 10⁴ cells/cm² for the purpose of the experiments.
[1487] Human adipose Mesenchymal Stem Cells (haMSCs) were obtained from Lonza®. These cells were cultured in Alpha-MEM supplemented with 10% (v/v) FBS and 1% penicillin/streptomycin and incubated in a humidified atmosphere containing 5% (v/v) CO₂ at 37° C. All cells were used at a low passage number (passage 3 to 4), were subconfluently cultured and were seeded at 10⁴ cells/cm² for the purpose of the experiments.
[1488] Mouse Hair Follicle Stem Cells were isolated and cultured as described in Methods Mol Biol. 2010; 585:401-20.
[1489] Neuron cells are Neuronal Schwann Cells obtained from ATCC®. These cells were cultured in Dulbecco's Modified Eagle's Medium supplemented with 10% (v/v) FBS and 1% penicillin/streptomycin and incubated in a humidified atmosphere containing 5% (v/v) CO₂ at 37° C. All cells were used at a low passage number (passage 6-8), were subconfluently cultured and were seeded at 10⁴ cells/cm² for the purpose of the experiments.
[1490] Human umbilical-vein endothelial cells (HUVECs) were purchased from Promocell®. HUVECs were isolated and grown on gelatin coated culture flasks in a complete HUVEC culture medium (IMDM (Invitrogen, France) supplemented with 20% (v/v) fetal bovine serum (FBS) (PAA, France) and 0.4% (v/v) EC growth supplement/heparin kit (Promocell, France)). Cells were subcultured by using trypsin/EDTA (Invitrogen, France) and maintained in a humidified atmosphere containing 5% CO₂ at 37° C. These cells were used at a passage number 3 to 5 for the purpose of the experiments.
[1491] HUVECs were seeded on each surface at a density of 50 000 cells/cm².
[1492] Human Mammary Epithelial Cells (HMEC) were obtained from Lonza®. These cells were cultured in Clonetics™ MEGM™ Mammary Epithelial Cell Growth Medium.
[1493] Hematopoietic stem (Bone marrow CD-34+ cells, Lonza). These cells were cultured on HPGM™ Hematopoietic Growth Medium in serum-free culturing.
[1494] CMFDA is a Cell Tracker Green obtained from Invitrogen®.
[1495] DAPI was obtained from Sigma®.
[1496] Fetal bovine serum (FBS) was obtained from Gibco®.
[1497] Penicillin/streptomycin was obtained from Invitrogen®.
[1498] The AlamarBlue® assay was obtained from Molecular Probes®.
[1499] Runx2 antibody was obtained from Abcam®.
[1500] Osterix antibody was obtained from Santa Cruz Biotechnology®.
[1501] Osteopontin antibody was obtained from Abcam®,
[1502] Stro-1 antibody was obtained from Abcam®,
[1503] Sox2 antibody was obtained from Santa Cruz Biotechnology®.
[1504] Sox9 antibody was obtained from Santa Cruz Biotechnology®.
[1505] BMP-6 antibody was obtained from Abcam®,
[1506] CD31 (PECAM-1) antibody was obtained from Invitrogen®,
[1507] Primers for GAP 43: 5′-AAGCTACCACTGATAACTCGCC-3′ (Forward) and 5′-CTTCTTTACCCTCATCCTGTCG-3′ (Reverse) were obtained from Invitrogen®.
[1508] Primers for Aggrecan: 5′-CACTGTTACCGCCACTTCCC-3′ (Forward) and 5′-ACCAGCGGAAGTCCCCTTCG-3′ (Reverse) were obtained from Invitrogen®.
[1509] Primers for COMP: 5′-GCTCTGTGGCATACAGGAGA-3′ (Forward) and 5′-CATAGAATCGCACCCTGATG-3′ were obtained from Invitrogen®.
[1510] Primers for Runx2: 5′-GACGTGCCCAGGCGTATTTC-3′ (Forward) and 5′-AAGTCTGGGGTCCGTCAAGG-3′ (Reverse) were obtained from Invitrogen®.
[1511] Primers for HPRT: 5′-GCAGTACAGCCCCAAAATGG-3′ (Forward) and 5′-ACAAAGTCCGGCCTGTATCCAA-3′ (Reverse) were obtained from Invitrogen®.
[1512] All peptides were synthesized using conventional solution and/or solid phase peptide synthesis methods.
[1513] All experiments were carried out with a concentration of compounds of the invention of 400 ng/mL. When cell culture duration extended beyond 24 h, a further 400 ng/mL solution of compounds of the invention was added every 24 h.
[1514] In all the following exemplified peptide sequences, X1 (or Xaa) is a serine (Ser, S).

[1515] The following general methods were used:

[1516] X-Ray Photoelectron Spectroscopy:

[1517] For X-ray photoelectron spectroscopy, AVG Scientific ESCALAB photoelectron spectrometer was used for the surface analysis with a non-monochromatized MgK 1253.6 eV source of 100 W. The area of the analytical X-ray spot on the sample surface was about 200 μm². A 45° insert angle that corresponds to about 5 nm of analyzed depth was used. A flood gun was used for charge compensation. Acquisition of high resolution spectra was performed at constant pass energy of 20 eV.

[1518] Optical Profilometry Probing:

[1519] The surface profiler system is a non-contact optical profiler that measures a wide range of surface heights. The vertical scanning interferometry mode allows for the measurement of rough surfaces and steps of up to several micrometers. This mode was used in order to measure the thickness of the extracellular matrix produced by the cells. First, after 24 h of culture, the cells were fixed with paraformaldehyde in PBS (4%) for 30 minutes at 4° C. and the samples were dehydrated in increasing concentrations of ethanol (30, 70, 80, 90, 95 and 100%) and critical-point dried. To evaluate the extent of the newly synthesized extracellular matrix, a spatula was used to scratch the surface of the materials. The samples were then metallized for 10 sec with gold or titanium before being analyzed. This procedure did not affect the cell shape and dimensions.
[1520] Immunostaining:

[1521] The cells were first fixed for 20 min with 4% paraformaldehyde/PBS at 4° C. After fixation, the cells were permeabilized in PBS containing 1% Triton X-100 for 15 min. Runx2, Osterix, Stro-1, Vinculin, Phalloidin, Osteopontin, Sox2, Sox9 antibodies were visualized by treating the cells with 1% (v/v) specific monoclonal antibodies for 1 hour at 37° C. Then the samples were incubated with Alexa Fluor® 568 or 647 (F(ab′)2 fragment of IgG(H+L)) during 30 min at room temperature. The cell nuclei were counterstained in 20 ng/mL DAPI for 10 min at room temperature.

[1522] Quantification of Positive Contact Numbers and Areas:

[1523] For this type of quantification the freeware image analysis ImageJ® software was used. The raw image was first converted to an 8-bit file, and then the unsharp mask feature was used (settings 1:0.2) to remove the image background (rolling ball radius 10). After smoothing, the resulting image, which appears similar to the original photomicrograph but with minimal background, was then converted to a binary image by setting a threshold. Threshold values were determined empirically by selecting a setting, which gave the most accurate binary image for a subset of randomly selected photomicrographs. The cell area was determined by manual delineation on raw fluorescent images. Total contact area and mean contact area per cell were calculated by “analyze particules” in ImageJ®. A minimum of 30 cells per condition were analyzed. Stro-1, CD-34+, and CD-105 expressions were determined using this procedure.

[1524] Quantitative Real Time Polymerase Chain Reaction (Q-PCR):

[1525] Total RNA was extracted by using the RNeasy total RNA kit (Qiagen®) according to the manufacturer's instructions. Purified total RNA was used as a template in order to make cDNA by a reverse transcription reaction (Gibco Brl®) with random primers (Invitrogen®). The cDNA was then used as a template for a real-time PCR amplification in the presence of SYBR green reagents (Bio-Rad®) by using a thermocycler (iCycler, Biorad®). Data were analyzed with the iCycler IQ™® software and compared by the ΔΔCt method. Briefly, the mean Ct value of the target gene was normalized to its averaged Ct values of the housekeeping gene (HPRT) to give a ΔCt value, which was then normalized to a control sample to obtain a ΔΔCt value. The results were obtained from two series of experiments performed in a triplicate.

[1526] Semi-Quantitative RT-PCR:

[1527] Total RNA was extracted by using the RNeasy Mini Kit (Qiagen) and 1 mg RNA was used for cDNA synthesis with AMV kit (Invitrogen®) according to the manufacturer' instructions. Semi-quantitative reverse transcriptase-polymerase chain reaction (RT-PCR) was performed with Taq DNA Polymerase (Invitrogen®) in a thermocycler (Bio-Rad®). The cDNA input was normalized to glyceraldehyde-3-phosphate dehydrogenase (HPRT). The PCR products were analyzed on 2% agarose gels. For the Aggrecan gene, the PCR bands were densitometrically quantified by using the BioCapt software (Vilber). Values were normalized to HPRT, and results were reported as relative gene expression.

[1528] General Procedure Used for the Covalent Depositing of the GFR-Binding Compounds as Described Herein onto Biomaterials

### Method 1: Hydrogel Surface Preparation and Covalent Grafting (Such as PLLA)

[1529] The preparation of poly(acrylamide-co-acrylic acid) gel substrates was shown as an example in order to illustrate the effect of the GFR-binding compounds as described herein. The synthesis of hydrogels is based on acrylamide and acrylic acid by polymerization in the presence of N,N′-methylene-bis-acrylamide as a cross-linker in an aqueous medium. Practically, 0.3 g of acrylamide (AM, Merck) has been dissolved in 5 mL of PBS 1× (Invitrogen). 30 μL of acrylic acid (AA, Merck), then x g (function as the stiffness) of N,N-methylene-bis-acrylamide was added under stirring. Then, a NaOH solution (1 M, Aldrich) was added dropwise to reach a pH 8. The formation of hydrogel proceeded via free radical polymerization. The starting solution was degassed during 10 min by bubbling nitrogen in order to remove the oxygen which acts as an inhibitor for the free radical polymerization process. Nitrogen atmosphere was maintained above the solution and 50 μL (corresponding to 1/100 of the total volume) of Ammonium persulfate 10% (Biorad), (free radical initiator) and then 5 μL (corresponding to 1/1000 of total volume) of N,N,N′,N′-tetramethylethylenediamine (catalyst, Aldrich) were added. The polymerizing solution was vortexed gently. Promptly, 0.5 mL of this gel solution was placed before polymerization on a glass slide and another slide was placed on the top of this structure. Reactivity ratios calculated by the Finemann-Ross and Kelen-Tudos methods showed that the copolymers were random with a reactivity ratio of rAM=3.76 and rAA=0.28. The materials obtained here have various stiffnesses ranging from 0.1 to 600 kPa.

[1530] Chemical functionalization with GFR-binding compounds as described herein of poly(acrylamide-co-acrylic acid) gel substrates was performed via the —COOH (carboxyl) functions of their surface. Hydrogels were immersed in a solution of dimethylaminopropyl-3-ethylcarbodiimide hydrochloride (EDC, 0.2 M)+N-hydroxysuccinimide (NHS, 0.1 M) in 2-(N-morpholino)-ethane sulfonic acid (MES buffer, 0.1 M in MilliQ water) overnight at room temperature without stirring and then rinsed in MilliQ water (50 mL during 30 min). The immobilization of the GFR-binding compounds as described herein was achieved in a solution of peptides/PBS 1× (C=10⁻³ M) for 18 hours at room temperature by using an orbital shaker. After grafting, the modified hydrogels were rinsed with PBS 1× for one week.

### Method 2: Solid Material Covalent Modification (Such as Ceramics or Titaniums)

[1531] The material modifications were performed in a controlled Atmosphere (Ar Atmosphere, Glove Box). The strategy for covalent modification of GFR-binding compounds as described herein involved (1) grafting of (3-aminopropyl)-triéthoxysilane (concentration of 1×10⁻²M, 4 hours) onto the surface of the biopolymer, (2) substitution of the terminal amine by a hetero-bifunctional cross-linker, a 3-succinimidyl-3-maleimidopropionate (concentration of 1×10⁻³M, 4 hours) in order to (3) reacting of the “outer” maleimide group with the GFR-binding compounds as described herein (concentration of 1×10⁻³M, 18 hours) via a thiol group present in the terminal cysteine. After grafting, the modified materials were rinsed with PBS 1× buffer for 5 days.

### Method 3: Polymer Grafted by Peptides (Such as PET or PEEK)

[1532] The polymer used in this study is poly(ethylene terephthalate) (PET). The polymers were first treated in order to create —COOH (carboxyl) functions on the PET surfaces from —OH (hydroxyl) functions. Next, the PET-COOH samples were immersed in a solution of dimethylaminopropyl-3-ethylcarbodiimide hydrochloride (EDC, 0.2 M)+N-hydroxysuccinimide (NHS, 0.1 M) in 2-(N-morpholino)-ethanesulfonic acid (MES) buffer (0.1 M in MilliQ water) and the samples were rinsed in MilliQ water (50 mL for 30 min). The same protocol was used for all the polymers containing —OH (hydroxyl) functions on their extreme surface. Finally, the covalent immobilization of the peptides was achieved by using a solution of peptides/1×PBS (C=10−3 M) incubated for 18 hours at room temperature. After grafting, the materials were rinsed in MilliQ water (100 ml) for 1 week.

### Example 1: Covalent Depositing of GFR-Binding Compounds as Described Herein onto Conventional Titanium

[1533] The material modifications were performed in a controlled atmosphere (Ar Atmosphere, Glove Box). The strategy for the covalent peptide immobilization involved (1) the grafting of (3-aminopropyl)-triethoxysilane (concentration of 1×10⁻²M, 4 hours) onto the surface of the implant, (2) substitution of the terminal amine by a hetero-bifunctional cross-linker: a 3-succinimidyl-3-maleimidopropionate (concentration of 1×10⁻³M, 4 hours) in order to (3) react the “outer” maleimide group with an osteogenic peptide (concentration of 1×10⁻³M, 24 hours) via a thiol group present in the terminal cysteine. After covalent immobilization, the modified materials were rinsed with Phosphate Buffered Saline (PBS 1×) buffer for 5 days. PBS is a buffer solution commonly used in the biological research. It is a water-based salt solution containing sodium phosphate, sodium chloride and, in some formulations, potassium chloride and potassium phosphate. The osmolarity and ion concentrations of the solutions match those of the human body (isotonic) and are thus physiological and non-toxic to the cells.

[1534] The following peptides were covalently deposited via the thiol group present in the terminal cysteine that was added to the GFR-binding compounds to allow covalent bonding to the surface of the biomaterial:

| | |
|---|---|
| SEQ ID NO: 1 | CKVPKPSSAPTQLSAISTLYLDEYDKVVLKNYQNMV |
| | VRA |
| SEQ ID NO: 2 | CKVGKASSVPTKLSAISTLYLDDMGVPTLKNYQNMV |
| | VRASGSH |
| SEQ ID NO: 3 | CASASPSSVSQDLSAISTLYLIGKTPKILKNYQMIV |
| | KSSKSS |
| SEQ ID NO: 4 | CKIPKASSVPTELNAISVLYFDENEKVILKKYRDMV |
| | VEGSG |
| SEQ ID NO: 5 | CASASPSSVSQDLNAISVLYFIGKTPKILKKYRMIV |
| | KSSKSS |
| SEQ ID NO: 6 | CAVPKASSAPTKLSATSVLYYDSSNNVVLRKHRNMV |
| | VK |
| SEQ ID NO: 7 | CTVPKPSSAPTQLSPISVLYKDDSSNVILKYHYNMV |
| | VRASGSH |
| SEQ ID NO: 8 | CAPTQLSPISVLYKDDSSNVILKYHYTLEDH |
| SEQ ID NO: 9 | CRNVQCRPTQVQLSAISTLYLEIVRKKPLKNYQTLE |
| | DH |
| SEQ ID NO: 10 | CPSSAPTQLSATSVLYYDDSSNVILRKHRQHNK |
| SEQ ID NO: 11 | CPKPSSAPTQLNAISMLYFGGGGGGGLKKYRNMVVR |
| | A |
| SEQ ID NO: 12 | CKVPKASSVPTELSAISTLYLAAAALKNYQEM |
| SEQ ID NO: 13 | CSIPKASSVPTELSATSVLYYDEYDEKVVLRKHEMV |
| | VEG |
| SEQ ID NO: 14 | CAPTKLSAISMLYLDSSNNVILKNYQ |
| SEQ ID NO: 15 | CASSAVSQELSAISMLYLGGGLKNYQDM |
| SEQ ID NO: 16 | CKASSVPTELSPISTLYKDENEKVVLKYHYDMVVE |
| | GSGSR |
| SEQ ID NO: 17 | CASAAPSSVPQKLNAISMLYFVGRKPKVLKKYRMI |
| | VRS |
| SEQ ID NO: 18 | CKVGKASSVPTKLNAISTLYLDENEKVVLKKYREG |
| | MS |
| SEQ ID NO: 19 | CPKPSSAPTQLSAISTLYLDDSSNVILKNYQMIVV |
| | RA |
| SEQ ID NO: 20 | CKVGKASSVPTKLNAISTLYLDDSSNVILKNYQ |
| SEQ ID NO: 21 | CGGGSSVPTELSAISTLYLDDYDKVILKKYRNM |
| SEQ ID NO: 36 | CKIPKASSVPTELEPLPIVYYVGRKPKVEQLSNM |
| | IVRS |
| SEQ ID NO: 37 | CASAAPSSVPQALEPLPIVYYVGRTPKVEQLSNM |
| | IVRSSK |
| SEQ ID NO: 38 | CVPTEERSVKVAKVRIKPHQGQHKEVQV |
| SEQ ID NO: 39 | CVPTEESNITMQIMRIKPHQGQHIGEMSFL |
| SEQ ID NO: 40 | CRNVQCRPTQVQLRPVQVRKIEYVRKKPKLKKAT |
| | VRLEDHLA |
| SEQ ID NO: 41 | CGIPEPSSVPEKMSSLSILFFDENKNVVLKVYPN |
| | M |
| SEQ ID NO: 42 | CGIPEPSSVPEKTSSLSLLFFDENKNVVLKVYPN |
| | M |
| SEQ ID NO: 43 | CAAPASSSVPARLSPISILYIDAANNVVYKQYED |
| | MVVEASG |
| SEQ ID NO: 44 | CAAPASSSVPARLSPISILYIDAANNVVYKQYED |
| | MVVE |
| SEQ ID NO: 45 | CAAPASSSVPARLSPISLLYIDAANNVVYKQYED |
| | M |
| SEQ ID NO: 46 | CPARLSPISLLYIDAANNVVYKQYEDM |
| SEQ ID NO: 47 | CAAAPASSSVPARLSPISILYIAAAYKQYEDM |
| SEQ ID NO: 48 | CVPQRLSPISILYIDAANNVVYKQYE |
| SEQ ID NO: 49 | CTVPKPSSAPTQLSPISILYIDAANNVVYKQYED |
| | MVVRA |

[1535] The biomaterial surface was characterized by covalently immobilizing fluorescent peptides (Herein SEQ ID NO: 1 coupled to fluorescein isothiocyanate (FITC), FIG. 1) and X-ray photoelectron spectroscopy (Table 1). The X-ray photoelectron spectroscopy was performed as described above.

[1536] The results presented in Table 1 were obtained for a titanium alloy material (Ti6Al4V metal alloy pellets) covalently modified with SEQ ID NO: 2 to 6.

TABLE 1

| | At. % | At. % |
|---|---|---|
| Name | C1s | N1s |
| Titanium | 29.07 | no detection |
| Titanium grafted covalently with SEQ ID NO: 2 | 43.65 | 5.87 |
| Titanium grafted covalently with SEQ ID NO: 3 | 42.02 | 5.47 |
| Titanium grafted covalently with SEQ ID NO: 4 | 39.95 | 5.11 |
| Titanium grafted covalently with SEQ ID NO: 5 | 40.58 | 5.2 |
| Titanium grafted covalently with SEQ ID NO: 6 | 44.01 | 4.89 |

### Example 2: Covalent Depositing of GFR-Binding Compounds as Described Herein onto Conventional PEEK Material

[1537] A polyetheretherketone (PEEK) was treated with ethylene diamine (NH₂═NH₂) to create —NH₂ (amine) functions on the PEEK surfaces from ketone (═O) functions. Next, the PEEK-NH₂ samples were immersed in a solution of a hetero-bifunctional cross-linker: a 3-succinimidyl-3-maleimidopropionate (concentration of 1×10⁻³M, 4 hours) in order to react the “outer” maleimide group with the GFR-binding compounds as described herein (concentration of 1×10⁻³M, 24 hours) via a thiol group present in the terminal cysteine. After grafting, the modified materials were rinsed with PBS 1× for 5 days.

[1538] The surfaces were characterized by grafting fluorescent peptides and by other methods such as X-ray photoelectron spectroscopy (Table 2). The X-ray photoelectron spectroscopy was performed as described above.

[1539] The results presented in Table 2 were obtained by using a PEEK covalently modified with SEQ ID NO: 7.

TABLE 2

| | At. % | At. % |
|---|---|---|
| Name | C1s | N1s |
| PEEK | 86.56 | no detection |
| PEEK grafted covalently with peptides | 71.61 | 4.98 |
| (SEQ ID NO: 7) | | |

### Example 3: Covalent Depositing of GFR-Binding Compounds as Described Herein onto PLLA

[1540] PLLA (Polylactic acid) was immersed in a solution of dimethylaminopropyl)-3-ethylcarbodiimide hydrochloride (EDC, 0.2 M)+N-hydroxysuccinimide (NHS, 0.1 M) in (2-(N-morpholino)-ethanesulfonic acid (MES buffer, 0.1 M in MilliQ water) and then rinsed in MilliQ water (during 30 min). The covalent immobilization was performed in a solution of GFR-binding compounds as described herein SEQ ID NO: 8 (concentration of 1×10⁻³M, 18 hours, room temperature). After the covalent immobilization, the modified materials were rinsed with PBS 1× for 5 days.

[1541] The surfaces were characterized by using fluorescent peptides and by using other methods such as X-ray photoelectron spectroscopy (Table 3). The X-ray photoelectron spectroscopy was performed as described above.

[1542] The results presented in Table 3 were obtained by using a PLLA covalently modified with SEQ ID NO: 8.

TABLE 3

| | At. % | At. % |
|---|---|---|
| Name | C1s | N1s |
| PLLA | 69.02 | no detection |
| PLLA grafted covalently with peptides | 72.31 | 5.07 |
| (SEQ ID NO: 8) | | |

### Example 4: Proliferation of Progenitor Bone Cells

[1543] The effect of the GFR-binding compounds as described herein (SEQ ID NO: 9 to 14) of the invention on the proliferation of osteoblast progenitors (MC3T3-E1 cells, ATCC®) was investigated. The stimulatory effect of apatite ceramics, covalently modified with at least one inducing peptide of the invention, on osteoblast progenitor cells was compared with the effect of non-modified apatite ceramics, which are conventionally used to manufacture bone implants suitable for humans and animals. The AlamarBlue® assay was used to compare the extent of cell proliferation on the different biomaterials based on detection of metabolic activity. Analysis of these data showed that the proliferation was increased significantly on apatite ceramics covalently modified with GFR-binding compounds as described herein of the invention in comparison with conventional non-modified ceramics (FIG. 2).

### Example 5: Osteogenic Differentiation of Human Mesenchymal Stem Cells

[1544] In this example, the biomaterial used was titanium Ti6Al4V metal alloy pellets. Human Mesenchymal Stem Cells (hMSCs) were obtained from Lonza®, Inc. Cells were then cultured in low glucose Dulbecco's Modified Eagle Medium (DMEM, Invitrogen®) supplemented with 10% (v/v) fetal bovine serum (FBS), 1% penicillin/streptomycin and incubated in a humidified atmosphere containing 5% (v/v) CO₂ at 37° C. All the cells were used at a low passage number (≤passage 3), were subconfluently cultured and were seeded at 10 000 cells/cm² for the purpose of the experiments. Stem cell phenotype was analyzed after 62 hours of cell culture on titanium covalently modified with GFR-binding compounds as described herein of the invention (SEQ: ID NO: 15 to 20).

[1545] To probe this lineage specification, immunostaining for Runx2 and Osterix was performed after cell fixation as described in the Methods section. The quantification of Runx2 and Osterix positive contact numbers and areas was performed as described in the Methods section.

[1546] As shown in FIG. 3, when cultured on covalently modified titanium of the invention, the vast majority of the human bone marrow mesenchymal stem cells adheres, spreads, and differentiates into osteoblast-like cells, which was confirmed by increase in the Runx2 and Osterix protein expression (FIG. 3).

### Example 6: Osteogenic Differentiation of Osteoblast Progenitors

[1547] In this example, a conventional PEEK carrier was covalently modified with the GFR-binding compounds as described herein (SEQ ID NO: 21) to produce biomaterials of the invention, and mouse mesenchymal pre-osteoblastic cells (MC3T3-E1, from ATCC®) were cultured thereon. MC3T3-E1 cells were cultured in Alpha-MEM medium supplemented with 10% fetal calf serum (FCS) and 1% penicillin/streptomycin. All the cells were used at a low passage number (passage 4) and were subconfluently cultured. The cells were plated at 10 000 cells/cm² for the purpose of these experiments. The extracellular matrix production was compared between cells cultured on conventional PEEK biomaterials and cells cultured on PEEK biomaterials covalently modified with the GFR-binding compounds as described herein of the invention (SEQ ID NO: 21) after 24 h of cell culture. This was performed by using optical profilometry system probing as described in the Methods section.

[1548] As shown in FIG. 4, the PEEK biomaterials of the invention i.e. conventional PEEK biomaterials covalently modified with at least one type of GFR-binding compounds as described herein of the invention, allow for the differentiation of mouse mesenchymal pre-osteoblastic cells into mature osteoblasts after 24 hours of culture as shown by the synthesis of extracellular matrix.

[1549] Finally, it was verified that the osteoblast progenitors were transformed into mature osteoblasts when cultured on the covalently modified PEEK biomaterials by analyzing the expression of the osteogenic biomarker Runx2, also called Cbfa-1. An increase in the Runx2 gene expression after 24 hours of culture (FIG. 5) was observed in comparison to non-modified conventional PEEK biomaterials by using Quantitative Real Time Polymerase Chain Reaction as described in the Methods section.

### Example 7: Non-Covalent Depositing of GFR-Binding Compounds as Described Herein

[1550] Non-covalent modifications of the materials were performed in air atmosphere at room temperature. The non-covalent coating strategy consisted in using a mixture of inducing peptide (SEQ ID NO: 23; concentration of 1×10⁻³M) with an apatite ceramics implant or a mixture of inducing peptide (SEQ ID NO: 22; concentration of 1×10⁻³M) with a type-I collagen sponge. The non-covalently coated conventional materials were characterized by using fluorescent peptides (Here SEQ ID NO: 22 and 23 covalently bound to fluorescein isothiocyanate (FITC), FIG. 6). The results shown here in FIG. 6 were obtained from experiments performed with apatite ceramics and a type-I collagen sponge. It can be seen that the interaction between these peptides and the apatite ceramics or the type-I collagen is stable as no significant release of peptides was observed over time. Indeed, after 3, 7 or 10 days, the osteogenic peptides were still coupled to the ceramics or the type-I collagen (FIGS. 7a and b).

[1551] Peptides that were non-covalently deposited through specific peptide fragments (such as WWFWG or GTPGP) added to GFR-binding compounds of the invention are as follows:

| | |
|---|---|
| SEQ ID NO: 22 | WWFWGKVPKPSSAPTQLSAISTLYLDEYDKVVLK |
| | NYQNMVVR |
| SEQ ID NO: 23 | GTPGPKVPKPSSAPTQLSAISTLYLDEYDKVVLKN |
| | YQNMAVR |
| SEQ ID NO: 24 | GTPGPPSSAPTQLSATSVLYYDDSSNVILRKHRMI |
| | VKS |
| SEQ ID NO: 25 | GTPGPAPTQLSPISVLYKDDSSNVILKYHY |
| SEQ ID NO: 26 | GTPGPASSAVSQELSAISMLYLGGGLKNYQDM |
| SEQ ID NO: 27 | GTPGPAPTKLSAISMLYLDSSNNVILRKHR |
| SEQ ID NO: 28 | GTPGPAPTKLSAISMLYLDSSNNVILKKYR |
| SEQ ID NO: 29 | GTPGPKASSVPTELSPISTLYKDENEKVVLKYHYD |
| | MVVEGSGSR |
| SEQ ID NO: 30 | GTPGPKASSVPTELSPISTLYKDENEKVVLKYHYD |
| | M |
| SEQ ID NO: 31 | GTPGPPKPSSAPTQLNAISMLYFGGGGGLKKYRDM |
| | QHN |
| SEQ ID NO: 32 | WWFWGKASSVPTELSPISTLYKDENEKVVLKYHYD |
| | MVVEGSGSR |
| SEQ ID NO: 33 | WWFWGASSAVSQELSAISMLYLGGGLKNYQDMQHN |
| SEQ ID NO: 34 | GTPGPRNVQCRPTQVQLSAISTLYLEIVRKKPLKN |
| | YQTLEDH |
| SEQ ID NO: 35 | GTPGPRNVQCRPTQVQLSAISTLYLAAALKNYQTL |
| | E |

### Example 8: Proliferation of Progenitor Bone Cells

[1552] The effect of the GFR-binding compounds as described herein (SEQ ID NO: 24 to 27) of the present invention on the proliferation of osteoblast progenitors was investigated. MC3T3-E1 cells were cultured in Alpha-MEM medium supplemented with 10% fetal calf serum (FCS) and 1% penicillin/streptomycin. All the cells were used at a low passage number (passage 4), were subconfluently cultured and were plated at 10 000 cells/cm² for the purpose of the experiments. The stimulatory effect of the osteogenic peptides, coupled to apatite ceramics or to type-I collagen on osteoblast progenitor cells, was compared to the effect of native apatite ceramics or of native type-I collagen sponge, which are already being used as bone graft/LT-Cage® lumbar tapered fusion devices designed to aid in the treatment of the degenerative disc disease (DDD) in humans. The AlamarBlue® assay was used to compare cell proliferation on the different biomaterials based on detection of metabolic activity. Analysis of these data showed that the cell proliferation proceeded more significantly on apatite ceramics and type-I collagen sponge when coupled to osteogenic peptides as compared to native apatite ceramics and native type-I collagen sponge (FIG. 8).

### Example 9: Osteogenic Differentiation of Human Mesenchymal Stem Cells

[1553] GFR-binding compounds as described herein were non-covalently deposited on apatite ceramics or type-I collagen onto apatite ceramics or onto type-I collagen sponge. Human Mesenchymal Stem Cells (hMSCs) were obtained from Lonza®, Inc. Cells were then cultured in low glucose Dulbecco's Modified Eagle Medium (DMEM, Invitrogen®) supplemented with 10% (v/v) fetal bovine serum (FBS), 1% penicillin/streptomycin and incubated in a humidified atmosphere containing 5% (v/v) CO₂ at 37° C. All cell culture experiments were carried out without any serum in the medium for the first 8 hours of culture. All cells were used at a low passage number (≤passage 3), were subconfluently cultured and were seeded at 10 000 cells/cm² for the purpose of the experiments.

[1554] The cell phenotype was analyzed after 96 hours of cell culture on apatite ceramics coupled with osteogenic peptides or on a type-I collagen sponge coupled with osteogenic peptides (SEQ: ID NO: 28 to 31). On GFR-binding compounds as described herein-coupled apatite ceramics and type-I collagen sponge, the vast majority of the human bone marrow mesenchymal stem cells adhere, spread, and differentiate into osteoblast-like cells as confirmed by analysis of Runx2 and Osterix expression (FIG. 9a). To probe this lineage specification, immunostaining for Runx2 and Osterix was performed after cell fixation as described in the Methods section. The quantification of Runx2 and Osterix positive contact numbers and areas was performed as described in the Methods section.

[1555] Finally, it was verified that the hMSCs were differentiated into mature osteoblasts by analyzing the activity of the osteogenic biomarker ALP (Alkaline Phosphatase Activity). We observed an increase in the ALP activity after 1 week of culture on type-I collagen sponge coupled with GFR-binding compounds as described herein (SEQ ID NO: 32) (FIG. 9b).

### Example 10: Osteogenic Differentiation of Osteoblast Progenitors

[1556] Mature osteoblasts are the cells responsible for bone formation and are derived from precursor osteoblasts. Mature osteoblasts were obtained and characterized by the expression of osteoblastic markers such as Runx2 and the synthesis of extracellular matrix proteins.

[1557] The effect of the GFR-binding compounds as described herein (SEQ ID NO: 33) on the differentiation of osteoblast progenitors was evaluated. These osteoblast progenitors were seeded onto the apatite ceramics or on type-I collagen sponge that were both coupled with osteogenic peptides. The cells were differentiated into mature osteoblasts after 48 hours of culture on these non-covalently coated materials. The differentiated osteoblast progenitors produced extensive amounts of extracellular matrix proteins such as Osteopontin (OPN) as compared to the osteoblast precursors cultured on a native type-I collagen sponge. This was seen from Osteopentin immunofluorescence staining after cell fixation as described in the Methods section (FIG. 10).

[1558] Finally, it was verified that the osteoblast progenitors were differentiated into mature osteoblasts by analyzing the expression of the osteogenic biomarker Runx2. An increase in the Runx2 gene expression after 24 hours of culture (FIG. 11) was observed by using Quantitative Real Time Polymerase Chain Reaction as described in the Methods section.

### Example 11: Cartilage Regeneration

[1559] hMSCs were cultured on native hydrogels ((poly(acrylamide-co-acrylic acid)) having a stiffness of 14 kPa and on hydrogels (also at a stiffness of 14 kPa) covalently modified with GFR-binding compounds as described herein (SEQ ID NO: 36 and 37). The expression of the Sox9 protein was observed after 96 hours of culture suggesting that hMSCs have committed towards chondrocyte like cell differentiation (FIG. 12a). It was then verified that these hMSCs cultured on the covalently modified hydrogels were differentiated into chondrocyte cells by analyzing the expression of the chondrocyte gene biomarker: Aggrecan. The increased expression of this gene was observed after 96 hours of culture (FIG. 12b). For that a semi-quantitative RT-PCR was performed as described in the Methods section for the Aggrecan gene and a Quantitative Real Time PCR for Sox9.

### Example 12: Endothelialization

[1560] Human umbilical-vein endothelial cells were cultured on a native polymer (PET) and on a polymer (PET) covalently modified with endothelialization GFR-binding compounds as described herein (SEQ ID NO: 38). An increase in the area of the adherent junctions (CD31) was observed after 36 hours of culture on the covalently modified PET (FIG. 13). The results observed showed that the GFR-binding compounds as described herein have the ability to rapidly induce stent endothelialization.

### Example 13: Angiogenesis

[1561] Human umbilical-vein endothelial cells were cultured on a native polymer (PET) and on a polymer (PET) covalently modified with vascular peptides (SEQ ID NO: 39). The formation of tube-like structures was observed after 18 hours of culture on the covalently modified PET (FIG. 14). The results observed showed that the GFR-binding compounds as described herein have the ability to rapidly induce angiogenesis.

### Example 14: Wound Healing and Increase of Collective Cell Migration

[1562] Human epithelial cells were cultured on a native polymer (PET) and on a polymer (PET) covalently modified with tissue-closure peptides (SEQ ID NO: 40). A usual scratch test was applied (Nat Protoc 2: 329-333) on a monolayer of these epithelial cells in culture (FIG. 15a). An increase in the cell migration velocity for cells cultured on PET covalently modified with peptides was observed after 18 hours of culture. The cells migrated collectively and the communication between cells was maintained (FIG. 15b). In fact, the injury has been closed rapidly for the cells cultured on polymers covalently modified with GFR-binding compounds as described herein. The results observed showed that the GFR-binding compounds as described herein have the ability to rapidly induce tissue closure such as in wound healing.

### Example 15: Loss of Quiescence and Activation of Hair Follicle Stem Cells

[1563] Isolated Hair Follicle Stem Cells were cultured on native hydrogels ((poly(acrylamide-co-acrylic acid)) having a stiffness of 73 kPa and hydrogels (also at a stiffness of 73 kPa) covalently modified with hair follicle stem cells GFR-binding compounds as described herein (SEQ ID NO: 41 and 42). An increase in the Sox2 protein expression was observed indicating the activation of these stem cells (FIG. 16a). In parallel, a decrease in the BMP-6 release in the cell culture medium was observed (FIG. 16b). In these conditions, the decrease in the BMP-6 release indicated that the hair follicle stem cells were activated and that the hair growth process was induced.

### Example 16: Muscle Differentiation of Human Mesenchymal Stem Cells

[1564] hMSCs were cultured on native hydrogels ((poly(acrylamide-co-acrylic acid)) having a stiffness of 28 kPa and on hydrogels (having the same stiffness of 28 kPa) covalently modified with musculogenic peptides (SEQ ID NO: 43 to 48). We observed an increase in the cell area of the cells cultured on the covalently modified hydrogels after 62 hours of culture suggesting that hMSCs have committed towards muscle differentiation (FIG. 17a).

[1565] It was then verified that these hMSCs cultured on the covalently modified hydrogels were differentiated into muscle cells by analyzing the expression of the musculogenic biomarker COMP (Cartilage Oligomeric Matrix Protein). An increased expression of this gene was observed after 96 hours of culture (FIG. 17b). For that a Quantitative Real Time PCR was performed as described in the Methods section.

### Example 17: Neuron Growth

[1566] Neurons were cultured on native titanium (control) and on titanium covalently modified with neurogenic peptides (SEQ ID NO: 49). A rapid establishment of cell-cell contacts via dendrite growth was observed after 6 hours of culture on the covalently modified titanium (FIG. 18a). To further confirm this the expression of the Growth Associated Protein 43 (GAP43) gene was verified for neuron cells cultured on materials covalently modified with neurogenic peptides (SEQ ID NO: 49). A high level of expression of this gene was observed after 48 hours of culture on the covalently modified titanium by using Quantitative Real Time Polymerase Chain Reaction as described in the Methods section (FIG. 18b).

### Example 18: Loss of Stemness

[1567] hMSCs were cultured on conventional cell culture plastic plates with or without the presence in the cell culture media of different GFR-binding compounds as described herein (SEQ ID NO: 50 to 88) in solution. A rapid (48 hours) loss of the stemness marker STRO-1 was observed for the cells cultured in the presence of GFR-binding compounds as described herein in the cell media solution (FIG. 19). This was probed by Stro-1 immunostaining after cell fixation as described in the Methods section. The quantification of Stro-1 positive contact numbers and areas was performed as described in the Methods section. A minimum of 30 cells per condition were analyzed. Stro-1 positive marrow cells are multipotential and capable of differentiating into multiple mesenchymal lineages including stromal cells with a phenotype resembling vascular smooth muscle cells that can support hematopoiesis, adipocytes, osteoblasts, and chondrocytes. All the sequences have a RMSD of 2.45 Å or less as defined herein and as shown in table 4.

TABLE 4

| SEQ ID | | |
|---|---|---|
| NO: | Sequence | RMSD (Å) |
| 50 | NDEGLECVPTEERPVQVRKIRIKPHQGQKKATVFLQHNK | 1.23 |
| 51 | ASASPSSVPQDLEPLTILYYVGRTPKVEQLSNMV | 1.51 |
| 52 | RNVQCRPTQLEPLPIVYYEIVRKKPEQLSNTLEDHLA | 1.7 |
| 53 | VPTKLSPISILYIDDMGVPTYKQYEEGMSVAE | 1.62 |
| 54 | VPQALSPISILYIDDMGVPTYKQYEEGMSVAE | 1.53 |
| 55 | VPTEESNITTQIMRIKPHQGQHIGEMSFLQH | 1.1 |
| 56 | VPTELSPISILFIRIKPHQGHLGEMSAAVVE | 0.82 |
| 57 | TQVQLEPLTLLYYDENEKVIEQLSNDMVVE | 0.79 |
| 58 | VQLRLEPLTILYYDSANNVVEQLSNDMVVR | 0.78 |
| 59 | APTKLEPLEIVYYDDSSNVIEQLSNNMVVR | 0.92 |
| 60 | VPQALSPISILFIVGRKPKVYKQYEMIVERS | 0.97 |
| 61 | APTQLSPISILFIVGRKPKVYKQYERLEEH | 0.81 |
| 62 | VPQALNAISTLYFDDSSNVILKKYRNMAVS | 0.92 |
| 63 | VPEKMSSLSILFFDENKNVVLKVYPNMAVS | 0.92 |
| 64 | VPARLSPISILYIDAANNVVYKQYEDM | 0.81 |
| 65 | VPQALSPINMLYFNEKNQIIYGKIPFLQHNK | 0.86 |
| 66 | TPTKMSPINMLYFNEKNNIIYGKIPGMVVD | 0.92 |
| 67 | APTQLSAISTLYLEIVRKKPLKNYQFLQHNK | 0.79 |
| 68 | APTQLSAISTLYLEIVRKKPLKNYQEMEDH | 0.92 |
| 69 | NDEGLECVPTEERPVQVRKIRIKPHQGQKKATVFLQHNK | 1.1 |
| 70 | ASASPSSVPQDLEPLTILYYVGRTPKVEQLSNMVEDH | 1.62 |
| 71 | RNVQCRPTQLEPLPIVYYEIVRKKPEQLSNTLEDHLA | 1.1 |
| 72 | VPTKLSPISILYIDKMGVPTYKQYEEGMSVAE | 1.1 |
| 73 | VPARLSPISILYIDEMGVPTYKQYEEGMSVAE | 1.2 |
| 74 | VPTEESNITTQIMRIKPHQGQHIGEMSFLQH | 1.31 |
| 75 | VPQALSPISILFIRLKPHQGHLGEMSNMVVR | 1.23 |
| 76 | VPQALEPLTLLYYDENEKVIEQLSNDMVVE | 1.24 |
| 77 | VPTELEPLTILYYDSANNAVEQLSNDMVKS | 1.01 |
| 78 | APTKLEPLTIVYYDDSSNVIEQLSNNMVVR | 0.91 |
| 79 | VPQALSPISILFIVGRKPKVYKQYEMIVERS | 0.72 |
| 80 | VPTELSPISILFIVGGKPKVYKQYENMVVE | 0.77 |
| 81 | SRVHHNAISTLYFDESSNVILKKYRGMSVVE | 0.88 |
| 82 | VPEKMSSLSILFFDENKNAALKVYPNMTVE | 0.77 |
| 83 | VPARLSPISILYIDAANNVVYKQYEDMVKS | 0.76 |
| 84 | VPTEESPINMLYFNEKNQIIYGKIPMIVVE | 0.8 |
| 85 | TPTKMSPINMLYFNEKNNIIYGKIPGMVVD | 0.89 |
| 86 | VPTHHSAISTLYLELAGEKPLKNYQFLQHNK | 0.91 |
| 87 | APTKLSAISTLYLEIVREEPLKNYQEMVVD | 0.81 |
| 88 | VSQDLSAISTLYLKIVRKEPLKNYQEMVEE | 0.79 |

### Example 19: Differentiation of Human Hematopoitic Stem Cells

[1568] hMSCs were cultured on conventional cell culture plastic plates with or without the presence in the cell culture media of different GFR-binding peptides as described herein (SEQ ID NO: 2147 to 2157) in solution. A rapid (48 hours) loss of the sternness marker CD34+ was observed for the cells cultured in the presence of GFR-binding peptides as described herein in the cell media solution. This was probed by CD-34+ immunostaining after cell fixation as described in the Methods section. The quantification of CD-34+ positive contact numbers and areas was performed as described in the Methods section. A minimum of 30 cells per condition were analyzed. CD-34+ positive marrow cells are multipotential and capable of differentiating into all the various blood cell types. All the sequences have a RMSD of 2.45 Å or less as defined herein and as shown in table 5.

TABLE 5

| | | | CD34+ |
|---|---|---|---|
| SEQ ID | | RMSD | Expression |
| NO: | Sequences | (Å) | (%) |
| 2147 | IPKASSAPVGQRPVQMRKIDKGVVTYKKATVSSVEESGSL | 0.93 | 27 |
| 2148 | KASSVPQEERPVQMRKIGGGGGGGKKATVMIVRSSKSS | 2.03 | 32 |
| 2149 | VSQAARPVQTRKIDDMGVPTKKATVAAVKS | 1.04 | 28 |
| 2150 | PTSSAPTDLRSVKMAKVEIVRKKPIFKEVQVDMVVKASGSH | 1.31 | 26 |
| 2151 | PTSSVPTGGRSVKMAKVDKGVVTYKEVQVMVVAESKSS | 1.45 | 24 |
| 2152 | IPKASSVPQSSSNITMQIMGGGGGGGIGEMSSSVKSSGSL | 2.14 | 30 |
| 2153 | KASSSRVKMSNITVQIMRIKPHQGQHIGEMSVVEEHASGSH | 1.44 | 22 |
| 2154 | VPTAAEPLTMLYYEIVRKKPIFEQLSNMVEHS | 1.67 | 21 |
| 2155 | EPSSSRVRLEPLTTLYYGGGGGGGEQLSNVVEEHSKSS | 2.05 | 29 |
| 2156 | APVKMEPLPTVYYDDMGVPTEQLSNDMVEESGSL | 1.18 | 25 |
| 2157 | EPSSVSQAAEPLPIVYYRIKPHQGQHEQLSNMIVKSSKSS | 1.31 | 23 |

### Example 20: RMSD Measurement and Biological Activity

[1569] RMSD values are always calculated for a GFR-binding peptide sequence exempt from any possible bioactive-carrier-affinity-containing group as defined herein. When needed i.e. when attachment to a bioactive carrier is contemplated, the bioactive-carrier-affinity-containing group is then present in the GFR-binding compound when it is biologically tested.

[1570] Using the method detailed in the description, the RMSD of 57 previously reported peptide sequences have been determined (Table 6) and correlated with the expression of STRO-1 in solution. These data show that a calculated value of RMSD of more than 2.45 Å, in particular more than 2 Å, more particularly more than 1.79 Å, always correlates with no significant hMSCs commitment and/or differentiation of the treated cells. One should note that it is commonly admitted that the expression of STRO-1 in a cell is indicative of a cell that is in a substantially non-differentiated state and the decrease of its expression of at least about 20% is indicative of a cell that has started a processus of differentiation but which may not result in the differentiation of the cell. A decrease of more than 50% would be indicative of the presence of a significant shift towards a differentiated state. A decrease of more than 70% would be indicative of the presence of a very important shift towards a differentiated state. A sustained decrease (e.g. for at least 96 h) of more than 50% or 70% would be indicative of the presence of an even more important shift towards a differentiated state.

TABLE 6

| | | | CD34+ |
|---|---|---|---|
| SEQ ID | | RMSD | Expression |
| NO: | Sequences | (Å) | (%) |
| 2158 | VEQLSNMVVK | 5.2 | 98 |
| 2159 | PIIYYVGRNVRVEQLSNMVVRA | 5.7 | 92 |
| 2160 | PIIYYVGRNVRVEQLSNMVVRRA | 6.1 | 98 |
| 2161 | DPLPIIYYVGRNVRVEQLSNMVVRACKCS | 4.9 | 97 |
| 2162 | ENVNLKKYRNMIVKSCGCH | 7.3 | 97 |
| 2163 | TPTYSRPVQKAELTR | 6.3 | 97 |
| 2164 | HIRSTTSSYVSLKSNITNRTIQTPTYSYT | 8.1 | 98 |
| 2165 | LMDLARMPSCLRGERAVPQDTTGYFTWSSNITPLNFIF | 8.6 | 92 |
| 2166 | NEVLRFCGIQVPEGDEPLT | 6.7 | 98 |
| 2167 | LNEVLRFCGIQVPEGDEPLTY | 6.8 | 99 |
| 2168 | MSRVLFEPLTFLQTGSGLPDEKTLG | 5.9 | 94 |
| 2169 | IKSPARHSAPTHQEPLP | 4.5 | 98 |
| 2170 | NPGASASPCCVSQDLEPLPIL | 5.3 | 86 |
| 2171 | SHQSAGDSIKSPARHSAPTHQEPLPD | 6.4 | 91 |
| 2172 | PNYSVPAGNKPLSERE | 6.8 | 95 |
| 2173 | TKPLSSLLFPNWNTTTTPTPPRP | 7.1 | 91 |
| 2174 | CVTKPLSSLLFPNWNTTTTPTPP | 7 | 92 |
| 2175 | VGAAWWLREQGSPINTLAVPA | 5.9 | 88 |
| 2176 | MQCRELVTQVTEEPISQTEDGEEQESTTTPRLKGQKKE | 4.3 | 85 |
| 2177 | VPTKLEPISVLYKDDMGVPTLKYHYEGMAVSECGCR | 4.2 | 81 |
| 2178 | SPISILVVPELDASLPEKRPSLDGFEALLVYNAPKA | 5.5 | 82 |
| 2179 | TLXPIVSSXNPSPISFRXIKILLHDLEVVPFPKSRVR | 4.8 | 84 |
| 2180 | VPTKLSPISILYLDKGVVTYKFKYEGMSVAECGCR | 4.1 | 80 |
| 2181 | VPTKLSPISILYKDDMGVPTYKFKYEGMSVAECGCR | 4 | 82 |
| 2182 | VPTELSPISLLYLDEFEKVTLKNYQDMVVDG | 3.7 | 87 |
| 2183 | TPTVVSATSL | 3.6 | 98 |
| 2184 | SATSRLALSDVPAELAA | 5.2 | 98 |
| 2185 | LGIAAIIFLQQVPAAFSATSPPG | 5.7 | 97 |
| 2186 | SVPAVCSATSATGPYSSVTVTSWPSIVATGGTT | 4.5 | 92 |
| 2187 | SVPAVCSATSATGPYSTATNTVWPSIVATGGTT | 5.2 | 92 |
| 2188 | SSVPAVCSATSATGPYSSGSVEVTFDVYATTVY | 5.1 | 92 |
| 2189 | SSVPAVCSATSATGPYSTATNTVWFDVYATTVY | 4.7 | 91 |
| 2190 | VHLLKPHAVPKACCAPTKLSATSVLYYDSSNNVILRKHRNMV | 3.8 | 88 |
| | VRACGCH | | |
| 2191 | ANINKDRDNVPAATSSLSKAYNP | 6.2 | 92 |
| 2192 | SFRTARANAPTGRSSLSGEKEQQEASTHS | 5.4 | 91 |
| 2193 | DKPEESSSTPTHAQCICSSLSEAIVSSVLSTRLVLSQISLTRAK | 4.8 | 87 |
| | RAFE | | |
| 2194 | KGSEYEKLVVSGITQVYQSSLSWHGCKSCCEVQVXNLXILIR | 4.1 | 88 |
| | LYDVHYYN | | |
| 2195 | MALPQPRGSSLSKAPVVVAPCMALKRVNIRSIVFEVLKTMNQ | 4.7 | 82 |
| | NCIHETPN | | |
| 2196 | MAAQDEWRDAITLTMGRDLKKVPQHLNAISVIDPVT | 7 | 83 |
| 2197 | LSLLAPPEPVWNHETSYGSDCHVPTNVNAISKMIDKSNHQTG | 4.3 | 93 |
| 2198 | APTKLNAISVLYFDDSSNVILKKYRNMIVKS | 5.8 | 84 |
| 2199 | APTQLSAISVL | 2.9 | 93 |
| 2200 | FDSRVLKSAISFKENIIF | 2.8 | 89 |
| 2201 | KIPKPSSAPTELSAISMC | 3.3 | 78 |
| 2202 | CPKPSSAPTELSAISMLL | 3.6 | 79 |
| 2203 | TCCVPELSAISMLYLDEN | 4.7 | 84 |
| 2204 | KIPKPSSAPTELSAISMLC | 3.6 | 82 |
| 2205 | KIPKPSSAPTELSAISMLYC | 3.6 | 80 |
| 2206 | CIPKPSSAPTELSAISMLYL | 3.6 | 83 |
| 2207 | CKIPKPSSAPTELSAISMLYL | 3.5 | 78 |
| 2208 | AETLHTLGLSAPVIESAISDAI | 4.6 | 93 |
| 2209 | MRTESTPTTASAISYECLWSPPSNEAAKLHFDS | 6.1 | 94 |
| 2210 | SRVLPIVVQGYVPVQDTKFLGIYYVIGFIIARVILSSSSAISSLN | 4.7 | 84 |
| | KS | | |
| 2211 | CCAPTELSAISVLYFDDSSNVILKKYRNMVVRACGCR | 3.4 | 81 |
| 2212 | CCAPTQLSAISVLYFDDSSNVILKKYRNMVVRACGCR | 3.2 | 82 |
| 2213 | KPCCAPTQLSAISVLYFDDSSNVILKKYRNMVVRACGCR | 3.6 | 80 |
| 2214 | KPCCAPTELSAISVLYFDDSSNVILKKYRNMVVRACGCR | 3.3 | 83 |

[1571] Likewise, using the method detailed in the description, the RMSD of another 27 previously reported peptide sequences have been determined (Table 7) and correlated with the expressions of STRO-1 and CD-105 in solution. These data show that a calculated value of RMSD of more than 2.45 Å, in particular more than 2 Å, more particularly more than 1.79 Å, always correlates with no significant hMSCs commitment and/or differentiation of the treated cells. Data were obtained with peptides in solution (i.e. not combined with a bioactive carrier).

TABLE 7

| SEQ | | | STRO-1 | CD-105 |
|---|---|---|---|---|
| ID | | RMSD | express- | express- |
| NO: | Sequences | (Å) | ion (%) | ion (%) |
| 2215 | VPQTLDPLPIIYYVGRNVRVEQLSNMVVRA | 2.79 | 71 | 68 |
| 2216 | VPQTLDPLPIIYYVGRNVRVEQLSNMVVRACKCS | 2.94 | | |
| 2217 | CCVPQTLDPLPIIYYVGRNVRVEQLSNMVVRACKCS | 3.04 | | |
| 2218 | APTRLGALPVLYHLNDENVNLKKYRNMIVKS | 2.93 | | |
| 2219 | APTRLGALPVLYHLNDENVNLKKYRNMIVKSCGCH | 3.12 | | |
| 2220 | CCAPTRLGALPVLYHLNDENVNLKKYRNMIVKSCGCH | 3.07 | | |
| 2221 | VPTTLDAISMLFMNEHSKVVLKNYQDMVVDG | 2.92 | | |
| 2222 | VPTTLEAISMLFMNEHSKVVLKNYQDMVVDG | 2.93 | | |
| 2223 | MAFKDTGKAPVEPEVAIHRIRITLTSRSVKSLEK | 3.41 | | |
| 2224 | LSTQVSQKPLSDKNQNLK | 2.95 | | |
| 2225 | EYAKAWFKLLHRDMGPVQRYLGPLVPTQTWLWQDIVPA | 4.03 | | |
| | GKPLSDADVA | | | |
| 2226 | APTELSPISVLYFDQDNNVVLKKYNKMVVKA | 2.67 | | |
| 2227 | APTKLSPISMLYYDNNDNVVLRHYEDMVVDE | 2.94 | | |
| 2228 | VPERLSPISVLFFDNSDNVVLRHYEDMVVDE | 2.96 | | |
| 2229 | VPERLSPISVLFFDNEDNVVLRHYEDMVVDECGCR | 2.77 | | |
| 2230 | CCVPERLSPISVLFFDNEDNVVLRHYEDMVVDECGCR | 2.69 | 81 | 78 |
| 2231 | VPTELSSLSLLYTDEHGTVVLKVYQDMVVEG | 2.88 | | |
| 2232 | VPTELSSLSLLYTDEHGAVVLKVYQDMVVEG | 2.88 | | |
| 2233 | CCVPTELNAISVLYFDDSSNVILKKYEDMVVEACGCR | 3.3 | | |
| 2234 | NSCCVPTELNAISVLYFDDSSNVILKKYEDMVVEACGCR | 3.01 | | |
| 2235 | APTALSAISMLYFDESGNVVLRQYEDMVVEG | 2.81 | 77 | 63 |
| 2236 | APTKLSAISMLYFDNDENVVLRQYEDMVVEA | 2.8 | | |
| 2237 | CCAPTQLSAISVLYFDDSSNVILKKYEDMVVEACGCR | 2.69 | | |
| 2238 | CCAPTELSAISVLYFDDSSNVILKKYEDMVVEACGCR | 2.69 | 76 | 72 |
| 2239 | KPCCAPTQLSAISVLYFDDSSNVILKKYEDMVVEACGCR | 2.58 | | |
| 2240 | KPCCAPTELSAISVLYFDDSSNVILKKYEDMVVEACGCR | 2.6 | 73 | 69 |
| 2241 | VPTEEFNVTMQIMRIKPHQGQHIGEMSFLQHNK | 3.04 | | |

[1572] Likewise, using the method detailed in the description, the RMSD of 75 GFR-binding peptide sequence representatives of the invention have been determined (Table 8) and correlated with the expression of STRO-1. SEQ ID NO: 1 to 49 were tested in combination with a bioactive carrier as defined above in the Examples Section (i.e. titanium, ceramics, collagen, etc. . . . ), whereas SEQ ID NO: 2242 to 2267 were tested in solution. These data show that a calculated value of RMSD of 2.45 Å or less, in particular 2 Å or less, more particularly 1.79 Å or less, always correlates with a significant hMSCs commitment and/or differentiation of the treated cells.

TABLE 8

| | | | STRO-1 |
|---|---|---|---|
| SEQ ID | | RMSD | express- |
| NO: | Sequences | (Å) | ion (%) |
| 1 | CKVPKPSSAPTQLSAISTLYLDEYDKVVLKNYQNMVVRA | 1.23 | 26 |
| 2 | CKVGKASSVPTKLSAISTLYLDDMGVPTLKNYQNMVVRASG | | |
| | SH | 1.33 | 21 |
| 3 | CASASPSSVSQDLSAISTLYLIGKTPKILKNYQMIVKSSKSS | 0.98 | 18 |
| 4 | CKIPKASSVPTELNAISVLYFDENEKVILKKYRDMVVEGSG | 1.09 | 27 |
| 5 | CASASPSSVSQDLNAISVLYFIGKTPKILKKYRMIVKSSKSS | 1.34 | 26 |
| 6 | CAVPKASSAPTKLSATSVLYYDSSNNVVLRKHRNMVVK | 1.33 | 26 |
| 7 | CTVPKPSSAPTQLSPISVLYKDDSSNVILKYHYNMVVRASGS | 0.88 | 18 |
| | H | | |
| 8 | CAPTQLSPISVLYKDDSSNVILKYHYTLEDH | 1.93 | 19 |
| 9 | CRNVQCRPTQVQLSAISTLYLEIVRKKPLKNYQTLEDH | 1.12 | 19 |
| 10 | CPSSAPTQLSATSVLYYDDSSNVILRKHRQHNK | 1.33 | 19 |
| 11 | CPKPSSAPTQLNAISMLYFGGGGGGGLKKYRNMVVRA | 2.16 | 31 |
| 12 | CKVPKASSVPTELSAISTLYLAAAALKNYQEM | 2.21 | 28 |
| 13 | CSIPKASSVPTELSATSVLYYDEYDEKVVLRKHEMVVEG | 1.43 | 23 |
| 14 | CAPTKLSAISMLYLDSSNNVILKNYQ | 0.56 | 16 |
| 15 | CASSAVSQELSAISMLYLGGGLKNYQDM | 2.01 | 21 |
| 16 | CKASSVPTELSPISTLYKDENEKVVLKYHYDMVVEGSGSR | 1.03 | 18 |
| 17 | CASAAPSSVPQKLNAISMLYFVGRKPKVLKKYRMIVRS | 1.04 | 21 |
| 18 | CKVGKASSVPTKLNAISTLYLDENEKVVLKKYREGMS | 1.03 | 19 |
| 19 | CPKPSSAPTQLSAISTLYLDDSSNVILKNYQMIVVRA | 1.41 | 20 |
| 20 | CKVGKASSVPTKLNAISTLYLDDSSNVILKNYQ | 0.94 | 18 |
| 21 | CGGGSSVPTELSAISTLYLDDYDKVILKKYRNM | 2.11 | 14 |
| 22 | WWFWGKVPKPSSAPTQLSAISTLYLDEYDKVVLKNYQNMVV | 0.87 | 17 |
| | R | | |
| 23 | GTPGPKVPKPSSAPTQLSAISTLYLDEYDKVVLKNYQNMAVR | 0.89 | 17 |
| 24 | GTPGPPSSAPTQLSATSVLYYDDSSNVILRKHRMIVKS | 1.33 | 21 |
| 25 | GTPGPAPTQLSPISVLYKDDSSNVILKYHY | 1.82 | 23 |
| 26 | GTPGPASSAVSQELSAISMLYLGGGLKNYQDM | 2.3 | 22 |
| 27 | GTPGPAPTKLSAISMLYLDSSNNVILRKHR | 1.44 | 19 |
| 28 | GTPGPAPTKLSAISMLYLDSSNNVILKKYR | 1.67 | 19 |
| 29 | GTPGPKASSVPTELSPISTLYKDENEKVVLKYHYDMVVEGSG | 1.17 | 21 |
| | SR | | |
| 30 | GTPGPKASSVPTELSPISTLYKDENEKVVLKYHYDM | 1.65 | 18 |
| 31 | GTPGPPKPSSAPTQLNAISMLYFGGGGGLKKYRDMQHN | 2.36 | 31 |
| 32 | WWFWGKASSVPTELSPISTLYKDENEKVVLKYHYDMVVEGS | 1.18 | 21 |
| | GSR | | |
| 33 | WWFWGASSAVSQELSAISMLYLGGGLKNYQDMQHN | 1.97 | 28 |
| 34 | GTPGPRNVQCRPTQVQLSAISTLYLEIVRKKPLKNYQTLEDH | 1.27 | 18 |
| 35 | GTPGPRNVQCRPTQVQLSAISTLYLAAALKNYQTLE | 2.06 | 28 |
| 36 | CKIPKASSVPTELEPLPIVYYVGRKPKVEQLSNMIVRS | 1.84 | 19 |
| 37 | CASAAPSSVPQALEPLPIVYYVGRTPKVEQLSNMIVRSSK | 1.54 | 21 |
| 38 | CVPTEERSVKVAKVRIKPHQGQHKEVQV | 1.8 | 23 |
| 39 | CVPTEESNITMQIMRIKPHQGQHIGEMSFL | 0.79 | 16 |
| 40 | CRNVQCRPTQVQLRPVQVRKIEYVRKKPKLKKATVRLEDHL | 0.88 | 18 |
| | A | | |
| 41 | CGIPEPSSVPEKMSSLSILFFDENKNVVLKVYPNM | 1.08 | 22 |
| 42 | CGIPEPSSVPEKTSSLSLLFFDENKNVVLKVYPNM | 1.04 | 28 |
| 43 | CAAPASSSVPARLSPISILYIDAANNVVYKQYEDMVVEASG | 1.11 | 27 |
| 44 | CAAPASSSVPARLSPISILYIDAANNVVYKQYEDMVVE | 1.47 | 27 |
| 45 | CAAPASSSVPARLSPISLLYIDAANNVVYKQYEDM | 1.45 | 24 |
| 46 | CPARLSPISLLYIDAANNVVYKQYEDM | 1.82 | 19 |
| 47 | CAAAPASSSVPARLSPISILYIAAAYKQYEDM | 1.77 | 18 |
| 48 | CVPQRLSPISILYIDAANNVVYKQYE | 0.95 | 18 |
| 49 | CTVPKPSSAPTQLSPISILYIDAANNVVYKQYEDMVVRA | 0.74 | 18 |
| 2242 | VPTAASAISILYLDAANNVVLKNYQAAVVE | 1.02 | 17 |
| 2243 | VPEAASSLSMLFFEIVRKKPIFLKVYPAATVE | 1.32 | 19 |
| 2244 | VPTVVSAISTLYLRIKPHQGQHLKNYQVVVVE | 1.56 | 21 |
| 2245 | APTLLNAISMLYFNDKQQIILKKYRLLVVR | 0.97 | 22 |
| 2246 | APTGGSATSMLYYDKGVVTYLRKHRGGVVK | 1.12 | 23 |
| 2247 | VPTSSSPISTLYIDKGVVTYLKYHYSSVAE | 1.52 | 20 |
| 2248 | VPTAAEPISMLYLDEYDKVVKFKYEAAAVS | 1.61 | 26 |
| 2249 | TPTSSSPINTLYFDDMGVPTYGKIPSSVVD | 1.31 | 25 |
| 2250 | VPTVVSPISMLYIDDMGVPTYKQYEVVVVE | 1.41 | 26 |
| 2251 | APVAAKPLSMLYVDKGVVTYDHHKDAAVEE | 0.98 | 22 |
| 2252 | VPQAAEPLPMLYYDKGVVTYEQLSNAAVRS | 0.95 | 19 |
| 2253 | VPQQQEPLTTLYYDEYDKVVEQLSNQQVKS | 1.16 | 18 |
| 2254 | VPTMMSNITTQIMRIKPHQGQHIGEMSMMQHN | 1.56 | 19 |
| 2255 | SRVAARSVKMAKVGGGGGGGKEVQVAAEEH | 2.08 | 31 |
| 2256 | VPTDDSATSTLYYDKGVVTYLRKHRDDEHS | 1.73 | 27 |
| 2257 | VPTGGEPLTTLYYNDKQQIIEQLSNGGEHS | 1.92 | 26 |
| 2258 | SRVLLRPVQMRKIDKGVVTYKKATVLLEEH | 1.85 | 21 |
| 2259 | TQVAARPVQTRKIDDMGVPTKKATVAAEDH | 1.93 | 23 |
| 2260 | VPQRLEPLTILYYDAANNVVEQLSNDMVKS | 0.83 | 23 |
| 2261 | NDEGLESVPTGQSPISILYIRIKPHQGQHYKQYELEEHSQSES | 1.22 | 17 |
| | R | | |
| 2262 | HVTKPTSVPTKLSPISILFIDDSSNVIYKQYENMVVESSGSH | 1.34 | 18 |
| 2263 | ASASPSSAPVDLKPLSMLYVIGKTPKIDHHKDMIVEESKSS | 1.41 | 16 |
| 2264 | KIPKASSVPQELEPLPIVYYDENEKVVEQLSNDMVRSGSGSR | 1.45 | 24 |
| 2265 | AVPKASSVPQKLEPLTILYYDSSNNVIEQLSNNMVKSASGSH | 1.28 | 21 |
| 2266 | RVPSTSSAPVKTSNITMQIMDNGRVLLLGEMSMIVEESGSL | 1.33 | 22 |
| 2267 | ASASPSSVSQDLRSVKVAKVIGKTPKIKEVQVMIVKSSKSS | 0.97 | 34 |

### Example 21: Application in the Treatment of Osteoporosis

[1573] The following study aims at validating the osteoinduction, osteoconducion and osteoclast inhibition activity properties of the GFR-binding compounds in a critical size fracture induced defect in an osteoporosis rat model. The goal is to induce the process of bone regeneration in a physiological way resulting in osteogenesis without bone formation anomalies like ectopic growth or osteopetrosis.

### A. Osteoporosis Rat Model

[1574] Given that the acceleration of bone turnover caused by oestrogen deficiency at menopause is the most common cause of osteoporosis, animal models that lose bone in response to oestrogen deficiency are preferred in the preclinical examination of therapeutic agents. This bone loss is characterized by an increased turnover rate, decreased bone mass as measured by densitometry and decreased bone volume. The ovariectomy-induced osteoporosis (OVX) rat model is most commonly used in research on osteoporosis and in preclinical animal studies. After ovariectomy, bone resorption exceeds bone formation, causing a rapid and reproducible bone loss in response to oestrogen deficiency.

### B. Experimental Protocol

[1575] An overview of the experimental protocol is schematically represented in FIG. 21.

### B.1. Surgical Procedure

[1576] After 1 week of adaptation period, 3-month-old female rats (Sprague Dawley® strain) were subjected to bilateral ovariectomy (OVX) dorsal surgery. This procedure involves pain and therefore an analgesic administration was performed 30 minutes before surgery and 6 hours after surgery. Significant bone loss in the femoral condyle due to induced estrogen deficiency is typically obtained 8 weeks after the surgery with this animal model. One week before compound administration the OVX rats were randomly assigned to three different groups.

### B.2. Compound Administration

[1577] Eight weeks after the surgery, a critical size defect of 3 mm was drilled in the femoral condyle of the OVX rats at JO and a mixture of GFR-binding compounds (SEQ ID NOs: 609 and 2268) were site administrated. This critical size defect would not heal alone through complete bone formation without external intervention at the experimental endpoints of the present study: 3 weeks and 12 weeks. The control conditions include a “No implantation” condition for which no implantations were performed in the defect as well as one ceramic (70% TCP30% HA) implant: a ceramic scaffold (Control 1). A mixture of SEQ ID NOs: 609 and 2268 was included in a specific capsule that enables its progressive release at the defect site as a solution. Hereinafter the various experimental conditions, the results for which are detailed below:

| Experimental | | Type of | Reference or |
|---|---|---|---|
| conditions | Code | product | test product |
| No implantation | No | None | Reference |
| (empty defect) | implantation | | |
| Ceramic Scaffold | Control 1 | Solid | Reference |
| SEQ ID NOs: 609 and | HTD-PCL-M06 | Solution | Test |
| 2268 in solution | | | |

[1578] Two experimental endpoints were tested in the present study: 3 weeks and 12 weeks after compound administration. The first endpoint of 3 weeks allows the detection of an early osteogenesis process involving stem cells and progenitor cells differentiation towards the osteoblast lineage. The second endpoint of 12 weeks allows the detection of osteoporosis defect healing and the assessment of stably and efficiently induced osteogenesis. The experimenters were blinded to group assignment until the completion of the procedure, and again at the time of the results assessment analysis performed with various techniques.

### B.3. Histopathological Analysis

[1579] For all the experimental conditions, the femoral defect sites were removed and resin embedded without prior demineralization, after which successive coronal sections were produced. A thorough histopathological analysis has been then performed on these sections in order to assess tissue and cellular structure and therefore the osteogenesis, osteoinduction, osteoconduction and bone resorption processes with the following stainings:
[1580] Hematoxylin-Eosin (HE) staining to qualitatively analyze tissue morphology as well as: presence or not of the administrated compounds, bone remodeling (bone formation and bone resorption) at the defect sites, the presence of osteoblast cells. A semi-quantitative analysis of osteoblast cell detection was performed, as the presence of osteoblasts in the defect site area is an indicator of osteoinduction and new bone formation.
[1581] Tartrate-resistant acid phosphatase (TRAP) staining: to highlight active osteoclasts (in red) that produce the TRAP-isoenzyme but also the osteoclast fraction at the defect sites and its surroundings. Osteoclast activity is an indicator of bone resorption.
[1582] Von Kossa Van Gieson (VKVG) staining: to highlight mineralized tissue (in black) including newly formed bone tissue, native bone, and the calcified compounds as well as the non mineralized osteoid tissue (dark pink). The fibrous tissue is stained in light pink and the bone marrow in light orange. The VKVG staining allows assessing the percentage of mineralized and osteoid tissue in and around the defect site as well as the amount of remaining compounds at the defect site area 3 and 12 weeks after administration. In addition, the tolerance rate of the various administrated compounds can be evaluated by examining tissue integrity at the defect site, presence and amount of necrotic tissue and presence of inflammatory cell infiltration such as immune cells and macrophages.

### C. Results

[1583] Regarding the “No implantation” condition, 3 weeks after inducing a critical size defect, a thickening of the periosteum (fibrous tissue) can be observed at the defect entry for all the stainings (FIG. 22, left). This indicates that a closing of the defect site entry has been initiated and completed after 12 weeks (FIG. 22, right). In addition, no inflammatory cells could be detected in the periosteum suggesting a complete lack of surgery related inflammatory process at 3 weeks. Osteoclast activity is present at the defect entry at 3 weeks but no active osteoclasts could be detected after 12 weeks (FIG. 22, TRAP staining). Finally, mineralized bone tissue is observed at the defect site entry at 3 weeks with very little osteoid tissue (FIG. 22, VKVG staining) and the defect entry is closed after 12 weeks with mineralized tissue. However, no osteoid tissue could be detected in contact with the mineralized tissue at the defect entry at 12 weeks suggesting the absence of any bone formation activity. In addition, no bone tissue structures or bone trabeculae could be detected inside the defect, indicating that osteogenic activity did not occur in that area during 12 weeks. Thus, 12 weeks after inducing a critical size defect in the “No implantation” condition, the entry of the defect site was closed with mineralized bone tissue and periosteum thickening. No osteoid tissue could be detected at the entry site and no bone tissue structures or osteoid could be observed inside the defect area indicating a complete lack of bone formation and osteogenic activity.

[1584] The tested mixture is administrated at the defect site as a solution included in a capsule, progressively releasing it in the defect area. A periosteum fibrous tissue closing can be observed at the defect entry 12 weeks after HTD-PCL-M06 administration (FIG. 23). No inflammatory infiltration could be detected suggesting that the compounds were very well tolerated. In addition, the capsule releasing HTD-PCL-M06 is still present at the defect site 3 and 12 weeks after administration. Osteoblast cells were detected around the HTD-PCL-M06, indicating the induction of bone formation activity as compared to Control 1 where no osteoblast cells were present (FIG. 23, HE staining). The observed osteoinduction is further confirmed by the increased amount of osteoid tissue and mineralized bone tissue in contact with HTD-PCL-M06 3 weeks after administration (FIG. 23, VKVG staining). A further increase in mineralized and osteoid tissue is observed 12 weeks after administration indicating that the bone formation activity detected at 3 weeks is also continuing at 12 weeks. This is not the case for the Control 1 condition where no increase in mineralized and osteoid bone tissue could be detected at 12 weeks. Finally, no osteoclast cells could be detected at the defect site 3 and 12 weeks after HTD-PCL-M06 administration, suggesting an important reduction in bone resorption activity. In conclusion, HTD-PCL-M06 is well tolerated and efficiently inducing osteogenesis at a critical defect site as revealed by in increased osteoid and mineralized bone tissue formation 3 and 12 weeks after administration. This increased osteogenic activity is associated with the presence of osteoblast cells confirming the triggering of osteoinduction. In addition no active osteoclast cells could be detected indicating a highly reduced bone resorption activity. HTD-PCL-M06 is therefore very well suited for efficient bone reconstruction of osteoporosis related fractures and osteoporosis treatment and prevention, potentially via a systemic administration or a local administration as a solution. The superiority of HTD-PCL-M06 is further confirmed as compared to the ceramic scaffold of Control 1, which is a product already present on the market for bone reconstruction.

### D. Conclusions

[1585] The present CRO-conducted blind randomized preclinical pilot trial has validated the efficiency of representative GFR-binding compounds as disclosed herein in solution, for the treatment and prevention of osteoporosis and osteoporosis related fractures in an osteoporosis animal model. Osteoinductive activity was observed through bone tissue regeneration of critical size induced defects. The representative GFR-binding compounds were well tolerated and have efficiently induced bone formation as revealed by an increased osteoid and mineralized bone tissue formation at the defect area, 3 and 12 weeks after administration.

[1586] It was shown that HTD-PCL-M06 increased osteoinduction activity, increased the amount of osteoblast cells and highly reduced bone resorption activity. In addition, HTD-PCL-M06 induced an increase in bone mineralization speed, rate and surface. HTD-PCL-M06 is therefore very well suited for efficient bone reconstruction of osteoporosis related fractures, osteoporosis treatment and prevention, potentially via a systemic administration or a local administration as a solution.

[1587] At 3 weeks, the compounds have induced the early osteogenesis process involving stem cells and progenitor cells differentiation towards the osteoblast lineage. At 12 weeks the compound was proven efficient in inducing stable osteogenesis and inducing efficient osteoporosis defect healing. These results obtained after 12 weeks are of utmost importance for patients having osteoporotic related fractures, who usually remain significantly impaired for much longer periods of time or permanently.

[1588] Thus, GFR-binding compounds of the present disclosure represent new therapeutic solutions for osteoporosis with the unique ability to decouple bone resorption from bone formation by increasing bone formation and concomitantly decreasing bone resorption, which is required to achieve efficient bone strengthening in osteoporosis patients as compared to the existing treatments.

[1589] Advantageously, the animals used in the experiments did not present any deleterious side effects regardless of the experimental condition. In addition, the animal body weight was monitored twice a week during the course of the experiment, and a very slight weight loss was observed just after the ovariectomy surgery due to the anesthesia related decrease in food intake for all the animals, which is classically observed for this animal model. No compound administration related weight loss could be detected. Combined with the complete absence of deleterious side effects, this indicates that the administrated compounds did not negatively interfere with the normal animal metabolism and physiology. Moreover, no animals were euthanized during the course of the experiment due to advanced state of morbidity or signs of pain. The animals were euthanized at the experimental endpoints 3 or 12 weeks after compound administration and a macroscopic post-mortem analysis was performed on the entire animal and specifically at the administration sites. The analysis has revealed no visible signs of inflammation or necrosis at the administration sites for all the animals. This indicates that the compounds were well tolerated by the animals, which was also confirmed microscopically by the very small amount of immune cells at the administration sites. Finally, no animals with indications of the osteopetrosis disorder were detected.

1. A peptide with between 25 and 60 amino acids, having growth factor receptor-binding capability or a peptidomimetic having growth factor receptor-binding capability comprising between 20 and 60 amino acids, wherein said peptidomimetic has a molecular weight comprised between 2,000 and 8,000 Daltons:
comprising a peptide with four amino acids, PEP1, and a peptide with five amino acids, PEP2; wherein PEP1 is selected from the group consisting of SAIS, SSLS, NAIS, SATS, SPIS, EPIS, SPIN, KPLS, EPLP, EPLT, SNIT, RSVK and RPVQ; wherein PEP2 is selected from the group consisting of LKNYQ, LKVYP, LKKYR, LRKHR, LKYHY, KFKYE, YGKIP, YKQYE, DHHKD, EQLSN, IGEMS, LGEMS, KEVQV and KKATV;
comprising a peptide with three amino acids PEP3 and a peptide with three amino acids PEP4 wherein PEP3 is selected from the group consisting of VPT, VPE, APT, TPT, VPA, APV, VPQ, VSQ, SRV and TQV; wherein PEP4 is selected from the group consisting of VVE, TVE, VVR, VVK, VAE, AVS, VVD, VEE, VRS, VKS, QHN, EHS, EEH and EDH; and
wherein the RMSD value of the structure coordinates of said peptide or peptidomimetic with respect to PEPREF is 2.45 Å (Angstroms) or less, and wherein PEPREF is

| | | | | | | | | |
|---|---|---|---|---|---|---|---|---|
| ATOM | 511 | N | LYS | A | 1 | −14.570 | 46.437 | 27.424 |
| ATOM | 512 | CA | LYS | A | 1 | −13.512 | 45.748 | 28.151 |
| ATOM | 513 | C | LYS | A | 1 | −13.655 | 44.259 | 27.884 |
| ATOM | 514 | O | LYS | A | 1 | −12.769 | 43.463 | 28.197 |
| ATOM | 515 | CB | LYS | A | 1 | −13.605 | 46.029 | 29.652 |
| ATOM | 516 | CG | LYS | A | 1 | −13.640 | 47.509 | 29.991 |
| ATOM | 517 | CD | LYS | A | 1 | −12.615 | 48.297 | 29.183 |
| ATOM | 518 | CE | LYS | A | 1 | −12.625 | 49.768 | 29.575 |
| ATOM | 519 | NZ | LYS | A | 1 | −13.994 | 50.369 | 29.497 |
| ATOM | 520 | N | ILE | A | 2 | −14.792 | 43.890 | 27.309 |
| ATOM | 521 | CA | ILE | A | 2 | −15.051 | 42.499 | 26.967 |
| ATOM | 522 | C | ILE | A | 2 | −14.911 | 42.370 | 25.444 |
| ATOM | 523 | O | ILE | A | 2 | −15.531 | 43.125 | 24.683 |
| ATOM | 524 | CB | ILE | A | 2 | −16.466 | 42.065 | 27.401 |
| ATOM | 525 | CG1 | ILE | A | 2 | −16.630 | 42.238 | 28.915 |
| ATOM | 526 | CG2 | ILE | A | 2 | −16.710 | 40.629 | 26.985 |
| ATOM | 527 | CD1 | ILE | A | 2 | −15.631 | 41.478 | 29.30 |
| ATOM | 528 | N | PRO | A | 3 | −14.085 | 41.411 | 24.989 |
| ATOM | 529 | CA | PRO | A | 3 | −13.789 | 41.109 | 23.588 |
| ATOM | 530 | C | PRO | A | 3 | −14.998 | 40.695 | 22.768 |
| ATOM | 531 | O | PRO | A | 3 | −15.969 | 40.164 | 23.305 |
| ATOM | 532 | CB | PRO | A | 3 | −12.785 | 39.968 | 23.688 |
| ATOM | 533 | CG | PRO | A | 3 | −12.156 | 40.166 | 25.007 |
| ATOM | 534 | CD | PRO | A | 3 | −13.330 | 40.506 | 25.867 |
| ATOM | 535 | N | LYS | A | 4 | −14.937 | 40.937 | 21.463 |
| ATOM | 536 | CA | LYS | A | 4 | −16.023 | 40.529 | 20.590 |
| ATOM | 537 | C | LYS | A | 4 | −15.886 | 39.015 | 20.391 |
| ATOM | 538 | O | LYS | A | 4 | −14.903 | 38.415 | 20.831 |
| ATOM | 539 | CB | LYS | A | 4 | −15.926 | 41.244 | 19.245 |
| ATOM | 540 | CG | LYS | A | 4 | −15.802 | 42.751 | 19.355 |
| ATOM | 541 | CD | LYS | A | 4 | −16.292 | 43.433 | 18.083 |
| ATOM | 542 | CE | LYS | A | 4 | −16.162 | 44.943 | 18.177 |
| ATOM | 543 | NZ | LYS | A | 4 | −16.825 | 45.628 | 17.019 |
| ATOM | 544 | N | ALA | A | 5 | −16.85 | 38.393 | 19.759 |
| ATOM | 545 | CA | ALA | A | 5 | −16.811 | 36.955 | 19.507 |
| ATOM | 546 | C | ALA | A | 5 | −15.772 | 36.771 | 18.416 |
| ATOM | 547 | O | ALA | A | 5 | −15.727 | 37.534 | 17.455 |
| ATOM | 548 | CB | ALA | A | 5 | −18.168 | 36.419 | 19.043 |
| ATOM | 549 | N | CYS | A | 6 | −14.935 | 35.756 | 18.562 |
| ATOM | 550 | CA | CYS | A | 6 | −13.887 | 35.518 | 17.584 |
| ATOM | 551 | C | CYS | A | 6 | −14.347 | 34.765 | 16.338 |
| ATOM | 552 | O | CYS | A | 6 | −15.327 | 34.018 | 16.368 |
| ATOM | 553 | CB | CYS | A | 6 | −12.743 | 34.768 | 18.241 |
| ATOM | 554 | SG | CYS | A | 6 | −11.198 | 34.959 | 17.353 |
| ATOM | 555 | N | CYS | A | 7 | −13.623 | 34.973 | 15.243 |
| ATOM | 556 | CA | CYS | A | 7 | −13.931 | 34.328 | 13.969 |
| ATOM | 557 | C | CYS | A | 7 | −13.091 | 33.071 | 13.798 |
| ATOM | 558 | O | CYS | A | 7 | −11.961 | 33.123 | 13.302 |
| ATOM | 559 | CB | CYS | A | 7 | −13.653 | 35.290 | 12.824 |
| ATOM | 560 | SG | CYS | A | 7 | −13.930 | 34.633 | 11.154 |
| ATOM | 561 | N | VAL | A | 8 | −13.654 | 31.941 | 14.209 |
| ATOM | 562 | CA | VAL | A | 8 | −12.949 | 30.684 | 14.110 |
| ATOM | 563 | C | VAL | A | 8 | −13.653 | 29.733 | 13.157 |
| ATOM | 564 | O | VAL | A | 8 | −14.759 | 30.016 | 12.687 |
| ATOM | 565 | CB | VAL | A | 8 | −12.814 | 30.038 | 15.492 |
| ATOM | 566 | CG1 | VAL | A | 8 | −11.807 | 30.825 | 16.337 |
| ATOM | 567 | CG2 | VAL | A | 8 | −14.161 | 30.006 | 16.170 |
| ATOM | 568 | N | PRO | A | 9 | −13.003 | 28.601 | 12.828 |
| ATOM | 569 | CA | PRO | A | 9 | −13.593 | 27.615 | 11.918 |
| ATOM | 570 | C | PRO | A | 9 | −14.726 | 26.886 | 12.631 |
| ATOM | 571 | O | PRO | A | 9 | −14.581 | 26.476 | 13.780 |
| ATOM | 572 | CB | PRO | A | 9 | −12.423 | 26.676 | 11.601 |
| ATOM | 573 | CG | PRO | A | 9 | −11.204 | 27.487 | 11.925 |
| ATOM | 574 | CD | PRO | A | 9 | −11.620 | 28.226 | 13.163 |
| ATOM | 575 | N | THR | A | 10 | −15.847 | 26.721 | 11.942 |
| ATOM | 576 | CA | THR | A | 10 | −16.999 | 26.060 | 12.527 |
| ATOM | 577 | C | THR | A | 10 | −17.334 | 24.767 | 11.804 |
| ATOM | 578 | O | THR | A | 10 | −18.097 | 23.943 | 12.303 |
| ATOM | 579 | CB | THR | A | 10 | −18.211 | 27.010 | 12.523 |
| ATOM | 580 | OG1 | THR | A | 10 | −18.491 | 27.445 | 11.185 |
| ATOM | 581 | CG2 | THR | A | 10 | −17.902 | 28.230 | 13.375 |
| ATOM | 582 | N | GLU | A | 11 | −16.750 | 24.586 | 10.627 |
| ATOM | 583 | CA | GLU | A | 11 | −16.980 | 23.377 | 9.848 |
| ATOM | 584 | C | GLU | A | 11 | −15.643 | 22.935 | 9.246 |
| ATOM | 585 | O | GLU | A | 11 | −15.029 | 23.666 | 8.464 |
| ATOM | 586 | CB | GLU | A | 11 | −17.981 | 23.624 | 8.715 |
| ATOM | 587 | CG | GLU | A | 11 | −19.421 | 23.807 | 9.163 |
| ATOM | 588 | CD | GLU | A | 11 | −19.686 | 25.166 | 9.770 |
| ATOM | 589 | OE1 | GLU | A | 11 | −19.478 | 26.175 | 9.073 |
| ATOM | 590 | OE2 | GLU | A | 11 | −20.111 | 25.227 | 10.939 |
| ATOM | 591 | N | LEU | A | 12 | −15.183 | 21.749 | 9.622 |
| ATOM | 592 | CA | LEU | A | 12 | −13.923 | 21.254 | 9.104 |
| ATOM | 593 | C | LEU | A | 12 | −14.062 | 19.912 | 8.386 |
| ATOM | 594 | O | LEU | A | 12 | −15.136 | 19.299 | 8.359 |
| ATOM | 595 | CB | LEU | A | 12 | −12.893 | 21.144 | 10.230 |
| ATOM | 596 | CG | LEU | A | 12 | −12.660 | 22.422 | 11.054 |
| ATOM | 597 | CD1 | LEU | A | 12 | −13.475 | 22.350 | 12.337 |
| ATOM | 598 | CD2 | LEU | A | 12 | −11.181 | 22.586 | 11.399 |
| ATOM | 599 | N | SER | A | 13 | −12.971 | 19.476 | 7.771 |
| ATOM | 600 | CA | SER | A | 13 | −12.964 | 18.218 | 7.046 |
| ATOM | 601 | C | SER | A | 13 | −11.568 | 17.628 | 7.164 |
| ATOM | 602 | O | SER | A | 13 | −10.613 | 18.320 | 7.550 |
| ATOM | 603 | CB | SER | A | 13 | −13.346 | 18.435 | 5.578 |
| ATOM | 604 | OG | SER | A | 13 | −12.404 | 19.261 | 4.923 |
| ATOM | 605 | N | ALA | A | 13 | −11.449 | 16.352 | 6.818 |
| ATOM | 606 | CA | ALA | A | 13 | −10.179 | 15.665 | 6.949 |
| ATOM | 607 | C | ALA | A | 13 | −9.421 | 15.471 | 5.652 |
| ATOM | 608 | O | ALA | A | 13 | −9.941 | 15.720 | 4.563 |
| ATOM | 609 | CB | ALA | A | 13 | −10.413 | 14.306 | 7.626 |
| ATOM | 610 | N | ILE | A | 14 | −8.171 | 15.046 | 5.783 |
| ATOM | 611 | CA | ILE | A | 14 | −7.343 | 14.746 | 4.623 |
| ATOM | 612 | C | ILE | A | 14 | −6.475 | 13.559 | 5.004 |
| ATOM | 613 | O | ILE | A | 14 | −6.212 | 13.316 | 6.183 |
| ATOM | 614 | CB | ILE | A | 14 | −6.401 | 15.916 | 4.183 |
| ATOM | 615 | CG1 | ILE | A | 14 | −5.284 | 16.106 | 5.200 |
| ATOM | 616 | CG2 | ILE | A | 14 | −7.188 | 17.211 | 3.982 |
| ATOM | 617 | CD1 | ILE | A | 14 | −4.173 | 16.973 | 4.696 |
| ATOM | 618 | N | SER | A | 15 | −6.045 | 12.806 | 3.999 |
| ATOM | 619 | CA | SER | A | 15 | −5.187 | 11.662 | 4.242 |
| ATOM | 620 | C | SER | A | 15 | −3.740 | 12.089 | 4.217 |
| ATOM | 621 | O | SER | A | 15 | −3.360 | 13.020 | 3.508 |
| ATOM | 622 | CB | SER | A | 15 | −5.416 | 10.584 | 3.185 |
| ATOM | 623 | OG | SER | A | 15 | −6.667 | 9.971 | 3.401 |
| ATOM | 624 | N | MET | A | 16 | −2.933 | 11.409 | 5.012 |
| ATOM | 625 | CA | MET | A | 16 | −1.518 | 11.700 | 5.047 |
| ATOM | 626 | C | MET | A | 16 | −0.778 | 10.414 | 5.244 |
| ATOM | 627 | O | MET | A | 16 | −1.137 | 9.594 | 6.078 |
| ATOM | 628 | CB | MET | A | 16 | −1.170 | 12.694 | 6.164 |
| ATOM | 629 | CG | MET | A | 16 | −1.848 | 14.042 | 5.974 |
| ATOM | 630 | SD | MET | A | 16 | −1.017 | 15.431 | 6.760 |
| ATOM | 631 | CE | MET | A | 16 | −0.799 | 14.823 | 8.475 |
| ATOM | 632 | N | LEU | A | 17 | 0.238 | 10.231 | 4.426 |
| ATOM | 633 | CA | LEU | A | 17 | 1.077 | 9.065 | 4.508 |
| ATOM | 634 | C | LEU | A | 17 | 2.289 | 9.610 | 5.264 |
| ATOM | 635 | O | LEU | A | 17 | 2.939 | 10.565 | 4.818 |
| ATOM | 636 | CB | LEU | A | 17 | 1.461 | 8.608 | 3.100 |
| ATOM | 637 | CG | LEU | A | 17 | 2.324 | 7.355 | 2.955 |
| ATOM | 638 | CD1 | LEU | A | 17 | 1.553 | 6.145 | 3.445 |
| ATOM | 639 | CD2 | LEU | A | 17 | 2.723 | 7.190 | 1.492 |
| ATOM | 640 | N | TYR | A | 18 | 2.581 | 9.029 | 6.418 |
| ATOM | 641 | CA | TYR | A | 18 | 3.706 | 9.501 | 7.196 |
| ATOM | 642 | C | TYR | A | 18 | 4.434 | 8.333 | 7.835 |
| ATOM | 643 | O | TYR | A | 18 | 4.081 | 7.186 | 7.603 |
| ATOM | 644 | CB | TYR | A | 18 | 3.222 | 10.458 | 8.281 |
| ATOM | 645 | CG | TYR | A | 18 | 2.386 | 9.782 | 9.346 |
| ATOM | 646 | CD1 | TYR | A | 18 | 1.029 | 9.527 | 9.147 |
| ATOM | 647 | CD2 | TYR | A | 18 | 2.961 | 9.379 | 10.550 |
| ATOM | 648 | CE1 | TYR | A | 18 | 0.273 | 8.894 | 10.128 |
| ATOM | 649 | CE2 | TYR | A | 18 | 2.218 | 8.745 | 11.526 |
| ATOM | 650 | CZ | TYR | A | 18 | 0.877 | 8.508 | 11.317 |
| ATOM | 651 | OH | TYR | A | 18 | 0.134 | 7.922 | 12.318 |
| ATOM | 652 | N | LEU | A | 19 | 5.439 | 8.651 | 8.650 |
| ATOM | 653 | CA | LEU | A | 19 | 6.255 | 7.661 | 9.347 |
| ATOM | 654 | C | LEU | A | 19 | 6.210 | 7.946 | 10.847 |
| ATOM | 655 | O | LEU | A | 19 | 6.685 | 8.992 | 11.288 |
| ATOM | 656 | CB | LEU | A | 19 | 7.701 | 7.763 | 8.871 |
| ATOM | 657 | CG | LEU | A | 19 | 7.901 | 7.850 | 7.359 |
| ATOM | 658 | CD1 | LEU | A | 19 | 9.300 | 8.379 | 7.039 |
| ATOM | 659 | CD2 | LEU | A | 19 | 7.669 | 6.482 | 6.748 |
| ATOM | 660 | N | ASP | A | 20 | 5.652 | 7.035 | 11.639 |
| ATOM | 661 | CA | ASP | A | 20 | 5.594 | 7.282 | 13.071 |
| ATOM | 662 | C | ASP | A | 20 | 7.001 | 7.289 | 13.662 |
| ATOM | 663 | O | ASP | A | 20 | 7.985 | 7.185 | 12.932 |
| ATOM | 664 | CB | ASP | A | 20 | 4.714 | 6.244 | 13.786 |
| ATOM | 665 | CG | ASP | A | 20 | 5.292 | 4.837 | 13.752 |
| ATOM | 666 | OD1 | ASP | A | 20 | 6.533 | 4.678 | 13.775 |
| ATOM | 667 | OD2 | ASP | A | 20 | 4.491 | 3.882 | 13.732 |
| ATOM | 668 | N | GLU | A | 21 | 7.089 | 7.413 | 14.981 |
| ATOM | 669 | CA | GLU | A | 21 | 8.375 | 7.451 | 15.669 |
| ATOM | 670 | C | GLU | A | 21 | 9.250 | 6.212 | 15.463 |
| ATOM | 671 | O | GLU | A | 21 | 10.459 | 6.246 | 15.738 |
| ATOM | 672 | CB | GLU | A | 21 | 8.164 | 7.699 | 17.171 |
| ATOM | 673 | CG | GLU | A | 21 | 7.220 | 6.731 | 17.868 |
| ATOM | 674 | CD | GLU | A | 21 | 5.828 | 6.726 | 17.257 |
| ATOM | 675 | OE1 | GLU | A | 21 | 5.347 | 7.810 | 16.856 |
| ATOM | 676 | OE2 | GLU | A | 21 | 5.210 | 5.640 | 17.185 |
| ATOM | 677 | N | ASN | A | 22 | 8.646 | 5.133 | 14.966 |
| ATOM | 678 | CA | ASN | A | 22 | 9.377 | 3.889 | 14.727 |
| ATOM | 679 | C | ASN | A | 22 | 9.682 | 3.647 | 13.249 |
| ATOM | 680 | O | ASN | A | 22 | 10.095 | 2.554 | 12.853 |
| ATOM | 681 | CB | ASN | A | 22 | 8.591 | 2.707 | 15.299 |
| ATOM | 682 | CG | ASN | A | 22 | 8.384 | 2.827 | 16.794 |
| ATOM | 683 | OD1 | ASN | A | 22 | 9.349 | 2.930 | 17.560 |
| ATOM | 684 | ND2 | ASN | A | 22 | 7.125 | 2.819 | 17.221 |
| ATOM | 685 | N | GLU | A | 23 | 9.485 | 4.672 | 12.435 |
| ATOM | 686 | CA | GLU | A | 23 | 9.749 | 4.558 | 11.015 |
| ATOM | 687 | C | GLU | A | 23 | 8.790 | 3.603 | 10.299 |
| ATOM | 688 | O | GLU | A | 23 | 9.145 | 2.996 | 9.292 |
| ATOM | 689 | CB | GLU | A | 23 | 11.203 | 4.129 | 10.784 |
| ATOM | 690 | CG | GLU | A | 23 | 12.232 | 5.210 | 11.082 |
| ATOM | 691 | CD | GLU | A | 23 | 12.072 | 6.410 | 10.166 |
| ATOM | 692 | OE1 | GLU | A | 23 | 12.108 | 6.218 | 8.928 |
| ATOM | 693 | OE2 | GLU | A | 23 | 11.907 | 7.541 | 10.677 |
| ATOM | 694 | N | LYS | A | 24 | 7.580 | 3.459 | 10.826 |
| ATOM | 695 | CA | LYS | A | 24 | 6.583 | 2.624 | 10.175 |
| ATOM | 696 | C | LYS | A | 24 | 5.815 | 3.540 | 9.228 |
| ATOM | 697 | O | LYS | A | 24 | 5.553 | 4.692 | 9.552 |
| ATOM | 698 | CB | LYS | A | 24 | 5.602 | 2.039 | 11.182 |
| ATOM | 699 | CG | LYS | A | 24 | 6.163 | 0.963 | 12.058 |
| ATOM | 700 | CD | LYS | A | 24 | 5.068 | 0.387 | 12.947 |
| ATOM | 701 | CE | LYS | A | 24 | 5.648 | −0.511 | 14.031 |
| ATOM | 702 | NZ | LYS | A | 24 | 4.577 | −1.091 | 14.886 |
| ATOM | 703 | N | VAL | A | 25 | 5.455 | 3.037 | 8.057 |
| ATOM | 704 | CA | VAL | A | 25 | 4.713 | 3.849 | 7.116 |
| ATOM | 705 | C | VAL | A | 25 | 3.237 | 3.737 | 7.444 |
| ATOM | 706 | O | VAL | A | 25 | 2.657 | 2.659 | 7.383 |
| ATOM | 707 | CB | VAL | A | 25 | 4.969 | 3.396 | 5.681 |
| ATOM | 708 | CG1 | VAL | A | 25 | 4.250 | 4.317 | 4.708 |
| ATOM | 709 | CG2 | VAL | A | 25 | 6.462 | 3.393 | 5.422 |
| ATOM | 710 | N | VAL | A | 25 | 2.637 | 4.864 | 7.800 |
| ATOM | 711 | CA | VAL | A | 25 | 1.231 | 4.916 | 8.170 |
| ATOM | 712 | C | VAL | A | 25 | 0.418 | 5.778 | 7.213 |
| ATOM | 713 | O | VAL | A | 25 | 0.871 | 6.841 | 6.774 |
| ATOM | 714 | CB | VAL | A | 25 | 1.062 | 5.531 | 9.577 |
| ATOM | 715 | CG1 | VAL | A | 25 | −0.341 | 5.253 | 10.115 |
| ATOM | 716 | CG2 | VAL | A | 25 | 2.128 | 5.006 | 10.506 |
| ATOM | 717 | N | LEU | A | 26 | −0.779 | 5.306 | 6.887 |
| ATOM | 718 | CA | LEU | A | 26 | −1.706 | 6.048 | 6.040 |
| ATOM | 719 | C | LEU | A | 26 | −2.862 | 6.358 | 6.992 |
| ATOM | 720 | O | LEU | A | 26 | −3.679 | 5.497 | 7.297 |
| ATOM | 721 | CB | LEU | A | 26 | −2.201 | 5.189 | 4.876 |
| ATOM | 722 | CG | LEU | A | 26 | −3.204 | 5.898 | 3.952 |
| ATOM | 723 | CD1 | LEU | A | 26 | −2.519 | 7.077 | 3.262 |
| ATOM | 724 | CD2 | LEU | A | 26 | −3.755 | 4.925 | 2.929 |
| ATOM | 725 | N | LYS | A | 27 | −2.910 | 7.584 | 7.489 |
| ATOM | 726 | CA | LYS | A | 27 | −3.952 | 7.965 | 8.430 |
| ATOM | 727 | C | LYS | A | 27 | −4.831 | 9.082 | 7.881 |
| ATOM | 728 | O | LYS | A | 27 | −4.374 | 9.924 | 7.103 |
| ATOM | 729 | CB | LYS | A | 27 | −3.305 | 8.409 | 9.738 |
| ATOM | 730 | CG | LYS | A | 27 | −4.265 | 8.720 | 10.859 |
| ATOM | 731 | CD | LYS | A | 27 | −3.509 | 9.382 | 11.994 |
| ATOM | 732 | CE | LYS | A | 27 | −4.397 | 9.654 | 13.186 |
| ATOM | 733 | NZ | LYS | A | 27 | −4.839 | 8.377 | 13.816 |
| ATOM | 734 | N | ASN | A | 28 | −6.098 | 9.078 | 8.279 |
| ATOM | 735 | CA | ASN | A | 28 | −7.045 | 10.095 | 7.843 |
| ATOM | 736 | C | ASN | A | 28 | −7.147 | 11.103 | 8.979 |
| ATOM | 737 | O | ASN | A | 28 | −7.815 | 10.842 | 9.969 |
| ATOM | 738 | CB | ASN | A | 28 | −8.408 | 9.455 | 7.560 |
| ATOM | 739 | CG | ASN | A | 28 | −9.518 | 10.485 | 7.364 |
| ATOM | 740 | OD1 | ASN | A | 28 | −9.360 | 11.444 | 6.597 |
| ATOM | 741 | ND2 | ASN | A | 28 | −10.653 | 10.288 | 8.050 |
| ATOM | 742 | N | TYR | A | 29 | −6.473 | 12.241 | 8.837 |
| ATOM | 743 | CA | TYR | A | 29 | −6.470 | 13.278 | 9.869 |
| ATOM | 744 | C | TYR | A | 29 | −7.680 | 14.204 | 9.836 |
| ATOM | 745 | O | TYR | A | 29 | −7.928 | 14.870 | 8.835 |
| ATOM | 746 | CB | TYR | A | 29 | −5.197 | 14.130 | 9.768 |
| ATOM | 747 | CG | TYR | A | 29 | −3.913 | 13.420 | 10.155 |
| ATOM | 748 | CD1 | TYR | A | 29 | −3.378 | 12.394 | 9.363 |
| ATOM | 749 | CD2 | TYR | A | 29 | −3.220 | 13.792 | 11.306 |
| ATOM | 750 | CE1 | TYR | A | 29 | −2.181 | 11.765 | 9.713 |
| ATOM | 751 | CE2 | TYR | A | 29 | −2.032 | 13.171 | 11.665 |
| ATOM | 752 | CZ | TYR | A | 29 | −1.516 | 12.167 | 10.869 |
| ATOM | 753 | OH | TYR | A | 29 | −0.319 | 11.603 | 11.231 |
| ATOM | 754 | N | GLN | A | 30 | −8.408 | 14.254 | 10.950 |
| ATOM | 755 | CA | GLN | A | 30 | −9.606 | 15.088 | 11.089 |
| ATOM | 756 | C | GLN | A | 30 | −9.287 | 16.541 | 11.431 |
| ATOM | 757 | O | GLN | A | 30 | −8.213 | 16.847 | 11.925 |
| ATOM | 758 | CB | GLN | A | 30 | −10.500 | 14.541 | 12.202 |
| ATOM | 759 | CG | GLN | A | 30 | −10.807 | 13.074 | 12.104 |
| ATOM | 760 | CD | GLN | A | 30 | −11.744 | 12.749 | 10.969 |
| ATOM | 761 | OE1 | GLN | A | 30 | −11.900 | 11.582 | 10.602 |
| ATOM | 762 | NE2 | GLN | A | 30 | −12.385 | 13.773 | 10.405 |
| ATOM | 763 | N | ASP | A | 31 | −10.238 | 17.430 | 11.173 |
| ATOM | 764 | CA | ASP | A | 31 | −10.085 | 18.851 | 11.495 |
| ATOM | 765 | C | ASP | A | 31 | −8.867 | 19.494 | 10.842 |
| ATOM | 766 | O | ASP | A | 31 | −8.195 | 20.335 | 11.442 |
| ATOM | 767 | CB | ASP | A | 31 | −10.000 | 19.025 | 13.019 |
| ATOM | 768 | CG | ASP | A | 31 | −11.247 | 18.520 | 13.742 |
| ATOM | 769 | OD1 | ASP | A | 31 | −12.349 | 18.587 | 13.155 |
| ATOM | 770 | OD2 | ASP | A | 31 | −11.130 | 18.069 | 14.908 |
| ATOM | 771 | N | MET | A | 32 | −8.582 | 19.113 | 9.606 |
| ATOM | 772 | CA | MET | A | 32 | −7.426 | 19.662 | 8.918 |
| ATOM | 773 | C | MET | A | 32 | −7.780 | 20.808 | 7.987 |
| ATOM | 774 | O | MET | A | 32 | −7.021 | 21.768 | 7.855 |
| ATOM | 775 | CB | MET | A | 32 | −6.741 | 18.559 | 8.125 |
| ATOM | 776 | CG | MET | A | 32 | −6.037 | 17.540 | 8.980 |
| ATOM | 777 | SD | MET | A | 32 | −4.559 | 18.231 | 9.714 |
| ATOM | 778 | CE | MET | A | 32 | −3.406 | 18.041 | 8.318 |
| ATOM | 779 | N | VAL | A | 33 | −8.942 | 20.707 | 7.351 |
| ATOM | 780 | CA | VAL | A | 33 | −9.381 | 21.719 | 6.401 |
| ATOM | 781 | C | VAL | A | 33 | −10.579 | 22.536 | 6.858 |
| ATOM | 782 | O | VAL | A | 33 | −11.586 | 21.988 | 7.292 |
| ATOM | 783 | CB | VAL | A | 33 | −9.701 | 21.056 | 5.027 |
| ATOM | 784 | CG1 | VAL | A | 33 | −10.388 | 22.040 | 4.087 |
| ATOM | 785 | CG2 | VAL | A | 33 | −8.423 | 20.561 | 4.412 |
| ATOM | 786 | N | VAL | A | 34 | −10.465 | 23.855 | 6.739 |
| ATOM | 787 | CA | VAL | A | 34 | −11.553 | 24.745 | 7.113 |
| ATOM | 788 | C | VAL | A | 34 | −12.610 | 24.835 | 6.016 |
| ATOM | 789 | O | VAL | A | 34 | −12.373 | 25.403 | 4.950 |
| ATOM | 790 | CB | VAL | A | 34 | −11.057 | 26.176 | 7.407 |
| ATOM | 791 | CG1 | VAL | A | 34 | −12.240 | 27.097 | 7.601 |
| ATOM | 792 | CG2 | VAL | A | 34 | −10.222 | 26.186 | 8.655 |
| ATOM | 793 | N | GLU | A | 35 | −13.779 | 24.266 | 6.282 |
| ATOM | 794 | CA | GLU | A | 35 | −14.870 | 24.311 | 5.321 |
| ATOM | 795 | C | GLU | A | 35 | −15.702 | 25.565 | 5.572 |
| ATOM | 796 | O | GLU | A | 35 | −16.011 | 26.303 | 4.645 |
| ATOM | 797 | CB | GLU | A | 35 | −15.733 | 23.054 | 5.447 |
| ATOM | 798 | CG | GLU | A | 35 | −14.969 | 21.782 | 5.128 |
| ATOM | 799 | CD | GLU | A | 35 | −14.515 | 21.732 | 3.676 |
| ATOM | 800 | OE1 | GLU | A | 35 | −15.036 | 22.519 | 2.858 |
| ATOM | 801 | OE2 | GLU | A | 35 | −13.643 | 20.902 | 3.344 |
| ATOM | 802 | N | GLY | A | 36 | −16.053 | 25.811 | 6.829 |
| ATOM | 803 | CA | GLY | A | 36 | −16.834 | 26.990 | 7.152 |
| ATOM | 804 | C | GLY | A | 36 | −16.322 | 27.785 | 8.341 |
| ATOM | 805 | O | GLY | A | 36 | −15.671 | 27.249 | 9.237 |
| ATOM | 806 | N | CYS | A | 37 | −16.616 | 29.077 | 8.360 |
| ATOM | 807 | CA | CYS | A | 37 | −16.177 | 29.917 | 9.466 |
| ATOM | 808 | C | CYS | A | 37 | −17.347 | 30.502 | 10.249 |
| ATOM | 809 | O | CYS | A | 37 | −18.467 | 30.628 | 9.741 |
| ATOM | 810 | CB | CYS | A | 37 | −15.301 | 31.058 | 8.967 |
| ATOM | 811 | SG | CYS | A | 37 | −13.785 | 30.558 | 8.098 |
| ATOM | 812 | N | GLY | A | 38 | −17.079 | 30.867 | 11.494 |
| ATOM | 813 | CA | GLY | A | 38 | −18.129 | 31.430 | 12.309 |
| ATOM | 814 | C | GLY | A | 38 | −17.622 | 32.176 | 13.518 |
| ATOM | 815 | O | GLY | A | 38 | −16.425 | 32.235 | 13.791 |
| ATOM | 816 | N | CYS | A | 39 | −18.564 | 32.753 | 14.245 |
| ATOM | 817 | CA | CYS | A | 39 | −18.253 | 33.505 | 15.439 |
| ATOM | 818 | C | CYS | A | 39 | −18.543 | 32.670 | 16.665 |
| ATOM | 819 | O | CYS | A | 39 | −19.620 | 32.084 | 16.794 |
| ATOM | 820 | CB | CYS | A | 39 | −19.068 | 34.779 | 15.442 |
| ATOM | 821 | SG | CYS | A | 39 | −18.539 | 35.799 | 14.053 |

2.-10. (canceled)

11. A peptide or a peptidomimetic according to claim 1, wherein said growth factor receptor is selected from the group consisting of platelet-derived growth factor, platelet-derived angiogenesis factor, vascular endothelial growth factor, platelet-derived epidermal growth factor, transforming growth factor beta, transforming growth factor A, epidermal growth factor, fibroblast growth factor, acidic fibroblast growth factor, basic fibroblast growth factor, insulin-like growth factors 1 and 2, keratinocyte growth factor, tumor necrosis factor, fibroblast growth factor and interleukin-1, Keratinocyte Growth Factor-2, and combinations thereof.

12. (canceled)

13. A peptide or a peptidomimetic according to claim 1, comprising a peptide with eight amino acids PEP12, and a peptide with five amino acids PEP2; wherein PEP12 is a peptide of general formula PEP1-AA¹⁷-PEP11; wherein AA¹⁷ is selected from the group consisting of G, A, V, L, I, P, F, M, W, T and S; wherein PEP11 is a peptide with 3 amino acids of general formula AA¹⁸-AA¹⁹-AA²⁰; wherein AA¹⁸ is selected from the group consisting of L, V, Q, A and R; wherein AA¹⁹ is selected from the group consisting of F, W, H, Y, I and K; wherein AA²⁰ is selected from the group consisting of L, F, Y, K, I, V and M.

14. A peptide or a peptidomimetic according to claim 13, wherein PEP11 is selected from the group consisting of LYL, LFF, LYF, LYY, LYK, LYI, LFI, LYV, VYY, QIM, AKV and RKI.

15. (canceled)

16. A peptide or a peptidomimetic according claim 1, comprising a peptide with five amino acids PEP5 and a peptide with between five and seven amino acids PEP6; wherein PEP5 is a peptide of general formula PEP3-AA¹¹-AA¹²; wherein PEP3 is selected from the group consisting of VPT, VPE, APT, TPT, VPA, APV, VPQ, VSQ, SRV and TQV; wherein AA¹¹ is selected from the group consisting of E, K, Q, R, A, D, G and H; and wherein AA¹² is selected from the group consisting of L, M, T, E, Q and H; wherein PEP6 is a peptide of general formula AA²⁶-AA²⁷-AA²⁸-AA²⁹-PEP4; wherein PEP4 is selected from the group consisting of VVE, TVE, VVR, VVK, VAE, AVS, VVD, VEE, VRS, VKS, QHN, EHS, EEH and EDH; wherein AA²⁶ is absent or selected from the group consisting of amino acids having an acidic group-containing side chain; wherein AA²⁷ and AA²⁸ are independently selected from the group consisting of amino acids having an acidic group-containing side chain and amino acids having an apolar side chain; and wherein AA²⁹ is absent or selected from the group consisting of amino acids having a polar, non-charged group-containing side chain.

17. (canceled)

18. (canceled)

19. A peptide or a peptidomimetic according claim 1, comprising a peptide with between six and twelve amino acids PEP9 and a peptide with between six and eleven amino acids PEP10; wherein PEP9 is a peptide of general formula PEP7-PEP5; wherein PEP5 is a peptide of formula PEP3-AA¹¹-AA¹²; wherein PEP3 is selected from the group consisting of VPT, VPE, APT, TPT, VPA, APV, VPQ, VSQ, SRV and TQV; wherein AA¹¹ is selected from the group consisting of E, K, Q, R, A, D, G and H; and wherein AA¹² is selected from the group consisting of L, M, T, E, Q and H; wherein PEP7 is an amino acid or a peptide with between two and seven amino acids of general formula AA¹-AA²-AA³-AA⁴-AA⁵-AA⁶-AA⁷; wherein AA¹, AA², AA³, AA⁴, and AA⁵ are independently absent or any naturally occurring and non-naturally occurring amino acids; wherein AA⁶ is absent or selected from the group consisting of S, T, C, E, Q, P and R; wherein AA⁷ is absent or is selected from the group consisting of S, T, C, E, Q, P and R; wherein PEP10 is a peptide of general formula PEP6-PEP8; wherein PEP6 is a peptide of formula AA²⁶-AA²⁷-AA²⁸-AA²⁹-PEP4; wherein PEP4 is selected from the group consisting of VVE, TVE, VVR, VVK, VAE, AVS, VVD, VEE, VRS, VKS, QHN, EHS, EEH and EDH; wherein AA²⁶ is absent or selected from the group consisting of amino acids having an acidic group-containing side chain; wherein AA²⁷ and AA²⁸ are independently selected from the group consisting of amino acids having an acidic group-containing side chain and amino acids having an apolar side chain; and wherein AA²⁹ is absent or selected from the group consisting of amino acids having a polar, non-charged group-containing side chain, preferably is absent; wherein PEP8 is an amino acid or a peptide with between two and six amino acids of general formula AA³³-AA³⁴-AA³⁵-AA³⁶-AA³⁷-AA³⁸; AA³³ is absent or is selected from the group consisting of any naturally occurring and non-naturally occurring amino acids at the exception of amino acids having an aromatic group-containing side chain; AA³⁴ is absent or is selected from the group consisting of amino acids having an acidic group-containing side chain and amino acids having an aliphatic side chain; wherein AA³⁵ is absent or is selected from the group consisting of amino acids having a polar, non-charged group-containing side chain; wherein AA³⁶ is absent or is selected from the group consisting of amino acids having an acidic group-containing side chain and amino acids having an aliphatic side chain; wherein AA³⁷ is absent or is selected from the group consisting of amino acids having a polar, non-charged group-containing side chain; wherein AA³⁸ is absent or is selected from the group consisting of any naturally occurring and non-naturally occurring amino acids.

20.-55. (canceled)

56. A peptide, or a peptidomimetic according to claim 1, wherein the pair PEP1:PEP2 is selected from the group consisting of SAIS:LKNYQ, SSLS:LKVYP, NAIS:LKKYR, SATS:LRKHR, SPIS:LKYHY, EPIS:KFKYE, SPIN:YGKIP, SPIS:YKQYE, KPLS:DHHKD, EPLP:EQLSN, EPLT:EQLSN, SNIT:IGEMS, SNIT:LGEMS, RSVK:KEVQV and RPVQ:KKATV.

57. A peptide or a peptidomimetic according to claim 56, wherein the pair PEP12:PEP2 is selected from the group consisting of SAIS-AA¹⁷-LYL:LKNYQ, SSLS-AA¹⁷-LFF:LKVYP, NAIS-AA¹⁷-LYF:LKKYR, SATS-AA¹⁷-LYY:LRKHR, SPIS-AA¹⁷-LYK:LKYHY, EPIS-AA¹⁷-LYL:KFKYE, SPIN-AA¹⁷-LYF:YGKIP, SPIS-AA¹⁷-LYI:YKQYE, SPIS-AA¹⁷-LFI:YKQYE, KPLS-AA¹⁷-LYV:DHHKD, EPLP-AA¹⁷-VYY:EQLSN, EPLT-AA¹⁷-LYY:EQLSN, SNIT-AA¹⁷-QIM:IGEMS, SNIT-AA¹⁷-QIM:LGEMS, RSVK-AA¹⁷-AKV:KEVQV and RPVQ-AA¹⁷-RKI:KKATV; wherein AA¹⁷ is selected from the group consisting of G, A, V, L, I, P, F, M, W, T and S.

58. A peptide, or a peptidomimetic according to claim 1, wherein the pair PEP3:PEP4 is selected from the group consisting of VPT:VVE, VPE:TVE, APT:VVR, APT:VVK, VPT:VAE, VPT:AVS, TPT:VVD, VPA:VVE, APV:VEE, VPQ:VRS, VSQ:VKS, VPQ:VKS, VPT:QHN, VPT:EHS, SRV:EEH and TQV:EDH.

59. A peptide, or a peptidomimetic according to claim 16, wherein the pair PEP5:PEP6 is selected from the group consisting of VPT-AA¹¹-AA¹²:AA²⁶-AA²⁷-AA²⁸-AA²⁹-VVE, VPE-AA¹¹-AA¹²:AA²⁶-AA²⁷-AA²⁸-AA²⁹-TVE, APT-AA¹¹-AA¹²:AA²⁶-AA²⁷-AA²⁸-AA²⁹-VVR, APT-AA¹¹-AA¹²:AA²⁶-AA²⁷-AA²⁸-AA²⁹-VVK, VPT-AA¹¹-AA¹²:AA²⁶-AA²⁷-AA²⁸-AA²⁹-VAE, VPT-AA¹¹-AA¹²:AA²⁶-AA²⁷-AA²⁸-AA²⁹-AVS, TPT-AA¹¹-AA¹²:AA²⁶-AA²⁷-AA²⁸-AA²⁹-VVD, VPA-AA¹¹-AA¹² :AA²⁶-AA²⁷-AA²⁸-AA²⁹-VVE, APV-AA¹¹-AA¹²:AA²⁶-AA²⁷-AA²⁸-AA²⁹-VEE, VPQ-AA¹¹-AA¹²:AA²⁶-AA²⁷-AA²⁸-AA²⁹-VRS, VSQ-AA¹¹-AA¹²:AA²⁶-AA²⁷-AA²⁸-AA²⁹-VKS, VPQ-AA¹¹-AA¹²:AA²⁶-AA²⁷-AA²⁸-AA²⁹-VKS, VPT-AA¹¹-AA¹²:AA²⁶-AA²⁷-AA²⁸-AA²⁹-QHN, VPT-AA¹-AA¹²:AA²⁶-AA²⁷-AA²⁸-AA²⁹-EHS, SRV-AA¹¹-AA¹²:AA²⁶-AA²⁷-AA²⁸-AA²⁹-EEH and TQV-AA¹-AA¹²:AA²⁶-AA²⁷-AA²⁸-AA²⁹-EDH.

60.-66. (canceled)

67. A peptide or a peptidomimetic according to claim 1, wherein the pair PEP1:PEP11 is selected from the group consisting of SAIS:LYL, SSLS:LFF, NAIS:LYF, SATS:LYY, SPIS:LYK, SPIS:LYI, SPIS:LFI, EPIS:LYL, SPIN:LYF, KPLS:LYV, EPLP:VYY, EPLT:LYY, SNIT:QIM, RSVK:AKV and RPVQ:RKI.

68.-71. (canceled)

72. A peptide or a peptidomimetic, according to claim 1, wherein said peptide or peptidomimetic may be any one of peptides of SEQ ID NO: 1 to 2157 and 2242 to 84108.

73.-80. (canceled)

81. A peptide or a peptidomimetic, having growth factor receptor-binding capability, according to claim 1, comprising at least one biomaterial-affinity-containing group, wherein said at least one biomaterial-affinity-containing group provides said peptide or a peptidomimetic, with the ability to covalently or non-covalently interact with a biomaterial.

82.-86. (canceled)

87. A functionalized biomaterial comprising at least one peptide or a peptidomimetic, according to claim 1, and a biomaterial.

88.-90. (canceled)

91. A medical device comprising at least one peptide or peptidomimetic, according to claim 1.

92. A medical composition comprising at least one peptide or peptidomimetic, according to claim 1, and a medically acceptable carrier.

93.-134. (canceled)

135. A screening method for selecting a peptide or a peptidomimetic having the ability to induce tissue regeneration and cell differentiation, the method comprising the steps of (a) providing a molecular model of the 3D structure atomic coordinates of PEPREF as defined in claim 1 and (b) identifying a candidate analog having a RMSD value of 2.45 Å or less.

136. (canceled)

137. A method of producing a peptide or peptidomimetic having the ability to induce tissue regeneration and cell differentiation, the method comprising the steps of (a) providing a molecular model comprising the 3D structure atomic coordinates of PEPREF as defined in claim 1; (b) identifying a candidate analog having a RMSD of 2.45 Å or less; and (c) producing the candidate analog identified in step (b).

138.-141. (canceled)

142. A computer system comprising: (a) a memory comprising the 3D structure atomic coordinates of PEPREF as defined in claim 1, and (b) a processor in electrical communication with the memory; wherein the processor generates a molecular model having a three dimensional shape representative of PEPREF.

143. (canceled)

144. A method of inducing cell differentiation, tissue regeneration, or tissue formation comprising the in-vitro, ex-vivo or in-vivo administration of an effective amount of a peptide or peptidomimetic according to claim 1; wherein said method is selected from the group consisting of pharmaceutical, surgical, dermatological, prophylactic, diagnostic, imaging methods, and any combination thereof.

145. A method of inducing cell differentiation, tissue regeneration, or tissue formation comprising the in-vitro, ex-vivo or in-vivo administration of an effective amount of a functionalized biomaterial according to claim 87; wherein said method is selected from the group consisting of pharmaceutical, surgical, dermatological, prophylactic, diagnostic, imaging methods, and any combination thereof.

146. A method of inducing cell differentiation, tissue regeneration, or tissue formation comprising the in-vitro, ex-vivo or in-vivo administration of an effective amount of a medical composition according to claim 92; wherein said method is selected from the group consisting of pharmaceutical, surgical, dermatological, prophylactic, diagnostic, imaging methods, and any combination thereof.

147. The method according to claim 144, wherein said method may be used for protecting a patient from a disease, condition, disorder, or pathology selected from the group consisting of enhancing osteogenesis, inducing bone formation, inducing osteocyte maturation, treating, preventing or diagnosing osteoporosis; enhancing chondrogenesis, inducing cartilage formation, inducing chondrocyte maturation, treating or preventing osteoarthritis, treating or preventing costochondritis, treating or preventing herniation, treating or preventing achondroplasia, treating, preventing or diagnosing relapsing polychondritis; enhancing endothelization, enhancing vascularization/angiogenesis, treating, preventing or diagnosing at least one of coronary artery disease, cardiomyopathy, hypertensive heart disease, heart failure, cor pulmonale, cardiac dysrhythmias, inflammatory heart disease, endocarditis, inflammatory cardiomegaly, myocarditis, valvular heart disease, cerebrovascular disease, peripheral arterial disease, congenital heart disease, or rheumatic heart disease; enhancing axonal dendritic neuron growth, promoting neuron-regeneration, treating, preventing or diagnosing neuron degeneration-related conditions and diseases; enhancing eye retina cell regeneration, treating, preventing or diagnosing eye retina cell degeneration-related conditions or diseases; enhancing renal functions, preventing, treating or diagnosing kidneys failure, chronic kidney disease, and/or renal fibrosis; enhancing fibrous tissue formation, promoting tendon and ligament regeneration, preventing, treating or diagnosing tendon/ligament cell degeneration; hair follicle tissue regeneration, hair follicle stem cell activation, preventing, treating or diagnosing alopecia areata, alopecia totalis, alopecia universalis, androgenic alopecia, telogen effluvium, anagen effluvium or chemotherapy-induced alopecia; enhancing tissue closure; promoting female fertility, and treating, preventing, or diagnosing female infertility; myopathies, muscular atrophy, disuse atrophy, denervation atrophy, muscular dystrophies such as the Duchenne muscular dystrophy (DMD), and the Becker muscular dystrophy (BMD), fibrosis, fibrositis, muscle weakness, fatigue, cramps, fibromyalgia, or chronic muscle pain syndrome; treating asthma, Chronic obstructive pulmonary disease, Chronic bronchitis, Emphysema, Cystic fibrosis, Pulmonary edema, Acute respiratory distress syndrome, Pneumoconiosis, Interstitial lung disease, Sarcoidosis, Idiopathic pulmonary fibrosis, Pulmonary embolism, Pulmonary hypertension, Pleural effusion, Pneumothorax, Mesothelioma, Granulomatosis with polyangiitis, Goodpasture syndrome, Pulmonary hyperplasia, Infant respiratory distress syndrome, Chronic obstructive pulmonary disease, Silicosis, Sleep Apnea, Severe Acute Respiratory Syndrome, Pulmonary fibrosis, Primary ciliary dyskinesia, Pneumoconiosis, Hypersensitivity Pneumonitis, Cryptogenic Organizing Pneumonia (Bronchiolitis Obliterans Organizing Pneumonia, Byssinosis, Bronchopulmonary Dysplasia, Bronchiolitis, Bronchiectasis, Asbestosis, Pertussis, Middle Eastern Respiratory Syndrome, Pneumonia, Tuberculosis, Bronchitis, Histoplasmosis, Coccidioidomycosis, and Acute bronchitis; treating anemia, Iron-deficiency anemia, Anemia of chronic disease, Pernicious anemia, Aplastic anemia, Autoimmune hemolytic anemia, Thalassemia, Sickle cell anemia, Polycythemia vera, Vitamin deficiency anemia, Hemolytic anemia, Thrombocytopenia, Idiopathic thrombocytopenic purpura, Heparin-induced thrombocytopenia, Thrombotic thrombocytopenic purpura, Essential thrombocytosis, Thrombosis, Hemophilia, von Willebrand disease, Hypercoaguable state, Deep venous thrombosis, Disseminated intravascular coagulation, Thrombocytopenia, Immune Thrombocytopenia, Drug-induced thrombocytopenia, Gestational thrombocytopenia, Thrombotic microangiopathies, Drug-induced thrombotic microangiopathies, Complement-mediated thrombotic microangiopathies, Mixed cryoglobulinemia, Eosinophilia, Eosinopenia, Idiopathic hypereosinophilic syndrome, Antiphospholipid syndrome, Glanzmann's thrombasthenia, Wiskott-Aldrich syndrome, Leishmania infection, Toxoplasmosis, Hereditary hypogammaglobulinemia, Nonfamilial hypogammaglobulinemia, Leukopenia, Agranulocytosis, Basopenia, Bernard-Soulier syndrome, Malaria, Sepsis, and Hemolytic uremic syndrome; treating obesity, Dercum's disease, Multiple symmetric lipomatosis, Familial multiple lipomatosis, Lipodystrophy, Lipedema, and Atherosclerosis.

148. The method according to claim 145, wherein said method may be used for protecting a patient from a disease, condition, disorder, or pathology selected from the group consisting of enhancing osteogenesis, inducing bone formation, inducing osteocyte maturation, treating, preventing or diagnosing osteoporosis; enhancing chondrogenesis, inducing cartilage formation, inducing chondrocyte maturation, treating or preventing osteoarthritis, treating or preventing costochondritis, treating or preventing herniation, treating or preventing achondroplasia, treating, preventing or diagnosing relapsing polychondritis; enhancing endothelization, enhancing vascularization/angiogenesis, treating, preventing or diagnosing at least one of coronary artery disease, cardiomyopathy, hypertensive heart disease, heart failure, cor pulmonale, cardiac dysrhythmias, inflammatory heart disease, endocarditis, inflammatory cardiomegaly, myocarditis, valvular heart disease, cerebrovascular disease, peripheral arterial disease, congenital heart disease, or rheumatic heart disease; enhancing axonal dendritic neuron growth, promoting neuron-regeneration, treating, preventing or diagnosing neuron degeneration-related conditions and diseases; enhancing eye retina cell regeneration, treating, preventing or diagnosing eye retina cell degeneration-related conditions or diseases; enhancing renal functions, preventing, treating or diagnosing kidneys failure, chronic kidney disease, and/or renal fibrosis; enhancing fibrous tissue formation, promoting tendon and ligament regeneration, preventing, treating or diagnosing tendon/ligament cell degeneration; hair follicle tissue regeneration, hair follicle stem cell activation, preventing, treating or diagnosing alopecia areata, alopecia totalis, alopecia universalis, androgenic alopecia, telogen effluvium, anagen effluvium or chemotherapy-induced alopecia; enhancing tissue closure; promoting female fertility, and treating, preventing, or diagnosing female infertility; myopathies, muscular atrophy, disuse atrophy, denervation atrophy, muscular dystrophies such as the Duchenne muscular dystrophy (DMD), and the Becker muscular dystrophy (BMD), fibrosis, fibrositis, muscle weakness, fatigue, cramps, fibromyalgia, or chronic muscle pain syndrome; treating asthma, Chronic obstructive pulmonary disease, Chronic bronchitis, Emphysema, Cystic fibrosis, Pulmonary edema, Acute respiratory distress syndrome, Pneumoconiosis, Interstitial lung disease, Sarcoidosis, Idiopathic pulmonary fibrosis, Pulmonary embolism, Pulmonary hypertension, Pleural effusion, Pneumothorax, Mesothelioma, Granulomatosis with polyangiitis, Goodpasture syndrome, Pulmonary hyperplasia, Infant respiratory distress syndrome, Chronic obstructive pulmonary disease, Silicosis, Sleep Apnea, Severe Acute Respiratory Syndrome, Pulmonary fibrosis, Primary ciliary dyskinesia, Pneumoconiosis, Hypersensitivity Pneumonitis, Cryptogenic Organizing Pneumonia (Bronchiolitis Obliterans Organizing Pneumonia, Byssinosis, Bronchopulmonary Dysplasia, Bronchiolitis, Bronchiectasis, Asbestosis, Pertussis, Middle Eastern Respiratory Syndrome, Pneumonia, Tuberculosis, Bronchitis, Histoplasmosis, Coccidioidomycosis, and Acute bronchitis; treating anemia, Iron-deficiency anemia, Anemia of chronic disease, Pernicious anemia, Aplastic anemia, Autoimmune hemolytic anemia, Thalassemia, Sickle cell anemia, Polycythemia vera, Vitamin deficiency anemia, Hemolytic anemia, Thrombocytopenia, Idiopathic thrombocytopenic purpura, Heparin-induced thrombocytopenia, Thrombotic thrombocytopenic purpura, Essential thrombocytosis, Thrombosis, Hemophilia, von Willebrand disease, Hypercoaguable state, Deep venous thrombosis, Disseminated intravascular coagulation, Thrombocytopenia, Immune Thrombocytopenia, Drug-induced thrombocytopenia, Gestational thrombocytopenia, Thrombotic microangiopathies, Drug-induced thrombotic microangiopathies, Complement-mediated thrombotic microangiopathies, Mixed cryoglobulinemia, Eosinophilia, Eosinopenia, Idiopathic hypereosinophilic syndrome, Antiphospholipid syndrome, Glanzmann's thrombasthenia, Wiskott-Aldrich syndrome, Leishmania infection, Toxoplasmosis, Hereditary hypogammaglobulinemia, Nonfamilial hypogammaglobulinemia, Leukopenia, Agranulocytosis, Basopenia, Bernard-Soulier syndrome, Malaria, Sepsis, and Hemolytic uremic syndrome; treating obesity, Dercum's disease, Multiple symmetric lipomatosis, Familial multiple lipomatosis, Lipodystrophy, Lipedema, and Atherosclerosis.

149. The method according to claim 146, wherein said method may be used for protecting a patient from a disease, condition, disorder, or pathology selected from the group consisting of enhancing osteogenesis, inducing bone formation, inducing osteocyte maturation, treating, preventing or diagnosing osteoporosis; enhancing chondrogenesis, inducing cartilage formation, inducing chondrocyte maturation, treating or preventing osteoarthritis, treating or preventing costochondritis, treating or preventing herniation, treating or preventing achondroplasia, treating, preventing or diagnosing relapsing polychondritis; enhancing endothelization, enhancing vascularization/angiogenesis, treating, preventing or diagnosing at least one of coronary artery disease, cardiomyopathy, hypertensive heart disease, heart failure, cor pulmonale, cardiac dysrhythmias, inflammatory heart disease, endocarditis, inflammatory cardiomegaly, myocarditis, valvular heart disease, cerebrovascular disease, peripheral arterial disease, congenital heart disease, or rheumatic heart disease; enhancing axonal dendritic neuron growth, promoting neuron-regeneration, treating, preventing or diagnosing neuron degeneration-related conditions and diseases; enhancing eye retina cell regeneration, treating, preventing or diagnosing eye retina cell degeneration-related conditions or diseases; enhancing renal functions, preventing, treating or diagnosing kidneys failure, chronic kidney disease, and/or renal fibrosis; enhancing fibrous tissue formation, promoting tendon and ligament regeneration, preventing, treating or diagnosing tendon/ligament cell degeneration; hair follicle tissue regeneration, hair follicle stem cell activation, preventing, treating or diagnosing alopecia areata, alopecia totalis, alopecia universalis, androgenic alopecia, telogen effluvium, anagen effluvium or chemotherapy-induced alopecia; enhancing tissue closure; promoting female fertility, and treating, preventing, or diagnosing female infertility; myopathies, muscular atrophy, disuse atrophy, denervation atrophy, muscular dystrophies such as the Duchenne muscular dystrophy (DMD), and the Becker muscular dystrophy (BMD), fibrosis, fibrositis, muscle weakness, fatigue, cramps, fibromyalgia, or chronic muscle pain syndrome; treating asthma, Chronic obstructive pulmonary disease, Chronic bronchitis, Emphysema, Cystic fibrosis, Pulmonary edema, Acute respiratory distress syndrome, Pneumoconiosis, Interstitial lung disease, Sarcoidosis, Idiopathic pulmonary fibrosis, Pulmonary embolism, Pulmonary hypertension, Pleural effusion, Pneumothorax, Mesothelioma, Granulomatosis with polyangiitis, Goodpasture syndrome, Pulmonary hyperplasia, Infant respiratory distress syndrome, Chronic obstructive pulmonary disease, Silicosis, Sleep Apnea, Severe Acute Respiratory Syndrome, Pulmonary fibrosis, Primary ciliary dyskinesia, Pneumoconiosis, Hypersensitivity Pneumonitis, Cryptogenic Organizing Pneumonia (Bronchiolitis Obliterans Organizing Pneumonia, Byssinosis, Bronchopulmonary Dysplasia, Bronchiolitis, Bronchiectasis, Asbestosis, Pertussis, Middle Eastern Respiratory Syndrome, Pneumonia, Tuberculosis, Bronchitis, Histoplasmosis, Coccidioidomycosis, and Acute bronchitis; treating anemia, Iron-deficiency anemia, Anemia of chronic disease, Pernicious anemia, Aplastic anemia, Autoimmune hemolytic anemia, Thalassemia, Sickle cell anemia, Polycythemia vera, Vitamin deficiency anemia, Hemolytic anemia, Thrombocytopenia, Idiopathic thrombocytopenic purpura, Heparin-induced thrombocytopenia, Thrombotic thrombocytopenic purpura, Essential thrombocytosis, Thrombosis, Hemophilia, von Willebrand disease, Hypercoaguable state, Deep venous thrombosis, Disseminated intravascular coagulation, Thrombocytopenia, Immune Thrombocytopenia, Drug-induced thrombocytopenia, Gestational thrombocytopenia, Thrombotic microangiopathies, Drug-induced thrombotic microangiopathies, Complement-mediated thrombotic microangiopathies, Mixed cryoglobulinemia, Eosinophilia, Eosinopenia, Idiopathic hypereosinophilic syndrome, Antiphospholipid syndrome, Glanzmann's thrombasthenia, Wiskott-Aldrich syndrome, Leishmania infection, Toxoplasmosis, Hereditary hypogammaglobulinemia, Nonfamilial hypogammaglobulinemia, Leukopenia, Agranulocytosis, Basopenia, Bernard-Soulier syndrome, Malaria, Sepsis, and Hemolytic uremic syndrome; treating obesity, Dercum's disease, Multiple symmetric lipomatosis, Familial multiple lipomatosis, Lipodystrophy, Lipedema, and Atherosclerosis.

150. A method of producing a physiologically functional and healthy cell, comprising the administration in-vitro, ex-vivo or in-vivo to a mesenchymal stem cell or progenitor cell, at any stage of differentiation thereof, of an effective amount of a peptide or a peptidomimetic according to claim 1, and wherein said physiologically functional and healthy cell is selected from the group consisting of an osteoblast, osteocyte, chondroblast, chondrocyte, neuroblast, neurocyte, Sertoli cells, Leydig cell, Germ cell, myoblast, myocyte, keratinocyte, endothelial cells, angioblast, fibroblast, fibrocyte, podocyte, areolar connective cells, adipocytes, pre-adipocytes/lipoblasts, epithelial cells, erythrocytes, alveolar cells, hematopoietic stem cells (HSC), myeloid progenitors, lymphoid progenitors, mast cells, myeloblasts, monocytes, macrophages, neutrophils, basophils, eosinophils, erythrocytes, megakaryocytes, thrombocytes, dendritic cells, small lymphocytes, T-lymphocytes (T-cells), B-lymphocytes (B-cells), and natural killer (NK)-cells.

151. A method of producing a physiologically functional and healthy cell, comprising the administration in-vitro, ex-vivo or in-vivo to a mesenchymal stem cell or progenitor cell, at any stage of differentiation thereof, of an effective amount of a functionalized biomaterial according to claim 87, and wherein said physiologically functional and healthy cell is selected from the group consisting of an osteoblast, osteocyte, chondroblast, chondrocyte, neuroblast, neurocyte, Sertoli cells, Leydig cell, Germ cell, myoblast, myocyte, keratinocyte, endothelial cells, angioblast, fibroblast, fibrocyte, podocyte, areolar connective cells, adipocytes, pre-adipocytes/lipoblasts, epithelial cells, erythrocytes, alveolar cells, hematopoietic stem cells (HSC), myeloid progenitors, lymphoid progenitors, mast cells, myeloblasts, monocytes, macrophages, neutrophils, basophils, eosinophils, erythrocytes, megakaryocytes, thrombocytes, dendritic cells, small lymphocytes, T-lymphocytes (T-cells), B-lymphocytes (B-cells), and natural killer (NK)-cells.

152. A method of producing a physiologically functional and healthy cell, comprising the administration in-vitro, ex-vivo or in-vivo to a mesenchymal stem cell or progenitor cell, at any stage of differentiation thereof, of an effective amount of a medical composition according to claim 92, and wherein said physiologically functional and healthy cell is selected from the group consisting of an osteoblast, osteocyte, chondroblast, chondrocyte, neuroblast, neurocyte, Sertoli cells, Leydig cell, Germ cell, myoblast, myocyte, keratinocyte, endothelial cells, angioblast, fibroblast, fibrocyte, podocyte, areolar connective cells, adipocytes, pre-adipocytes/lipoblasts, epithelial cells, erythrocytes, alveolar cells, hematopoietic stem cells (HSC), myeloid progenitors, lymphoid progenitors, mast cells, myeloblasts, monocytes, macrophages, neutrophils, basophils, eosinophils, erythrocytes, megakaryocytes, thrombocytes, dendritic cells, small lymphocytes, T-lymphocytes (T-cells), B-lymphocytes (B-cells), and natural killer (NK)-cells.

153. A surgical method for surgical treatment comprising the contacting of a peptide or a peptidomimetic according to claim 1 with a body part of a patient to be treated, wherein said contacting induces stem cell differentiation and tissue formation.

154. A surgical method for surgical treatment comprising the contacting of a functionalized biomaterial according to claim 87 with a body part of a patient to be treated, wherein said contacting induces stem cell differentiation and tissue formation.

155. A surgical method for surgical treatment comprising the contacting of a medical device according to claim 91 with a body part of a patient to be treated, wherein said contacting induces stem cell differentiation and tissue formation.

156. Kits for pharmaceutical, surgical, dermatological, prophylactic, diagnostic, or imaging functional association production, comprising at least one peptide or peptidomimetic according to claim 1, at least one bioactive carrier, each and every one of them provided in an amount effective to produce a pharmaceutical, surgical, dermatological, prophylactic, diagnostic, or imaging association to induce cell differentiation, promote tissue regeneration or protect a subject from a disease, disorder, pathology or condition selected from the group consisting of enhancing osteogenesis, inducing bone formation, inducing osteocyte maturation, treating, preventing or diagnosing osteoporosis; enhancing chondrogenesis, inducing cartilage formation, inducing chondrocyte maturation, treating or preventing osteoarthritis, treating or preventing costochondritis, treating or preventing herniation, treating or preventing achondroplasia, treating, preventing or diagnosing relapsing polychondritis; enhancing endothelization, enhancing vascularization/angiogenesis, treating, preventing or diagnosing at least one of coronary artery disease, cardiomyopathy, hypertensive heart disease, heart failure, cor pulmonale, cardiac dysrhythmias, inflammatory heart disease, endocarditis, inflammatory cardiomegaly, myocarditis, valvular heart disease, cerebrovascular disease, peripheral arterial disease, congenital heart disease, or rheumatic heart disease; enhancing axonal dendritic neuron growth, promoting neuron-regeneration, treating, preventing or diagnosing neuron degeneration-related conditions and diseases; enhancing eye retina cell regeneration, treating, preventing or diagnosing eye retina cell degeneration-related conditions or diseases; enhancing renal functions, preventing, treating or diagnosing kidneys failure, chronic kidney disease, and/or renal fibrosis; enhancing fibrous tissue formation, promoting tendon and ligament regeneration, preventing, treating or diagnosing tendon/ligament cell degeneration; hair follicle tissue regeneration, hair follicle stem cell activation, preventing, treating or diagnosing alopecia areata, alopecia totalis, alopecia universalis, androgenic alopecia, telogen effluvium, anagen effluvium or chemotherapy-induced alopecia; enhancing tissue closure; promoting female fertility, and treating, preventing, or diagnosing female infertility; myopathies, muscular atrophy, disuse atrophy, denervation atrophy, muscular dystrophies such as the Duchenne muscular dystrophy (DMD), and the Becker muscular dystrophy (BMD), fibrosis, fibrositis, muscle weakness, fatigue, cramps, fibromyalgia, or chronic muscle pain syndrome; treating asthma, Chronic obstructive pulmonary disease, Chronic bronchitis, Emphysema, Cystic fibrosis, Pulmonary edema, Acute respiratory distress syndrome, Pneumoconiosis, Interstitial lung disease, Sarcoidosis, Idiopathic pulmonary fibrosis, Pulmonary embolism, Pulmonary hypertension, Pleural effusion, Pneumothorax, Mesothelioma, Granulomatosis with polyangiitis, Goodpasture syndrome, Pulmonary hyperplasia, Infant respiratory distress syndrome, Chronic obstructive pulmonary disease, Silicosis, Sleep Apnea, Severe Acute Respiratory Syndrome, Pulmonary fibrosis, Primary ciliary dyskinesia, Pneumoconiosis, Hypersensitivity Pneumonitis, Cryptogenic Organizing Pneumonia (Bronchiolitis Obliterans Organizing Pneumonia, Byssinosis, Bronchopulmonary Dysplasia, Bronchiolitis, Bronchiectasis, Asbestosis, Pertussis, Middle Eastern Respiratory Syndrome, Pneumonia, Tuberculosis, Bronchitis, Histoplasmosis, Coccidioidomycosis, and Acute bronchitis; treating anemia, Iron-deficiency anemia, Anemia of chronic disease, Pernicious anemia, Aplastic anemia, Autoimmune hemolytic anemia, Thalassemia, Sickle cell anemia, Polycythemia vera, Vitamin deficiency anemia, Hemolytic anemia, Thrombocytopenia, Idiopathic thrombocytopenic purpura, Heparin-induced thrombocytopenia, Thrombotic thrombocytopenic purpura, Essential thrombocytosis, Thrombosis, Hemophilia, von Willebrand disease, Hypercoaguable state, Deep venous thrombosis, Disseminated intravascular coagulation, Thrombocytopenia, Immune Thrombocytopenia, Drug-induced thrombocytopenia, Gestational thrombocytopenia, Thrombotic microangiopathies, Drug-induced thrombotic microangiopathies, Complement-mediated thrombotic microangiopathies, Mixed cryoglobulinemia, Eosinophilia, Eosinopenia, Idiopathic hypereosinophilic syndrome, Antiphospholipid syndrome, Glanzmann's thrombasthenia, Wiskott-Aldrich syndrome, Leishmania infection, Toxoplasmosis, Hereditary hypogammaglobulinemia, Nonfamilial hypogammaglobulinemia, Leukopenia, Agranulocytosis, Basopenia, Bernard-Soulier syndrome, Malaria, Sepsis, and Hemolytic uremic syndrome; treating obesity, Dercum's disease, Multiple symmetric lipomatosis, Familial multiple lipomatosis, Lipodystrophy, Lipedema, and Atherosclerosis, when administered in-vitro, ex-vivo or in-vivo to a mesenchymal stem cell, progenitor cell, at any stage of differentiation thereof, or to a subject carrying such a cell, and packaging and instructions.

157. Kits for pharmaceutical, surgical, dermatological, prophylactic, diagnostic, or imaging functional association production, comprising at least one functionalized biomaterial according to claim 87, at least one bioactive carrier, each and every one of them provided in an amount effective to produce a pharmaceutical, surgical, dermatological, prophylactic, diagnostic, or imaging association to induce cell differentiation, promote tissue regeneration or protect a subject from a disease, disorder, pathology or condition selected from the group consisting of enhancing osteogenesis, inducing bone formation, inducing osteocyte maturation, treating, preventing or diagnosing osteoporosis; enhancing chondrogenesis, inducing cartilage formation, inducing chondrocyte maturation, treating or preventing osteoarthritis, treating or preventing costochondritis, treating or preventing herniation, treating or preventing achondroplasia, treating, preventing or diagnosing relapsing polychondritis; enhancing endothelization, enhancing vascularization/angiogenesis, treating, preventing or diagnosing at least one of coronary artery disease, cardiomyopathy, hypertensive heart disease, heart failure, cor pulmonale, cardiac dysrhythmias, inflammatory heart disease, endocarditis, inflammatory cardiomegaly, myocarditis, valvular heart disease, cerebrovascular disease, peripheral arterial disease, congenital heart disease, or rheumatic heart disease; enhancing axonal dendritic neuron growth, promoting neuron-regeneration, treating, preventing or diagnosing neuron degeneration-related conditions and diseases; enhancing eye retina cell regeneration, treating, preventing or diagnosing eye retina cell degeneration-related conditions or diseases; enhancing renal functions, preventing, treating or diagnosing kidneys failure, chronic kidney disease, and/or renal fibrosis; enhancing fibrous tissue formation, promoting tendon and ligament regeneration, preventing, treating or diagnosing tendon/ligament cell degeneration; hair follicle tissue regeneration, hair follicle stem cell activation, preventing, treating or diagnosing alopecia areata, alopecia totalis, alopecia universalis, androgenic alopecia, telogen effluvium, anagen effluvium or chemotherapy-induced alopecia; enhancing tissue closure; promoting female fertility, and treating, preventing, or diagnosing female infertility; myopathies, muscular atrophy, disuse atrophy, denervation atrophy, muscular dystrophies such as the Duchenne muscular dystrophy (DMD), and the Becker muscular dystrophy (BMD), fibrosis, fibrositis, muscle weakness, fatigue, cramps, fibromyalgia, or chronic muscle pain syndrome; treating asthma, Chronic obstructive pulmonary disease, Chronic bronchitis, Emphysema, Cystic fibrosis, Pulmonary edema, Acute respiratory distress syndrome, Pneumoconiosis, Interstitial lung disease, Sarcoidosis, Idiopathic pulmonary fibrosis, Pulmonary embolism, Pulmonary hypertension, Pleural effusion, Pneumothorax, Mesothelioma, Granulomatosis with polyangiitis, Goodpasture syndrome, Pulmonary hyperplasia, Infant respiratory distress syndrome, Chronic obstructive pulmonary disease, Silicosis, Sleep Apnea, Severe Acute Respiratory Syndrome, Pulmonary fibrosis, Primary ciliary dyskinesia, Pneumoconiosis, Hypersensitivity Pneumonitis, Cryptogenic Organizing Pneumonia (Bronchiolitis Obliterans Organizing Pneumonia, Byssinosis, Bronchopulmonary Dysplasia, Bronchiolitis, Bronchiectasis, Asbestosis, Pertussis, Middle Eastern Respiratory Syndrome, Pneumonia, Tuberculosis, Bronchitis, Histoplasmosis, Coccidioidomycosis, and Acute bronchitis; treating anemia, Iron-deficiency anemia, Anemia of chronic disease, Pernicious anemia, Aplastic anemia, Autoimmune hemolytic anemia, Thalassemia, Sickle cell anemia, Polycythemia vera, Vitamin deficiency anemia, Hemolytic anemia, Thrombocytopenia, Idiopathic thrombocytopenic purpura, Heparin-induced thrombocytopenia, Thrombotic thrombocytopenic purpura, Essential thrombocytosis, Thrombosis, Hemophilia, von Willebrand disease, Hypercoaguable state, Deep venous thrombosis, Disseminated intravascular coagulation, Thrombocytopenia, Immune Thrombocytopenia, Drug-induced thrombocytopenia, Gestational thrombocytopenia, Thrombotic microangiopathies, Drug-induced thrombotic microangiopathies, Complement-mediated thrombotic microangiopathies, Mixed cryoglobulinemia, Eosinophilia, Eosinopenia, Idiopathic hypereosinophilic syndrome, Antiphospholipid syndrome, Glanzmann's thrombasthenia, Wiskott-Aldrich syndrome, Leishmania infection, Toxoplasmosis, Hereditary hypogammaglobulinemia, Nonfamilial hypogammaglobulinemia, Leukopenia, Agranulocytosis, Basopenia, Bernard-Soulier syndrome, Malaria, Sepsis, and Hemolytic uremic syndrome; treating obesity, Dercum's disease, Multiple symmetric lipomatosis, Familial multiple lipomatosis, Lipodystrophy, Lipedema, and Atherosclerosis, when administered in-vitro, ex-vivo or in-vivo to a mesenchymal stem cell, progenitor cell, at any stage of differentiation thereof, or to a subject carrying such a cell, and packaging and instructions.

158. A medical device comprising at least one functionalized biomaterial according to claim 87.

159. A medical composition comprising at least one functionalized biomaterial according to claim 87, and a medically acceptable carrier.

The application's sequence listing, which the Patent Office published only in electronic form, follows.

SEQUENCE LISTING (84186 sequences)

SEQ ID NO: 1 - protein, 39 aa, Artificial Sequence
  GFR-binding peptide
  MOD_RES (7)..(8): Xaa is C or S
CKVPKPXXAPTQLSAISTLYLDEYDKVVLKNYQNMVVRA

SEQ ID NO: 2 - protein, 43 aa, Artificial Sequence
  GFR-binding peptide
  MOD_RES (7)..(8)..(40)..(42): Xaa is C or S
CKVGKAXXVPTKLSAISTLYLDDMGVPTLKNYQNMVVRAXGXH

SEQ ID NO: 3 - protein, 42 aa, Artificial Sequence
  GFR-binding peptide
  MOD_RES (7)..(8)..(39)..(41): Xaa is C or S
CASASPXXVSQDLSAISTLYLIGKTPKILKNYQMIVKSXKXS

SEQ ID NO: 4 - protein, 42 aa, Artificial Sequence
  GFR-binding peptide
  MOD_RES (7)..(8)..(41): Xaa is C or S
CKIPKAXXVPTELNAISVLYFDENEKVILKKYRDMVVEGSXG

SEQ ID NO: 5 - protein, 42 aa, Artificial Sequence
  GFR-binding peptide
  MOD_RES (7)..(8)..(39)..(41): Xaa is C or S
CASASPXXVSQDLNAISVLYFIGKTPKILKKYRMIVKSXKXS

SEQ ID NO: 6 - protein, 38 aa, Artificial Sequence
  GFR-binding peptide
  MOD_RES (7)..(8): Xaa is C or S
CAVPKAXXAPTKLSATSVLYYDSSNNVVLRKHRNMVVK

SEQ ID NO: 7 - protein, 43 aa, Artificial Sequence
  GFR-binding peptide
  MOD_RES (7)..(8)..(40)..(42): Xaa is C or S
CTVPKPXXAPTQLSPISVLYKDDSSNVILKYHYNMVVRAXGXH

SEQ ID NO: 8 - protein, 31 aa, Artificial Sequence
  GFR-binding peptide
CAPTQLSPISVLYKDDSSNVILKYHYTLEDH

SEQ ID NO: 9 - protein, 38 aa, Artificial Sequence
  GFR-binding peptide
CRNVQCRPTQVQLSAISTLYLEIVRKKPLKNYQTLEDH

SEQ ID NO: 10 - protein, 33 aa, Artificial Sequence
  GFR-binding peptide
CPSSAPTQLSATSVLYYDDSSNVILRKHRQHNK

SEQ ID NO: 11 - protein, 37 aa, Artificial Sequence
  GFR-binding peptide
CPKPSSAPTQLNAISMLYFGGGGGGGLKKYRNMVVRA

SEQ ID NO: 12 - protein, 32 aa, Artificial Sequence
  GFR-binding peptide
CKVPKASSVPTELSAISTLYLAAAALKNYQEM

SEQ ID NO: 13 - protein, 39 aa, Artificial Sequence
  GFR-binding peptide
  MOD_RES (7)..(8): Xaa is C or S
CSIPKAXXVPTELSATSVLYYDEYDEKVVLRKHEMVVEG

SEQ ID NO: 14 - protein, 26 aa, Artificial Sequence
  GFR-binding peptide
CAPTKLSAISMLYLDSSNNVILKNYQ

SEQ ID NO: 15 - protein, 28 aa, Artificial Sequence
  GFR-binding peptide
CASSAVSQELSAISMLYLGGGLKNYQDM

SEQ ID NO: 16 - protein, 40 aa, Artificial Sequence
  GFR-binding peptide
  MOD_RES (37)..(39): Xaa is C or S
CKASSVPTELSPISTLYKDENEKVVLKYHYDMVVEGXGXR

SEQ ID NO: 17 - protein, 38 aa, Artificial Sequence
  GFR-binding peptide
  MOD_RES (7)..(8): Xaa is C or S
CASAAPXXVPQKLNAISMLYFVGRKPKVLKKYRMIVRS

SEQ ID NO: 18 - protein, 37 aa, Artificial Sequence
  GFR-binding peptide
  MOD_RES (7)..(8): Xaa is C or S
CKVGKAXXVPTKLNAISTLYLDENEKVVLKKYREGMS

SEQ ID NO: 19 - protein, 37 aa, Artificial Sequence
  GFR-binding peptide
CPKPSSAPTQLSAISTLYLDDSSNVILKNYQMIVVRA

SEQ ID NO: 20 - protein, 33 aa, Artificial Sequence
  GFR-binding peptide
  MOD_RES (7)..(8): Xaa is C or S
CKVGKAXXVPTKLNAISTLYLDDSSNVILKNYQ

SEQ ID NO: 21 - protein, 33 aa, Artificial Sequence
  GFR-binding peptide
CGGGSSVPTELSAISTLYLDDYDKVILKKYRNM

SEQ ID NO: 22 - protein, 42 aa, Artificial Sequence
  GFR-binding peptide
  MOD_RES (11)..(12): Xaa is C or S
WWFWGKVPKPXXAPTQLSAISTLYLDEYDKVVLKNYQNMVVR

SEQ ID NO: 23 - protein, 42 aa, Artificial Sequence
  GFR-binding peptide
  MOD_RES (11)..(12): Xaa is C or S
GTPGPKVPKPXXAPTQLSAISTLYLDEYDKVVLKNYQNMAVR

SEQ ID NO: 24 - protein, 38 aa, Artificial Sequence
  GFR-binding peptide
GTPGPPSSAPTQLSATSVLYYDDSSNVILRKHRMIVKS

SEQ ID NO: 25 - protein, 30 aa, Artificial Sequence
  GFR-binding peptide
GTPGPAPTQLSPISVLYKDDSSNVILKYHY

SEQ ID NO: 26 - protein, 32 aa, Artificial Sequence
  GFR-binding peptide
GTPGPASSAVSQELSAISMLYLGGGLKNYQDM

SEQ ID NO: 27 - protein, 30 aa, Artificial Sequence
  GFR-binding peptide
GTPGPAPTKLSAISMLYLDSSNNVILRKHR

SEQ ID NO: 28 - protein, 30 aa, Artificial Sequence
  GFR-binding peptide
GTPGPAPTKLSAISMLYLDSSNNVILKKYR

SEQ ID NO: 29 - protein, 44 aa, Artificial Sequence
  GFR-binding peptide
  MOD_RES (41)..(43): Xaa is C or S
GTPGPKASSVPTELSPISTLYKDENEKVVLKYHYDMVVEGXGXR

SEQ ID NO: 30 - protein, 36 aa, Artificial Sequence
  GFR-binding peptide
GTPGPKASSVPTELSPISTLYKDENEKVVLKYHYDM

SEQ ID NO: 31 - protein, 38 aa, Artificial Sequence
  GFR-binding peptide
GTPGPPKPSSAPTQLNAISMLYFGGGGGLKKYRDMQHN

SEQ ID NO: 32 - protein, 44 aa, Artificial Sequence
  GFR-binding peptide
  MOD_RES (41)..(43): Xaa is C or S
WWFWGKASSVPTELSPISTLYKDENEKVVLKYHYDMVVEGXGXR

SEQ ID NO: 33 - protein, 35 aa, Artificial Sequence
  GFR-binding peptide
WWFWGASSAVSQELSAISMLYLGGGLKNYQDMQHN

SEQ ID NO: 34 - protein, 42 aa, Artificial Sequence
  GFR-binding peptide
GTPGPRNVQCRPTQVQLSAISTLYLEIVRKKPLKNYQTLEDH

SEQ ID NO: 35 - protein, 36 aa, Artificial Sequence
  GFR-binding peptide
GTPGPRNVQCRPTQVQLSAISTLYLAAALKNYQTLE

SEQ ID NO: 36 - protein, 38 aa, Artificial Sequence
  GFR-binding peptide
  MOD_RES (7)..(8): Xaa is C or S
CKIPKAXXVPTELEPLPIVYYVGRKPKVEQLSNMIVRS

SEQ ID NO: 37 - protein, 40 aa, Artificial Sequence
  GFR-binding peptide
  MOD_RES (7)..(8): Xaa is C or S
CASAAPXXVPQALEPLPIVYYVGRTPKVEQLSNMIVRSSK

SEQ ID NO: 38 - protein, 28 aa, Artificial Sequence
  GFR-binding peptide
CVPTEERSVKVAKVRIKPHQGQHKEVQV

SEQ ID NO: 39 - protein, 30 aa, Artificial Sequence
  GFR-binding peptide
CVPTEESNITMQIMRIKPHQGQHIGEMSFL

SEQ ID NO: 40 - protein, 42 aa, Artificial Sequence
  GFR-binding peptide
CRNVQCRPTQVQLRPVQVRKIEYVRKKPKLKKATVRLEDHLA

SEQ ID NO: 41 - protein, 35 aa, Artificial Sequence
  GFR-binding peptide
  MOD_RES (7)..(8): Xaa is C or S
CGIPEPXXVPEKMSSLSILFFDENKNVVLKVYPNM

SEQ ID NO: 42 - protein, 35 aa, Artificial Sequence
  GFR-binding peptide
  MOD_RES (7)..(8): Xaa is C or S
CGIPEPXXVPEKTSSLSLLFFDENKNVVLKVYPNM

SEQ ID NO: 43 - protein, 41 aa, Artificial Sequence
  GFR-binding peptide
  MOD_RES (7)..(8): Xaa is C or S
CAAPASXXVPARLSPISILYIDAANNVVYKQYEDMVVEASG

SEQ ID NO: 44 - protein, 38 aa, Artificial Sequence
  GFR-binding peptide
  MOD_RES (7)..(8): Xaa is C or S
CAAPASXXVPARLSPISILYIDAANNVVYKQYEDMVVE

SEQ ID NO: 45 - protein, 35 aa, Artificial Sequence
  GFR-binding peptide
  MOD_RES (7)..(8): Xaa is C or S
CAAPASXXVPARLSPISLLYIDAANNVVYKQYEDM

SEQ ID NO: 46 - protein, 27 aa, Artificial Sequence
  GFR-binding peptide
CPARLSPISLLYIDAANNVVYKQYEDM

SEQ ID NO: 47 - protein, 32 aa, Artificial Sequence
  GFR-binding peptide
  MOD_RES (8)..(9): Xaa is C or S
CAAAPASXXVPARLSPISILYIAAAYKQYEDM

SEQ ID NO: 48 - protein, 26 aa, Artificial Sequence
  GFR-binding peptide
CVPQRLSPISILYIDAANNVVYKQYE

SEQ ID NO: 49 - protein, 39 aa, Artificial Sequence
  GFR-binding peptide
  MOD_RES (7)..(8): Xaa is C or S
CTVPKPXXAPTQLSPISILYIDAANNVVYKQYEDMVVRA

SEQ ID NO: 50 - protein, 39 aa, Artificial Sequence
  GFR-binding peptide
NDEGLECVPTEERPVQVRKIRIKPHQGQKKATVFLQHNK

SEQ ID NO: 51 - protein, 34 aa, Artificial Sequence
  GFR-binding peptide
  MOD_RES (6)..(7): Xaa is C or S
ASASPXXVPQDLEPLTILYYVGRTPKVEQLSNMV

SEQ ID NO: 52 - protein, 37 aa, Artificial Sequence
  GFR-binding peptide
RNVQCRPTQLEPLPIVYYEIVRKKPEQLSNTLEDHLA

SEQ ID NO: 53 - protein, 32 aa, Artificial Sequence
  GFR-binding peptide
VPTKLSPISILYIDDMGVPTYKQYEEGMSVAE

SEQ ID NO: 54 - protein, 32 aa, Artificial Sequence
  GFR-binding peptide
VPQALSPISILYIDDMGVPTYKQYEEGMSVAE

SEQ ID NO: 55 - protein, 31 aa, Artificial Sequence
  GFR-binding peptide
VPTEESNITTQIMRIKPHQGQHIGEMSFLQH

SEQ ID NO: 56 - protein, 31 aa, Artificial Sequence
  GFR-binding peptide
VPTELSPISILFIRIKPHQGHLGEMSAAVVE

SEQ ID NO: 57 - protein, 30 aa, Artificial Sequence
  GFR-binding peptide
TQVQLEPLTLLYYDENEKVIEQLSNDMVVE

SEQ ID NO: 58 - protein, 30 aa, Artificial Sequence
  GFR-binding peptide
VQLRLEPLTILYYDSANNVVEQLSNDMVVR

SEQ ID NO: 59 - protein, 30 aa, Artificial Sequence
  GFR-binding peptide
APTKLEPLEIVYYDDSSNVIEQLSNNMVVR

SEQ ID NO: 60 - protein, 31 aa, Artificial Sequence
  GFR-binding peptide
VPQALSPISILFIVGRKPKVYKQYEMIVERS

SEQ ID NO: 61 - protein, 30 aa, Artificial Sequence
  GFR-binding peptide
APTQLSPISILFIVGRKPKVYKQYERLEEH

SEQ ID NO: 62 - protein, 30 aa, Artificial Sequence
  GFR-binding peptide
VPQALNAISTLYFDDSSNVILKKYRNMAVS

SEQ ID NO: 63 - protein, 30 aa, Artificial Sequence
  GFR-binding peptide
VPEKMSSLSILFFDENKNVVLKVYPNMAVS

SEQ ID NO: 64 - protein, 27 aa, Artificial Sequence
  GFR-binding peptide
VPARLSPISILYIDAANNVVYKQYEDM

SEQ ID NO: 65 - protein, 31 aa, Artificial Sequence
  GFR-binding peptide
VPQALSPINMLYFNEKNQIIYGKIPFLQHNK

SEQ ID NO: 66 - protein, 30 aa, Artificial Sequence
  GFR-binding peptide
TPTKMSPINMLYFNEKNNIIYGKIPGMVVD

SEQ ID NO: 67 - protein, 31 aa, Artificial Sequence
  GFR-binding peptide
APTQLSAISTLYLEIVRKKPLKNYQFLQHNK

SEQ ID NO: 68 - protein, 30 aa, Artificial Sequence
  GFR-binding peptide
APTQLSAISTLYLEIVRKKPLKNYQEMEDH

SEQ ID NO: 69 - protein, 39 aa, Artificial Sequence; identical to SEQ ID NO: 50
  GFR-binding peptide

SEQ ID NO: 70 - protein, 37 aa, Artificial Sequence
  GFR-binding peptide
  MOD_RES (6)..(7): Xaa is C or S
ASASPXXVPQDLEPLTILYYVGRTPKVEQLSNMVEDH

SEQ ID NO: 71 - protein, 37 aa, Artificial Sequence; identical to SEQ ID NO: 52
  GFR-binding peptide

SEQ ID NO: 72 - protein, 32 aa, Artificial Sequence
  GFR-binding peptide
VPTKLSPISILYIDKMGVPTYKQYEEGMSVAE

SEQ ID NO: 73 - protein, 32 aa, Artificial Sequence
  GFR-binding peptide
VPARLSPISILYIDEMGVPTYKQYEEGMSVAE

SEQ ID NO: 74 - protein, 31 aa, Artificial Sequence; identical to SEQ ID NO: 55
  GFR-binding peptide

SEQ ID NO: 75 - protein, 31 aa, Artificial Sequence
  GFR-binding peptide
VPQALSPISILFIRLKPHQGHLGEMSNMVVR

SEQ ID NO: 76 - protein, 30 aa, Artificial Sequence
  GFR-binding peptide
VPQALEPLTLLYYDENEKVIEQLSNDMVVE

SEQ ID NO: 77 - protein, 30 aa, Artificial Sequence
  GFR-binding peptide
VPTELEPLTILYYDSANNAVEQLSNDMVKS

SEQ ID NO: 78 - protein, 30 aa, Artificial Sequence
  GFR-binding peptide
APTKLEPLTIVYYDDSSNVIEQLSNNMVVR

SEQ ID NO: 79 - protein, 31 aa, Artificial Sequence; identical to SEQ ID NO: 60
  GFR-binding peptide

SEQ ID NO: 80 - protein, 30 aa, Artificial Sequence
  GFR-binding peptide
VPTELSPISILFIVGGKPKVYKQYENMVVE

SEQ ID NO: 81 - protein, 31 aa, Artificial Sequence
  GFR-binding peptide
SRVHHNAISTLYFDESSNVILKKYRGMSVVE

SEQ ID NO: 82 - protein, 30 aa, Artificial Sequence
  GFR-binding peptide
VPEKMSSLSILFFDENKNAALKVYPNMTVE

SEQ ID NO: 83 - protein, 30 aa, Artificial Sequence
  GFR-binding peptide
VPARLSPISILYIDAANNVVYKQYEDMVKS

SEQ ID NO: 84 - protein, 30 aa, Artificial Sequence
  GFR-binding peptide
VPTEESPINMLYFNEKNQIIYGKIPMIVVE

SEQ ID NO: 85 - protein, 30 aa, Artificial Sequence; identical to SEQ ID NO: 66
  GFR-binding peptide

SEQ ID NO: 86 - protein, 31 aa, Artificial Sequence
  GFR-binding peptide
VPTHHSAISTLYLELAGEKPLKNYQFLQHNK

SEQ ID NO: 87 - protein, 30 aa, Artificial Sequence
  GFR-binding peptide
APTKLSAISTLYLEIVREEPLKNYQEMVVD

SEQ ID NO: 88 - protein, 30 aa, Artificial Sequence
  GFR-binding peptide
VSQDLSAISTLYLKIVRKEPLKNYQEMVEE

SEQ ID NO: 89 - protein, 42 aa, Artificial Sequence
  GFR-binding peptide
  MOD_RES (6)..(7)..(39)..(41): Xaa is C or S
GIPEPXXVPTKMSAISMLYLDENKNVVLKNYQNMVVESXAXR

SEQ ID NO: 90 - protein, 42 aa, Artificial Sequence
  GFR-binding peptide
  MOD_RES (7)..(39)..(41): Xaa is C or S
HVTKPTXVPTKLSAISMLYLDDSSNVILKNYQNMVVESXGXH

SEQ ID NO: 91 - protein, 42 aa, Artificial Sequence
  GFR-binding peptide
  MOD_RES (6)..(7)..(39)..(41): Xaa is C or S
YVPKPXXVPTKLSAISMLYLDDSSNVILKNYQNMVVESXGXH

SEQ ID NO: 92 - protein, 42 aa, Artificial Sequence
  GFR-binding peptide
  MOD_RES (6)..(7)..(39)..(41): Xaa is C or S
TVPKPXXVPTQLSAISMLYLDDSSNVILKNYQNMVVEAXGXH

SEQ ID NO: 93 - protein, 42 aa, Artificial Sequence
  GFR-binding peptide
  MOD_RES (6)..(7)..(39)..(41): Xaa is C or S
AVPKAXXVPTKLSAISMLYLDSSNNVILKNYQNMVVEAXGXH

SEQ ID NO: 94 - protein, 43 aa, Artificial Sequence
  GFR-binding peptide
  MOD_RES (6)..(7)..(40)..(42): Xaa is C or S
KVGKAXXVPTKLSAISMLYLDDMGVPTLKNYQEGMSVVEXGXR

SEQ ID NO: 95 - protein, 42 aa, Artificial Sequence
  GFR-binding peptide
  MOD_RES (6)..(7)..(39)..(41): Xaa is C or S
KASKAXXVPTKLSAISMLYLDKGVVTYLKNYQGMVVEEXGXR

SEQ ID NO: 96 - protein, 42 aa, Artificial Sequence
  GFR-binding peptide
  MOD_RES (6)..(7)..(39)..(41): Xaa is C or S
GSAGPXXVPTKMSAISMLYLNDKQQIILKNYQGMVVERXGXS

SEQ ID NO: 97 - protein, 42 aa, Artificial Sequence
  GFR-binding peptide
  MOD_RES (6)..(7)..(39)..(41): Xaa is C or S
AAPASXXVPTRLSAISMLYLDAANNVVLKNYQDMVVEAXGXR

SEQ ID NO: 98 - protein, 42 aa, Artificial Sequence
  GFR-binding peptide
  MOD_RES (6)..(7)..(39)..(41): Xaa is C or S
STPPTXXVPTRLSAISMLYLDSANNVVLKNYQDMVVESXGXR

SEQ ID NO: 99 - protein, 42 aa, Artificial Sequence
  GFR-binding peptide
  MOD_RES (6)..(7)..(39)..(41): Xaa is C or S
HVPKPXXVPTKLSAISMLYLDDSSNVILKNYQNMVVESXGXH

SEQ ID NO: 100 - protein, 41 aa, Artificial Sequence
  GFR-binding peptide
  MOD_RES (6)..(7)..(38)..(40): Xaa is C or S
RVPSTXXVPTKTSAISMLYLDNGRVLLLKNYQMIVVEXGXL

SEQ ID NO: 101 - protein, 41 aa, Artificial Sequence
  GFR-binding peptide
  MOD_RES (6)..(7)..(38)..(40): Xaa is C or S
ASAAPXXVPTALSAISMLYLVGRKPKVLKNYQMIVVEXKXS

SEQ ID NO: 102 - protein, 41 aa, Artificial Sequence
  GFR-binding peptide
  MOD_RES (6)..(7)..(38)..(40): Xaa is C or S
ASASPXXVPTDLSAISMLYLIGKTPKILKNYQMIVVEXKXS

SEQ ID NO: 103 - protein, 41 aa, Artificial Sequence
  GFR-binding peptide
  MOD_RES (6)..(7)..(38)..(40): Xaa is C or S
ASASPXXVPTDLSAISMLYLVGRTPKVLKNYQMVVVEXKXS

SEQ ID NO: 104 - protein, 42 aa, Artificial Sequence
  GFR-binding peptide
  MOD_RES (6)..(7)..(39)..(41): Xaa is C or S
GIPEPXXVPEKMSAISMLYLDENKNVVLKNYQNMTVESXAXR

SEQ ID NO: 105 - protein, 42 aa, Artificial Sequence
  GFR-binding peptide
  MOD_RES (7)..(39)..(41): Xaa is C or S
HVTKPTXAPTKLSAISMLYLDDSSNVILKNYQNMVVRSXGXH

SEQ ID NO: 106 - protein, 42 aa, Artificial Sequence
  GFR-binding peptide
  MOD_RES (6)..(7)..(39)..(41): Xaa is C or S
YVPKPXXAPTKLSAISMLYLDDSSNVILKNYQNMVVRSXGXH

SEQ ID NO: 107 - protein, 42 aa, Artificial Sequence
  GFR-binding peptide
  MOD_RES (6)..(7)..(39)..(41): Xaa is C or S
TVPKPXXAPTQLSAISMLYLDDSSNVILKNYQNMVVRAXGXH

SEQ ID NO: 108 - protein, 42 aa, Artificial Sequence
  GFR-binding peptide
  MOD_RES (6)..(7)..(39)..(41): Xaa is C or S
AVPKAXXAPTKLSAISMLYLDSSNNVILKNYQNMVVKAXGXH

SEQ ID NO: 109 - protein, 43 aa, Artificial Sequence
  GFR-binding peptide
  MOD_RES (6)..(7)..(40)..(42): Xaa is C or S
KVGKAXXVPTKLSAISMLYLDDMGVPTLKNYQEGMSVAEXGXR

SEQ ID NO: 110 - protein, 42 aa, Artificial Sequence
  GFR-binding peptide
  MOD_RES (6)..(7)..(39)..(41): Xaa is C or S
KASKAXXVPTKLSAISMLYLDKGVVTYLKNYQGMAVSEXGXR

SEQ ID NO: 111 - protein, 42 aa, Artificial Sequence
  GFR-binding peptide
  MOD_RES (6)..(7)..(39)..(41): Xaa is C or S
GSAGPXXTPTKMSAISMLYLNDKQQIILKNYQGMVVDRXGXS

SEQ ID NO: 112 - protein, 42 aa, Artificial Sequence
  GFR-binding peptide
  MOD_RES (6)..(7)..(39)..(41): Xaa is C or S
AAPASXXVPARLSAISMLYLDAANNVVLKNYQDMVVEAXGXR

SEQ ID NO: 113 - protein, 42 aa, Artificial Sequence
  GFR-binding peptide
  MOD_RES (6)..(7)..(39)..(41): Xaa is C or S
HVPKPXXAPTKLSAISMLYLDDSSNVILKNYQNMVVRSXGXH

SEQ ID NO: 114 - protein, 41 aa, Artificial Sequence
  GFR-binding peptide
  MOD_RES (6)..(7)..(38)..(40): Xaa is C or S
RVPSTXXAPVKTSAISMLYLDNGRVLLLKNYQMIVEEXGXL

SEQ ID NO: 115 - protein, 41 aa, Artificial Sequence
  GFR-binding peptide
  MOD_RES (6)..(7)..(38)..(40): Xaa is C or S
ASAAPXXVPQALSAISMLYLVGRKPKVLKNYQMIVRSXKXS

SEQ ID NO: 116 - protein, 41 aa, Artificial Sequence
  GFR-binding peptide
  MOD_RES (6)..(7)..(38)..(40): Xaa is C or S
ASASPXXVSQDLSAISMLYLIGKTPKILKNYQMIVKSXKXS

SEQ ID NO: 117 - protein, 41 aa, Artificial Sequence
  GFR-binding peptide
  MOD_RES (6)..(7)..(38)..(40): Xaa is C or S
ASASPXXVPQDLSAISMLYLVGRTPKVLKNYQMVVKSXKXS

SEQ ID NO: 118 - protein, 44 aa, Artificial Sequence
  GFR-binding peptide
  MOD_RES (7)..(41)..(43): Xaa is C or S
NDEGLEXVPTEESAISMLYLRIKPHQGQHLKNYQFLQHNKXEXR

SEQ ID NO: 119 - protein, 44 aa, Artificial Sequence
  GFR-binding peptide
  MOD_RES (7)..(41)..(43): Xaa is C or S
NDEGLEXVPTGQSAISMLYLRIKPHQGQHLKNYQLEEHSQXEXR

SEQ ID NO: 120 - protein, 45 aa, Artificial Sequence
  GFR-binding peptide
  MOD_RES (5)..(42)..(44): Xaa is C or S
SSVKXQPSRVHHSAISMLYLEYVRKKPKLLKNYQRLEEHLEXAXA

SEQ ID NO: 121 - protein, 45 aa, Artificial Sequence
  GFR-binding peptide
  MOD_RES (5)..(42)..(44): Xaa is C or S
RNVQXRPTQVQLSAISMLYLEIVRKKPIFLKNYQTLEDHLAXKXE

SEQ ID NO: 122 - protein, 42 aa, Artificial Sequence
  GFR-binding peptide
  MOD_RES (6)..(7)..(39)..(41): Xaa is C or S
KIPKAXXVPEELSSLSILFFDENEKVVLKVYPDMTVEGXGXR

SEQ ID NO: 123 - protein, 42 aa, Artificial Sequence
  GFR-binding peptide
  MOD_RES (6)..(7)..(39)..(41): Xaa is C or S
SIPKAXXVPEELSSLSILFFDEYDKVVLKVYPEMTVEGXGXR

SEQ ID NO: 124 - protein, 42 aa, Artificial Sequence
  GFR-binding peptide
  MOD_RES (7)..(39)..(41): Xaa is C or S
HVTKPTXVPEKLSSLSILFFDDSSNVILKVYPNMTVESXGXH

SEQ ID NO: 125 - protein, 42 aa, Artificial Sequence
  GFR-binding peptide
  MOD_RES (6)..(7)..(39)..(41): Xaa is C or S
YVPKPXXVPEKLSSLSILFFDDSSNVILKVYPNMTVESXGXH

SEQ ID NO: 126 - protein, 42 aa, Artificial Sequence
  GFR-binding peptide
  MOD_RES (6)..(7)..(39)..(41): Xaa is C or S
TVPKPXXVPEQLSSLSILFFDDSSNVILKVYPNMTVEAXGXH

SEQ ID NO: 127 - protein, 42 aa, Artificial Sequence
  GFR-binding peptide
  MOD_RES (6)..(7)..(39)..(41): Xaa is C or S
AVPKAXXVPEKLSSLSILFFDSSNNVILKVYPNMTVEAXGXH

SEQ ID NO: 128 - protein, 43 aa, Artificial Sequence
  GFR-binding peptide
  MOD_RES (6)..(7)..(40)..(42): Xaa is C or S
KVGKAXXVPEKLSSLSILFFDDMGVPTLKVYPEGMSTVEXGXR

SEQ ID NO: 129 - protein, 42 aa, Artificial Sequence
  GFR-binding peptide
  MOD_RES (6)..(7)..(39)..(41): Xaa is C or S
KASKAXXVPEKLSSLSILFFDKGVVTYLKVYPGMTVEEXGXR

SEQ ID NO: 130 - protein, 42 aa, Artificial Sequence
  GFR-binding peptide
  MOD_RES (6)..(7)..(39)..(41): Xaa is C or S
GSAGPXXVPEKMSSLSILFFNDKQQIILKVYPGMTVERXGXS

SEQ ID NO: 131 - protein, 42 aa, Artificial Sequence
  GFR-binding peptide
  MOD_RES (6)..(7)..(39)..(41): Xaa is C or S
AAPASXXVPERLSSLSILFFDAANNVVLKVYPDMTVEAXGXR

SEQ ID NO: 132 - protein, 42 aa, Artificial Sequence
  GFR-binding peptide
  MOD_RES (6)..(7)..(39)..(41): Xaa is C or S
STPPTXXVPERLSSLSILFFDSANNVVLKVYPDMTVESXGXR

SEQ ID NO: 133 - protein, 42 aa, Artificial Sequence
  GFR-binding peptide
  MOD_RES (6)..(7)..(39)..(41): Xaa is C or S
HVPKPXXVPEKLSSLSILFFDDSSNVILKVYPNMTVESXGXH

SEQ ID NO: 134 - protein, 41 aa, Artificial Sequence
  GFR-binding peptide
  MOD_RES (6)..(7)..(38)..(40): Xaa is C or S
RVPSTXXVPEKTSSLSILFFDNGRVLLLKVYPMITVEXGXL

SEQ ID NO: 135 - protein, 41 aa, Artificial Sequence
  GFR-binding peptide
  MOD_RES (6)..(7)..(38)..(40): Xaa is C or S
ASAAPXXVPEALSSLSILFFVGRKPKVLKVYPMITVEXKXS

SEQ ID NO: 136 - protein, 41 aa, Artificial Sequence
  GFR-binding peptide
  MOD_RES (6)..(7)..(38)..(40): Xaa is C or S
ASASPXXVPEDLSSLSILFFIGKTPKILKVYPMITVEXKXS

SEQ ID NO: 137 - protein, 41 aa, Artificial Sequence
  GFR-binding peptide
  MOD_RES (6)..(7)..(38)..(40): Xaa is C or S
ASASPXXVPEDLSSLSILFFVGRTPKVLKVYPMVTVEXKXS

SEQ ID NO: 138 - protein, 42 aa, Artificial Sequence
  GFR-binding peptide
  MOD_RES (6)..(7)..(39)..(41): Xaa is C or S
KIPKAXXVPTELSSLSILFFDENEKVVLKVYPDMVVEGXGXR

SEQ ID NO: 139 - protein, 42 aa, Artificial Sequence
  GFR-binding peptide
  MOD_RES (6)..(7)..(39)..(41): Xaa is C or S
SIPKAXXVPTELSSLSILFFDEYDKVVLKVYPEMVVEGXGXR

SEQ ID NO: 140 - protein, 42 aa, Artificial Sequence
  GFR-binding peptide
  MOD_RES (7)..(39)..(41): Xaa is C or S
HVTKPTXAPTKLSSLSILFFDDSSNVILKVYPNMVVRSXGXH

SEQ ID NO: 141 - protein, 42 aa, Artificial Sequence
  GFR-binding peptide
  MOD_RES (6)..(7)..(39)..(41): Xaa is C or S
YVPKPXXAPTKLSSLSILFFDDSSNVILKVYPNMVVRSXGXH

SEQ ID NO: 142 - protein, 42 aa, Artificial Sequence
  GFR-binding peptide
  MOD_RES (6)..(7)..(39)..(41): Xaa is C or S
TVPKPXXAPTQLSSLSILFFDDSSNVILKVYPNMVVRAXGXH

SEQ ID NO: 143 - protein, 42 aa, Artificial Sequence
  GFR-binding peptide
  MOD_RES (6)..(7)..(39)..(41): Xaa is C or S
AVPKAXXAPTKLSSLSILFFDSSNNVILKVYPNMVVKAXGXH

SEQ ID NO: 144 - protein, 43 aa, Artificial Sequence
  GFR-binding peptide
  MOD_RES (6)..(7)..(40)..(42): Xaa is C or S
KVGKAXXVPTKLSSLSILFFDDMGVPTLKVYPEGMSVAEXGXR

SEQ ID NO: 145 - protein, 42 aa, Artificial Sequence
  GFR-binding peptide
  MOD_RES (6)..(7)..(39)..(41): Xaa is C or S
KASKAXXVPTKLSSLSILFFDKGVVTYLKVYPGMAVSEXGXR

SEQ ID NO: 146 - protein, 42 aa, Artificial Sequence
  GFR-binding peptide
  MOD_RES (6)..(7)..(39)..(41): Xaa is C or S
GSAGPXXTPTKMSSLSILFFNDKQQIILKVYPGMVVDRXGXS

SEQ ID NO: 147 - protein, 42 aa, Artificial Sequence
  GFR-binding peptide
  MOD_RES (6)..(7)..(39)..(41): Xaa is C or S
AAPASXXVPARLSSLSILFFDAANNVVLKVYPDMVVEAXGXR

SEQ ID NO: 148 - protein, 42 aa, Artificial Sequence
  GFR-binding peptide
  MOD_RES (6)..(7)..(39)..(41): Xaa is C or S
STPPTXXVPTRLSSLSILFFDSANNVVLKVYPDMVVESXGXR

SEQ ID NO: 149 - protein, 42 aa, Artificial Sequence
  GFR-binding peptide
  MOD_RES (6)..(7)..(39)..(41): Xaa is C or S
HVPKPXXAPTKLSSLSILFFDDSSNVILKVYPNMVVRSXGXH

SEQ ID NO: 150 - protein, 41 aa, Artificial Sequence
  GFR-binding peptide
  MOD_RES (6)..(7)..(38)..(40): Xaa is C or S
RVPSTXXAPVKTSSLSILFFDNGRVLLLKVYPMIVEEXGXL

SEQ ID NO: 151 - protein, 41 aa, Artificial Sequence
  GFR-binding peptide
  MOD_RES (6)..(7)..(38)..(40): Xaa is C or S
ASAAPXXVPQALSSLSILFFVGRKPKVLKVYPMIVRSXKXS

SEQ ID NO: 152 - protein, 41 aa, Artificial Sequence
  GFR-binding peptide
  MOD_RES (6)..(7)..(38)..(40): Xaa is C or S
ASASPXXVSQDLSSLSILFFIGKTPKILKVYPMIVKSXKXS

SEQ ID NO: 153 - protein, 41 aa, Artificial Sequence
  GFR-binding peptide
  MOD_RES (6)..(7)..(38)..(40): Xaa is C or S
ASASPXXVPQDLSSLSILFFVGRTPKVLKVYPMVVKSXKXS

SEQ ID NO: 154 - protein, 44 aa, Artificial Sequence
  GFR-binding peptide
  MOD_RES (7)..(41)..(43): Xaa is C or S
NDEGLEXVPTEESSLSILFFRIKPHQGQHLKVYPFLQHNKXEXR

SEQ ID NO: 155 - protein, 44 aa, Artificial Sequence
  GFR-binding peptide
  MOD_RES (7)..(41)..(43): Xaa is C or S
NDEGLEXVPTGQSSLSILFFRIKPHQGQHLKVYPLEEHSQXEXR

SEQ ID NO: 156 - protein, 45 aa, Artificial Sequence
  GFR-binding peptide
  MOD_RES (5)..(42)..(44): Xaa is C or S
SSVKXQPSRVHHSSLSILFFEYVRKKPKLLKVYPRLEEHLEXAXA

SEQ ID NO: 157 - protein, 45 aa, Artificial Sequence
  GFR-binding peptide
  MOD_RES (5)..(42)..(44): Xaa is C or S
RNVQXRPTQVQLSSLSILFFEIVRKKPIFLKVYPTLEDHLAXKXE

SEQ ID NO: 158 - protein, 42 aa, Artificial Sequence
  GFR-binding peptide
  MOD_RES (6)..(7)..(39)..(41): Xaa is C or S
KIPKAXXAPTELNAISVLYFDENEKVVLKKYRDMVVRGXGXR

SEQ ID NO: 159 - protein, 42 aa, Artificial Sequence
  GFR-binding peptide
  MOD_RES (6)..(7)..(39)..(41): Xaa is C or S
GIPEPXXAPTKMNAISVLYFDENKNVVLKKYRNMVVRSXAXR

SEQ ID NO: 160 - protein, 42 aa, Artificial Sequence
  GFR-binding peptide
  MOD_RES (6)..(7)..(39)..(41): Xaa is C or S
SIPKAXXAPTELNAISVLYFDEYDKVVLKKYREMVVRGXGXR

SEQ ID NO: 161 - protein, 42 aa, Artificial Sequence
  GFR-binding peptide
  MOD_RES (6)..(7)..(39)..(41): Xaa is C or S
AVPKAXXAPTKLNAISVLYFDSSNNVILKKYRNMVVRAXGXH

SEQ ID NO: 162 - protein, 43 aa, Artificial Sequence
  GFR-binding peptide
  MOD_RES (6)..(7)..(40)..(42): Xaa is C or S
KVGKAXXAPTKLNAISVLYFDDMGVPTLKKYREGMSVVRXGXR

SEQ ID NO: 163 - protein, 42 aa, Artificial Sequence
  GFR-binding peptide
  MOD_RES (6)..(7)..(39)..(41): Xaa is C or S
KASKAXXAPTKLNAISVLYFDKGVVTYLKKYRGMVVREXGXR

SEQ ID NO: 164 - protein, 42 aa, Artificial Sequence
  GFR-binding peptide
  MOD_RES (6)..(7)..(39)..(41): Xaa is C or S
GSAGPXXAPTKMNAISVLYFNDKQQIILKKYRGMVVRRXGXS

SEQ ID NO: 165 - protein, 42 aa, Artificial Sequence
  GFR-binding peptide
  MOD_RES (6)..(7)..(39)..(41): Xaa is C or S
AAPASXXAPTRLNAISVLYFDAANNVVLKKYRDMVVRAXGXR

SEQ ID NO: 166 - protein, 42 aa, Artificial Sequence
  GFR-binding peptide
  MOD_RES (6)..(7)..(39)..(41): Xaa is C or S
STPPTXXAPTRLNAISVLYFDSANNVVLKKYRDMVVRSXGXR

SEQ ID NO: 167 - protein, 41 aa, Artificial Sequence
  GFR-binding peptide
  MOD_RES (6)..(7)..(38)..(40): Xaa is C or S
RVPSTXXAPTKTNAISVLYFDNGRVLLLKKYRMIVVRXGXL

SEQ ID NO: 168 - protein, 41 aa, Artificial Sequence
  GFR-binding peptide
  MOD_RES (6)..(7)..(38)..(40): Xaa is C or S
ASAAPXXAPTALNAISVLYFVGRKPKVLKKYRMIVVRXKXS

SEQ ID NO: 169 - protein, 41 aa, Artificial Sequence
  GFR-binding peptide
  MOD_RES (6)..(7)..(38)..(40): Xaa is C or S
ASASPXXAPTDLNAISVLYFIGKTPKILKKYRMIVVRXKXS

SEQ ID NO: 170 - protein, 41 aa, Artificial Sequence
  GFR-binding peptide
  MOD_RES (6)..(7)..(38)..(40): Xaa is C or S
ASASPXXAPTDLNAISVLYFVGRTPKVLKKYRMVVVRXKXS

SEQ ID NO: 171 - protein, 42 aa, Artificial Sequence
  GFR-binding peptide
  MOD_RES (6)..(7)..(39)..(41): Xaa is C or S
KIPKAXXVPTELNAISVLYFDENEKVVLKKYRDMVVEGXGXR

SEQ ID NO: 172 - protein, 42 aa, Artificial Sequence
  GFR-binding peptide
  MOD_RES (6)..(7)..(39)..(41): Xaa is C or S
GIPEPXXVPEKMNAISVLYFDENKNVVLKKYRNMTVESXAXR

SEQ ID NO: 173 - protein, 42 aa, Artificial Sequence
  GFR-binding peptide
  MOD_RES (6)..(7)..(39)..(41): Xaa is C or S
SIPKAXXVPTELNAISVLYFDEYDKVVLKKYREMVVEGXGXR

SEQ ID NO: 174 - protein, 42 aa, Artificial Sequence
  GFR-binding peptide
  MOD_RES (6)..(7)..(39)..(41): Xaa is C or S
AVPKAXXAPTKLNAISVLYFDSSNNVILKKYRNMVVKAXGXH

SEQ ID NO: 175 - protein, 43 aa, Artificial Sequence
  GFR-binding peptide
  MOD_RES (6)..(7)..(40)..(42): Xaa is C or S
KVGKAXXVPTKLNAISVLYFDDMGVPTLKKYREGMSVAEXGXR

SEQ ID NO: 176 - protein, 42 aa, Artificial Sequence
  GFR-binding peptide
  MOD_RES (6)..(7)..(39)..(41): Xaa is C or S
KASKAXXVPTKLNAISVLYFDKGVVTYLKKYRGMAVSEXGXR

SEQ ID NO: 177 - protein, 42 aa, Artificial Sequence
  GFR-binding peptide
  MOD_RES (6)..(7)..(39)..(41): Xaa is C or S
GSAGPXXTPTKMNAISVLYFNDKQQIILKKYRGMVVDRXGXS

SEQ ID NO: 178 - protein, 42 aa, Artificial Sequence
  GFR-binding peptide
  MOD_RES (6)..(7)..(39)..(41): Xaa is C or S
AAPASXXVPARLNAISVLYFDAANNVVLKKYRDMVVEAXGXR

SEQ ID NO: 179 - protein, 42 aa, Artificial Sequence
  GFR-binding peptide
  MOD_RES (6)..(7)..(39)..(41): Xaa is C or S
STPPTXXVPTRLNAISVLYFDSANNVVLKKYRDMVVESXGXR

SEQ ID NO: 180 - protein, 41 aa, Artificial Sequence
  GFR-binding peptide
  MOD_RES (6)..(7)..(38)..(40): Xaa is C or S
RVPSTXXAPVKTNAISVLYFDNGRVLLLKKYRMIVEEXGXL

SEQ ID NO: 181 - protein, 41 aa, Artificial Sequence
  GFR-binding peptide
  MOD_RES (6)..(7)..(38)..(40): Xaa is C or S
ASAAPXXVPQALNAISVLYFVGRKPKVLKKYRMIVRSXKXS

SEQ ID NO: 182 - protein, 41 aa, Artificial Sequence
  GFR-binding peptide
  MOD_RES (6)..(7)..(38)..(40): Xaa is C or S
ASASPXXVSQDLNAISVLYFIGKTPKILKKYRMIVKSXKXS

SEQ ID NO: 183 - protein, 41 aa, Artificial Sequence
  GFR-binding peptide
  MOD_RES (6)..(7)..(38)..(40): Xaa is C or S
ASASPXXVPQDLNAISVLYFVGRTPKVLKKYRMVVKSXKXS

SEQ ID NO: 184 - protein, 44 aa, Artificial Sequence
  GFR-binding peptide
  MOD_RES (7)..(41)..(43): Xaa is C or S
NDEGLEXVPTEENAISVLYFRIKPHQGQHLKKYRFLQHNKXEXR

SEQ ID NO: 185 - protein, 44 aa, Artificial Sequence
  GFR-binding peptide
  MOD_RES (7)..(41)..(43): Xaa is C or S
NDEGLEXVPTGQNAISVLYFRIKPHQGQHLKKYRLEEHSQXEXR

SEQ ID NO: 186 - protein, 45 aa, Artificial Sequence
  GFR-binding peptide
  MOD_RES (5)..(42)..(44): Xaa is C or S
SSVKXQPSRVHHNAISVLYFEYVRKKPKLLKKYRRLEEHLEXAXA

SEQ ID NO: 187 - protein, 45 aa, Artificial Sequence
  GFR-binding peptide
  MOD_RES (5)..(42)..(44): Xaa is C or S
RNVQXRPTQVQLNAISVLYFEIVRKKPIFLKKYRTLEDHLAXKXE

SEQ ID NO: 188 - protein, 42 aa, Artificial Sequence
  GFR-binding peptide
  MOD_RES (6)..(7)..(39)..(41): Xaa is C or S
KIPKAXXAPTELSATSVLYYDENEKVVLRKHRDMVVKGXGXR

SEQ ID NO: 189 - protein, 42 aa, Artificial Sequence
  GFR-binding peptide
  MOD_RES (6)..(7)..(39)..(41): Xaa is C or S
GIPEPXXAPTKMSATSVLYYDENKNVVLRKHRNMVVKSXAXR

SEQ ID NO: 190 - protein, 42 aa, Artificial Sequence
  GFR-binding peptide
  MOD_RES (6)..(7)..(39)..(41): Xaa is C or S
SIPKAXXAPTELSATSVLYYDEYDKVVLRKHREMVVKGXGXR

SEQ ID NO: 191 - protein, 42 aa, Artificial Sequence
  GFR-binding peptide
  MOD_RES (7)..(39)..(41): Xaa is C or S
HVTKPTXAPTKLSATSVLYYDDSSNVILRKHRNMVVKSXGXH

SEQ ID NO: 192 - protein, 42 aa, Artificial Sequence
  GFR-binding peptide
  MOD_RES (6)..(7)..(39)..(41): Xaa is C or S
YVPKPXXAPTKLSATSVLYYDDSSNVILRKHRNMVVKSXGXH

SEQ ID NO: 193 - protein, 42 aa, Artificial Sequence
  GFR-binding peptide
  MOD_RES (6)..(7)..(39)..(41): Xaa is C or S
TVPKPXXAPTQLSATSVLYYDDSSNVILRKHRNMVVKAXGXH

SEQ ID NO: 194 - protein, 43 aa, Artificial Sequence
  GFR-binding peptide
  MOD_RES (6)..(7)..(40)..(42): Xaa is C or S
KVGKAXXAPTKLSATSVLYYDDMGVPTLRKHREGMSVVKXGXR

SEQ ID NO: 195 - protein, 42 aa, Artificial Sequence
  GFR-binding peptide
  MOD_RES (6)..(7)..(39)..(41): Xaa is C or S
KASKAXXAPTKLSATSVLYYDKGVVTYLRKHRGMVVKEXGXR

SEQ ID NO: 196 - protein, 42 aa, Artificial Sequence
  GFR-binding peptide
  MOD_RES (6)..(7)..(39)..(41): Xaa is C or S
GSAGPXXAPTKMSATSVLYYNDKQQIILRKHRGMVVKRXGXS

SEQ ID NO: 197 - protein, 42 aa, Artificial Sequence
  GFR-binding peptide
  MOD_RES (6)..(7)..(39)..(41): Xaa is C or S
AAPASXXAPTRLSATSVLYYDAANNVVLRKHRDMVVKAXGXR

SEQ ID NO: 198 - protein, 42 aa, Artificial Sequence
  GFR-binding peptide
  MOD_RES (6)..(7)..(39)..(41): Xaa is C or S
STPPTXXAPTRLSATSVLYYDSANNVVLRKHRDMVVKSXGXR

SEQ ID NO: 199 - protein, 42 aa, Artificial Sequence
  GFR-binding peptide
  MOD_RES (6)..(7)..(39)..(41): Xaa is C or S
HVPKPXXAPTKLSATSVLYYDDSSNVILRKHRNMVVKSXGXH

SEQ ID NO: 200 - protein, 41 aa, Artificial Sequence
  GFR-binding peptide
  MOD_RES (6)..(7)..(38)..(40): Xaa is C or S
RVPSTXXAPTKTSATSVLYYDNGRVLLLRKHRMIVVKXGXL

SEQ ID NO: 201 - protein, 41 aa, Artificial Sequence
  GFR-binding peptide
  MOD_RES (6)..(7)..(38)..(40): Xaa is C or S
ASAAPXXAPTALSATSVLYYVGRKPKVLRKHRMIVVKXKXS

SEQ ID NO: 202 - protein, 41 aa, Artificial Sequence
  GFR-binding peptide
  MOD_RES (6)..(7)..(38)..(40): Xaa is C or S
ASASPXXAPTDLSATSVLYYIGKTPKILRKHRMIVVKXKXS

SEQ ID NO: 203 - protein, 41 aa, Artificial Sequence
  GFR-binding peptide
  MOD_RES (6)..(7)..(38)..(40): Xaa is C or S
ASASPXXAPTDLSATSVLYYVGRTPKVLRKHRMVVVKXKXS

SEQ ID NO: 204 - protein, 42 aa, Artificial Sequence
  GFR-binding peptide
  MOD_RES (6)..(7)..(39)..(41): Xaa is C or S
KIPKAXXVPTELSATSVLYYDENEKVVLRKHRDMVVEGXGXR

SEQ ID NO: 205 - protein, 42 aa, Artificial Sequence
  GFR-binding peptide
  MOD_RES (6)..(7)..(39)..(41): Xaa is C or S
GIPEPXXVPEKMSATSVLYYDENKNVVLRKHRNMTVESXAXR

SEQ ID NO: 206 - protein, 42 aa, Artificial Sequence
  GFR-binding peptide
  MOD_RES (6)..(7)..(39)..(41): Xaa is C or S
SIPKAXXVPTELSATSVLYYDEYDKVVLRKHREMVVEGXGXR

SEQ ID NO: 207 - protein, 42 aa, Artificial Sequence
  GFR-binding peptide
  MOD_RES (7)..(39)..(41): Xaa is C or S
HVTKPTXAPTKLSATSVLYYDDSSNVILRKHRNMVVRSXGXH

SEQ ID NO: 208 - protein, 42 aa, Artificial Sequence
  GFR-binding peptide
  MOD_RES (6)..(7)..(39)..(41): Xaa is C or S
YVPKPXXAPTKLSATSVLYYDDSSNVILRKHRNMVVRSXGXH

SEQ ID NO: 209 - protein, 42 aa, Artificial Sequence
  GFR-binding peptide
  MOD_RES (6)..(7)..(39)..(41): Xaa is C or S
TVPKPXXAPTQLSATSVLYYDDSSNVILRKHRNMVVRAXGXH

SEQ ID NO: 210 - protein, 43 aa, Artificial Sequence
  GFR-binding peptide
  MOD_RES (6)..(7)..(40)..(42): Xaa is C or S
KVGKAXXVPTKLSATSVLYYDDMGVPTLRKHREGMSVAEXGXR

SEQ ID NO: 211 - protein, 42 aa, Artificial Sequence
  GFR-binding peptide
  MOD_RES (6)..(7)..(39)..(41): Xaa is C or S
KASKAXXVPTKLSATSVLYYDKGVVTYLRKHRGMAVSEXGXR

SEQ ID NO: 212 - protein, 42 aa, Artificial Sequence
  GFR-binding peptide
  MOD_RES (6)..(7)..(39)..(41): Xaa is C or S
GSAGPXXTPTKMSATSVLYYNDKQQIILRKHRGMVVDRXGXS

SEQ ID NO: 213 - protein, 42 aa, Artificial Sequence
  GFR-binding peptide
  MOD_RES (6)..(7)..(39)..(41): Xaa is C or S
AAPASXXVPARLSATSVLYYDAANNVVLRKHRDMVVEAXGXR

SEQ ID NO: 214 - protein, 42 aa, Artificial Sequence
  GFR-binding peptide
  MOD_RES (6)..(7)..(39)..(41): Xaa is C or S
STPPTXXVPTRLSATSVLYYDSANNVVLRKHRDMVVESXGXR

SEQ ID NO: 215 - protein, 42 aa, Artificial Sequence
  GFR-binding peptide
  MOD_RES (6)..(7)..(39)..(41): Xaa is C or S
HVPKPXXAPTKLSATSVLYYDDSSNVILRKHRNMVVRSXGXH

SEQ ID NO: 216 - protein, 41 aa, Artificial Sequence
  GFR-binding peptide
  MOD_RES (6)..(7)..(38)..(40): Xaa is C or S
RVPSTXXAPVKTSATSVLYYDNGRVLLLRKHRMIVEEXGXL

SEQ ID NO: 217 - protein, 41 aa, Artificial Sequence
  GFR-binding peptide
  MOD_RES (6)..(7)..(38)..(40): Xaa is C or S
ASAAPXXVPQALSATSVLYYVGRKPKVLRKHRMIVRSXKXS

SEQ ID NO: 218 - protein, 41 aa, Artificial Sequence
  GFR-binding peptide
  MOD_RES (6)..(7)..(38)..(40): Xaa is C or S
ASASPXXVSQDLSATSVLYYIGKTPKILRKHRMIVKSXKXS

SEQ ID NO: 219 - protein, 41 aa, Artificial Sequence
  GFR-binding peptide
  MOD_RES (6)..(7)..(38)..(40): Xaa is C or S
ASASPXXVPQDLSATSVLYYVGRTPKVLRKHRMVVKSXKXS

SEQ ID NO: 220 - protein, 44 aa, Artificial Sequence
  GFR-binding peptide
  MOD_RES (7)..(41)..(43): Xaa is C or S
NDEGLEXVPTEESATSVLYYRIKPHQGQHLRKHRFLQHNKXEXR

SEQ ID NO: 221 - protein, 44 aa, Artificial Sequence
  GFR-binding peptide
  MOD_RES (7)..(41)..(43): Xaa is C or S
NDEGLEXVPTGQSATSVLYYRIKPHQGQHLRKHRLEEHSQXEXR

SEQ ID NO: 222 - protein, 45 aa, Artificial Sequence
  GFR-binding peptide
  MOD_RES (5)..(42)..(44): Xaa is C or S
SSVKXQPSRVHHSATSVLYYEYVRKKPKLLRKHRRLEEHLEXAXA

SEQ ID NO: 223 - protein, 45 aa, Artificial Sequence
  GFR-binding peptide
  MOD_RES (5)..(42)..(44): Xaa is C or S
RNVQXRPTQVQLSATSVLYYEIVRKKPIFLRKHRTLEDHLAXKXE

SEQ ID NO: 224 - protein, 42 aa, Artificial Sequence
  GFR-binding peptide
  MOD_RES (6)..(7)..(39)..(41): Xaa is C or S
KIPKAXXVPTELSPISVLYKDENEKVVLKYHYDMVAEGXGXR

SEQ ID NO: 225 - protein, 42 aa, Artificial Sequence
  GFR-binding peptide
  MOD_RES (6)..(7)..(39)..(41): Xaa is C or S
GIPEPXXVPTKMSPISVLYKDENKNVVLKYHYNMVAESXAXR

SEQ ID NO: 226 - protein, 42 aa, Artificial Sequence
  GFR-binding peptide
  MOD_RES (6)..(7)..(39)..(41): Xaa is C or S
SIPKAXXVPTELSPISVLYKDEYDKVVLKYHYEMVAEGXGXR

SEQ ID NO: 227 - protein, 42 aa, Artificial Sequence
  GFR-binding peptide
  MOD_RES (7)..(39)..(41): Xaa is C or S
HVTKPTXVPTKLSPISVLYKDDSSNVILKYHYNMVAESXGXH

SEQ ID NO: 228 - protein, 42 aa, Artificial Sequence
  GFR-binding peptide
  MOD_RES (6)..(7)..(39)..(41): Xaa is C or S
YVPKPXXVPTKLSPISVLYKDDSSNVILKYHYNMVAESXGXH

SEQ ID NO: 229 - protein, 42 aa, Artificial Sequence
  GFR-binding peptide
  MOD_RES (6)..(7)..(39)..(41): Xaa is C or S
TVPKPXXVPTQLSPISVLYKDDSSNVILKYHYNMVAEAXGXH

SEQ ID NO: 230 - protein, 42 aa, Artificial Sequence
  GFR-binding peptide
  MOD_RES (6)..(7)..(39)..(41): Xaa is C or S
AVPKAXXVPTKLSPISVLYKDSSNNVILKYHYNMVAEAXGXH

SEQ ID NO: 231 - protein, 42 aa, Artificial Sequence
  GFR-binding peptide
  MOD_RES (6)..(7)..(39)..(41): Xaa is C or S
KASKAXXVPTKLSPISVLYKDKGVVTYLKYHYGMVAEEXGXR

SEQ ID NO: 232 - protein, 42 aa, Artificial Sequence
  GFR-binding peptide
  MOD_RES (6)..(7)..(39)..(41): Xaa is C or S
GSAGPXXVPTKMSPISVLYKNDKQQIILKYHYGMVAERXGXS

SEQ ID NO: 233 - protein, 42 aa, Artificial Sequence
  GFR-binding peptide
  MOD_RES (6)..(7)..(39)..(41): Xaa is C or S
AAPASXXVPTRLSPISVLYKDAANNVVLKYHYDMVAEAXGXR

SEQ ID NO: 234 - protein, 42 aa, Artificial Sequence
  GFR-binding peptide
  MOD_RES (6)..(7)..(39)..(41): Xaa is C or S
STPPTXXVPTRLSPISVLYKDSANNVVLKYHYDMVAESXGXR

SEQ ID NO: 235 - protein, 42 aa, Artificial Sequence
  GFR-binding peptide
  MOD_RES (6)..(7)..(39)..(41): Xaa is C or S
HVPKPXXVPTKLSPISVLYKDDSSNVILKYHYNMVAESXGXH

SEQ ID NO: 236 - protein, 41 aa, Artificial Sequence
  GFR-binding peptide
  MOD_RES (6)..(7)..(38)..(40): Xaa is C or S
RVPSTXXVPTKTSPISVLYKDNGRVLLLKYHYMIVAEXGXL

SEQ ID NO: 237 - protein, 41 aa, Artificial Sequence
  GFR-binding peptide
  MOD_RES (6)..(7)..(38)..(40): Xaa is C or S
ASAAPXXVPTALSPISVLYKVGRKPKVLKYHYMIVAEXKXS

SEQ ID NO: 238 - protein, 41 aa, Artificial Sequence
  GFR-binding peptide
  MOD_RES (6)..(7)..(38)..(40): Xaa is C or S
ASASPXXVPTDLSPISVLYKIGKTPKILKYHYMIVAEXKXS

SEQ ID NO: 239 - protein, 41 aa, Artificial Sequence
  GFR-binding peptide
  MOD_RES (6)..(7)..(38)..(40): Xaa is C or S
ASASPXXVPTDLSPISVLYKVGRTPKVLKYHYMVVAEXKXS

SEQ ID NO: 240 - protein, 42 aa, Artificial Sequence
  GFR-binding peptide
  MOD_RES (6)..(7)..(39)..(41): Xaa is C or S
KIPKAXXVPTELSPISVLYKDENEKVVLKYHYDMVVEGXGXR

SEQ ID NO: 241 - protein, 42 aa, Artificial Sequence
  GFR-binding peptide
  MOD_RES (6)..(7)..(39)..(41): Xaa is C or S
GIPEPXXVPEKMSPISVLYKDENKNVVLKYHYNMTVESXAXR

SEQ ID NO: 242 - protein, 42 aa, Artificial Sequence
  GFR-binding peptide
  MOD_RES (6)..(7)..(39)..(41): Xaa is C or S
SIPKAXXVPTELSPISVLYKDEYDKVVLKYHYEMVVEGXGXR

SEQ ID NO: 243 - protein, 42 aa, Artificial Sequence
  GFR-binding peptide
  MOD_RES (7)..(39)..(41): Xaa is C or S
HVTKPTXAPTKLSPISVLYKDDSSNVILKYHYNMVVRSXGXH

SEQ ID NO: 244 - protein, 42 aa, Artificial Sequence
  GFR-binding peptide
  MOD_RES (6)..(7)..(39)..(41): Xaa is C or S
YVPKPXXAPTKLSPISVLYKDDSSNVILKYHYNMVVRSXGXH

SEQ ID NO: 245 - protein, 42 aa, Artificial Sequence
  GFR-binding peptide
  MOD_RES (6)..(7)..(39)..(41): Xaa is C or S
TVPKPXXAPTQLSPISVLYKDDSSNVILKYHYNMVVRAXGXH

SEQ ID NO: 246 - protein, 42 aa, Artificial Sequence
  GFR-binding peptide
  MOD_RES (6)..(7)..(39)..(41): Xaa is C or S
AVPKAXXAPTKLSPISVLYKDSSNNVILKYHYNMVVKAXGXH

SEQ ID NO: 247 - protein, 42 aa, Artificial Sequence
  GFR-binding peptide
  MOD_RES (6)..(7)..(39)..(41): Xaa is C or S
KASKAXXVPTKLSPISVLYKDKGVVTYLKYHYGMAVSEXGXR

SEQ ID NO: 248 - protein, 42 aa, Artificial Sequence
  GFR-binding peptide
  MOD_RES (6)..(7)..(39)..(41): Xaa is C or S
GSAGPXXTPTKMSPISVLYKNDKQQIILKYHYGMVVDRXGXS

SEQ ID NO: 249 - protein, 42 aa, Artificial Sequence
  GFR-binding peptide
  MOD_RES (6)..(7)..(39)..(41): Xaa is C or S
AAPASXXVPARLSPISVLYKDAANNVVLKYHYDMVVEAXGXR

SEQ ID NO: 250 - protein, 42 aa, Artificial Sequence
  GFR-binding peptide
  MOD_RES (6)..(7)..(39)..(41): Xaa is C or S
STPPTXXVPTRLSPISVLYKDSANNVVLKYHYDMVVESXGXR

SEQ ID NO: 251 - protein, 42 aa, Artificial Sequence
  GFR-binding peptide
  MOD_RES (6)..(7)..(39)..(41): Xaa is C or S
HVPKPXXAPTKLSPISVLYKDDSSNVILKYHYNMVVRSXGXH

SEQ ID NO: 252 - protein, 41 aa, Artificial Sequence
  GFR-binding peptide
  MOD_RES (6)..(7)..(38)..(40): Xaa is C or S
RVPSTXXAPVKTSPISVLYKDNGRVLLLKYHYMIVEEXGXL

SEQ ID NO: 253 - protein, 41 aa, Artificial Sequence
  GFR-binding peptide
  MOD_RES (6)..(7)..(38)..(40): Xaa is C or S
ASAAPXXVPQALSPISVLYKVGRKPKVLKYHYMIVRSXKXS

SEQ ID NO: 254 - protein, 41 aa, Artificial Sequence
  GFR-binding peptide
  MOD_RES (6)..(7)..(38)..(40): Xaa is C or S
ASASPXXVSQDLSPISVLYKIGKTPKILKYHYMIVKSXKXS

SEQ ID NO: 255 - protein, 41 aa, Artificial Sequence
  GFR-binding peptide
  MOD_RES (6)..(7)..(38)..(40): Xaa is C or S
ASASPXXVPQDLSPISVLYKVGRTPKVLKYHYMVVKSXKXS

SEQ ID NO: 256 - protein, 44 aa, Artificial Sequence
  GFR-binding peptide
  MOD_RES (7)..(41)..(43): Xaa is C or S
NDEGLEXVPTEESPISVLYKRIKPHQGQHLKYHYFLQHNKXEXR

SEQ ID NO: 257 - protein, 44 aa, Artificial Sequence
  GFR-binding peptide
  MOD_RES (7)..(41)..(43): Xaa is C or S
NDEGLEXVPTGQSPISVLYKRIKPHQGQHLKYHYLEEHSQXEXR

SEQ ID NO: 258 - protein, 45 aa, Artificial Sequence
  GFR-binding peptide
  MOD_RES (5)..(42)..(44): Xaa is C or S
SSVKXQPSRVHHSPISVLYKEYVRKKPKLLKYHYRLEEHLEXAXA

SEQ ID NO: 259 - protein, 45 aa, Artificial Sequence
  GFR-binding peptide
  MOD_RES (5)..(42)..(44): Xaa is C or S
RNVQXRPTQVQLSPISVLYKEIVRKKPIFLKYHYTLEDHLAXKXE

SEQ ID NO: 260 - protein, 42 aa, Artificial Sequence
  GFR-binding peptide
  MOD_RES (6)..(7)..(39)..(41): Xaa is C or S
KIPKAXXVPTELEPISILYLDENEKVVKFKYEDMAVSGXGXR

SEQ ID NO: 261 - protein, 42 aa, Artificial Sequence
  GFR-binding peptide
  MOD_RES (6)..(7)..(39)..(41): Xaa is C or S
GIPEPXXVPTKMEPISILYLDENKNVVKFKYENMAVSSXAXR

SEQ ID NO: 262 - protein, 42 aa, Artificial Sequence
  GFR-binding peptide
  MOD_RES (6)..(7)..(39)..(41): Xaa is C or S
SIPKAXXVPTELEPISILYLDEYDKVVKFKYEEMAVSGXGXR

SEQ ID NO: 263 - protein, 42 aa, Artificial Sequence
  GFR-binding peptide
  MOD_RES (7)..(39)..(41): Xaa is C or S
HVTKPTXVPTKLEPISILYLDDSSNVIKFKYENMAVSSXGXH

SEQ ID NO: 264 - protein, 42 aa, Artificial Sequence
  GFR-binding peptide
  MOD_RES (6)..(7)..(39)..(41): Xaa is C or S
YVPKPXXVPTKLEPISILYLDDSSNVIKFKYENMAVSSXGXH

SEQ ID NO: 265 - protein, 42 aa, Artificial Sequence
  GFR-binding peptide
  MOD_RES (6)..(7)..(39)..(41): Xaa is C or S
TVPKPXXVPTQLEPISILYLDDSSNVIKFKYENMAVSAXGXH

SEQ ID NO: 266 - protein, 42 aa, Artificial Sequence
  GFR-binding peptide
  MOD_RES (6)..(7)..(39)..(41): Xaa is C or S
AVPKAXXVPTKLEPISILYLDSSNNVIKFKYENMAVSAXGXH

SEQ ID NO: 267 - protein, 43 aa, Artificial Sequence
  GFR-binding peptide
  MOD_RES (6)..(7)..(40)..(42): Xaa is C or S
KVGKAXXVPTKLEPISILYLDDMGVPTKFKYEEGMSAVSXGXR

SEQ ID NO: 268 - protein, 42 aa, Artificial Sequence
  GFR-binding peptide
  MOD_RES (6)..(7)..(39)..(41): Xaa is C or S
GSAGPXXVPTKMEPISILYLNDKQQIIKFKYEGMAVSRXGXS

SEQ ID NO: 269 - protein, 42 aa, Artificial Sequence
  GFR-binding peptide
  MOD_RES (6)..(7)..(39)..(41): Xaa is C or S
AAPASXXVPTRLEPISILYLDAANNVVKFKYEDMAVSAXGXR

SEQ ID NO: 270 - protein, 42 aa, Artificial Sequence
  GFR-binding peptide
  MOD_RES (6)..(7)..(39)..(41): Xaa is C or S
STPPTXXVPTRLEPISILYLDSANNVVKFKYEDMAVSSXGXR

SEQ ID NO: 271 - protein, 42 aa, Artificial Sequence
  GFR-binding peptide
  MOD_RES (6)..(7)..(39)..(41): Xaa is C or S
HVPKPXXVPTKLEPISILYLDDSSNVIKFKYENMAVSSXGXH

SEQ ID NO: 272 - protein, 41 aa, Artificial Sequence
  GFR-binding peptide
  MOD_RES (6)..(7)..(38)..(40): Xaa is C or S
RVPSTXXVPTKTEPISILYLDNGRVLLKFKYEMIAVSXGXL

SEQ ID NO: 273 - protein, 41 aa, Artificial Sequence
  GFR-binding peptide
  MOD_RES (6)..(7)..(38)..(40): Xaa is C or S
ASAAPXXVPTALEPISILYLVGRKPKVKFKYEMIAVSXKXS

SEQ ID NO: 274 - protein, 41 aa, Artificial Sequence
  GFR-binding peptide
  MOD_RES (6)..(7)..(38)..(40): Xaa is C or S
ASASPXXVPTDLEPISILYLIGKTPKIKFKYEMIAVSXKXS

SEQ ID NO: 275 - protein, 41 aa, Artificial Sequence
  GFR-binding peptide
  MOD_RES (6)..(7)..(38)..(40): Xaa is C or S
ASASPXXVPTDLEPISILYLVGRTPKVKFKYEMVAVSXKXS

SEQ ID NO: 276 - protein, 42 aa, Artificial Sequence
  GFR-binding peptide
  MOD_RES (6)..(7)..(39)..(41): Xaa is C or S
KIPKAXXVPTELEPISILYLDENEKVVKFKYEDMVVEGXGXR

SEQ ID NO: 277 - protein, 42 aa, Artificial Sequence
  GFR-binding peptide
  MOD_RES (6)..(7)..(39)..(41): Xaa is C or S
GIPEPXXVPEKMEPISILYLDENKNVVKFKYENMTVESXAXR

SEQ ID NO: 278 - protein, 42 aa, Artificial Sequence
  GFR-binding peptide
  MOD_RES (6)..(7)..(39)..(41): Xaa is C or S
SIPKAXXVPTELEPISILYLDEYDKVVKFKYEEMVVEGXGXR

SEQ ID NO: 279 - protein, 42 aa, Artificial Sequence
  GFR-binding peptide
  MOD_RES (7)..(39)..(41): Xaa is C or S
HVTKPTXAPTKLEPISILYLDDSSNVIKFKYENMVVRSXGXH

SEQ ID NO: 280 - protein, 42 aa, Artificial Sequence
  GFR-binding peptide
  MOD_RES (6)..(7)..(39)..(41): Xaa is C or S
YVPKPXXAPTKLEPISILYLDDSSNVIKFKYENMVVRSXGXH

SEQ ID NO: 281 - protein, 42 aa, Artificial Sequence
  GFR-binding peptide
  MOD_RES (6)..(7)..(39)..(41): Xaa is C or S
TVPKPXXAPTQLEPISILYLDDSSNVIKFKYENMVVRAXGXH

SEQ ID NO: 282 - protein, 42 aa, Artificial Sequence
  GFR-binding peptide
  MOD_RES (6)..(7)..(39)..(41): Xaa is C or S
AVPKAXXAPTKLEPISILYLDSSNNVIKFKYENMVVKAXGXH

SEQ ID NO: 283 - protein, 43 aa, Artificial Sequence
  GFR-binding peptide
  MOD_RES (6)..(7)..(40)..(42): Xaa is C or S
KVGKAXXVPTKLEPISILYLDDMGVPTKFKYEEGMSVAEXGXR

SEQ ID NO: 284 - protein, 42 aa, Artificial Sequence
  GFR-binding peptide
  MOD_RES (6)..(7)..(39)..(41): Xaa is C or S
GSAGPXXTPTKMEPISILYLNDKQQIIKFKYEGMVVDRXGXS

SEQ ID NO: 285 - protein, 42 aa, Artificial Sequence
  GFR-binding peptide
  MOD_RES (6)..(7)..(39)..(41): Xaa is C or S
AAPASXXVPARLEPISILYLDAANNVVKFKYEDMVVEAXGXR

SEQ ID NO: 286 - protein, 42 aa, Artificial Sequence
  GFR-binding peptide
  MOD_RES (6)..(7)..(39)..(41): Xaa is C or S
STPPTXXVPTRLEPISILYLDSANNVVKFKYEDMVVESXGXR

SEQ ID NO: 287 - protein, 42 aa, Artificial Sequence
  GFR-binding peptide
  MOD_RES (6)..(7)..(39)..(41): Xaa is C or S
HVPKPXXAPTKLEPISILYLDDSSNVIKFKYENMVVRSXGXH

SEQ ID NO: 288 - protein, 41 aa, Artificial Sequence
  GFR-binding peptide
  MOD_RES (6)..(7)..(38)..(40): Xaa is C or S
RVPSTXXAPVKTEPISILYLDNGRVLLKFKYEMIVEEXGXL

SEQ ID NO: 289 - protein, 41 aa, Artificial Sequence
  GFR-binding peptide
  MOD_RES (6)..(7)..(38)..(40): Xaa is C or S
ASAAPXXVPQALEPISILYLVGRKPKVKFKYEMIVRSXKXS

SEQ ID NO: 290 - protein, 41 aa, Artificial Sequence
  GFR-binding peptide
  MOD_RES (6)..(7)..(38)..(40): Xaa is C or S
ASASPXXVSQDLEPISILYLIGKTPKIKFKYEMIVKSXKXS

SEQ ID NO: 291 - protein, 41 aa, Artificial Sequence
  GFR-binding peptide
  MOD_RES (6)..(7)..(38)..(40): Xaa is C or S
ASASPXXVPQDLEPISILYLVGRTPKVKFKYEMVVKSXKXS

SEQ ID NO: 292 - protein, 44 aa, Artificial Sequence
  GFR-binding peptide
  MOD_RES (7)..(41)..(43): Xaa is C or S
NDEGLEXVPTEEEPISILYLRIKPHQGQHKFKYEFLQHNKXEXR

SEQ ID NO: 293 - protein, 44 aa, Artificial Sequence
  GFR-binding peptide
  MOD_RES (7)..(41)..(43): Xaa is C or S
NDEGLEXVPTGQEPISILYLRIKPHQGQHKFKYELEEHSQXEXR

SEQ ID NO: 294 - protein, 45 aa, Artificial Sequence
  GFR-binding peptide
  MOD_RES (5)..(42)..(44): Xaa is C or S
SSVKXQPSRVHHEPISILYLEYVRKKPKLKFKYERLEEHLEXAXA

SEQ ID NO: 295 - protein, 45 aa, Artificial Sequence
  GFR-binding peptide
  MOD_RES (5)..(42)..(44): Xaa is C or S
RNVQXRPTQVQLEPISILYLEIVRKKPIFKFKYETLEDHLAXKXE

SEQ ID NO: 296 - protein, 42 aa, Artificial Sequence
  GFR-binding peptide
  MOD_RES (6)..(7)..(39)..(41): Xaa is C or S
KIPKAXXTPTELSPINMLYFDENEKVVYGKIPDMVVDGXGXR

SEQ ID NO: 297 - protein, 42 aa, Artificial Sequence
  GFR-binding peptide
  MOD_RES (6)..(7)..(39)..(41): Xaa is C or S
GIPEPXXTPTKMSPINMLYFDENKNVVYGKIPNMVVDSXAXR

SEQ ID NO: 298 - protein, 42 aa, Artificial Sequence
  GFR-binding peptide
  MOD_RES (6)..(7)..(39)..(41): Xaa is C or S
SIPKAXXTPTELSPINMLYFDEYDKVVYGKIPEMVVDGXGXR

SEQ ID NO: 299 - protein, 42 aa, Artificial Sequence
  GFR-binding peptide
  MOD_RES (7)..(39)..(41): Xaa is C or S
HVTKPTXTPTKLSPINMLYFDDSSNVIYGKIPNMVVDSXGXH

SEQ ID NO: 300 - protein, 42 aa, Artificial Sequence
  GFR-binding peptide
  MOD_RES (6)..(7)..(39)..(41): Xaa is C or S
YVPKPXXTPTKLSPINMLYFDDSSNVIYGKIPNMVVDSXGXH

SEQ ID NO: 301 - protein, 42 aa, Artificial Sequence
  GFR-binding peptide
  MOD_RES (6)..(7)..(39)..(41): Xaa is C or S
TVPKPXXTPTQLSPINMLYFDDSSNVIYGKIPNMVVDAXGXH

SEQ ID NO: 302 - protein, 42 aa, Artificial Sequence
  GFR-binding peptide
  MOD_RES (6)..(7)..(39)..(41): Xaa is C or S
AVPKAXXTPTKLSPINMLYFDSSNNVIYGKIPNMVVDAXGXH

SEQ ID NO: 303 - protein, 43 aa, Artificial Sequence
  GFR-binding peptide
  MOD_RES (6)..(7)..(40)..(42): Xaa is C or S
KVGKAXXTPTKLSPINMLYFDDMGVPTYGKIPEGMSVVDXGXR

SEQ ID NO: 304 - protein, 42 aa, Artificial Sequence
  GFR-binding peptide
  MOD_RES (6)..(7)..(39)..(41): Xaa is C or S
KASKAXXTPTKLSPINMLYFDKGVVTYYGKIPGMVVDEXGXR

SEQ ID NO: 305 - protein, 42 aa, Artificial Sequence
  GFR-binding peptide
  MOD_RES (6)..(7)..(39)..(41): Xaa is C or S
AAPASXXTPTRLSPINMLYFDAANNVVYGKIPDMVVDAXGXR

SEQ ID NO: 306 - protein, 42 aa, Artificial Sequence
  GFR-binding peptide
  MOD_RES (6)..(7)..(39)..(41): Xaa is C or S
STPPTXXTPTRLSPINMLYFDSANNVVYGKIPDMVVDSXGXR

SEQ ID NO: 307 - protein, 42 aa, Artificial Sequence
  GFR-binding peptide
  MOD_RES (6)..(7)..(39)..(41): Xaa is C or S
HVPKPXXTPTKLSPINMLYFDDSSNVIYGKIPNMVVDSXGXH

SEQ ID NO: 308 - protein, 41 aa, Artificial Sequence
  GFR-binding peptide
  MOD_RES (6)..(7)..(38)..(40): Xaa is C or S
RVPSTXXTPTKTSPINMLYFDNGRVLLYGKIPMIVVDXGXL

SEQ ID NO: 309 - protein, 41 aa, Artificial Sequence
  GFR-binding peptide
  MOD_RES (6)..(7)..(38)..(40): Xaa is C or S
ASAAPXXTPTALSPINMLYFVGRKPKVYGKIPMIVVDXKXS

SEQ ID NO: 310 - protein, 41 aa, Artificial Sequence
  GFR-binding peptide
  MOD_RES (6)..(7)..(38)..(40): Xaa is C or S
ASASPXXTPTDLSPINMLYFIGKTPKIYGKIPMIVVDXKXS

SEQ ID NO: 311 - protein, 41 aa, Artificial Sequence
  GFR-binding peptide
  MOD_RES (6)..(7)..(38)..(40): Xaa is C or S
ASASPXXTPTDLSPINMLYFVGRTPKVYGKIPMVVVDXKXS

SEQ ID NO: 312 - protein, 42 aa, Artificial Sequence
  GFR-binding peptide
  MOD_RES (6)..(7)..(39)..(41): Xaa is C or S
KIPKAXXVPTELSPINMLYFDENEKVVYGKIPDMVVEGXGXR

SEQ ID NO: 313 - protein, 42 aa, Artificial Sequence
  GFR-binding peptide
  MOD_RES (6)..(7)..(39)..(41): Xaa is C or S
GIPEPXXVPEKMSPINMLYFDENKNVVYGKIPNMTVESXAXR

SEQ ID NO: 314 - protein, 42 aa, Artificial Sequence
  GFR-binding peptide
  MOD_RES (6)..(7)..(39)..(41): Xaa is C or S
SIPKAXXVPTELSPINMLYFDEYDKVVYGKIPEMVVEGXGXR

SEQ ID NO: 315 - protein, 42 aa, Artificial Sequence
  GFR-binding peptide
  MOD_RES (7)..(39)..(41): Xaa is C or S
HVTKPTXAPTKLSPINMLYFDDSSNVIYGKIPNMVVRSXGXH

SEQ ID NO: 316 - protein, 42 aa, Artificial Sequence
  GFR-binding peptide
  MOD_RES (6)..(7)..(39)..(41): Xaa is C or S
YVPKPXXAPTKLSPINMLYFDDSSNVIYGKIPNMVVRSXGXH

SEQ ID NO: 317 - protein, 42 aa, Artificial Sequence
  GFR-binding peptide
  MOD_RES (6)..(7)..(39)..(41): Xaa is C or S
TVPKPXXAPTQLSPINMLYFDDSSNVIYGKIPNMVVRAXGXH

SEQ ID NO: 318 - protein, 42 aa, Artificial Sequence
  GFR-binding peptide
  MOD_RES (6)..(7)..(39)..(41): Xaa is C or S
AVPKAXXAPTKLSPINMLYFDSSNNVIYGKIPNMVVKAXGXH

SEQ ID NO: 319 - protein, 43 aa, Artificial Sequence
  GFR-binding peptide
  MOD_RES (6)..(7)..(40)..(42): Xaa is C or S
KVGKAXXVPTKLSPINMLYFDDMGVPTYGKIPEGMSVAEXGXR

SEQ ID NO: 320 - protein, 42 aa, Artificial Sequence
  GFR-binding peptide
  MOD_RES (6)..(7)..(39)..(41): Xaa is C or S
KASKAXXVPTKLSPINMLYFDKGVVTYYGKIPGMAVSEXGXR

SEQ ID NO: 321 - protein, 42 aa, Artificial Sequence
  GFR-binding peptide
  MOD_RES (6)..(7)..(39)..(41): Xaa is C or S
AAPASXXVPARLSPINMLYFDAANNVVYGKIPDMVVEAXGXR

SEQ ID NO: 322 - protein, 42 aa, Artificial Sequence
  GFR-binding peptide
  MOD_RES (6)..(7)..(39)..(41): Xaa is C or S
STPPTXXVPTRLSPINMLYFDSANNVVYGKIPDMVVESXGXR

SEQ ID NO: 323 - protein, 42 aa, Artificial Sequence
  GFR-binding peptide
  MOD_RES (6)..(7)..(39)..(41): Xaa is C or S
HVPKPXXAPTKLSPINMLYFDDSSNVIYGKIPNMVVRSXGXH

SEQ ID NO: 324 - protein, 41 aa, Artificial Sequence
  GFR-binding peptide
  MOD_RES (6)..(7)..(38)..(40): Xaa is C or S
RVPSTXXAPVKTSPINMLYFDNGRVLLYGKIPMIVEEXGXL

SEQ ID NO: 325 - protein, 41 aa, Artificial Sequence
  GFR-binding peptide
  MOD_RES (6)..(7)..(38)..(40): Xaa is C or S
ASAAPXXVPQALSPINMLYFVGRKPKVYGKIPMIVRSXKXS

SEQ ID NO: 326 - protein, 41 aa, Artificial Sequence
  GFR-binding peptide
  MOD_RES (6)..(7)..(38)..(40): Xaa is C or S
ASASPXXVSQDLSPINMLYFIGKTPKIYGKIPMIVKSXKXS

SEQ ID NO: 327 - protein, 41 aa, Artificial Sequence
  GFR-binding peptide
  MOD_RES (6)..(7)..(38)..(40): Xaa is C or S
ASASPXXVPQDLSPINMLYFVGRTPKVYGKIPMVVKSXKXS

SEQ ID NO: 328 - protein, 44 aa, Artificial Sequence
  GFR-binding peptide
  MOD_RES (7)..(41)..(43): Xaa is C or S
NDEGLEXVPTEESPINMLYFRIKPHQGQHYGKIPFLQHNKXEXR

SEQ ID NO: 329 - protein, 44 aa, Artificial Sequence
  GFR-binding peptide
  MOD_RES (7)..(41)..(43): Xaa is C or S
NDEGLEXVPTGQSPINMLYFRIKPHQGQHYGKIPLEEHSQXEXR

SEQ ID NO: 330 - protein, 45 aa, Artificial Sequence
  GFR-binding peptide
  MOD_RES (5)..(42)..(44): Xaa is C or S
SSVKXQPSRVHHSPINMLYFEYVRKKPKLYGKIPRLEEHLEXAXA

SEQ ID NO: 331 - protein, 45 aa, Artificial Sequence
  GFR-binding peptide
  MOD_RES (5)..(42)..(44): Xaa is C or S
RNVQXRPTQVQLSPINMLYFEIVRKKPIFYGKIPTLEDHLAXKXE

SEQ ID NO: 332 - protein, 42 aa, Artificial Sequence
  GFR-binding peptide
  MOD_RES (6)..(7)..(39)..(41): Xaa is C or S
KIPKAXXVPAELSPISILYIDENEKVVYKQYEDMVVEGXGXR

SEQ ID NO: 333 - protein, 42 aa, Artificial Sequence
  GFR-binding peptide
  MOD_RES (6)..(7)..(39)..(41): Xaa is C or S
GIPEPXXVPAKMSPISILYIDENKNVVYKQYENMVVESXAXR

SEQ ID NO: 334 - protein, 42 aa, Artificial Sequence
  GFR-binding peptide
  MOD_RES (6)..(7)..(39)..(41): Xaa is C or S
SIPKAXXVPAELSPISILYIDEYDKVVYKQYEEMVVEGXGXR

SEQ ID NO: 335 - protein, 42 aa, Artificial Sequence
  GFR-binding peptide
  MOD_RES (7)..(39)..(41): Xaa is C or S
HVTKPTXVPAKLSPISILYIDDSSNVIYKQYENMVVESXGXH

SEQ ID NO: 336 - protein, 42 aa, Artificial Sequence
  GFR-binding peptide
  MOD_RES (6)..(7)..(39)..(41): Xaa is C or S
YVPKPXXVPAKLSPISILYIDDSSNVIYKQYENMVVESXGXH

SEQ ID NO: 337 - protein, 42 aa, Artificial Sequence
  GFR-binding peptide
  MOD_RES (6)..(7)..(39)..(41): Xaa is C or S
TVPKPXXVPAQLSPISILYIDDSSNVIYKQYENMVVEAXGXH

SEQ ID NO: 338 - protein, 42 aa, Artificial Sequence
  GFR-binding peptide
  MOD_RES (6)..(7)..(39)..(41): Xaa is C or S
AVPKAXXVPAKLSPISILYIDSSNNVIYKQYENMVVEAXGXH

SEQ ID NO: 339 - protein, 43 aa, Artificial Sequence
  GFR-binding peptide
  MOD_RES (6)..(7)..(40)..(42): Xaa is C or S
KVGKAXXVPAKLSPISILYIDDMGVPTYKQYEEGMSVVEXGXR

SEQ ID NO: 340 - protein, 42 aa, Artificial Sequence
  GFR-binding peptide
  MOD_RES (6)..(7)..(39)..(41): Xaa is C or S
KASKAXXVPAKLSPISILYIDKGVVTYYKQYEGMVVEEXGXR

SEQ ID NO: 341 - protein, 42 aa, Artificial Sequence
  GFR-binding peptide
  MOD_RES (6)..(7)..(39)..(41): Xaa is C or S
GSAGPXXVPAKMSPISILYINDKQQIIYKQYEGMVVERXGXS

SEQ ID NO: 342 - protein, 42 aa, Artificial Sequence
  GFR-binding peptide
  MOD_RES (6)..(7)..(39)..(41): Xaa is C or S
STPPTXXVPARLSPISILYIDSANNVVYKQYEDMVVESXGXR

SEQ ID NO: 343 - protein, 42 aa, Artificial Sequence
  GFR-binding peptide
  MOD_RES (6)..(7)..(39)..(41): Xaa is C or S
HVPKPXXVPAKLSPISILYIDDSSNVIYKQYENMVVESXGXH

SEQ ID NO: 344 - protein, 41 aa, Artificial Sequence
  GFR-binding peptide
  MOD_RES (6)..(7)..(38)..(40): Xaa is C or S
RVPSTXXVPAKTSPISILYIDNGRVLLYKQYEMIVVEXGXL

SEQ ID NO: 345 - protein, 41 aa, Artificial Sequence
  GFR-binding peptide
  MOD_RES (6)..(7)..(38)..(40): Xaa is C or S
ASAAPXXVPAALSPISILYIVGRKPKVYKQYEMIVVEXKXS

SEQ ID NO: 346 - protein, 41 aa, Artificial Sequence
  GFR-binding peptide
  MOD_RES (6)..(7)..(38)..(40): Xaa is C or S
ASASPXXVPADLSPISILYIIGKTPKIYKQYEMIVVEXKXS

SEQ ID NO: 347 - protein, 41 aa, Artificial Sequence
  GFR-binding peptide
  MOD_RES (6)..(7)..(38)..(40): Xaa is C or S
ASASPXXVPADLSPISILYIVGRTPKVYKQYEMVVVEXKXS

SEQ ID NO: 348 - protein, 42 aa, Artificial Sequence
  GFR-binding peptide
  MOD_RES (6)..(7)..(39)..(41): Xaa is C or S
KIPKAXXVPTELSPISILYIDENEKVVYKQYEDMVVEGXGXR

SEQ ID NO: 349 - protein, 42 aa, Artificial Sequence
  GFR-binding peptide
  MOD_RES (6)..(7)..(39)..(41): Xaa is C or S
GIPEPXXVPEKMSPISILYIDENKNVVYKQYENMTVESXAXR

SEQ ID NO: 350 - protein, 42 aa, Artificial Sequence
  GFR-binding peptide
  MOD_RES (6)..(7)..(39)..(41): Xaa is C or S
SIPKAXXVPTELSPISILYIDEYDKVVYKQYEEMVVEGXGXR

SEQ ID NO: 351 - protein, 42 aa, Artificial Sequence
  GFR-binding peptide
  MOD_RES (7)..(39)..(41): Xaa is C or S
HVTKPTXAPTKLSPISILYIDDSSNVIYKQYENMVVRSXGXH

SEQ ID NO: 352 - protein, 42 aa, Artificial Sequence
  GFR-binding peptide
  MOD_RES (6)..(7)..(39)..(41): Xaa is C or S
YVPKPXXAPTKLSPISILYIDDSSNVIYKQYENMVVRSXGXH

SEQ ID NO: 353 - protein, 42 aa, Artificial Sequence
  GFR-binding peptide
  MOD_RES (6)..(7)..(39)..(41): Xaa is C or S
TVPKPXXAPTQLSPISILYIDDSSNVIYKQYENMVVRAXGXH

SEQ ID NO: 354 - protein, 42 aa, Artificial Sequence
  GFR-binding peptide
  MOD_RES (6)..(7)..(39)..(41): Xaa is C or S
AVPKAXXAPTKLSPISILYIDSSNNVIYKQYENMVVKAXGXH

SEQ ID NO: 355 - protein, 43 aa, Artificial Sequence
  GFR-binding peptide
  MOD_RES (6)..(7)..(40)..(42): Xaa is C or S
KVGKAXXVPTKLSPISILYIDDMGVPTYKQYEEGMSVAEXGXR

SEQ ID NO: 356 - protein, 42 aa, Artificial Sequence
  GFR-binding peptide
  MOD_RES (6)..(7)..(39)..(41): Xaa is C or S
KASKAXXVPTKLSPISILYIDKGVVTYYKQYEGMAVSEXGXR

SEQ ID NO: 357 - protein, 42 aa, Artificial Sequence
  GFR-binding peptide
  MOD_RES (6)..(7)..(39)..(41): Xaa is C or S
GSAGPXXTPTKMSPISILYINDKQQIIYKQYEGMVVDRXGXS

SEQ ID NO: 358 - protein, 42 aa, Artificial Sequence
  GFR-binding peptide
  MOD_RES (6)..(7)..(39)..(41): Xaa is C or S
STPPTXXVPTRLSPISILYIDSANNVVYKQYEDMVVESXGXR

SEQ ID NO: 359 - protein, 42 aa, Artificial Sequence
  GFR-binding peptide
  MOD_RES (6)..(7)..(39)..(41): Xaa is C or S
HVPKPXXAPTKLSPISILYIDDSSNVIYKQYENMVVRSXGXH

SEQ ID NO: 360 - protein, 41 aa, Artificial Sequence
  GFR-binding peptide
  MOD_RES (6)..(7)..(38)..(40): Xaa is C or S
RVPSTXXAPVKTSPISILYIDNGRVLLYKQYEMIVEEXGXL

SEQ ID NO: 361 - protein, 41 aa, Artificial Sequence
  GFR-binding peptide
  MOD_RES (6)..(7)..(38)..(40): Xaa is C or S
ASAAPXXVPQALSPISILYIVGRKPKVYKQYEMIVRSXKXS

SEQ ID NO: 362 - protein, 41 aa, Artificial Sequence
  GFR-binding peptide
  MOD_RES (6)..(7)..(38)..(40): Xaa is C or S
ASASPXXVSQDLSPISILYIIGKTPKIYKQYEMIVKSXKXS

SEQ ID NO: 363 - protein, 41 aa, Artificial Sequence
  GFR-binding peptide
  MOD_RES (6)..(7)..(38)..(40): Xaa is C or S
ASASPXXVPQDLSPISILYIVGRTPKVYKQYEMVVKSXKXS

SEQ ID NO: 364 - protein, 44 aa, Artificial Sequence
  GFR-binding peptide
  MOD_RES (7)..(41)..(43): Xaa is C or S
NDEGLEXVPTEESPISILYIRIKPHQGQHYKQYEFLQHNKXEXR

SEQ ID NO: 365 - protein, 44 aa, Artificial Sequence
  GFR-binding peptide
  MOD_RES (7)..(41)..(43): Xaa is C or S
NDEGLEXVPTGQSPISILYIRIKPHQGQHYKQYELEEHSQXEXR

SEQ ID NO: 366 - protein, 45 aa, Artificial Sequence
  GFR-binding peptide
  MOD_RES (5)..(42)..(44): Xaa is C or S
SSVKXQPSRVHHSPISILYIEYVRKKPKLYKQYERLEEHLEXAXA

SEQ ID NO: 367 - protein, 45 aa, Artificial Sequence
  GFR-binding peptide
  MOD_RES (5)..(42)..(44): Xaa is C or S
RNVQXRPTQVQLSPISILYIEIVRKKPIFYKQYETLEDHLAXKXE

SEQ ID NO: 368 - protein, 42 aa, Artificial Sequence
  GFR-binding peptide
  MOD_RES (6)..(7)..(39)..(41): Xaa is C or S
KIPKAXXVPTELSPISILFIDENEKVVYKQYEDMVVEGXGXR

SEQ ID NO: 369 - protein, 42 aa, Artificial Sequence
  GFR-binding peptide
  MOD_RES (6)..(7)..(39)..(41): Xaa is C or S
GIPEPXXVPTKMSPISILFIDENKNVVYKQYENMVVESXAXR

SEQ ID NO: 370 - protein, 42 aa, Artificial Sequence
  GFR-binding peptide
  MOD_RES (6)..(7)..(39)..(41): Xaa is C or S
SIPKAXXVPTELSPISILFIDEYDKVVYKQYEEMVVEGXGXR

SEQ ID NO: 371 - protein, 42 aa, Artificial Sequence
  GFR-binding peptide
  MOD_RES (7)..(39)..(41): Xaa is C or S
HVTKPTXVPTKLSPISILFIDDSSNVIYKQYENMVVESXGXH

SEQ ID NO: 372 - protein, 42 aa, Artificial Sequence
  GFR-binding peptide
  MOD_RES (6)..(7)..(39)..(41): Xaa is C or S
YVPKPXXVPTKLSPISILFIDDSSNVIYKQYENMVVESXGXH

SEQ ID NO: 373 - protein, 42 aa, Artificial Sequence
  GFR-binding peptide
  MOD_RES (6)..(7)..(39)..(41): Xaa is C or S
TVPKPXXVPTQLSPISILFIDDSSNVIYKQYENMVVEAXGXH

SEQ ID NO: 374 - protein, 42 aa, Artificial Sequence
  GFR-binding peptide
  MOD_RES (6)..(7)..(39)..(41): Xaa is C or S
AVPKAXXVPTKLSPISILFIDSSNNVIYKQYENMVVEAXGXH

SEQ ID NO: 375 - protein, 43 aa, Artificial Sequence
  GFR-binding peptide
  MOD_RES (6)..(7)..(40)..(42): Xaa is C or S
KVGKAXXVPTKLSPISILFIDDMGVPTYKQYEEGMSVVEXGXR

SEQ ID NO: 376 - protein, 42 aa, Artificial Sequence
  GFR-binding peptide
  MOD_RES (6)..(7)..(39)..(41): Xaa is C or S
KASKAXXVPTKLSPISILFIDKGVVTYYKQYEGMVVEEXGXR

SEQ ID NO: 377 - protein, 42 aa, Artificial Sequence
  GFR-binding peptide
  MOD_RES (6)..(7)..(39)..(41): Xaa is C or S
GSAGPXXVPTKMSPISILFINDKQQIIYKQYEGMVVERXGXS

SEQ ID NO: 378 - protein, 42 aa, Artificial Sequence
  GFR-binding peptide
  MOD_RES (6)..(7)..(39)..(41): Xaa is C or S
AAPASXXVPTRLSPISILFIDAANNVVYKQYEDMVVEAXGXR

SEQ ID NO: 379 - protein, 42 aa, Artificial Sequence
  GFR-binding peptide
  MOD_RES (6)..(7)..(39)..(41): Xaa is C or S
HVPKPXXVPTKLSPISILFIDDSSNVIYKQYENMVVESXGXH

SEQ ID NO: 380 - protein, 41 aa, Artificial Sequence
  GFR-binding peptide
  MOD_RES (6)..(7)..(38)..(40): Xaa is C or S
RVPSTXXVPTKTSPISILFIDNGRVLLYKQYEMIVVEXGXL

SEQ ID NO: 381 - protein, 41 aa, Artificial Sequence
  GFR-binding peptide
  MOD_RES (6)..(7)..(38)..(40): Xaa is C or S
ASAAPXXVPTALSPISILFIVGRKPKVYKQYEMIVVEXKXS

SEQ ID NO: 382 - protein, 41 aa, Artificial Sequence
  GFR-binding peptide
  MOD_RES (6)..(7)..(38)..(40): Xaa is C or S
ASASPXXVPTDLSPISILFIIGKTPKIYKQYEMIVVEXKXS

SEQ ID NO: 383 - protein, 41 aa, Artificial Sequence
  GFR-binding peptide
  MOD_RES (6)..(7)..(38)..(40): Xaa is C or S
ASASPXXVPTDLSPISILFIVGRTPKVYKQYEMVVVEXKXS

SEQ ID NO: 384 - protein, 42 aa, Artificial Sequence
  GFR-binding peptide
  MOD_RES (6)..(7)..(39)..(41): Xaa is C or S
GIPEPXXVPEKMSPISILFIDENKNVVYKQYENMTVESXAXR

SEQ ID NO: 385 - protein, 42 aa, Artificial Sequence
  GFR-binding peptide
  MOD_RES (7)..(39)..(41): Xaa is C or S
HVTKPTXAPTKLSPISILFIDDSSNVIYKQYENMVVRSXGXH

SEQ ID NO: 386 - protein, 42 aa, Artificial Sequence
  GFR-binding peptide
  MOD_RES (6)..(7)..(39)..(41): Xaa is C or S
YVPKPXXAPTKLSPISILFIDDSSNVIYKQYENMVVRSXGXH

SEQ ID NO: 387 - protein, 42 aa, Artificial Sequence
  GFR-binding peptide
  MOD_RES (6)..(7)..(39)..(41): Xaa is C or S
TVPKPXXAPTQLSPISILFIDDSSNVIYKQYENMVVRAXGXH

SEQ ID NO: 388 - protein, 42 aa, Artificial Sequence
  GFR-binding peptide
  MOD_RES (6)..(7)..(39)..(41): Xaa is C or S
AVPKAXXAPTKLSPISILFIDSSNNVIYKQYENMVVKAXGXH

SEQ ID NO: 389 - protein, 43 aa, Artificial Sequence
  GFR-binding peptide
  MOD_RES (6)..(7)..(40)..(42): Xaa is C or S
KVGKAXXVPTKLSPISILFIDDMGVPTYKQYEEGMSVAEXGXR

SEQ ID NO: 390 - protein, 42 aa, Artificial Sequence
  GFR-binding peptide
  MOD_RES (6)..(7)..(39)..(41): Xaa is C or S
KASKAXXVPTKLSPISILFIDKGVVTYYKQYEGMAVSEXGXR

SEQ ID NO: 391 - protein, 42 aa, Artificial Sequence
  GFR-binding peptide
  MOD_RES (6)..(7)..(39)..(41): Xaa is C or S
GSAGPXXTPTKMSPISILFINDKQQIIYKQYEGMVVDRXGXS

SEQ ID NO: 392 - protein, 42 aa, Artificial Sequence
  GFR-binding peptide
  MOD_RES (6)..(7)..(39)..(41): Xaa is C or S
AAPASXXVPARLSPISILFIDAANNVVYKQYEDMVVEAXGXR

SEQ ID NO: 393 - protein, 42 aa, Artificial Sequence
  GFR-binding peptide
  MOD_RES (6)..(7)..(39)..(41): Xaa is C or S
HVPKPXXAPTKLSPISILFIDDSSNVIYKQYENMVVRSXGXH

SEQ ID NO: 394 - protein, 41 aa, Artificial Sequence
  GFR-binding peptide
  MOD_RES (6)..(7)..(38)..(40): Xaa is C or S
RVPSTXXAPVKTSPISILFIDNGRVLLYKQYEMIVEEXGXL

SEQ ID NO: 395 - protein, 41 aa, Artificial Sequence
  GFR-binding peptide
  MOD_RES (6)..(7)..(38)..(40): Xaa is C or S
ASAAPXXVPQALSPISILFIVGRKPKVYKQYEMIVRSXKXS

SEQ ID NO: 396 - protein, 41 aa, Artificial Sequence
  GFR-binding peptide
  MOD_RES (6)..(7)..(38)..(40): Xaa is C or S
ASASPXXVSQDLSPISILFIIGKTPKIYKQYEMIVKSXKXS

SEQ ID NO: 397 - protein, 41 aa, Artificial Sequence
  GFR-binding peptide
  MOD_RES (6)..(7)..(38)..(40): Xaa is C or S
ASASPXXVPQDLSPISILFIVGRTPKVYKQYEMVVKSXKXS

SEQ ID NO: 398 - protein, 44 aa, Artificial Sequence
  GFR-binding peptide
  MOD_RES (7)..(41)..(43): Xaa is C or S
NDEGLEXVPTEESPISILFIRIKPHQGQHYKQYEFLQHNKXEXR

SEQ ID NO: 399 - protein, 44 aa, Artificial Sequence
  GFR-binding peptide
  MOD_RES (7)..(41)..(43): Xaa is C or S
NDEGLEXVPTGQSPISILFIRIKPHQGQHYKQYELEEHSQXEXR

SEQ ID NO: 400 - protein, 45 aa, Artificial Sequence
  GFR-binding peptide
  MOD_RES (5)..(42)..(44): Xaa is C or S
SSVKXQPSRVHHSPISILFIEYVRKKPKLYKQYERLEEHLEXAXA

SEQ ID NO: 401 - protein, 45 aa, Artificial Sequence
  GFR-binding peptide
  MOD_RES (5)..(42)..(44): Xaa is C or S
RNVQXRPTQVQLSPISILFIEIVRKKPIFYKQYETLEDHLAXKXE

SEQ ID NO: 402 - protein, 42 aa, Artificial Sequence
  GFR-binding peptide
  MOD_RES (6)..(7)..(39)..(41): Xaa is C or S
KIPKAXXAPVELKPLSMLYVDENEKVVDHHKDDMVEEGXGXR

SEQ ID NO: 403 - protein, 42 aa, Artificial Sequence
  GFR-binding peptide
  MOD_RES (6)..(7)..(39)..(41): Xaa is C or S
GIPEPXXAPVKMKPLSMLYVDENKNVVDHHKDNMVEESXAXR

SEQ ID NO: 404 - protein, 42 aa, Artificial Sequence
  GFR-binding peptide
  MOD_RES (6)..(7)..(39)..(41): Xaa is C or S
SIPKAXXAPVELKPLSMLYVDEYDKVVDHHKDEMVEEGXGXR

SEQ ID NO: 405 - protein, 42 aa, Artificial Sequence
  GFR-binding peptide
  MOD_RES (7)..(39)..(41): Xaa is C or S
HVTKPTXAPVKLKPLSMLYVDDSSNVIDHHKDNMVEESXGXH

SEQ ID NO: 406 - protein, 42 aa, Artificial Sequence
  GFR-binding peptide
  MOD_RES (6)..(7)..(39)..(41): Xaa is C or S
YVPKPXXAPVKLKPLSMLYVDDSSNVIDHHKDNMVEESXGXH

SEQ ID NO: 407 - protein, 42 aa, Artificial Sequence
  GFR-binding peptide
  MOD_RES (6)..(7)..(39)..(41): Xaa is C or S
TVPKPXXAPVQLKPLSMLYVDDSSNVIDHHKDNMVEEAXGXH

SEQ ID NO: 408 - protein, 42 aa, Artificial Sequence
  GFR-binding peptide
  MOD_RES (6)..(7)..(39)..(41): Xaa is C or S
AVPKAXXAPVKLKPLSMLYVDSSNNVIDHHKDNMVEEAXGXH

SEQ ID NO: 409 - protein, 43 aa, Artificial Sequence
  GFR-binding peptide
  MOD_RES (6)..(7)..(40)..(42): Xaa is C or S
KVGKAXXAPVKLKPLSMLYVDDMGVPTDHHKDEGMSVEEXGXR

SEQ ID NO: 410 - protein, 42 aa, Artificial Sequence
  GFR-binding peptide
  MOD_RES (6)..(7)..(39)..(41): Xaa is C or S
KASKAXXAPVKLKPLSMLYVDKGVVTYDHHKDGMVEEEXGXR

SEQ ID NO: 411 - protein, 42 aa, Artificial Sequence
  GFR-binding peptide
  MOD_RES (6)..(7)..(39)..(41): Xaa is C or S
GSAGPXXAPVKMKPLSMLYVNDKQQIIDHHKDGMVEERXGXS

SEQ ID NO: 412 - protein, 42 aa, Artificial Sequence
  GFR-binding peptide
  MOD_RES (6)..(7)..(39)..(41): Xaa is C or S
AAPASXXAPVRLKPLSMLYVDAANNVVDHHKDDMVEEAXGXR

SEQ ID NO: 413 - protein, 42 aa, Artificial Sequence
  GFR-binding peptide
  MOD_RES (6)..(7)..(39)..(41): Xaa is C or S
STPPTXXAPVRLKPLSMLYVDSANNVVDHHKDDMVEESXGXR

SEQ ID NO: 414 - protein, 42 aa, Artificial Sequence
  GFR-binding peptide
  MOD_RES (6)..(7)..(39)..(41): Xaa is C or S
HVPKPXXAPVKLKPLSMLYVDDSSNVIDHHKDNMVEESXGXH

SEQ ID NO: 415 - protein, 41 aa, Artificial Sequence
  GFR-binding peptide
  MOD_RES (6)..(7)..(38)..(40): Xaa is C or S
ASAAPXXAPVALKPLSMLYVVGRKPKVDHHKDMIVEEXKXS

SEQ ID NO: 416 - protein, 41 aa, Artificial Sequence
  GFR-binding peptide
  MOD_RES (6)..(7)..(38)..(40): Xaa is C or S
ASASPXXAPVDLKPLSMLYVIGKTPKIDHHKDMIVEEXKXS

SEQ ID NO: 417 - protein, 41 aa, Artificial Sequence
  GFR-binding peptide
  MOD_RES (6)..(7)..(38)..(40): Xaa is C or S
ASASPXXAPVDLKPLSMLYVVGRTPKVDHHKDMVVEEXKXS

SEQ ID NO: 418 - protein, 42 aa, Artificial Sequence
  GFR-binding peptide
  MOD_RES (6)..(7)..(39)..(41): Xaa is C or S
KIPKAXXVPTELKPLSMLYVDENEKVVDHHKDDMVVEGXGXR

SEQ ID NO: 419 - protein, 42 aa, Artificial Sequence
  GFR-binding peptide
  MOD_RES (6)..(7)..(39)..(41): Xaa is C or S
GIPEPXXVPEKMKPLSMLYVDENKNVVDHHKDNMTVESXAXR

SEQ ID NO: 420 - protein, 42 aa, Artificial Sequence
  GFR-binding peptide
  MOD_RES (6)..(7)..(39)..(41): Xaa is C or S
SIPKAXXVPTELKPLSMLYVDEYDKVVDHHKDEMVVEGXGXR

SEQ ID NO: 421 - protein, 42 aa, Artificial Sequence
  GFR-binding peptide
  MOD_RES (7)..(39)..(41): Xaa is C or S
HVTKPTXAPTKLKPLSMLYVDDSSNVIDHHKDNMVVRSXGXH

SEQ ID NO: 422 - protein, 42 aa, Artificial Sequence
  GFR-binding peptide
  MOD_RES (6)..(7)..(39)..(41): Xaa is C or S
YVPKPXXAPTKLKPLSMLYVDDSSNVIDHHKDNMVVRSXGXH

SEQ ID NO: 423 - protein, 42 aa, Artificial Sequence
  GFR-binding peptide
  MOD_RES (6)..(7)..(39)..(41): Xaa is C or S
TVPKPXXAPTQLKPLSMLYVDDSSNVIDHHKDNMVVRAXGXH

SEQ ID NO: 424 - protein, 42 aa, Artificial Sequence
  GFR-binding peptide
  MOD_RES (6)..(7)..(39)..(41): Xaa is C or S
AVPKAXXAPTKLKPLSMLYVDSSNNVIDHHKDNMVVKAXGXH

SEQ ID NO: 425 - protein, 43 aa, Artificial Sequence
  GFR-binding peptide
  MOD_RES (6)..(7)..(40)..(42): Xaa is C or S
KVGKAXXVPTKLKPLSMLYVDDMGVPTDHHKDEGMSVAEXGXR

SEQ ID NO: 426 - protein, 42 aa, Artificial Sequence
  GFR-binding peptide
  MOD_RES (6)..(7)..(39)..(41): Xaa is C or S
KASKAXXVPTKLKPLSMLYVDKGVVTYDHHKDGMAVSEXGXR

SEQ ID NO: 427 - protein, 42 aa, Artificial Sequence
  GFR-binding peptide
  MOD_RES (6)..(7)..(39)..(41): Xaa is C or S
GSAGPXXTPTKMKPLSMLYVNDKQQIIDHHKDGMVVDRXGXS

SEQ ID NO: 428 - protein, 42 aa, Artificial Sequence
  GFR-binding peptide
  MOD_RES (6)..(7)..(39)..(41): Xaa is C or S
AAPASXXVPARLKPLSMLYVDAANNVVDHHKDDMVVEAXGXR

SEQ ID NO: 429 - protein, 42 aa, Artificial Sequence
  GFR-binding peptide
  MOD_RES (6)..(7)..(39)..(41): Xaa is C or S
STPPTXXVPTRLKPLSMLYVDSANNVVDHHKDDMVVESXGXR

SEQ ID NO: 430 - protein, 42 aa, Artificial Sequence
  GFR-binding peptide
  MOD_RES (6)..(7)..(39)..(41): Xaa is C or S
HVPKPXXAPTKLKPLSMLYVDDSSNVIDHHKDNMVVRSXGXH

SEQ ID NO: 431 - protein, 41 aa, Artificial Sequence
  GFR-binding peptide
  MOD_RES (6)..(7)..(38)..(40): Xaa is C or S
ASAAPXXVPQALKPLSMLYVVGRKPKVDHHKDMIVRSXKXS

SEQ ID NO: 432 - protein, 41 aa, Artificial Sequence
  GFR-binding peptide
  MOD_RES (6)..(7)..(38)..(40): Xaa is C or S
ASASPXXVSQDLKPLSMLYVIGKTPKIDHHKDMIVKSXKXS

SEQ ID NO: 433 - protein, 41 aa, Artificial Sequence
  GFR-binding peptide
  MOD_RES (6)..(7)..(38)..(40): Xaa is C or S
ASASPXXVPQDLKPLSMLYVVGRTPKVDHHKDMVVKSXKXS

SEQ ID NO: 434 - protein, 44 aa, Artificial Sequence
  GFR-binding peptide
  MOD_RES (7)..(41)..(43): Xaa is C or S
NDEGLEXVPTEEKPLSMLYVRIKPHQGQHDHHKDFLQHNKXEXR

SEQ ID NO: 435 - protein, 44 aa, Artificial Sequence
  GFR-binding peptide
  MOD_RES (7)..(41)..(43): Xaa is C or S
NDEGLEXVPTGQKPLSMLYVRIKPHQGQHDHHKDLEEHSQXEXR

SEQ ID NO: 436 - protein, 45 aa, Artificial Sequence
  GFR-binding peptide
  MOD_RES (5)..(42)..(44): Xaa is C or S
SSVKXQPSRVHHKPLSMLYVEYVRKKPKLDHHKDRLEEHLEXAXA

SEQ ID NO: 437 - protein, 45 aa, Artificial Sequence
  GFR-binding peptide
  MOD_RES (5)..(42)..(44): Xaa is C or S
RNVQXRPTQVQLKPLSMLYVEIVRKKPIFDHHKDTLEDHLAXKXE

SEQ ID NO: 438 - protein, 42 aa, Artificial Sequence
  GFR-binding peptide
  MOD_RES (6)..(7)..(39)..(41): Xaa is C or S
KIPKAXXVPQELEPLPIVYYDENEKVVEQLSNDMVRSGXGXR

SEQ ID NO: 439 - protein, 42 aa, Artificial Sequence
  GFR-binding peptide
  MOD_RES (6)..(7)..(39)..(41): Xaa is C or S
GIPEPXXVPQKMEPLPIVYYDENKNVVEQLSNNMVRSSXAXR

SEQ ID NO: 440 - protein, 42 aa, Artificial Sequence
  GFR-binding peptide
  MOD_RES (6)..(7)..(39)..(41): Xaa is C or S
SIPKAXXVPQELEPLPIVYYDEYDKVVEQLSNEMVRSGXGXR

SEQ ID NO: 441 - protein, 42 aa, Artificial Sequence
  GFR-binding peptide
  MOD_RES (7)..(39)..(41): Xaa is C or S
HVTKPTXVPQKLEPLPIVYYDDSSNVIEQLSNNMVRSSXGXH

SEQ ID NO: 442 - protein, 42 aa, Artificial Sequence
  GFR-binding peptide
  MOD_RES (6)..(7)..(39)..(41): Xaa is C or S
YVPKPXXVPQKLEPLPIVYYDDSSNVIEQLSNNMVRSSXGXH

SEQ ID NO: 443 - protein, 42 aa, Artificial Sequence
  GFR-binding peptide
  MOD_RES (6)..(7)..(39)..(41): Xaa is C or S
TVPKPXXVPQQLEPLPIVYYDDSSNVIEQLSNNMVRSAXGXH

SEQ ID NO: 444 - protein, 42 aa, Artificial Sequence
  GFR-binding peptide
  MOD_RES (6)..(7)..(39)..(41): Xaa is C or S
AVPKAXXVPQKLEPLPIVYYDSSNNVIEQLSNNMVRSAXGXH

SEQ ID NO: 445 - protein, 43 aa, Artificial Sequence
  GFR-binding peptide
  MOD_RES (6)..(7)..(40)..(42): Xaa is C or S
KVGKAXXVPQKLEPLPIVYYDDMGVPTEQLSNEGMSVRSXGXR

SEQ ID NO: 446 - protein, 42 aa, Artificial Sequence
  GFR-binding peptide
  MOD_RES (6)..(7)..(39)..(41): Xaa is C or S
KASKAXXVPQKLEPLPIVYYDKGVVTYEQLSNGMVRSEXGXR

SEQ ID NO: 447 - protein, 42 aa, Artificial Sequence
  GFR-binding peptide
  MOD_RES (6)..(7)..(39)..(41): Xaa is C or S
GSAGPXXVPQKMEPLPIVYYNDKQQIIEQLSNGMVRSRXGXS

SEQ ID NO: 448 - protein, 42 aa, Artificial Sequence
  GFR-binding peptide
  MOD_RES (6)..(7)..(39)..(41): Xaa is C or S
AAPASXXVPQRLEPLPIVYYDAANNVVEQLSNDMVRSAXGXR

SEQ ID NO: 449 - protein, 42 aa, Artificial Sequence
  GFR-binding peptide
  MOD_RES (6)..(7)..(39)..(41): Xaa is C or S
STPPTXXVPQRLEPLPIVYYDSANNVVEQLSNDMVRSSXGXR

SEQ ID NO: 450 - protein, 42 aa, Artificial Sequence
  GFR-binding peptide
  MOD_RES (6)..(7)..(39)..(41): Xaa is C or S
HVPKPXXVPQKLEPLPIVYYDDSSNVIEQLSNNMVRSSXGXH

SEQ ID NO: 451 - protein, 41 aa, Artificial Sequence
  GFR-binding peptide
  MOD_RES (6)..(7)..(38)..(40): Xaa is C or S
RVPSTXXVPQKTEPLPIVYYDNGRVLLEQLSNMIVRSXGXL

SEQ ID NO: 452 - protein, 41 aa, Artificial Sequence
  GFR-binding peptide
  MOD_RES (6)..(7)..(38)..(40): Xaa is C or S
ASASPXXVPQDLEPLPIVYYIGKTPKIEQLSNMIVRSXKXS

SEQ ID NO: 453 - protein, 41 aa, Artificial Sequence
  GFR-binding peptide
  MOD_RES (6)..(7)..(38)..(40): Xaa is C or S
ASASPXXVPQDLEPLPIVYYVGRTPKVEQLSNMVVRSXKXS

SEQ ID NO: 454 - protein, 42 aa, Artificial Sequence
  GFR-binding peptide
  MOD_RES (6)..(7)..(39)..(41): Xaa is C or S
KIPKAXXVPTELEPLPIVYYDENEKVVEQLSNDMVVEGXGXR

SEQ ID NO: 455 - protein, 42 aa, Artificial Sequence
  GFR-binding peptide
  MOD_RES (6)..(7)..(39)..(41): Xaa is C or S
GIPEPXXVPEKMEPLPIVYYDENKNVVEQLSNNMTVESXAXR

SEQ ID NO: 456 - protein, 42 aa, Artificial Sequence
  GFR-binding peptide
  MOD_RES (6)..(7)..(39)..(41): Xaa is C or S
SIPKAXXVPTELEPLPIVYYDEYDKVVEQLSNEMVVEGXGXR

SEQ ID NO: 457 - protein, 42 aa, Artificial Sequence
  GFR-binding peptide
  MOD_RES (7)..(39)..(41): Xaa is C or S
HVTKPTXAPTKLEPLPIVYYDDSSNVIEQLSNNMVVRSXGXH

SEQ ID NO: 458 - protein, 42 aa, Artificial Sequence
  GFR-binding peptide
  MOD_RES (6)..(7)..(39)..(41): Xaa is C or S
YVPKPXXAPTKLEPLPIVYYDDSSNVIEQLSNNMVVRSXGXH

SEQ ID NO: 459 - protein, 42 aa, Artificial Sequence
  GFR-binding peptide
  MOD_RES (6)..(7)..(39)..(41): Xaa is C or S
TVPKPXXAPTQLEPLPIVYYDDSSNVIEQLSNNMVVRAXGXH

SEQ ID NO: 460 - protein, 42 aa, Artificial Sequence
  GFR-binding peptide
  MOD_RES (6)..(7)..(39)..(41): Xaa is C or S
AVPKAXXAPTKLEPLPIVYYDSSNNVIEQLSNNMVVKAXGXH

SEQ ID NO: 461 - protein, 43 aa, Artificial Sequence
  GFR-binding peptide
  MOD_RES (6)..(7)..(40)..(42): Xaa is C or S
KVGKAXXVPTKLEPLPIVYYDDMGVPTEQLSNEGMSVAEXGXR

SEQ ID NO: 462 - protein, 42 aa, Artificial Sequence
  GFR-binding peptide
  MOD_RES (6)..(7)..(39)..(41): Xaa is C or S
KASKAXXVPTKLEPLPIVYYDKGVVTYEQLSNGMAVSEXGXR

SEQ ID NO: 463 - protein, 42 aa, Artificial Sequence
  GFR-binding peptide
  MOD_RES (6)..(7)..(39)..(41): Xaa is C or S
GSAGPXXTPTKMEPLPIVYYNDKQQIIEQLSNGMVVDRXGXS

SEQ ID NO: 464 - protein, 42 aa, Artificial Sequence
  GFR-binding peptide
  MOD_RES (6)..(7)..(39)..(41): Xaa is C or S
AAPASXXVPARLEPLPIVYYDAANNVVEQLSNDMVVEAXGXR

SEQ ID NO: 465 - protein, 42 aa, Artificial Sequence
  GFR-binding peptide
  MOD_RES (6)..(7)..(39)..(41): Xaa is C or S
STPPTXXVPTRLEPLPIVYYDSANNVVEQLSNDMVVESXGXR

SEQ ID NO: 466 - protein, 42 aa, Artificial Sequence
  GFR-binding peptide
  MOD_RES (6)..(7)..(39)..(41): Xaa is C or S
HVPKPXXAPTKLEPLPIVYYDDSSNVIEQLSNNMVVRSXGXH

SEQ ID NO: 467 - protein, 41 aa, Artificial Sequence
  GFR-binding peptide
  MOD_RES (6)..(7)..(38)..(40): Xaa is C or S
RVPSTXXAPVKTEPLPIVYYDNGRVLLEQLSNMIVEEXGXL

SEQ ID NO: 468 - protein, 41 aa, Artificial Sequence
  GFR-binding peptide
  MOD_RES (6)..(7)..(38)..(40): Xaa is C or S
ASASPXXVSQDLEPLPIVYYIGKTPKIEQLSNMIVKSXKXS

SEQ ID NO: 469 - protein, 41 aa, Artificial Sequence
  GFR-binding peptide
  MOD_RES (6)..(7)..(38)..(40): Xaa is C or S
ASASPXXVPQDLEPLPIVYYVGRTPKVEQLSNMVVKSXKXS

SEQ ID NO: 470 - protein, 44 aa, Artificial Sequence
  GFR-binding peptide
  MOD_RES (7)..(41)..(43): Xaa is C or S
NDEGLEXVPTEEEPLPIVYYRIKPHQGQHEQLSNFLQHNKXEXR

SEQ ID NO: 471 - protein, 44 aa, Artificial Sequence
  GFR-binding peptide
  MOD_RES (7)..(41)..(43): Xaa is C or S
NDEGLEXVPTGQEPLPIVYYRIKPHQGQHEQLSNLEEHSQXEXR

SEQ ID NO: 472 - protein, 45 aa, Artificial Sequence
  GFR-binding peptide
  MOD_RES (5)..(42)..(44): Xaa is C or S
SSVKXQPSRVHHEPLPIVYYEYVRKKPKLEQLSNRLEEHLEXAXA

SEQ ID NO: 473 - protein, 45 aa, Artificial Sequence
  GFR-binding peptide
  MOD_RES (5)..(42)..(44): Xaa is C or S
RNVQXRPTQVQLEPLPIVYYEIVRKKPIFEQLSNTLEDHLAXKXE

SEQ ID NO: 474 - protein, 42 aa, Artificial Sequence
  GFR-binding peptide
  MOD_RES (6)..(7)..(39)..(41): Xaa is C or S
KIPKAXXVSQELEPLTILYYDENEKVVEQLSNDMVKSGXGXR

SEQ ID NO: 475 - protein, 42 aa, Artificial Sequence
  GFR-binding peptide
  MOD_RES (6)..(7)..(39)..(41): Xaa is C or S
GIPEPXXVSQKMEPLTILYYDENKNVVEQLSNNMVKSSXAXR

SEQ ID NO: 476 - protein, 42 aa, Artificial Sequence
  GFR-binding peptide
  MOD_RES (6)..(7)..(39)..(41): Xaa is C or S
SIPKAXXVSQELEPLTILYYDEYDKVVEQLSNEMVKSGXGXR

SEQ ID NO: 477 - protein, 42 aa, Artificial Sequence
  GFR-binding peptide
  MOD_RES (7)..(39)..(41): Xaa is C or S
HVTKPTXVSQKLEPLTILYYDDSSNVIEQLSNNMVKSSXGXH

SEQ ID NO: 478 - protein, 42 aa, Artificial Sequence
  GFR-binding peptide
  MOD_RES (6)..(7)..(39)..(41): Xaa is C or S
YVPKPXXVSQKLEPLTILYYDDSSNVIEQLSNNMVKSSXGXH

SEQ ID NO: 479 - protein, 42 aa, Artificial Sequence
  GFR-binding peptide
  MOD_RES (6)..(7)..(39)..(41): Xaa is C or S
TVPKPXXVSQQLEPLTILYYDDSSNVIEQLSNNMVKSAXGXH

SEQ ID NO: 480 - protein, 42 aa, Artificial Sequence
  GFR-binding peptide
  MOD_RES (6)..(7)..(39)..(41): Xaa is C or S
AVPKAXXVSQKLEPLTILYYDSSNNVIEQLSNNMVKSAXGXH

SEQ ID NO: 481 - protein, 43 aa, Artificial Sequence
  GFR-binding peptide
  MOD_RES (6)..(7)..(40)..(42): Xaa is C or S
KVGKAXXVSQKLEPLTILYYDDMGVPTEQLSNEGMSVKSXGXR

SEQ ID NO: 482 - protein, 42 aa, Artificial Sequence
  GFR-binding peptide
  MOD_RES (6)..(7)..(39)..(41): Xaa is C or S
KASKAXXVSQKLEPLTILYYDKGVVTYEQLSNGMVKSEXGXR

SEQ ID NO: 483 - protein, 42 aa, Artificial Sequence
  GFR-binding peptide
  MOD_RES (6)..(7)..(39)..(41): Xaa is C or S
GSAGPXXVSQKMEPLTILYYNDKQQIIEQLSNGMVKSRXGXS

SEQ ID NO: 484 - protein, 42 aa, Artificial Sequence
  GFR-binding peptide
  MOD_RES (6)..(7)..(39)..(41): Xaa is C or S
AAPASXXVSQRLEPLTILYYDAANNVVEQLSNDMVKSAXGXR

SEQ ID NO: 485 - protein, 42 aa, Artificial Sequence
  GFR-binding peptide
  MOD_RES (6)..(7)..(39)..(41): Xaa is C or S
STPPTXXVSQRLEPLTILYYDSANNVVEQLSNDMVKSSXGXR

SEQ ID NO: 486 - protein, 42 aa, Artificial Sequence
  GFR-binding peptide
  MOD_RES (6)..(7)..(39)..(41): Xaa is C or S
HVPKPXXVSQKLEPLTILYYDDSSNVIEQLSNNMVKSSXGXH

SEQ ID NO: 487 - protein, 41 aa, Artificial Sequence
  GFR-binding peptide
  MOD_RES (6)..(7)..(38)..(40): Xaa is C or S
RVPSTXXVSQKTEPLTILYYDNGRVLLEQLSNMIVKSXGXL

SEQ ID NO: 488 - protein, 41 aa, Artificial Sequence
  GFR-binding peptide
  MOD_RES (6)..(7)..(38)..(40): Xaa is C or S
ASAAPXXVSQALEPLTILYYVGRKPKVEQLSNMIVKSXKXS

SEQ ID NO: 489 - protein, 41 aa, Artificial Sequence
  GFR-binding peptide
  MOD_RES (6)..(7)..(38)..(40): Xaa is C or S
ASASPXXVSQDLEPLTILYYVGRTPKVEQLSNMVVKSXKXS

SEQ ID NO: 490 - protein, 42 aa, Artificial Sequence
  GFR-binding peptide
  MOD_RES (6)..(7)..(39)..(41): Xaa is C or S
KIPKAXXVPTELEPLTILYYDENEKVVEQLSNDMVVEGXGXR

SEQ ID NO: 491 - protein, 42 aa, Artificial Sequence
  GFR-binding peptide
  MOD_RES (6)..(7)..(39)..(41): Xaa is C or S
GIPEPXXVPEKMEPLTILYYDENKNVVEQLSNNMTVESXAXR

SEQ ID NO: 492 - protein, 42 aa, Artificial Sequence
  GFR-binding peptide
  MOD_RES (6)..(7)..(39)..(41): Xaa is C or S
SIPKAXXVPTELEPLTILYYDEYDKVVEQLSNEMVVEGXGXR

SEQ ID NO: 493 - protein, 42 aa, Artificial Sequence
  GFR-binding peptide
  MOD_RES (7)..(39)..(41): Xaa is C or S
HVTKPTXAPTKLEPLTILYYDDSSNVIEQLSNNMVVRSXGXH

SEQ ID NO: 494 - protein, 42 aa, Artificial Sequence
  GFR-binding peptide
  MOD_RES (6)..(7)..(39)..(41): Xaa is C or S
YVPKPXXAPTKLEPLTILYYDDSSNVIEQLSNNMVVRSXGXH

SEQ ID NO: 495 - protein, 42 aa, Artificial Sequence
  GFR-binding peptide
  MOD_RES (6)..(7)..(39)..(41): Xaa is C or S
TVPKPXXAPTQLEPLTILYYDDSSNVIEQLSNNMVVRAXGXH

SEQ ID NO: 496 - protein, 42 aa, Artificial Sequence
  GFR-binding peptide
  MOD_RES (6)..(7)..(39)..(41): Xaa is C or S
AVPKAXXAPTKLEPLTILYYDSSNNVIEQLSNNMVVKAXGXH

SEQ ID NO: 497 - protein, 43 aa, Artificial Sequence
  GFR-binding peptide
  MOD_RES (6)..(7)..(40)..(42): Xaa is C or S
KVGKAXXVPTKLEPLTILYYDDMGVPTEQLSNEGMSVAEXGXR

SEQ ID NO: 498 - protein, 42 aa, Artificial Sequence
  GFR-binding peptide
  MOD_RES (6)..(7)..(39)..(41): Xaa is C or S
KASKAXXVPTKLEPLTILYYDKGVVTYEQLSNGMAVSEXGXR

SEQ ID NO: 499 - protein, 42 aa, Artificial Sequence
  GFR-binding peptide
  MOD_RES (6)..(7)..(39)..(41): Xaa is C or S
GSAGPXXTPTKMEPLTILYYNDKQQIIEQLSNGMVVDRXGXS

SEQ ID NO: 500 - protein, 42 aa, Artificial Sequence
  GFR-binding peptide
  MOD_RES (6)..(7)..(39)..(41): Xaa is C or S
AAPASXXVPARLEPLTILYYDAANNVVEQLSNDMVVEAXGXR

SEQ ID NO: 501 - protein, 42 aa, Artificial Sequence
  GFR-binding peptide
  MOD_RES (6)..(7)..(39)..(41): Xaa is C or S
STPPTXXVPTRLEPLTILYYDSANNVVEQLSNDMVVESXGXR

SEQ ID NO: 502 - protein, 42 aa, Artificial Sequence
  GFR-binding peptide
  MOD_RES (6)..(7)..(39)..(41): Xaa is C or S
HVPKPXXAPTKLEPLTILYYDDSSNVIEQLSNNMVVRSXGXH

SEQ ID NO: 503 - protein, 41 aa, Artificial Sequence
  GFR-binding peptide
  MOD_RES (6)..(7)..(38)..(40): Xaa is C or S
RVPSTXXAPVKTEPLTILYYDNGRVLLEQLSNMIVEEXGXL

SEQ ID NO: 504 - protein, 41 aa, Artificial Sequence
  GFR-binding peptide
  MOD_RES (6)..(7)..(38)..(40): Xaa is C or S
ASAAPXXVPQALEPLTILYYVGRKPKVEQLSNMIVRSXKXS

SEQ ID NO: 505 - protein, 44 aa, Artificial Sequence
  GFR-binding peptide
  MOD_RES (7)..(41)..(43): Xaa is C or S
NDEGLEXVPTEEEPLTILYYRIKPHQGQHEQLSNFLQHNKXEXR

SEQ ID NO: 506 - protein, 44 aa, Artificial Sequence
  GFR-binding peptide
  MOD_RES (7)..(41)..(43): Xaa is C or S
NDEGLEXVPTGQEPLTILYYRIKPHQGQHEQLSNLEEHSQXEXR

SEQ ID NO: 507 - protein, 45 aa, Artificial Sequence
  GFR-binding peptide
  MOD_RES (5)..(42)..(44): Xaa is C or S
SSVKXQPSRVHHEPLTILYYEYVRKKPKLEQLSNRLEEHLEXAXA

SEQ ID NO: 508 - protein, 45 aa, Artificial Sequence
  GFR-binding peptide
  MOD_RES (5)..(42)..(44): Xaa is C or S
RNVQXRPTQVQLEPLTILYYEIVRKKPIFEQLSNTLEDHLAXKXE

SEQ ID NO: 509 - protein, 42 aa, Artificial Sequence
  GFR-binding peptide
  MOD_RES (6)..(7)..(39)..(41): Xaa is C or S
KIPKAXXVPQELEPLTILYYDENEKVVEQLSNDMVKSGXGXR

SEQ ID NO: 510 - protein, 42 aa, Artificial Sequence
  GFR-binding peptide
  MOD_RES (6)..(7)..(39)..(41): Xaa is C or S
GIPEPXXVPQKMEPLTILYYDENKNVVEQLSNNMVKSSXAXR

SEQ ID NO: 511 - protein, 42 aa, Artificial Sequence
  GFR-binding peptide
  MOD_RES (6)..(7)..(39)..(41): Xaa is C or S
SIPKAXXVPQELEPLTILYYDEYDKVVEQLSNEMVKSGXGXR

SEQ ID NO: 512 - protein, 42 aa, Artificial Sequence
  GFR-binding peptide
  MOD_RES (7)..(39)..(41): Xaa is C or S
HVTKPTXVPQKLEPLTILYYDDSSNVIEQLSNNMVKSSXGXH

SEQ ID NO: 513 - protein, 42 aa, Artificial Sequence
  GFR-binding peptide
  MOD_RES (6)..(7)..(39)..(41): Xaa is C or S
YVPKPXXVPQKLEPLTILYYDDSSNVIEQLSNNMVKSSXGXH

SEQ ID NO: 514 - protein, 42 aa, Artificial Sequence
  GFR-binding peptide
  MOD_RES (6)..(7)..(39)..(41): Xaa is C or S
TVPKPXXVPQQLEPLTILYYDDSSNVIEQLSNNMVKSAXGXH

SEQ ID NO: 515 - protein, 42 aa, Artificial Sequence
  GFR-binding peptide
  MOD_RES (6)..(7)..(39)..(41): Xaa is C or S
AVPKAXXVPQKLEPLTILYYDSSNNVIEQLSNNMVKSAXGXH

SEQ ID NO: 516 - protein, 43 aa, Artificial Sequence
  GFR-binding peptide
  MOD_RES (6)..(7)..(40)..(42): Xaa is C or S
KVGKAXXVPQKLEPLTILYYDDMGVPTEQLSNEGMSVKSXGXR

SEQ ID NO: 517 - protein, 42 aa, Artificial Sequence
  GFR-binding peptide
  MOD_RES (6)..(7)..(39)..(41): Xaa is C or S
KASKAXXVPQKLEPLTILYYDKGVVTYEQLSNGMVKSEXGXR

SEQ ID NO: 518 - protein, 42 aa, Artificial Sequence
  GFR-binding peptide
  MOD_RES (6)..(7)..(39)..(41): Xaa is C or S
GSAGPXXVPQKMEPLTILYYNDKQQIIEQLSNGMVKSRXGXS

SEQ ID NO: 519 - protein, 42 aa, Artificial Sequence
  GFR-binding peptide
  MOD_RES (6)..(7)..(39)..(41): Xaa is C or S
AAPASXXVPQRLEPLTILYYDAANNVVEQLSNDMVKSAXGXR

SEQ ID NO: 520 - protein, 42 aa, Artificial Sequence
  GFR-binding peptide
  MOD_RES (6)..(7)..(39)..(41): Xaa is C or S
STPPTXXVPQRLEPLTILYYDSANNVVEQLSNDMVKSSXGXR

SEQ ID NO: 521 - protein, 42 aa, Artificial Sequence
  GFR-binding peptide
  MOD_RES (6)..(7)..(39)..(41): Xaa is C or S
HVPKPXXVPQKLEPLTILYYDDSSNVIEQLSNNMVKSSXGXH

SEQ ID NO: 522 - protein, 41 aa, Artificial Sequence
  GFR-binding peptide
  MOD_RES (6)..(7)..(38)..(40): Xaa is C or S
RVPSTXXVPQKTEPLTILYYDNGRVLLEQLSNMIVKSXGXL

SEQ ID NO: 523 - protein, 41 aa, Artificial Sequence
  GFR-binding peptide
  MOD_RES (6)..(7)..(38)..(40): Xaa is C or S
ASAAPXXVPQALEPLTILYYVGRKPKVEQLSNMIVKSXKXS

SEQ ID NO: 524 - protein, 41 aa, Artificial Sequence
  GFR-binding peptide
  MOD_RES (6)..(7)..(38)..(40): Xaa is C or S
ASASPXXVPQDLEPLTILYYIGKTPKIEQLSNMIVKSXKXS

SEQ ID NO: 525 - protein, 44 aa, Artificial Sequence
  GFR-binding peptide
  MOD_RES (7)..(41)..(43): Xaa is C or S
NDEGLEXVPTGQSNITMQIMRIKPHQGQHIGEMSLEQHNQXEXR

SEQ ID NO: 526 - protein, 42 aa, Artificial Sequence
  GFR-binding peptide
  MOD_RES (6)..(7)..(39)..(41): Xaa is C or S
KIPKAXXVPTELSNITMQIMDENEKVVIGEMSDMVVEGXGXR

SEQ ID NO: 527 - protein, 42 aa, Artificial Sequence
  GFR-binding peptide
  MOD_RES (6)..(7)..(39)..(41): Xaa is C or S
GIPEPXXVPEKMSNITMQIMDENKNVVIGEMSNMTVESXAXR

SEQ ID NO: 528 - protein, 42 aa, Artificial Sequence
  GFR-binding peptide
  MOD_RES (6)..(7)..(39)..(41): Xaa is C or S
SIPKAXXVPTELSNITMQIMDEYDKVVIGEMSEMVVEGXGXR

SEQ ID NO: 529 - protein, 42 aa, Artificial Sequence
  GFR-binding peptide
  MOD_RES (7)..(39)..(41): Xaa is C or S
HVTKPTXAPTKLSNITMQIMDDSSNVIIGEMSNMVVRSXGXH

SEQ ID NO: 530 - protein, 42 aa, Artificial Sequence
  GFR-binding peptide
  MOD_RES (6)..(7)..(39)..(41): Xaa is C or S
YVPKPXXAPTKLSNITMQIMDDSSNVIIGEMSNMVVRSXGXH

SEQ ID NO: 531 - protein, 42 aa, Artificial Sequence
  GFR-binding peptide
  MOD_RES (6)..(7)..(39)..(41): Xaa is C or S
TVPKPXXAPTQLSNITMQIMDDSSNVIIGEMSNMVVRAXGXH

SEQ ID NO: 532 - protein, 42 aa, Artificial Sequence
  GFR-binding peptide
  MOD_RES (6)..(7)..(39)..(41): Xaa is C or S
AVPKAXXAPTKLSNITMQIMDSSNNVIIGEMSNMVVKAXGXH

SEQ ID NO: 533 - protein, 43 aa, Artificial Sequence
  GFR-binding peptide
  MOD_RES (6)..(7)..(40)..(42): Xaa is C or S
KVGKAXXVPTKLSNITMQIMDDMGVPTIGEMSEGMSVAEXGXR

SEQ ID NO: 534 - protein, 42 aa, Artificial Sequence
  GFR-binding peptide
  MOD_RES (6)..(7)..(39)..(41): Xaa is C or S
KASKAXXVPTKLSNITMQIMDKGVVTYIGEMSGMAVSEXGXR

SEQ ID NO: 535 - protein, 42 aa, Artificial Sequence
  GFR-binding peptide
  MOD_RES (6)..(7)..(39)..(41): Xaa is C or S
GSAGPXXTPTKMSNITMQIMNDKQQIIIGEMSGMVVDRXGXS

SEQ ID NO: 536 - protein, 42 aa, Artificial Sequence
  GFR-binding peptide
  MOD_RES (6)..(7)..(39)..(41): Xaa is C or S
AAPASXXVPARLSNITMQIMDAANNVVIGEMSDMVVEAXGXR

SEQ ID NO: 537 - protein, 42 aa, Artificial Sequence
  GFR-binding peptide
  MOD_RES (6)..(7)..(39)..(41): Xaa is C or S
STPPTXXVPTRLSNITMQIMDSANNVVIGEMSDMVVESXGXR

SEQ ID NO: 538 - protein, 42 aa, Artificial Sequence
  GFR-binding peptide
  MOD_RES (6)..(7)..(39)..(41): Xaa is C or S
HVPKPXXAPTKLSNITMQIMDDSSNVIIGEMSNMVVRSXGXH

SEQ ID NO: 539 - protein, 41 aa, Artificial Sequence
  GFR-binding peptide
  MOD_RES (6)..(7)..(38)..(40): Xaa is C or S
RVPSTXXAPVKTSNITMQIMDNGRVLLIGEMSMIVEEXGXL

SEQ ID NO: 540 - protein, 41 aa, Artificial Sequence
  GFR-binding peptide
  MOD_RES (6)..(7)..(38)..(40): Xaa is C or S
ASAAPXXVPQALSNITMQIMVGRKPKVIGEMSMIVRSXKXS

SEQ ID NO: 541 - protein, 41 aa, Artificial Sequence
  GFR-binding peptide
  MOD_RES (6)..(7)..(38)..(40): Xaa is C or S
ASASPXXVSQDLSNITMQIMIGKTPKIIGEMSMIVKSXKXS

SEQ ID NO: 542 - protein, 41 aa, Artificial Sequence
  GFR-binding peptide
  MOD_RES (6)..(7)..(38)..(40): Xaa is C or S
ASASPXXVPQDLSNITMQIMVGRTPKVIGEMSMVVKSXKXS

SEQ ID NO: 543 - protein, 44 aa, Artificial Sequence
  GFR-binding peptide
  MOD_RES (7)..(41)..(43): Xaa is C or S
NDEGLEXVPTGQSNITMQIMRIKPHQGQHIGEMSLEEHSQXEXR

SEQ ID NO: 544 - protein, 45 aa, Artificial Sequence
  GFR-binding peptide
  MOD_RES (5)..(42)..(44): Xaa is C or S
SSVKXQPSRVHHSNITMQIMEYVRKKPKLIGEMSRLEEHLEXAXA

SEQ ID NO: 545 - protein, 45 aa, Artificial Sequence
  GFR-binding peptide
  MOD_RES (5)..(42)..(44): Xaa is C or S
RNVQXRPTQVQLSNITMQIMEIVRKKPIFIGEMSTLEDHLAXKXE

SEQ ID NO: 546 - protein, 44 aa, Artificial Sequence
  GFR-binding peptide
  MOD_RES (7)..(41)..(43): Xaa is C or S
NDEGLEXVPTEESNITMQIMRIKPHQGQHLGEMSFLEHSKXEXR

SEQ ID NO: 547 - protein, 42 aa, Artificial Sequence
  GFR-binding peptide
  MOD_RES (6)..(7)..(39)..(41): Xaa is C or S
KIPKAXXVPTELSNITMQIMDENEKVVLGEMSDMVVEGXGXR

SEQ ID NO: 548 - protein, 42 aa, Artificial Sequence
  GFR-binding peptide
  MOD_RES (6)..(7)..(39)..(41): Xaa is C or S
GIPEPXXVPEKMSNITMQIMDENKNVVLGEMSNMTVESXAXR

SEQ ID NO: 549 - protein, 42 aa, Artificial Sequence
  GFR-binding peptide
  MOD_RES (6)..(7)..(39)..(41): Xaa is C or S
SIPKAXXVPTELSNITMQIMDEYDKVVLGEMSEMVVEGXGXR

SEQ ID NO: 550 - protein, 42 aa, Artificial Sequence
  GFR-binding peptide
  MOD_RES (7)..(39)..(41): Xaa is C or S
HVTKPTXAPTKLSNITMQIMDDSSNVILGEMSNMVVRSXGXH

SEQ ID NO: 551 - protein, 42 aa, Artificial Sequence
  GFR-binding peptide
  MOD_RES (6)..(7)..(39)..(41): Xaa is C or S
YVPKPXXAPTKLSNITMQIMDDSSNVILGEMSNMVVRSXGXH

SEQ ID NO: 552 - protein, 42 aa, Artificial Sequence
  GFR-binding peptide
  MOD_RES (6)..(7)..(39)..(41): Xaa is C or S
TVPKPXXAPTQLSNITMQIMDDSSNVILGEMSNMVVRAXGXH

SEQ ID NO: 553 - protein, 42 aa, Artificial Sequence
  GFR-binding peptide
  MOD_RES (6)..(7)..(39)..(41): Xaa is C or S
AVPKAXXAPTKLSNITMQIMDSSNNVILGEMSNMVVKAXGXH

SEQ ID NO: 554 - protein, 43 aa, Artificial Sequence
  GFR-binding peptide
  MOD_RES (6)..(7)..(40)..(42): Xaa is C or S
KVGKAXXVPTKLSNITMQIMDDMGVPTLGEMSEGMSVAEXGXR

SEQ ID NO: 555 - protein, 42 aa, Artificial Sequence
  GFR-binding peptide
  MOD_RES (6)..(7)..(39)..(41): Xaa is C or S
KASKAXXVPTKLSNITMQIMDKGVVTYLGEMSGMAVSEXGXR

SEQ ID NO: 556 - protein, 42 aa, Artificial Sequence
  GFR-binding peptide
  MOD_RES (6)..(7)..(39)..(41): Xaa is C or S
GSAGPXXTPTKMSNITMQIMNDKQQIILGEMSGMVVDRXGXS

SEQ ID NO: 557 - protein, 42 aa, Artificial Sequence
  GFR-binding peptide
  MOD_RES (6)..(7)..(39)..(41): Xaa is C or S
AAPASXXVPARLSNITMQIMDAANNVVLGEMSDMVVEAXGXR

SEQ ID NO: 558 - protein, 42 aa, Artificial Sequence
  GFR-binding peptide
  MOD_RES (6)..(7)..(39)..(41): Xaa is C or S
STPPTXXVPTRLSNITMQIMDSANNVVLGEMSDMVVESXGXR

SEQ ID NO: 559 - protein, 42 aa, Artificial Sequence
  GFR-binding peptide
  MOD_RES (6)..(7)..(39)..(41): Xaa is C or S
HVPKPXXAPTKLSNITMQIMDDSSNVILGEMSNMVVRSXGXH

SEQ ID NO: 560 - protein, 41 aa, Artificial Sequence
  GFR-binding peptide
  MOD_RES (6)..(7)..(38)..(40): Xaa is C or S
RVPSTXXAPVKTSNITMQIMDNGRVLLLGEMSMIVEEXGXL

SEQ ID NO: 561 - protein, 41 aa, Artificial Sequence
  GFR-binding peptide
  MOD_RES (6)..(7)..(38)..(40): Xaa is C or S
ASAAPXXVPQALSNITMQIMVGRKPKVLGEMSMIVRSXKXS

SEQ ID NO: 562 - protein, 41 aa, Artificial Sequence
  GFR-binding peptide
  MOD_RES (6)..(7)..(38)..(40): Xaa is C or S
ASASPXXVSQDLSNITMQIMIGKTPKILGEMSMIVKSXKXS

SEQ ID NO: 563 - protein, 41 aa, Artificial Sequence
  GFR-binding peptide
  MOD_RES (6)..(7)..(38)..(40): Xaa is C or S
ASASPXXVPQDLSNITMQIMVGRTPKVLGEMSMVVKSXKXS

SEQ ID NO: 564 - protein, 44 aa, Artificial Sequence
  GFR-binding peptide
  MOD_RES (7)..(41)..(43): Xaa is C or S
NDEGLEXVPTEESNITMQIMRIKPHQGQHLGEMSFLQHNKXEXR

SEQ ID NO: 565 - protein, 45 aa, Artificial Sequence
  GFR-binding peptide
  MOD_RES (5)..(42)..(44): Xaa is C or S
SSVKXQPSRVHHSNITMQIMEYVRKKPKLLGEMSRLEEHLEXAXA

SEQ ID NO: 566 - protein, 45 aa, Artificial Sequence
  GFR-binding peptide
  MOD_RES (5)..(42)..(44): Xaa is C or S
RNVQXRPTQVQLSNITMQIMEIVRKKPIFLGEMSTLEDHLAXKXE

SEQ ID NO: 567 - protein, 45 aa, Artificial Sequence
  GFR-binding peptide
  MOD_RES (5)..(42)..(44): Xaa is C or S
RNVQXRPSRVQLRSVKVAKVEIVRKKPIFKEVQVTLEEHLAXKXE

SEQ ID NO: 568 - protein, 42 aa, Artificial Sequence
  GFR-binding peptide
  MOD_RES (6)..(7)..(39)..(41): Xaa is C or S
KIPKAXXVPTELRSVKVAKVDENEKVVKEVQVDMVVEGXGXR

SEQ ID NO: 569 - protein, 42 aa, Artificial Sequence
  GFR-binding peptide
  MOD_RES (6)..(7)..(39)..(41): Xaa is C or S
GIPEPXXVPEKMRSVKVAKVDENKNVVKEVQVNMTVESXAXR

SEQ ID NO: 570 - protein, 42 aa, Artificial Sequence
  GFR-binding peptide
  MOD_RES (6)..(7)..(39)..(41): Xaa is C or S
SIPKAXXVPTELRSVKVAKVDEYDKVVKEVQVEMVVEGXGXR

SEQ ID NO: 571 - protein, 42 aa, Artificial Sequence
  GFR-binding peptide
  MOD_RES (7)..(39)..(41): Xaa is C or S
HVTKPTXAPTKLRSVKVAKVDDSSNVIKEVQVNMVVRSXGXH

SEQ ID NO: 572 - protein, 42 aa, Artificial Sequence
  GFR-binding peptide
  MOD_RES (6)..(7)..(39)..(41): Xaa is C or S
YVPKPXXAPTKLRSVKVAKVDDSSNVIKEVQVNMVVRSXGXH

SEQ ID NO: 573 - protein, 42 aa, Artificial Sequence
  GFR-binding peptide
  MOD_RES (6)..(7)..(39)..(41): Xaa is C or S
TVPKPXXAPTQLRSVKVAKVDDSSNVIKEVQVNMVVRAXGXH

SEQ ID NO: 574 - protein, 42 aa, Artificial Sequence
  GFR-binding peptide
  MOD_RES (6)..(7)..(39)..(41): Xaa is C or S
AVPKAXXAPTKLRSVKVAKVDSSNNVIKEVQVNMVVKAXGXH

SEQ ID NO: 575 - protein, 43 aa, Artificial Sequence
  GFR-binding peptide
  MOD_RES (6)..(7)..(40)..(42): Xaa is C or S
KVGKAXXVPTKLRSVKVAKVDDMGVPTKEVQVEGMSVAEXGXR

SEQ ID NO: 576 - protein, 42 aa, Artificial Sequence
  GFR-binding peptide
  MOD_RES (6)..(7)..(39)..(41): Xaa is C or S
KASKAXXVPTKLRSVKVAKVDKGVVTYKEVQVGMAVSEXGXR

SEQ ID NO: 577 - protein, 42 aa, Artificial Sequence
  GFR-binding peptide
  MOD_RES (6)..(7)..(39)..(41): Xaa is C or S
GSAGPXXTPTKMRSVKVAKVNDKQQIIKEVQVGMVVDRXGXS

SEQ ID NO: 578 - protein, 42 aa, Artificial Sequence
  GFR-binding peptide
  MOD_RES (6)..(7)..(39)..(41): Xaa is C or S
AAPASXXVPARLRSVKVAKVDAANNVVKEVQVDMVVEAXGXR

SEQ ID NO: 579 - protein, 42 aa, Artificial Sequence
  GFR-binding peptide
  MOD_RES (6)..(7)..(39)..(41): Xaa is C or S
STPPTXXVPTRLRSVKVAKVDSANNVVKEVQVDMVVESXGXR

SEQ ID NO: 580 - protein, 42 aa, Artificial Sequence
  GFR-binding peptide
  MOD_RES (6)..(7)..(39)..(41): Xaa is C or S
HVPKPXXAPTKLRSVKVAKVDDSSNVIKEVQVNMVVRSXGXH

SEQ ID NO: 581 - protein, 41 aa, Artificial Sequence
  GFR-binding peptide
  MOD_RES (6)..(7)..(38)..(40): Xaa is C or S
RVPSTXXAPVKTRSVKVAKVDNGRVLLKEVQVMIVEEXGXL

SEQ ID NO: 582 - protein, 41 aa, Artificial Sequence
  GFR-binding peptide
  MOD_RES (6)..(7)..(38)..(40): Xaa is C or S
ASAAPXXVPQALRSVKVAKVVGRKPKVKEVQVMIVRSXKXS

SEQ ID NO: 583 - protein, 41 aa, Artificial Sequence
  GFR-binding peptide
  MOD_RES (6)..(7)..(38)..(40): Xaa is C or S
ASASPXXVSQDLRSVKVAKVIGKTPKIKEVQVMIVKSXKXS

SEQ ID NO: 584 - protein, 41 aa, Artificial Sequence
  GFR-binding peptide
  MOD_RES (6)..(7)..(38)..(40): Xaa is C or S
ASASPXXVPQDLRSVKVAKVVGRTPKVKEVQVMVVKSXKXS

SEQ ID NO: 585 - protein, 44 aa, Artificial Sequence
  GFR-binding peptide
  MOD_RES (7)..(41)..(43): Xaa is C or S
NDEGLEXVPTEERSVKVAKVRIKPHQGQHKEVQVFLQHNKXEXR

SEQ ID NO: 586 - protein, 44 aa, Artificial Sequence
  GFR-binding peptide
  MOD_RES (7)..(41)..(43): Xaa is C or S
NDEGLEXVPTGQRSVKVAKVRIKPHQGQHKEVQVLEEHSQXEXR

SEQ ID NO: 587 - protein, 45 aa, Artificial Sequence
  GFR-binding peptide
  MOD_RES (5)..(42)..(44): Xaa is C or S
RNVQXRPTQVQLRSVKVAKVEIVRKKPIFKEVQVTLEDHLAXKXE

SEQ ID NO: 588 - protein, 45 aa, Artificial Sequence
  GFR-binding peptide
  MOD_RES (5)..(42)..(44): Xaa is C or S
SSVKXQPTQVHHRPVQVRKIEYVRKKPKLKKATVRLEDHLEXAXA

SEQ ID NO: 589 - protein, 42 aa, Artificial Sequence
  GFR-binding peptide
  MOD_RES (6)..(7)..(39)..(41): Xaa is C or S
KIPKAXXVPTELRPVQVRKIDENEKVVKKATVDMVVEGXGXR

SEQ ID NO: 590 - protein, 42 aa, Artificial Sequence
  GFR-binding peptide
  MOD_RES (6)..(7)..(39)..(41): Xaa is C or S
GIPEPXXVPEKMRPVQVRKIDENKNVVKKATVNMTVESXAXR

SEQ ID NO: 591 - protein, 42 aa, Artificial Sequence
  GFR-binding peptide
  MOD_RES (6)..(7)..(39)..(41): Xaa is C or S
SIPKAXXVPTELRPVQVRKIDEYDKVVKKATVEMVVEGXGXR

SEQ ID NO: 592 - protein, 42 aa, Artificial Sequence
  GFR-binding peptide
  MOD_RES (7)..(39)..(41): Xaa is C or S
HVTKPTXAPTKLRPVQVRKIDDSSNVIKKATVNMVVRSXGXH

SEQ ID NO: 593 - protein, 42 aa, Artificial Sequence
  GFR-binding peptide
  MOD_RES (6)..(7)..(39)..(41): Xaa is C or S
YVPKPXXAPTKLRPVQVRKIDDSSNVIKKATVNMVVRSXGXH

SEQ ID NO: 594 - protein, 42 aa, Artificial Sequence
  GFR-binding peptide
  MOD_RES (6)..(7)..(39)..(41): Xaa is C or S
TVPKPXXAPTQLRPVQVRKIDDSSNVIKKATVNMVVRAXGXH

SEQ ID NO: 595 - protein, 42 aa, Artificial Sequence
  GFR-binding peptide
  MOD_RES (6)..(7)..(39)..(41): Xaa is C or S
AVPKAXXAPTKLRPVQVRKIDSSNNVIKKATVNMVVKAXGXH

SEQ ID NO: 596 - protein, 43 aa, Artificial Sequence
  GFR-binding peptide
  MOD_RES (6)..(7)..(40)..(42): Xaa is C or S
KVGKAXXVPTKLRPVQVRKIDDMGVPTKKATVEGMSVAEXGXR

SEQ ID NO: 597 - protein, 42 aa, Artificial Sequence
  GFR-binding peptide
  MOD_RES (6)..(7)..(39)..(41): Xaa is C or S
KASKAXXVPTKLRPVQVRKIDKGVVTYKKATVGMAVSEXGXR

SEQ ID NO: 598 - protein, 42 aa, Artificial Sequence
  GFR-binding peptide
  MOD_RES (6)..(7)..(39)..(41): Xaa is C or S
GSAGPXXTPTKMRPVQVRKINDKQQIIKKATVGMVVDRXGXS

SEQ ID NO: 599 - protein, 42 aa, Artificial Sequence
  GFR-binding peptide
  MOD_RES (6)..(7)..(39)..(41): Xaa is C or S
AAPASXXVPARLRPVQVRKIDAANNVVKKATVDMVVEAXGXR

SEQ ID NO: 600 - protein, 42 aa, Artificial Sequence
  GFR-binding peptide
  MOD_RES (6)..(7)..(39)..(41): Xaa is C or S
STPPTXXVPTRLRPVQVRKIDSANNVVKKATVDMVVESXGXR

SEQ ID NO: 601 - protein, 42 aa, Artificial Sequence
  GFR-binding peptide
  MOD_RES (6)..(7)..(39)..(41): Xaa is C or S
HVPKPXXAPTKLRPVQVRKIDDSSNVIKKATVNMVVRSXGXH

SEQ ID NO: 602 - protein, 41 aa, Artificial Sequence
  GFR-binding peptide
  MOD_RES (6)..(7)..(38)..(40): Xaa is C or S
RVPSTXXAPVKTRPVQVRKIDNGRVLLKKATVMIVEEXGXL

SEQ ID NO: 603 - protein, 41 aa, Artificial Sequence
  GFR-binding peptide
  MOD_RES (6)..(7)..(38)..(40): Xaa is C or S
ASAAPXXVPQALRPVQVRKIVGRKPKVKKATVMIVRSXKXS

SEQ ID NO: 604 - protein, 41 aa, Artificial Sequence
  GFR-binding peptide
  MOD_RES (6)..(7)..(38)..(40): Xaa is C or S
ASASPXXVSQDLRPVQVRKIIGKTPKIKKATVMIVKSXKXS

SEQ ID NO: 605 - protein, 41 aa, Artificial Sequence
  GFR-binding peptide
  MOD_RES (6)..(7)..(38)..(40): Xaa is C or S
ASASPXXVPQDLRPVQVRKIVGRTPKVKKATVMVVKSXKXS

SEQ ID NO: 606 - protein, 44 aa, Artificial Sequence
  GFR-binding peptide
  MOD_RES (7)..(41)..(43): Xaa is C or S
NDEGLEXVPTEERPVQVRKIRIKPHQGQHKKATVFLQHNKXEXR

SEQ ID NO: 607 - protein, 44 aa, Artificial Sequence
  GFR-binding peptide
  MOD_RES (7)..(41)..(43): Xaa is C or S
NDEGLEXVPTGQRPVQVRKIRIKPHQGQHKKATVLEEHSQXEXR

SEQ ID NO: 608 - protein, 45 aa, Artificial Sequence
  GFR-binding peptide
  MOD_RES (5)..(42)..(44): Xaa is C or S
SSVKXQPSRVHHRPVQVRKIEYVRKKPKLKKATVRLEEHLEXAXA

SEQ ID NO: 609 - protein, 30 aa, Artificial Sequence
  GFR-binding peptide
VPTKMSAISMLYLDENKNVVLKNYQNMVVE

SEQ ID NO: 610 - protein, 30 aa, Artificial Sequence
  GFR-binding peptide
VPTKLSAISMLYLDDSSNVILKNYQNMVVE

SEQ ID NO: 611 - protein, 30 aa, Artificial Sequence
  GFR-binding peptide
VPTQLSAISMLYLDDSSNVILKNYQNMVVE

SEQ ID NO: 612 - protein, 30 aa, Artificial Sequence
  GFR-binding peptide
VPTKLSAISMLYLDSSNNVILKNYQNMVVE

SEQ ID NO: 613 - protein, 32 aa, Artificial Sequence
  GFR-binding peptide
VPTKLSAISMLYLDDMGVPTLKNYQEGMSVVE

SEQ ID NO: 614 - protein, 30 aa, Artificial Sequence
  GFR-binding peptide
VPTKLSAISMLYLDKGVVTYLKNYQGMVVE

SEQ ID NO: 615 - protein, 30 aa, Artificial Sequence
  GFR-binding peptide
VPTKMSAISMLYLNDKQQIILKNYQGMVVE

SEQ ID NO: 616 - protein, 30 aa, Artificial Sequence
  GFR-binding peptide
VPTRLSAISMLYLDAANNVVLKNYQDMVVE

SEQ ID NO: 617 - protein, 30 aa, Artificial Sequence
  GFR-binding peptide
VPTRLSAISMLYLDSANNVVLKNYQDMVVE

SEQ ID NO: 618 - protein, 30 aa, Artificial Sequence
  GFR-binding peptide
VPTKTSAISMLYLDNGRVLLLKNYQMIVVE

SEQ ID NO: 619 - protein, 30 aa, Artificial Sequence
  GFR-binding peptide
VPTALSAISMLYLVGRKPKVLKNYQMIVVE

SEQ ID NO: 620 - protein, 30 aa, Artificial Sequence
  GFR-binding peptide
VPTDLSAISMLYLIGKTPKILKNYQMIVVE

SEQ ID NO: 621 - protein, 30 aa, Artificial Sequence
  GFR-binding peptide
VPTDLSAISMLYLVGRTPKVLKNYQMVVVE

SEQ ID NO: 622 - protein, 30 aa, Artificial Sequence
  GFR-binding peptide
VPEKMSAISMLYLDENKNVVLKNYQNMTVE

SEQ ID NO: 623 - protein, 30 aa, Artificial Sequence
  GFR-binding peptide
APTKLSAISMLYLDDSSNVILKNYQNMVVR

SEQ ID NO: 624 - protein, 30 aa, Artificial Sequence
  GFR-binding peptide
APTQLSAISMLYLDDSSNVILKNYQNMVVR

SEQ ID NO: 625 - protein, 30 aa, Artificial Sequence
  GFR-binding peptide
APTKLSAISMLYLDSSNNVILKNYQNMVVK

SEQ ID NO: 626 - protein, 32 aa, Artificial Sequence
  GFR-binding peptide
VPTKLSAISMLYLDDMGVPTLKNYQEGMSVAE

SEQ ID NO: 627 - protein, 30 aa, Artificial Sequence
  GFR-binding peptide
VPTKLSAISMLYLDKGVVTYLKNYQGMAVS

SEQ ID NO: 628 - protein, 30 aa, Artificial Sequence
  GFR-binding peptide
TPTKMSAISMLYLNDKQQIILKNYQGMVVD

SEQ ID NO: 629 - protein, 30 aa, Artificial Sequence
  GFR-binding peptide
VPARLSAISMLYLDAANNVVLKNYQDMVVE

SEQ ID NO: 630 - protein, 30 aa, Artificial Sequence
  GFR-binding peptide
APVKTSAISMLYLDNGRVLLLKNYQMIVEE

SEQ ID NO: 631 - protein, 30 aa, Artificial Sequence
  GFR-binding peptide
VPQALSAISMLYLVGRKPKVLKNYQMIVRS

SEQ ID NO: 632 - protein, 30 aa, Artificial Sequence
  GFR-binding peptide
VSQDLSAISMLYLIGKTPKILKNYQMIVKS

SEQ ID NO: 633 - protein, 30 aa, Artificial Sequence
  GFR-binding peptide
VPQDLSAISMLYLVGRTPKVLKNYQMVVKS

SEQ ID NO: 634 - protein, 32 aa, Artificial Sequence
  GFR-binding peptide
VPTEESAISMLYLRIKPHQGQHLKNYQFLQHN

SEQ ID NO: 635 - protein, 32 aa, Artificial Sequence
  GFR-binding peptide
VPTGQSAISMLYLRIKPHQGQHLKNYQLEEHS

SEQ ID NO: 636 - protein, 32 aa, Artificial Sequence
  GFR-binding peptide
SRVHHSAISMLYLEYVRKKPKLLKNYQRLEEH

SEQ ID NO: 637 - protein, 32 aa, Artificial Sequence
  GFR-binding peptide
TQVQLSAISMLYLEIVRKKPIFLKNYQTLEDH

SEQ ID NO: 638 - protein, 30 aa, Artificial Sequence
  GFR-binding peptide
VPEELSSLSILFFDENEKVVLKVYPDMTVE

SEQ ID NO: 639 - protein, 30 aa, Artificial Sequence
  GFR-binding peptide
VPEELSSLSILFFDEYDKVVLKVYPEMTVE

SEQ ID NO: 640 - protein, 30 aa, Artificial Sequence
  GFR-binding peptide
VPEKLSSLSILFFDDSSNVILKVYPNMTVE

SEQ ID NO: 641 - protein, 30 aa, Artificial Sequence
  GFR-binding peptide
VPEQLSSLSILFFDDSSNVILKVYPNMTVE

SEQ ID NO: 642 - protein, 30 aa, Artificial Sequence
  GFR-binding peptide
VPEKLSSLSILFFDSSNNVILKVYPNMTVE

SEQ ID NO: 643 - protein, 32 aa, Artificial Sequence
  GFR-binding peptide
VPEKLSSLSILFFDDMGVPTLKVYPEGMSTVE

SEQ ID NO: 644 - protein, 30 aa, Artificial Sequence
  GFR-binding peptide
VPEKLSSLSILFFDKGVVTYLKVYPGMTVE

SEQ ID NO: 645 - protein, 30 aa, Artificial Sequence
  GFR-binding peptide
VPEKMSSLSILFFNDKQQIILKVYPGMTVE

SEQ ID NO: 646 - protein, 30 aa, Artificial Sequence
  GFR-binding peptide
VPERLSSLSILFFDAANNVVLKVYPDMTVE

SEQ ID NO: 647 - protein, 30 aa, Artificial Sequence
  GFR-binding peptide
VPERLSSLSILFFDSANNVVLKVYPDMTVE

SEQ ID NO: 648 - protein, 30 aa, Artificial Sequence
  GFR-binding peptide
VPEKTSSLSILFFDNGRVLLLKVYPMITVE

SEQ ID NO: 649 - protein, 30 aa, Artificial Sequence
  GFR-binding peptide
VPEALSSLSILFFVGRKPKVLKVYPMITVE

SEQ ID NO: 650 - protein, 30 aa, Artificial Sequence
  GFR-binding peptide
VPEDLSSLSILFFIGKTPKILKVYPMITVE

SEQ ID NO: 651 - protein, 30 aa, Artificial Sequence
  GFR-binding peptide
VPEDLSSLSILFFVGRTPKVLKVYPMVTVE

SEQ ID NO: 652 - protein, 30 aa, Artificial Sequence
  GFR-binding peptide
VPTELSSLSILFFDENEKVVLKVYPDMVVE

SEQ ID NO: 653 - protein, 30 aa, Artificial Sequence
  GFR-binding peptide
VPTELSSLSILFFDEYDKVVLKVYPEMVVE

SEQ ID NO: 654 - protein, 30 aa, Artificial Sequence
  GFR-binding peptide
APTKLSSLSILFFDDSSNVILKVYPNMVVR

SEQ ID NO: 655 - protein, 30 aa, Artificial Sequence
  GFR-binding peptide
APTQLSSLSILFFDDSSNVILKVYPNMVVR

SEQ ID NO: 656 - protein, 30 aa, Artificial Sequence
  GFR-binding peptide
APTKLSSLSILFFDSSNNVILKVYPNMVVK

SEQ ID NO: 657 - protein, 32 aa, Artificial Sequence
  GFR-binding peptide
VPTKLSSLSILFFDDMGVPTLKVYPEGMSVAE

SEQ ID NO: 658 - protein, 30 aa, Artificial Sequence
  GFR-binding peptide
VPTKLSSLSILFFDKGVVTYLKVYPGMAVS

SEQ ID NO: 659 - protein, 30 aa, Artificial Sequence
  GFR-binding peptide
TPTKMSSLSILFFNDKQQIILKVYPGMVVD

SEQ ID NO: 660 - protein, 30 aa, Artificial Sequence
  GFR-binding peptide
VPARLSSLSILFFDAANNVVLKVYPDMVVE

SEQ ID NO: 661 - protein, 30 aa, Artificial Sequence
  GFR-binding peptide
VPTRLSSLSILFFDSANNVVLKVYPDMVVE

SEQ ID NO: 662 - protein, 30 aa, Artificial Sequence
  GFR-binding peptide
APVKTSSLSILFFDNGRVLLLKVYPMIVEE

SEQ ID NO: 663 - protein, 30 aa, Artificial Sequence
  GFR-binding peptide
VPQALSSLSILFFVGRKPKVLKVYPMIVRS

SEQ ID NO: 664 - protein, 30 aa, Artificial Sequence
  GFR-binding peptide
VSQDLSSLSILFFIGKTPKILKVYPMIVKS

SEQ ID NO: 665 - protein, 30 aa, Artificial Sequence
  GFR-binding peptide
VPQDLSSLSILFFVGRTPKVLKVYPMVVKS

SEQ ID NO: 666 - protein, 32 aa, Artificial Sequence
  GFR-binding peptide
VPTEESSLSILFFRIKPHQGQHLKVYPFLQHN

SEQ ID NO: 667 - protein, 32 aa, Artificial Sequence
  GFR-binding peptide
VPTGQSSLSILFFRIKPHQGQHLKVYPLEEHS

SEQ ID NO: 668 - protein, 32 aa, Artificial Sequence
  GFR-binding peptide
SRVHHSSLSILFFEYVRKKPKLLKVYPRLEEH

SEQ ID NO: 669 - protein, 32 aa, Artificial Sequence
  GFR-binding peptide
TQVQLSSLSILFFEIVRKKPIFLKVYPTLEDH

SEQ ID NO: 670 - protein, 30 aa, Artificial Sequence
  GFR-binding peptide
APTELNAISVLYFDENEKVVLKKYRDMVVR

SEQ ID NO: 671 - protein, 30 aa, Artificial Sequence
  GFR-binding peptide
APTKMNAISVLYFDENKNVVLKKYRNMVVR

SEQ ID NO: 672 - protein, 30 aa, Artificial Sequence
  GFR-binding peptide
APTELNAISVLYFDEYDKVVLKKYREMVVR

SEQ ID NO: 673 - protein, 30 aa, Artificial Sequence
  GFR-binding peptide
APTKLNAISVLYFDSSNNVILKKYRNMVVR

SEQ ID NO: 674 - protein, 32 aa, Artificial Sequence
  GFR-binding peptide
APTKLNAISVLYFDDMGVPTLKKYREGMSVVR

SEQ ID NO: 675 - protein, 30 aa, Artificial Sequence
  GFR-binding peptide
APTKLNAISVLYFDKGVVTYLKKYRGMVVR

SEQ ID NO: 676 - protein, 30 aa, Artificial Sequence
  GFR-binding peptide
APTKMNAISVLYFNDKQQIILKKYRGMVVR

SEQ ID NO: 677 - protein, 30 aa, Artificial Sequence
  GFR-binding peptide
APTRLNAISVLYFDAANNVVLKKYRDMVVR

SEQ ID NO: 678 - protein, 30 aa, Artificial Sequence
  GFR-binding peptide
APTRLNAISVLYFDSANNVVLKKYRDMVVR

SEQ ID NO: 679 - protein, 30 aa, Artificial Sequence
  GFR-binding peptide
APTKTNAISVLYFDNGRVLLLKKYRMIVVR

SEQ ID NO: 680 - protein, 30 aa, Artificial Sequence
  GFR-binding peptide
APTALNAISVLYFVGRKPKVLKKYRMIVVR

SEQ ID NO: 681 - protein, 30 aa, Artificial Sequence
  GFR-binding peptide
APTDLNAISVLYFIGKTPKILKKYRMIVVR

SEQ ID NO: 682 - protein, 30 aa, Artificial Sequence
  GFR-binding peptide
APTDLNAISVLYFVGRTPKVLKKYRMVVVR

SEQ ID NO: 683 - protein, 30 aa, Artificial Sequence
  GFR-binding peptide
VPTELNAISVLYFDENEKVVLKKYRDMVVE

SEQ ID NO: 684 - protein, 30 aa, Artificial Sequence
  GFR-binding peptide
VPEKMNAISVLYFDENKNVVLKKYRNMTVE

SEQ ID NO: 685 - protein, 30 aa, Artificial Sequence
  GFR-binding peptide
VPTELNAISVLYFDEYDKVVLKKYREMVVE

SEQ ID NO: 686 - protein, 30 aa, Artificial Sequence
  GFR-binding peptide
APTKLNAISVLYFDSSNNVILKKYRNMVVK

SEQ ID NO: 687 - protein, 32 aa, Artificial Sequence
  GFR-binding peptide
VPTKLNAISVLYFDDMGVPTLKKYREGMSVAE

SEQ ID NO: 688 - protein, 30 aa, Artificial Sequence
  GFR-binding peptide
VPTKLNAISVLYFDKGVVTYLKKYRGMAVS

SEQ ID NO: 689 - protein, 30 aa, Artificial Sequence
  GFR-binding peptide
TPTKMNAISVLYFNDKQQIILKKYRGMVVD

SEQ ID NO: 690 - protein, 30 aa, Artificial Sequence
  GFR-binding peptide
VPARLNAISVLYFDAANNVVLKKYRDMVVE

SEQ ID NO: 691 - protein, 30 aa, Artificial Sequence
  GFR-binding peptide
VPTRLNAISVLYFDSANNVVLKKYRDMVVE

SEQ ID NO: 692 - protein, 30 aa, Artificial Sequence
  GFR-binding peptide
APVKTNAISVLYFDNGRVLLLKKYRMIVEE

SEQ ID NO: 693 - protein, 30 aa, Artificial Sequence
  GFR-binding peptide
VPQALNAISVLYFVGRKPKVLKKYRMIVRS

SEQ ID NO: 694 - protein, 30 aa, Artificial Sequence
  GFR-binding peptide
VSQDLNAISVLYFIGKTPKILKKYRMIVKS

SEQ ID NO: 695 - protein, 30 aa, Artificial Sequence
  GFR-binding peptide
VPQDLNAISVLYFVGRTPKVLKKYRMVVKS

SEQ ID NO: 696 - protein, 32 aa, Artificial Sequence
  GFR-binding peptide
VPTEENAISVLYFRIKPHQGQHLKKYRFLQHN

SEQ ID NO: 697 - protein, 32 aa, Artificial Sequence
  GFR-binding peptide
VPTGQNAISVLYFRIKPHQGQHLKKYRLEEHS

SEQ ID NO: 698 - protein, 32 aa, Artificial Sequence
  GFR-binding peptide
SRVHHNAISVLYFEYVRKKPKLLKKYRRLEEH

SEQ ID NO: 699 - protein, 32 aa, Artificial Sequence
  GFR-binding peptide
TQVQLNAISVLYFEIVRKKPIFLKKYRTLEDH

SEQ ID NO: 700 - protein, 30 aa, Artificial Sequence
  GFR-binding peptide
APTELSATSVLYYDENEKVVLRKHRDMVVK

SEQ ID NO: 701 - protein, 30 aa, Artificial Sequence
  GFR-binding peptide
APTKMSATSVLYYDENKNVVLRKHRNMVVK

SEQ ID NO: 702 - protein, 30 aa, Artificial Sequence
  GFR-binding peptide
APTELSATSVLYYDEYDKVVLRKHREMVVK

SEQ ID NO: 703 - protein, 30 aa, Artificial Sequence
  GFR-binding peptide
APTKLSATSVLYYDDSSNVILRKHRNMVVK

SEQ ID NO: 704 - protein, 30 aa, Artificial Sequence
  GFR-binding peptide
APTQLSATSVLYYDDSSNVILRKHRNMVVK

SEQ ID NO: 705 - protein, 32 aa, Artificial Sequence
  GFR-binding peptide
APTKLSATSVLYYDDMGVPTLRKHREGMSVVK

SEQ ID NO: 706 - protein, 30 aa, Artificial Sequence
  GFR-binding peptide
APTKLSATSVLYYDKGVVTYLRKHRGMVVK

SEQ ID NO: 707 - protein, 30 aa, Artificial Sequence
  GFR-binding peptide
APTKMSATSVLYYNDKQQIILRKHRGMVVK

SEQ ID NO: 708 - protein, 30 aa, Artificial Sequence
  GFR-binding peptide
APTRLSATSVLYYDAANNVVLRKHRDMVVK

SEQ ID NO: 709 - protein, 30 aa, Artificial Sequence
  GFR-binding peptide
APTRLSATSVLYYDSANNVVLRKHRDMVVK

SEQ ID NO: 710 - protein, 30 aa, Artificial Sequence
  GFR-binding peptide
APTKTSATSVLYYDNGRVLLLRKHRMIVVK

SEQ ID NO: 711 - protein, 30 aa, Artificial Sequence
  GFR-binding peptide
APTALSATSVLYYVGRKPKVLRKHRMIVVK

SEQ ID NO: 712 - protein, 30 aa, Artificial Sequence
  GFR-binding peptide
APTDLSATSVLYYIGKTPKILRKHRMIVVK

SEQ ID NO: 713 - protein, 30 aa, Artificial Sequence
  GFR-binding peptide
APTDLSATSVLYYVGRTPKVLRKHRMVVVK

SEQ ID NO: 714 - protein, 30 aa, Artificial Sequence
  GFR-binding peptide
VPTELSATSVLYYDENEKVVLRKHRDMVVE

SEQ ID NO: 715 - protein, 30 aa, Artificial Sequence
  GFR-binding peptide
VPEKMSATSVLYYDENKNVVLRKHRNMTVE

SEQ ID NO: 716 - protein, 30 aa, Artificial Sequence
  GFR-binding peptide
VPTELSATSVLYYDEYDKVVLRKHREMVVE

SEQ ID NO: 717 - protein, 30 aa, Artificial Sequence
  GFR-binding peptide
APTKLSATSVLYYDDSSNVILRKHRNMVVR

SEQ ID NO: 718 - protein, 30 aa, Artificial Sequence
  GFR-binding peptide
APTQLSATSVLYYDDSSNVILRKHRNMVVR

SEQ ID NO: 719 - protein, 32 aa, Artificial Sequence
  GFR-binding peptide
VPTKLSATSVLYYDDMGVPTLRKHREGMSVAE

SEQ ID NO: 720 - protein, 30 aa, Artificial Sequence
  GFR-binding peptide
VPTKLSATSVLYYDKGVVTYLRKHRGMAVS

SEQ ID NO: 721 - protein, 30 aa, Artificial Sequence
  GFR-binding peptide
TPTKMSATSVLYYNDKQQIILRKHRGMVVD

SEQ ID NO: 722 - protein, 30 aa, Artificial Sequence
  GFR-binding peptide
VPARLSATSVLYYDAANNVVLRKHRDMVVE

SEQ ID NO: 723 - protein, 30 aa, Artificial Sequence
  GFR-binding peptide
VPTRLSATSVLYYDSANNVVLRKHRDMVVE

SEQ ID NO: 724 - protein, 30 aa, Artificial Sequence
  GFR-binding peptide
APVKTSATSVLYYDNGRVLLLRKHRMIVEE

SEQ ID NO: 725 - protein, 30 aa, Artificial Sequence
  GFR-binding peptide
VPQALSATSVLYYVGRKPKVLRKHRMIVRS

SEQ ID NO: 726 - protein, 30 aa, Artificial Sequence
  GFR-binding peptide
VSQDLSATSVLYYIGKTPKILRKHRMIVKS

SEQ ID NO: 727 - protein, 30 aa, Artificial Sequence
  GFR-binding peptide
VPQDLSATSVLYYVGRTPKVLRKHRMVVKS

SEQ ID NO: 728 - protein, 32 aa, Artificial Sequence
  GFR-binding peptide
VPTEESATSVLYYRIKPHQGQHLRKHRFLQHN

SEQ ID NO: 729 - protein, 32 aa, Artificial Sequence
  GFR-binding peptide
VPTGQSATSVLYYRIKPHQGQHLRKHRLEEHS

SEQ ID NO: 730 - protein, 32 aa, Artificial Sequence
  GFR-binding peptide
SRVHHSATSVLYYEYVRKKPKLLRKHRRLEEH

SEQ ID NO: 731 - protein, 32 aa, Artificial Sequence
  GFR-binding peptide
TQVQLSATSVLYYEIVRKKPIFLRKHRTLEDH

SEQ ID NO: 732 - protein, 30 aa, Artificial Sequence
  GFR-binding peptide
VPTELSPISVLYKDENEKVVLKYHYDMVAE

SEQ ID NO: 733 - protein, 30 aa, Artificial Sequence
  GFR-binding peptide
VPTKMSPISVLYKDENKNVVLKYHYNMVAE

SEQ ID NO: 734 - protein, 30 aa, Artificial Sequence
  GFR-binding peptide
VPTELSPISVLYKDEYDKVVLKYHYEMVAE

SEQ ID NO: 735 - protein, 30 aa, Artificial Sequence
  GFR-binding peptide
VPTKLSPISVLYKDDSSNVILKYHYNMVAE

SEQ ID NO: 736 - protein, 30 aa, Artificial Sequence
  GFR-binding peptide
VPTQLSPISVLYKDDSSNVILKYHYNMVAE

SEQ ID NO: 737 - protein, 30 aa, Artificial Sequence
  GFR-binding peptide
VPTKLSPISVLYKDSSNNVILKYHYNMVAE

SEQ ID NO: 738 - protein, 30 aa, Artificial Sequence
  GFR-binding peptide
VPTKLSPISVLYKDKGVVTYLKYHYGMVAE

SEQ ID NO: 739 - protein, 30 aa, Artificial Sequence
  GFR-binding peptide
VPTKMSPISVLYKNDKQQIILKYHYGMVAE

SEQ ID NO: 740 - protein, 30 aa, Artificial Sequence
  GFR-binding peptide
VPTRLSPISVLYKDAANNVVLKYHYDMVAE

SEQ ID NO: 741 - protein, 30 aa, Artificial Sequence
  GFR-binding peptide
VPTRLSPISVLYKDSANNVVLKYHYDMVAE

SEQ ID NO: 742 - protein, 30 aa, Artificial Sequence
  GFR-binding peptide
VPTKTSPISVLYKDNGRVLLLKYHYMIVAE

SEQ ID NO: 743 - protein, 30 aa, Artificial Sequence
  GFR-binding peptide
VPTALSPISVLYKVGRKPKVLKYHYMIVAE

SEQ ID NO: 744 - protein, 30 aa, Artificial Sequence
  GFR-binding peptide
VPTDLSPISVLYKIGKTPKILKYHYMIVAE

SEQ ID NO: 745 - protein, 30 aa, Artificial Sequence
  GFR-binding peptide
VPTDLSPISVLYKVGRTPKVLKYHYMVVAE

SEQ ID NO: 746 - protein, 30 aa, Artificial Sequence
  GFR-binding peptide
VPTELSPISVLYKDENEKVVLKYHYDMVVE

SEQ ID NO: 747 - protein, 30 aa, Artificial Sequence
  GFR-binding peptide
VPEKMSPISVLYKDENKNVVLKYHYNMTVE

SEQ ID NO: 748 - protein, 30 aa, Artificial Sequence
  GFR-binding peptide
VPTELSPISVLYKDEYDKVVLKYHYEMVVE

SEQ ID NO: 749 - protein, 30 aa, Artificial Sequence
  GFR-binding peptide
APTKLSPISVLYKDDSSNVILKYHYNMVVR

SEQ ID NO: 750 - protein, 30 aa, Artificial Sequence
  GFR-binding peptide
APTQLSPISVLYKDDSSNVILKYHYNMVVR

SEQ ID NO: 751 - protein, 30 aa, Artificial Sequence
  GFR-binding peptide
APTKLSPISVLYKDSSNNVILKYHYNMVVK

SEQ ID NO: 752 - protein, 30 aa, Artificial Sequence
  GFR-binding peptide
VPTKLSPISVLYKDKGVVTYLKYHYGMAVS

SEQ ID NO: 753 - protein, 30 aa, Artificial Sequence
  GFR-binding peptide
TPTKMSPISVLYKNDKQQIILKYHYGMVVD

SEQ ID NO: 754 - protein, 30 aa, Artificial Sequence
  GFR-binding peptide
VPARLSPISVLYKDAANNVVLKYHYDMVVE

SEQ ID NO: 755 - protein, 30 aa, Artificial Sequence
  GFR-binding peptide
VPTRLSPISVLYKDSANNVVLKYHYDMVVE

SEQ ID NO: 756 - protein, 30 aa, Artificial Sequence
  GFR-binding peptide
APVKTSPISVLYKDNGRVLLLKYHYMIVEE

SEQ ID NO: 757 - protein, 30 aa, Artificial Sequence
  GFR-binding peptide
VPQALSPISVLYKVGRKPKVLKYHYMIVRS

SEQ ID NO: 758 - protein, 30 aa, Artificial Sequence
  GFR-binding peptide
VSQDLSPISVLYKIGKTPKILKYHYMIVKS

SEQ ID NO: 759 - protein, 30 aa, Artificial Sequence
  GFR-binding peptide
VPQDLSPISVLYKVGRTPKVLKYHYMVVKS

SEQ ID NO: 760 - protein, 32 aa, Artificial Sequence
  GFR-binding peptide
VPTEESPISVLYKRIKPHQGQHLKYHYFLQHN

SEQ ID NO: 761 - protein, 32 aa, Artificial Sequence
  GFR-binding peptide
VPTGQSPISVLYKRIKPHQGQHLKYHYLEEHS

SEQ ID NO: 762 - protein, 32 aa, Artificial Sequence
  GFR-binding peptide
SRVHHSPISVLYKEYVRKKPKLLKYHYRLEEH

SEQ ID NO: 763 - protein, 32 aa, Artificial Sequence
  GFR-binding peptide
TQVQLSPISVLYKEIVRKKPIFLKYHYTLEDH

SEQ ID NO: 764 - protein, 30 aa, Artificial Sequence
  GFR-binding peptide
VPTELEPISILYLDENEKVVKFKYEDMAVS

SEQ ID NO: 765 - protein, 30 aa, Artificial Sequence
  GFR-binding peptide
VPTKMEPISILYLDENKNVVKFKYENMAVS

SEQ ID NO: 766 - protein, 30 aa, Artificial Sequence
  GFR-binding peptide
VPTELEPISILYLDEYDKVVKFKYEEMAVS

SEQ ID NO: 767 - protein, 30 aa, Artificial Sequence
  GFR-binding peptide
VPTKLEPISILYLDDSSNVIKFKYENMAVS

SEQ ID NO: 768 - protein, 30 aa, Artificial Sequence
  GFR-binding peptide
VPTQLEPISILYLDDSSNVIKFKYENMAVS

SEQ ID NO: 769 - protein, 30 aa, Artificial Sequence
  GFR-binding peptide
VPTKLEPISILYLDSSNNVIKFKYENMAVS

SEQ ID NO: 770 - protein, 32 aa, Artificial Sequence
  GFR-binding peptide
VPTKLEPISILYLDDMGVPTKFKYEEGMSAVS

SEQ ID NO: 771 - protein, 30 aa, Artificial Sequence
  GFR-binding peptide
VPTKMEPISILYLNDKQQIIKFKYEGMAVS

SEQ ID NO: 772 - protein, 30 aa, Artificial Sequence
  GFR-binding peptide
VPTRLEPISILYLDAANNVVKFKYEDMAVS

SEQ ID NO: 773 - protein, 30 aa, Artificial Sequence
  GFR-binding peptide
VPTRLEPISILYLDSANNVVKFKYEDMAVS

SEQ ID NO: 774 - protein, 30 aa, Artificial Sequence
  GFR-binding peptide
VPTKTEPISILYLDNGRVLLKFKYEMIAVS

SEQ ID NO: 775 - protein, 30 aa, Artificial Sequence
  GFR-binding peptide
VPTALEPISILYLVGRKPKVKFKYEMIAVS

SEQ ID NO: 776 - protein, 30 aa, Artificial Sequence
  GFR-binding peptide
VPTDLEPISILYLIGKTPKIKFKYEMIAVS

SEQ ID NO: 777 - protein, 30 aa, Artificial Sequence
  GFR-binding peptide
VPTDLEPISILYLVGRTPKVKFKYEMVAVS

SEQ ID NO: 778 - protein, 30 aa, Artificial Sequence
  GFR-binding peptide
VPTELEPISILYLDENEKVVKFKYEDMVVE

SEQ ID NO: 779 - protein, 30 aa, Artificial Sequence
  GFR-binding peptide
VPEKMEPISILYLDENKNVVKFKYENMTVE

SEQ ID NO: 780 - protein, 30 aa, Artificial Sequence
  GFR-binding peptide
VPTELEPISILYLDEYDKVVKFKYEEMVVE

SEQ ID NO: 781 - protein, 30 aa, Artificial Sequence
  GFR-binding peptide
APTKLEPISILYLDDSSNVIKFKYENMVVR

SEQ ID NO: 782 - protein, 30 aa, Artificial Sequence
  GFR-binding peptide
APTQLEPISILYLDDSSNVIKFKYENMVVR

SEQ ID NO: 783 - protein, 30 aa, Artificial Sequence
  GFR-binding peptide
APTKLEPISILYLDSSNNVIKFKYENMVVK

SEQ ID NO: 784 - protein, 32 aa, Artificial Sequence
  GFR-binding peptide
VPTKLEPISILYLDDMGVPTKFKYEEGMSVAE

SEQ ID NO: 785 - protein, 30 aa, Artificial Sequence
  GFR-binding peptide
TPTKMEPISILYLNDKQQIIKFKYEGMVVD

SEQ ID NO: 786 - protein, 30 aa, Artificial Sequence
  GFR-binding peptide
VPARLEPISILYLDAANNVVKFKYEDMVVE

SEQ ID NO: 787 - protein, 30 aa, Artificial Sequence
  GFR-binding peptide
VPTRLEPISILYLDSANNVVKFKYEDMVVE

SEQ ID NO: 788 - protein, 30 aa, Artificial Sequence
  GFR-binding peptide
APVKTEPISILYLDNGRVLLKFKYEMIVEE

SEQ ID NO: 789 - protein, 30 aa, Artificial Sequence
  GFR-binding peptide
VPQALEPISILYLVGRKPKVKFKYEMIVRS

SEQ ID NO: 790 - protein, 30 aa, Artificial Sequence
  GFR-binding peptide
VSQDLEPISILYLIGKTPKIKFKYEMIVKS

SEQ ID NO: 791 - protein, 30 aa, Artificial Sequence
  GFR-binding peptide
VPQDLEPISILYLVGRTPKVKFKYEMVVKS

SEQ ID NO: 792 - protein, 32 aa, Artificial Sequence
  GFR-binding peptide
VPTEEEPISILYLRIKPHQGQHKFKYEFLQHN

SEQ ID NO: 793 - protein, 32 aa, Artificial Sequence
  GFR-binding peptide
VPTGQEPISILYLRIKPHQGQHKFKYELEEHS

SEQ ID NO: 794 - protein, 32 aa, Artificial Sequence
  GFR-binding peptide
SRVHHEPISILYLEYVRKKPKLKFKYERLEEH

SEQ ID NO: 795 - protein, 32 aa, Artificial Sequence
  GFR-binding peptide
TQVQLEPISILYLEIVRKKPIFKFKYETLEDH

SEQ ID NO: 796 - protein, 30 aa, Artificial Sequence
  GFR-binding peptide
TPTELSPINMLYFDENEKVVYGKIPDMVVD

SEQ ID NO: 797 - protein, 30 aa, Artificial Sequence
  GFR-binding peptide
TPTKMSPINMLYFDENKNVVYGKIPNMVVD

SEQ ID NO: 798 - protein, 30 aa, Artificial Sequence
  GFR-binding peptide
TPTELSPINMLYFDEYDKVVYGKIPEMVVD

SEQ ID NO: 799 - protein, 30 aa, Artificial Sequence
  GFR-binding peptide
TPTKLSPINMLYFDDSSNVIYGKIPNMVVD

SEQ ID NO: 800 - protein, 30 aa, Artificial Sequence
  GFR-binding peptide
TPTQLSPINMLYFDDSSNVIYGKIPNMVVD

SEQ ID NO: 801 - protein, 30 aa, Artificial Sequence
  GFR-binding peptide
TPTKLSPINMLYFDSSNNVIYGKIPNMVVD

SEQ ID NO: 802 - protein, 32 aa, Artificial Sequence
  GFR-binding peptide
TPTKLSPINMLYFDDMGVPTYGKIPEGMSVVD

SEQ ID NO: 803 - protein, 30 aa, Artificial Sequence
  GFR-binding peptide
TPTKLSPINMLYFDKGVVTYYGKIPGMVVD

SEQ ID NO: 804 - protein, 30 aa, Artificial Sequence
  GFR-binding peptide
TPTRLSPINMLYFDAANNVVYGKIPDMVVD

SEQ ID NO: 805 - protein, 30 aa, Artificial Sequence
  GFR-binding peptide
TPTRLSPINMLYFDSANNVVYGKIPDMVVD

SEQ ID NO: 806 - protein, 30 aa, Artificial Sequence
  GFR-binding peptide
TPTKTSPINMLYFDNGRVLLYGKIPMIVVD

SEQ ID NO: 807 - protein, 30 aa, Artificial Sequence
  GFR-binding peptide
TPTALSPINMLYFVGRKPKVYGKIPMIVVD

SEQ ID NO: 808 - protein, 30 aa, Artificial Sequence
  GFR-binding peptide
TPTDLSPINMLYFIGKTPKIYGKIPMIVVD

SEQ ID NO: 809 - protein, 30 aa, Artificial Sequence
  GFR-binding peptide
TPTDLSPINMLYFVGRTPKVYGKIPMVVVD

SEQ ID NO: 810 - protein, 30 aa, Artificial Sequence
  GFR-binding peptide
VPTELSPINMLYFDENEKVVYGKIPDMVVE

SEQ ID NO: 811 - protein, 30 aa, Artificial Sequence
  GFR-binding peptide
VPEKMSPINMLYFDENKNVVYGKIPNMTVE

SEQ ID NO: 812 - protein, 30 aa, Artificial Sequence
  GFR-binding peptide
VPTELSPINMLYFDEYDKVVYGKIPEMVVE

SEQ ID NO: 813 - protein, 30 aa, Artificial Sequence
  GFR-binding peptide
APTKLSPINMLYFDDSSNVIYGKIPNMVVR

SEQ ID NO: 814 - protein, 30 aa, Artificial Sequence
  GFR-binding peptide
APTQLSPINMLYFDDSSNVIYGKIPNMVVR

SEQ ID NO: 815 - protein, 30 aa, Artificial Sequence
  GFR-binding peptide
APTKLSPINMLYFDSSNNVIYGKIPNMVVK

SEQ ID NO: 816 - protein, 32 aa, Artificial Sequence
  GFR-binding peptide
VPTKLSPINMLYFDDMGVPTYGKIPEGMSVAE

SEQ ID NO: 817 - protein, 30 aa, Artificial Sequence
  GFR-binding peptide
VPTKLSPINMLYFDKGVVTYYGKIPGMAVS

SEQ ID NO: 818 - protein, 30 aa, Artificial Sequence
  GFR-binding peptide
VPARLSPINMLYFDAANNVVYGKIPDMVVE

SEQ ID NO: 819 - protein, 30 aa, Artificial Sequence
  GFR-binding peptide
VPTRLSPINMLYFDSANNVVYGKIPDMVVE

SEQ ID NO: 820 - protein, 30 aa, Artificial Sequence
  GFR-binding peptide
APVKTSPINMLYFDNGRVLLYGKIPMIVEE

SEQ ID NO: 821 - protein, 30 aa, Artificial Sequence
  GFR-binding peptide
VPQALSPINMLYFVGRKPKVYGKIPMIVRS

SEQ ID NO: 822 - protein, 30 aa, Artificial Sequence
  GFR-binding peptide
VSQDLSPINMLYFIGKTPKIYGKIPMIVKS

SEQ ID NO: 823 - protein, 30 aa, Artificial Sequence
  GFR-binding peptide
VPQDLSPINMLYFVGRTPKVYGKIPMVVKS

SEQ ID NO: 824 - protein, 32 aa, Artificial Sequence
  GFR-binding peptide
VPTEESPINMLYFRIKPHQGQHYGKIPFLQHN

SEQ ID NO: 825 - protein, 32 aa, Artificial Sequence
  GFR-binding peptide
VPTGQSPINMLYFRIKPHQGQHYGKIPLEEHS

SEQ ID NO: 826 - protein, 32 aa, Artificial Sequence
  GFR-binding peptide
SRVHHSPINMLYFEYVRKKPKLYGKIPRLEEH

SEQ ID NO: 827 - protein, 32 aa, Artificial Sequence
  GFR-binding peptide
TQVQLSPINMLYFEIVRKKPIFYGKIPTLEDH

SEQ ID NO: 828 - protein, 30 aa, Artificial Sequence
  GFR-binding peptide
VPAELSPISILYIDENEKVVYKQYEDMVVE

SEQ ID NO: 829 - protein, 30 aa, Artificial Sequence
  GFR-binding peptide
VPAKMSPISILYIDENKNVVYKQYENMVVE

SEQ ID NO: 830 - protein, 30 aa, Artificial Sequence
  GFR-binding peptide
VPAELSPISILYIDEYDKVVYKQYEEMVVE

SEQ ID NO: 831 - protein, 30 aa, Artificial Sequence
  GFR-binding peptide
VPAKLSPISILYIDDSSNVIYKQYENMVVE

SEQ ID NO: 832 - protein, 30 aa, Artificial Sequence
  GFR-binding peptide
VPAQLSPISILYIDDSSNVIYKQYENMVVE

SEQ ID NO: 833 - protein, 30 aa, Artificial Sequence
  GFR-binding peptide
VPAKLSPISILYIDSSNNVIYKQYENMVVE

SEQ ID NO: 834 - protein, 32 aa, Artificial Sequence
  GFR-binding peptide
VPAKLSPISILYIDDMGVPTYKQYEEGMSVVE

SEQ ID NO: 835 - protein, 30 aa, Artificial Sequence
  GFR-binding peptide
VPAKLSPISILYIDKGVVTYYKQYEGMVVE

SEQ ID NO: 836 - protein, 30 aa, Artificial Sequence
  GFR-binding peptide
VPAKMSPISILYINDKQQIIYKQYEGMVVE

SEQ ID NO: 837 - protein, 30 aa, Artificial Sequence
  GFR-binding peptide
VPARLSPISILYIDSANNVVYKQYEDMVVE

SEQ ID NO: 838 - protein, 30 aa, Artificial Sequence
  GFR-binding peptide
VPAKTSPISILYIDNGRVLLYKQYEMIVVE

SEQ ID NO: 839 - protein, 30 aa, Artificial Sequence
  GFR-binding peptide
VPAALSPISILYIVGRKPKVYKQYEMIVVE

SEQ ID NO: 840 - protein, 30 aa, Artificial Sequence
  GFR-binding peptide
VPADLSPISILYIIGKTPKIYKQYEMIVVE

SEQ ID NO: 841 - protein, 30 aa, Artificial Sequence
  GFR-binding peptide
VPADLSPISILYIVGRTPKVYKQYEMVVVE

SEQ ID NO: 842 - protein, 30 aa, Artificial Sequence
  GFR-binding peptide
VPTELSPISILYIDENEKVVYKQYEDMVVE

SEQ ID NO: 843 - protein, 30 aa, Artificial Sequence
  GFR-binding peptide
VPEKMSPISILYIDENKNVVYKQYENMTVE

SEQ ID NO: 844 - protein, 30 aa, Artificial Sequence
  GFR-binding peptide
VPTELSPISILYIDEYDKVVYKQYEEMVVE

SEQ ID NO: 845 - protein, 30 aa, Artificial Sequence
  GFR-binding peptide
APTKLSPISILYIDDSSNVIYKQYENMVVR

SEQ ID NO: 846 - protein, 30 aa, Artificial Sequence
  GFR-binding peptide
APTQLSPISILYIDDSSNVIYKQYENMVVR

SEQ ID NO: 847 - protein, 30 aa, Artificial Sequence
  GFR-binding peptide
APTKLSPISILYIDSSNNVIYKQYENMVVK

SEQ ID NO: 848 - protein, 30 aa, Artificial Sequence
  GFR-binding peptide
VPTKLSPISILYIDKGVVTYYKQYEGMAVS

SEQ ID NO: 849 - protein, 30 aa, Artificial Sequence
  GFR-binding peptide
TPTKMSPISILYINDKQQIIYKQYEGMVVD

SEQ ID NO: 850 - protein, 30 aa, Artificial Sequence
  GFR-binding peptide
VPTRLSPISILYIDSANNVVYKQYEDMVVE

SEQ ID NO: 851 - protein, 30 aa, Artificial Sequence
  GFR-binding peptide
APVKTSPISILYIDNGRVLLYKQYEMIVEE

SEQ ID NO: 852 - protein, 30 aa, Artificial Sequence
  GFR-binding peptide
VPQALSPISILYIVGRKPKVYKQYEMIVRS

SEQ ID NO: 853 - protein, 30 aa, Artificial Sequence
  GFR-binding peptide
VSQDLSPISILYIIGKTPKIYKQYEMIVKS

SEQ ID NO: 854 - protein, 30 aa, Artificial Sequence
  GFR-binding peptide
VPQDLSPISILYIVGRTPKVYKQYEMVVKS

SEQ ID NO: 855 - protein, 32 aa, Artificial Sequence
  GFR-binding peptide
VPTEESPISILYIRIKPHQGQHYKQYEFLQHN

SEQ ID NO: 856 - protein, 32 aa, Artificial Sequence
  GFR-binding peptide
VPTGQSPISILYIRIKPHQGQHYKQYELEEHS

SEQ ID NO: 857 - protein, 32 aa, Artificial Sequence
  GFR-binding peptide
SRVHHSPISILYIEYVRKKPKLYKQYERLEEH

SEQ ID NO: 858 - protein, 32 aa, Artificial Sequence
  GFR-binding peptide
TQVQLSPISILYIEIVRKKPIFYKQYETLEDH

SEQ ID NO: 859 - protein, 30 aa, Artificial Sequence
  GFR-binding peptide
VPTELSPISILFIDENEKVVYKQYEDMVVE

SEQ ID NO: 860 - protein, 30 aa, Artificial Sequence
  GFR-binding peptide
VPTKMSPISILFIDENKNVVYKQYENMVVE

SEQ ID NO: 861 - protein, 30 aa, Artificial Sequence
  GFR-binding peptide
VPTELSPISILFIDEYDKVVYKQYEEMVVE

SEQ ID NO: 862 - protein, 30 aa, Artificial Sequence
  GFR-binding peptide
VPTKLSPISILFIDDSSNVIYKQYENMVVE

SEQ ID NO: 863 - protein, 30 aa, Artificial Sequence
  GFR-binding peptide
VPTQLSPISILFIDDSSNVIYKQYENMVVE

SEQ ID NO: 864 - protein, 30 aa, Artificial Sequence
  GFR-binding peptide
VPTKLSPISILFIDSSNNVIYKQYENMVVE

SEQ ID NO: 865 - protein, 32 aa, Artificial Sequence
  GFR-binding peptide
VPTKLSPISILFIDDMGVPTYKQYEEGMSVVE

SEQ ID NO: 866 - protein, 30 aa, Artificial Sequence
  GFR-binding peptide
VPTKLSPISILFIDKGVVTYYKQYEGMVVE

SEQ ID NO: 867 - protein, 30 aa, Artificial Sequence
  GFR-binding peptide
VPTKMSPISILFINDKQQIIYKQYEGMVVE

SEQ ID NO: 868 - protein, 30 aa, Artificial Sequence
  GFR-binding peptide
VPTRLSPISILFIDAANNVVYKQYEDMVVE

SEQ ID NO: 869 - protein, 30 aa, Artificial Sequence
  GFR-binding peptide
VPTKTSPISILFIDNGRVLLYKQYEMIVVE

SEQ ID NO: 870 - protein, 30 aa, Artificial Sequence
  GFR-binding peptide
VPTALSPISILFIVGRKPKVYKQYEMIVVE

SEQ ID NO: 871 - protein, 30 aa, Artificial Sequence
  GFR-binding peptide
VPTDLSPISILFIIGKTPKIYKQYEMIVVE

SEQ ID NO: 872 - protein, 30 aa, Artificial Sequence
  GFR-binding peptide
VPTDLSPISILFIVGRTPKVYKQYEMVVVE

SEQ ID NO: 873 - protein, 30 aa, Artificial Sequence
  GFR-binding peptide
VPEKMSPISILFIDENKNVVYKQYENMTVE

SEQ ID NO: 874 - protein, 30 aa, Artificial Sequence
  GFR-binding peptide
APTKLSPISILFIDDSSNVIYKQYENMVVR

SEQ ID NO: 875 - protein, 30 aa, Artificial Sequence
  GFR-binding peptide
APTQLSPISILFIDDSSNVIYKQYENMVVR

SEQ ID NO: 876 - protein, 30 aa, Artificial Sequence
  GFR-binding peptide
APTKLSPISILFIDSSNNVIYKQYENMVVK

SEQ ID NO: 877 - protein, 32 aa, Artificial Sequence
  GFR-binding peptide
VPTKLSPISILFIDDMGVPTYKQYEEGMSVAE

SEQ ID NO: 878 - protein, 30 aa, Artificial Sequence
  GFR-binding peptide
VPTKLSPISILFIDKGVVTYYKQYEGMAVS

SEQ ID NO: 879 - protein, 30 aa, Artificial Sequence
  GFR-binding peptide
TPTKMSPISILFINDKQQIIYKQYEGMVVD

SEQ ID NO: 880 - protein, 30 aa, Artificial Sequence
  GFR-binding peptide
VPARLSPISILFIDAANNVVYKQYEDMVVE

SEQ ID NO: 881 - protein, 30 aa, Artificial Sequence
  GFR-binding peptide
APVKTSPISILFIDNGRVLLYKQYEMIVEE

SEQ ID NO: 882 - protein, 30 aa, Artificial Sequence
  GFR-binding peptide
VPQALSPISILFIVGRKPKVYKQYEMIVRS

SEQ ID NO: 883 - protein, 30 aa, Artificial Sequence
  GFR-binding peptide
VSQDLSPISILFIIGKTPKIYKQYEMIVKS

SEQ ID NO: 884 - protein, 30 aa, Artificial Sequence
  GFR-binding peptide
VPQDLSPISILFIVGRTPKVYKQYEMVVKS

SEQ ID NO: 885 - protein, 32 aa, Artificial Sequence
  GFR-binding peptide
VPTEESPISILFIRIKPHQGQHYKQYEFLQHN

SEQ ID NO: 886 - protein, 32 aa, Artificial Sequence
  GFR-binding peptide
VPTGQSPISILFIRIKPHQGQHYKQYELEEHS

SEQ ID NO: 887 - protein, 32 aa, Artificial Sequence
  GFR-binding peptide
SRVHHSPISILFIEYVRKKPKLYKQYERLEEH

SEQ ID NO: 888 - protein, 32 aa, Artificial Sequence
  GFR-binding peptide
TQVQLSPISILFIEIVRKKPIFYKQYETLEDH

SEQ ID NO: 889 - protein, 30 aa, Artificial Sequence
  GFR-binding peptide
APVELKPLSMLYVDENEKVVDHHKDDMVEE

SEQ ID NO: 890 - protein, 30 aa, Artificial Sequence
  GFR-binding peptide
APVKMKPLSMLYVDENKNVVDHHKDNMVEE

SEQ ID NO: 891 - protein, 30 aa, Artificial Sequence
  GFR-binding peptide
APVELKPLSMLYVDEYDKVVDHHKDEMVEE

SEQ ID NO: 892 - protein, 30 aa, Artificial Sequence
  GFR-binding peptide
APVKLKPLSMLYVDDSSNVIDHHKDNMVEE

SEQ ID NO: 893 - protein, 30 aa, Artificial Sequence
  GFR-binding peptide
APVQLKPLSMLYVDDSSNVIDHHKDNMVEE

SEQ ID NO: 894 - protein, 30 aa, Artificial Sequence
  GFR-binding peptide
APVKLKPLSMLYVDSSNNVIDHHKDNMVEE

SEQ ID NO: 895 - protein, 32 aa, Artificial Sequence
  GFR-binding peptide
APVKLKPLSMLYVDDMGVPTDHHKDEGMSVEE

SEQ ID NO: 896 - protein, 30 aa, Artificial Sequence
  GFR-binding peptide
APVKLKPLSMLYVDKGVVTYDHHKDGMVEE

SEQ ID NO: 897 - protein, 30 aa, Artificial Sequence
  GFR-binding peptide
APVKMKPLSMLYVNDKQQIIDHHKDGMVEE

SEQ ID NO: 898 - protein, 30 aa, Artificial Sequence
  GFR-binding peptide
APVRLKPLSMLYVDAANNVVDHHKDDMVEE

SEQ ID NO: 899 - protein, 30 aa, Artificial Sequence
  GFR-binding peptide
APVRLKPLSMLYVDSANNVVDHHKDDMVEE

SEQ ID NO: 900 - protein, 30 aa, Artificial Sequence
  GFR-binding peptide
APVALKPLSMLYVVGRKPKVDHHKDMIVEE

SEQ ID NO: 901 - protein, 30 aa, Artificial Sequence
  GFR-binding peptide
APVDLKPLSMLYVIGKTPKIDHHKDMIVEE

SEQ ID NO: 902 - protein, 30 aa, Artificial Sequence
  GFR-binding peptide
APVDLKPLSMLYVVGRTPKVDHHKDMVVEE

SEQ ID NO: 903 - protein, 30 aa, Artificial Sequence
  GFR-binding peptide
VPTELKPLSMLYVDENEKVVDHHKDDMVVE

SEQ ID NO: 904 - protein, 30 aa, Artificial Sequence
  GFR-binding peptide
VPEKMKPLSMLYVDENKNVVDHHKDNMTVE

SEQ ID NO: 905 - protein, 30 aa, Artificial Sequence
  GFR-binding peptide
VPTELKPLSMLYVDEYDKVVDHHKDEMVVE

SEQ ID NO: 906 - protein, 30 aa, Artificial Sequence
  GFR-binding peptide
APTKLKPLSMLYVDDSSNVIDHHKDNMVVR

SEQ ID NO: 907 - protein, 30 aa, Artificial Sequence
  GFR-binding peptide
APTQLKPLSMLYVDDSSNVIDHHKDNMVVR

SEQ ID NO: 908 - protein, 30 aa, Artificial Sequence
  GFR-binding peptide
APTKLKPLSMLYVDSSNNVIDHHKDNMVVK

SEQ ID NO: 909 - protein, 32 aa, Artificial Sequence
  GFR-binding peptide
VPTKLKPLSMLYVDDMGVPTDHHKDEGMSVAE

SEQ ID NO: 910 - protein, 30 aa, Artificial Sequence
  GFR-binding peptide
VPTKLKPLSMLYVDKGVVTYDHHKDGMAVS

SEQ ID NO: 911 - protein, 30 aa, Artificial Sequence
  GFR-binding peptide
TPTKMKPLSMLYVNDKQQIIDHHKDGMVVD

SEQ ID NO: 912 - protein, 30 aa, Artificial Sequence
  GFR-binding peptide
VPARLKPLSMLYVDAANNVVDHHKDDMVVE

SEQ ID NO: 913 - protein, 30 aa, Artificial Sequence
  GFR-binding peptide
VPTRLKPLSMLYVDSANNVVDHHKDDMVVE

SEQ ID NO: 914 - protein, 30 aa, Artificial Sequence
  GFR-binding peptide
VPQALKPLSMLYVVGRKPKVDHHKDMIVRS

SEQ ID NO: 915 - protein, 30 aa, Artificial Sequence
  GFR-binding peptide
VSQDLKPLSMLYVIGKTPKIDHHKDMIVKS

SEQ ID NO: 916 - protein, 30 aa, Artificial Sequence
  GFR-binding peptide
VPQDLKPLSMLYVVGRTPKVDHHKDMVVKS

SEQ ID NO: 917 - protein, 32 aa, Artificial Sequence
  GFR-binding peptide
VPTEEKPLSMLYVRIKPHQGQHDHHKDFLQHN

SEQ ID NO: 918 - protein, 32 aa, Artificial Sequence
  GFR-binding peptide
VPTGQKPLSMLYVRIKPHQGQHDHHKDLEEHS

SEQ ID NO: 919 - protein, 32 aa, Artificial Sequence
  GFR-binding peptide
SRVHHKPLSMLYVEYVRKKPKLDHHKDRLEEH

SEQ ID NO: 920 - protein, 32 aa, Artificial Sequence
  GFR-binding peptide
TQVQLKPLSMLYVEIVRKKPIFDHHKDTLEDH

SEQ ID NO: 921 - protein, 30 aa, Artificial Sequence
  GFR-binding peptide
VPQELEPLPIVYYDENEKVVEQLSNDMVRS

SEQ ID NO: 922 - protein, 30 aa, Artificial Sequence
  GFR-binding peptide
VPQKMEPLPIVYYDENKNVVEQLSNNMVRS

SEQ ID NO: 923 - protein, 30 aa, Artificial Sequence
  GFR-binding peptide
VPQELEPLPIVYYDEYDKVVEQLSNEMVRS

SEQ ID NO: 924 - protein, 30 aa, Artificial Sequence
  GFR-binding peptide
VPQKLEPLPIVYYDDSSNVIEQLSNNMVRS

SEQ ID NO: 925 - protein, 30 aa, Artificial Sequence
  GFR-binding peptide
VPQQLEPLPIVYYDDSSNVIEQLSNNMVRS

SEQ ID NO: 926 - protein, 30 aa, Artificial Sequence
  GFR-binding peptide
VPQKLEPLPIVYYDSSNNVIEQLSNNMVRS

SEQ ID NO: 927 - protein, 32 aa, Artificial Sequence
  GFR-binding peptide
VPQKLEPLPIVYYDDMGVPTEQLSNEGMSVRS

SEQ ID NO: 928 - protein, 30 aa, Artificial Sequence
  GFR-binding peptide
VPQKLEPLPIVYYDKGVVTYEQLSNGMVRS

SEQ ID NO: 929 - protein, 30 aa, Artificial Sequence
  GFR-binding peptide
VPQKMEPLPIVYYNDKQQIIEQLSNGMVRS

SEQ ID NO: 930 - protein, 30 aa, Artificial Sequence
  GFR-binding peptide
VPQRLEPLPIVYYDAANNVVEQLSNDMVRS

SEQ ID NO: 931 - protein, 30 aa, Artificial Sequence
  GFR-binding peptide
VPQRLEPLPIVYYDSANNVVEQLSNDMVRS

SEQ ID NO: 932 - protein, 30 aa, Artificial Sequence
  GFR-binding peptide
VPQKTEPLPIVYYDNGRVLLEQLSNMIVRS

SEQ ID NO: 933 - protein, 30 aa, Artificial Sequence
  GFR-binding peptide
VPQDLEPLPIVYYIGKTPKIEQLSNMIVRS

SEQ ID NO: 934 - protein, 30 aa, Artificial Sequence
  GFR-binding peptide
VPQDLEPLPIVYYVGRTPKVEQLSNMVVRS

SEQ ID NO: 935 - protein, 30 aa, Artificial Sequence
  GFR-binding peptide
VPTELEPLPIVYYDENEKVVEQLSNDMVVE

SEQ ID NO: 936 - protein, 30 aa, Artificial Sequence
  GFR-binding peptide
VPEKMEPLPIVYYDENKNVVEQLSNNMTVE

SEQ ID NO: 937 - protein, 30 aa, Artificial Sequence
  GFR-binding peptide
VPTELEPLPIVYYDEYDKVVEQLSNEMVVE

SEQ ID NO: 938 - protein, 30 aa, Artificial Sequence
  GFR-binding peptide
APTKLEPLPIVYYDDSSNVIEQLSNNMVVR

SEQ ID NO: 939 - protein, 30 aa, Artificial Sequence
  GFR-binding peptide
APTQLEPLPIVYYDDSSNVIEQLSNNMVVR

SEQ ID NO: 940 - protein, 30 aa, Artificial Sequence
  GFR-binding peptide
APTKLEPLPIVYYDSSNNVIEQLSNNMVVK

SEQ ID NO: 941 - protein, 32 aa, Artificial Sequence
  GFR-binding peptide
VPTKLEPLPIVYYDDMGVPTEQLSNEGMSVAE

SEQ ID NO: 942 - protein, 30 aa, Artificial Sequence
  GFR-binding peptide
VPTKLEPLPIVYYDKGVVTYEQLSNGMAVS

SEQ ID NO: 943 - protein, 30 aa, Artificial Sequence
  GFR-binding peptide
TPTKMEPLPIVYYNDKQQIIEQLSNGMVVD

SEQ ID NO: 944 - protein, 30 aa, Artificial Sequence
  GFR-binding peptide
VPARLEPLPIVYYDAANNVVEQLSNDMVVE

SEQ ID NO: 945 - protein, 30 aa, Artificial Sequence
  GFR-binding peptide
VPTRLEPLPIVYYDSANNVVEQLSNDMVVE

SEQ ID NO: 946 - protein, 30 aa, Artificial Sequence
  GFR-binding peptide
APVKTEPLPIVYYDNGRVLLEQLSNMIVEE

SEQ ID NO: 947 - protein, 30 aa, Artificial Sequence
  GFR-binding peptide
VSQDLEPLPIVYYIGKTPKIEQLSNMIVKS

SEQ ID NO: 948 - protein, 30 aa, Artificial Sequence
  GFR-binding peptide
VPQDLEPLPIVYYVGRTPKVEQLSNMVVKS

SEQ ID NO: 949 - protein, 32 aa, Artificial Sequence
  GFR-binding peptide
VPTEEEPLPIVYYRIKPHQGQHEQLSNFLQHN

SEQ ID NO: 950 - protein, 32 aa, Artificial Sequence
  GFR-binding peptide
VPTGQEPLPIVYYRIKPHQGQHEQLSNLEEHS

SEQ ID NO: 951 - protein, 32 aa, Artificial Sequence
  GFR-binding peptide
SRVHHEPLPIVYYEYVRKKPKLEQLSNRLEEH

SEQ ID NO: 952 - protein, 32 aa, Artificial Sequence
  GFR-binding peptide
TQVQLEPLPIVYYEIVRKKPIFEQLSNTLEDH

SEQ ID NO: 953 - protein, 30 aa, Artificial Sequence
  GFR-binding peptide
VSQELEPLTILYYDENEKVVEQLSNDMVKS

SEQ ID NO: 954 - protein, 30 aa, Artificial Sequence
  GFR-binding peptide
VSQKMEPLTILYYDENKNVVEQLSNNMVKS

SEQ ID NO: 955 - protein, 30 aa, Artificial Sequence
  GFR-binding peptide
VSQELEPLTILYYDEYDKVVEQLSNEMVKS

SEQ ID NO: 956 - protein, 30 aa, Artificial Sequence
  GFR-binding peptide
VSQKLEPLTILYYDDSSNVIEQLSNNMVKS

SEQ ID NO: 957 - protein, 30 aa, Artificial Sequence
  GFR-binding peptide
VSQQLEPLTILYYDDSSNVIEQLSNNMVKS

SEQ ID NO: 958 - protein, 30 aa, Artificial Sequence
  GFR-binding peptide
VSQKLEPLTILYYDSSNNVIEQLSNNMVKS

SEQ ID NO: 959 - protein, 32 aa, Artificial Sequence
  GFR-binding peptide
VSQKLEPLTILYYDDMGVPTEQLSNEGMSVKS

SEQ ID NO: 960 - protein, 30 aa, Artificial Sequence
  GFR-binding peptide
VSQKLEPLTILYYDKGVVTYEQLSNGMVKS

SEQ ID NO: 961 - protein, 30 aa, Artificial Sequence
  GFR-binding peptide
VSQKMEPLTILYYNDKQQIIEQLSNGMVKS

SEQ ID NO: 962 - protein, 30 aa, Artificial Sequence
  GFR-binding peptide
VSQRLEPLTILYYDAANNVVEQLSNDMVKS

SEQ ID NO: 963 - protein, 30 aa, Artificial Sequence
  GFR-binding peptide
VSQRLEPLTILYYDSANNVVEQLSNDMVKS

SEQ ID NO: 964 - protein, 30 aa, Artificial Sequence
  GFR-binding peptide
VSQKTEPLTILYYDNGRVLLEQLSNMIVKS

SEQ ID NO: 965 - protein, 30 aa, Artificial Sequence
  GFR-binding peptide
VSQALEPLTILYYVGRKPKVEQLSNMIVKS

SEQ ID NO: 966 - protein, 30 aa, Artificial Sequence
  GFR-binding peptide
VSQDLEPLTILYYVGRTPKVEQLSNMVVKS

SEQ ID NO: 967 - protein, 30 aa, Artificial Sequence
  GFR-binding peptide
VPTELEPLTILYYDENEKVVEQLSNDMVVE

SEQ ID NO: 968 - protein, 30 aa, Artificial Sequence
  GFR-binding peptide
VPEKMEPLTILYYDENKNVVEQLSNNMTVE

SEQ ID NO: 969 - protein, 30 aa, Artificial Sequence
  GFR-binding peptide
VPTELEPLTILYYDEYDKVVEQLSNEMVVE

SEQ ID NO: 970 - protein, 30 aa, Artificial Sequence
  GFR-binding peptide
APTKLEPLTILYYDDSSNVIEQLSNNMVVR

SEQ ID NO: 971 - protein, 30 aa, Artificial Sequence
  GFR-binding peptide
APTQLEPLTILYYDDSSNVIEQLSNNMVVR

SEQ ID NO: 972 - protein, 30 aa, Artificial Sequence
  GFR-binding peptide
APTKLEPLTILYYDSSNNVIEQLSNNMVVK

SEQ ID NO: 973 - protein, 32 aa, Artificial Sequence
  GFR-binding peptide
VPTKLEPLTILYYDDMGVPTEQLSNEGMSVAE

SEQ ID NO: 974 - protein, 30 aa, Artificial Sequence
  GFR-binding peptide
VPTKLEPLTILYYDKGVVTYEQLSNGMAVS

SEQ ID NO: 975 - protein, 30 aa, Artificial Sequence
  GFR-binding peptide
TPTKMEPLTILYYNDKQQIIEQLSNGMVVD

SEQ ID NO: 976 - protein, 30 aa, Artificial Sequence
  GFR-binding peptide
VPARLEPLTILYYDAANNVVEQLSNDMVVE

SEQ ID NO: 977 - protein, 30 aa, Artificial Sequence
  GFR-binding peptide
VPTRLEPLTILYYDSANNVVEQLSNDMVVE

SEQ ID NO: 978 - protein, 30 aa, Artificial Sequence
  GFR-binding peptide
APVKTEPLTILYYDNGRVLLEQLSNMIVEE

SEQ ID NO: 979 - protein, 30 aa, Artificial Sequence
  GFR-binding peptide
VPQALEPLTILYYVGRKPKVEQLSNMIVRS

SEQ ID NO: 980 - protein, 32 aa, Artificial Sequence
  GFR-binding peptide
VPTEEEPLTILYYRIKPHQGQHEQLSNFLQHN

SEQ ID NO: 981 - protein, 32 aa, Artificial Sequence
  GFR-binding peptide
VPTGQEPLTILYYRIKPHQGQHEQLSNLEEHS

SEQ ID NO: 982 - protein, 32 aa, Artificial Sequence
  GFR-binding peptide
SRVHHEPLTILYYEYVRKKPKLEQLSNRLEEH

SEQ ID NO: 983 - protein, 32 aa, Artificial Sequence
  GFR-binding peptide
TQVQLEPLTILYYEIVRKKPIFEQLSNTLEDH

SEQ ID NO: 984 - protein, 30 aa, Artificial Sequence
  GFR-binding peptide
VPQELEPLTILYYDENEKVVEQLSNDMVKS

SEQ ID NO: 985 - protein, 30 aa, Artificial Sequence
  GFR-binding peptide
VPQKMEPLTILYYDENKNVVEQLSNNMVKS

SEQ ID NO: 986 - protein, 30 aa, Artificial Sequence
  GFR-binding peptide
VPQELEPLTILYYDEYDKVVEQLSNEMVKS

SEQ ID NO: 987 - protein, 30 aa, Artificial Sequence
  GFR-binding peptide
VPQKLEPLTILYYDDSSNVIEQLSNNMVKS

SEQ ID NO: 988 - protein, 30 aa, Artificial Sequence
  GFR-binding peptide
VPQQLEPLTILYYDDSSNVIEQLSNNMVKS

SEQ ID NO: 989 - protein, 30 aa, Artificial Sequence
  GFR-binding peptide
VPQKLEPLTILYYDSSNNVIEQLSNNMVKS

SEQ ID NO: 990 - protein, 32 aa, Artificial Sequence
  GFR-binding peptide
VPQKLEPLTILYYDDMGVPTEQLSNEGMSVKS

SEQ ID NO: 991 - protein, 30 aa, Artificial Sequence
  GFR-binding peptide
VPQKLEPLTILYYDKGVVTYEQLSNGMVKS

SEQ ID NO: 992 - protein, 30 aa, Artificial Sequence
  GFR-binding peptide
VPQKMEPLTILYYNDKQQIIEQLSNGMVKS

SEQ ID NO: 993 - protein, 30 aa, Artificial Sequence
  GFR-binding peptide
VPQRLEPLTILYYDAANNVVEQLSNDMVKS

SEQ ID NO: 994 - protein, 30 aa, Artificial Sequence
  GFR-binding peptide
VPQRLEPLTILYYDSANNVVEQLSNDMVKS

SEQ ID NO: 995 - protein, 30 aa, Artificial Sequence
  GFR-binding peptide
VPQKTEPLTILYYDNGRVLLEQLSNMIVKS

SEQ ID NO: 996 - protein, 30 aa, Artificial Sequence
  GFR-binding peptide
VPQALEPLTILYYVGRKPKVEQLSNMIVKS

SEQ ID NO: 997 - protein, 30 aa, Artificial Sequence
  GFR-binding peptide
VPQDLEPLTILYYIGKTPKIEQLSNMIVKS

SEQ ID NO: 998 - protein, 32 aa, Artificial Sequence
  GFR-binding peptide
VPTGQSNITMQIMRIKPHQGQHIGEMSLEQHN

SEQ ID NO: 999 - protein, 30 aa, Artificial Sequence
  GFR-binding peptide
VPTELSNITMQIMDENEKVVIGEMSDMVVE

SEQ ID NO: 1000 - protein, 30 aa, Artificial Sequence
  GFR-binding peptide
VPEKMSNITMQIMDENKNVVIGEMSNMTVE

SEQ ID NO: 1001 - protein, 30 aa, Artificial Sequence
  GFR-binding peptide
VPTELSNITMQIMDEYDKVVIGEMSEMVVE

SEQ ID NO: 1002 - protein, 30 aa, Artificial Sequence
  GFR-binding peptide
APTKLSNITMQIMDDSSNVIIGEMSNMVVR

SEQ ID NO: 1003 - protein, 30 aa, Artificial Sequence
  GFR-binding peptide
APTQLSNITMQIMDDSSNVIIGEMSNMVVR

SEQ ID NO: 1004 - protein, 30 aa, Artificial Sequence
  GFR-binding peptide
APTKLSNITMQIMDSSNNVIIGEMSNMVVK

SEQ ID NO: 1005 - protein, 32 aa, Artificial Sequence
  GFR-binding peptide
VPTKLSNITMQIMDDMGVPTIGEMSEGMSVAE

SEQ ID NO: 1006 - protein, 30 aa, Artificial Sequence
  GFR-binding peptide
VPTKLSNITMQIMDKGVVTYIGEMSGMAVS

SEQ ID NO: 1007 - protein, 30 aa, Artificial Sequence
  GFR-binding peptide
TPTKMSNITMQIMNDKQQIIIGEMSGMVVD

SEQ ID NO: 1008 - protein, 30 aa, Artificial Sequence
  GFR-binding peptide
VPARLSNITMQIMDAANNVVIGEMSDMVVE

SEQ ID NO: 1009 - protein, 30 aa, Artificial Sequence
  GFR-binding peptide
VPTRLSNITMQIMDSANNVVIGEMSDMVVE

SEQ ID NO: 1010 - protein, 30 aa, Artificial Sequence
  GFR-binding peptide
APVKTSNITMQIMDNGRVLLIGEMSMIVEE

SEQ ID NO: 1011 - protein, 30 aa, Artificial Sequence
  GFR-binding peptide
VPQALSNITMQIMVGRKPKVIGEMSMIVRS

SEQ ID NO: 1012 - protein, 30 aa, Artificial Sequence
  GFR-binding peptide
VSQDLSNITMQIMIGKTPKIIGEMSMIVKS

SEQ ID NO: 1013 - protein, 30 aa, Artificial Sequence
  GFR-binding peptide
VPQDLSNITMQIMVGRTPKVIGEMSMVVKS

SEQ ID NO: 1014 - protein, 32 aa, Artificial Sequence
  GFR-binding peptide
VPTGQSNITMQIMRIKPHQGQHIGEMSLEEHS

SEQ ID NO: 1015 - protein, 32 aa, Artificial Sequence
  GFR-binding peptide
SRVHHSNITMQIMEYVRKKPKLIGEMSRLEEH

SEQ ID NO: 1016 - protein, 32 aa, Artificial Sequence
  GFR-binding peptide
TQVQLSNITMQIMEIVRKKPIFIGEMSTLEDH

SEQ ID NO: 1017 - protein, 32 aa, Artificial Sequence
  GFR-binding peptide
VPTEESNITMQIMRIKPHQGQHLGEMSFLEHS

SEQ ID NO: 1018 - protein, 30 aa, Artificial Sequence
  GFR-binding peptide
VPTELSNITMQIMDENEKVVLGEMSDMVVE

SEQ ID NO: 1019 - protein, 30 aa, Artificial Sequence
  GFR-binding peptide
VPEKMSNITMQIMDENKNVVLGEMSNMTVE

SEQ ID NO: 1020 - protein, 30 aa, Artificial Sequence
  GFR-binding peptide
VPTELSNITMQIMDEYDKVVLGEMSEMVVE

SEQ ID NO: 1021 - protein, 30 aa, Artificial Sequence
  GFR-binding peptide
APTKLSNITMQIMDDSSNVILGEMSNMVVR

SEQ ID NO: 1022 - protein, 30 aa, Artificial Sequence
  GFR-binding peptide
APTQLSNITMQIMDDSSNVILGEMSNMVVR

SEQ ID NO: 1023 - protein, 30 aa, Artificial Sequence
  GFR-binding peptide
APTKLSNITMQIMDSSNNVILGEMSNMVVK

SEQ ID NO: 1024 - protein, 32 aa, Artificial Sequence
  GFR-binding peptide
VPTKLSNITMQIMDDMGVPTLGEMSEGMSVAE

SEQ ID NO: 1025 - protein, 30 aa, Artificial Sequence
  GFR-binding peptide
VPTKLSNITMQIMDKGVVTYLGEMSGMAVS

SEQ ID NO: 1026 - protein, 30 aa, Artificial Sequence
  GFR-binding peptide
TPTKMSNITMQIMNDKQQIILGEMSGMVVD

SEQ ID NO: 1027 - protein, 30 aa, Artificial Sequence
  GFR-binding peptide
VPARLSNITMQIMDAANNVVLGEMSDMVVE

SEQ ID NO: 1028 - protein, 30 aa, Artificial Sequence
  GFR-binding peptide
VPTRLSNITMQIMDSANNVVLGEMSDMVVE

SEQ ID NO: 1029 - protein, 30 aa, Artificial Sequence
  GFR-binding peptide
APVKTSNITMQIMDNGRVLLLGEMSMIVEE

SEQ ID NO: 1030 - protein, 30 aa, Artificial Sequence
  GFR-binding peptide
VPQALSNITMQIMVGRKPKVLGEMSMIVRS

SEQ ID NO: 1031 - protein, 30 aa, Artificial Sequence
  GFR-binding peptide
VSQDLSNITMQIMIGKTPKILGEMSMIVKS

SEQ ID NO: 1032 - protein, 30 aa, Artificial Sequence
  GFR-binding peptide
VPQDLSNITMQIMVGRTPKVLGEMSMVVKS

SEQ ID NO: 1033 - protein, 32 aa, Artificial Sequence
  GFR-binding peptide
VPTEESNITMQIMRIKPHQGQHLGEMSFLQHN

SEQ ID NO: 1034 - protein, 32 aa, Artificial Sequence
  GFR-binding peptide
SRVHHSNITMQIMEYVRKKPKLLGEMSRLEEH

SEQ ID NO: 1035 - protein, 32 aa, Artificial Sequence
  GFR-binding peptide
TQVQLSNITMQIMEIVRKKPIFLGEMSTLEDH

SEQ ID NO: 1036 - protein, 32 aa, Artificial Sequence
  GFR-binding peptide
SRVQLRSVKVAKVEIVRKKPIFKEVQVTLEEH

SEQ ID NO: 1037 - protein, 30 aa, Artificial Sequence
  GFR-binding peptide
VPTELRSVKVAKVDENEKVVKEVQVDMVVE

SEQ ID NO: 1038 - protein, 30 aa, Artificial Sequence
  GFR-binding peptide
VPEKMRSVKVAKVDENKNVVKEVQVNMTVE

SEQ ID NO: 1039 - protein, 30 aa, Artificial Sequence
  GFR-binding peptide
VPTELRSVKVAKVDEYDKVVKEVQVEMVVE

SEQ ID NO: 1040 - protein, 30 aa, Artificial Sequence
  GFR-binding peptide
APTKLRSVKVAKVDDSSNVIKEVQVNMVVR

SEQ ID NO: 1041 - protein, 30 aa, Artificial Sequence
  GFR-binding peptide
APTQLRSVKVAKVDDSSNVIKEVQVNMVVR

SEQ ID NO: 1042 - protein, 30 aa, Artificial Sequence
  GFR-binding peptide
APTKLRSVKVAKVDSSNNVIKEVQVNMVVK

SEQ ID NO: 1043 - protein, 32 aa, Artificial Sequence
  GFR-binding peptide
VPTKLRSVKVAKVDDMGVPTKEVQVEGMSVAE

SEQ ID NO: 1044 - protein, 30 aa, Artificial Sequence
  GFR-binding peptide
VPTKLRSVKVAKVDKGVVTYKEVQVGMAVS

SEQ ID NO: 1045 - protein, 30 aa, Artificial Sequence
  GFR-binding peptide
TPTKMRSVKVAKVNDKQQIIKEVQVGMVVD

SEQ ID NO: 1046 - protein, 30 aa, Artificial Sequence
  GFR-binding peptide
VPARLRSVKVAKVDAANNVVKEVQVDMVVE

SEQ ID NO: 1047 - protein, 30 aa, Artificial Sequence
  GFR-binding peptide
VPTRLRSVKVAKVDSANNVVKEVQVDMVVE

SEQ ID NO: 1048 - protein, 30 aa, Artificial Sequence
  GFR-binding peptide
APVKTRSVKVAKVDNGRVLLKEVQVMIVEE

SEQ ID NO: 1049 - protein, 30 aa, Artificial Sequence
  GFR-binding peptide
VPQALRSVKVAKVVGRKPKVKEVQVMIVRS

SEQ ID NO: 1050 - protein, 30 aa, Artificial Sequence
  GFR-binding peptide
VSQDLRSVKVAKVIGKTPKIKEVQVMIVKS

SEQ ID NO: 1051 - protein, 30 aa, Artificial Sequence
  GFR-binding peptide
VPQDLRSVKVAKVVGRTPKVKEVQVMVVKS

SEQ ID NO: 1052 - protein, 32 aa, Artificial Sequence
  GFR-binding peptide
VPTEERSVKVAKVRIKPHQGQHKEVQVFLQHN

SEQ ID NO: 1053 - protein, 32 aa, Artificial Sequence
  GFR-binding peptide
VPTGQRSVKVAKVRIKPHQGQHKEVQVLEEHS

SEQ ID NO: 1054 - protein, 32 aa, Artificial Sequence
  GFR-binding peptide
TQVQLRSVKVAKVEIVRKKPIFKEVQVTLEDH

SEQ ID NO: 1055 - protein, 32 aa, Artificial Sequence
  GFR-binding peptide
TQVHHRPVQVRKIEYVRKKPKLKKATVRLEDH

SEQ ID NO: 1056 - protein, 30 aa, Artificial Sequence
  GFR-binding peptide
VPTELRPVQVRKIDENEKVVKKATVDMVVE

SEQ ID NO: 1057 - protein, 30 aa, Artificial Sequence
  GFR-binding peptide
VPEKMRPVQVRKIDENKNVVKKATVNMTVE

SEQ ID NO: 1058 - protein, 30 aa, Artificial Sequence
  GFR-binding peptide
VPTELRPVQVRKIDEYDKVVKKATVEMVVE

SEQ ID NO: 1059 - protein, 30 aa, Artificial Sequence
  GFR-binding peptide
APTKLRPVQVRKIDDSSNVIKKATVNMVVR

SEQ ID NO: 1060 - protein, 30 aa, Artificial Sequence
  GFR-binding peptide
APTQLRPVQVRKIDDSSNVIKKATVNMVVR

SEQ ID NO: 1061 - protein, 30 aa, Artificial Sequence
  GFR-binding peptide
APTKLRPVQVRKIDSSNNVIKKATVNMVVK

SEQ ID NO: 1062 - protein, 32 aa, Artificial Sequence
  GFR-binding peptide
VPTKLRPVQVRKIDDMGVPTKKATVEGMSVAE

SEQ ID NO: 1063 - protein, 30 aa, Artificial Sequence
  GFR-binding peptide
VPTKLRPVQVRKIDKGVVTYKKATVGMAVS

SEQ ID NO: 1064 - protein, 30 aa, Artificial Sequence
  GFR-binding peptide
TPTKMRPVQVRKINDKQQIIKKATVGMVVD

SEQ ID NO: 1065 - protein, 30 aa, Artificial Sequence
  GFR-binding peptide
VPARLRPVQVRKIDAANNVVKKATVDMVVE

SEQ ID NO: 1066 - protein, 30 aa, Artificial Sequence
  GFR-binding peptide
VPTRLRPVQVRKIDSANNVVKKATVDMVVE

SEQ ID NO: 1067 - protein, 30 aa, Artificial Sequence
  GFR-binding peptide
APVKTRPVQVRKIDNGRVLLKKATVMIVEE

SEQ ID NO: 1068 - protein, 30 aa, Artificial Sequence
  GFR-binding peptide
VPQALRPVQVRKIVGRKPKVKKATVMIVRS

SEQ ID NO: 1069 - protein, 30 aa, Artificial Sequence
  GFR-binding peptide
VSQDLRPVQVRKIIGKTPKIKKATVMIVKS

SEQ ID NO: 1070 - protein, 30 aa, Artificial Sequence
  GFR-binding peptide
VPQDLRPVQVRKIVGRTPKVKKATVMVVKS

SEQ ID NO: 1071 - protein, 32 aa, Artificial Sequence
  GFR-binding peptide
VPTEERPVQVRKIRIKPHQGQHKKATVFLQHN

SEQ ID NO: 1072 - protein, 32 aa, Artificial Sequence
  GFR-binding peptide
VPTGQRPVQVRKIRIKPHQGQHKKATVLEEHS

SEQ ID NO: 1073 - protein, 32 aa, Artificial Sequence
  GFR-binding peptide
SRVHHRPVQVRKIEYVRKKPKLKKATVRLEEH

SEQ ID NO: 1074 - protein, 39 aa, Artificial Sequence
  GFR-binding peptide
  MOD_RES (32)..(33): Xaa is C or S
ARVVMNQYNKLVVKDYEDLYLTSIASLQTPAXXPKPVKC

SEQ ID NO: 1075 - protein, 43 aa, Artificial Sequence
  GFR-binding peptide
  MOD_RES (2)..(4)..(36)..(37): Xaa is C or S
HXGXARVVMNQYNKLTPVGMDDLYLTSIASLKTPVXXAKGVKC

SEQ ID NO: 1076 - protein, 42 aa, Artificial Sequence
  GFR-binding peptide
  MOD_RES (2)..(4)..(35)..(36): Xaa is C or S
SXKXSKVIMQYNKLIKPTKGILYLTSIASLDQSVXXPSASAC

SEQ ID NO: 1077 - protein, 41 aa, Artificial Sequence
  GFR-binding peptide
  MOD_RES (34)..(35): Xaa is C or S
GSGEVVMDRYKKLIVKENEDFYLVSIANLETPVXXAKPIKC

SEQ ID NO: 1078 - protein, 42 aa, Artificial Sequence
  GFR-binding peptide
  MOD_RES (2)..(4)..(35)..(36): Xaa is C or S
SXKXSKVIMRYKKLIKPTKGIFYLVSIANLDQSVXXPSASAC

SEQ ID NO: 1079 - protein, 38 aa, Artificial Sequence
  GFR-binding peptide
  MOD_RES (31)..(32): Xaa is C or S
KVVMNRHKRLVVNNSSDYYLVSTASLKTPAXXAKPVAC

SEQ ID NO: 1080 - protein, 43 aa, Artificial Sequence
  GFR-binding peptide
  MOD_RES (2)..(4)..(36)..(37): Xaa is C or S
HXGXARVVMNYHYKLIVNSSDDKYLVSIPSLQTPAXXPKPVTC

SEQ ID NO: 1081 - protein, 31 aa, Artificial Sequence
  GFR-binding peptide
HDELTYHYKLIVNSSDDKYLVSIPSLQTPAC

SEQ ID NO: 1082 - protein, 38 aa, Artificial Sequence
  GFR-binding peptide
HDELTQYNKLPKKRVIELYLTSIASLQVQTPRCQVNRC

SEQ ID NO: 1083 - protein, 33 aa, Artificial Sequence
  GFR-binding peptide
KNHQRHKRLIVNSSDDYYLVSTASLQTPASSPC

SEQ ID NO: 1084 - protein, 37 aa, Artificial Sequence
  GFR-binding peptide
ARVVMNRYKKLGGGGGGGFYLMSIANLQTPASSPKPC

SEQ ID NO: 1085 - protein, 32 aa, Artificial Sequence
  GFR-binding peptide
MEQYNKLAAAALYLTSIASLETPVSSAKPVKC

SEQ ID NO: 1086 - protein, 39 aa, Artificial Sequence
  GFR-binding peptide
  MOD_RES (32)..(33): Xaa is C or S
GEVVMEHKRLVVKEDYEDYYLVSTASLETPVXXAKPISC

SEQ ID NO: 1087 - protein, 26 aa, Artificial Sequence
  GFR-binding peptide
QYNKLIVNNSSDLYLMSIASLKTPAC

SEQ ID NO: 1088 - protein, 28 aa, Artificial Sequence
  GFR-binding peptide
MDQYNKLGGGLYLMSIASLEQSVASSAC

SEQ ID NO: 1089 - protein, 40 aa, Artificial Sequence
  GFR-binding peptide
  MOD_RES (2)..(4): Xaa is C or S
RXGXGEVVMDYHYKLVVKENEDKYLTSIPSLETPVSSAKC

SEQ ID NO: 1090 - protein, 38 aa, Artificial Sequence
  GFR-binding peptide
  MOD_RES (31)..(32): Xaa is C or S
SRVIMRYKKLVKPKRGVFYLMSIANLKQPVXXPAASAC

SEQ ID NO: 1091 - protein, 37 aa, Artificial Sequence
  GFR-binding peptide
  MOD_RES (30)..(31): Xaa is C or S
SMGERYKKLVVKENEDLYLTSIANLKTPVXXAKGVKC

SEQ ID NO: 1092 - protein, 37 aa, Artificial Sequence
  GFR-binding peptide
ARVVIMQYNKLIVNSSDDLYLTSIASLQTPASSPKPC

SEQ ID NO: 1093 - protein, 33 aa, Artificial Sequence
  GFR-binding peptide
  MOD_RES (26)..(27): Xaa is C or S
QYNKLIVNSSDDLYLTSIANLKTPVXXAKGVKC

SEQ ID NO: 1094 - protein, 33 aa, Artificial Sequence
  GFR-binding peptide
MNRYKKLIVKDYDDLYLTSIASLETPVSSGGGC

SEQ ID NO: 1095 - protein, 42 aa, Artificial Sequence
  GFR-binding peptide
  MOD_RES (31)..(32): Xaa is C or S
RVVMNQYNKLVVKDYEDLYLTSIASLQTPAXXPKPVKGWFWW

SEQ ID NO: 1096 - protein, 42 aa, Artificial Sequence
  GFR-binding peptide
  MOD_RES (31)..(32): Xaa is C or S
RVAMNQYNKLVVKDYEDLYLTSIASLQTPAXXPKPVKPGPTG

SEQ ID NO: 1097 - protein, 38 aa, Artificial Sequence
  GFR-binding peptide
SKVIMRHKRLIVNSSDDYYLVSTASLQTPASSPPGPTG

SEQ ID NO: 1098 - protein, 30 aa, Artificial Sequence
  GFR-binding peptide
YHYKLIVNSSDDKYLVSIPSLQTPAPGPTG

SEQ ID NO: 1099 - protein, 32 aa, Artificial Sequence
  GFR-binding peptide
MDQYNKLGGGLYLMSIASLEQSVASSAPGPTG

SEQ ID NO: 1100 - protein, 30 aa, Artificial Sequence
  GFR-binding peptide
RHKRLIVNNSSDLYLMSIASLKTPAPGPTG

SEQ ID NO: 1101 - protein, 30 aa, Artificial Sequence
  GFR-binding peptide
RYKKLIVNNSSDLYLMSIASLKTPAPGPTG

SEQ ID NO: 1102 - protein, 44 aa, Artificial Sequence
  GFR-binding peptide
  MOD_RES (2)..(4): Xaa is C or S
RXGXGEVVMDYHYKLVVKENEDKYLTSIPSLETPVSSAKPGPTG

SEQ ID NO: 1103 - protein, 36 aa, Artificial Sequence
  GFR-binding peptide
MDYHYKLVVKENEDKYLTSIPSLETPVSSAKPGPTG

SEQ ID NO: 1104 - protein, 38 aa, Artificial Sequence
  GFR-binding peptide
NHQMDRYKKLGGGGGFYLMSIANLQTPASSPKPPGPTG

SEQ ID NO: 1105 - protein, 44 aa, Artificial Sequence
  GFR-binding peptide
  MOD_RES (2)..(4): Xaa is C or S
RXGXGEVVMDYHYKLVVKENEDKYLTSIPSLETPVSSAKGWFWW

SEQ ID NO: 1106 - protein, 35 aa, Artificial Sequence
  GFR-binding peptide
NHQMDQYNKLGGGLYLMSIASLEQSVASSAGWFWW

SEQ ID NO: 1107 - protein, 42 aa, Artificial Sequence
  GFR-binding peptide
HDELTQYNKLPKKRVIELYLTSIASLQVQTPRCQVNRPGPTG

SEQ ID NO: 1108 - protein, 36 aa, Artificial Sequence
  GFR-binding peptide
ELTQYNKLAAALYLTSIASLQVQTPRCQVNRPGPTG

SEQ ID NO: 1109 - protein, 38 aa, Artificial Sequence
  GFR-binding peptide
  MOD_RES (31)..(32): Xaa is C or S
SRVIMNSLQEVKPKRGVYYVIPLPELETPVXXAKPIKC

SEQ ID NO: 1110 - protein, 40 aa, Artificial Sequence
  GFR-binding peptide
  MOD_RES (33)..(34): Xaa is C or S
KSSRVIMNSLQEVKPTRGVYYVIPLPELAQPVXXPAASAC

SEQ ID NO: 1111 - protein, 28 aa, Artificial Sequence
  GFR-binding peptide
VQVEKHQGQHPKIRVKAVKVSREETPVC

SEQ ID NO: 1112 - protein, 30 aa, Artificial Sequence
  GFR-binding peptide
LFSMEGIHQGQHPKIRMIQMTINSEETPVC

SEQ ID NO: 1113 - protein, 42 aa, Artificial Sequence
  GFR-binding peptide
ALHDELRVTAKKLKPKKRVYEIKRVQVPRLQVQTPRCQVNRC

SEQ ID NO: 1114 - protein, 35 aa, Artificial Sequence
  GFR-binding peptide
  MOD_RES (28)..(29): Xaa is C or S
MNPYVKLVVNKNEDFFLISLSSMKEPVXXPEPIGC

SEQ ID NO: 1115 - protein, 35 aa, Artificial Sequence
  GFR-binding peptide
  MOD_RES (28)..(29): Xaa is C or S
MNPYVKLVVNKNEDFFLLSLSSTKEPVXXPEPIGC

SEQ ID NO: 1116 - protein, 41 aa, Artificial Sequence
  GFR-binding peptide
  MOD_RES (34)..(35): Xaa is C or S
GSAEVVMDEYQKYVVNNAADIYLISIPSLRAPVXXSAPAAC

SEQ ID NO: 1117 - protein, 38 aa, Artificial Sequence
  GFR-binding peptide
  MOD_RES (31)..(32): Xaa is C or S
EVVMDEYQKYVVNNAADIYLISIPSLRAPVXXSAPAAC

SEQ ID NO: 1118 - protein, 35 aa, Artificial Sequence
  GFR-binding peptide
  MOD_RES (28)..(29): Xaa is C or S
MDEYQKYVVNNAADIYLLSIPSLRAPVXXSAPAAC

SEQ ID NO: 1119 - protein, 27 aa, Artificial Sequence
  GFR-binding peptide
MDEYQKYVVNNAADIYLLSIPSLRAPC

SEQ ID NO: 1120 - protein, 32 aa, Artificial Sequence
  GFR-binding peptide
  MOD_RES (24)..(25): Xaa is C or S
MDEYQKYAAAIYLISIPSLRAPVXXSAPAAAC

SEQ ID NO: 1121 - protein, 26 aa, Artificial Sequence
  GFR-binding peptide
EYQKYVVNNAADIYLISIPSLRQPVC

SEQ ID NO: 1122 - protein, 39 aa, Artificial Sequence
  GFR-binding peptide
  MOD_RES (32)..(33): Xaa is C or S
ARVVMDEYQKYVVNNAADIYLISIPSLQTPAXXPKPVTC

SEQ ID NO: 1123 - protein, 39 aa, Artificial Sequence
  GFR-binding peptide
KNHQLFVTAKKQGQHPKIRIKRVQVPREETPVCELGEDN

SEQ ID NO: 1124 - protein, 34 aa, Artificial Sequence
  GFR-binding peptide
  MOD_RES (28)..(29): Xaa is C or S
VMNSLQEVKPTRGVYYLITLPELDQPVXXPSASA

SEQ ID NO: 1125 - protein, 37 aa, Artificial Sequence
  GFR-binding peptide
ALHDELTNSLQEPKKRVIEYYVIPLPELQTPRCQVNR

SEQ ID NO: 1126 - protein, 32 aa, Artificial Sequence
  GFR-binding peptide
EAVSMGEEYQKYTPVGMDDIYLISIPSLKTPV

SEQ ID NO: 1127 - protein, 32 aa, Artificial Sequence
  GFR-binding peptide
EAVSMGEEYQKYTPVGMDDIYLISIPSLAQPV

SEQ ID NO: 1128 - protein, 31 aa, Artificial Sequence
  GFR-binding peptide
HQLFSMEGIHQGQHPKIRMIQTTINSEETPV

SEQ ID NO: 1129 - protein, 31 aa, Artificial Sequence
  GFR-binding peptide
EVVAASMEGLHGQHPKIRIFLISIPSLETPV

SEQ ID NO: 1130 - protein, 30 aa, Artificial Sequence
  GFR-binding peptide
EVVMDNSLQEIVKENEDYYLLTLPELQVQT

SEQ ID NO: 1131 - protein, 30 aa, Artificial Sequence
  GFR-binding peptide
RVVMDNSLQEVVNNASDYYLITLPELRLQV

SEQ ID NO: 1132 - protein, 30 aa, Artificial Sequence
  GFR-binding peptide
RVVMNNSLQEIVNSSDDYYVIELPELKTPA

SEQ ID NO: 1133 - protein, 31 aa, Artificial Sequence
  GFR-binding peptide
SREVIMEYQKYVKPKRGVIFLISIPSLAQPV

SEQ ID NO: 1134 - protein, 30 aa, Artificial Sequence
  GFR-binding peptide
HEELREYQKYVKPKRGVIFLISIPSLQTPA

SEQ ID NO: 1135 - protein, 30 aa, Artificial Sequence
  GFR-binding peptide
SVAMNRYKKLIVNSSDDFYLTSIANLAQPV

SEQ ID NO: 1136 - protein, 30 aa, Artificial Sequence
  GFR-binding peptide
SVAMNPYVKLVVNKNEDFFLISLSSMKEPV

SEQ ID NO: 1137 - protein, 27 aa, Artificial Sequence
  GFR-binding peptide
MDEYQKYVVNNAADIYLISIPSLRAPV

SEQ ID NO: 1138 - protein, 31 aa, Artificial Sequence
  GFR-binding peptide
KNHQLFPIKGYIIQNKENFYLMNIPSLAQPV

SEQ ID NO: 1139 - protein, 30 aa, Artificial Sequence
  GFR-binding peptide
DVVMGPIKGYIINNKENFYLMNIPSMKTPT

SEQ ID NO: 1140 - protein, 31 aa, Artificial Sequence
  GFR-binding peptide
KNHQLFQYNKLPKKRVIELYLTSIASLQTPA

SEQ ID NO: 1141 - protein, 30 aa, Artificial Sequence
  GFR-binding peptide
HDEMEQYNKLPKKRVIELYLTSIASLQTPA

SEQ ID NO: 1142 - protein, 39 aa, Artificial Sequence; identical to SEQ ID NO: 1123
  GFR-binding peptide

SEQ ID NO: 1143 - protein, 37 aa, Artificial Sequence
  GFR-binding peptide
  MOD_RES (31)..(32): Xaa is C or S
HDEVMNSLQEVKPTRGVYYLITLPELDQPVXXPSASA

SEQ ID NO: 1144 - protein, 37 aa, Artificial Sequence; identical to SEQ ID NO: 1125
  GFR-binding peptide

SEQ ID NO: 1145 - protein, 32 aa, Artificial Sequence
  GFR-binding peptide
EAVSMGEEYQKYTPVGMKDIYLISIPSLKTPV

SEQ ID NO: 1146 - protein, 32 aa, Artificial Sequence
  GFR-binding peptide
EAVSMGEEYQKYTPVGMEDIYLISIPSLRAPV

SEQ ID NO: 1147 - protein, 31 aa, Artificial Sequence; identical to SEQ ID NO: 1128
  GFR-binding peptide

SEQ ID NO: 1148 - protein, 31 aa, Artificial Sequence
  GFR-binding peptide
RVVMNSMEGLHGQHPKLRIFLISIPSLAQPV

SEQ ID NO: 1149 - protein, 30 aa, Artificial Sequence
  GFR-binding peptide
EVVMDNSLQEIVKENEDYYLLTLPELAQPV

SEQ ID NO: 1150 - protein, 30 aa, Artificial Sequence
  GFR-binding peptide
SKVMDNSLQEVANNASDYYLITLPELETPV

SEQ ID NO: 1151 - protein, 30 aa, Artificial Sequence
  GFR-binding peptide
RVVMNNSLQEIVNSSDDYYVITLPELKTPA

SEQ ID NO: 1152 - protein, 31 aa, Artificial Sequence; identical to SEQ ID NO: 1133
  GFR-binding peptide

SEQ ID NO: 1153 - protein, 30 aa, Artificial Sequence
  GFR-binding peptide
EVVMNEYQKYVKPKGGVIFLISIPSLETPV

SEQ ID NO: 1154 - protein, 31 aa, Artificial Sequence
  GFR-binding peptide
EVVSMGRYKKLIVNSSEDFYLTSIANHHVRS

SEQ ID NO: 1155 - protein, 30 aa, Artificial Sequence
  GFR-binding peptide
EVTMNPYVKLAANKNEDFFLISLSSMKEPV

SEQ ID NO: 1156 - protein, 30 aa, Artificial Sequence
  GFR-binding peptide
SKVMDEYQKYVVNNAADIYLISIPSLRAPV

SEQ ID NO: 1157 - protein, 30 aa, Artificial Sequence
  GFR-binding peptide
EVVIMPIKGYIIQNKENFYLMNIPSEETPV

SEQ ID NO: 1158 - protein, 30 aa, Artificial Sequence; identical to SEQ ID NO: 1139
  GFR-binding peptide

SEQ ID NO: 1159 - protein, 31 aa, Artificial Sequence
  GFR-binding peptide
KNHQLFQYNKLPKEGALELYLTSIASHHTPV

SEQ ID NO: 1160 - protein, 30 aa, Artificial Sequence
  GFR-binding peptide
DVVMEQYNKLPEERVIELYLTSIASLKTPA

SEQ ID NO: 1161 - protein, 30 aa, Artificial Sequence
  GFR-binding peptide
EEVMEQYNKLPEKRVIKLYLTSIASLDQSV

SEQ ID NO: 1162 - protein, 42 aa, Artificial Sequence
  GFR-binding peptide
  MOD_RES (2)..(4)..(36)..(37): Xaa is C or S
RXAXSEVVMNQYNKLVVNKNEDLYLMSIASMKTPVXXPEPIG

SEQ ID NO: 1163 - protein, 42 aa, Artificial Sequence
  GFR-binding peptide
  MOD_RES (2)..(4)..(36): Xaa is C or S
HXGXSEVVMNQYNKLIVNSSDDLYLMSIASLKTPVXTPKTVH

SEQ ID NO: 1164 - protein, 42 aa, Artificial Sequence
  GFR-binding peptide
  MOD_RES (2)..(4)..(36)..(37): Xaa is C or S
HXGXSEVVMNQYNKLIVNSSDDLYLMSIASLKTPVXXPKPVY

SEQ ID NO: 1165 - protein, 42 aa, Artificial Sequence
  GFR-binding peptide
  MOD_RES (2)..(4)..(36)..(37): Xaa is C or S
HXGXAEVVMNQYNKLIVNSSDDLYLMSIASLQTPVXXPKPVT

SEQ ID NO: 1166 - protein, 42 aa, Artificial Sequence
  GFR-binding peptide
  MOD_RES (2)..(4)..(36)..(37): Xaa is C or S
HXGXAEVVMNQYNKLIVNNSSDLYLMSIASLKTPVXXAKPVA

SEQ ID NO: 1167 - protein, 43 aa, Artificial Sequence
  GFR-binding peptide
  MOD_RES (2)..(4)..(37)..(38): Xaa is C or S
RXGXEVVSMGEQYNKLTPVGMDDLYLMSIASLKTPVXXAKGVK

SEQ ID NO: 1168 - protein, 42 aa, Artificial Sequence
  GFR-binding peptide
  MOD_RES (2)..(4)..(36)..(37): Xaa is C or S
RXGXEEVVMGQYNKLYTVVGKDLYLMSIASLKTPVXXAKSAK

SEQ ID NO: 1169 - protein, 42 aa, Artificial Sequence
  GFR-binding peptide
  MOD_RES (2)..(4)..(36)..(37): Xaa is C or S
SXGXREVVMGQYNKLIIQQKDNLYLMSIASMKTPVXXPGASG

SEQ ID NO: 1170 - protein, 42 aa, Artificial Sequence
  GFR-binding peptide
  MOD_RES (2)..(4)..(36)..(37): Xaa is C or S
RXGXAEVVMDQYNKLVVNNAADLYLMSIASLRTPVXXSAPAA

SEQ ID NO: 1171 - protein, 42 aa, Artificial Sequence
  GFR-binding peptide
  MOD_RES (2)..(4)..(36)..(37): Xaa is C or S
RXGXSEVVMDQYNKLVVNNASDLYLMSIASLRTPVXXTPPTS

SEQ ID NO: 1172 - protein, 42 aa, Artificial Sequence
  GFR-binding peptide
  MOD_RES (2)..(4)..(36)..(37): Xaa is C or S
HXGXSEVVMNQYNKLIVNSSDDLYLMSIASLKTPVXXPKPVH

SEQ ID NO: 1173 - protein, 41 aa, Artificial Sequence
  GFR-binding peptide
  MOD_RES (2)..(4)..(35)..(36): Xaa is C or S
LXGXEVVIMQYNKLLLVRGNDLYLMSIASTKTPVXXTSPVR

SEQ ID NO: 1174 - protein, 41 aa, Artificial Sequence
  GFR-binding peptide
  MOD_RES (2)..(4)..(35)..(36): Xaa is C or S
SXKXEVVIMQYNKLVKPKRGVLYLMSIASLATPVXXPAASA

SEQ ID NO: 1175 - protein, 41 aa, Artificial Sequence
  GFR-binding peptide
  MOD_RES (2)..(4)..(35)..(36): Xaa is C or S
SXKXEVVIMQYNKLIKPTKGILYLMSIASLDTPVXXPSASA

SEQ ID NO: 1176 - protein, 41 aa, Artificial Sequence
  GFR-binding peptide
  MOD_RES (2)..(4)..(35)..(36): Xaa is C or S
SXKXEVVVMQYNKLVKPTRGVLYLMSIASLDTPVXXPSASA

SEQ ID NO: 1177 - protein, 42 aa, Artificial Sequence
  GFR-binding peptide
  MOD_RES (2)..(4)..(36)..(37): Xaa is C or S
RXAXSEVTMNQYNKLVVNKNEDLYLMSIASMKEPVXXPEPIG

SEQ ID NO: 1178 - protein, 42 aa, Artificial Sequence
  GFR-binding peptide
  MOD_RES (2)..(4)..(36): Xaa is C or S
HXGXSRVVMNQYNKLIVNSSDDLYLMSIASLKTPAXTPKTVH

SEQ ID NO: 1179 - protein, 42 aa, Artificial Sequence
  GFR-binding peptide
  MOD_RES (2)..(4)..(36)..(37): Xaa is C or S
HXGXSRVVMNQYNKLIVNSSDDLYLMSIASLKTPAXXPKPVY

SEQ ID NO: 1180 - protein, 42 aa, Artificial Sequence
  GFR-binding peptide
  MOD_RES (2)..(4)..(36)..(37): Xaa is C or S
HXGXARVVMNQYNKLIVNSSDDLYLMSIASLQTPAXXPKPVT

SEQ ID NO: 1181 - protein, 42 aa, Artificial Sequence
  GFR-binding peptide
  MOD_RES (2)..(4)..(36)..(37): Xaa is C or S
HXGXAKVVMNQYNKLIVNNSSDLYLMSIASLKTPAXXAKPVA

SEQ ID NO: 1182 - protein, 43 aa, Artificial Sequence
  GFR-binding peptide
  MOD_RES (2)..(4)..(37)..(38): Xaa is C or S
RXGXEAVSMGEQYNKLTPVGMDDLYLMSIASLKTPVXXAKGVK

SEQ ID NO: 1183 - protein, 42 aa, Artificial Sequence
  GFR-binding peptide
  MOD_RES (2)..(4)..(36)..(37): Xaa is C or S
RXGXESVAMGQYNKLYTVVGKDLYLMSIASLKTPVXXAKSAK

SEQ ID NO: 1184 - protein, 42 aa, Artificial Sequence
  GFR-binding peptide
  MOD_RES (2)..(4)..(36)..(37): Xaa is C or S
SXGXRDVVMGQYNKLIIQQKDNLYLMSIASMKTPTXXPGASG

SEQ ID NO: 1185 - protein, 42 aa, Artificial Sequence
  GFR-binding peptide
  MOD_RES (2)..(4)..(36)..(37): Xaa is C or S
RXGXAEVVMDQYNKLVVNNAADLYLMSIASLRAPVXXSAPAA

SEQ ID NO: 1186 - protein, 42 aa, Artificial Sequence
  GFR-binding peptide
  MOD_RES (2)..(4)..(36)..(37): Xaa is C or S
HXGXSRVVMNQYNKLIVNSSDDLYLMSIASLKTPAXXPKPVH

SEQ ID NO: 1187 - protein, 41 aa, Artificial Sequence
  GFR-binding peptide
  MOD_RES (2)..(4)..(35)..(36): Xaa is C or S
LXGXEEVIMQYNKLLLVRGNDLYLMSIASTKVPAXXTSPVR

SEQ ID NO: 1188 - protein, 41 aa, Artificial Sequence
  GFR-binding peptide
  MOD_RES (2)..(4)..(35)..(36): Xaa is C or S
SXKXSRVIMQYNKLVKPKRGVLYLMSIASLAQPVXXPAASA

SEQ ID NO: 1189 - protein, 41 aa, Artificial Sequence
  GFR-binding peptide
  MOD_RES (2)..(4)..(35)..(36): Xaa is C or S
SXKXSKVIMQYNKLIKPTKGILYLMSIASLDQSVXXPSASA

SEQ ID NO: 1190 - protein, 41 aa, Artificial Sequence
  GFR-binding peptide
  MOD_RES (2)..(4)..(35)..(36): Xaa is C or S
SXKXSKVVMQYNKLVKPTRGVLYLMSIASLDQPVXXPSASA

SEQ ID NO: 1191 - protein, 44 aa, Artificial Sequence
  GFR-binding peptide
  MOD_RES (2)..(4)..(38): Xaa is C or S
RXEXKNHQLFQYNKLHQGQHPKIRLYLMSIASEETPVXELGEDN

SEQ ID NO: 1192 - protein, 44 aa, Artificial Sequence
  GFR-binding peptide
  MOD_RES (2)..(4)..(38): Xaa is C or S
RXEXQSHEELQYNKLHQGQHPKIRLYLMSIASQGTPVXELGEDN

SEQ ID NO: 1193 - protein, 45 aa, Artificial Sequence
  GFR-binding peptide
  MOD_RES (2)..(4)..(41): Xaa is C or S
AXAXELHEELRQYNKLLKPKKRVYELYLMSIASHHVRSPQXKVSS

SEQ ID NO: 1194 - protein, 45 aa, Artificial Sequence
  GFR-binding peptide
  MOD_RES (2)..(4)..(41): Xaa is C or S
EXKXALHDELTQYNKLFIPKKRVIELYLMSIASLQVQTPRXQVNR

SEQ ID NO: 1195 - protein, 42 aa, Artificial Sequence
  GFR-binding peptide
  MOD_RES (2)..(4)..(36)..(37): Xaa is C or S
RXGXGEVTMDPYVKLVVKENEDFFLISLSSLEEPVXXAKPIK

SEQ ID NO: 1196 - protein, 42 aa, Artificial Sequence
  GFR-binding peptide
  MOD_RES (2)..(4)..(36)..(37): Xaa is C or S
RXGXGEVTMEPYVKLVVKDYEDFFLISLSSLEEPVXXAKPIS

SEQ ID NO: 1197 - protein, 42 aa, Artificial Sequence
  GFR-binding peptide
  MOD_RES (2)..(4)..(36): Xaa is C or S
HXGXSEVTMNPYVKLIVNSSDDFFLISLSSLKEPVXTPKTVH

SEQ ID NO: 1198 - protein, 42 aa, Artificial Sequence
  GFR-binding peptide
  MOD_RES (2)..(4)..(36)..(37): Xaa is C or S
HXGXSEVTMNPYVKLIVNSSDDFFLISLSSLKEPVXXPKPVY

SEQ ID NO: 1199 - protein, 42 aa, Artificial Sequence
  GFR-binding peptide
  MOD_RES (2)..(4)..(36)..(37): Xaa is C or S
HXGXAEVTMNPYVKLIVNSSDDFFLISLSSLQEPVXXPKPVT

SEQ ID NO: 1200 - protein, 42 aa, Artificial Sequence
  GFR-binding peptide
  MOD_RES (2)..(4)..(36)..(37): Xaa is C or S
HXGXAEVTMNPYVKLIVNNSSDFFLISLSSLKEPVXXAKPVA

SEQ ID NO: 1201 - protein, 43 aa, Artificial Sequence
  GFR-binding peptide
  MOD_RES (2)..(4)..(37)..(38): Xaa is C or S
RXGXEVTSMGEPYVKLTPVGMDDFFLISLSSLKEPVXXAKGVK

SEQ ID NO: 1202 - protein, 42 aa, Artificial Sequence
  GFR-binding peptide
  MOD_RES (2)..(4)..(36)..(37): Xaa is C or S
RXGXEEVTMGPYVKLYTVVGKDFFLISLSSLKEPVXXAKSAK

SEQ ID NO: 1203 - protein, 42 aa, Artificial Sequence
  GFR-binding peptide
  MOD_RES (2)..(4)..(36)..(37): Xaa is C or S
SXGXREVTMGPYVKLIIQQKDNFFLISLSSMKEPVXXPGASG

SEQ ID NO: 1204 - protein, 42 aa, Artificial Sequence
  GFR-binding peptide
  MOD_RES (2)..(4)..(36)..(37): Xaa is C or S
RXGXAEVTMDPYVKLVVNNAADFFLISLSSLREPVXXSAPAA

SEQ ID NO: 1205 - protein, 42 aa, Artificial Sequence
  GFR-binding peptide
  MOD_RES (2)..(4)..(36)..(37): Xaa is C or S
RXGXSEVTMDPYVKLVVNNASDFFLISLSSLREPVXXTPPTS

SEQ ID NO: 1206 - protein, 42 aa, Artificial Sequence
  GFR-binding peptide
  MOD_RES (2)..(4)..(36)..(37): Xaa is C or S
HXGXSEVTMNPYVKLIVNSSDDFFLISLSSLKEPVXXPKPVH

SEQ ID NO: 1207 - protein, 41 aa, Artificial Sequence
  GFR-binding peptide
  MOD_RES (2)..(4)..(35)..(36): Xaa is C or S
LXGXEVTIMPYVKLLLVRGNDFFLISLSSTKEPVXXTSPVR

SEQ ID NO: 1208 - protein, 41 aa, Artificial Sequence
  GFR-binding peptide
  MOD_RES (2)..(4)..(35)..(36): Xaa is C or S
SXKXEVTIMPYVKLVKPKRGVFFLISLSSLAEPVXXPAASA

SEQ ID NO: 1209 - protein, 41 aa, Artificial Sequence
  GFR-binding peptide
  MOD_RES (2)..(4)..(35)..(36): Xaa is C or S
SXKXEVTIMPYVKLIKPTKGIFFLISLSSLDEPVXXPSASA

SEQ ID NO: 1210 - protein, 41 aa, Artificial Sequence
  GFR-binding peptide
  MOD_RES (2)..(4)..(35)..(36): Xaa is C or S
SXKXEVTVMPYVKLVKPTRGVFFLISLSSLDEPVXXPSASA

SEQ ID NO: 1211 - protein, 42 aa, Artificial Sequence
  GFR-binding peptide
  MOD_RES (2)..(4)..(36)..(37): Xaa is C or S
RXGXGEVVMDPYVKLVVKENEDFFLISLSSLETPVXXAKPIK

SEQ ID NO: 1212 - protein, 42 aa, Artificial Sequence
  GFR-binding peptide
  MOD_RES (2)..(4)..(36)..(37): Xaa is C or S
RXGXGEVVMEPYVKLVVKDYEDFFLISLSSLETPVXXAKPIS

SEQ ID NO: 1213 - protein, 42 aa, Artificial Sequence
  GFR-binding peptide
  MOD_RES (2)..(4)..(36): Xaa is C or S
HXGXSRVVMNPYVKLIVNSSDDFFLISLSSLKTPAXTPKTVH

SEQ ID NO: 1214 - protein, 42 aa, Artificial Sequence
  GFR-binding peptide
  MOD_RES (2)..(4)..(36)..(37): Xaa is C or S
HXGXSRVVMNPYVKLIVNSSDDFFLISLSSLKTPAXXPKPVY

SEQ ID NO: 1215 - protein, 42 aa, Artificial Sequence
  GFR-binding peptide
  MOD_RES (2)..(4)..(36)..(37): Xaa is C or S
HXGXARVVMNPYVKLIVNSSDDFFLISLSSLQTPAXXPKPVT

SEQ ID NO: 1216 - protein, 42 aa, Artificial Sequence
  GFR-binding peptide
  MOD_RES (2)..(4)..(36)..(37): Xaa is C or S
HXGXAKVVMNPYVKLIVNNSSDFFLISLSSLKTPAXXAKPVA

SEQ ID NO: 1217 - protein, 43 aa, Artificial Sequence
  GFR-binding peptide
  MOD_RES (2)..(4)..(37)..(38): Xaa is C or S
RXGXEAVSMGEPYVKLTPVGMDDFFLISLSSLKTPVXXAKGVK

SEQ ID NO: 1218 - protein, 42 aa, Artificial Sequence
  GFR-binding peptide
  MOD_RES (2)..(4)..(36)..(37): Xaa is C or S
RXGXESVAMGPYVKLYTVVGKDFFLISLSSLKTPVXXAKSAK

SEQ ID NO: 1219 - protein, 42 aa, Artificial Sequence
  GFR-binding peptide
  MOD_RES (2)..(4)..(36)..(37): Xaa is C or S
SXGXRDVVMGPYVKLIIQQKDNFFLISLSSMKTPTXXPGASG

SEQ ID NO: 1220 - protein, 42 aa, Artificial Sequence
  GFR-binding peptide
  MOD_RES (2)..(4)..(36)..(37): Xaa is C or S
RXGXAEVVMDPYVKLVVNNAADFFLISLSSLRAPVXXSAPAA

SEQ ID NO: 1221 - protein, 42 aa, Artificial Sequence
  GFR-binding peptide
  MOD_RES (2)..(4)..(36)..(37): Xaa is C or S
RXGXSEVVMDPYVKLVVNNASDFFLISLSSLRTPVXXTPPTS

SEQ ID NO: 1222 - protein, 42 aa, Artificial Sequence
  GFR-binding peptide
  MOD_RES (2)..(4)..(36)..(37): Xaa is C or S
HXGXSRVVMNPYVKLIVNSSDDFFLISLSSLKTPAXXPKPVH

SEQ ID NO: 1223 - protein, 41 aa, Artificial Sequence
  GFR-binding peptide
  MOD_RES (2)..(4)..(35)..(36): Xaa is C or S
LXGXEEVIMPYVKLLLVRGNDFFLISLSSTKVPAXXTSPVR

SEQ ID NO: 1224 - protein, 41 aa, Artificial Sequence
  GFR-binding peptide
  MOD_RES (2)..(4)..(35)..(36): Xaa is C or S
SXKXSRVIMPYVKLVKPKRGVFFLISLSSLAQPVXXPAASA

SEQ ID NO: 1225 - protein, 41 aa, Artificial Sequence
  GFR-binding peptide
  MOD_RES (2)..(4)..(35)..(36): Xaa is C or S
SXKXSKVIMPYVKLIKPTKGIFFLISLSSLDQSVXXPSASA

SEQ ID NO: 1226 - protein, 41 aa, Artificial Sequence
  GFR-binding peptide
  MOD_RES (2)..(4)..(35)..(36): Xaa is C or S
SXKXSKVVMPYVKLVKPTRGVFFLISLSSLDQPVXXPSASA

SEQ ID NO: 1227 - protein, 44 aa, Artificial Sequence
  GFR-binding peptide
  MOD_RES (2)..(4)..(38): Xaa is C or S
RXEXKNHQLFPYVKLHQGQHPKIRFFLISLSSEETPVXELGEDN

SEQ ID NO: 1228 - protein, 44 aa, Artificial Sequence
  GFR-binding peptide
  MOD_RES (2)..(4)..(38): Xaa is C or S
RXEXQSHEELPYVKLHQGQHPKIRFFLISLSSQGTPVXELGEDN

SEQ ID NO: 1229 - protein, 45 aa, Artificial Sequence
  GFR-binding peptide
  MOD_RES (2)..(4)..(41): Xaa is C or S
AXAXELHEELRPYVKLLKPKKRVYEFFLISLSSHHVRSPQXKVSS

SEQ ID NO: 1230 - protein, 45 aa, Artificial Sequence
  GFR-binding peptide
  MOD_RES (2)..(4)..(41): Xaa is C or S
EXKXALHDELTPYVKLFIPKKRVIEFFLISLSSLQVQTPRXQVNR

SEQ ID NO: 1231 - protein, 42 aa, Artificial Sequence
  GFR-binding peptide
  MOD_RES (2)..(4)..(36)..(37): Xaa is C or S
RXGXGRVVMDRYKKLVVKENEDFYLVSIANLETPAXXAKPIK

SEQ ID NO: 1232 - protein, 42 aa, Artificial Sequence
  GFR-binding peptide
  MOD_RES (2)..(4)..(36)..(37): Xaa is C or S
RXAXSRVVMNRYKKLVVNKNEDFYLVSIANMKTPAXXPEPIG

SEQ ID NO: 1233 - protein, 42 aa, Artificial Sequence
  GFR-binding peptide
  MOD_RES (2)..(4)..(36)..(37): Xaa is C or S
RXGXGRVVMERYKKLVVKDYEDFYLVSIANLETPAXXAKPIS

SEQ ID NO: 1234 - protein, 42 aa, Artificial Sequence
  GFR-binding peptide
  MOD_RES (2)..(4)..(36)..(37): Xaa is C or S
HXGXARVVMNRYKKLIVNNSSDFYLVSIANLKTPAXXAKPVA

SEQ ID NO: 1235 - protein, 43 aa, Artificial Sequence
  GFR-binding peptide
  MOD_RES (2)..(4)..(37)..(38): Xaa is C or S
RXGXRVVSMGERYKKLTPVGMDDFYLVSIANLKTPAXXAKGVK

SEQ ID NO: 1236 - protein, 42 aa, Artificial Sequence
  GFR-binding peptide
  MOD_RES (2)..(4)..(36)..(37): Xaa is C or S
RXGXERVVMGRYKKLYTVVGKDFYLVSIANLKTPAXXAKSAK

SEQ ID NO: 1237 - protein, 42 aa, Artificial Sequence
  GFR-binding peptide
  MOD_RES (2)..(4)..(36)..(37): Xaa is C or S
SXGXRRVVMGRYKKLIIQQKDNFYLVSIANMKTPAXXPGASG

SEQ ID NO: 1238 - protein, 42 aa, Artificial Sequence
  GFR-binding peptide
  MOD_RES (2)..(4)..(36)..(37): Xaa is C or S
RXGXARVVMDRYKKLVVNNAADFYLVSIANLRTPAXXSAPAA

SEQ ID NO: 1239 - protein, 42 aa, Artificial Sequence
  GFR-binding peptide
  MOD_RES (2)..(4)..(36)..(37): Xaa is C or S
RXGXSRVVMDRYKKLVVNNASDFYLVSIANLRTPAXXTPPTS

SEQ ID NO: 1240 - protein, 41 aa, Artificial Sequence
  GFR-binding peptide
  MOD_RES (2)..(4)..(35)..(36): Xaa is C or S
LXGXRVVIMRYKKLLLVRGNDFYLVSIANTKTPAXXTSPVR

SEQ ID NO: 1241 - protein, 41 aa, Artificial Sequence
  GFR-binding peptide
  MOD_RES (2)..(4)..(35)..(36): Xaa is C or S
SXKXRVVIMRYKKLVKPKRGVFYLVSIANLATPAXXPAASA

SEQ ID NO: 1242 - protein, 41 aa, Artificial Sequence
  GFR-binding peptide
  MOD_RES (2)..(4)..(35)..(36): Xaa is C or S
SXKXRVVIMRYKKLIKPTKGIFYLVSIANLDTPAXXPSASA

SEQ ID NO: 1243 - protein, 41 aa, Artificial Sequence
  GFR-binding peptide
  MOD_RES (2)..(4)..(35)..(36): Xaa is C or S
SXKXRVVVMRYKKLVKPTRGVFYLVSIANLDTPAXXPSASA

SEQ ID NO: 1244 - protein, 42 aa, Artificial Sequence
  GFR-binding peptide
  MOD_RES (2)..(4)..(36)..(37): Xaa is C or S
RXGXGEVVMDRYKKLVVKENEDFYLVSIANLETPVXXAKPIK

SEQ ID NO: 1245 - protein, 42 aa, Artificial Sequence
  GFR-binding peptide
  MOD_RES (2)..(4)..(36)..(37): Xaa is C or S
RXAXSEVTMNRYKKLVVNKNEDFYLVSIANMKEPVXXPEPIG

SEQ ID NO: 1246 - protein, 42 aa, Artificial Sequence
  GFR-binding peptide
  MOD_RES (2)..(4)..(36)..(37): Xaa is C or S
RXGXGEVVMERYKKLVVKDYEDFYLVSIANLETPVXXAKPIS

SEQ ID NO: 1247 - protein, 42 aa, Artificial Sequence
  GFR-binding peptide
  MOD_RES (2)..(4)..(36)..(37): Xaa is C or S
HXGXAKVVMNRYKKLIVNNSSDFYLVSIANLKTPAXXAKPVA

SEQ ID NO: 1248 - protein, 43 aa, Artificial Sequence
  GFR-binding peptide
  MOD_RES (2)..(4)..(37)..(38): Xaa is C or S
RXGXEAVSMGERYKKLTPVGMDDFYLVSIANLKTPVXXAKGVK

SEQ ID NO: 1249 - protein, 42 aa, Artificial Sequence
  GFR-binding peptide
  MOD_RES (2)..(4)..(36)..(37): Xaa is C or S
RXGXESVAMGRYKKLYTVVGKDFYLVSIANLKTPVXXAKSAK

SEQ ID NO: 1250 - protein, 42 aa, Artificial Sequence
  GFR-binding peptide
  MOD_RES (2)..(4)..(36)..(37): Xaa is C or S
SXGXRDVVMGRYKKLIIQQKDNFYLVSIANMKTPTXXPGASG

SEQ ID NO: 1251 - protein, 42 aa, Artificial Sequence
  GFR-binding peptide
  MOD_RES (2)..(4)..(36)..(37): Xaa is C or S
RXGXAEVVMDRYKKLVVNNAADFYLVSIANLRAPVXXSAPAA

SEQ ID NO: 1252 - protein, 42 aa, Artificial Sequence
  GFR-binding peptide
  MOD_RES (2)..(4)..(36)..(37): Xaa is C or S
RXGXSEVVMDRYKKLVVNNASDFYLVSIANLRTPVXXTPPTS

SEQ ID NO: 1253 - protein, 41 aa, Artificial Sequence
  GFR-binding peptide
  MOD_RES (2)..(4)..(35)..(36): Xaa is C or S
LXGXEEVIMRYKKLLLVRGNDFYLVSIANTKVPAXXTSPVR

SEQ ID NO: 1254 - protein, 41 aa, Artificial Sequence
  GFR-binding peptide
  MOD_RES (2)..(4)..(35)..(36): Xaa is C or S
SXKXSRVIMRYKKLVKPKRGVFYLVSIANLAQPVXXPAASA

SEQ ID NO: 1255 - protein, 41 aa, Artificial Sequence
  GFR-binding peptide
  MOD_RES (2)..(4)..(35)..(36): Xaa is C or S
SXKXSKVIMRYKKLIKPTKGIFYLVSIANLDQSVXXPSASA

SEQ ID NO: 1256 - protein, 41 aa, Artificial Sequence
  GFR-binding peptide
  MOD_RES (2)..(4)..(35)..(36): Xaa is C or S
SXKXSKVVMRYKKLVKPTRGVFYLVSIANLDQPVXXPSASA

SEQ ID NO: 1257 - protein, 44 aa, Artificial Sequence
  GFR-binding peptide
  MOD_RES (2)..(4)..(38): Xaa is C or S
RXEXKNHQLFRYKKLHQGQHPKIRFYLVSIANEETPVXELGEDN

SEQ ID NO: 1258 - protein, 44 aa, Artificial Sequence
  GFR-binding peptide
  MOD_RES (2)..(4)..(38): Xaa is C or S
RXEXQSHEELRYKKLHQGQHPKIRFYLVSIANQGTPVXELGEDN

SEQ ID NO: 1259 - protein, 45 aa, Artificial Sequence
  GFR-binding peptide
  MOD_RES (2)..(4)..(41): Xaa is C or S
AXAXELHEELRRYKKLLKPKKRVYEFYLVSIANHHVRSPQXKVSS

SEQ ID NO: 1260 - protein, 45 aa, Artificial Sequence
  GFR-binding peptide
  MOD_RES (2)..(4)..(41): Xaa is C or S
EXKXALHDELTRYKKLFIPKKRVIEFYLVSIANLQVQTPRXQVNR

SEQ ID NO: 1261 - protein, 42 aa, Artificial Sequence
  GFR-binding peptide
  MOD_RES (2)..(4)..(36)..(37): Xaa is C or S
RXGXGKVVMDRHKRLVVKENEDYYLVSTASLETPAXXAKPIK

SEQ ID NO: 1262 - protein, 42 aa, Artificial Sequence
  GFR-binding peptide
  MOD_RES (2)..(4)..(36)..(37): Xaa is C or S
RXAXSKVVMNRHKRLVVNKNEDYYLVSTASMKTPAXXPEPIG

SEQ ID NO: 1263 - protein, 42 aa, Artificial Sequence
  GFR-binding peptide
  MOD_RES (2)..(4)..(36)..(37): Xaa is C or S
RXGXGKVVMERHKRLVVKDYEDYYLVSTASLETPAXXAKPIS

SEQ ID NO: 1264 - protein, 42 aa, Artificial Sequence
  GFR-binding peptide
  MOD_RES (2)..(4)..(36): Xaa is C or S
HXGXSKVVMNRHKRLIVNSSDDYYLVSTASLKTPAXTPKTVH

SEQ ID NO: 1265 - protein, 42 aa, Artificial Sequence
  GFR-binding peptide
  MOD_RES (2)..(4)..(36)..(37): Xaa is C or S
HXGXSKVVMNRHKRLIVNSSDDYYLVSTASLKTPAXXPKPVY

SEQ ID NO: 1266 - protein, 42 aa, Artificial Sequence
  GFR-binding peptide
  MOD_RES (2)..(4)..(36)..(37): Xaa is C or S
HXGXAKVVMNRHKRLIVNSSDDYYLVSTASLQTPAXXPKPVT

SEQ ID NO: 1267 - protein, 43 aa, Artificial Sequence
  GFR-binding peptide
  MOD_RES (2)..(4)..(37)..(38): Xaa is C or S
RXGXKVVSMGERHKRLTPVGMDDYYLVSTASLKTPAXXAKGVK

SEQ ID NO: 1268 - protein, 42 aa, Artificial Sequence
  GFR-binding peptide
  MOD_RES (2)..(4)..(36)..(37): Xaa is C or S
RXGXEKVVMGRHKRLYTVVGKDYYLVSTASLKTPAXXAKSAK

SEQ ID NO: 1269 - protein, 42 aa, Artificial Sequence
  GFR-binding peptide
  MOD_RES (2)..(4)..(36)..(37): Xaa is C or S
SXGXRKVVMGRHKRLIIQQKDNYYLVSTASMKTPAXXPGASG

SEQ ID NO: 1270 - protein, 42 aa, Artificial Sequence
  GFR-binding peptide
  MOD_RES (2)..(4)..(36)..(37): Xaa is C or S
RXGXAKVVMDRHKRLVVNNAADYYLVSTASLRTPAXXSAPAA

SEQ ID NO: 1271 - protein, 42 aa, Artificial Sequence
  GFR-binding peptide
  MOD_RES (2)..(4)..(36)..(37): Xaa is C or S
RXGXSKVVMDRHKRLVVNNASDYYLVSTASLRTPAXXTPPTS

SEQ ID NO: 1272 - protein, 42 aa, Artificial Sequence
  GFR-binding peptide
  MOD_RES (2)..(4)..(36)..(37): Xaa is C or S
HXGXSKVVMNRHKRLIVNSSDDYYLVSTASLKTPAXXPKPVH

SEQ ID NO: 1273 - protein, 41 aa, Artificial Sequence
  GFR-binding peptide
  MOD_RES (2)..(4)..(35)..(36): Xaa is C or S
LXGXKVVIMRHKRLLLVRGNDYYLVSTASTKTPAXXTSPVR

SEQ ID NO: 1274 - protein, 41 aa, Artificial Sequence
  GFR-binding peptide
  MOD_RES (2)..(4)..(35)..(36): Xaa is C or S
SXKXKVVIMRHKRLVKPKRGVYYLVSTASLATPAXXPAASA

SEQ ID NO: 1275 - protein, 41 aa, Artificial Sequence
  GFR-binding peptide
  MOD_RES (2)..(4)..(35)..(36): Xaa is C or S
SXKXKVVIMRHKRLIKPTKGIYYLVSTASLDTPAXXPSASA

SEQ ID NO: 1276 - protein, 41 aa, Artificial Sequence
  GFR-binding peptide
  MOD_RES (2)..(4)..(35)..(36): Xaa is C or S
SXKXKVVVMRHKRLVKPTRGVYYLVSTASLDTPAXXPSASA

SEQ ID NO: 1277 - protein, 42 aa, Artificial Sequence
  GFR-binding peptide
  MOD_RES (2)..(4)..(36)..(37): Xaa is C or S
RXGXGEVVMDRHKRLVVKENEDYYLVSTASLETPVXXAKPIK

SEQ ID NO: 1278 - protein, 42 aa, Artificial Sequence
  GFR-binding peptide
  MOD_RES (2)..(4)..(36)..(37): Xaa is C or S
RXAXSEVTMNRHKRLVVNKNEDYYLVSTASMKEPVXXPEPIG

SEQ ID NO: 1279 - protein, 42 aa, Artificial Sequence
  GFR-binding peptide
  MOD_RES (2)..(4)..(36)..(37): Xaa is C or S
RXGXGEVVMERHKRLVVKDYEDYYLVSTASLETPVXXAKPIS

SEQ ID NO: 1280 - protein, 42 aa, Artificial Sequence
  GFR-binding peptide
  MOD_RES (2)..(4)..(36): Xaa is C or S
HXGXSRVVMNRHKRLIVNSSDDYYLVSTASLKTPAXTPKTVH

SEQ ID NO: 1281 - protein, 42 aa, Artificial Sequence
  GFR-binding peptide
  MOD_RES (2)..(4)..(36)..(37): Xaa is C or S
HXGXSRVVMNRHKRLIVNSSDDYYLVSTASLKTPAXXPKPVY

SEQ ID NO: 1282 - protein, 42 aa, Artificial Sequence
  GFR-binding peptide
  MOD_RES (2)..(4)..(36)..(37): Xaa is C or S
HXGXARVVMNRHKRLIVNSSDDYYLVSTASLQTPAXXPKPVT

SEQ ID NO: 1283 - protein, 43 aa, Artificial Sequence
  GFR-binding peptide
  MOD_RES (2)..(4)..(37)..(38): Xaa is C or S
RXGXEAVSMGERHKRLTPVGMDDYYLVSTASLKTPVXXAKGVK

SEQ ID NO: 1284 - protein, 42 aa, Artificial Sequence
  GFR-binding peptide
  MOD_RES (2)..(4)..(36)..(37): Xaa is C or S
RXGXESVAMGRHKRLYTVVGKDYYLVSTASLKTPVXXAKSAK

SEQ ID NO: 1285 - protein, 42 aa, Artificial Sequence
  GFR-binding peptide
  MOD_RES (2)..(4)..(36)..(37): Xaa is C or S
SXGXRDVVMGRHKRLIIQQKDNYYLVSTASMKTPTXXPGASG

SEQ ID NO: 1286 - protein, 42 aa, Artificial Sequence
  GFR-binding peptide
  MOD_RES (2)..(4)..(36)..(37): Xaa is C or S
RXGXAEVVMDRHKRLVVNNAADYYLVSTASLRAPVXXSAPAA

SEQ ID NO: 1287 - protein, 42 aa, Artificial Sequence
  GFR-binding peptide
  MOD_RES (2)..(4)..(36)..(37): Xaa is C or S
RXGXSEVVMDRHKRLVVNNASDYYLVSTASLRTPVXXTPPTS

SEQ ID NO: 1288 - protein, 42 aa, Artificial Sequence
  GFR-binding peptide
  MOD_RES (2)..(4)..(36)..(37): Xaa is C or S
HXGXSRVVMNRHKRLIVNSSDDYYLVSTASLKTPAXXPKPVH

SEQ ID NO: 1289 - protein, 41 aa, Artificial Sequence
  GFR-binding peptide
  MOD_RES (2)..(4)..(35)..(36): Xaa is C or S
LXGXEEVIMRHKRLLLVRGNDYYLVSTASTKVPAXXTSPVR

SEQ ID NO: 1290 - protein, 41 aa, Artificial Sequence
  GFR-binding peptide
  MOD_RES (2)..(4)..(35)..(36): Xaa is C or S
SXKXSRVIMRHKRLVKPKRGVYYLVSTASLAQPVXXPAASA

SEQ ID NO: 1291 - protein, 41 aa, Artificial Sequence
  GFR-binding peptide
  MOD_RES (2)..(4)..(35)..(36): Xaa is C or S
SXKXSKVIMRHKRLIKPTKGIYYLVSTASLDQSVXXPSASA

SEQ ID NO: 1292 - protein, 41 aa, Artificial Sequence
  GFR-binding peptide
  MOD_RES (2)..(4)..(35)..(36): Xaa is C or S
SXKXSKVVMRHKRLVKPTRGVYYLVSTASLDQPVXXPSASA

SEQ ID NO: 1293 - protein, 44 aa, Artificial Sequence
  GFR-binding peptide
  MOD_RES (2)..(4)..(38): Xaa is C or S
RXEXKNHQLFRHKRLHQGQHPKIRYYLVSTASEETPVXELGEDN

SEQ ID NO: 1294 - protein, 44 aa, Artificial Sequence
  GFR-binding peptide
  MOD_RES (2)..(4)..(38): Xaa is C or S
RXEXQSHEELRHKRLHQGQHPKIRYYLVSTASQGTPVXELGEDN

SEQ ID NO: 1295 - protein, 45 aa, Artificial Sequence
  GFR-binding peptide
  MOD_RES (2)..(4)..(41): Xaa is C or S
AXAXELHEELRRHKRLLKPKKRVYEYYLVSTASHHVRSPQXKVSS

SEQ ID NO: 1296 - protein, 45 aa, Artificial Sequence
  GFR-binding peptide
  MOD_RES (2)..(4)..(41): Xaa is C or S
EXKXALHDELTRHKRLFIPKKRVIEYYLVSTASLQVQTPRXQVNR

SEQ ID NO: 1297 - protein, 42 aa, Artificial Sequence
  GFR-binding peptide
  MOD_RES (2)..(4)..(36)..(37): Xaa is C or S
RXGXGEAVMDYHYKLVVKENEDKYLVSIPSLETPVXXAKPIK

SEQ ID NO: 1298 - protein, 42 aa, Artificial Sequence
  GFR-binding peptide
  MOD_RES (2)..(4)..(36)..(37): Xaa is C or S
RXAXSEAVMNYHYKLVVNKNEDKYLVSIPSMKTPVXXPEPIG

SEQ ID NO: 1299 - protein, 42 aa, Artificial Sequence
  GFR-binding peptide
  MOD_RES (2)..(4)..(36)..(37): Xaa is C or S
RXGXGEAVMEYHYKLVVKDYEDKYLVSIPSLETPVXXAKPIS

SEQ ID NO: 1300 - protein, 42 aa, Artificial Sequence
  GFR-binding peptide
  MOD_RES (2)..(4)..(36): Xaa is C or S
HXGXSEAVMNYHYKLIVNSSDDKYLVSIPSLKTPVXTPKTVH

SEQ ID NO: 1301 - protein, 42 aa, Artificial Sequence
  GFR-binding peptide
  MOD_RES (2)..(4)..(36)..(37): Xaa is C or S
HXGXSEAVMNYHYKLIVNSSDDKYLVSIPSLKTPVXXPKPVY

SEQ ID NO: 1302 - protein, 42 aa, Artificial Sequence
  GFR-binding peptide
  MOD_RES (2)..(4)..(36)..(37): Xaa is C or S
HXGXAEAVMNYHYKLIVNSSDDKYLVSIPSLQTPVXXPKPVT

SEQ ID NO: 1303 - protein, 42 aa, Artificial Sequence
  GFR-binding peptide
  MOD_RES (2)..(4)..(36)..(37): Xaa is C or S
HXGXAEAVMNYHYKLIVNNSSDKYLVSIPSLKTPVXXAKPVA

SEQ ID NO: 1304 - protein, 42 aa, Artificial Sequence
  GFR-binding peptide
  MOD_RES (2)..(4)..(36)..(37): Xaa is C or S
RXGXEEAVMGYHYKLYTVVGKDKYLVSIPSLKTPVXXAKSAK

SEQ ID NO: 1305 - protein, 42 aa, Artificial Sequence
  GFR-binding peptide
  MOD_RES (2)..(4)..(36)..(37): Xaa is C or S
SXGXREAVMGYHYKLIIQQKDNKYLVSIPSMKTPVXXPGASG

SEQ ID NO: 1306 - protein, 42 aa, Artificial Sequence
  GFR-binding peptide
  MOD_RES (2)..(4)..(36)..(37): Xaa is C or S
RXGXAEAVMDYHYKLVVNNAADKYLVSIPSLRTPVXXSAPAA

SEQ ID NO: 1307 - protein, 42 aa, Artificial Sequence
  GFR-binding peptide
  MOD_RES (2)..(4)..(36)..(37): Xaa is C or S
RXGXSEAVMDYHYKLVVNNASDKYLVSIPSLRTPVXXTPPTS

SEQ ID NO: 1308 - protein, 42 aa, Artificial Sequence
  GFR-binding peptide
  MOD_RES (2)..(4)..(36)..(37): Xaa is C or S
HXGXSEAVMNYHYKLIVNSSDDKYLVSIPSLKTPVXXPKPVH

SEQ ID NO: 1309 - protein, 41 aa, Artificial Sequence
  GFR-binding peptide
  MOD_RES (2)..(4)..(35)..(36): Xaa is C or S
LXGXEAVIMYHYKLLLVRGNDKYLVSIPSTKTPVXXTSPVR

SEQ ID NO: 1310 - protein, 41 aa, Artificial Sequence
  GFR-binding peptide
  MOD_RES (2)..(4)..(35)..(36): Xaa is C or S
SXKXEAVIMYHYKLVKPKRGVKYLVSIPSLATPVXXPAASA

SEQ ID NO: 1311 - protein, 41 aa, Artificial Sequence
  GFR-binding peptide
  MOD_RES (2)..(4)..(35)..(36): Xaa is C or S
SXKXEAVIMYHYKLIKPTKGIKYLVSIPSLDTPVXXPSASA

SEQ ID NO: 1312 - protein, 41 aa, Artificial Sequence
  GFR-binding peptide
  MOD_RES (2)..(4)..(35)..(36): Xaa is C or S
SXKXEAVVMYHYKLVKPTRGVKYLVSIPSLDTPVXXPSASA

SEQ ID NO: 1313 - protein, 42 aa, Artificial Sequence
  GFR-binding peptide
  MOD_RES (2)..(4)..(36)..(37): Xaa is C or S
RXGXGEVVMDYHYKLVVKENEDKYLVSIPSLETPVXXAKPIK

SEQ ID NO: 1314 - protein, 42 aa, Artificial Sequence
  GFR-binding peptide
  MOD_RES (2)..(4)..(36)..(37): Xaa is C or S
RXAXSEVTMNYHYKLVVNKNEDKYLVSIPSMKEPVXXPEPIG

SEQ ID NO: 1315 - protein, 42 aa, Artificial Sequence
  GFR-binding peptide
  MOD_RES (2)..(4)..(36)..(37): Xaa is C or S
RXGXGEVVMEYHYKLVVKDYEDKYLVSIPSLETPVXXAKPIS

SEQ ID NO: 1316 - protein, 42 aa, Artificial Sequence
  GFR-binding peptide
  MOD_RES (2)..(4)..(36): Xaa is C or S
HXGXSRVVMNYHYKLIVNSSDDKYLVSIPSLKTPAXTPKTVH

SEQ ID NO: 1317 - protein, 42 aa, Artificial Sequence
  GFR-binding peptide
  MOD_RES (2)..(4)..(36)..(37): Xaa is C or S
HXGXSRVVMNYHYKLIVNSSDDKYLVSIPSLKTPAXXPKPVY

SEQ ID NO: 1318 - protein, 42 aa, Artificial Sequence
  GFR-binding peptide
  MOD_RES (2)..(4)..(36)..(37): Xaa is C or S
HXGXARVVMNYHYKLIVNSSDDKYLVSIPSLQTPAXXPKPVT

SEQ ID NO: 1319 - protein, 42 aa, Artificial Sequence
  GFR-binding peptide
  MOD_RES (2)..(4)..(36)..(37): Xaa is C or S
HXGXAKVVMNYHYKLIVNNSSDKYLVSIPSLKTPAXXAKPVA

SEQ ID NO: 1320 - protein, 42 aa, Artificial Sequence
  GFR-binding peptide
  MOD_RES (2)..(4)..(36)..(37): Xaa is C or S
RXGXESVAMGYHYKLYTVVGKDKYLVSIPSLKTPVXXAKSAK

SEQ ID NO: 1321 - protein, 42 aa, Artificial Sequence
  GFR-binding peptide
  MOD_RES (2)..(4)..(36)..(37): Xaa is C or S
SXGXRDVVMGYHYKLIIQQKDNKYLVSIPSMKTPTXXPGASG

SEQ ID NO: 1322 - protein, 42 aa, Artificial Sequence
  GFR-binding peptide
  MOD_RES (2)..(4)..(36)..(37): Xaa is C or S
RXGXAEVVMDYHYKLVVNNAADKYLVSIPSLRAPVXXSAPAA

SEQ ID NO: 1323 - protein, 42 aa, Artificial Sequence
  GFR-binding peptide
  MOD_RES (2)..(4)..(36)..(37): Xaa is C or S
RXGXSEVVMDYHYKLVVNNASDKYLVSIPSLRTPVXXTPPTS

SEQ ID NO: 1324 - protein, 42 aa, Artificial Sequence
  GFR-binding peptide
  MOD_RES (2)..(4)..(36)..(37): Xaa is C or S
HXGXSRVVMNYHYKLIVNSSDDKYLVSIPSLKTPAXXPKPVH

SEQ ID NO: 1325 - protein, 41 aa, Artificial Sequence
  GFR-binding peptide
  MOD_RES (2)..(4)..(35)..(36): Xaa is C or S
LXGXEEVIMYHYKLLLVRGNDKYLVSIPSTKVPAXXTSPVR

SEQ ID NO: 1326 - protein, 41 aa, Artificial Sequence
  GFR-binding peptide
  MOD_RES (2)..(4)..(35)..(36): Xaa is C or S
SXKXSRVIMYHYKLVKPKRGVKYLVSIPSLAQPVXXPAASA

SEQ ID NO: 1327 - protein, 41 aa, Artificial Sequence
  GFR-binding peptide
  MOD_RES (2)..(4)..(35)..(36): Xaa is C or S
SXKXSKVIMYHYKLIKPTKGIKYLVSIPSLDQSVXXPSASA

SEQ ID NO: 1328 - protein, 41 aa, Artificial Sequence
  GFR-binding peptide
  MOD_RES (2)..(4)..(35)..(36): Xaa is C or S
SXKXSKVVMYHYKLVKPTRGVKYLVSIPSLDQPVXXPSASA

SEQ ID NO: 1329 - protein, 44 aa, Artificial Sequence
  GFR-binding peptide
  MOD_RES (2)..(4)..(38): Xaa is C or S
RXEXKNHQLFYHYKLHQGQHPKIRKYLVSIPSEETPVXELGEDN

SEQ ID NO: 1330 - protein, 44 aa, Artificial Sequence
  GFR-binding peptide
  MOD_RES (2)..(4)..(38): Xaa is C or S
RXEXQSHEELYHYKLHQGQHPKIRKYLVSIPSQGTPVXELGEDN

SEQ ID NO: 1331 - protein, 45 aa, Artificial Sequence
  GFR-binding peptide
  MOD_RES (2)..(4)..(41): Xaa is C or S
AXAXELHEELRYHYKLLKPKKRVYEKYLVSIPSHHVRSPQXKVSS

SEQ ID NO: 1332 - protein, 45 aa, Artificial Sequence
  GFR-binding peptide
  MOD_RES (2)..(4)..(41): Xaa is C or S
EXKXALHDELTYHYKLFIPKKRVIEKYLVSIPSLQVQTPRXQVNR

SEQ ID NO: 1333 - protein, 42 aa, Artificial Sequence
  GFR-binding peptide
  MOD_RES (2)..(4)..(36)..(37): Xaa is C or S
RXGXGSVAMDEYKFKVVKENEDLYLISIPELETPVXXAKPIK

SEQ ID NO: 1334 - protein, 42 aa, Artificial Sequence
  GFR-binding peptide
  MOD_RES (2)..(4)..(36)..(37): Xaa is C or S
RXAXSSVAMNEYKFKVVNKNEDLYLISIPEMKTPVXXPEPIG

SEQ ID NO: 1335 - protein, 42 aa, Artificial Sequence
  GFR-binding peptide
  MOD_RES (2)..(4)..(36)..(37): Xaa is C or S
RXGXGSVAMEEYKFKVVKDYEDLYLISIPELETPVXXAKPIS

SEQ ID NO: 1336 - protein, 42 aa, Artificial Sequence
  GFR-binding peptide
  MOD_RES (2)..(4)..(36): Xaa is C or S
HXGXSSVAMNEYKFKIVNSSDDLYLISIPELKTPVXTPKTVH

SEQ ID NO: 1337 - protein, 42 aa, Artificial Sequence
  GFR-binding peptide
  MOD_RES (2)..(4)..(36)..(37): Xaa is C or S
HXGXSSVAMNEYKFKIVNSSDDLYLISIPELKTPVXXPKPVY

SEQ ID NO: 1338 - protein, 42 aa, Artificial Sequence
  GFR-binding peptide
  MOD_RES (2)..(4)..(36)..(37): Xaa is C or S
HXGXASVAMNEYKFKIVNSSDDLYLISIPELQTPVXXPKPVT

SEQ ID NO: 1339 - protein, 42 aa, Artificial Sequence
  GFR-binding peptide
  MOD_RES (2)..(4)..(36)..(37): Xaa is C or S
HXGXASVAMNEYKFKIVNNSSDLYLISIPELKTPVXXAKPVA

SEQ ID NO: 1340 - protein, 43 aa, Artificial Sequence
  GFR-binding peptide
  MOD_RES (2)..(4)..(37)..(38): Xaa is C or S
RXGXSVASMGEEYKFKTPVGMDDLYLISIPELKTPVXXAKGVK

SEQ ID NO: 1341 - protein, 42 aa, Artificial Sequence
  GFR-binding peptide
  MOD_RES (2)..(4)..(36)..(37): Xaa is C or S
SXGXRSVAMGEYKFKIIQQKDNLYLISIPEMKTPVXXPGASG

SEQ ID NO: 1342 - protein, 42 aa, Artificial Sequence
  GFR-binding peptide
  MOD_RES (2)..(4)..(36)..(37): Xaa is C or S
RXGXASVAMDEYKFKVVNNAADLYLISIPELRTPVXXSAPAA

SEQ ID NO: 1343 - protein, 42 aa, Artificial Sequence
  GFR-binding peptide
  MOD_RES (2)..(4)..(36)..(37): Xaa is C or S
RXGXSSVAMDEYKFKVVNNASDLYLISIPELRTPVXXTPPTS

SEQ ID NO: 1344 - protein, 42 aa, Artificial Sequence
  GFR-binding peptide
  MOD_RES (2)..(4)..(36)..(37): Xaa is C or S
HXGXSSVAMNEYKFKIVNSSDDLYLISIPELKTPVXXPKPVH

SEQ ID NO: 1345 - protein, 41 aa, Artificial Sequence
  GFR-binding peptide
  MOD_RES (2)..(4)..(35)..(36): Xaa is C or S
LXGXSVAIMEYKFKLLVRGNDLYLISIPETKTPVXXTSPVR

SEQ ID NO: 1346 - protein, 41 aa, Artificial Sequence
  GFR-binding peptide
  MOD_RES (2)..(4)..(35)..(36): Xaa is C or S
SXKXSVAIMEYKFKVKPKRGVLYLISIPELATPVXXPAASA

SEQ ID NO: 1347 - protein, 41 aa, Artificial Sequence
  GFR-binding peptide
  MOD_RES (2)..(4)..(35)..(36): Xaa is C or S
SXKXSVAIMEYKFKIKPTKGILYLISIPELDTPVXXPSASA

SEQ ID NO: 1348 - protein, 41 aa, Artificial Sequence
  GFR-binding peptide
  MOD_RES (2)..(4)..(35)..(36): Xaa is C or S
SXKXSVAVMEYKFKVKPTRGVLYLISIPELDTPVXXPSASA

SEQ ID NO: 1349 - protein, 42 aa, Artificial Sequence
  GFR-binding peptide
  MOD_RES (2)..(4)..(36)..(37): Xaa is C or S
RXGXGEVVMDEYKFKVVKENEDLYLISIPELETPVXXAKPIK

SEQ ID NO: 1350 - protein, 42 aa, Artificial Sequence
  GFR-binding peptide
  MOD_RES (2)..(4)..(36)..(37): Xaa is C or S
RXAXSEVTMNEYKFKVVNKNEDLYLISIPEMKEPVXXPEPIG

SEQ ID NO: 1351 - protein, 42 aa, Artificial Sequence
  GFR-binding peptide
  MOD_RES (2)..(4)..(36)..(37): Xaa is C or S
RXGXGEVVMEEYKFKVVKDYEDLYLISIPELETPVXXAKPIS

SEQ ID NO: 1352 - protein, 42 aa, Artificial Sequence
  GFR-binding peptide
  MOD_RES (2)..(4)..(36): Xaa is C or S
HXGXSRVVMNEYKFKIVNSSDDLYLISIPELKTPAXTPKTVH

SEQ ID NO: 1353 - protein, 42 aa, Artificial Sequence
  GFR-binding peptide
  MOD_RES (2)..(4)..(36)..(37): Xaa is C or S
HXGXSRVVMNEYKFKIVNSSDDLYLISIPELKTPAXXPKPVY

SEQ ID NO: 1354 - protein, 42 aa, Artificial Sequence
  GFR-binding peptide
  MOD_RES (2)..(4)..(36)..(37): Xaa is C or S
HXGXARVVMNEYKFKIVNSSDDLYLISIPELQTPAXXPKPVT

SEQ ID NO: 1355 - protein, 42 aa, Artificial Sequence
  GFR-binding peptide
  MOD_RES (2)..(4)..(36)..(37): Xaa is C or S
HXGXAKVVMNEYKFKIVNNSSDLYLISIPELKTPAXXAKPVA

SEQ ID NO: 1356 - protein, 43 aa, Artificial Sequence
  GFR-binding peptide
  MOD_RES (2)..(4)..(37)..(38): Xaa is C or S
RXGXEAVSMGEEYKFKTPVGMDDLYLISIPELKTPVXXAKGVK

SEQ ID NO: 1357 - protein, 42 aa, Artificial Sequence
  GFR-binding peptide
  MOD_RES (2)..(4)..(36)..(37): Xaa is C or S
SXGXRDVVMGEYKFKIIQQKDNLYLISIPEMKTPTXXPGASG

SEQ ID NO: 1358 - protein, 42 aa, Artificial Sequence
  GFR-binding peptide
  MOD_RES (2)..(4)..(36)..(37): Xaa is C or S
RXGXAEVVMDEYKFKVVNNAADLYLISIPELRAPVXXSAPAA

SEQ ID NO: 1359 - protein, 42 aa, Artificial Sequence
  GFR-binding peptide
  MOD_RES (2)..(4)..(36)..(37): Xaa is C or S
RXGXSEVVMDEYKFKVVNNASDLYLISIPELRTPVXXTPPTS

SEQ ID NO: 1360 - protein, 42 aa, Artificial Sequence
  GFR-binding peptide
  MOD_RES (2)..(4)..(36)..(37): Xaa is C or S
HXGXSRVVMNEYKFKIVNSSDDLYLISIPELKTPAXXPKPVH

SEQ ID NO: 1361 - protein, 41 aa, Artificial Sequence
  GFR-binding peptide
  MOD_RES (2)..(4)..(35)..(36): Xaa is C or S
LXGXEEVIMEYKFKLLVRGNDLYLISIPETKVPAXXTSPVR

SEQ ID NO: 1362 - protein, 41 aa, Artificial Sequence
  GFR-binding peptide
  MOD_RES (2)..(4)..(35)..(36): Xaa is C or S
SXKXSRVIMEYKFKVKPKRGVLYLISIPELAQPVXXPAASA

SEQ ID NO: 1363 - protein, 41 aa, Artificial Sequence
  GFR-binding peptide
  MOD_RES (2)..(4)..(35)..(36): Xaa is C or S
SXKXSKVIMEYKFKIKPTKGILYLISIPELDQSVXXPSASA

SEQ ID NO: 1364 - protein, 41 aa, Artificial Sequence
  GFR-binding peptide
  MOD_RES (2)..(4)..(35)..(36): Xaa is C or S
SXKXSKVVMEYKFKVKPTRGVLYLISIPELDQPVXXPSASA

SEQ ID NO: 1365 - protein, 44 aa, Artificial Sequence
  GFR-binding peptide
  MOD_RES (2)..(4)..(38): Xaa is C or S
RXEXKNHQLFEYKFKHQGQHPKIRLYLISIPEEETPVXELGEDN

SEQ ID NO: 1366 - protein, 44 aa, Artificial Sequence
  GFR-binding peptide
  MOD_RES (2)..(4)..(38): Xaa is C or S
RXEXQSHEELEYKFKHQGQHPKIRLYLISIPEQGTPVXELGEDN

SEQ ID NO: 1367 - protein, 45 aa, Artificial Sequence
  GFR-binding peptide
  MOD_RES (2)..(4)..(41): Xaa is C or S
AXAXELHEELREYKFKLKPKKRVYELYLISIPEHHVRSPQXKVSS

SEQ ID NO: 1368 - protein, 45 aa, Artificial Sequence
  GFR-binding peptide
  MOD_RES (2)..(4)..(41): Xaa is C or S
EXKXALHDELTEYKFKFIPKKRVIELYLISIPELQVQTPRXQVNR

SEQ ID NO: 1369 - protein, 42 aa, Artificial Sequence
  GFR-binding peptide
  MOD_RES (2)..(4)..(36)..(37): Xaa is C or S
RXGXGDVVMDPIKGYVVKENEDFYLMNIPSLETPTXXAKPIK

SEQ ID NO: 1370 - protein, 42 aa, Artificial Sequence
  GFR-binding peptide
  MOD_RES (2)..(4)..(36)..(37): Xaa is C or S
RXAXSDVVMNPIKGYVVNKNEDFYLMNIPSMKTPTXXPEPIG

SEQ ID NO: 1371 - protein, 42 aa, Artificial Sequence
  GFR-binding peptide
  MOD_RES (2)..(4)..(36)..(37): Xaa is C or S
RXGXGDVVMEPIKGYVVKDYEDFYLMNIPSLETPTXXAKPIS

SEQ ID NO: 1372 - protein, 42 aa, Artificial Sequence
  GFR-binding peptide
  MOD_RES (2)..(4)..(36): Xaa is C or S
HXGXSDVVMNPIKGYIVNSSDDFYLMNIPSLKTPTXTPKTVH

SEQ ID NO: 1373 - protein, 42 aa, Artificial Sequence
  GFR-binding peptide
  MOD_RES (2)..(4)..(36)..(37): Xaa is C or S
HXGXSDVVMNPIKGYIVNSSDDFYLMNIPSLKTPTXXPKPVY

SEQ ID NO: 1374 - protein, 42 aa, Artificial Sequence
  GFR-binding peptide
  MOD_RES (2)..(4)..(36)..(37): Xaa is C or S
HXGXADVVMNPIKGYIVNSSDDFYLMNIPSLQTPTXXPKPVT

SEQ ID NO: 1375 - protein, 42 aa, Artificial Sequence
  GFR-binding peptide
  MOD_RES (2)..(4)..(36)..(37): Xaa is C or S
HXGXADVVMNPIKGYIVNNSSDFYLMNIPSLKTPTXXAKPVA

SEQ ID NO: 1376 - protein, 43 aa, Artificial Sequence
  GFR-binding peptide
  MOD_RES (2)..(4)..(37)..(38): Xaa is C or S
RXGXDVVSMGEPIKGYTPVGMDDFYLMNIPSLKTPTXXAKGVK

SEQ ID NO: 1377 - protein, 42 aa, Artificial Sequence
  GFR-binding peptide
  MOD_RES (2)..(4)..(36)..(37): Xaa is C or S
RXGXEDVVMGPIKGYYTVVGKDFYLMNIPSLKTPTXXAKSAK

SEQ ID NO: 1378 - protein, 42 aa, Artificial Sequence
  GFR-binding peptide
  MOD_RES (2)..(4)..(36)..(37): Xaa is C or S
RXGXADVVMDPIKGYVVNNAADFYLMNIPSLRTPTXXSAPAA

SEQ ID NO: 1379 - protein, 42 aa, Artificial Sequence
  GFR-binding peptide
  MOD_RES (2)..(4)..(36)..(37): Xaa is C or S
RXGXSDVVMDPIKGYVVNNASDFYLMNIPSLRTPTXXTPPTS

SEQ ID NO: 1380 - protein, 42 aa, Artificial Sequence
  GFR-binding peptide
  MOD_RES (2)..(4)..(36)..(37): Xaa is C or S
HXGXSDVVMNPIKGYIVNSSDDFYLMNIPSLKTPTXXPKPVH

SEQ ID NO: 1381 - protein, 41 aa, Artificial Sequence
  GFR-binding peptide
  MOD_RES (2)..(4)..(35)..(36): Xaa is C or S
LXGXDVVIMPIKGYLLVRGNDFYLMNIPSTKTPTXXTSPVR

SEQ ID NO: 1382 - protein, 41 aa, Artificial Sequence
  GFR-binding peptide
  MOD_RES (2)..(4)..(35)..(36): Xaa is C or S
SXKXDVVIMPIKGYVKPKRGVFYLMNIPSLATPTXXPAASA

SEQ ID NO: 1383 - protein, 41 aa, Artificial Sequence
  GFR-binding peptide
  MOD_RES (2)..(4)..(35)..(36): Xaa is C or S
SXKXDVVIMPIKGYIKPTKGIFYLMNIPSLDTPTXXPSASA

SEQ ID NO: 1384 - protein, 41 aa, Artificial Sequence
  GFR-binding peptide
  MOD_RES (2)..(4)..(35)..(36): Xaa is C or S
SXKXDVVVMPIKGYVKPTRGVFYLMNIPSLDTPTXXPSASA

SEQ ID NO: 1385 - protein, 42 aa, Artificial Sequence
  GFR-binding peptide
  MOD_RES (2)..(4)..(36)..(37): Xaa is C or S
RXGXGEVVMDPIKGYVVKENEDFYLMNIPSLETPVXXAKPIK

SEQ ID NO: 1386 - protein, 42 aa, Artificial Sequence
  GFR-binding peptide
  MOD_RES (2)..(4)..(36)..(37): Xaa is C or S
RXAXSEVTMNPIKGYVVNKNEDFYLMNIPSMKEPVXXPEPIG

SEQ ID NO: 1387 - protein, 42 aa, Artificial Sequence
  GFR-binding peptide
  MOD_RES (2)..(4)..(36)..(37): Xaa is C or S
RXGXGEVVMEPIKGYVVKDYEDFYLMNIPSLETPVXXAKPIS

SEQ ID NO: 1388 - protein, 42 aa, Artificial Sequence
  GFR-binding peptide
  MOD_RES (2)..(4)..(36): Xaa is C or S
HXGXSRVVMNPIKGYIVNSSDDFYLMNIPSLKTPAXTPKTVH

SEQ ID NO: 1389 - protein, 42 aa, Artificial Sequence
  GFR-binding peptide
  MOD_RES (2)..(4)..(36)..(37): Xaa is C or S
HXGXSRVVMNPIKGYIVNSSDDFYLMNIPSLKTPAXXPKPVY

SEQ ID NO: 1390 - protein, 42 aa, Artificial Sequence
  GFR-binding peptide
  MOD_RES (2)..(4)..(36)..(37): Xaa is C or S
HXGXARVVMNPIKGYIVNSSDDFYLMNIPSLQTPAXXPKPVT

SEQ ID NO: 1391 - protein, 42 aa, Artificial Sequence
  GFR-binding peptide
  MOD_RES (2)..(4)..(36)..(37): Xaa is C or S
HXGXAKVVMNPIKGYIVNNSSDFYLMNIPSLKTPAXXAKPVA

SEQ ID NO: 1392 - protein, 43 aa, Artificial Sequence
  GFR-binding peptide
  MOD_RES (2)..(4)..(37)..(38): Xaa is C or S
RXGXEAVSMGEPIKGYTPVGMDDFYLMNIPSLKTPVXXAKGVK

SEQ ID NO: 1393 - protein, 42 aa, Artificial Sequence
  GFR-binding peptide
  MOD_RES (2)..(4)..(36)..(37): Xaa is C or S
RXGXESVAMGPIKGYYTVVGKDFYLMNIPSLKTPVXXAKSAK

SEQ ID NO: 1394 - protein, 42 aa, Artificial Sequence
  GFR-binding peptide
  MOD_RES (2)..(4)..(36)..(37): Xaa is C or S
RXGXAEVVMDPIKGYVVNNAADFYLMNIPSLRAPVXXSAPAA

SEQ ID NO: 1395 - protein, 42 aa, Artificial Sequence
  GFR-binding peptide
  MOD_RES (2)..(4)..(36)..(37): Xaa is C or S
RXGXSEVVMDPIKGYVVNNASDFYLMNIPSLRTPVXXTPPTS

SEQ ID NO: 1396 - protein, 42 aa, Artificial Sequence
  GFR-binding peptide
  MOD_RES (2)..(4)..(36)..(37): Xaa is C or S
HXGXSRVVMNPIKGYIVNSSDDFYLMNIPSLKTPAXXPKPVH

SEQ ID NO: 1397 - protein, 41 aa, Artificial Sequence
  GFR-binding peptide
  MOD_RES (2)..(4)..(35)..(36): Xaa is C or S
LXGXEEVIMPIKGYLLVRGNDFYLMNIPSTKVPAXXTSPVR

SEQ ID NO: 1398 - protein, 41 aa, Artificial Sequence
  GFR-binding peptide
  MOD_RES (2)..(4)..(35)..(36): Xaa is C or S
SXKXSRVIMPIKGYVKPKRGVFYLMNIPSLAQPVXXPAASA

SEQ ID NO: 1399 - protein, 41 aa, Artificial Sequence
  GFR-binding peptide
  MOD_RES (2)..(4)..(35)..(36): Xaa is C or S
SXKXSKVIMPIKGYIKPTKGIFYLMNIPSLDQSVXXPSASA

SEQ ID NO: 1400 - protein, 41 aa, Artificial Sequence
  GFR-binding peptide
  MOD_RES (2)..(4)..(35)..(36): Xaa is C or S
SXKXSKVVMPIKGYVKPTRGVFYLMNIPSLDQPVXXPSASA

SEQ ID NO: 1401 - protein, 44 aa, Artificial Sequence
  GFR-binding peptide
  MOD_RES (2)..(4)..(38): Xaa is C or S
RXEXKNHQLFPIKGYHQGQHPKIRFYLMNIPSEETPVXELGEDN

SEQ ID NO: 1402 - protein, 44 aa, Artificial Sequence
  GFR-binding peptide
  MOD_RES (2)..(4)..(38): Xaa is C or S
RXEXQSHEELPIKGYHQGQHPKIRFYLMNIPSQGTPVXELGEDN

SEQ ID NO: 1403 - protein, 45 aa, Artificial Sequence
  GFR-binding peptide
  MOD_RES (2)..(4)..(41): Xaa is C or S
AXAXELHEELRPIKGYLKPKKRVYEFYLMNIPSHHVRSPQXKVSS

SEQ ID NO: 1404 - protein, 45 aa, Artificial Sequence
  GFR-binding peptide
  MOD_RES (2)..(4)..(41): Xaa is C or S
EXKXALHDELTPIKGYFIPKKRVIEFYLMNIPSLQVQTPRXQVNR

SEQ ID NO: 1405 - protein, 42 aa, Artificial Sequence
  GFR-binding peptide
  MOD_RES (2)..(4)..(36)..(37): Xaa is C or S
RXGXGEVVMDEYQKYVVKENEDIYLISIPSLEAPVXXAKPIK

SEQ ID NO: 1406 - protein, 42 aa, Artificial Sequence
  GFR-binding peptide
  MOD_RES (2)..(4)..(36)..(37): Xaa is C or S
RXAXSEVVMNEYQKYVVNKNEDIYLISIPSMKAPVXXPEPIG

SEQ ID NO: 1407 - protein, 42 aa, Artificial Sequence
  GFR-binding peptide
  MOD_RES (2)..(4)..(36)..(37): Xaa is C or S
RXGXGEVVMEEYQKYVVKDYEDIYLISIPSLEAPVXXAKPIS

SEQ ID NO: 1408 - protein, 42 aa, Artificial Sequence
  GFR-binding peptide
  MOD_RES (2)..(4)..(36): Xaa is C or S
HXGXSEVVMNEYQKYIVNSSDDIYLISIPSLKAPVXTPKTVH

SEQ ID NO: 1409 - protein, 42 aa, Artificial Sequence
  GFR-binding peptide
  MOD_RES (2)..(4)..(36)..(37): Xaa is C or S
HXGXSEVVMNEYQKYIVNSSDDIYLISIPSLKAPVXXPKPVY

SEQ ID NO: 1410 - protein, 42 aa, Artificial Sequence
  GFR-binding peptide
  MOD_RES (2)..(4)..(36)..(37): Xaa is C or S
HXGXAEVVMNEYQKYIVNSSDDIYLISIPSLQAPVXXPKPVT

SEQ ID NO: 1411 - protein, 42 aa, Artificial Sequence
  GFR-binding peptide
  MOD_RES (2)..(4)..(36)..(37): Xaa is C or S
HXGXAEVVMNEYQKYIVNNSSDIYLISIPSLKAPVXXAKPVA

SEQ ID NO: 1412 - protein, 43 aa, Artificial Sequence
  GFR-binding peptide
  MOD_RES (2)..(4)..(37)..(38): Xaa is C or S
RXGXEVVSMGEEYQKYTPVGMDDIYLISIPSLKAPVXXAKGVK

SEQ ID NO: 1413 - protein, 42 aa, Artificial Sequence
  GFR-binding peptide
  MOD_RES (2)..(4)..(36)..(37): Xaa is C or S
RXGXEEVVMGEYQKYYTVVGKDIYLISIPSLKAPVXXAKSAK

SEQ ID NO: 1414 - protein, 42 aa, Artificial Sequence
  GFR-binding peptide
  MOD_RES (2)..(4)..(36)..(37): Xaa is C or S
SXGXREVVMGEYQKYIIQQKDNIYLISIPSMKAPVXXPGASG

SEQ ID NO: 1415 - protein, 42 aa, Artificial Sequence
  GFR-binding peptide
  MOD_RES (2)..(4)..(36)..(37): Xaa is C or S
RXGXSEVVMDEYQKYVVNNASDIYLISIPSLRAPVXXTPPTS

SEQ ID NO: 1416 - protein, 42 aa, Artificial Sequence
  GFR-binding peptide
  MOD_RES (2)..(4)..(36)..(37): Xaa is C or S
HXGXSEVVMNEYQKYIVNSSDDIYLISIPSLKAPVXXPKPVH

SEQ ID NO: 1417 - protein, 41 aa, Artificial Sequence
  GFR-binding peptide
  MOD_RES (2)..(4)..(35)..(36): Xaa is C or S
LXGXEVVIMEYQKYLLVRGNDIYLISIPSTKAPVXXTSPVR

SEQ ID NO: 1418 - protein, 41 aa, Artificial Sequence
  GFR-binding peptide
  MOD_RES (2)..(4)..(35)..(36): Xaa is C or S
SXKXEVVIMEYQKYVKPKRGVIYLISIPSLAAPVXXPAASA

SEQ ID NO: 1419 - protein, 41 aa, Artificial Sequence
  GFR-binding peptide
  MOD_RES (2)..(4)..(35)..(36): Xaa is C or S
SXKXEVVIMEYQKYIKPTKGIIYLISIPSLDAPVXXPSASA

SEQ ID NO: 1420 - protein, 41 aa, Artificial Sequence
  GFR-binding peptide
  MOD_RES (2)..(4)..(35)..(36): Xaa is C or S
SXKXEVVVMEYQKYVKPTRGVIYLISIPSLDAPVXXPSASA

SEQ ID NO: 1421 - protein, 42 aa, Artificial Sequence
  GFR-binding peptide
  MOD_RES (2)..(4)..(36)..(37): Xaa is C or S
RXGXGEVVMDEYQKYVVKENEDIYLISIPSLETPVXXAKPIK

SEQ ID NO: 1422 - protein, 42 aa, Artificial Sequence
  GFR-binding peptide
  MOD_RES (2)..(4)..(36)..(37): Xaa is C or S
RXAXSEVTMNEYQKYVVNKNEDIYLISIPSMKEPVXXPEPIG

SEQ ID NO: 1423 - protein, 42 aa, Artificial Sequence
  GFR-binding peptide
  MOD_RES (2)..(4)..(36)..(37): Xaa is C or S
RXGXGEVVMEEYQKYVVKDYEDIYLISIPSLETPVXXAKPIS

SEQ ID NO: 1424 - protein, 42 aa, Artificial Sequence
  GFR-binding peptide
  MOD_RES (2)..(4)..(36): Xaa is C or S
HXGXSRVVMNEYQKYIVNSSDDIYLISIPSLKTPAXTPKTVH

SEQ ID NO: 1425 - protein, 42 aa, Artificial Sequence
  GFR-binding peptide
  MOD_RES (2)..(4)..(36)..(37): Xaa is C or S
HXGXSRVVMNEYQKYIVNSSDDIYLISIPSLKTPAXXPKPVY

SEQ ID NO: 1426 - protein, 42 aa, Artificial Sequence
  GFR-binding peptide
  MOD_RES (2)..(4)..(36)..(37): Xaa is C or S
HXGXARVVMNEYQKYIVNSSDDIYLISIPSLQTPAXXPKPVT

SEQ ID NO: 1427 - protein, 42 aa, Artificial Sequence
  GFR-binding peptide
  MOD_RES (2)..(4)..(36)..(37): Xaa is C or S
HXGXAKVVMNEYQKYIVNNSSDIYLISIPSLKTPAXXAKPVA

SEQ ID NO: 1428 - protein, 43 aa, Artificial Sequence
  GFR-binding peptide
  MOD_RES (2)..(4)..(37)..(38): Xaa is C or S
RXGXEAVSMGEEYQKYTPVGMDDIYLISIPSLKTPVXXAKGVK

SEQ ID NO: 1429 - protein, 42 aa, Artificial Sequence
  GFR-binding peptide
  MOD_RES (2)..(4)..(36)..(37): Xaa is C or S
RXGXESVAMGEYQKYYTVVGKDIYLISIPSLKTPVXXAKSAK

SEQ ID NO: 1430 - protein, 42 aa, Artificial Sequence
  GFR-binding peptide
  MOD_RES (2)..(4)..(36)..(37): Xaa is C or S
SXGXRDVVMGEYQKYIIQQKDNIYLISIPSMKTPTXXPGASG

SEQ ID NO: 1431 - protein, 42 aa, Artificial Sequence
  GFR-binding peptide
  MOD_RES (2)..(4)..(36)..(37): Xaa is C or S
RXGXSEVVMDEYQKYVVNNASDIYLISIPSLRTPVXXTPPTS

SEQ ID NO: 1432 - protein, 42 aa, Artificial Sequence
  GFR-binding peptide
  MOD_RES (2)..(4)..(36)..(37): Xaa is C or S
HXGXSRVVMNEYQKYIVNSSDDIYLISIPSLKTPAXXPKPVH

SEQ ID NO: 1433 - protein, 41 aa, Artificial Sequence
  GFR-binding peptide
  MOD_RES (2)..(4)..(35)..(36): Xaa is C or S
LXGXEEVIMEYQKYLLVRGNDIYLISIPSTKVPAXXTSPVR

SEQ ID NO: 1434 - protein, 41 aa, Artificial Sequence
  GFR-binding peptide
  MOD_RES (2)..(4)..(35)..(36): Xaa is C or S
SXKXSRVIMEYQKYVKPKRGVIYLISIPSLAQPVXXPAASA

SEQ ID NO: 1435 - protein, 41 aa, Artificial Sequence
  GFR-binding peptide
  MOD_RES (2)..(4)..(35)..(36): Xaa is C or S
SXKXSKVIMEYQKYIKPTKGIIYLISIPSLDQSVXXPSASA

SEQ ID NO: 1436 - protein, 41 aa, Artificial Sequence
  GFR-binding peptide
  MOD_RES (2)..(4)..(35)..(36): Xaa is C or S
SXKXSKVVMEYQKYVKPTRGVIYLISIPSLDQPVXXPSASA

SEQ ID NO: 1437 - protein, 44 aa, Artificial Sequence
  GFR-binding peptide
  MOD_RES (2)..(4)..(38): Xaa is C or S
RXEXKNHQLFEYQKYHQGQHPKIRIYLISIPSEETPVXELGEDN

SEQ ID NO: 1438 - protein, 44 aa, Artificial Sequence
  GFR-binding peptide
  MOD_RES (2)..(4)..(38): Xaa is C or S
RXEXQSHEELEYQKYHQGQHPKIRIYLISIPSQGTPVXELGEDN

SEQ ID NO: 1439 - protein, 45 aa, Artificial Sequence
  GFR-binding peptide
  MOD_RES (2)..(4)..(41): Xaa is C or S
AXAXELHEELREYQKYLKPKKRVYEIYLISIPSHHVRSPQXKVSS

SEQ ID NO: 1440 - protein, 45 aa, Artificial Sequence
  GFR-binding peptide
  MOD_RES (2)..(4)..(41): Xaa is C or S
EXKXALHDELTEYQKYFIPKKRVIEIYLISIPSLQVQTPRXQVNR

SEQ ID NO: 1441 - protein, 42 aa, Artificial Sequence
  GFR-binding peptide
  MOD_RES (2)..(4)..(36)..(37): Xaa is C or S
RXGXGEVVMDEYQKYVVKENEDIFLISIPSLETPVXXAKPIK

SEQ ID NO: 1442 - protein, 42 aa, Artificial Sequence
  GFR-binding peptide
  MOD_RES (2)..(4)..(36)..(37): Xaa is C or S
RXAXSEVVMNEYQKYVVNKNEDIFLISIPSMKTPVXXPEPIG

SEQ ID NO: 1443 - protein, 42 aa, Artificial Sequence
  GFR-binding peptide
  MOD_RES (2)..(4)..(36)..(37): Xaa is C or S
RXGXGEVVMEEYQKYVVKDYEDIFLISIPSLETPVXXAKPIS

SEQ ID NO: 1444 - protein, 42 aa, Artificial Sequence
  GFR-binding peptide
  MOD_RES (2)..(4)..(36): Xaa is C or S
HXGXSEVVMNEYQKYIVNSSDDIFLISIPSLKTPVXTPKTVH

SEQ ID NO: 1445 - protein, 42 aa, Artificial Sequence
  GFR-binding peptide
  MOD_RES (2)..(4)..(36)..(37): Xaa is C or S
HXGXSEVVMNEYQKYIVNSSDDIFLISIPSLKTPVXXPKPVY

SEQ ID NO: 1446 - protein, 42 aa, Artificial Sequence
  GFR-binding peptide
  MOD_RES (2)..(4)..(36)..(37): Xaa is C or S
HXGXAEVVMNEYQKYIVNSSDDIFLISIPSLQTPVXXPKPVT

SEQ ID NO: 1447 - protein, 42 aa, Artificial Sequence
  GFR-binding peptide
  MOD_RES (2)..(4)..(36)..(37): Xaa is C or S
HXGXAEVVMNEYQKYIVNNSSDIFLISIPSLKTPVXXAKPVA

SEQ ID NO: 1448 - protein, 43 aa, Artificial Sequence
  GFR-binding peptide
  MOD_RES (2)..(4)..(37)..(38): Xaa is C or S
RXGXEVVSMGEEYQKYTPVGMDDIFLISIPSLKTPVXXAKGVK

SEQ ID NO: 1449 - protein, 42 aa, Artificial Sequence
  GFR-binding peptide
  MOD_RES (2)..(4)..(36)..(37): Xaa is C or S
RXGXEEVVMGEYQKYYTVVGKDIFLISIPSLKTPVXXAKSAK

SEQ ID NO: 1450 - protein, 42 aa, Artificial Sequence
  GFR-binding peptide
  MOD_RES (2)..(4)..(36)..(37): Xaa is C or S
SXGXREVVMGEYQKYIIQQKDNIFLISIPSMKTPVXXPGASG

SEQ ID NO: 1451 - protein, 42 aa, Artificial Sequence
  GFR-binding peptide
  MOD_RES (2)..(4)..(36)..(37): Xaa is C or S
RXGXAEVVMDEYQKYVVNNAADIFLISIPSLRTPVXXSAPAA

SEQ ID NO: 1452 - protein, 42 aa, Artificial Sequence
  GFR-binding peptide
  MOD_RES (2)..(4)..(36)..(37): Xaa is C or S
HXGXSEVVMNEYQKYIVNSSDDIFLISIPSLKTPVXXPKPVH

SEQ ID NO: 1453 - protein, 41 aa, Artificial Sequence
  GFR-binding peptide
  MOD_RES (2)..(4)..(35)..(36): Xaa is C or S
LXGXEVVIMEYQKYLLVRGNDIFLISIPSTKTPVXXTSPVR

SEQ ID NO: 1454 - protein, 41 aa, Artificial Sequence
  GFR-binding peptide
  MOD_RES (2)..(4)..(35)..(36): Xaa is C or S
SXKXEVVIMEYQKYVKPKRGVIFLISIPSLATPVXXPAASA

SEQ ID NO: 1455 - protein, 41 aa, Artificial Sequence
  GFR-binding peptide
  MOD_RES (2)..(4)..(35)..(36): Xaa is C or S
SXKXEVVIMEYQKYIKPTKGIIFLISIPSLDTPVXXPSASA

SEQ ID NO: 1456 - protein, 41 aa, Artificial Sequence
  GFR-binding peptide
  MOD_RES (2)..(4)..(35)..(36): Xaa is C or S
SXKXEVVVMEYQKYVKPTRGVIFLISIPSLDTPVXXPSASA

SEQ ID NO: 1457 - protein, 42 aa, Artificial Sequence
  GFR-binding peptide
  MOD_RES (2)..(4)..(36)..(37): Xaa is C or S
RXAXSEVTMNEYQKYVVNKNEDIFLISIPSMKEPVXXPEPIG

SEQ ID NO: 1458 - protein, 42 aa, Artificial Sequence
  GFR-binding peptide
  MOD_RES (2)..(4)..(36): Xaa is C or S
HXGXSRVVMNEYQKYIVNSSDDIFLISIPSLKTPAXTPKTVH

SEQ ID NO: 1459 - protein, 42 aa, Artificial Sequence
  GFR-binding peptide
  MOD_RES (2)..(4)..(36)..(37): Xaa is C or S
HXGXSRVVMNEYQKYIVNSSDDIFLISIPSLKTPAXXPKPVY

SEQ ID NO: 1460 - protein, 42 aa, Artificial Sequence
  GFR-binding peptide
  MOD_RES (2)..(4)..(36)..(37): Xaa is C or S
HXGXARVVMNEYQKYIVNSSDDIFLISIPSLQTPAXXPKPVT

SEQ ID NO: 1461 - protein, 42 aa, Artificial Sequence
  GFR-binding peptide
  MOD_RES (2)..(4)..(36)..(37): Xaa is C or S
HXGXAKVVMNEYQKYIVNNSSDIFLISIPSLKTPAXXAKPVA

SEQ ID NO: 1462 - protein, 43 aa, Artificial Sequence
  GFR-binding peptide
  MOD_RES (2)..(4)..(37)..(38): Xaa is C or S
RXGXEAVSMGEEYQKYTPVGMDDIFLISIPSLKTPVXXAKGVK

SEQ ID NO: 1463 - protein, 42 aa, Artificial Sequence
  GFR-binding peptide
  MOD_RES (2)..(4)..(36)..(37): Xaa is C or S
RXGXESVAMGEYQKYYTVVGKDIFLISIPSLKTPVXXAKSAK

SEQ ID NO: 1464 - protein, 42 aa, Artificial Sequence
  GFR-binding peptide
  MOD_RES (2)..(4)..(36)..(37): Xaa is C or S
SXGXRDVVMGEYQKYIIQQKDNIFLISIPSMKTPTXXPGASG

SEQ ID NO: 1465 - protein, 42 aa, Artificial Sequence
  GFR-binding peptide
  MOD_RES (2)..(4)..(36)..(37): Xaa is C or S
RXGXAEVVMDEYQKYVVNNAADIFLISIPSLRAPVXXSAPAA

SEQ ID NO: 1466 - protein, 42 aa, Artificial Sequence
  GFR-binding peptide
  MOD_RES (2)..(4)..(36)..(37): Xaa is C or S
HXGXSRVVMNEYQKYIVNSSDDIFLISIPSLKTPAXXPKPVH

SEQ ID NO: 1467 - protein, 41 aa, Artificial Sequence
  GFR-binding peptide
  MOD_RES (2)..(4)..(35)..(36): Xaa is C or S
LXGXEEVIMEYQKYLLVRGNDIFLISIPSTKVPAXXTSPVR

SEQ ID NO: 1468 - protein, 41 aa, Artificial Sequence
  GFR-binding peptide
  MOD_RES (2)..(4)..(35)..(36): Xaa is C or S
SXKXSRVIMEYQKYVKPKRGVIFLISIPSLAQPVXXPAASA

SEQ ID NO: 1469 - protein, 41 aa, Artificial Sequence
  GFR-binding peptide
  MOD_RES (2)..(4)..(35)..(36): Xaa is C or S
SXKXSKVIMEYQKYIKPTKGIIFLISIPSLDQSVXXPSASA

SEQ ID NO: 1470 - protein, 41 aa, Artificial Sequence
  GFR-binding peptide
  MOD_RES (2)..(4)..(35)..(36): Xaa is C or S
SXKXSKVVMEYQKYVKPTRGVIFLISIPSLDQPVXXPSASA

SEQ ID NO: 1471 - protein, 44 aa, Artificial Sequence
  GFR-binding peptide
  MOD_RES (2)..(4)..(38): Xaa is C or S
RXEXKNHQLFEYQKYHQGQHPKIRIFLISIPSEETPVXELGEDN

SEQ ID NO: 1472 - protein, 44 aa, Artificial Sequence
  GFR-binding peptide
  MOD_RES (2)..(4)..(38): Xaa is C or S
RXEXQSHEELEYQKYHQGQHPKIRIFLISIPSQGTPVXELGEDN

SEQ ID NO: 1473 - protein, 45 aa, Artificial Sequence
  GFR-binding peptide
  MOD_RES (2)..(4)..(41): Xaa is C or S
AXAXELHEELREYQKYLKPKKRVYEIFLISIPSHHVRSPQXKVSS

SEQ ID NO: 1474 - protein, 45 aa, Artificial Sequence
  GFR-binding peptide
  MOD_RES (2)..(4)..(41): Xaa is C or S
EXKXALHDELTEYQKYFIPKKRVIEIFLISIPSLQVQTPRXQVNR

SEQ ID NO: 1475 - protein, 42 aa, Artificial Sequence
  GFR-binding peptide
  MOD_RES (2)..(4)..(36)..(37): Xaa is C or S
RXGXGEEVMDDKHHDVVKENEDVYLMSLPKLEVPAXXAKPIK

SEQ ID NO: 1476 - protein, 42 aa, Artificial Sequence
  GFR-binding peptide
  MOD_RES (2)..(4)..(36)..(37): Xaa is C or S
RXAXSEEVMNDKHHDVVNKNEDVYLMSLPKMKVPAXXPEPIG

SEQ ID NO: 1477 - protein, 42 aa, Artificial Sequence
  GFR-binding peptide
  MOD_RES (2)..(4)..(36)..(37): Xaa is C or S
RXGXGEEVMEDKHHDVVKDYEDVYLMSLPKLEVPAXXAKPIS

SEQ ID NO: 1478 - protein, 42 aa, Artificial Sequence
  GFR-binding peptide
  MOD_RES (2)..(4)..(36): Xaa is C or S
HXGXSEEVMNDKHHDIVNSSDDVYLMSLPKLKVPAXTPKTVH

SEQ ID NO: 1479 - protein, 42 aa, Artificial Sequence
  GFR-binding peptide
  MOD_RES (2)..(4)..(36)..(37): Xaa is C or S
HXGXSEEVMNDKHHDIVNSSDDVYLMSLPKLKVPAXXPKPVY

SEQ ID NO: 1480 - protein, 42 aa, Artificial Sequence
  GFR-binding peptide
  MOD_RES (2)..(4)..(36)..(37): Xaa is C or S
HXGXAEEVMNDKHHDIVNSSDDVYLMSLPKLQVPAXXPKPVT

SEQ ID NO: 1481 - protein, 42 aa, Artificial Sequence
  GFR-binding peptide
  MOD_RES (2)..(4)..(36)..(37): Xaa is C or S
HXGXAEEVMNDKHHDIVNNSSDVYLMSLPKLKVPAXXAKPVA

SEQ ID NO: 1482 - protein, 43 aa, Artificial Sequence
  GFR-binding peptide
  MOD_RES (2)..(4)..(37)..(38): Xaa is C or S
RXGXEEVSMGEDKHHDTPVGMDDVYLMSLPKLKVPAXXAKGVK

SEQ ID NO: 1483 - protein, 42 aa, Artificial Sequence
  GFR-binding peptide
  MOD_RES (2)..(4)..(36)..(37): Xaa is C or S
RXGXEEEVMGDKHHDYTVVGKDVYLMSLPKLKVPAXXAKSAK

SEQ ID NO: 1484 - protein, 42 aa, Artificial Sequence
  GFR-binding peptide
  MOD_RES (2)..(4)..(36)..(37): Xaa is C or S
SXGXREEVMGDKHHDIIQQKDNVYLMSLPKMKVPAXXPGASG

SEQ ID NO: 1485 - protein, 42 aa, Artificial Sequence
  GFR-binding peptide
  MOD_RES (2)..(4)..(36)..(37): Xaa is C or S
RXGXAEEVMDDKHHDVVNNAADVYLMSLPKLRVPAXXSAPAA

SEQ ID NO: 1486 - protein, 42 aa, Artificial Sequence
  GFR-binding peptide
  MOD_RES (2)..(4)..(36)..(37): Xaa is C or S
RXGXSEEVMDDKHHDVVNNASDVYLMSLPKLRVPAXXTPPTS

SEQ ID NO: 1487 - protein, 42 aa, Artificial Sequence
  GFR-binding peptide
  MOD_RES (2)..(4)..(36)..(37): Xaa is C or S
HXGXSEEVMNDKHHDIVNSSDDVYLMSLPKLKVPAXXPKPVH

SEQ ID NO: 1488 - protein, 41 aa, Artificial Sequence
  GFR-binding peptide
  MOD_RES (2)..(4)..(35)..(36): Xaa is C or S
SXKXEEVIMDKHHDVKPKRGVVYLMSLPKLAVPAXXPAASA

SEQ ID NO: 1489 - protein, 41 aa, Artificial Sequence
  GFR-binding peptide
  MOD_RES (2)..(4)..(35)..(36): Xaa is C or S
SXKXEEVIMDKHHDIKPTKGIVYLMSLPKLDVPAXXPSASA

SEQ ID NO: 1490 - protein, 41 aa, Artificial Sequence
  GFR-binding peptide
  MOD_RES (2)..(4)..(35)..(36): Xaa is C or S
SXKXEEVVMDKHHDVKPTRGVVYLMSLPKLDVPAXXPSASA

SEQ ID NO: 1491 - protein, 42 aa, Artificial Sequence
  GFR-binding peptide
  MOD_RES (2)..(4)..(36)..(37): Xaa is C or S
RXGXGEVVMDDKHHDVVKENEDVYLMSLPKLETPVXXAKPIK

SEQ ID NO: 1492 - protein, 42 aa, Artificial Sequence
  GFR-binding peptide
  MOD_RES (2)..(4)..(36)..(37): Xaa is C or S
RXAXSEVTMNDKHHDVVNKNEDVYLMSLPKMKEPVXXPEPIG

SEQ ID NO: 1493 - protein, 42 aa, Artificial Sequence
  GFR-binding peptide
  MOD_RES (2)..(4)..(36)..(37): Xaa is C or S
RXGXGEVVMEDKHHDVVKDYEDVYLMSLPKLETPVXXAKPIS

SEQ ID NO: 1494 - protein, 42 aa, Artificial Sequence
  GFR-binding peptide
  MOD_RES (2)..(4)..(36): Xaa is C or S
HXGXSRVVMNDKHHDIVNSSDDVYLMSLPKLKTPAXTPKTVH

SEQ ID NO: 1495 - protein, 42 aa, Artificial Sequence
  GFR-binding peptide
  MOD_RES (2)..(4)..(36)..(37): Xaa is C or S
HXGXSRVVMNDKHHDIVNSSDDVYLMSLPKLKTPAXXPKPVY

SEQ ID NO: 1496 - protein, 42 aa, Artificial Sequence
  GFR-binding peptide
  MOD_RES (2)..(4)..(36)..(37): Xaa is C or S
HXGXARVVMNDKHHDIVNSSDDVYLMSLPKLQTPAXXPKPVT

SEQ ID NO: 1497 - protein, 42 aa, Artificial Sequence
  GFR-binding peptide
  MOD_RES (2)..(4)..(36)..(37): Xaa is C or S
HXGXAKVVMNDKHHDIVNNSSDVYLMSLPKLKTPAXXAKPVA

SEQ ID NO: 1498 - protein, 43 aa, Artificial Sequence
  GFR-binding peptide
  MOD_RES (2)..(4)..(37)..(38): Xaa is C or S
RXGXEAVSMGEDKHHDTPVGMDDVYLMSLPKLKTPVXXAKGVK

SEQ ID NO: 1499 - protein, 42 aa, Artificial Sequence
  GFR-binding peptide
  MOD_RES (2)..(4)..(36)..(37): Xaa is C or S
RXGXESVAMGDKHHDYTVVGKDVYLMSLPKLKTPVXXAKSAK

SEQ ID NO: 1500 - protein, 42 aa, Artificial Sequence
  GFR-binding peptide
  MOD_RES (2)..(4)..(36)..(37): Xaa is C or S
SXGXRDVVMGDKHHDIIQQKDNVYLMSLPKMKTPTXXPGASG

SEQ ID NO: 1501 - protein, 42 aa, Artificial Sequence
  GFR-binding peptide
  MOD_RES (2)..(4)..(36)..(37): Xaa is C or S
RXGXAEVVMDDKHHDVVNNAADVYLMSLPKLRAPVXXSAPAA

SEQ ID NO: 1502 - protein, 42 aa, Artificial Sequence
  GFR-binding peptide
  MOD_RES (2)..(4)..(36)..(37): Xaa is C or S
RXGXSEVVMDDKHHDVVNNASDVYLMSLPKLRTPVXXTPPTS

SEQ ID NO: 1503 - protein, 42 aa, Artificial Sequence
  GFR-binding peptide
  MOD_RES (2)..(4)..(36)..(37): Xaa is C or S
HXGXSRVVMNDKHHDIVNSSDDVYLMSLPKLKTPAXXPKPVH

SEQ ID NO: 1504 - protein, 41 aa, Artificial Sequence
  GFR-binding peptide
  MOD_RES (2)..(4)..(35)..(36): Xaa is C or S
SXKXSRVIMDKHHDVKPKRGVVYLMSLPKLAQPVXXPAASA

SEQ ID NO: 1505 - protein, 41 aa, Artificial Sequence
  GFR-binding peptide
  MOD_RES (2)..(4)..(35)..(36): Xaa is C or S
SXKXSKVIMDKHHDIKPTKGIVYLMSLPKLDQSVXXPSASA

SEQ ID NO: 1506 - protein, 41 aa, Artificial Sequence
  GFR-binding peptide
  MOD_RES (2)..(4)..(35)..(36): Xaa is C or S
SXKXSKVVMDKHHDVKPTRGVVYLMSLPKLDQPVXXPSASA

SEQ ID NO: 1507 - protein, 44 aa, Artificial Sequence
  GFR-binding peptide
  MOD_RES (2)..(4)..(38): Xaa is C or S
RXEXKNHQLFDKHHDHQGQHPKIRVYLMSLPKEETPVXELGEDN

SEQ ID NO: 1508 - protein, 44 aa, Artificial Sequence
  GFR-binding peptide
  MOD_RES (2)..(4)..(38): Xaa is C or S
RXEXQSHEELDKHHDHQGQHPKIRVYLMSLPKQGTPVXELGEDN

SEQ ID NO: 1509 - protein, 45 aa, Artificial Sequence
  GFR-binding peptide
  MOD_RES (2)..(4)..(41): Xaa is C or S
AXAXELHEELRDKHHDLKPKKRVYEVYLMSLPKHHVRSPQXKVSS

SEQ ID NO: 1510 - protein, 45 aa, Artificial Sequence
  GFR-binding peptide
  MOD_RES (2)..(4)..(41): Xaa is C or S
EXKXALHDELTDKHHDFIPKKRVIEVYLMSLPKLQVQTPRXQVNR

SEQ ID NO: 1511 - protein, 42 aa, Artificial Sequence
  GFR-binding peptide
  MOD_RES (4)..(6)..(36)..(37): Xaa is C or S
RSGXGXRVMDNSLQEVVKENEDYYVIPLPELEQPVXXAKPIK

SEQ ID NO: 1512 - protein, 42 aa, Artificial Sequence
  GFR-binding peptide
  MOD_RES (2)..(4)..(36)..(37): Xaa is C or S
RXAXSSRVMNNSLQEVVNKNEDYYVIPLPEMKQPVXXPEPIG

SEQ ID NO: 1513 - protein, 42 aa, Artificial Sequence
  GFR-binding peptide
  MOD_RES (4)..(6)..(36)..(37): Xaa is C or S
RSGXGXRVMENSLQEVVKDYEDYYVIPLPELEQPVXXAKPIS

SEQ ID NO: 1514 - protein, 42 aa, Artificial Sequence
  GFR-binding peptide
  MOD_RES (2)..(4)..(36): Xaa is C or S
HXGXSSRVMNNSLQEIVNSSDDYYVIPLPELKQPVXTPKTVH

SEQ ID NO: 1515 - protein, 42 aa, Artificial Sequence
  GFR-binding peptide
  MOD_RES (2)..(4)..(36)..(37): Xaa is C or S
HXGXSSRVMNNSLQEIVNSSDDYYVIPLPELKQPVXXPKPVY

SEQ ID NO: 1516 - protein, 42 aa, Artificial Sequence
  GFR-binding peptide
  MOD_RES (2)..(4)..(36)..(37): Xaa is C or S
HXGXASRVMNNSLQEIVNSSDDYYVIPLPELQQPVXXPKPVT

SEQ ID NO: 1517 - protein, 42 aa, Artificial Sequence
  GFR-binding peptide
  MOD_RES (2)..(4)..(36)..(37): Xaa is C or S
HXGXASRVMNNSLQEIVNNSSDYYVIPLPELKQPVXXAKPVA

SEQ ID NO: 1518 - protein, 43 aa, Artificial Sequence
  GFR-binding peptide
  MOD_RES (2)..(4)..(37)..(38): Xaa is C or S
RXGXSRVSMGENSLQETPVGMDDYYVIPLPELKQPVXXAKGVK

SEQ ID NO: 1519 - protein, 42 aa, Artificial Sequence
  GFR-binding peptide
  MOD_RES (2)..(4)..(36)..(37): Xaa is C or S
RXGXESRVMGNSLQEYTVVGKDYYVIPLPELKQPVXXAKSAK

SEQ ID NO: 1520 - protein, 42 aa, Artificial Sequence
  GFR-binding peptide
  MOD_RES (2)..(4)..(36)..(37): Xaa is C or S
SXGXRSRVMGNSLQEIIQQKDNYYVIPLPEMKQPVXXPGASG

SEQ ID NO: 1521 - protein, 42 aa, Artificial Sequence
  GFR-binding peptide
  MOD_RES (2)..(4)..(36)..(37): Xaa is C or S
RXGXASRVMDNSLQEVVNNAADYYVIPLPELRQPVXXSAPAA

SEQ ID NO: 1522 - protein, 42 aa, Artificial Sequence
  GFR-binding peptide
  MOD_RES (2)..(4)..(36)..(37): Xaa is C or S
RXGXSSRVMDNSLQEVVNNASDYYVIPLPELRQPVXXTPPTS

SEQ ID NO: 1523 - protein, 42 aa, Artificial Sequence
  GFR-binding peptide
  MOD_RES (2)..(4)..(36)..(37): Xaa is C or S
HXGXSSRVMNNSLQEIVNSSDDYYVIPLPELKQPVXXPKPVH

SEQ ID NO: 1524 - protein, 41 aa, Artificial Sequence
  GFR-binding peptide
  MOD_RES (2)..(4)..(35)..(36): Xaa is C or S
LXGXSRVIMNSLQELLVRGNDYYVIPLPETKQPVXXTSPVR

SEQ ID NO: 1525 - protein, 41 aa, Artificial Sequence
  GFR-binding peptide
  MOD_RES (2)..(4)..(35)..(36): Xaa is C or S
SXKXSRVIMNSLQEIKPTKGIYYVIPLPELDQPVXXPSASA

SEQ ID NO: 1526 - protein, 41 aa, Artificial Sequence
  GFR-binding peptide
  MOD_RES (2)..(4)..(35)..(36): Xaa is C or S
SXKXSRVVMNSLQEVKPTRGVYYVIPLPELDQPVXXPSASA

SEQ ID NO: 1527 - protein, 42 aa, Artificial Sequence
  GFR-binding peptide
  MOD_RES (2)..(4)..(36)..(37): Xaa is C or S
RXGXGEVVMDNSLQEVVKENEDYYVIPLPELETPVXXAKPIK

SEQ ID NO: 1528 - protein, 42 aa, Artificial Sequence
  GFR-binding peptide
  MOD_RES (2)..(4)..(36)..(37): Xaa is C or S
RXAXSEVTMNNSLQEVVNKNEDYYVIPLPEMKEPVXXPEPIG

SEQ ID NO: 1529 - protein, 42 aa, Artificial Sequence
  GFR-binding peptide
  MOD_RES (2)..(4)..(36)..(37): Xaa is C or S
RXGXGEVVMENSLQEVVKDYEDYYVIPLPELETPVXXAKPIS

SEQ ID NO: 1530 - protein, 42 aa, Artificial Sequence
  GFR-binding peptide
  MOD_RES (2)..(4)..(36): Xaa is C or S
HXGXSRVVMNNSLQEIVNSSDDYYVIPLPELKTPAXTPKTVH

SEQ ID NO: 1531 - protein, 42 aa, Artificial Sequence
  GFR-binding peptide
  MOD_RES (2)..(4)..(36)..(37): Xaa is C or S
HXGXSRVVMNNSLQEIVNSSDDYYVIPLPELKTPAXXPKPVY

SEQ ID NO: 1532 - protein, 42 aa, Artificial Sequence
  GFR-binding peptide
  MOD_RES (2)..(4)..(36)..(37): Xaa is C or S
HXGXARVVMNNSLQEIVNSSDDYYVIPLPELQTPAXXPKPVT

SEQ ID NO: 1533 - protein, 42 aa, Artificial Sequence
  GFR-binding peptide
  MOD_RES (2)..(4)..(36)..(37): Xaa is C or S
HXGXAKVVMNNSLQEIVNNSSDYYVIPLPELKTPAXXAKPVA

SEQ ID NO: 1534 - protein, 43 aa, Artificial Sequence
  GFR-binding peptide
  MOD_RES (2)..(4)..(37)..(38): Xaa is C or S
RXGXEAVSMGENSLQETPVGMDDYYVIPLPELKTPVXXAKGVK

SEQ ID NO: 1535 - protein, 42 aa, Artificial Sequence
  GFR-binding peptide
  MOD_RES (2)..(4)..(36)..(37): Xaa is C or S
RXGXESVAMGNSLQEYTVVGKDYYVIPLPELKTPVXXAKSAK

SEQ ID NO: 1536 - protein, 42 aa, Artificial Sequence
  GFR-binding peptide
  MOD_RES (2)..(4)..(36)..(37): Xaa is C or S
SXGXRDVVMGNSLQEIIQQKDNYYVIPLPEMKTPTXXPGASG

SEQ ID NO: 1537 - protein, 42 aa, Artificial Sequence
  GFR-binding peptide
  MOD_RES (2)..(4)..(36)..(37): Xaa is C or S
RXGXAEVVMDNSLQEVVNNAADYYVIPLPELRAPVXXSAPAA

SEQ ID NO: 1538 - protein, 42 aa, Artificial Sequence
  GFR-binding peptide
  MOD_RES (2)..(4)..(36)..(37): Xaa is C or S
RXGXSEVVMDNSLQEVVNNASDYYVIPLPELRTPVXXTPPTS

SEQ ID NO: 1539 - protein, 42 aa, Artificial Sequence
  GFR-binding peptide
  MOD_RES (2)..(4)..(36)..(37): Xaa is C or S
HXGXSRVVMNNSLQEIVNSSDDYYVIPLPELKTPAXXPKPVH

SEQ ID NO: 1540 - protein, 41 aa, Artificial Sequence
  GFR-binding peptide
  MOD_RES (2)..(4)..(35)..(36): Xaa is C or S
LXGXEEVIMNSLQELLVRGNDYYVIPLPETKVPAXXTSPVR

SEQ ID NO: 1541 - protein, 41 aa, Artificial Sequence
  GFR-binding peptide
  MOD_RES (2)..(4)..(35)..(36): Xaa is C or S
SXKXSKVIMNSLQEIKPTKGIYYVIPLPELDQSVXXPSASA

SEQ ID NO: 1542 - protein, 41 aa, Artificial Sequence
  GFR-binding peptide
  MOD_RES (2)..(4)..(35)..(36): Xaa is C or S
SXKXSKVVMNSLQEVKPTRGVYYVIPLPELDQPVXXPSASA

SEQ ID NO: 1543 - protein, 44 aa, Artificial Sequence
  GFR-binding peptide
  MOD_RES (2)..(4)..(38): Xaa is C or S
RXEXKNHQLFNSLQEHQGQHPKIRYYVIPLPEEETPVXELGEDN

SEQ ID NO: 1544 - protein, 44 aa, Artificial Sequence
  GFR-binding peptide
  MOD_RES (2)..(4)..(38): Xaa is C or S
RXEXQSHEELNSLQEHQGQHPKIRYYVIPLPEQGTPVXELGEDN

SEQ ID NO: 1545 - protein, 45 aa, Artificial Sequence
  GFR-binding peptide
  MOD_RES (2)..(4)..(41): Xaa is C or S
AXAXELHEELRNSLQELKPKKRVYEYYVIPLPEHHVRSPQXKVSS

SEQ ID NO: 1546 - protein, 45 aa, Artificial Sequence
  GFR-binding peptide
  MOD_RES (2)..(4)..(41): Xaa is C or S
EXKXALHDELTNSLQEFIPKKRVIEYYVIPLPELQVQTPRXQVNR

SEQ ID NO: 1547 - protein, 42 aa, Artificial Sequence
  GFR-binding peptide
  MOD_RES (2)..(4)..(36)..(37): Xaa is C or S
RXGXGSKVMDNSLQEVVKENEDYYLITLPELEQSVXXAKPIK

SEQ ID NO: 1548 - protein, 42 aa, Artificial Sequence
  GFR-binding peptide
  MOD_RES (2)..(4)..(36)..(37): Xaa is C or S
RXAXSSKVMNNSLQEVVNKNEDYYLITLPEMKQSVXXPEPIG

SEQ ID NO: 1549 - protein, 42 aa, Artificial Sequence
  GFR-binding peptide
  MOD_RES (2)..(4)..(36)..(37): Xaa is C or S
RXGXGSKVMENSLQEVVKDYEDYYLITLPELEQSVXXAKPIS

SEQ ID NO: 1550 - protein, 42 aa, Artificial Sequence
  GFR-binding peptide
  MOD_RES (2)..(4)..(36): Xaa is C or S
HXGXSSKVMNNSLQEIVNSSDDYYLITLPELKQSVXTPKTVH

SEQ ID NO: 1551 - protein, 42 aa, Artificial Sequence
  GFR-binding peptide
  MOD_RES (2)..(4)..(36)..(37): Xaa is C or S
HXGXSSKVMNNSLQEIVNSSDDYYLITLPELKQSVXXPKPVY

SEQ ID NO: 1552 - protein, 42 aa, Artificial Sequence
  GFR-binding peptide
  MOD_RES (2)..(4)..(36)..(37): Xaa is C or S
HXGXASKVMNNSLQEIVNSSDDYYLITLPELQQSVXXPKPVT

SEQ ID NO: 1553 - protein, 42 aa, Artificial Sequence
  GFR-binding peptide
  MOD_RES (2)..(4)..(36)..(37): Xaa is C or S
HXGXASKVMNNSLQEIVNNSSDYYLITLPELKQSVXXAKPVA

SEQ ID NO: 1554 - protein, 43 aa, Artificial Sequence
  GFR-binding peptide
  MOD_RES (2)..(4)..(37)..(38): Xaa is C or S
RXGXSKVSMGENSLQETPVGMDDYYLITLPELKQSVXXAKGVK

SEQ ID NO: 1555 - protein, 42 aa, Artificial Sequence
  GFR-binding peptide
  MOD_RES (2)..(4)..(36)..(37): Xaa is C or S
RXGXESKVMGNSLQEYTVVGKDYYLITLPELKQSVXXAKSAK

SEQ ID NO: 1556 - protein, 42 aa, Artificial Sequence
  GFR-binding peptide
  MOD_RES (2)..(4)..(36)..(37): Xaa is C or S
SXGXRSKVMGNSLQEIIQQKDNYYLITLPEMKQSVXXPGASG

SEQ ID NO: 1557 - protein, 42 aa, Artificial Sequence
  GFR-binding peptide
  MOD_RES (2)..(4)..(36)..(37): Xaa is C or S
RXGXASKVMDNSLQEVVNNAADYYLITLPELRQSVXXSAPAA

SEQ ID NO: 1558 - protein, 42 aa, Artificial Sequence
  GFR-binding peptide
  MOD_RES (2)..(4)..(36)..(37): Xaa is C or S
RXGXSSKVMDNSLQEVVNNASDYYLITLPELRQSVXXTPPTS

SEQ ID NO: 1559 - protein, 42 aa, Artificial Sequence
  GFR-binding peptide
  MOD_RES (2)..(4)..(36)..(37): Xaa is C or S
HXGXSSKVMNNSLQEIVNSSDDYYLITLPELKQSVXXPKPVH

SEQ ID NO: 1560 - protein, 41 aa, Artificial Sequence
  GFR-binding peptide
  MOD_RES (2)..(4)..(35)..(36): Xaa is C or S
LXGXSKVIMNSLQELLVRGNDYYLITLPETKQSVXXTSPVR

SEQ ID NO: 1561 - protein, 41 aa, Artificial Sequence
  GFR-binding peptide
  MOD_RES (2)..(4)..(35)..(36): Xaa is C or S
SXKXSKVIMNSLQEVKPKRGVYYLITLPELAQSVXXPAASA

SEQ ID NO: 1562 - protein, 41 aa, Artificial Sequence
  GFR-binding peptide
  MOD_RES (2)..(4)..(35)..(36): Xaa is C or S
SXKXSKVVMNSLQEVKPTRGVYYLITLPELDQSVXXPSASA

SEQ ID NO: 1563 - protein, 42 aa, Artificial Sequence
  GFR-binding peptide
  MOD_RES (2)..(4)..(36)..(37): Xaa is C or S
RXGXGEVVMDNSLQEVVKENEDYYLITLPELETPVXXAKPIK

SEQ ID NO: 1564 - protein, 42 aa, Artificial Sequence
  GFR-binding peptide
  MOD_RES (2)..(4)..(36)..(37): Xaa is C or S
RXAXSEVTMNNSLQEVVNKNEDYYLITLPEMKEPVXXPEPIG

SEQ ID NO: 1565 - protein, 42 aa, Artificial Sequence
  GFR-binding peptide
  MOD_RES (2)..(4)..(36)..(37): Xaa is C or S
RXGXGEVVMENSLQEVVKDYEDYYLITLPELETPVXXAKPIS

SEQ ID NO: 1566 - protein, 42 aa, Artificial Sequence
  GFR-binding peptide
  MOD_RES (2)..(4)..(36): Xaa is C or S
HXGXSRVVMNNSLQEIVNSSDDYYLITLPELKTPAXTPKTVH

SEQ ID NO: 1567 - protein, 42 aa, Artificial Sequence
  GFR-binding peptide
  MOD_RES (2)..(4)..(36)..(37): Xaa is C or S
HXGXSRVVMNNSLQEIVNSSDDYYLITLPELKTPAXXPKPVY

SEQ ID NO: 1568 - protein, 42 aa, Artificial Sequence
  GFR-binding peptide
  MOD_RES (2)..(4)..(36)..(37): Xaa is C or S
HXGXARVVMNNSLQEIVNSSDDYYLITLPELQTPAXXPKPVT

SEQ ID NO: 1569 - protein, 42 aa, Artificial Sequence
  GFR-binding peptide
  MOD_RES (2)..(4)..(36)..(37): Xaa is C or S
HXGXAKVVMNNSLQEIVNNSSDYYLITLPELKTPAXXAKPVA

SEQ ID NO: 1570 - protein, 43 aa, Artificial Sequence
  GFR-binding peptide
  MOD_RES (2)..(4)..(37)..(38): Xaa is C or S
RXGXEAVSMGENSLQETPVGMDDYYLITLPELKTPVXXAKGVK

SEQ ID NO: 1571 - protein, 42 aa, Artificial Sequence
  GFR-binding peptide
  MOD_RES (2)..(4)..(36)..(37): Xaa is C or S
RXGXESVAMGNSLQEYTVVGKDYYLITLPELKTPVXXAKSAK

SEQ ID NO: 1572 - protein, 42 aa, Artificial Sequence
  GFR-binding peptide
  MOD_RES (2)..(4)..(36)..(37): Xaa is C or S
SXGXRDVVMGNSLQEIIQQKDNYYLITLPEMKTPTXXPGASG

SEQ ID NO: 1573 - protein, 42 aa, Artificial Sequence
  GFR-binding peptide
  MOD_RES (2)..(4)..(36)..(37): Xaa is C or S
RXGXAEVVMDNSLQEVVNNAADYYLITLPELRAPVXXSAPAA

SEQ ID NO: 1574 - protein, 42 aa, Artificial Sequence
  GFR-binding peptide
  MOD_RES (2)..(4)..(36)..(37): Xaa is C or S
RXGXSEVVMDNSLQEVVNNASDYYLITLPELRTPVXXTPPTS

SEQ ID NO: 1575 - protein, 42 aa, Artificial Sequence
  GFR-binding peptide
  MOD_RES (2)..(4)..(36)..(37): Xaa is C or S
HXGXSRVVMNNSLQEIVNSSDDYYLITLPELKTPAXXPKPVH

SEQ ID NO: 1576 - protein, 41 aa, Artificial Sequence
  GFR-binding peptide
  MOD_RES (2)..(4)..(35)..(36): Xaa is C or S
LXGXEEVIMNSLQELLVRGNDYYLITLPETKVPAXXTSPVR

SEQ ID NO: 1577 - protein, 41 aa, Artificial Sequence
  GFR-binding peptide
  MOD_RES (2)..(4)..(35)..(36): Xaa is C or S
SXKXSRVIMNSLQEVKPKRGVYYLITLPELAQPVXXPAASA

SEQ ID NO: 1578 - protein, 44 aa, Artificial Sequence
  GFR-binding peptide
  MOD_RES (2)..(4)..(38): Xaa is C or S
RXEXKNHQLFNSLQEHQGQHPKIRYYLITLPEEETPVXELGEDN

SEQ ID NO: 1579 - protein, 44 aa, Artificial Sequence
  GFR-binding peptide
  MOD_RES (2)..(4)..(38): Xaa is C or S
RXEXQSHEELNSLQEHQGQHPKIRYYLITLPEQGTPVXELGEDN

SEQ ID NO: 1580 - protein, 45 aa, Artificial Sequence
  GFR-binding peptide
  MOD_RES (2)..(4)..(41): Xaa is C or S
AXAXELHEELRNSLQELKPKKRVYEYYLITLPEHHVRSPQXKVSS

SEQ ID NO: 1581 - protein, 45 aa, Artificial Sequence
  GFR-binding peptide
  MOD_RES (2)..(4)..(41): Xaa is C or S
EXKXALHDELTNSLQEFIPKKRVIEYYLITLPELQVQTPRXQVNR

SEQ ID NO: 1582 - protein, 42 aa, Artificial Sequence
  GFR-binding peptide
  MOD_RES (2)..(4)..(36)..(37): Xaa is C or S
RXGXGSKVMDNSLQEVVKENEDYYLITLPELEQPVXXAKPIK

SEQ ID NO: 1583 - protein, 42 aa, Artificial Sequence
  GFR-binding peptide
  MOD_RES (2)..(4)..(36)..(37): Xaa is C or S
RXAXSSKVMNNSLQEVVNKNEDYYLITLPEMKQPVXXPEPIG

SEQ ID NO: 1584 - protein, 42 aa, Artificial Sequence
  GFR-binding peptide
  MOD_RES (2)..(4)..(36)..(37): Xaa is C or S
RXGXGSKVMENSLQEVVKDYEDYYLITLPELEQPVXXAKPIS

SEQ ID NO: 1585 - protein, 42 aa, Artificial Sequence
  GFR-binding peptide
  MOD_RES (2)..(4)..(36): Xaa is C or S
HXGXSSKVMNNSLQEIVNSSDDYYLITLPELKQPVXTPKTVH

SEQ ID NO: 1586 - protein, 42 aa, Artificial Sequence
  GFR-binding peptide
  MOD_RES (2)..(4)..(36)..(37): Xaa is C or S
HXGXSSKVMNNSLQEIVNSSDDYYLITLPELKQPVXXPKPVY

SEQ ID NO: 1587 - protein, 42 aa, Artificial Sequence
  GFR-binding peptide
  MOD_RES (2)..(4)..(36)..(37): Xaa is C or S
HXGXASKVMNNSLQEIVNSSDDYYLITLPELQQPVXXPKPVT

SEQ ID NO: 1588 - protein, 42 aa, Artificial Sequence
  GFR-binding peptide
  MOD_RES (2)..(4)..(36)..(37): Xaa is C or S
HXGXASKVMNNSLQEIVNNSSDYYLITLPELKQPVXXAKPVA

SEQ ID NO: 1589 - protein, 43 aa, Artificial Sequence
  GFR-binding peptide
  MOD_RES (2)..(4)..(37)..(38): Xaa is C or S
RXGXSKVSMGENSLQETPVGMDDYYLITLPELKQPVXXAKGVK

SEQ ID NO: 1590 - protein, 42 aa, Artificial Sequence
  GFR-binding peptide
  MOD_RES (2)..(4)..(36)..(37): Xaa is C or S
RXGXESKVMGNSLQEYTVVGKDYYLITLPELKQPVXXAKSAK

SEQ ID NO: 1591 - protein, 42 aa, Artificial Sequence
  GFR-binding peptide
  MOD_RES (2)..(4)..(36)..(37): Xaa is C or S
SXGXRSKVMGNSLQEIIQQKDNYYLITLPEMKQPVXXPGASG

SEQ ID NO: 1592 - protein, 42 aa, Artificial Sequence
  GFR-binding peptide
  MOD_RES (2)..(4)..(36)..(37): Xaa is C or S
RXGXASKVMDNSLQEVVNNAADYYLITLPELRQPVXXSAPAA

SEQ ID NO: 1593 - protein, 42 aa, Artificial Sequence
  GFR-binding peptide
  MOD_RES (2)..(4)..(36)..(37): Xaa is C or S
RXGXSSKVMDNSLQEVVNNASDYYLITLPELRQPVXXTPPTS

SEQ ID NO: 1594 - protein, 42 aa, Artificial Sequence
  GFR-binding peptide
  MOD_RES (2)..(4)..(36)..(37): Xaa is C or S
HXGXSSKVMNNSLQEIVNSSDDYYLITLPELKQPVXXPKPVH

SEQ ID NO: 1595 - protein, 41 aa, Artificial Sequence
  GFR-binding peptide
  MOD_RES (2)..(4)..(35)..(36): Xaa is C or S
LXGXSKVIMNSLQELLVRGNDYYLITLPETKQPVXXTSPVR

SEQ ID NO: 1596 - protein, 41 aa, Artificial Sequence
  GFR-binding peptide
  MOD_RES (2)..(4)..(35)..(36): Xaa is C or S
SXKXSKVIMNSLQEVKPKRGVYYLITLPELAQPVXXPAASA

SEQ ID NO: 1597 - protein, 41 aa, Artificial Sequence
  GFR-binding peptide
  MOD_RES (2)..(4)..(35)..(36): Xaa is C or S
SXKXSKVIMNSLQEIKPTKGIYYLITLPELDQPVXXPSASA

SEQ ID NO: 1598 - protein, 44 aa, Artificial Sequence
  GFR-binding peptide
  MOD_RES (2)..(4)..(38): Xaa is C or S
RXEXQNHQELSMEGIHQGQHPKIRMIQMTINSQGTPVXELGEDN

SEQ ID NO: 1599 - protein, 42 aa, Artificial Sequence
  GFR-binding peptide
  MOD_RES (2)..(4)..(36)..(37): Xaa is C or S
RXGXGEVVMDSMEGIVVKENEDMIQMTINSLETPVXXAKPIK

SEQ ID NO: 1600 - protein, 42 aa, Artificial Sequence
  GFR-binding peptide
  MOD_RES (2)..(4)..(36)..(37): Xaa is C or S
RXAXSEVTMNSMEGIVVNKNEDMIQMTINSMKEPVXXPEPIG

SEQ ID NO: 1601 - protein, 42 aa, Artificial Sequence
  GFR-binding peptide
  MOD_RES (2)..(4)..(36)..(37): Xaa is C or S
RXGXGEVVMESMEGIVVKDYEDMIQMTINSLETPVXXAKPIS

SEQ ID NO: 1602 - protein, 42 aa, Artificial Sequence
  GFR-binding peptide
  MOD_RES (2)..(4)..(36): Xaa is C or S
HXGXSRVVMNSMEGIIVNSSDDMIQMTINSLKTPAXTPKTVH

SEQ ID NO: 1603 - protein, 42 aa, Artificial Sequence
  GFR-binding peptide
  MOD_RES (2)..(4)..(36)..(37): Xaa is C or S
HXGXSRVVMNSMEGIIVNSSDDMIQMTINSLKTPAXXPKPVY

SEQ ID NO: 1604 - protein, 42 aa, Artificial Sequence
  GFR-binding peptide
  MOD_RES (2)..(4)..(36)..(37): Xaa is C or S
HXGXARVVMNSMEGIIVNSSDDMIQMTINSLQTPAXXPKPVT

SEQ ID NO: 1605 - protein, 42 aa, Artificial Sequence
  GFR-binding peptide
  MOD_RES (2)..(4)..(36)..(37): Xaa is C or S
HXGXAKVVMNSMEGIIVNNSSDMIQMTINSLKTPAXXAKPVA

SEQ ID NO: 1606 - protein, 43 aa, Artificial Sequence
  GFR-binding peptide
  MOD_RES (2)..(4)..(37)..(38): Xaa is C or S
RXGXEAVSMGESMEGITPVGMDDMIQMTINSLKTPVXXAKGVK

SEQ ID NO: 1607 - protein, 42 aa, Artificial Sequence
  GFR-binding peptide
  MOD_RES (2)..(4)..(36)..(37): Xaa is C or S
RXGXESVAMGSMEGIYTVVGKDMIQMTINSLKTPVXXAKSAK

SEQ ID NO: 1608 - protein, 42 aa, Artificial Sequence
  GFR-binding peptide
  MOD_RES (2)..(4)..(36)..(37): Xaa is C or S
SXGXRDVVMGSMEGIIIQQKDNMIQMTINSMKTPTXXPGASG

SEQ ID NO: 1609 - protein, 42 aa, Artificial Sequence
  GFR-binding peptide
  MOD_RES (2)..(4)..(36)..(37): Xaa is C or S
RXGXAEVVMDSMEGIVVNNAADMIQMTINSLRAPVXXSAPAA

SEQ ID NO: 1610 - protein, 42 aa, Artificial Sequence
  GFR-binding peptide
  MOD_RES (2)..(4)..(36)..(37): Xaa is C or S
RXGXSEVVMDSMEGIVVNNASDMIQMTINSLRTPVXXTPPTS

SEQ ID NO: 1611 - protein, 42 aa, Artificial Sequence
  GFR-binding peptide
  MOD_RES (2)..(4)..(36)..(37): Xaa is C or S
HXGXSRVVMNSMEGIIVNSSDDMIQMTINSLKTPAXXPKPVH

SEQ ID NO: 1612 - protein, 41 aa, Artificial Sequence
  GFR-binding peptide
  MOD_RES (2)..(4)..(35)..(36): Xaa is C or S
LXGXEEVIMSMEGILLVRGNDMIQMTINSTKVPAXXTSPVR

SEQ ID NO: 1613 - protein, 41 aa, Artificial Sequence
  GFR-binding peptide
  MOD_RES (2)..(4)..(35)..(36): Xaa is C or S
SXKXSRVIMSMEGIVKPKRGVMIQMTINSLAQPVXXPAASA

SEQ ID NO: 1614 - protein, 41 aa, Artificial Sequence
  GFR-binding peptide
  MOD_RES (2)..(4)..(35)..(36): Xaa is C or S
SXKXSKVIMSMEGIIKPTKGIMIQMTINSLDQSVXXPSASA

SEQ ID NO: 1615 - protein, 41 aa, Artificial Sequence
  GFR-binding peptide
  MOD_RES (2)..(4)..(35)..(36): Xaa is C or S
SXKXSKVVMSMEGIVKPTRGVMIQMTINSLDQPVXXPSASA

SEQ ID NO: 1616 - protein, 44 aa, Artificial Sequence
  GFR-binding peptide
  MOD_RES (2)..(4)..(38): Xaa is C or S
RXEXQSHEELSMEGIHQGQHPKIRMIQMTINSQGTPVXELGEDN

SEQ ID NO: 1617 - protein, 45 aa, Artificial Sequence
  GFR-binding peptide
  MOD_RES (2)..(4)..(41): Xaa is C or S
AXAXELHEELRSMEGILKPKKRVYEMIQMTINSHHVRSPQXKVSS

SEQ ID NO: 1618 - protein, 45 aa, Artificial Sequence
  GFR-binding peptide
  MOD_RES (2)..(4)..(41): Xaa is C or S
EXKXALHDELTSMEGIFIPKKRVIEMIQMTINSLQVQTPRXQVNR

SEQ ID NO: 1619 - protein, 44 aa, Artificial Sequence
  GFR-binding peptide
  MOD_RES (2)..(4)..(38): Xaa is C or S
RXEXKSHELFSMEGLHQGQHPKIRMIQMTINSEETPVXELGEDN

SEQ ID NO: 1620 - protein, 42 aa, Artificial Sequence
  GFR-binding peptide
  MOD_RES (2)..(4)..(36)..(37): Xaa is C or S
RXGXGEVVMDSMEGLVVKENEDMIQMTINSLETPVXXAKPIK

SEQ ID NO: 1621 - protein, 42 aa, Artificial Sequence
  GFR-binding peptide
  MOD_RES (2)..(4)..(36)..(37): Xaa is C or S
RXAXSEVTMNSMEGLVVNKNEDMIQMTINSMKEPVXXPEPIG

SEQ ID NO: 1622 - protein, 42 aa, Artificial Sequence
  GFR-binding peptide
  MOD_RES (2)..(4)..(36)..(37): Xaa is C or S
RXGXGEVVMESMEGLVVKDYEDMIQMTINSLETPVXXAKPIS

SEQ ID NO: 1623 - protein, 42 aa, Artificial Sequence
  GFR-binding peptide
  MOD_RES (2)..(4)..(36): Xaa is C or S
HXGXSRVVMNSMEGLIVNSSDDMIQMTINSLKTPAXTPKTVH

SEQ ID NO: 1624 - protein, 42 aa, Artificial Sequence
  GFR-binding peptide
  MOD_RES (2)..(4)..(36)..(37): Xaa is C or S
HXGXSRVVMNSMEGLIVNSSDDMIQMTINSLKTPAXXPKPVY

SEQ ID NO: 1625 - protein, 42 aa, Artificial Sequence
  GFR-binding peptide
  MOD_RES (2)..(4)..(36)..(37): Xaa is C or S
HXGXARVVMNSMEGLIVNSSDDMIQMTINSLQTPAXXPKPVT

SEQ ID NO: 1626 - protein, 42 aa, Artificial Sequence
  GFR-binding peptide
  MOD_RES (2)..(4)..(36)..(37): Xaa is C or S
HXGXAKVVMNSMEGLIVNNSSDMIQMTINSLKTPAXXAKPVA

SEQ ID NO: 1627 - protein, 43 aa, Artificial Sequence
  GFR-binding peptide
  MOD_RES (2)..(4)..(37)..(38): Xaa is C or S
RXGXEAVSMGESMEGLTPVGMDDMIQMTINSLKTPVXXAKGVK

SEQ ID NO: 1628 - protein, 42 aa, Artificial Sequence
  GFR-binding peptide
  MOD_RES (2)..(4)..(36)..(37): Xaa is C or S
RXGXESVAMGSMEGLYTVVGKDMIQMTINSLKTPVXXAKSAK

SEQ ID NO: 1629 - protein, 42 aa, Artificial Sequence
  GFR-binding peptide
  MOD_RES (2)..(4)..(36)..(37): Xaa is C or S
SXGXRDVVMGSMEGLIIQQKDNMIQMTINSMKTPTXXPGASG

SEQ ID NO: 1630 - protein, 42 aa, Artificial Sequence
  GFR-binding peptide
  MOD_RES (2)..(4)..(36)..(37): Xaa is C or S
RXGXAEVVMDSMEGLVVNNAADMIQMTINSLRAPVXXSAPAA

SEQ ID NO: 1631 - protein, 42 aa, Artificial Sequence
  GFR-binding peptide
  MOD_RES (2)..(4)..(36)..(37): Xaa is C or S
RXGXSEVVMDSMEGLVVNNASDMIQMTINSLRTPVXXTPPTS

SEQ ID NO: 1632 - protein, 42 aa, Artificial Sequence
  GFR-binding peptide
  MOD_RES (2)..(4)..(36)..(37): Xaa is C or S
HXGXSRVVMNSMEGLIVNSSDDMIQMTINSLKTPAXXPKPVH

SEQ ID NO: 1633 - protein, 41 aa, Artificial Sequence
  GFR-binding peptide
  MOD_RES (2)..(4)..(35)..(36): Xaa is C or S
LXGXEEVIMSMEGLLLVRGNDMIQMTINSTKVPAXXTSPVR

SEQ ID NO: 1634 - protein, 41 aa, Artificial Sequence
  GFR-binding peptide
  MOD_RES (2)..(4)..(35)..(36): Xaa is C or S
SXKXSRVIMSMEGLVKPKRGVMIQMTINSLAQPVXXPAASA

SEQ ID NO: 1635 - protein, 41 aa, Artificial Sequence
  GFR-binding peptide
  MOD_RES (2)..(4)..(35)..(36): Xaa is C or S
SXKXSKVIMSMEGLIKPTKGIMIQMTINSLDQSVXXPSASA

SEQ ID NO: 1636 - protein, 41 aa, Artificial Sequence
  GFR-binding peptide
  MOD_RES (2)..(4)..(35)..(36): Xaa is C or S
SXKXSKVVMSMEGLVKPTRGVMIQMTINSLDQPVXXPSASA

SEQ ID NO: 1637 - protein, 44 aa, Artificial Sequence
  GFR-binding peptide
  MOD_RES (2)..(4)..(38): Xaa is C or S
RXEXKNHQLFSMEGLHQGQHPKIRMIQMTINSEETPVXELGEDN

SEQ ID NO: 1638 - protein, 45 aa, Artificial Sequence
  GFR-binding peptide
  MOD_RES (2)..(4)..(41): Xaa is C or S
AXAXELHEELRSMEGLLKPKKRVYEMIQMTINSHHVRSPQXKVSS

SEQ ID NO: 1639 - protein, 45 aa, Artificial Sequence
  GFR-binding peptide
  MOD_RES (2)..(4)..(41): Xaa is C or S
EXKXALHDELTSMEGLFIPKKRVIEMIQMTINSLQVQTPRXQVNR

SEQ ID NO: 1640 - protein, 45 aa, Artificial Sequence
  GFR-binding peptide
  MOD_RES (2)..(4)..(41): Xaa is C or S
EXKXALHEELTVQVEKFIPKKRVIEVKAVKVSRLQVRSPRXQVNR

SEQ ID NO: 1641 - protein, 42 aa, Artificial Sequence
  GFR-binding peptide
  MOD_RES (2)..(4)..(36)..(37): Xaa is C or S
RXGXGEVVMDVQVEKVVKENEDVKAVKVSRLETPVXXAKPIK

SEQ ID NO: 1642 - protein, 42 aa, Artificial Sequence
  GFR-binding peptide
  MOD_RES (2)..(4)..(36)..(37): Xaa is C or S
RXAXSEVTMNVQVEKVVNKNEDVKAVKVSRMKEPVXXPEPIG

SEQ ID NO: 1643 - protein, 42 aa, Artificial Sequence
  GFR-binding peptide
  MOD_RES (2)..(4)..(36)..(37): Xaa is C or S
RXGXGEVVMEVQVEKVVKDYEDVKAVKVSRLETPVXXAKPIS

SEQ ID NO: 1644 - protein, 42 aa, Artificial Sequence
  GFR-binding peptide
  MOD_RES (2)..(4)..(36): Xaa is C or S
HXGXSRVVMNVQVEKIVNSSDDVKAVKVSRLKTPAXTPKTVH

SEQ ID NO: 1645 - protein, 42 aa, Artificial Sequence
  GFR-binding peptide
  MOD_RES (2)..(4)..(36)..(37): Xaa is C or S
HXGXSRVVMNVQVEKIVNSSDDVKAVKVSRLKTPAXXPKPVY

SEQ ID NO: 1646 - protein, 42 aa, Artificial Sequence
  GFR-binding peptide
  MOD_RES (2)..(4)..(36)..(37): Xaa is C or S
HXGXARVVMNVQVEKIVNSSDDVKAVKVSRLQTPAXXPKPVT

SEQ ID NO: 1647 - protein, 42 aa, Artificial Sequence
  GFR-binding peptide
  MOD_RES (2)..(4)..(36)..(37): Xaa is C or S
HXGXAKVVMNVQVEKIVNNSSDVKAVKVSRLKTPAXXAKPVA

SEQ ID NO: 1648 - protein, 43 aa, Artificial Sequence
  GFR-binding peptide
  MOD_RES (2)..(4)..(37)..(38): Xaa is C or S
RXGXEAVSMGEVQVEKTPVGMDDVKAVKVSRLKTPVXXAKGVK

SEQ ID NO: 1649 - protein, 42 aa, Artificial Sequence
  GFR-binding peptide
  MOD_RES (2)..(4)..(36)..(37): Xaa is C or S
RXGXESVAMGVQVEKYTVVGKDVKAVKVSRLKTPVXXAKSAK

SEQ ID NO: 1650 - protein, 42 aa, Artificial Sequence
  GFR-binding peptide
  MOD_RES (2)..(4)..(36)..(37): Xaa is C or S
SXGXRDVVMGVQVEKIIQQKDNVKAVKVSRMKTPTXXPGASG

SEQ ID NO: 1651 - protein, 42 aa, Artificial Sequence
  GFR-binding peptide
  MOD_RES (2)..(4)..(36)..(37): Xaa is C or S
RXGXAEVVMDVQVEKVVNNAADVKAVKVSRLRAPVXXSAPAA

SEQ ID NO: 1652 - protein, 42 aa, Artificial Sequence
  GFR-binding peptide
  MOD_RES (2)..(4)..(36)..(37): Xaa is C or S
RXGXSEVVMDVQVEKVVNNASDVKAVKVSRLRTPVXXTPPTS

SEQ ID NO: 1653 - protein, 42 aa, Artificial Sequence
  GFR-binding peptide
  MOD_RES (2)..(4)..(36)..(37): Xaa is C or S
HXGXSRVVMNVQVEKIVNSSDDVKAVKVSRLKTPAXXPKPVH

SEQ ID NO: 1654 - protein, 41 aa, Artificial Sequence
  GFR-binding peptide
  MOD_RES (2)..(4)..(35)..(36): Xaa is C or S
LXGXEEVIMVQVEKLLVRGNDVKAVKVSRTKVPAXXTSPVR

SEQ ID NO: 1655 - protein, 41 aa, Artificial Sequence
  GFR-binding peptide
  MOD_RES (2)..(4)..(35)..(36): Xaa is C or S
SXKXSRVIMVQVEKVKPKRGVVKAVKVSRLAQPVXXPAASA

SEQ ID NO: 1656 - protein, 41 aa, Artificial Sequence
  GFR-binding peptide
  MOD_RES (2)..(4)..(35)..(36): Xaa is C or S
SXKXSKVIMVQVEKIKPTKGIVKAVKVSRLDQSVXXPSASA

SEQ ID NO: 1657 - protein, 41 aa, Artificial Sequence
  GFR-binding peptide
  MOD_RES (2)..(4)..(35)..(36): Xaa is C or S
SXKXSKVVMVQVEKVKPTRGVVKAVKVSRLDQPVXXPSASA

SEQ ID NO: 1658 - protein, 44 aa, Artificial Sequence
  GFR-binding peptide
  MOD_RES (2)..(4)..(38): Xaa is C or S
RXEXKNHQLFVQVEKHQGQHPKIRVKAVKVSREETPVXELGEDN

SEQ ID NO: 1659 - protein, 44 aa, Artificial Sequence
  GFR-binding peptide
  MOD_RES (2)..(4)..(38): Xaa is C or S
RXEXQSHEELVQVEKHQGQHPKIRVKAVKVSRQGTPVXELGEDN

SEQ ID NO: 1660 - protein, 45 aa, Artificial Sequence
  GFR-binding peptide
  MOD_RES (2)..(4)..(41): Xaa is C or S
EXKXALHDELTVQVEKFIPKKRVIEVKAVKVSRLQVQTPRXQVNR

SEQ ID NO: 1661 - protein, 45 aa, Artificial Sequence
  GFR-binding peptide
  MOD_RES (2)..(4)..(41): Xaa is C or S
AXAXELHDELRVTAKKLKPKKRVYEIKRVQVPRHHVQTPQXKVSS

SEQ ID NO: 1662 - protein, 42 aa, Artificial Sequence
  GFR-binding peptide
  MOD_RES (2)..(4)..(36)..(37): Xaa is C or S
RXGXGEVVMDVTAKKVVKENEDIKRVQVPRLETPVXXAKPIK

SEQ ID NO: 1663 - protein, 42 aa, Artificial Sequence
  GFR-binding peptide
  MOD_RES (2)..(4)..(36)..(37): Xaa is C or S
RXAXSEVTMNVTAKKVVNKNEDIKRVQVPRMKEPVXXPEPIG

SEQ ID NO: 1664 - protein, 42 aa, Artificial Sequence
  GFR-binding peptide
  MOD_RES (2)..(4)..(36)..(37): Xaa is C or S
RXGXGEVVMEVTAKKVVKDYEDIKRVQVPRLETPVXXAKPIS

SEQ ID NO: 1665 - protein, 42 aa, Artificial Sequence
  GFR-binding peptide
  MOD_RES (2)..(4)..(36): Xaa is C or S
HXGXSRVVMNVTAKKIVNSSDDIKRVQVPRLKTPAXTPKTVH

SEQ ID NO: 1666 - protein, 42 aa, Artificial Sequence
  GFR-binding peptide
  MOD_RES (2)..(4)..(36)..(37): Xaa is C or S
HXGXSRVVMNVTAKKIVNSSDDIKRVQVPRLKTPAXXPKPVY

SEQ ID NO: 1667 - protein, 42 aa, Artificial Sequence
  GFR-binding peptide
  MOD_RES (2)..(4)..(36)..(37): Xaa is C or S
HXGXARVVMNVTAKKIVNSSDDIKRVQVPRLQTPAXXPKPVT

SEQ ID NO: 1668 - protein, 42 aa, Artificial Sequence
  GFR-binding peptide
  MOD_RES (2)..(4)..(36)..(37): Xaa is C or S
HXGXAKVVMNVTAKKIVNNSSDIKRVQVPRLKTPAXXAKPVA

SEQ ID NO: 1669 - protein, 43 aa, Artificial Sequence
  GFR-binding peptide
  MOD_RES (2)..(4)..(37)..(38): Xaa is C or S
RXGXEAVSMGEVTAKKTPVGMDDIKRVQVPRLKTPVXXAKGVK

SEQ ID NO: 1670 - protein, 42 aa, Artificial Sequence
  GFR-binding peptide
  MOD_RES (2)..(4)..(36)..(37): Xaa is C or S
RXGXESVAMGVTAKKYTVVGKDIKRVQVPRLKTPVXXAKSAK

SEQ ID NO: 1671 - protein, 42 aa, Artificial Sequence
  GFR-binding peptide
  MOD_RES (2)..(4)..(36)..(37): Xaa is C or S
SXGXRDVVMGVTAKKIIQQKDNIKRVQVPRMKTPTXXPGASG

SEQ ID NO: 1672 - protein, 42 aa, Artificial Sequence
  GFR-binding peptide
  MOD_RES (2)..(4)..(36)..(37): Xaa is C or S
RXGXAEVVMDVTAKKVVNNAADIKRVQVPRLRAPVXXSAPAA

SEQ ID NO: 1673 - protein, 42 aa, Artificial Sequence
  GFR-binding peptide
  MOD_RES (2)..(4)..(36)..(37): Xaa is C or S
RXGXSEVVMDVTAKKVVNNASDIKRVQVPRLRTPVXXTPPTS

SEQ ID NO: 1674 - protein, 42 aa, Artificial Sequence
  GFR-binding peptide
  MOD_RES (2)..(4)..(36)..(37): Xaa is C or S
HXGXSRVVMNVTAKKIVNSSDDIKRVQVPRLKTPAXXPKPVH

SEQ ID NO: 1675 - protein, 41 aa, Artificial Sequence
  GFR-binding peptide
  MOD_RES (2)..(4)..(35)..(36): Xaa is C or S
LXGXEEVIMVTAKKLLVRGNDIKRVQVPRTKVPAXXTSPVR

SEQ ID NO: 1676 - protein, 41 aa, Artificial Sequence
  GFR-binding peptide
  MOD_RES (2)..(4)..(35)..(36): Xaa is C or S
SXKXSRVIMVTAKKVKPKRGVIKRVQVPRLAQPVXXPAASA

SEQ ID NO: 1677 - protein, 41 aa, Artificial Sequence
  GFR-binding peptide
  MOD_RES (2)..(4)..(35)..(36): Xaa is C or S
SXKXSKVIMVTAKKIKPTKGIIKRVQVPRLDQSVXXPSASA

SEQ ID NO: 1678 - protein, 41 aa, Artificial Sequence
  GFR-binding peptide
  MOD_RES (2)..(4)..(35)..(36): Xaa is C or S
SXKXSKVVMVTAKKVKPTRGVIKRVQVPRLDQPVXXPSASA

SEQ ID NO: 1679 - protein, 44 aa, Artificial Sequence
  GFR-binding peptide
  MOD_RES (2)..(4)..(38): Xaa is C or S
RXEXKNHQLFVTAKKHQGQHPKIRIKRVQVPREETPVXELGEDN

SEQ ID NO: 1680 - protein, 44 aa, Artificial Sequence
  GFR-binding peptide
  MOD_RES (2)..(4)..(38): Xaa is C or S
RXEXQSHEELVTAKKHQGQHPKIRIKRVQVPRQGTPVXELGEDN

SEQ ID NO: 1681 - protein, 45 aa, Artificial Sequence
  GFR-binding peptide
  MOD_RES (2)..(4)..(41): Xaa is C or S
AXAXELHEELRVTAKKLKPKKRVYEIKRVQVPRHHVRSPQXKVSS

SEQ ID NO: 1682 - protein, 30 aa, Artificial Sequence
  GFR-binding peptide
EVVMNQYNKLVVNKNEDLYLMSIASMKTPV

SEQ ID NO: 1683 - protein, 30 aa, Artificial Sequence
  GFR-binding peptide
EVVMNQYNKLIVNSSDDLYLMSIASLKTPV

SEQ ID NO: 1684 - protein, 30 aa, Artificial Sequence
  GFR-binding peptide
EVVMNQYNKLIVNSSDDLYLMSIASLQTPV

SEQ ID NO: 1685 - protein, 30 aa, Artificial Sequence
  GFR-binding peptide
EVVMNQYNKLIVNNSSDLYLMSIASLKTPV

SEQ ID NO: 1686 - protein, 32 aa, Artificial Sequence
  GFR-binding peptide
EVVSMGEQYNKLTPVGMDDLYLMSIASLKTPV

SEQ ID NO: 1687 - protein, 30 aa, Artificial Sequence
  GFR-binding peptide
EVVMGQYNKLYTVVGKDLYLMSIASLKTPV

SEQ ID NO: 1688 - protein, 30 aa, Artificial Sequence
  GFR-binding peptide
EVVMGQYNKLIIQQKDNLYLMSIASMKTPV

SEQ ID NO: 1689 - protein, 30 aa, Artificial Sequence
  GFR-binding peptide
EVVMDQYNKLVVNNAADLYLMSIASLRTPV

SEQ ID NO: 1690 - protein, 30 aa, Artificial Sequence
  GFR-binding peptide
EVVMDQYNKLVVNNASDLYLMSIASLRTPV

SEQ ID NO: 1691 - protein, 30 aa, Artificial Sequence
  GFR-binding peptide
EVVIMQYNKLLLVRGNDLYLMSIASTKTPV

SEQ ID NO: 1692 - protein, 30 aa, Artificial Sequence
  GFR-binding peptide
EVVIMQYNKLVKPKRGVLYLMSIASLATPV

SEQ ID NO: 1693 - protein, 30 aa, Artificial Sequence
  GFR-binding peptide
EVVIMQYNKLIKPTKGILYLMSIASLDTPV

SEQ ID NO: 1694 - protein, 30 aa, Artificial Sequence
  GFR-binding peptide
EVVVMQYNKLVKPTRGVLYLMSIASLDTPV

SEQ ID NO: 1695 - protein, 30 aa, Artificial Sequence
  GFR-binding peptide
EVTMNQYNKLVVNKNEDLYLMSIASMKEPV

SEQ ID NO: 1696 - protein, 30 aa, Artificial Sequence
  GFR-binding peptide
RVVMNQYNKLIVNSSDDLYLMSIASLKTPA

SEQ ID NO: 1697 - protein, 30 aa, Artificial Sequence
  GFR-binding peptide
RVVMNQYNKLIVNSSDDLYLMSIASLQTPA

SEQ ID NO: 1698 - protein, 30 aa, Artificial Sequence
  GFR-binding peptide
KVVMNQYNKLIVNNSSDLYLMSIASLKTPA

SEQ ID NO: 1699 - protein, 32 aa, Artificial Sequence
  GFR-binding peptide
EAVSMGEQYNKLTPVGMDDLYLMSIASLKTPV

SEQ ID NO: 1700 - protein, 30 aa, Artificial Sequence
  GFR-binding peptide
SVAMGQYNKLYTVVGKDLYLMSIASLKTPV

SEQ ID NO: 1701 - protein, 30 aa, Artificial Sequence
  GFR-binding peptide
DVVMGQYNKLIIQQKDNLYLMSIASMKTPT

SEQ ID NO: 1702 - protein, 30 aa, Artificial Sequence
  GFR-binding peptide
EVVMDQYNKLVVNNAADLYLMSIASLRAPV

SEQ ID NO: 1703 - protein, 30 aa, Artificial Sequence
  GFR-binding peptide
EEVIMQYNKLLLVRGNDLYLMSIASTKVPA

SEQ ID NO: 1704 - protein, 30 aa, Artificial Sequence
  GFR-binding peptide
SRVIMQYNKLVKPKRGVLYLMSIASLAQPV

SEQ ID NO: 1705 - protein, 30 aa, Artificial Sequence
  GFR-binding peptide
SKVIMQYNKLIKPTKGILYLMSIASLDQSV

SEQ ID NO: 1706 - protein, 30 aa, Artificial Sequence
  GFR-binding peptide
SKVVMQYNKLVKPTRGVLYLMSIASLDQPV

SEQ ID NO: 1707 - protein, 32 aa, Artificial Sequence
  GFR-binding peptide
NHQLFQYNKLHQGQHPKIRLYLMSIASEETPV

SEQ ID NO: 1708 - protein, 32 aa, Artificial Sequence
  GFR-binding peptide
SHEELQYNKLHQGQHPKIRLYLMSIASQGTPV

SEQ ID NO: 1709 - protein, 32 aa, Artificial Sequence
  GFR-binding peptide
HEELRQYNKLLKPKKRVYELYLMSIASHHVRS

SEQ ID NO: 1710 - protein, 32 aa, Artificial Sequence
  GFR-binding peptide
HDELTQYNKLFIPKKRVIELYLMSIASLQVQT

SEQ ID NO: 1711 - protein, 30 aa, Artificial Sequence
  GFR-binding peptide
EVTMDPYVKLVVKENEDFFLISLSSLEEPV

SEQ ID NO: 1712 - protein, 30 aa, Artificial Sequence
  GFR-binding peptide
EVTMEPYVKLVVKDYEDFFLISLSSLEEPV

SEQ ID NO: 1713 - protein, 30 aa, Artificial Sequence
  GFR-binding peptide
EVTMNPYVKLIVNSSDDFFLISLSSLKEPV

SEQ ID NO: 1714 - protein, 30 aa, Artificial Sequence
  GFR-binding peptide
EVTMNPYVKLIVNSSDDFFLISLSSLQEPV

SEQ ID NO: 1715 - protein, 30 aa, Artificial Sequence
  GFR-binding peptide
EVTMNPYVKLIVNNSSDFFLISLSSLKEPV

SEQ ID NO: 1716 - protein, 32 aa, Artificial Sequence
  GFR-binding peptide
EVTSMGEPYVKLTPVGMDDFFLISLSSLKEPV

SEQ ID NO: 1717 - protein, 30 aa, Artificial Sequence
  GFR-binding peptide
EVTMGPYVKLYTVVGKDFFLISLSSLKEPV

SEQ ID NO: 1718 - protein, 30 aa, Artificial Sequence
  GFR-binding peptide
EVTMGPYVKLIIQQKDNFFLISLSSMKEPV

SEQ ID NO: 1719 - protein, 30 aa, Artificial Sequence
  GFR-binding peptide
EVTMDPYVKLVVNNAADFFLISLSSLREPV

SEQ ID NO: 1720 - protein, 30 aa, Artificial Sequence
  GFR-binding peptide
EVTMDPYVKLVVNNASDFFLISLSSLREPV

SEQ ID NO: 1721 - protein, 30 aa, Artificial Sequence
  GFR-binding peptide
EVTIMPYVKLLLVRGNDFFLISLSSTKEPV

SEQ ID NO: 1722 - protein, 30 aa, Artificial Sequence
  GFR-binding peptide
EVTIMPYVKLVKPKRGVFFLISLSSLAEPV

SEQ ID NO: 1723 - protein, 30 aa, Artificial Sequence
  GFR-binding peptide
EVTIMPYVKLIKPTKGIFFLISLSSLDEPV

SEQ ID NO: 1724 - protein, 30 aa, Artificial Sequence
  GFR-binding peptide
EVTVMPYVKLVKPTRGVFFLISLSSLDEPV

SEQ ID NO: 1725 - protein, 30 aa, Artificial Sequence
  GFR-binding peptide
EVVMDPYVKLVVKENEDFFLISLSSLETPV

SEQ ID NO: 1726 - protein, 30 aa, Artificial Sequence
  GFR-binding peptide
EVVMEPYVKLVVKDYEDFFLISLSSLETPV

SEQ ID NO: 1727 - protein, 30 aa, Artificial Sequence
  GFR-binding peptide
RVVMNPYVKLIVNSSDDFFLISLSSLKTPA

SEQ ID NO: 1728 - protein, 30 aa, Artificial Sequence
  GFR-binding peptide
RVVMNPYVKLIVNSSDDFFLISLSSLQTPA

SEQ ID NO: 1729 - protein, 30 aa, Artificial Sequence
  GFR-binding peptide
KVVMNPYVKLIVNNSSDFFLISLSSLKTPA

SEQ ID NO: 1730 - protein, 32 aa, Artificial Sequence
  GFR-binding peptide
EAVSMGEPYVKLTPVGMDDFFLISLSSLKTPV

SEQ ID NO: 1731 - protein, 30 aa, Artificial Sequence
  GFR-binding peptide
SVAMGPYVKLYTVVGKDFFLISLSSLKTPV

SEQ ID NO: 1732 - protein, 30 aa, Artificial Sequence
  GFR-binding peptide
DVVMGPYVKLIIQQKDNFFLISLSSMKTPT

SEQ ID NO: 1733 - protein, 30 aa, Artificial Sequence
  GFR-binding peptide
EVVMDPYVKLVVNNAADFFLISLSSLRAPV

SEQ ID NO: 1734 - protein, 30 aa, Artificial Sequence
  GFR-binding peptide
EVVMDPYVKLVVNNASDFFLISLSSLRTPV

SEQ ID NO: 1735 - protein, 30 aa, Artificial Sequence
  GFR-binding peptide
EEVIMPYVKLLLVRGNDFFLISLSSTKVPA

SEQ ID NO: 1736 - protein, 30 aa, Artificial Sequence
  GFR-binding peptide
SRVIMPYVKLVKPKRGVFFLISLSSLAQPV

SEQ ID NO: 1737 - protein, 30 aa, Artificial Sequence
  GFR-binding peptide
SKVIMPYVKLIKPTKGIFFLISLSSLDQSV

SEQ ID NO: 1738 - protein, 30 aa, Artificial Sequence
  GFR-binding peptide
SKVVMPYVKLVKPTRGVFFLISLSSLDQPV

SEQ ID NO: 1739 - protein, 32 aa, Artificial Sequence
  GFR-binding peptide
NHQLFPYVKLHQGQHPKIRFFLISLSSEETPV

SEQ ID NO: 1740 - protein, 32 aa, Artificial Sequence
  GFR-binding peptide
SHEELPYVKLHQGQHPKIRFFLISLSSQGTPV

SEQ ID NO: 1741 - protein, 32 aa, Artificial Sequence
  GFR-binding peptide
HEELRPYVKLLKPKKRVYEFFLISLSSHHVRS

SEQ ID NO: 1742 - protein, 32 aa, Artificial Sequence
  GFR-binding peptide
HDELTPYVKLFIPKKRVIEFFLISLSSLQVQT

SEQ ID NO: 1743 - protein, 30 aa, Artificial Sequence
  GFR-binding peptide
RVVMDRYKKLVVKENEDFYLVSIANLETPA

SEQ ID NO: 1744 - protein, 30 aa, Artificial Sequence
  GFR-binding peptide
RVVMNRYKKLVVNKNEDFYLVSIANMKTPA

SEQ ID NO: 1745 - protein, 30 aa, Artificial Sequence
  GFR-binding peptide
RVVMERYKKLVVKDYEDFYLVSIANLETPA

SEQ ID NO: 1746 - protein, 30 aa, Artificial Sequence
  GFR-binding peptide
RVVMNRYKKLIVNNSSDFYLVSIANLKTPA

SEQ ID NO: 1747 - protein, 32 aa, Artificial Sequence
  GFR-binding peptide
RVVSMGERYKKLTPVGMDDFYLVSIANLKTPA

SEQ ID NO: 1748 - protein, 30 aa, Artificial Sequence
  GFR-binding peptide
RVVMGRYKKLYTVVGKDFYLVSIANLKTPA

SEQ ID NO: 1749 - protein, 30 aa, Artificial Sequence
  GFR-binding peptide
RVVMGRYKKLIIQQKDNFYLVSIANMKTPA

SEQ ID NO: 1750 - protein, 30 aa, Artificial Sequence
  GFR-binding peptide
RVVMDRYKKLVVNNAADFYLVSIANLRTPA

SEQ ID NO: 1751 - protein, 30 aa, Artificial Sequence
  GFR-binding peptide
RVVMDRYKKLVVNNASDFYLVSIANLRTPA

SEQ ID NO: 1752 - protein, 30 aa, Artificial Sequence
  GFR-binding peptide
RVVIMRYKKLLLVRGNDFYLVSIANTKTPA

SEQ ID NO: 1753 - protein, 30 aa, Artificial Sequence
  GFR-binding peptide
RVVIMRYKKLVKPKRGVFYLVSIANLATPA

SEQ ID NO: 1754 - protein, 30 aa, Artificial Sequence
  GFR-binding peptide
RVVIMRYKKLIKPTKGIFYLVSIANLDTPA

SEQ ID NO: 1755 - protein, 30 aa, Artificial Sequence
  GFR-binding peptide
RVVVMRYKKLVKPTRGVFYLVSIANLDTPA

SEQ ID NO: 1756 - protein, 30 aa, Artificial Sequence
  GFR-binding peptide
EVVMDRYKKLVVKENEDFYLVSIANLETPV

SEQ ID NO: 1757 - protein, 30 aa, Artificial Sequence
  GFR-binding peptide
EVTMNRYKKLVVNKNEDFYLVSIANMKEPV

SEQ ID NO: 1758 - protein, 30 aa, Artificial Sequence
  GFR-binding peptide
EVVMERYKKLVVKDYEDFYLVSIANLETPV

SEQ ID NO: 1759 - protein, 30 aa, Artificial Sequence
  GFR-binding peptide
KVVMNRYKKLIVNNSSDFYLVSIANLKTPA

SEQ ID NO: 1760 - protein, 32 aa, Artificial Sequence
  GFR-binding peptide
EAVSMGERYKKLTPVGMDDFYLVSIANLKTPV

SEQ ID NO: 1761 - protein, 30 aa, Artificial Sequence
  GFR-binding peptide
SVAMGRYKKLYTVVGKDFYLVSIANLKTPV

SEQ ID NO: 1762 - protein, 30 aa, Artificial Sequence
  GFR-binding peptide
DVVMGRYKKLIIQQKDNFYLVSIANMKTPT

SEQ ID NO: 1763 - protein, 30 aa, Artificial Sequence
  GFR-binding peptide
EVVMDRYKKLVVNNAADFYLVSIANLRAPV

SEQ ID NO: 1764 - protein, 30 aa, Artificial Sequence
  GFR-binding peptide
EVVMDRYKKLVVNNASDFYLVSIANLRTPV

SEQ ID NO: 1765 - protein, 30 aa, Artificial Sequence
  GFR-binding peptide
EEVIMRYKKLLLVRGNDFYLVSIANTKVPA

SEQ ID NO: 1766 - protein, 30 aa, Artificial Sequence
  GFR-binding peptide
SRVIMRYKKLVKPKRGVFYLVSIANLAQPV

SEQ ID NO: 1767 - protein, 30 aa, Artificial Sequence
  GFR-binding peptide
SKVIMRYKKLIKPTKGIFYLVSIANLDQSV

SEQ ID NO: 1768 - protein, 30 aa, Artificial Sequence
  GFR-binding peptide
SKVVMRYKKLVKPTRGVFYLVSIANLDQPV

SEQ ID NO: 1769 - protein, 32 aa, Artificial Sequence
  GFR-binding peptide
NHQLFRYKKLHQGQHPKIRFYLVSIANEETPV

SEQ ID NO: 1770 - protein, 32 aa, Artificial Sequence
  GFR-binding peptide
SHEELRYKKLHQGQHPKIRFYLVSIANQGTPV

SEQ ID NO: 1771 - protein, 32 aa, Artificial Sequence
  GFR-binding peptide
HEELRRYKKLLKPKKRVYEFYLVSIANHHVRS

SEQ ID NO: 1772 - protein, 32 aa, Artificial Sequence
  GFR-binding peptide
HDELTRYKKLFIPKKRVIEFYLVSIANLQVQT

SEQ ID NO: 1773 - protein, 30 aa, Artificial Sequence
  GFR-binding peptide
KVVMDRHKRLVVKENEDYYLVSTASLETPA

SEQ ID NO: 1774 - protein, 30 aa, Artificial Sequence
  GFR-binding peptide
KVVMNRHKRLVVNKNEDYYLVSTASMKTPA

SEQ ID NO: 1775 - protein, 30 aa, Artificial Sequence
  GFR-binding peptide
KVVMERHKRLVVKDYEDYYLVSTASLETPA

SEQ ID NO: 1776 - protein, 30 aa, Artificial Sequence
  GFR-binding peptide
KVVMNRHKRLIVNSSDDYYLVSTASLKTPA

SEQ ID NO: 1777 - protein, 30 aa, Artificial Sequence
  GFR-binding peptide
KVVMNRHKRLIVNSSDDYYLVSTASLQTPA

SEQ ID NO: 1778 - protein, 32 aa, Artificial Sequence
  GFR-binding peptide
KVVSMGERHKRLTPVGMDDYYLVSTASLKTPA

SEQ ID NO: 1779 - protein, 30 aa, Artificial Sequence
  GFR-binding peptide
KVVMGRHKRLYTVVGKDYYLVSTASLKTPA

SEQ ID NO: 1780 - protein, 30 aa, Artificial Sequence
  GFR-binding peptide
KVVMGRHKRLIIQQKDNYYLVSTASMKTPA

SEQ ID NO: 1781 - protein, 30 aa, Artificial Sequence
  GFR-binding peptide
KVVMDRHKRLVVNNAADYYLVSTASLRTPA

SEQ ID NO: 1782 - protein, 30 aa, Artificial Sequence
  GFR-binding peptide
KVVMDRHKRLVVNNASDYYLVSTASLRTPA

SEQ ID NO: 1783 - protein, 30 aa, Artificial Sequence
  GFR-binding peptide
KVVIMRHKRLLLVRGNDYYLVSTASTKTPA

SEQ ID NO: 1784 - protein, 30 aa, Artificial Sequence
  GFR-binding peptide
KVVIMRHKRLVKPKRGVYYLVSTASLATPA

SEQ ID NO: 1785 - protein, 30 aa, Artificial Sequence
  GFR-binding peptide
KVVIMRHKRLIKPTKGIYYLVSTASLDTPA

SEQ ID NO: 1786 - protein, 30 aa, Artificial Sequence
  GFR-binding peptide
KVVVMRHKRLVKPTRGVYYLVSTASLDTPA

SEQ ID NO: 1787 - protein, 30 aa, Artificial Sequence
  GFR-binding peptide
EVVMDRHKRLVVKENEDYYLVSTASLETPV

SEQ ID NO: 1788 - protein, 30 aa, Artificial Sequence
  GFR-binding peptide
EVTMNRHKRLVVNKNEDYYLVSTASMKEPV

SEQ ID NO: 1789 - protein, 30 aa, Artificial Sequence
  GFR-binding peptide
EVVMERHKRLVVKDYEDYYLVSTASLETPV

SEQ ID NO: 1790 - protein, 30 aa, Artificial Sequence
  GFR-binding peptide
RVVMNRHKRLIVNSSDDYYLVSTASLKTPA

SEQ ID NO: 1791 - protein, 30 aa, Artificial Sequence
  GFR-binding peptide
RVVMNRHKRLIVNSSDDYYLVSTASLQTPA

SEQ ID NO: 1792 - protein, 32 aa, Artificial Sequence
  GFR-binding peptide
EAVSMGERHKRLTPVGMDDYYLVSTASLKTPV

SEQ ID NO: 1793 - protein, 30 aa, Artificial Sequence
  GFR-binding peptide
SVAMGRHKRLYTVVGKDYYLVSTASLKTPV

SEQ ID NO: 1794 - protein, 30 aa, Artificial Sequence
  GFR-binding peptide
DVVMGRHKRLIIQQKDNYYLVSTASMKTPT

SEQ ID NO: 1795 - protein, 30 aa, Artificial Sequence
  GFR-binding peptide
EVVMDRHKRLVVNNAADYYLVSTASLRAPV

SEQ ID NO: 1796 - protein, 30 aa, Artificial Sequence
  GFR-binding peptide
EVVMDRHKRLVVNNASDYYLVSTASLRTPV

SEQ ID NO: 1797 - protein, 30 aa, Artificial Sequence
  GFR-binding peptide
EEVIMRHKRLLLVRGNDYYLVSTASTKVPA

SEQ ID NO: 1798 - protein, 30 aa, Artificial Sequence
  GFR-binding peptide
SRVIMRHKRLVKPKRGVYYLVSTASLAQPV

SEQ ID NO: 1799 - protein, 30 aa, Artificial Sequence
  GFR-binding peptide
SKVIMRHKRLIKPTKGIYYLVSTASLDQSV

SEQ ID NO: 1800 - protein, 30 aa, Artificial Sequence
  GFR-binding peptide
SKVVMRHKRLVKPTRGVYYLVSTASLDQPV

SEQ ID NO: 1801 - protein, 32 aa, Artificial Sequence
  GFR-binding peptide
NHQLFRHKRLHQGQHPKIRYYLVSTASEETPV

SEQ ID NO: 1802 - protein, 32 aa, Artificial Sequence
  GFR-binding peptide
SHEELRHKRLHQGQHPKIRYYLVSTASQGTPV

SEQ ID NO: 1803 - protein, 32 aa, Artificial Sequence
  GFR-binding peptide
HEELRRHKRLLKPKKRVYEYYLVSTASHHVRS

SEQ ID NO: 1804 - protein, 32 aa, Artificial Sequence
  GFR-binding peptide
HDELTRHKRLFIPKKRVIEYYLVSTASLQVQT

SEQ ID NO: 1805 - protein, 30 aa, Artificial Sequence
  GFR-binding peptide
EAVMDYHYKLVVKENEDKYLVSIPSLETPV

SEQ ID NO: 1806 - protein, 30 aa, Artificial Sequence
  GFR-binding peptide
EAVMNYHYKLVVNKNEDKYLVSIPSMKTPV

SEQ ID NO: 1807 - protein, 30 aa, Artificial Sequence
  GFR-binding peptide
EAVMEYHYKLVVKDYEDKYLVSIPSLETPV

SEQ ID NO: 1808 - protein, 30 aa, Artificial Sequence
  GFR-binding peptide
EAVMNYHYKLIVNSSDDKYLVSIPSLKTPV

SEQ ID NO: 1809 - protein, 30 aa, Artificial Sequence
  GFR-binding peptide
EAVMNYHYKLIVNSSDDKYLVSIPSLQTPV

SEQ ID NO: 1810 - protein, 30 aa, Artificial Sequence
  GFR-binding peptide
EAVMNYHYKLIVNNSSDKYLVSIPSLKTPV

SEQ ID NO: 1811 - protein, 30 aa, Artificial Sequence
  GFR-binding peptide
EAVMGYHYKLYTVVGKDKYLVSIPSLKTPV

SEQ ID NO: 1812 - protein, 30 aa, Artificial Sequence
  GFR-binding peptide
EAVMGYHYKLIIQQKDNKYLVSIPSMKTPV

SEQ ID NO: 1813 - protein, 30 aa, Artificial Sequence
  GFR-binding peptide
EAVMDYHYKLVVNNAADKYLVSIPSLRTPV

SEQ ID NO: 1814 - protein, 30 aa, Artificial Sequence
  GFR-binding peptide
EAVMDYHYKLVVNNASDKYLVSIPSLRTPV

SEQ ID NO: 1815 - protein, 30 aa, Artificial Sequence
  GFR-binding peptide
EAVIMYHYKLLLVRGNDKYLVSIPSTKTPV

SEQ ID NO: 1816 - protein, 30 aa, Artificial Sequence
  GFR-binding peptide
EAVIMYHYKLVKPKRGVKYLVSIPSLATPV

SEQ ID NO: 1817 - protein, 30 aa, Artificial Sequence
  GFR-binding peptide
EAVIMYHYKLIKPTKGIKYLVSIPSLDTPV

SEQ ID NO: 1818 - protein, 30 aa, Artificial Sequence
  GFR-binding peptide
EAVVMYHYKLVKPTRGVKYLVSIPSLDTPV

SEQ ID NO: 1819 - protein, 30 aa, Artificial Sequence
  GFR-binding peptide
EVVMDYHYKLVVKENEDKYLVSIPSLETPV

SEQ ID NO: 1820 - protein, 30 aa, Artificial Sequence
  GFR-binding peptide
EVTMNYHYKLVVNKNEDKYLVSIPSMKEPV

SEQ ID NO: 1821 - protein, 30 aa, Artificial Sequence
  GFR-binding peptide
EVVMEYHYKLVVKDYEDKYLVSIPSLETPV

SEQ ID NO: 1822 - protein, 30 aa, Artificial Sequence
  GFR-binding peptide
RVVMNYHYKLIVNSSDDKYLVSIPSLKTPA

SEQ ID NO: 1823 - protein, 30 aa, Artificial Sequence
  GFR-binding peptide
RVVMNYHYKLIVNSSDDKYLVSIPSLQTPA

SEQ ID NO: 1824 - protein, 30 aa, Artificial Sequence
  GFR-binding peptide
KVVMNYHYKLIVNNSSDKYLVSIPSLKTPA

SEQ ID NO: 1825 - protein, 30 aa, Artificial Sequence
  GFR-binding peptide
SVAMGYHYKLYTVVGKDKYLVSIPSLKTPV

SEQ ID NO: 1826 - protein, 30 aa, Artificial Sequence
  GFR-binding peptide
DVVMGYHYKLIIQQKDNKYLVSIPSMKTPT

SEQ ID NO: 1827 - protein, 30 aa, Artificial Sequence
  GFR-binding peptide
EVVMDYHYKLVVNNAADKYLVSIPSLRAPV

SEQ ID NO: 1828 - protein, 30 aa, Artificial Sequence
  GFR-binding peptide
EVVMDYHYKLVVNNASDKYLVSIPSLRTPV

SEQ ID NO: 1829 - protein, 30 aa, Artificial Sequence
  GFR-binding peptide
EEVIMYHYKLLLVRGNDKYLVSIPSTKVPA

SEQ ID NO: 1830 - protein, 30 aa, Artificial Sequence
  GFR-binding peptide
SRVIMYHYKLVKPKRGVKYLVSIPSLAQPV

SEQ ID NO: 1831 - protein, 30 aa, Artificial Sequence
  GFR-binding peptide
SKVIMYHYKLIKPTKGIKYLVSIPSLDQSV

SEQ ID NO: 1832 - protein, 30 aa, Artificial Sequence
  GFR-binding peptide
SKVVMYHYKLVKPTRGVKYLVSIPSLDQPV

SEQ ID NO: 1833 - protein, 32 aa, Artificial Sequence
  GFR-binding peptide
NHQLFYHYKLHQGQHPKIRKYLVSIPSEETPV

SEQ ID NO: 1834 - protein, 32 aa, Artificial Sequence
  GFR-binding peptide
SHEELYHYKLHQGQHPKIRKYLVSIPSQGTPV

SEQ ID NO: 1835 - protein, 32 aa, Artificial Sequence
  GFR-binding peptide
HEELRYHYKLLKPKKRVYEKYLVSIPSHHVRS

SEQ ID NO: 1836 - protein, 32 aa, Artificial Sequence
  GFR-binding peptide
HDELTYHYKLFIPKKRVIEKYLVSIPSLQVQT

SEQ ID NO: 1837 - protein, 30 aa, Artificial Sequence
  GFR-binding peptide
SVAMDEYKFKVVKENEDLYLISIPELETPV

SEQ ID NO: 1838 - protein, 30 aa, Artificial Sequence
  GFR-binding peptide
SVAMNEYKFKVVNKNEDLYLISIPEMKTPV

SEQ ID NO: 1839 - protein, 30 aa, Artificial Sequence
  GFR-binding peptide
SVAMEEYKFKVVKDYEDLYLISIPELETPV

SEQ ID NO: 1840 - protein, 30 aa, Artificial Sequence
  GFR-binding peptide
SVAMNEYKFKIVNSSDDLYLISIPELKTPV

SEQ ID NO: 1841 - protein, 30 aa, Artificial Sequence
  GFR-binding peptide
SVAMNEYKFKIVNSSDDLYLISIPELQTPV

SEQ ID NO: 1842 - protein, 30 aa, Artificial Sequence
  GFR-binding peptide
SVAMNEYKFKIVNNSSDLYLISIPELKTPV

SEQ ID NO: 1843 - protein, 32 aa, Artificial Sequence
  GFR-binding peptide
SVASMGEEYKFKTPVGMDDLYLISIPELKTPV

SEQ ID NO: 1844 - protein, 30 aa, Artificial Sequence
  GFR-binding peptide
SVAMGEYKFKIIQQKDNLYLISIPEMKTPV

SEQ ID NO: 1845 - protein, 30 aa, Artificial Sequence
  GFR-binding peptide
SVAMDEYKFKVVNNAADLYLISIPELRTPV

SEQ ID NO: 1846 - protein, 30 aa, Artificial Sequence
  GFR-binding peptide
SVAMDEYKFKVVNNASDLYLISIPELRTPV

SEQ ID NO: 1847 - protein, 30 aa, Artificial Sequence
  GFR-binding peptide
SVAIMEYKFKLLVRGNDLYLISIPETKTPV

SEQ ID NO: 1848 - protein, 30 aa, Artificial Sequence
  GFR-binding peptide
SVAIMEYKFKVKPKRGVLYLISIPELATPV

SEQ ID NO: 1849 - protein, 30 aa, Artificial Sequence
  GFR-binding peptide
SVAIMEYKFKIKPTKGILYLISIPELDTPV

SEQ ID NO: 1850 - protein, 30 aa, Artificial Sequence
  GFR-binding peptide
SVAVMEYKFKVKPTRGVLYLISIPELDTPV

SEQ ID NO: 1851 - protein, 30 aa, Artificial Sequence
  GFR-binding peptide
EVVMDEYKFKVVKENEDLYLISIPELETPV

SEQ ID NO: 1852 - protein, 30 aa, Artificial Sequence
  GFR-binding peptide
EVTMNEYKFKVVNKNEDLYLISIPEMKEPV

SEQ ID NO: 1853 - protein, 30 aa, Artificial Sequence
  GFR-binding peptide
EVVMEEYKFKVVKDYEDLYLISIPELETPV

SEQ ID NO: 1854 - protein, 30 aa, Artificial Sequence
  GFR-binding peptide
RVVMNEYKFKIVNSSDDLYLISIPELKTPA

SEQ ID NO: 1855 - protein, 30 aa, Artificial Sequence
  GFR-binding peptide
RVVMNEYKFKIVNSSDDLYLISIPELQTPA

SEQ ID NO: 1856 - protein, 30 aa, Artificial Sequence
  GFR-binding peptide
KVVMNEYKFKIVNNSSDLYLISIPELKTPA

SEQ ID NO: 1857 - protein, 32 aa, Artificial Sequence
  GFR-binding peptide
EAVSMGEEYKFKTPVGMDDLYLISIPELKTPV

SEQ ID NO: 1858 - protein, 30 aa, Artificial Sequence
  GFR-binding peptide
DVVMGEYKFKIIQQKDNLYLISIPEMKTPT

SEQ ID NO: 1859 - protein, 30 aa, Artificial Sequence
  GFR-binding peptide
EVVMDEYKFKVVNNAADLYLISIPELRAPV

SEQ ID NO: 1860 - protein, 30 aa, Artificial Sequence
  GFR-binding peptide
EVVMDEYKFKVVNNASDLYLISIPELRTPV

SEQ ID NO: 1861 - protein, 30 aa, Artificial Sequence
  GFR-binding peptide
EEVIMEYKFKLLVRGNDLYLISIPETKVPA

SEQ ID NO: 1862 - protein, 30 aa, Artificial Sequence
  GFR-binding peptide
SRVIMEYKFKVKPKRGVLYLISIPELAQPV

SEQ ID NO: 1863 - protein, 30 aa, Artificial Sequence
  GFR-binding peptide
SKVIMEYKFKIKPTKGILYLISIPELDQSV

SEQ ID NO: 1864 - protein, 30 aa, Artificial Sequence
  GFR-binding peptide
SKVVMEYKFKVKPTRGVLYLISIPELDQPV

SEQ ID NO: 1865 - protein, 32 aa, Artificial Sequence
  GFR-binding peptide
NHQLFEYKFKHQGQHPKIRLYLISIPEEETPV

SEQ ID NO: 1866 - protein, 32 aa, Artificial Sequence
  GFR-binding peptide
SHEELEYKFKHQGQHPKIRLYLISIPEQGTPV

SEQ ID NO: 1867 - protein, 32 aa, Artificial Sequence
  GFR-binding peptide
HEELREYKFKLKPKKRVYELYLISIPEHHVRS

SEQ ID NO: 1868 - protein, 32 aa, Artificial Sequence
  GFR-binding peptide
HDELTEYKFKFIPKKRVIELYLISIPELQVQT

SEQ ID NO: 1869 - protein, 30 aa, Artificial Sequence
  GFR-binding peptide
DVVMDPIKGYVVKENEDFYLMNIPSLETPT

SEQ ID NO: 1870 - protein, 30 aa, Artificial Sequence
  GFR-binding peptide
DVVMNPIKGYVVNKNEDFYLMNIPSMKTPT

SEQ ID NO: 1871 - protein, 30 aa, Artificial Sequence
  GFR-binding peptide
DVVMEPIKGYVVKDYEDFYLMNIPSLETPT

SEQ ID NO: 1872 - protein, 30 aa, Artificial Sequence
  GFR-binding peptide
DVVMNPIKGYIVNSSDDFYLMNIPSLKTPT

SEQ ID NO: 1873 - protein, 30 aa, Artificial Sequence
  GFR-binding peptide
DVVMNPIKGYIVNSSDDFYLMNIPSLQTPT

SEQ ID NO: 1874 - protein, 30 aa, Artificial Sequence
  GFR-binding peptide
DVVMNPIKGYIVNNSSDFYLMNIPSLKTPT

SEQ ID NO: 1875 - protein, 32 aa, Artificial Sequence
  GFR-binding peptide
DVVSMGEPIKGYTPVGMDDFYLMNIPSLKTPT

SEQ ID NO: 1876 - protein, 30 aa, Artificial Sequence
  GFR-binding peptide
DVVMGPIKGYYTVVGKDFYLMNIPSLKTPT

SEQ ID NO: 1877 - protein, 30 aa, Artificial Sequence
  GFR-binding peptide
DVVMDPIKGYVVNNAADFYLMNIPSLRTPT

SEQ ID NO: 1878 - protein, 30 aa, Artificial Sequence
  GFR-binding peptide
DVVMDPIKGYVVNNASDFYLMNIPSLRTPT

SEQ ID NO: 1879 - protein, 30 aa, Artificial Sequence
  GFR-binding peptide
DVVIMPIKGYLLVRGNDFYLMNIPSTKTPT

SEQ ID NO: 1880 - protein, 30 aa, Artificial Sequence
  GFR-binding peptide
DVVIMPIKGYVKPKRGVFYLMNIPSLATPT

SEQ ID NO: 1881 - protein, 30 aa, Artificial Sequence
  GFR-binding peptide
DVVIMPIKGYIKPTKGIFYLMNIPSLDTPT

SEQ ID NO: 1882 - protein, 30 aa, Artificial Sequence
  GFR-binding peptide
DVVVMPIKGYVKPTRGVFYLMNIPSLDTPT

SEQ ID NO: 1883 - protein, 30 aa, Artificial Sequence
  GFR-binding peptide
EVVMDPIKGYVVKENEDFYLMNIPSLETPV

SEQ ID NO: 1884 - protein, 30 aa, Artificial Sequence
  GFR-binding peptide
EVTMNPIKGYVVNKNEDFYLMNIPSMKEPV

SEQ ID NO: 1885 - protein, 30 aa, Artificial Sequence
  GFR-binding peptide
EVVMEPIKGYVVKDYEDFYLMNIPSLETPV

SEQ ID NO: 1886 - protein, 30 aa, Artificial Sequence
  GFR-binding peptide
RVVMNPIKGYIVNSSDDFYLMNIPSLKTPA

SEQ ID NO: 1887 - protein, 30 aa, Artificial Sequence
  GFR-binding peptide
RVVMNPIKGYIVNSSDDFYLMNIPSLQTPA

SEQ ID NO: 1888 - protein, 30 aa, Artificial Sequence
  GFR-binding peptide
KVVMNPIKGYIVNNSSDFYLMNIPSLKTPA

SEQ ID NO: 1889 - protein, 32 aa, Artificial Sequence
  GFR-binding peptide
EAVSMGEPIKGYTPVGMDDFYLMNIPSLKTPV

SEQ ID NO: 1890 - protein, 30 aa, Artificial Sequence
  GFR-binding peptide
SVAMGPIKGYYTVVGKDFYLMNIPSLKTPV

SEQ ID NO: 1891 - protein, 30 aa, Artificial Sequence
  GFR-binding peptide
EVVMDPIKGYVVNNAADFYLMNIPSLRAPV

SEQ ID NO: 1892 - protein, 30 aa, Artificial Sequence
  GFR-binding peptide
EVVMDPIKGYVVNNASDFYLMNIPSLRTPV

SEQ ID NO: 1893 - protein, 30 aa, Artificial Sequence
  GFR-binding peptide
EEVIMPIKGYLLVRGNDFYLMNIPSTKVPA

SEQ ID NO: 1894 - protein, 30 aa, Artificial Sequence
  GFR-binding peptide
SRVIMPIKGYVKPKRGVFYLMNIPSLAQPV

SEQ ID NO: 1895 - protein, 30 aa, Artificial Sequence
  GFR-binding peptide
SKVIMPIKGYIKPTKGIFYLMNIPSLDQSV

SEQ ID NO: 1896 - protein, 30 aa, Artificial Sequence
  GFR-binding peptide
SKVVMPIKGYVKPTRGVFYLMNIPSLDQPV

SEQ ID NO: 1897 - protein, 32 aa, Artificial Sequence
  GFR-binding peptide
NHQLFPIKGYHQGQHPKIRFYLMNIPSEETPV

SEQ ID NO: 1898 - protein, 32 aa, Artificial Sequence
  GFR-binding peptide
SHEELPIKGYHQGQHPKIRFYLMNIPSQGTPV

SEQ ID NO: 1899 - protein, 32 aa, Artificial Sequence
  GFR-binding peptide
HEELRPIKGYLKPKKRVYEFYLMNIPSHHVRS

SEQ ID NO: 1900 - protein, 32 aa, Artificial Sequence
  GFR-binding peptide
HDELTPIKGYFIPKKRVIEFYLMNIPSLQVQT

SEQ ID NO: 1901 - protein, 30 aa, Artificial Sequence
  GFR-binding peptide
EVVMDEYQKYVVKENEDIYLISIPSLEAPV

SEQ ID NO: 1902 - protein, 30 aa, Artificial Sequence
  GFR-binding peptide
EVVMNEYQKYVVNKNEDIYLISIPSMKAPV

SEQ ID NO: 1903 - protein, 30 aa, Artificial Sequence
  GFR-binding peptide
EVVMEEYQKYVVKDYEDIYLISIPSLEAPV

SEQ ID NO: 1904 - protein, 30 aa, Artificial Sequence
  GFR-binding peptide
EVVMNEYQKYIVNSSDDIYLISIPSLKAPV

SEQ ID NO: 1905 - protein, 30 aa, Artificial Sequence
  GFR-binding peptide
EVVMNEYQKYIVNSSDDIYLISIPSLQAPV

SEQ ID NO: 1906 - protein, 30 aa, Artificial Sequence
  GFR-binding peptide
EVVMNEYQKYIVNNSSDIYLISIPSLKAPV

SEQ ID NO: 1907 - protein, 32 aa, Artificial Sequence
  GFR-binding peptide
EVVSMGEEYQKYTPVGMDDIYLISIPSLKAPV

SEQ ID NO: 1908 - protein, 30 aa, Artificial Sequence
  GFR-binding peptide
EVVMGEYQKYYTVVGKDIYLISIPSLKAPV

SEQ ID NO: 1909 - protein, 30 aa, Artificial Sequence
  GFR-binding peptide
EVVMGEYQKYIIQQKDNIYLISIPSMKAPV

SEQ ID NO: 1910 - protein, 30 aa, Artificial Sequence
  GFR-binding peptide
EVVMDEYQKYVVNNASDIYLISIPSLRAPV

SEQ ID NO: 1911 - protein, 30 aa, Artificial Sequence
  GFR-binding peptide
EVVIMEYQKYLLVRGNDIYLISIPSTKAPV

SEQ ID NO: 1912 - protein, 30 aa, Artificial Sequence
  GFR-binding peptide
EVVIMEYQKYVKPKRGVIYLISIPSLAAPV

SEQ ID NO: 1913 - protein, 30 aa, Artificial Sequence
  GFR-binding peptide
EVVIMEYQKYIKPTKGIIYLISIPSLDAPV

SEQ ID NO: 1914 - protein, 30 aa, Artificial Sequence
  GFR-binding peptide
EVVVMEYQKYVKPTRGVIYLISIPSLDAPV

SEQ ID NO: 1915 - protein, 30 aa, Artificial Sequence
  GFR-binding peptide
EVVMDEYQKYVVKENEDIYLISIPSLETPV

SEQ ID NO: 1916 - protein, 30 aa, Artificial Sequence
  GFR-binding peptide
EVTMNEYQKYVVNKNEDIYLISIPSMKEPV

SEQ ID NO: 1917 - protein, 30 aa, Artificial Sequence
  GFR-binding peptide
EVVMEEYQKYVVKDYEDIYLISIPSLETPV

SEQ ID NO: 1918 - protein, 30 aa, Artificial Sequence
  GFR-binding peptide
RVVMNEYQKYIVNSSDDIYLISIPSLKTPA

SEQ ID NO: 1919 - protein, 30 aa, Artificial Sequence
  GFR-binding peptide
RVVMNEYQKYIVNSSDDIYLISIPSLQTPA

SEQ ID NO: 1920 - protein, 30 aa, Artificial Sequence
  GFR-binding peptide
KVVMNEYQKYIVNNSSDIYLISIPSLKTPA

SEQ ID NO: 1921 - protein, 30 aa, Artificial Sequence
  GFR-binding peptide
SVAMGEYQKYYTVVGKDIYLISIPSLKTPV

SEQ ID NO: 1922 - protein, 30 aa, Artificial Sequence
  GFR-binding peptide
DVVMGEYQKYIIQQKDNIYLISIPSMKTPT

SEQ ID NO: 1923 - protein, 30 aa, Artificial Sequence
  GFR-binding peptide
EVVMDEYQKYVVNNASDIYLISIPSLRTPV

SEQ ID NO: 1924 - protein, 30 aa, Artificial Sequence
  GFR-binding peptide
EEVIMEYQKYLLVRGNDIYLISIPSTKVPA

SEQ ID NO: 1925 - protein, 30 aa, Artificial Sequence
  GFR-binding peptide
SRVIMEYQKYVKPKRGVIYLISIPSLAQPV

SEQ ID NO: 1926 - protein, 30 aa, Artificial Sequence
  GFR-binding peptide
SKVIMEYQKYIKPTKGIIYLISIPSLDQSV

SEQ ID NO: 1927 - protein, 30 aa, Artificial Sequence
  GFR-binding peptide
SKVVMEYQKYVKPTRGVIYLISIPSLDQPV

SEQ ID NO: 1928 - protein, 32 aa, Artificial Sequence
  GFR-binding peptide
NHQLFEYQKYHQGQHPKIRIYLISIPSEETPV

SEQ ID NO: 1929 - protein, 32 aa, Artificial Sequence
  GFR-binding peptide
SHEELEYQKYHQGQHPKIRIYLISIPSQGTPV

SEQ ID NO: 1930 - protein, 32 aa, Artificial Sequence
  GFR-binding peptide
HEELREYQKYLKPKKRVYEIYLISIPSHHVRS

SEQ ID NO: 1931 - protein, 32 aa, Artificial Sequence
  GFR-binding peptide
HDELTEYQKYFIPKKRVIEIYLISIPSLQVQT

SEQ ID NO: 1932 - protein, 30 aa, Artificial Sequence
  GFR-binding peptide
EVVMDEYQKYVVKENEDIFLISIPSLETPV

SEQ ID NO: 1933 - protein, 30 aa, Artificial Sequence
  GFR-binding peptide
EVVMNEYQKYVVNKNEDIFLISIPSMKTPV

SEQ ID NO: 1934 - protein, 30 aa, Artificial Sequence
  GFR-binding peptide
EVVMEEYQKYVVKDYEDIFLISIPSLETPV

SEQ ID NO: 1935 - protein, 30 aa, Artificial Sequence
  GFR-binding peptide
EVVMNEYQKYIVNSSDDIFLISIPSLKTPV

SEQ ID NO: 1936 - protein, 30 aa, Artificial Sequence
  GFR-binding peptide
EVVMNEYQKYIVNSSDDIFLISIPSLQTPV

SEQ ID NO: 1937 - protein, 30 aa, Artificial Sequence
  GFR-binding peptide
EVVMNEYQKYIVNNSSDIFLISIPSLKTPV

SEQ ID NO: 1938 - protein, 32 aa, Artificial Sequence
  GFR-binding peptide
EVVSMGEEYQKYTPVGMDDIFLISIPSLKTPV

SEQ ID NO: 1939 - protein, 30 aa, Artificial Sequence
  GFR-binding peptide
EVVMGEYQKYYTVVGKDIFLISIPSLKTPV

SEQ ID NO: 1940 - protein, 30 aa, Artificial Sequence
  GFR-binding peptide
EVVMGEYQKYIIQQKDNIFLISIPSMKTPV

SEQ ID NO: 1941 - protein, 30 aa, Artificial Sequence
  GFR-binding peptide
EVVMDEYQKYVVNNAADIFLISIPSLRTPV

SEQ ID NO: 1942 - protein, 30 aa, Artificial Sequence
  GFR-binding peptide
EVVIMEYQKYLLVRGNDIFLISIPSTKTPV

SEQ ID NO: 1943 - protein, 30 aa, Artificial Sequence
  GFR-binding peptide
EVVIMEYQKYVKPKRGVIFLISIPSLATPV

SEQ ID NO: 1944 - protein, 30 aa, Artificial Sequence
  GFR-binding peptide
EVVIMEYQKYIKPTKGIIFLISIPSLDTPV

SEQ ID NO: 1945 - protein, 30 aa, Artificial Sequence
  GFR-binding peptide
EVVVMEYQKYVKPTRGVIFLISIPSLDTPV

SEQ ID NO: 1946 - protein, 30 aa, Artificial Sequence
  GFR-binding peptide
EVTMNEYQKYVVNKNEDIFLISIPSMKEPV

SEQ ID NO: 1947 - protein, 30 aa, Artificial Sequence
  GFR-binding peptide
RVVMNEYQKYIVNSSDDIFLISIPSLKTPA

SEQ ID NO: 1948 - protein, 30 aa, Artificial Sequence
  GFR-binding peptide
RVVMNEYQKYIVNSSDDIFLISIPSLQTPA

SEQ ID NO: 1949 - protein, 30 aa, Artificial Sequence
  GFR-binding peptide
KVVMNEYQKYIVNNSSDIFLISIPSLKTPA

SEQ ID NO: 1950 - protein, 32 aa, Artificial Sequence
  GFR-binding peptide
EAVSMGEEYQKYTPVGMDDIFLISIPSLKTPV

SEQ ID NO: 1951 - protein, 30 aa, Artificial Sequence
  GFR-binding peptide
SVAMGEYQKYYTVVGKDIFLISIPSLKTPV

SEQ ID NO: 1952 - protein, 30 aa, Artificial Sequence
  GFR-binding peptide
DVVMGEYQKYIIQQKDNIFLISIPSMKTPT

SEQ ID NO: 1953 - protein, 30 aa, Artificial Sequence
  GFR-binding peptide
EVVMDEYQKYVVNNAADIFLISIPSLRAPV

SEQ ID NO: 1954 - protein, 30 aa, Artificial Sequence
  GFR-binding peptide
EEVIMEYQKYLLVRGNDIFLISIPSTKVPA

SEQ ID NO: 1955 - protein, 30 aa, Artificial Sequence
  GFR-binding peptide
SRVIMEYQKYVKPKRGVIFLISIPSLAQPV

SEQ ID NO: 1956 - protein, 30 aa, Artificial Sequence
  GFR-binding peptide
SKVIMEYQKYIKPTKGIIFLISIPSLDQSV

SEQ ID NO: 1957 - protein, 30 aa, Artificial Sequence
  GFR-binding peptide
SKVVMEYQKYVKPTRGVIFLISIPSLDQPV

SEQ ID NO: 1958 - protein, 32 aa, Artificial Sequence
  GFR-binding peptide
NHQLFEYQKYHQGQHPKIRIFLISIPSEETPV

SEQ ID NO: 1959 - protein, 32 aa, Artificial Sequence
  GFR-binding peptide
SHEELEYQKYHQGQHPKIRIFLISIPSQGTPV

SEQ ID NO: 1960 - protein, 32 aa, Artificial Sequence
  GFR-binding peptide
HEELREYQKYLKPKKRVYEIFLISIPSHHVRS

SEQ ID NO: 1961 - protein, 32 aa, Artificial Sequence
  GFR-binding peptide
HDELTEYQKYFIPKKRVIEIFLISIPSLQVQT

SEQ ID NO: 1962 - protein, 30 aa, Artificial Sequence
  GFR-binding peptide
EEVMDDKHHDVVKENEDVYLMSLPKLEVPA

SEQ ID NO: 1963 - protein, 30 aa, Artificial Sequence
  GFR-binding peptide
EEVMNDKHHDVVNKNEDVYLMSLPKMKVPA

SEQ ID NO: 1964 - protein, 30 aa, Artificial Sequence
  GFR-binding peptide
EEVMEDKHHDVVKDYEDVYLMSLPKLEVPA

SEQ ID NO: 1965 - protein, 30 aa, Artificial Sequence
  GFR-binding peptide
EEVMNDKHHDIVNSSDDVYLMSLPKLKVPA

SEQ ID NO: 1966 - protein, 30 aa, Artificial Sequence
  GFR-binding peptide
EEVMNDKHHDIVNSSDDVYLMSLPKLQVPA

SEQ ID NO: 1967 - protein, 30 aa, Artificial Sequence
  GFR-binding peptide
EEVMNDKHHDIVNNSSDVYLMSLPKLKVPA

SEQ ID NO: 1968 - protein, 32 aa, Artificial Sequence
  GFR-binding peptide
EEVSMGEDKHHDTPVGMDDVYLMSLPKLKVPA

SEQ ID NO: 1969 - protein, 30 aa, Artificial Sequence
  GFR-binding peptide
EEVMGDKHHDYTVVGKDVYLMSLPKLKVPA

SEQ ID NO: 1970 - protein, 30 aa, Artificial Sequence
  GFR-binding peptide
EEVMGDKHHDIIQQKDNVYLMSLPKMKVPA

SEQ ID NO: 1971 - protein, 30 aa, Artificial Sequence
  GFR-binding peptide
EEVMDDKHHDVVNNAADVYLMSLPKLRVPA

SEQ ID NO: 1972 - protein, 30 aa, Artificial Sequence
  GFR-binding peptide
EEVMDDKHHDVVNNASDVYLMSLPKLRVPA

SEQ ID NO: 1973 - protein, 30 aa, Artificial Sequence
  GFR-binding peptide
EEVIMDKHHDVKPKRGVVYLMSLPKLAVPA

SEQ ID NO: 1974 - protein, 30 aa, Artificial Sequence
  GFR-binding peptide
EEVIMDKHHDIKPTKGIVYLMSLPKLDVPA

SEQ ID NO: 1975 - protein, 30 aa, Artificial Sequence
  GFR-binding peptide
EEVVMDKHHDVKPTRGVVYLMSLPKLDVPA

SEQ ID NO: 1976 - protein, 30 aa, Artificial Sequence
  GFR-binding peptide
EVVMDDKHHDVVKENEDVYLMSLPKLETPV

SEQ ID NO: 1977 - protein, 30 aa, Artificial Sequence
  GFR-binding peptide
EVTMNDKHHDVVNKNEDVYLMSLPKMKEPV

SEQ ID NO: 1978 - protein, 30 aa, Artificial Sequence
  GFR-binding peptide
EVVMEDKHHDVVKDYEDVYLMSLPKLETPV

SEQ ID NO: 1979 - protein, 30 aa, Artificial Sequence
  GFR-binding peptide
RVVMNDKHHDIVNSSDDVYLMSLPKLKTPA

SEQ ID NO: 1980 - protein, 30 aa, Artificial Sequence
  GFR-binding peptide
RVVMNDKHHDIVNSSDDVYLMSLPKLQTPA

SEQ ID NO: 1981 - protein, 30 aa, Artificial Sequence
  GFR-binding peptide
KVVMNDKHHDIVNNSSDVYLMSLPKLKTPA

SEQ ID NO: 1982 - protein, 32 aa, Artificial Sequence
  GFR-binding peptide
EAVSMGEDKHHDTPVGMDDVYLMSLPKLKTPV

SEQ ID NO: 1983 - protein, 30 aa, Artificial Sequence
  GFR-binding peptide
SVAMGDKHHDYTVVGKDVYLMSLPKLKTPV

SEQ ID NO: 1984 - protein, 30 aa, Artificial Sequence
  GFR-binding peptide
DVVMGDKHHDIIQQKDNVYLMSLPKMKTPT

SEQ ID NO: 1985 - protein, 30 aa, Artificial Sequence
  GFR-binding peptide
EVVMDDKHHDVVNNAADVYLMSLPKLRAPV

SEQ ID NO: 1986 - protein, 30 aa, Artificial Sequence
  GFR-binding peptide
EVVMDDKHHDVVNNASDVYLMSLPKLRTPV

SEQ ID NO: 1987 - protein, 30 aa, Artificial Sequence
  GFR-binding peptide
SRVIMDKHHDVKPKRGVVYLMSLPKLAQPV

SEQ ID NO: 1988 - protein, 30 aa, Artificial Sequence
  GFR-binding peptide
SKVIMDKHHDIKPTKGIVYLMSLPKLDQSV

SEQ ID NO: 1989 - protein, 30 aa, Artificial Sequence
  GFR-binding peptide
SKVVMDKHHDVKPTRGVVYLMSLPKLDQPV

SEQ ID NO: 1990 - protein, 32 aa, Artificial Sequence
  GFR-binding peptide
NHQLFDKHHDHQGQHPKIRVYLMSLPKEETPV

SEQ ID NO: 1991 - protein, 32 aa, Artificial Sequence
  GFR-binding peptide
SHEELDKHHDHQGQHPKIRVYLMSLPKQGTPV

SEQ ID NO: 1992 - protein, 32 aa, Artificial Sequence
  GFR-binding peptide
HEELRDKHHDLKPKKRVYEVYLMSLPKHHVRS

SEQ ID NO: 1993 - protein, 32 aa, Artificial Sequence
  GFR-binding peptide
HDELTDKHHDFIPKKRVIEVYLMSLPKLQVQT

SEQ ID NO: 1994 - protein, 30 aa, Artificial Sequence
  GFR-binding peptide
SRVMDNSLQEVVKENEDYYVIPLPELEQPV

SEQ ID NO: 1995 - protein, 30 aa, Artificial Sequence
  GFR-binding peptide
SRVMNNSLQEVVNKNEDYYVIPLPEMKQPV

SEQ ID NO: 1996 - protein, 30 aa, Artificial Sequence
  GFR-binding peptide
SRVMENSLQEVVKDYEDYYVIPLPELEQPV

SEQ ID NO: 1997 - protein, 30 aa, Artificial Sequence
  GFR-binding peptide
SRVMNNSLQEIVNSSDDYYVIPLPELKQPV

SEQ ID NO: 1998 - protein, 30 aa, Artificial Sequence
  GFR-binding peptide
SRVMNNSLQEIVNSSDDYYVIPLPELQQPV

SEQ ID NO: 1999 - protein, 30 aa, Artificial Sequence
  GFR-binding peptide
SRVMNNSLQEIVNNSSDYYVIPLPELKQPV

SEQ ID NO: 2000 - protein, 32 aa, Artificial Sequence
  GFR-binding peptide
SRVSMGENSLQETPVGMDDYYVIPLPELKQPV

SEQ ID NO: 2001 - protein, 30 aa, Artificial Sequence
  GFR-binding peptide
SRVMGNSLQEYTVVGKDYYVIPLPELKQPV

SEQ ID NO: 2002 - protein, 30 aa, Artificial Sequence
  GFR-binding peptide
SRVMGNSLQEIIQQKDNYYVIPLPEMKQPV

SEQ ID NO: 2003 - protein, 30 aa, Artificial Sequence
  GFR-binding peptide
SRVMDNSLQEVVNNAADYYVIPLPELRQPV

SEQ ID NO: 2004 - protein, 30 aa, Artificial Sequence
  GFR-binding peptide
SRVMDNSLQEVVNNASDYYVIPLPELRQPV

SEQ ID NO: 2005 - protein, 30 aa, Artificial Sequence
  GFR-binding peptide
SRVIMNSLQELLVRGNDYYVIPLPETKQPV

SEQ ID NO: 2006 - protein, 30 aa, Artificial Sequence
  GFR-binding peptide
SRVIMNSLQEIKPTKGIYYVIPLPELDQPV

SEQ ID NO: 2007 - protein, 30 aa, Artificial Sequence
  GFR-binding peptide
SRVVMNSLQEVKPTRGVYYVIPLPELDQPV

SEQ ID NO: 2008 - protein, 30 aa, Artificial Sequence
  GFR-binding peptide
EVVMDNSLQEVVKENEDYYVIPLPELETPV

SEQ ID NO: 2009 - protein, 30 aa, Artificial Sequence
  GFR-binding peptide
EVTMNNSLQEVVNKNEDYYVIPLPEMKEPV

SEQ ID NO: 2010 - protein, 30 aa, Artificial Sequence
  GFR-binding peptide
EVVMENSLQEVVKDYEDYYVIPLPELETPV

SEQ ID NO: 2011 - protein, 30 aa, Artificial Sequence
  GFR-binding peptide
RVVMNNSLQEIVNSSDDYYVIPLPELKTPA

SEQ ID NO: 2012 - protein, 30 aa, Artificial Sequence
  GFR-binding peptide
RVVMNNSLQEIVNSSDDYYVIPLPELQTPA

SEQ ID NO: 2013 - protein, 30 aa, Artificial Sequence
  GFR-binding peptide
KVVMNNSLQEIVNNSSDYYVIPLPELKTPA

SEQ ID NO: 2014 - protein, 32 aa, Artificial Sequence
  GFR-binding peptide
EAVSMGENSLQETPVGMDDYYVIPLPELKTPV

SEQ ID NO: 2015 - protein, 30 aa, Artificial Sequence
  GFR-binding peptide
SVAMGNSLQEYTVVGKDYYVIPLPELKTPV

SEQ ID NO: 2016 - protein, 30 aa, Artificial Sequence
  GFR-binding peptide
DVVMGNSLQEIIQQKDNYYVIPLPEMKTPT

SEQ ID NO: 2017 - protein, 30 aa, Artificial Sequence
  GFR-binding peptide
EVVMDNSLQEVVNNAADYYVIPLPELRAPV

SEQ ID NO: 2018 - protein, 30 aa, Artificial Sequence
  GFR-binding peptide
EVVMDNSLQEVVNNASDYYVIPLPELRTPV

SEQ ID NO: 2019 - protein, 30 aa, Artificial Sequence
  GFR-binding peptide
EEVIMNSLQELLVRGNDYYVIPLPETKVPA

SEQ ID NO: 2020 - protein, 30 aa, Artificial Sequence
  GFR-binding peptide
SKVIMNSLQEIKPTKGIYYVIPLPELDQSV

SEQ ID NO: 2021 - protein, 30 aa, Artificial Sequence
  GFR-binding peptide
SKVVMNSLQEVKPTRGVYYVIPLPELDQPV

SEQ ID NO: 2022 - protein, 32 aa, Artificial Sequence
  GFR-binding peptide
NHQLFNSLQEHQGQHPKIRYYVIPLPEEETPV

SEQ ID NO: 2023 - protein, 32 aa, Artificial Sequence
  GFR-binding peptide
SHEELNSLQEHQGQHPKIRYYVIPLPEQGTPV

SEQ ID NO: 2024 - protein, 32 aa, Artificial Sequence
  GFR-binding peptide
HEELRNSLQELKPKKRVYEYYVIPLPEHHVRS

SEQ ID NO: 2025 - protein, 32 aa, Artificial Sequence
  GFR-binding peptide
HDELTNSLQEFIPKKRVIEYYVIPLPELQVQT

SEQ ID NO: 2026 - protein, 30 aa, Artificial Sequence
  GFR-binding peptide
SKVMDNSLQEVVKENEDYYLITLPELEQSV

SEQ ID NO: 2027 - protein, 30 aa, Artificial Sequence
  GFR-binding peptide
SKVMNNSLQEVVNKNEDYYLITLPEMKQSV

SEQ ID NO: 2028 - protein, 30 aa, Artificial Sequence
  GFR-binding peptide
SKVMENSLQEVVKDYEDYYLITLPELEQSV

SEQ ID NO: 2029 - protein, 30 aa, Artificial Sequence
  GFR-binding peptide
SKVMNNSLQEIVNSSDDYYLITLPELKQSV

SEQ ID NO: 2030 - protein, 30 aa, Artificial Sequence
  GFR-binding peptide
SKVMNNSLQEIVNSSDDYYLITLPELQQSV

SEQ ID NO: 2031 - protein, 30 aa, Artificial Sequence
  GFR-binding peptide
SKVMNNSLQEIVNNSSDYYLITLPELKQSV

SEQ ID NO: 2032 - protein, 32 aa, Artificial Sequence
  GFR-binding peptide
SKVSMGENSLQETPVGMDDYYLITLPELKQSV

SEQ ID NO: 2033 - protein, 30 aa, Artificial Sequence
  GFR-binding peptide
SKVMGNSLQEYTVVGKDYYLITLPELKQSV

SEQ ID NO: 2034 - protein, 30 aa, Artificial Sequence
  GFR-binding peptide
SKVMGNSLQEIIQQKDNYYLITLPEMKQSV

SEQ ID NO: 2035 - protein, 30 aa, Artificial Sequence
  GFR-binding peptide
SKVMDNSLQEVVNNAADYYLITLPELRQSV

SEQ ID NO: 2036 - protein, 30 aa, Artificial Sequence
  GFR-binding peptide
SKVMDNSLQEVVNNASDYYLITLPELRQSV

SEQ ID NO: 2037 - protein, 30 aa, Artificial Sequence
  GFR-binding peptide
SKVIMNSLQELLVRGNDYYLITLPETKQSV

SEQ ID NO: 2038 - protein, 30 aa, Artificial Sequence
  GFR-binding peptide
SKVIMNSLQEVKPKRGVYYLITLPELAQSV

SEQ ID NO: 2039 - protein, 30 aa, Artificial Sequence
  GFR-binding peptide
SKVVMNSLQEVKPTRGVYYLITLPELDQSV

SEQ ID NO: 2040 - protein, 30 aa, Artificial Sequence
  GFR-binding peptide
EVVMDNSLQEVVKENEDYYLITLPELETPV

SEQ ID NO: 2041 - protein, 30 aa, Artificial Sequence
  GFR-binding peptide
EVTMNNSLQEVVNKNEDYYLITLPEMKEPV

SEQ ID NO: 2042 - protein, 30 aa, Artificial Sequence
  GFR-binding peptide
EVVMENSLQEVVKDYEDYYLITLPELETPV

SEQ ID NO: 2043 - protein, 30 aa, Artificial Sequence
  GFR-binding peptide
RVVMNNSLQEIVNSSDDYYLITLPELKTPA

SEQ ID NO: 2044 - protein, 30 aa, Artificial Sequence
  GFR-binding peptide
RVVMNNSLQEIVNSSDDYYLITLPELQTPA

SEQ ID NO: 2045 - protein, 30 aa, Artificial Sequence
  GFR-binding peptide
KVVMNNSLQEIVNNSSDYYLITLPELKTPA

SEQ ID NO: 2046 - protein, 32 aa, Artificial Sequence
  GFR-binding peptide
EAVSMGENSLQETPVGMDDYYLITLPELKTPV

SEQ ID NO: 2047 - protein, 30 aa, Artificial Sequence
  GFR-binding peptide
SVAMGNSLQEYTVVGKDYYLITLPELKTPV

SEQ ID NO: 2048 - protein, 30 aa, Artificial Sequence
  GFR-binding peptide
DVVMGNSLQEIIQQKDNYYLITLPEMKTPT

SEQ ID NO: 2049 - protein, 30 aa, Artificial Sequence
  GFR-binding peptide
EVVMDNSLQEVVNNAADYYLITLPELRAPV

SEQ ID NO: 2050 - protein, 30 aa, Artificial Sequence
  GFR-binding peptide
EVVMDNSLQEVVNNASDYYLITLPELRTPV

SEQ ID NO: 2051 - protein, 30 aa, Artificial Sequence
  GFR-binding peptide
EEVIMNSLQELLVRGNDYYLITLPETKVPA

SEQ ID NO: 2052 - protein, 30 aa, Artificial Sequence
  GFR-binding peptide
SRVIMNSLQEVKPKRGVYYLITLPELAQPV

SEQ ID NO: 2053 - protein, 32 aa, Artificial Sequence
  GFR-binding peptide
NHQLFNSLQEHQGQHPKIRYYLITLPEEETPV

SEQ ID NO: 2054 - protein, 32 aa, Artificial Sequence
  GFR-binding peptide
SHEELNSLQEHQGQHPKIRYYLITLPEQGTPV

SEQ ID NO: 2055 - protein, 32 aa, Artificial Sequence
  GFR-binding peptide
HEELRNSLQELKPKKRVYEYYLITLPEHHVRS

SEQ ID NO: 2056 - protein, 32 aa, Artificial Sequence
  GFR-binding peptide
HDELTNSLQEFIPKKRVIEYYLITLPELQVQT

SEQ ID NO: 2057 - protein, 30 aa, Artificial Sequence
  GFR-binding peptide
SKVMDNSLQEVVKENEDYYLITLPELEQPV

SEQ ID NO: 2058 - protein, 30 aa, Artificial Sequence
  GFR-binding peptide
SKVMNNSLQEVVNKNEDYYLITLPEMKQPV

SEQ ID NO: 2059 - protein, 30 aa, Artificial Sequence
  GFR-binding peptide
SKVMENSLQEVVKDYEDYYLITLPELEQPV

SEQ ID NO: 2060 - protein, 30 aa, Artificial Sequence
  GFR-binding peptide
SKVMNNSLQEIVNSSDDYYLITLPELKQPV

SEQ ID NO: 2061 - protein, 30 aa, Artificial Sequence
  GFR-binding peptide
SKVMNNSLQEIVNSSDDYYLITLPELQQPV

SEQ ID NO: 2062 - protein, 30 aa, Artificial Sequence
  GFR-binding peptide
SKVMNNSLQEIVNNSSDYYLITLPELKQPV

SEQ ID NO: 2063 - protein, 32 aa, Artificial Sequence
  GFR-binding peptide
SKVSMGENSLQETPVGMDDYYLITLPELKQPV

SEQ ID NO: 2064 - protein, 30 aa, Artificial Sequence
  GFR-binding peptide
SKVMGNSLQEYTVVGKDYYLITLPELKQPV

SEQ ID NO: 2065 - protein, 30 aa, Artificial Sequence
  GFR-binding peptide
SKVMGNSLQEIIQQKDNYYLITLPEMKQPV

SEQ ID NO: 2066 - protein, 30 aa, Artificial Sequence
  GFR-binding peptide
SKVMDNSLQEVVNNAADYYLITLPELRQPV

SEQ ID NO: 2067 - protein, 30 aa, Artificial Sequence
  GFR-binding peptide
SKVMDNSLQEVVNNASDYYLITLPELRQPV

SEQ ID NO: 2068 - protein, 30 aa, Artificial Sequence
  GFR-binding peptide
SKVIMNSLQELLVRGNDYYLITLPETKQPV

SEQ ID NO: 2069 - protein, 30 aa, Artificial Sequence
  GFR-binding peptide
SKVIMNSLQEVKPKRGVYYLITLPELAQPV

SEQ ID NO: 2070 - protein, 30 aa, Artificial Sequence
  GFR-binding peptide
SKVIMNSLQEIKPTKGIYYLITLPELDQPV

SEQ ID NO: 2071 - protein, 32 aa, Artificial Sequence
  GFR-binding peptide
NHQELSMEGIHQGQHPKIRMIQMTINSQGTPV

SEQ ID NO: 2072 - protein, 30 aa, Artificial Sequence
  GFR-binding peptide
EVVMDSMEGIVVKENEDMIQMTINSLETPV

SEQ ID NO: 2073 - protein, 30 aa, Artificial Sequence
  GFR-binding peptide
EVTMNSMEGIVVNKNEDMIQMTINSMKEPV

SEQ ID NO: 2074 - protein, 30 aa, Artificial Sequence
  GFR-binding peptide
EVVMESMEGIVVKDYEDMIQMTINSLETPV

SEQ ID NO: 2075 - protein, 30 aa, Artificial Sequence
  GFR-binding peptide
RVVMNSMEGIIVNSSDDMIQMTINSLKTPA

SEQ ID NO: 2076 - protein, 30 aa, Artificial Sequence
  GFR-binding peptide
RVVMNSMEGIIVNSSDDMIQMTINSLQTPA

SEQ ID NO: 2077 - protein, 30 aa, Artificial Sequence
  GFR-binding peptide
KVVMNSMEGIIVNNSSDMIQMTINSLKTPA

SEQ ID NO: 2078 - protein, 32 aa, Artificial Sequence
  GFR-binding peptide
EAVSMGESMEGITPVGMDDMIQMTINSLKTPV

SEQ ID NO: 2079 - protein, 30 aa, Artificial Sequence
  GFR-binding peptide
SVAMGSMEGIYTVVGKDMIQMTINSLKTPV

SEQ ID NO: 2080 - protein, 30 aa, Artificial Sequence
  GFR-binding peptide
DVVMGSMEGIIIQQKDNMIQMTINSMKTPT

SEQ ID NO: 2081 - protein, 30 aa, Artificial Sequence
  GFR-binding peptide
EVVMDSMEGIVVNNAADMIQMTINSLRAPV

SEQ ID NO: 2082 - protein, 30 aa, Artificial Sequence
  GFR-binding peptide
EVVMDSMEGIVVNNASDMIQMTINSLRTPV

SEQ ID NO: 2083 - protein, 30 aa, Artificial Sequence
  GFR-binding peptide
EEVIMSMEGILLVRGNDMIQMTINSTKVPA

SEQ ID NO: 2084 - protein, 30 aa, Artificial Sequence
  GFR-binding peptide
SRVIMSMEGIVKPKRGVMIQMTINSLAQPV

SEQ ID NO: 2085 - protein, 30 aa, Artificial Sequence
  GFR-binding peptide
SKVIMSMEGIIKPTKGIMIQMTINSLDQSV

SEQ ID NO: 2086 - protein, 30 aa, Artificial Sequence
  GFR-binding peptide
SKVVMSMEGIVKPTRGVMIQMTINSLDQPV

SEQ ID NO: 2087 - protein, 32 aa, Artificial Sequence
  GFR-binding peptide
SHEELSMEGIHQGQHPKIRMIQMTINSQGTPV

SEQ ID NO: 2088 - protein, 32 aa, Artificial Sequence
  GFR-binding peptide
HEELRSMEGILKPKKRVYEMIQMTINSHHVRS

SEQ ID NO: 2089 - protein, 32 aa, Artificial Sequence
  GFR-binding peptide
HDELTSMEGIFIPKKRVIEMIQMTINSLQVQT

SEQ ID NO: 2090 - protein, 32 aa, Artificial Sequence
  GFR-binding peptide
SHELFSMEGLHQGQHPKIRMIQMTINSEETPV

SEQ ID NO: 2091 - protein, 30 aa, Artificial Sequence
  GFR-binding peptide
EVVMDSMEGLVVKENEDMIQMTINSLETPV

SEQ ID NO: 2092 - protein, 30 aa, Artificial Sequence
  GFR-binding peptide
EVTMNSMEGLVVNKNEDMIQMTINSMKEPV

SEQ ID NO: 2093 - protein, 30 aa, Artificial Sequence
  GFR-binding peptide
EVVMESMEGLVVKDYEDMIQMTINSLETPV

SEQ ID NO: 2094 - protein, 30 aa, Artificial Sequence
  GFR-binding peptide
RVVMNSMEGLIVNSSDDMIQMTINSLKTPA

SEQ ID NO: 2095 - protein, 30 aa, Artificial Sequence
  GFR-binding peptide
RVVMNSMEGLIVNSSDDMIQMTINSLQTPA

SEQ ID NO: 2096 - protein, 30 aa, Artificial Sequence
  GFR-binding peptide
KVVMNSMEGLIVNNSSDMIQMTINSLKTPA

SEQ ID NO: 2097 - protein, 32 aa, Artificial Sequence
  GFR-binding peptide
EAVSMGESMEGLTPVGMDDMIQMTINSLKTPV

SEQ ID NO: 2098 - protein, 30 aa, Artificial Sequence
  GFR-binding peptide
SVAMGSMEGLYTVVGKDMIQMTINSLKTPV

SEQ ID NO: 2099 - protein, 30 aa, Artificial Sequence
  GFR-binding peptide
DVVMGSMEGLIIQQKDNMIQMTINSMKTPT

SEQ ID NO: 2100 - protein, 30 aa, Artificial Sequence
  GFR-binding peptide
EVVMDSMEGLVVNNAADMIQMTINSLRAPV

SEQ ID NO: 2101 - protein, 30 aa, Artificial Sequence
  GFR-binding peptide
EVVMDSMEGLVVNNASDMIQMTINSLRTPV

SEQ ID NO: 2102 - protein, 30 aa, Artificial Sequence
  GFR-binding peptide
EEVIMSMEGLLLVRGNDMIQMTINSTKVPA

SEQ ID NO: 2103 - protein, 30 aa, Artificial Sequence
  GFR-binding peptide
SRVIMSMEGLVKPKRGVMIQMTINSLAQPV

SEQ ID NO: 2104 - protein, 30 aa, Artificial Sequence
  GFR-binding peptide
SKVIMSMEGLIKPTKGIMIQMTINSLDQSV

SEQ ID NO: 2105 - protein, 30 aa, Artificial Sequence
  GFR-binding peptide
SKVVMSMEGLVKPTRGVMIQMTINSLDQPV

SEQ ID NO: 2106 - protein, 32 aa, Artificial Sequence
  GFR-binding peptide
NHQLFSMEGLHQGQHPKIRMIQMTINSEETPV

SEQ ID NO: 2107 - protein, 32 aa, Artificial Sequence
  GFR-binding peptide
HEELRSMEGLLKPKKRVYEMIQMTINSHHVRS

SEQ ID NO: 2108 - protein, 32 aa, Artificial Sequence
  GFR-binding peptide
HDELTSMEGLFIPKKRVIEMIQMTINSLQVQT

SEQ ID NO: 2109 - protein, 32 aa, Artificial Sequence
  GFR-binding peptide
HEELTVQVEKFIPKKRVIEVKAVKVSRLQVRS

SEQ ID NO: 2110 - protein, 30 aa, Artificial Sequence
  GFR-binding peptide
EVVMDVQVEKVVKENEDVKAVKVSRLETPV

SEQ ID NO: 2111 - protein, 30 aa, Artificial Sequence
  GFR-binding peptide
EVTMNVQVEKVVNKNEDVKAVKVSRMKEPV

SEQ ID NO: 2112 - protein, 30 aa, Artificial Sequence
  GFR-binding peptide
EVVMEVQVEKVVKDYEDVKAVKVSRLETPV

SEQ ID NO: 2113 - protein, 30 aa, Artificial Sequence
  GFR-binding peptide
RVVMNVQVEKIVNSSDDVKAVKVSRLKTPA

SEQ ID NO: 2114 - protein, 30 aa, Artificial Sequence
  GFR-binding peptide
RVVMNVQVEKIVNSSDDVKAVKVSRLQTPA

SEQ ID NO: 2115 - protein, 30 aa, Artificial Sequence
  GFR-binding peptide
KVVMNVQVEKIVNNSSDVKAVKVSRLKTPA

SEQ ID NO: 2116 - protein, 32 aa, Artificial Sequence
  GFR-binding peptide
EAVSMGEVQVEKTPVGMDDVKAVKVSRLKTPV

SEQ ID NO: 2117 - protein, 30 aa, Artificial Sequence
  GFR-binding peptide
SVAMGVQVEKYTVVGKDVKAVKVSRLKTPV

SEQ ID NO: 2118 - protein, 30 aa, Artificial Sequence
  GFR-binding peptide
DVVMGVQVEKIIQQKDNVKAVKVSRMKTPT

SEQ ID NO: 2119 - protein, 30 aa, Artificial Sequence
  GFR-binding peptide
EVVMDVQVEKVVNNAADVKAVKVSRLRAPV

SEQ ID NO: 2120 - protein, 30 aa, Artificial Sequence
  GFR-binding peptide
EVVMDVQVEKVVNNASDVKAVKVSRLRTPV

SEQ ID NO: 2121 - protein, 30 aa, Artificial Sequence
  GFR-binding peptide
EEVIMVQVEKLLVRGNDVKAVKVSRTKVPA

SEQ ID NO: 2122 - protein, 30 aa, Artificial Sequence
  GFR-binding peptide
SRVIMVQVEKVKPKRGVVKAVKVSRLAQPV

SEQ ID NO: 2123 - protein, 30 aa, Artificial Sequence
  GFR-binding peptide
SKVIMVQVEKIKPTKGIVKAVKVSRLDQSV

SEQ ID NO: 2124 - protein, 30 aa, Artificial Sequence
  GFR-binding peptide
SKVVMVQVEKVKPTRGVVKAVKVSRLDQPV

SEQ ID NO: 2125 - protein, 32 aa, Artificial Sequence
  GFR-binding peptide
NHQLFVQVEKHQGQHPKIRVKAVKVSREETPV

SEQ ID NO: 2126 - protein, 32 aa, Artificial Sequence
  GFR-binding peptide
SHEELVQVEKHQGQHPKIRVKAVKVSRQGTPV

SEQ ID NO: 2127 - protein, 32 aa, Artificial Sequence
  GFR-binding peptide
HDELTVQVEKFIPKKRVIEVKAVKVSRLQVQT

SEQ ID NO: 2128 - protein, 32 aa, Artificial Sequence
  GFR-binding peptide
HDELRVTAKKLKPKKRVYEIKRVQVPRHHVQT

SEQ ID NO: 2129 - protein, 30 aa, Artificial Sequence
  GFR-binding peptide
EVVMDVTAKKVVKENEDIKRVQVPRLETPV

SEQ ID NO: 2130 - protein, 30 aa, Artificial Sequence
  GFR-binding peptide
EVTMNVTAKKVVNKNEDIKRVQVPRMKEPV

SEQ ID NO: 2131 - protein, 30 aa, Artificial Sequence
  GFR-binding peptide
EVVMEVTAKKVVKDYEDIKRVQVPRLETPV

SEQ ID NO: 2132 - protein, 30 aa, Artificial Sequence
  GFR-binding peptide
RVVMNVTAKKIVNSSDDIKRVQVPRLKTPA

SEQ ID NO: 2133 - protein, 30 aa, Artificial Sequence
  GFR-binding peptide
RVVMNVTAKKIVNSSDDIKRVQVPRLQTPA

SEQ ID NO: 2134 - protein, 30 aa, Artificial Sequence
  GFR-binding peptide
KVVMNVTAKKIVNNSSDIKRVQVPRLKTPA

SEQ ID NO: 2135 - protein, 32 aa, Artificial Sequence
  GFR-binding peptide
EAVSMGEVTAKKTPVGMDDIKRVQVPRLKTPV

SEQ ID NO: 2136 - protein, 30 aa, Artificial Sequence
  GFR-binding peptide
SVAMGVTAKKYTVVGKDIKRVQVPRLKTPV

SEQ ID NO: 2137 - protein, 30 aa, Artificial Sequence
  GFR-binding peptide
DVVMGVTAKKIIQQKDNIKRVQVPRMKTPT

SEQ ID NO: 2138 - protein, 30 aa, Artificial Sequence
  GFR-binding peptide
EVVMDVTAKKVVNNAADIKRVQVPRLRAPV

SEQ ID NO: 2139 - protein, 30 aa, Artificial Sequence
  GFR-binding peptide
EVVMDVTAKKVVNNASDIKRVQVPRLRTPV

SEQ ID NO: 2140 - protein, 30 aa, Artificial Sequence
  GFR-binding peptide
EEVIMVTAKKLLVRGNDIKRVQVPRTKVPA

SEQ ID NO: 2141 - protein, 30 aa, Artificial Sequence
  GFR-binding peptide
SRVIMVTAKKVKPKRGVIKRVQVPRLAQPV

SEQ ID NO: 2142 - protein, 30 aa, Artificial Sequence
  GFR-binding peptide
SKVIMVTAKKIKPTKGIIKRVQVPRLDQSV

SEQ ID NO: 2143 - protein, 30 aa, Artificial Sequence
  GFR-binding peptide
SKVVMVTAKKVKPTRGVIKRVQVPRLDQPV

SEQ ID NO: 2144 - protein, 32 aa, Artificial Sequence
  GFR-binding peptide
NHQLFVTAKKHQGQHPKIRIKRVQVPREETPV

SEQ ID NO: 2145 - protein, 32 aa, Artificial Sequence
  GFR-binding peptide
SHEELVTAKKHQGQHPKIRIKRVQVPRQGTPV

SEQ ID NO: 2146 - protein, 32 aa, Artificial Sequence
  GFR-binding peptide
HEELRVTAKKLKPKKRVYEIKRVQVPRHHVRS

SEQ ID NO: 2147 - protein, 40 aa, Artificial Sequence
  GFR-binding peptide
IPKASSAPVGQRPVQMRKIDKGVVTYKKATVSSVEESGSL

SEQ ID NO: 2148 - protein, 38 aa, Artificial Sequence
  GFR-binding peptide
KASSVPQEERPVQMRKIGGGGGGGKKATVMIVRSSKSS

SEQ ID NO: 2149 - protein, 30 aa, Artificial Sequence
  GFR-binding peptide
VSQAARPVQTRKIDDMGVPTKKATVAAVKS

SEQ ID NO: 2150 - protein, 41 aa, Artificial Sequence
  GFR-binding peptide
PTSSAPTDLRSVKMAKVEIVRKKPIFKEVQVDMVVKASGSH

SEQ ID NO: 2151 - protein, 38 aa, Artificial Sequence
  GFR-binding peptide
PTSSVPTGGRSVKMAKVDKGVVTYKEVQVMVVAESKSS

SEQ ID NO: 2152 - protein, 40 aa, Artificial Sequence
  GFR-binding peptide
IPKASSVPQSSSNITMQIMGGGGGGGIGEMSSSVKSSGSL

SEQ ID NO: 2153 - protein, 41 aa, Artificial Sequence
  GFR-binding peptide
KASSSRVKMSNITVQIMRIKPHQGQHIGEMSVVEEHASGSH

SEQ ID NO: 2154 - protein, 32 aa, Artificial Sequence
  GFR-binding peptide
VPTAAEPLTMLYYEIVRKKPIFEQLSNMVEHS

SEQ ID NO: 2155 - protein, 38 aa, Artificial Sequence
  GFR-binding peptide
EPSSSRVRLEPLTTLYYGGGGGGGEQLSNVVEEHSKSS

SEQ ID NO: 2156 - protein, 34 aa, Artificial Sequence
  GFR-binding peptide
APVKMEPLPTVYYDDMGVPTEQLSNDMVEESGSL

SEQ ID NO: 2157 - protein, 40 aa, Artificial Sequence
  GFR-binding peptide
EPSSVSQAAEPLPIVYYRIKPHQGQHEQLSNMIVKSSKSS

SEQ ID NO: 2158 - protein, 10 aa, Artificial Sequence
  Previously reported sequence
VEQLSNMVVK

SEQ ID NO: 2159 - protein, 22 aa, Artificial Sequence
  Previously reported sequence
PIIYYVGRNVRVEQLSNMVVRA

SEQ ID NO: 2160 - protein, 23 aa, Artificial Sequence
  Previously reported sequence
PIIYYVGRNVRVEQLSNMVVRRA

SEQ ID NO: 2161 - protein, 29 aa, Artificial Sequence
  Previously reported sequence
DPLPIIYYVGRNVRVEQLSNMVVRACKCS

SEQ ID NO: 2162 - protein, 19 aa, Artificial Sequence
  Previously reported sequence
ENVNLKKYRNMIVKSCGCH

SEQ ID NO: 2163 - protein, 15 aa, Artificial Sequence
  Previously reported sequence
TPTYSRPVQKAELTR

SEQ ID NO: 2164 - protein, 29 aa, Artificial Sequence
  Previously reported sequence
HIRSTTSSYVSLKSNITNRTIQTPTYSYT

SEQ ID NO: 2165 - protein, 38 aa, Artificial Sequence
  Previously reported sequence
LMDLARMPSCLRGERAVPQDTTGYFTWSSNITPLNFIF

SEQ ID NO: 2166 - protein, 19 aa, Artificial Sequence
  Previously reported sequence
NEVLRFCGIQVPEGDEPLT

SEQ ID NO: 2167 - protein, 21 aa, Artificial Sequence
  Previously reported sequence
LNEVLRFCGIQVPEGDEPLTY

SEQ ID NO: 2168 - protein, 25 aa, Artificial Sequence
  Previously reported sequence
MSRVLFEPLTFLQTGSGLPDEKTLG

SEQ ID NO: 2169 - protein, 17 aa, Artificial Sequence
  Previously reported sequence
IKSPARHSAPTHQEPLP

SEQ ID NO: 2170 - protein, 21 aa, Artificial Sequence
  Previously reported sequence
NPGASASPCCVSQDLEPLPIL

SEQ ID NO: 2171 - protein, 26 aa, Artificial Sequence
  Previously reported sequence
SHQSAGDSIKSPARHSAPTHQEPLPD

SEQ ID NO: 2172 - protein, 16 aa, Artificial Sequence
  Previously reported sequence
PNYSVPAGNKPLSERE

SEQ ID NO: 2173 - protein, 23 aa, Artificial Sequence
  Previously reported sequence
TKPLSSLLFPNWNTTTTPTPPRP

SEQ ID NO: 2174 - protein, 23 aa, Artificial Sequence
  Previously reported sequence
CVTKPLSSLLFPNWNTTTTPTPP

SEQ ID NO: 2175 - protein, 21 aa, Artificial Sequence
  Previously reported sequence
VGAAWWLREQGSPINTLAVPA

SEQ ID NO: 2176 - protein, 38 aa, Artificial Sequence
  Previously reported sequence
MQCRELVTQVTEEPISQTEDGEEQESTTTPRLKGQKKE

SEQ ID NO: 2177 - protein, 36 aa, Artificial Sequence
  Previously reported sequence
VPTKLEPISVLYKDDMGVPTLKYHYEGMAVSECGCR

SEQ ID NO: 2178 - protein, 36 aa, Artificial Sequence
  Previously reported sequence
SPISILVVPELDASLPEKRPSLDGFEALLVYNAPKA

SEQ ID NO: 2179 - protein, 37 aa, Artificial Sequence
  Previously reported sequence
TLXPIVSSXNPSPISFRXIKILLHDLEVVPFPKSRVR

SEQ ID NO: 2180 - protein, 35 aa, Artificial Sequence
  Previously reported sequence
VPTKLSPISILYLDKGVVTYKFKYEGMSVAECGCR

SEQ ID NO: 2181 - protein, 36 aa, Artificial Sequence
  Previously reported sequence
VPTKLSPISILYKDDMGVPTYKFKYEGMSVAECGCR

SEQ ID NO: 2182 - protein, 31 aa, Artificial Sequence
  Previously reported sequence
VPTELSPISLLYLDEFEKVTLKNYQDMVVDG

SEQ ID NO: 2183 - protein, 10 aa, Artificial Sequence
  Previously reported sequence
TPTVVSATSL

SEQ ID NO: 2184 - protein, 17 aa, Artificial Sequence
  Previously reported sequence
SATSRLALSDVPAELAA

SEQ ID NO: 2185 - protein, 23 aa, Artificial Sequence
  Previously reported sequence
LGIAAIIFLQQVPAAFSATSPPG

SEQ ID NO: 2186 - protein, 33 aa, Artificial Sequence
  Previously reported sequence
SVPAVCSATSATGPYSSVTVTSWPSIVATGGTT

SEQ ID NO: 2187 - protein, 33 aa, Artificial Sequence
  Previously reported sequence
SVPAVCSATSATGPYSTATNTVWPSIVATGGTT

SEQ ID NO: 2188 - protein, 33 aa, Artificial Sequence
  Previously reported sequence
SSVPAVCSATSATGPYSSGSVEVTFDVYATTVY

SEQ ID NO: 2189 - protein, 33 aa, Artificial Sequence
  Previously reported sequence
SSVPAVCSATSATGPYSTATNTVWFDVYATTVY

SEQ ID NO: 2190 - protein, 49 aa, Artificial Sequence
  Previously reported sequence
VHLLKPHAVPKACCAPTKLSATSVLYYDSSNNVILRKHRNMVVRACGCH

SEQ ID NO: 2191 - protein, 23 aa, Artificial Sequence
  Previously reported sequence
ANINKDRDNVPAATSSLSKAYNP

SEQ ID NO: 2192 - protein, 29 aa, Artificial Sequence
  Previously reported sequence
SFRTARANAPTGRSSLSGEKEQQEASTHS

SEQ ID NO: 2193 - protein, 48 aa, Artificial Sequence
  Previously reported sequence
DKPEESSSTPTHAQCICSSLSEAIVSSVLSTRLVLSQISLTRAKRAFE

SEQ ID NO: 2194 - protein, 50 aa, Artificial Sequence
  Previously reported sequence
KGSEYEKLVVSGITQVYQSSLSWHGCKSCCEVQVXNLXILIRLYDVHYYN

SEQ ID NO: 2195 - protein, 50 aa, Artificial Sequence
  Previously reported sequence
MALPQPRGSSLSKAPVVVAPCMALKRVNIRSIVFEVLKTMNQNCIHETPN

SEQ ID NO: 2196 - protein, 36 aa, Artificial Sequence
  Previously reported sequence
MAAQDEWRDAITLTMGRDLKKVPQHLNAISVIDPVT

SEQ ID NO: 2197 - protein, 42 aa, Artificial Sequence
  Previously reported sequence
LSLLAPPEPVWNHETSYGSDCHVPTNVNAISKMIDKSNHQTG

SEQ ID NO: 2198 - protein, 31 aa, Artificial Sequence
  Previously reported sequence
APTKLNAISVLYFDDSSNVILKKYRNMIVKS

SEQ ID NO: 2199 - protein, 11 aa, Artificial Sequence
  Previously reported sequence
APTQLSAISVL

SEQ ID NO: 2200 - protein, 18 aa, Artificial Sequence
  Previously reported sequence
FDSRVLKSAISFKENIIF

SEQ ID NO: 2201 - protein, 18 aa, Artificial Sequence
  Previously reported sequence
KIPKPSSAPTELSAISMC

SEQ ID NO: 2202 - protein, 18 aa, Artificial Sequence
  Previously reported sequence
CPKPSSAPTELSAISMLL

SEQ ID NO: 2203 - protein, 18 aa, Artificial Sequence
  Previously reported sequence
TCCVPELSAISMLYLDEN

SEQ ID NO: 2204 - protein, 19 aa, Artificial Sequence
  Previously reported sequence
KIPKPSSAPTELSAISMLC

SEQ ID NO: 2205 - protein, 20 aa, Artificial Sequence
  Previously reported sequence
KIPKPSSAPTELSAISMLYC

SEQ ID NO: 2206 - protein, 20 aa, Artificial Sequence
  Previously reported sequence
CIPKPSSAPTELSAISMLYL

SEQ ID NO: 2207 - protein, 21 aa, Artificial Sequence
  Previously reported sequence
CKIPKPSSAPTELSAISMLYL

SEQ ID NO: 2208 - protein, 22 aa, Artificial Sequence
  Previously reported sequence
AETLHTLGLSAPVIESAISDAI

SEQ ID NO: 2209 - protein, 33 aa, Artificial Sequence
  Previously reported sequence
MRTESTPTTASAISYECLWSPPSNEAAKLHFDS

SEQ ID NO: 2210 - protein, 47 aa, Artificial Sequence
  Previously reported sequence
SRVLPIVVQGYVPVQDTKFLGIYYVIGPIIARVILSSSSAISSLNKS

SEQ ID NO: 2211 - protein, 37 aa, Artificial Sequence
  Previously reported sequence
CCAPTELSAISVLYFDDSSNVILKKYRNMVVRACGCR

SEQ ID NO: 2212 - protein, 37 aa, Artificial Sequence
  Previously reported sequence
CCAPTQLSAISVLYFDDSSNVILKKYRNMVVRACGCR

SEQ ID NO: 2213 - protein, 39 aa, Artificial Sequence
  Previously reported sequence
KPCCAPTQLSAISVLYFDDSSNVILKKYRNMVVRACGCR

SEQ ID NO: 2214 - protein, 39 aa, Artificial Sequence
  Previously reported sequence
KPCCAPTELSAISVLYFDDSSNVILKKYRNMVVRACGCR

SEQ ID NO: 2215 - protein, 30 aa, Artificial Sequence
  Previously reported sequence
VPQTLDPLPIIYYVGRNVRVEQLSNMVVRA

SEQ ID NO: 2216 - protein, 34 aa, Artificial Sequence
  Previously reported sequence
VPQTLDPLPIIYYVGRNVRVEQLSNMVVRACKCS

SEQ ID NO: 2217 - protein, 36 aa, Artificial Sequence
  Previously reported sequence
CCVPQTLDPLPIIYYVGRNVRVEQLSNMVVRACKCS

SEQ ID NO: 2218 - protein, 31 aa, Artificial Sequence
  Previously reported sequence
APTRLGALPVLYHLNDENVNLKKYRNMIVKS

SEQ ID NO: 2219 - protein, 35 aa, Artificial Sequence
  Previously reported sequence
APTRLGALPVLYHLNDENVNLKKYRNMIVKSCGCH

SEQ ID NO: 2220 - protein, 37 aa, Artificial Sequence
  Previously reported sequence
CCAPTRLGALPVLYHLNDENVNLKKYRNMIVKSCGCH

SEQ ID NO: 2221 - protein, 31 aa, Artificial Sequence
  Previously reported sequence
VPTTLDAISMLFMNEHSKVVLKNYQDMVVDG

SEQ ID NO: 2222 - protein, 31 aa, Artificial Sequence
  Previously reported sequence
VPTTLEAISMLFMNEHSKVVLKNYQDMVVDG

SEQ ID NO: 2223 - protein, 34 aa, Artificial Sequence
  Previously reported sequence
MAFKDTGKAPVEPEVAIHRIRITLTSRSVKSLEK

SEQ ID NO: 2224 - protein, 18 aa, Artificial Sequence
  Previously reported sequence
LSTQVSQKPLSDKNQNLK

SEQ ID NO: 2225 - protein, 48 aa, Artificial Sequence
  Previously reported sequence
EYAKAWFKLLHRDMGPVQRYLGPLVPTQTWLWQDIVPAGKPLSDADVA

SEQ ID NO: 2226 - protein, 31 aa, Artificial Sequence
  Previously reported sequence
APTELSPISVLYFDQDNNVVLKKYNKMVVKA

SEQ ID NO: 2227 - protein, 31 aa, Artificial Sequence
  Previously reported sequence
APTKLSPISMLYYDNNDNVVLRHYEDMVVDE

SEQ ID NO: 2228 - protein, 31 aa, Artificial Sequence
  Previously reported sequence
VPERLSPISVLFFDNSDNVVLRHYEDMVVDE

SEQ ID NO: 2229 - protein, 35 aa, Artificial Sequence
  Previously reported sequence
VPERLSPISVLFFDNEDNVVLRHYEDMVVDECGCR

SEQ ID NO: 2230 - protein, 37 aa, Artificial Sequence
  Previously reported sequence
CCVPERLSPISVLFFDNEDNVVLRHYEDMVVDECGCR

SEQ ID NO: 2231 - protein, 31 aa, Artificial Sequence
  Previously reported sequence
VPTELSSLSLLYTDEHGTVVLKVYQDMVVEG

SEQ ID NO: 2232 - protein, 31 aa, Artificial Sequence
  Previously reported sequence
VPTELSSLSLLYTDEHGAVVLKVYQDMVVEG

SEQ ID NO: 2233 - protein, 37 aa, Artificial Sequence
  Previously reported sequence
CCVPTELNAISVLYFDDSSNVILKKYEDMVVEACGCR

SEQ ID NO: 2234 - protein, 39 aa, Artificial Sequence
  Previously reported sequence
NSCCVPTELNAISVLYFDDSSNVILKKYEDMVVEACGCR

SEQ ID NO: 2235 - protein, 31 aa, Artificial Sequence
  Previously reported sequence
APTALSAISMLYFDESGNVVLRQYEDMVVEG

SEQ ID NO: 2236 - protein, 31 aa, Artificial Sequence
  Previously reported sequence
APTKLSAISMLYFDNDENVVLRQYEDMVVEA

SEQ ID NO: 2237 - protein, 37 aa, Artificial Sequence
  Previously reported sequence
CCAPTQLSAISVLYFDDSSNVILKKYEDMVVEACGCR

SEQ ID NO: 2238 - protein, 37 aa, Artificial Sequence
  Previously reported sequence
CCAPTELSAISVLYFDDSSNVILKKYEDMVVEACGCR

SEQ ID NO: 2239 - protein, 39 aa, Artificial Sequence
  Previously reported sequence
KPCCAPTQLSAISVLYFDDSSNVILKKYEDMVVEACGCR

SEQ ID NO: 2240 - protein, 39 aa, Artificial Sequence
  Previously reported sequence
KPCCAPTELSAISVLYFDDSSNVILKKYEDMVVEACGCR

SEQ ID NO: 2241 - protein, 33 aa, Artificial Sequence
  Previously reported sequence
VPTEEFNVTMQIMRIKPHQGQHIGEMSFLQHNK

SEQ ID NO: 2242 - protein, 30 aa, Artificial Sequence
  GFR-binding peptide
VPTAASAISILYLDAANNVVLKNYQAAVVE

SEQ ID NO: 2243 - protein, 32 aa, Artificial Sequence
  GFR-binding peptide
VPEAASSLSMLFFEIVRKKPIFLKVYPAATVE

SEQ ID NO: 2244 - protein, 32 aa, Artificial Sequence
  GFR-binding peptide
VPTVVSAISTLYLRIKPHQGQHLKNYQVVVVE

SEQ ID NO: 2245 - protein, 30 aa, Artificial Sequence
  GFR-binding peptide
APTLLNAISMLYFNDKQQIILKKYRLLVVR

SEQ ID NO: 2246 - protein, 30 aa, Artificial Sequence
  GFR-binding peptide
APTGGSATSMLYYDKGVVTYLRKHRGGVVK

SEQ ID NO: 2247 - protein, 30 aa, Artificial Sequence
  GFR-binding peptide
VPTSSSPISTLYIDKGVVTYLKYHYSSVAE

SEQ ID NO: 2248 - protein, 30 aa, Artificial Sequence
  GFR-binding peptide
VPTAAEPISMLYLDEYDKVVKFKYEAAAVS

SEQ ID NO: 2249 - protein, 30 aa, Artificial Sequence
  GFR-binding peptide
TPTSSSPINTLYFDDMGVPTYGKIPSSVVD

SEQ ID NO: 2250 - protein, 30 aa, Artificial Sequence
  GFR-binding peptide
VPTVVSPISMLYIDDMGVPTYKQYEVVVVE

SEQ ID NO: 2251 - protein, 30 aa, Artificial Sequence
  GFR-binding peptide
APVAAKPLSMLYVDKGVVTYDHHKDAAVEE

SEQ ID NO: 2252 - protein, 30 aa, Artificial Sequence
  GFR-binding peptide
VPQAAEPLPMLYYDKGVVTYEQLSNAAVRS

SEQ ID NO: 2253 - protein, 30 aa, Artificial Sequence
  GFR-binding peptide
VPQQQEPLTTLYYDEYDKVVEQLSNQQVKS

SEQ ID NO: 2254 - protein, 32 aa, Artificial Sequence
  GFR-binding peptide
VPTMMSNITTQIMRIKPHQGQHIGEMSMMQHN

SEQ ID NO: 2255 - protein, 30 aa, Artificial Sequence
  GFR-binding peptide
SRVAARSVKMAKVGGGGGGGKEVQVAAEEH

SEQ ID NO: 2256 - protein, 30 aa, Artificial Sequence
  GFR-binding peptide
VPTDDSATSTLYYDKGVVTYLRKHRDDEHS

SEQ ID NO: 2257 - protein, 30 aa, Artificial Sequence
  GFR-binding peptide
VPTGGEPLTTLYYNDKQQIIEQLSNGGEHS

SEQ ID NO: 2258 - protein, 30 aa, Artificial Sequence
  GFR-binding peptide
SRVLLRPVQMRKIDKGVVTYKKATVLLEEH

SEQ ID NO: 2259 - protein, 30 aa, Artificial Sequence
  GFR-binding peptide
TQVAARPVQTRKIDDMGVPTKKATVAAEDH

SEQ ID NO: 2260 - protein, 30 aa, Artificial Sequence; identical to SEQ ID NO: 993
  GFR-binding peptide

SEQ ID NO: 2261 - protein, 44 aa, Artificial Sequence
  GFR-binding peptide
NDEGLESVPTGQSPISILYIRIKPHQGQHYKQYELEEHSQSESR

SEQ ID NO: 2262 - protein, 42 aa, Artificial Sequence
  GFR-binding peptide
HVTKPTSVPTKLSPISILFIDDSSNVIYKQYENMVVESSGSH

SEQ ID NO: 2263 - protein, 41 aa, Artificial Sequence
  GFR-binding peptide
ASASPSSAPVDLKPLSMLYVIGKTPKIDHHKDMIVEESKSS

SEQ ID NO: 2264 - protein, 42 aa, Artificial Sequence
  GFR-binding peptide
KIPKASSVPQELEPLPIVYYDENEKVVEQLSNDMVRSGSGSR

SEQ ID NO: 2265 - protein, 42 aa, Artificial Sequence
  GFR-binding peptide
AVPKASSVPQKLEPLTILYYDSSNNVIEQLSNNMVKSASGSH

SEQ ID NO: 2266 - protein, 41 aa, Artificial Sequence
  GFR-binding peptide
RVPSTSSAPVKTSNITMQIMDNGRVLLLGEMSMIVEESGSL

SEQ ID NO: 2267 - protein, 41 aa, Artificial Sequence
  GFR-binding peptide
ASASPSSVSQDLRSVKVAKVIGKTPKIKEVQVMIVKSSKSS

SEQ ID NO: 2268 - protein, 42 aa, Artificial Sequence
  GFR-binding peptide
GIPEPSSVPTKMSAISTLYLDENKNVVLKNYQNMVVESSASR

SEQ ID NO: 2269 - protein, 38 aa, Artificial Sequence
  GFR-binding peptide
  MOD_RES (32)..(33): Xaa is C or S
GEVVMDRYKKLVVKENEDFYLMSIANLETPVXXAKPIK

SEQ ID NO: 2270 - protein, 43 aa, Artificial Sequence
  GFR-binding peptide
  MOD_RES (2)..(4)..(38)..(39): Xaa is C or S
  MOD_RES (16)..(17)..(18)..(19)..(20): Xaa is A or G
  MOD_RES (21)..(22)..(23)..(24): Xaa is A or G or is absent
RXGXGEVVMEQYNKLXXXXXXXXXLYLMSIASLETPVXXAKPI

SEQ ID NO: 2271 - protein, 35 aa, Artificial Sequence
  GFR-binding peptide
  MOD_RES (2)..(4): Xaa is C or S
HXGXARVVMNQYNKLIVNSSDDLYLVSIASLQTPA

SEQ ID NO: 2272 - protein, 34 aa, Artificial Sequence
  GFR-binding peptide
  MOD_RES (13)..(14)..(15)..(16)..(17): Xaa is A or G
  MOD_RES (18)..(19)..(20)..(21): Xaa is A or G or is absent
EAVSMGERYKKLXXXXXXXXXFYLVSIANLKTPV

SEQ ID NO: 2273 - protein, 38 aa, Artificial Sequence
  GFR-binding peptide
  MOD_RES (1)..(38): Xaa is C or S
  MOD_RES (14)..(15)..(16)..(17)..(18): Xaa is A or G
  MOD_RES (19)..(20)..(21)..(22): Xaa is A or G or is absent
XALHDELTRHKRLXXXXXXXXXYYLVSTASLQVQTPRX

SEQ ID NO: 2274 - protein, 42 aa, Artificial Sequence
  GFR-binding peptide
  MOD_RES (1)..(3)..(38)..(39): Xaa is C or S
  MOD_RES (16)..(17)..(18)..(19)..(20): Xaa is A or G
  MOD_RES (21)..(22)..(23)..(24): Xaa is A or G or is absent
XGXEAVSMGERYKKLXXXXXXXXXFYLVSIANLKTPVXXAKG

SEQ ID NO: 2275 - protein, 40 aa, Artificial Sequence
  GFR-binding peptide
  MOD_RES (1)..(3)..(36)..(37): Xaa is C or S
  MOD_RES (14)..(15)..(16)..(17)..(18): Xaa is A or G
  MOD_RES (19)..(20)..(21)..(22): Xaa is A or G or is absent
XKXSRVIMQYNKLXXXXXXXXXLYLISIASLAQPVXXPAA

SEQ ID NO: 2276 - protein, 38 aa, Artificial Sequence
  GFR-binding peptide
  MOD_RES (32)..(32): Xaa is C or S
SRVVMNRHKRLIVNSSDDYYLVSTASLKTPAXTPKTVH

SEQ ID NO: 2277 - protein, 33 aa, Artificial Sequence
  GFR-binding peptide
  MOD_RES (2)..(2): Xaa is C or S
GXGEVVMDRYKKLVVKENEDFYLMSIANLETPV

SEQ ID NO: 2278 - protein, 38 aa, Artificial Sequence
  GFR-binding peptide
  MOD_RES (1)..(3)..(36)..(37): Xaa is C or S
  MOD_RES (14)..(15)..(16)..(17)..(18): Xaa is A or G
  MOD_RES (19)..(20)..(21)..(22): Xaa is A or G or is absent
XKXSKVIMYHYKLXXXXXXXXXKYLISIPSLDQSVXXP

SEQ ID NO: 2279 - protein, 38 aa, Artificial Sequence
  GFR-binding peptide
  MOD_RES (1)..(3)..(37)..(38): Xaa is C or S
  MOD_RES (15)..(16)..(17)..(18)..(19): Xaa is A or G
  MOD_RES (20)..(21)..(22)..(23): Xaa is A or G or is absent
XGXSRVVMNQYNKLXXXXXXXXXLYLVSIASLKTPAXX

SEQ ID NO: 2280 - protein, 36 aa, Artificial Sequence
  GFR-binding peptide
  MOD_RES (1)..(33)..(34): Xaa is C or S
XSRVVMNYHYKLIVNSSDDKYLVSIPSLKTPAXXPK

SEQ ID NO: 2281 - protein, 39 aa, Artificial Sequence
  GFR-binding peptide
  MOD_RES (2)..(4)..(36)..(37): Xaa is C or S
HXGXAKVVMNRHKRLIVNNSSDYYLVSTASLKTPAXXAK

SEQ ID NO: 2282 - protein, 32 aa, Artificial Sequence
  GFR-binding peptide
  MOD_RES (1)..(32): Xaa is C or S
XSKVVMYHYKLVKPTRGVKYLISIPSLDQPVX

SEQ ID NO: 2283 - protein, 37 aa, Artificial Sequence
  GFR-binding peptide
  MOD_RES (33)..(34): Xaa is C or S
  MOD_RES (11)..(12)..(13)..(14)..(15): Xaa is A or G
  MOD_RES (16)..(17)..(18)..(19): Xaa is A or G or is absent
RVVMNRHKRLXXXXXXXXXYYLVSTASLKTPAXXPKP

SEQ ID NO: 2284 - protein, 38 aa, Artificial Sequence
  GFR-binding peptide
  MOD_RES (1)..(3)..(34)..(35): Xaa is C or S
XKXSRVIMQYNKLVKPKRGVLYLISIASLAQPVXXPAA

SEQ ID NO: 2285 - protein, 35 aa, Artificial Sequence
  GFR-binding peptide
  MOD_RES (1)..(35): Xaa is C or S
  MOD_RES (13)..(14)..(15)..(16)..(17): Xaa is A or G
  MOD_RES (18)..(19)..(20)..(21): Xaa is A or G or is absent
XSRVVMNRHKRLXXXXXXXXXYYLVSTASLKTPAX

SEQ ID NO: 2286 - protein, 39 aa, Artificial Sequence
  GFR-binding peptide
  MOD_RES (1)..(34)..(35): Xaa is C or S
  MOD_RES (12)..(13)..(14)..(15)..(16): Xaa is A or G
  MOD_RES (17)..(18)..(19)..(20): Xaa is A or G or is absent
XSRVIMRHKRLXXXXXXXXXYYLISTASLAQPVXXPAAS

SEQ ID NO: 2287 - protein, 38 aa, Artificial Sequence
  GFR-binding peptide
  MOD_RES (32)..(33): Xaa is C or S
SRVVMNRHKRLIVNSSDDYYLVSTASLKTPAXXPKPVY

SEQ ID NO: 2288 - protein, 35 aa, Artificial Sequence
  GFR-binding peptide
  MOD_RES (31)..(32): Xaa is C or S
SKVIMRYKKLIKPTKGIFYLISIANLDQSVXXPSA

SEQ ID NO: 2289 - protein, 42 aa, Artificial Sequence
  GFR-binding peptide
  MOD_RES (1)..(3)..(37)..(38): Xaa is C or S
  MOD_RES (15)..(16)..(17)..(18)..(19): Xaa is A or G
  MOD_RES (20)..(21)..(22)..(23): Xaa is A or G or is absent
XGXGEVVMEYHYKLXXXXXXXXXKYLMSIPSLETPVXXAKPI

SEQ ID NO: 2290 - protein, 39 aa, Artificial Sequence
  GFR-binding peptide
  MOD_RES (2)..(36)..(37): Xaa is C or S
  MOD_RES (14)..(15)..(16)..(17)..(18): Xaa is A or G
  MOD_RES (19)..(20)..(21)..(22): Xaa is A or G or is absent
GXARVVMNRHKRLXXXXXXXXXYYLVSTASLQTPAXXPK

SEQ ID NO: 2291 - protein, 35 aa, Artificial Sequence
  GFR-binding peptide
  MOD_RES (13)..(14)..(15)..(16)..(17): Xaa is A or G
  MOD_RES (18)..(19)..(20)..(21): Xaa is A or G or is absent
ALHDELTRHKRLXXXXXXXXXYYLVSTASLQVQTP

SEQ ID NO: 2292 - protein, 30 aa, Artificial Sequence
  GFR-binding peptide
EVVMEQYNKLVVKDYEDLYLMSIASLETPV

SEQ ID NO: 2293 - protein, 42 aa, Artificial Sequence
  GFR-binding peptide
  MOD_RES (2)..(4)..(36)..(37): Xaa is C or S
HXGXSRVVMNRYKKLIVNSSDDFYLVSIANLKTPAXXPKPVY

SEQ ID NO: 2294 - protein, 38 aa, Artificial Sequence
  GFR-binding peptide
  MOD_RES (2)..(4)..(37)..(38): Xaa is C or S
  MOD_RES (15)..(16)..(17)..(18)..(19): Xaa is A or G
  MOD_RES (20)..(21)..(22)..(23): Xaa is A or G or is absent
SXKXSKVVMYHYKLXXXXXXXXXKYLISIPSLDQPVXX

SEQ ID NO: 2295 - protein, 39 aa, Artificial Sequence
  GFR-binding peptide
  MOD_RES (1)..(3)..(38)..(39): Xaa is C or S
  MOD_RES (16)..(17)..(18)..(19)..(20): Xaa is A or G
  MOD_RES (21)..(22)..(23)..(24): Xaa is A or G or is absent
XGXEAVSMGEQYNKLXXXXXXXXXLYLVSIASLKTPVXX

SEQ ID NO: 2296 - protein, 33 aa, Artificial Sequence
  GFR-binding peptide
  MOD_RES (12)..(13)..(14)..(15)..(16): Xaa is A or G
  MOD_RES (17)..(18)..(19)..(20): Xaa is A or G or is absent
GEVVMDRHKRLXXXXXXXXXYYLMSTASLETPV

SEQ ID NO: 2297 - protein, 32 aa, Artificial Sequence
  GFR-binding peptide
  MOD_RES (11)..(12)..(13)..(14)..(15): Xaa is A or G
  MOD_RES (16)..(17)..(18)..(19): Xaa is A or G or is absent
EVVMDQYNKLXXXXXXXXXLYLMSIASLETPV

SEQ ID NO: 2298 - protein, 38 aa, Artificial Sequence
  GFR-binding peptide
  MOD_RES (1)..(35)..(36): Xaa is C or S
  MOD_RES (13)..(14)..(15)..(16)..(17): Xaa is A or G
  MOD_RES (18)..(19)..(20)..(21): Xaa is A or G or is absent
XSRVVMNRYKKLXXXXXXXXXFYLVSIANLKTPAXXPK

SEQ ID NO: 2299 - protein, 39 aa, Artificial Sequence
  GFR-binding peptide
  MOD_RES (1)..(3)..(35)..(36): Xaa is C or S
XGXGEVVMDRYKKLVVKENEDFYLMSIANLETPVXXAKP

SEQ ID NO: 2300 - protein, 35 aa, Artificial Sequence
  GFR-binding peptide
  MOD_RES (1)..(32)..(33): Xaa is C or S
XSKVIMQYNKLIKPTKGILYLISIASLDQSVXXPS

SEQ ID NO: 2301 - protein, 38 aa, Artificial Sequence
  GFR-binding peptide
  MOD_RES (1)..(33): Xaa is C or S
XSRVVMNRYKKLIVNSSDDFYLVSIANLKTPAXTPKTV

SEQ ID NO: 2302 - protein, 32 aa, Artificial Sequence
  GFR-binding peptide
  MOD_RES (31)..(32): Xaa is C or S
SKVIMYHYKLIKPTKGIKYLISIPSLDQSVXX

SEQ ID NO: 2303 - protein, 40 aa, Artificial Sequence
  GFR-binding peptide
  MOD_RES (1)..(3)..(36)..(37): Xaa is C or S
  MOD_RES (14)..(15)..(16)..(17)..(18): Xaa is A or G
  MOD_RES (19)..(20)..(21)..(22): Xaa is A or G or is absent
XKXSKVIMQYNKLXXXXXXXXXLYLISIASLDQSVXXPSA

SEQ ID NO: 2304 - protein, 41 aa, Artificial Sequence
  GFR-binding peptide
  MOD_RES (1)..(35)..(36): Xaa is C or S
  MOD_RES (13)..(14)..(15)..(16)..(17): Xaa is A or G
  MOD_RES (18)..(19)..(20)..(21): Xaa is A or G or is absent
XGEVVMEYHYKLXXXXXXXXXKYLMSIPSLETPVXXAKPIS

SEQ ID NO: 2305 - protein, 34 aa, Artificial Sequence
  GFR-binding peptide
  MOD_RES (2)..(2): Xaa is C or S
  MOD_RES (13)..(14)..(15)..(16)..(17): Xaa is A or G
  MOD_RES (18)..(19)..(20)..(21): Xaa is A or G or is absent
KXSKVVMQYNKLXXXXXXXXXLYLISIASLDQPV

SEQ ID NO: 2306 - protein, 34 aa, Artificial Sequence
  GFR-binding peptide
  MOD_RES (32)..(33): Xaa is C or S
GEVVMDRHKRLVVKENEDYYLMSTASLETPVXXA

SEQ ID NO: 2307 - protein, 32 aa, Artificial Sequence
  GFR-binding peptide
  MOD_RES (11)..(12)..(13)..(14)..(15): Xaa is A or G
  MOD_RES (16)..(17)..(18)..(19): Xaa is A or G or is absent
HDELTRHKRLXXXXXXXXXYYLVSTASLQVQT

SEQ ID NO: 2308 - protein, 30 aa, Artificial Sequence
  GFR-binding peptide
EVVMEYHYKLVVKDYEDKYLMSIPSLETPV

SEQ ID NO: 2309 - protein, 43 aa, Artificial Sequence
  GFR-binding peptide
  MOD_RES (2)..(4)..(38)..(39): Xaa is C or S
  MOD_RES (16)..(17)..(18)..(19)..(20): Xaa is A or G
  MOD_RES (21)..(22)..(23)..(24): Xaa is A or G or is absent
RXGXGEVVMDYHYKLXXXXXXXXXKYLMSIPSLETPVXXAKPI

SEQ ID NO: 2310 - protein, 37 aa, Artificial Sequence
  GFR-binding peptide
  MOD_RES (31)..(32): Xaa is C or S
RVVMNQYNKLIVNSSDDLYLVSIASLQTPAXXPKPVT

SEQ ID NO: 2311 - protein, 44 aa, Artificial Sequence
  GFR-binding peptide
  MOD_RES (2)..(4)..(38)..(39): Xaa is C or S
  MOD_RES (16)..(17)..(18)..(19)..(20): Xaa is A or G
  MOD_RES (21)..(22)..(23)..(24): Xaa is A or G or is absent
RXGXGEVVMDQYNKLXXXXXXXXXLYLMSIASLETPVXXAKPIK

SEQ ID NO: 2312 - protein, 32 aa, Artificial Sequence
  GFR-binding peptide
  MOD_RES (32)..(32): Xaa is C or S
GEVVMEYHYKLVVKDYEDKYLMSIPSLETPVX

SEQ ID NO: 2313 - protein, 35 aa, Artificial Sequence
  GFR-binding peptide
  MOD_RES (1)..(33)..(34): Xaa is C or S
XGEVVMERHKRLVVKDYEDYYLMSTASLETPVXXA

SEQ ID NO: 2314 - protein, 35 aa, Artificial Sequence
  GFR-binding peptide
  MOD_RES (2)..(35): Xaa is C or S
GXEAVSMGERHKRLTPVGMDDYYLVSTASLKTPVX

SEQ ID NO: 2315 - protein, 36 aa, Artificial Sequence
  GFR-binding peptide
  MOD_RES (35)..(35): Xaa is C or S
HDELTRHKRLFIPKKRVIEYYLVSTASLQVQTPRXQ

SEQ ID NO: 2316 - protein, 38 aa, Artificial Sequence
  GFR-binding peptide
  MOD_RES (32)..(32): Xaa is C or S
SRVVMNQYNKLIVNSSDDLYLVSIASLKTPAXTPKTVH

SEQ ID NO: 2317 - protein, 32 aa, Artificial Sequence
  GFR-binding peptide
  MOD_RES (1)..(1): Xaa is C or S
XGEVVMEYHYKLVVKDYEDKYLMSIPSLETPV

SEQ ID NO: 2318 - protein, 37 aa, Artificial Sequence
  GFR-binding peptide
  MOD_RES (1)..(3)..(36)..(37): Xaa is C or S
XGXEAVSMGEYHYKLTPVGMDDKYLVSIPSLKTPVXX

SEQ ID NO: 2319 - protein, 40 aa, Artificial Sequence
  GFR-binding peptide
  MOD_RES (2)..(35)..(36): Xaa is C or S
GXEAVSMGEQYNKLTPVGMDDLYLVSIASLKTPVXXAKGV

SEQ ID NO: 2320 - protein, 38 aa, Artificial Sequence
  GFR-binding peptide
  MOD_RES (36)..(36): Xaa is C or S
  MOD_RES (12)..(13)..(14)..(15)..(16): Xaa is A or G
  MOD_RES (17)..(18)..(19)..(20): Xaa is A or G or is absent
LHDELTQYNKLXXXXXXXXXLYLVSIASLQVQTPRXQV

SEQ ID NO: 2321 - protein, 39 aa, Artificial Sequence
  GFR-binding peptide
  MOD_RES (2)..(39): Xaa is C or S
  MOD_RES (15)..(16)..(17)..(18)..(19): Xaa is A or G
  MOD_RES (20)..(21)..(22)..(23): Xaa is A or G or is absent
KXALHDELTRHKRLXXXXXXXXXYYLVSTASLQVQTPRX

SEQ ID NO: 2322 - protein, 39 aa, Artificial Sequence
  GFR-binding peptide
  MOD_RES (2)..(4)..(38)..(39): Xaa is C or S
  MOD_RES (16)..(17)..(18)..(19)..(20): Xaa is A or G
  MOD_RES (21)..(22)..(23)..(24): Xaa is A or G or is absent
HXGXSRVVMNRHKRLXXXXXXXXXYYLVSTASLKTPAXX

SEQ ID NO: 2323 - protein, 37 aa, Artificial Sequence
  GFR-binding peptide
  MOD_RES (2)..(4): Xaa is C or S
  MOD_RES (16)..(17)..(18)..(19)..(20): Xaa is A or G
  MOD_RES (21)..(22)..(23)..(24): Xaa is A or G or is absent
HXGXAKVVMNRYKKLXXXXXXXXXFYLVSIANLKTPA

SEQ ID NO: 2324 - protein, 36 aa, Artificial Sequence
  GFR-binding peptide
  MOD_RES (13)..(14)..(15)..(16)..(17): Xaa is A or G
  MOD_RES (18)..(19)..(20)..(21): Xaa is A or G or is absent
ALHDELTRYKKLXXXXXXXXXFYLVSIANLQVQTPR

SEQ ID NO: 2325 - protein, 38 aa, Artificial Sequence
  GFR-binding peptide
  MOD_RES (2)..(34)..(35): Xaa is C or S
GXGEVVMERHKRLVVKDYEDYYLMSTASLETPVXXAKP

SEQ ID NO: 2326 - protein, 34 aa, Artificial Sequence
  GFR-binding peptide
  MOD_RES (1)..(34): Xaa is C or S
  MOD_RES (12)..(13)..(14)..(15)..(16): Xaa is A or G
  MOD_RES (17)..(18)..(19)..(20): Xaa is A or G or is absent
XSKVIMYHYKLXXXXXXXXXKYLISIPSLDQSVX

SEQ ID NO: 2327 - protein, 32 aa, Artificial Sequence
  GFR-binding peptide
  MOD_RES (31)..(32): Xaa is C or S
RVVMNRYKKLIVNSSDDFYLVSIANLQTPAXX

SEQ ID NO: 2328 - protein, 42 aa, Artificial Sequence
  GFR-binding peptide
  MOD_RES (2)..(4)..(37)..(38): Xaa is C or S
  MOD_RES (15)..(16)..(17)..(18)..(19): Xaa is A or G
  MOD_RES (20)..(21)..(22)..(23): Xaa is A or G or is absent
SXKXSKVIMYHYKLXXXXXXXXXKYLISIPSLDQSVXXPSAS

SEQ ID NO: 2329 - protein, 36 aa, Artificial Sequence
  GFR-binding peptide
  MOD_RES (1)..(35)..(36): Xaa is C or S
  MOD_RES (13)..(14)..(15)..(16)..(17): Xaa is A or G
  MOD_RES (18)..(19)..(20)..(21): Xaa is A or G or is absent
XSRVVMNRHKRLXXXXXXXXXYYLVSTASLKTPAXX

SEQ ID NO: 2330 - protein, 33 aa, Artificial Sequence
  GFR-binding peptide
  MOD_RES (1)..(1): Xaa is C or S
  MOD_RES (12)..(13)..(14)..(15)..(16): Xaa is A or G
  MOD_RES (17)..(18)..(19)..(20): Xaa is A or G or is absent
XSKVVMYHYKLXXXXXXXXXKYLISIPSLDQPV

SEQ ID NO: 2331 - protein, 37 aa, Artificial Sequence
  GFR-binding peptide
  MOD_RES (1)..(3): Xaa is C or S
  MOD_RES (16)..(17)..(18)..(19)..(20): Xaa is A or G
  MOD_RES (21)..(22)..(23)..(24): Xaa is A or G or is absent
XKXALHDELTRHKRLXXXXXXXXXYYLVSTASLQVQT

SEQ ID NO: 2332 - protein, 35 aa, Artificial Sequence
  GFR-binding peptide
  MOD_RES (2)..(4)..(35): Xaa is C or S
SXKXSKVIMQYNKLIKPTKGILYLISIASLDQSVX

SEQ ID NO: 2333 - protein, 40 aa, Artificial Sequence
  GFR-binding peptide
  MOD_RES (1)..(3)..(36)..(37): Xaa is C or S
XGXEAVSMGERYKKLTPVGMDDFYLVSIANLKTPVXXAKG

SEQ ID NO: 2334 - protein, 40 aa, Artificial Sequence
  GFR-binding peptide
  MOD_RES (1)..(3)..(35): Xaa is C or S
XGXSRVVMNRYKKLIVNSSDDFYLVSIANLKTPAXTPKTV

SEQ ID NO: 2335 - protein, 36 aa, Artificial Sequence
  GFR-binding peptide
  MOD_RES (1)..(3): Xaa is C or S
  MOD_RES (15)..(16)..(17)..(18)..(19): Xaa is A or G
  MOD_RES (20)..(21)..(22)..(23): Xaa is A or G or is absent
XGXSRVVMNYHYKLXXXXXXXXXKYLVSIPSLKTPA

SEQ ID NO: 2336 - protein, 39 aa, Artificial Sequence
  GFR-binding peptide
  MOD_RES (2)..(35)..(36): Xaa is C or S
  MOD_RES (13)..(14)..(15)..(16)..(17): Xaa is A or G
  MOD_RES (18)..(19)..(20)..(21): Xaa is A or G or is absent
KXSKVIMQYNKLXXXXXXXXXLYLISIASLDQSVXXPSA

SEQ ID NO: 2337 - protein, 37 aa, Artificial Sequence
  GFR-binding peptide
  MOD_RES (1)..(3)..(35)..(36): Xaa is C or S
XGXAKVVMNQYNKLIVNNSSDLYLVSIASLKTPAXXA

SEQ ID NO: 2338 - protein, 39 aa, Artificial Sequence
  GFR-binding peptide
  MOD_RES (2)..(36)..(37): Xaa is C or S
  MOD_RES (14)..(15)..(16)..(17)..(18): Xaa is A or G
  MOD_RES (19)..(20)..(21)..(22): Xaa is A or G or is absent
GXGEVVMDQYNKLXXXXXXXXXLYLMSIASLETPVXXAK

SEQ ID NO: 2339 - protein, 38 aa, Artificial Sequence
  GFR-binding peptide
  MOD_RES (1)..(38): Xaa is C or S
XALHDELTRHKRLFIPKKRVIEYYLVSTASLQVQTPRX

SEQ ID NO: 2340 - protein, 37 aa, Artificial Sequence
  GFR-binding peptide
  MOD_RES (1)..(33)..(34): Xaa is C or S
XARVVMNQYNKLIVNSSDDLYLVSIASLQTPAXXPKP

SEQ ID NO: 2341 - protein, 39 aa, Artificial Sequence
  GFR-binding peptide
  MOD_RES (33)..(34): Xaa is C or S
  MOD_RES (11)..(12)..(13)..(14)..(15): Xaa is A or G
  MOD_RES (16)..(17)..(18)..(19): Xaa is A or G or is absent
SKVVMYHYKLXXXXXXXXXKYLISIPSLDQPVXXPSASA

SEQ ID NO: 2342 - protein, 30 aa, Artificial Sequence
  GFR-binding peptide
SRVIMRHKRLVKPKRGVYYLISTASLAQPV

SEQ ID NO: 2343 - protein, 41 aa, Artificial Sequence
  GFR-binding peptide
  MOD_RES (1)..(3)..(37): Xaa is C or S
  MOD_RES (15)..(16)..(17)..(18)..(19): Xaa is A or G
  MOD_RES (20)..(21)..(22)..(23): Xaa is A or G or is absent
XGXSRVVMNQYNKLXXXXXXXXXLYLVSIASLKTPAXTPKT

SEQ ID NO: 2344 - protein, 34 aa, Artificial Sequence
  GFR-binding peptide
  MOD_RES (31)..(32): Xaa is C or S
SKVIMQYNKLIKPTKGILYLISIASLDQSVXXPS

SEQ ID NO: 2345 - protein, 43 aa, Artificial Sequence
  GFR-binding peptide
  MOD_RES (1)..(3)..(40): Xaa is C or S
  MOD_RES (16)..(17)..(18)..(19)..(20): Xaa is A or G
  MOD_RES (21)..(22)..(23)..(24): Xaa is A or G or is absent
XKXALHDELTRHKRLXXXXXXXXXYYLVSTASLQVQTPRXQVN

SEQ ID NO: 2346 - protein, 39 aa, Artificial Sequence
  GFR-binding peptide
  MOD_RES (33)..(34): Xaa is C or S
  MOD_RES (11)..(12)..(13)..(14)..(15): Xaa is A or G
  MOD_RES (16)..(17)..(18)..(19): Xaa is A or G or is absent
KVVMNRHKRLXXXXXXXXXYYLVSTASLKTPAXXAKPVA

SEQ ID NO: 2347 - protein, 35 aa, Artificial Sequence
  GFR-binding peptide
  MOD_RES (2)..(2): Xaa is C or S
  MOD_RES (14)..(15)..(16)..(17)..(18): Xaa is A or G
  MOD_RES (19)..(20)..(21)..(22): Xaa is A or G or is absent
GXGEVVMERHKRLXXXXXXXXXYYLMSTASLETPV

SEQ ID NO: 2348 - protein, 43 aa, Artificial Sequence
  GFR-binding peptide
  MOD_RES (2)..(4)..(38)..(39): Xaa is C or S
  MOD_RES (16)..(17)..(18)..(19)..(20): Xaa is A or G
  MOD_RES (21)..(22)..(23)..(24): Xaa is A or G or is absent
HXGXSRVVMNYHYKLXXXXXXXXXKYLVSIPSLKTPAXXPKPV

SEQ ID NO: 2349 - protein, 38 aa, Artificial Sequence
  GFR-binding peptide
  MOD_RES (34)..(35): Xaa is C or S
  MOD_RES (12)..(13)..(14)..(15)..(16): Xaa is A or G
  MOD_RES (17)..(18)..(19)..(20): Xaa is A or G or is absent
SRVVMNQYNKLXXXXXXXXXLYLVSIASLKTPAXXPKP

SEQ ID NO: 2350 - protein, 39 aa, Artificial Sequence
  GFR-binding peptide
  MOD_RES (2)..(4)..(36)..(37): Xaa is C or S
RXGXGEVVMDQYNKLVVKENEDLYLMSIASLETPVXXAK

SEQ ID NO: 2351 - protein, 38 aa, Artificial Sequence
  GFR-binding peptide
  MOD_RES (1)..(3)..(35)..(36): Xaa is C or S
XGXARVVMNRYKKLIVNSSDDFYLVSIANLQTPAXXPK

SEQ ID NO: 2352 - protein, 33 aa, Artificial Sequence
  GFR-binding peptide
  MOD_RES (2)..(33): Xaa is C or S
KXSKVIMYHYKLIKPTKGIKYLISIPSLDQSVX

SEQ ID NO: 2353 - protein, 42 aa, Artificial Sequence
  GFR-binding peptide
  MOD_RES (1)..(3)..(37)..(38): Xaa is C or S
  MOD_RES (15)..(16)..(17)..(18)..(19): Xaa is A or G
  MOD_RES (20)..(21)..(22)..(23): Xaa is A or G or is absent
XGXAKVVMNQYNKLXXXXXXXXXLYLVSIASLKTPAXXAKPV

SEQ ID NO: 2354 - protein, 36 aa, Artificial Sequence
  GFR-binding peptide
  MOD_RES (36)..(36): Xaa is C or S
LHDELTYHYKLFIPKKRVIEKYLVSIPSLQVQTPRX

SEQ ID NO: 2355 - protein, 43 aa, Artificial Sequence
  GFR-binding peptide
  MOD_RES (2)..(4)..(38)..(39): Xaa is C or S
  MOD_RES (16)..(17)..(18)..(19)..(20): Xaa is A or G
  MOD_RES (21)..(22)..(23)..(24): Xaa is A or G or is absent
RXGXGEVVMDRHKRLXXXXXXXXXYYLMSTASLETPVXXAKPI

SEQ ID NO: 2356 - protein, 34 aa, Artificial Sequence
  GFR-binding peptide
  MOD_RES (1)..(34): Xaa is C or S
  MOD_RES (12)..(13)..(14)..(15)..(16): Xaa is A or G
  MOD_RES (17)..(18)..(19)..(20): Xaa is A or G or is absent
XSKVVMRYKKLXXXXXXXXXFYLISIANLDQPVX

SEQ ID NO: 2357 - protein, 43 aa, Artificial Sequence
  GFR-binding peptide
  MOD_RES (2)..(4)..(38)..(39): Xaa is C or S
  MOD_RES (16)..(17)..(18)..(19)..(20): Xaa is A or G
  MOD_RES (21)..(22)..(23)..(24): Xaa is A or G or is absent
HXGXARVVMNRYKKLXXXXXXXXXFYLVSIANLQTPAXXPKPV

SEQ ID NO: 2358 - protein, 33 aa, Artificial Sequence
  GFR-binding peptide
  MOD_RES (33)..(33): Xaa is C or S
  MOD_RES (11)..(12)..(13)..(14)..(15): Xaa is A or G
  MOD_RES (16)..(17)..(18)..(19): Xaa is A or G or is absent
SRVIMRYKKLXXXXXXXXXFYLISIANLAQPVX

SEQ ID NO: 2359 - protein, 38 aa, Artificial Sequence
  GFR-binding peptide
  MOD_RES (1)..(34)..(35): Xaa is C or S
  MOD_RES (12)..(13)..(14)..(15)..(16): Xaa is A or G
  MOD_RES (17)..(18)..(19)..(20): Xaa is A or G or is absent
XSKVVMRYKKLXXXXXXXXXFYLISIANLDQPVXXPSA

SEQ ID NO: 2360 - protein, 37 aa, Artificial Sequence
  GFR-binding peptide
  MOD_RES (1)..(3)..(37): Xaa is C or S
  MOD_RES (15)..(16)..(17)..(18)..(19): Xaa is A or G
  MOD_RES (20)..(21)..(22)..(23): Xaa is A or G or is absent
XGXGEVVMERYKKLXXXXXXXXXFYLMSIANLETPVX

SEQ ID NO: 2361 - protein, 39 aa, Artificial Sequence
  GFR-binding peptide
  MOD_RES (2)..(36)..(37): Xaa is C or S
  MOD_RES (14)..(15)..(16)..(17)..(18): Xaa is A or G
  MOD_RES (19)..(20)..(21)..(22): Xaa is A or G or is absent
GXAKVVMNRHKRLXXXXXXXXXYYLVSTASLKTPAXXAK

SEQ ID NO: 2362 - protein, 34 aa, Artificial Sequence
  GFR-binding peptide
  MOD_RES (1)..(33)..(34): Xaa is C or S
XSRVVMNQYNKLIVNSSDDLYLVSIASLKTPAXX

SEQ ID NO: 2363 - protein, 39 aa, Artificial Sequence
  GFR-binding peptide
  MOD_RES (33)..(34): Xaa is C or S
  MOD_RES (11)..(12)..(13)..(14)..(15): Xaa is A or G
  MOD_RES (16)..(17)..(18)..(19): Xaa is A or G or is absent
SRVIMRYKKLXXXXXXXXXFYLISIANLAQPVXXPAASA

SEQ ID NO: 2364 - protein, 41 aa, Artificial Sequence
  GFR-binding peptide
  MOD_RES (2)..(4)..(37)..(38): Xaa is C or S
  MOD_RES (15)..(16)..(17)..(18)..(19): Xaa is A or G
  MOD_RES (20)..(21)..(22)..(23): Xaa is A or G or is absent
SXKXSRVIMQYNKLXXXXXXXXXLYLISIASLAQPVXXPAA

SEQ ID NO: 2365 - protein, 42 aa, Artificial Sequence
  GFR-binding peptide
  MOD_RES (1)..(3)..(40): Xaa is C or S
XKXALHDELTRYKKLFIPKKRVIEFYLVSIANLQVQTPRXQV

SEQ ID NO: 2366 - protein, 33 aa, Artificial Sequence
  GFR-binding peptide
HDELTRHKRLFIPKKRVIEYYLVSTASLQVQTP

SEQ ID NO: 2367 - protein, 35 aa, Artificial Sequence
  GFR-binding peptide
  MOD_RES (34)..(35): Xaa is C or S
  MOD_RES (12)..(13)..(14)..(15)..(16): Xaa is A or G
  MOD_RES (17)..(18)..(19)..(20): Xaa is A or G or is absent
SRVVMNQYNKLXXXXXXXXXLYLVSIASLKTPAXX

SEQ ID NO: 2368 - protein, 34 aa, Artificial Sequence
  GFR-binding peptide
  MOD_RES (32)..(33): Xaa is C or S
GEVVMDQYNKLVVKENEDLYLMSIASLETPVXXA

SEQ ID NO: 2369 - protein, 33 aa, Artificial Sequence
  GFR-binding peptide
  MOD_RES (2)..(2): Xaa is C or S
GXARVVMNRHKRLIVNSSDDYYLVSTASLQTPA

SEQ ID NO: 2370 - protein, 37 aa, Artificial Sequence
  GFR-binding peptide
  MOD_RES (32)..(33): Xaa is C or S
GEVVMEYHYKLVVKDYEDKYLMSIPSLETPVXXAKPI

SEQ ID NO: 2371 - protein, 35 aa, Artificial Sequence
  GFR-binding peptide
  MOD_RES (13)..(14)..(15)..(16)..(17): Xaa is A or G
  MOD_RES (18)..(19)..(20)..(21): Xaa is A or G or is absent
ALHDELTQYNKLXXXXXXXXXLYLVSIASLQVQTP

SEQ ID NO: 2372 - protein, 39 aa, Artificial Sequence
  GFR-binding peptide
  MOD_RES (2)..(4): Xaa is C or S
  MOD_RES (17)..(18)..(19)..(20)..(21): Xaa is A or G
  MOD_RES (22)..(23)..(24)..(25): Xaa is A or G or is absent
EXKXALHDELTRHKRLXXXXXXXXXYYLVSTASLQVQTP

SEQ ID NO: 2373 - protein, 34 aa, Artificial Sequence
  GFR-binding peptide
HDELTRYKKLFIPKKRVIEFYLVSIANLQVQTPR

SEQ ID NO: 2374 - protein, 38 aa, Artificial Sequence
  GFR-binding peptide
  MOD_RES (1)..(33)..(34): Xaa is C or S
XAKVVMNYHYKLIVNNSSDKYLVSIPSLKTPAXXAKPV

SEQ ID NO: 2375 - protein, 37 aa, Artificial Sequence
  GFR-binding peptide
  MOD_RES (1)..(3): Xaa is C or S
  MOD_RES (16)..(17)..(18)..(19)..(20): Xaa is A or G
  MOD_RES (21)..(22)..(23)..(24): Xaa is A or G or is absent
XKXALHDELTYHYKLXXXXXXXXXKYLVSIPSLQVQT

SEQ ID NO: 2376 - protein, 39 aa, Artificial Sequence
  GFR-binding peptide
  MOD_RES (2)..(34)..(35): Xaa is C or S
GXSRVVMNRHKRLIVNSSDDYYLVSTASLKTPAXXPKPV

SEQ ID NO: 2377 - protein, 37 aa, Artificial Sequence
  GFR-binding peptide
  MOD_RES (1)..(33)..(34): Xaa is C or S
XGEVVMEQYNKLVVKDYEDLYLMSIASLETPVXXAKP

SEQ ID NO: 2378 - protein, 37 aa, Artificial Sequence
  GFR-binding peptide
  MOD_RES (2)..(4)..(37): Xaa is C or S
RXGXEAVSMGERHKRLTPVGMDDYYLVSTASLKTPVX

SEQ ID NO: 2379 - protein, 42 aa, Artificial Sequence
  GFR-binding peptide
  MOD_RES (2)..(4)..(38)..(39): Xaa is C or S
  MOD_RES (16)..(17)..(18)..(19)..(20): Xaa is A or G
  MOD_RES (21)..(22)..(23)..(24): Xaa is A or G or is absent
HXGXSRVVMNQYNKLXXXXXXXXXLYLVSIASLKTPAXXPKP

SEQ ID NO: 2380 - protein, 38 aa, Artificial Sequence
  GFR-binding peptide
  MOD_RES (1)..(3)..(37)..(38): Xaa is C or S
  MOD_RES (15)..(16)..(17)..(18)..(19): Xaa is A or G
  MOD_RES (20)..(21)..(22)..(23): Xaa is A or G or is absent
XGXGEVVMDYHYKLXXXXXXXXXKYLMSIPSLETPVXX

SEQ ID NO: 2381 - protein, 39 aa, Artificial Sequence
  GFR-binding peptide
  MOD_RES (2)..(36)..(37): Xaa is C or S
  MOD_RES (14)..(15)..(16)..(17)..(18): Xaa is A or G
  MOD_RES (19)..(20)..(21)..(22): Xaa is A or G or is absent
GXAKVVMNRYKKLXXXXXXXXXFYLVSIANLKTPAXXAK

SEQ ID NO: 2382 - protein, 38 aa, Artificial Sequence
  GFR-binding peptide
  MOD_RES (1)..(3)..(37)..(38): Xaa is C or S
  MOD_RES (15)..(16)..(17)..(18)..(19): Xaa is A or G
  MOD_RES (20)..(21)..(22)..(23): Xaa is A or G or is absent
XGXGEVVMEQYNKLXXXXXXXXXLYLMSIASLETPVXX

SEQ ID NO: 2383 - protein, 42 aa, Artificial Sequence
  GFR-binding peptide
  MOD_RES (2)..(36)..(37): Xaa is C or S
  MOD_RES (14)..(15)..(16)..(17)..(18): Xaa is A or G
  MOD_RES (19)..(20)..(21)..(22): Xaa is A or G or is absent
GXGEVVMDYHYKLXXXXXXXXXKYLMSIPSLETPVXXAKPIK

SEQ ID NO: 2384 - protein, 35 aa, Artificial Sequence
  GFR-binding peptide
  MOD_RES (1)..(33)..(34): Xaa is C or S
XAKVVMNRHKRLIVNNSSDYYLVSTASLKTPAXXA

SEQ ID NO: 2385 - protein, 37 aa, Artificial Sequence
  GFR-binding peptide
  MOD_RES (31)..(32): Xaa is C or S
RVVMNYHYKLIVNSSDDKYLVSIPSLQTPAXXPKPVT

SEQ ID NO: 2386 - protein, 36 aa, Artificial Sequence
  GFR-binding peptide
  MOD_RES (1)..(3)..(34)..(35): Xaa is C or S
XKXSKVVMYHYKLVKPTRGVKYLISIPSLDQPVXXP

SEQ ID NO: 2387 - protein, 34 aa, Artificial Sequence
  GFR-binding peptide
  MOD_RES (33)..(34): Xaa is C or S
  MOD_RES (11)..(12)..(13)..(14)..(15): Xaa is A or G
  MOD_RES (16)..(17)..(18)..(19): Xaa is A or G or is absent
SKVIMQYNKLXXXXXXXXXLYLISIASLDQSVXX

SEQ ID NO: 2388 - protein, 44 aa, Artificial Sequence
  GFR-binding peptide
  MOD_RES (1)..(3)..(38)..(39): Xaa is C or S
  MOD_RES (16)..(17)..(18)..(19)..(20): Xaa is A or G
  MOD_RES (21)..(22)..(23)..(24): Xaa is A or G or is absent
XGXEAVSMGERYKKLXXXXXXXXXFYLVSIANLKTPVXXAKGVK

SEQ ID NO: 2389 - protein, 39 aa, Artificial Sequence
  GFR-binding peptide
  MOD_RES (1)..(3)..(37)..(38): Xaa is C or S
  MOD_RES (15)..(16)..(17)..(18)..(19): Xaa is A or G
  MOD_RES (20)..(21)..(22)..(23): Xaa is A or G or is absent
XGXSRVVMNRYKKLXXXXXXXXXFYLVSIANLKTPAXXP

SEQ ID NO: 2390 - protein, 35 aa, Artificial Sequence
  GFR-binding peptide
  MOD_RES (1)..(32)..(33): Xaa is C or S
XSKVIMRYKKLIKPTKGIFYLISIANLDQSVXXPS

SEQ ID NO: 2391 - protein, 40 aa, Artificial Sequence
  GFR-binding peptide
  MOD_RES (1)..(3)..(38)..(39): Xaa is C or S
  MOD_RES (16)..(17)..(18)..(19)..(20): Xaa is A or G
  MOD_RES (21)..(22)..(23)..(24): Xaa is A or G or is absent
XGXEAVSMGEYHYKLXXXXXXXXXKYLVSIPSLKTPVXXA

SEQ ID NO: 2392 - protein, 40 aa, Artificial Sequence
  GFR-binding peptide
  MOD_RES (36)..(36): Xaa is C or S
LHDELTYHYKLFIPKKRVIEKYLVSIPSLQVQTPRXQVNR

SEQ ID NO: 2393 - protein, 35 aa, Artificial Sequence
  GFR-binding peptide
  MOD_RES (1)..(3)..(35): Xaa is C or S
XGXGEVVMDYHYKLVVKENEDKYLMSIPSLETPVX

SEQ ID NO: 2394 - protein, 41 aa, Artificial Sequence
  GFR-binding peptide
  MOD_RES (2)..(36)..(37): Xaa is C or S
  MOD_RES (14)..(15)..(16)..(17)..(18): Xaa is A or G
  MOD_RES (19)..(20)..(21)..(22): Xaa is A or G or is absent
GXGEVVMDRYKKLXXXXXXXXXFYLMSIANLETPVXXAKPI

SEQ ID NO: 2395 - protein, 39 aa, Artificial Sequence
  GFR-binding peptide
  MOD_RES (1)..(3)..(37)..(38): Xaa is C or S
  MOD_RES (15)..(16)..(17)..(18)..(19): Xaa is A or G
  MOD_RES (20)..(21)..(22)..(23): Xaa is A or G or is absent
XGXGEVVMERHKRLXXXXXXXXXYYLMSTASLETPVXXA

SEQ ID NO: 2396 - protein, 38 aa, Artificial Sequence
  GFR-binding peptide
  MOD_RES (37)..(37): Xaa is C or S
ALHDELTRYKKLFIPKKRVIEFYLVSIANLQVQTPRXQ

SEQ ID NO: 2397 - protein, 35 aa, Artificial Sequence
  GFR-binding peptide
  MOD_RES (33)..(34): Xaa is C or S
  MOD_RES (11)..(12)..(13)..(14)..(15): Xaa is A or G
  MOD_RES (16)..(17)..(18)..(19): Xaa is A or G or is absent
SRVIMRHKRLXXXXXXXXXYYLISTASLAQPVXXP

SEQ ID NO: 2398 - protein, 36 aa, Artificial Sequence
  GFR-binding peptide
  MOD_RES (1)..(34)..(35): Xaa is C or S
  MOD_RES (12)..(13)..(14)..(15)..(16): Xaa is A or G
  MOD_RES (17)..(18)..(19)..(20): Xaa is A or G or is absent
XSKVIMRYKKLXXXXXXXXXFYLISIANLDQSVXXP

SEQ ID NO: 2399 - protein, 37 aa, Artificial Sequence
  GFR-binding peptide
  MOD_RES (1)..(3)..(37): Xaa is C or S
  MOD_RES (15)..(16)..(17)..(18)..(19): Xaa is A or G
  MOD_RES (20)..(21)..(22)..(23): Xaa is A or G or is absent
XGXSRVVMNRYKKLXXXXXXXXXFYLVSIANLKTPAX

SEQ ID NO: 2400 - protein, 34 aa, Artificial Sequence
  GFR-binding peptide
  MOD_RES (1)..(32)..(33): Xaa is C or S
XSKVIMRHKRLIKPTKGIYYLISTASLDQSVXXP

SEQ ID NO: 2401 - protein, 41 aa, Artificial Sequence
  GFR-binding peptide
  MOD_RES (1)..(3)..(35)..(36): Xaa is C or S
XGXARVVMNYHYKLIVNSSDDKYLVSIPSLQTPAXXPKPVT

SEQ ID NO: 2402 - protein, 38 aa, Artificial Sequence
  GFR-binding peptide
  MOD_RES (2)..(4)..(36)..(37): Xaa is C or S
HXGXAKVVMNRYKKLIVNNSSDFYLVSIANLKTPAXXA

SEQ ID NO: 2403 - protein, 34 aa, Artificial Sequence
  GFR-binding peptide
  MOD_RES (33)..(34): Xaa is C or S
  MOD_RES (11)..(12)..(13)..(14)..(15): Xaa is A or G
  MOD_RES (16)..(17)..(18)..(19): Xaa is A or G or is absent
KVVMNQYNKLXXXXXXXXXLYLVSIASLKTPAXX

SEQ ID NO: 2404 - protein, 36 aa, Artificial Sequence
  GFR-binding peptide
  MOD_RES (2)..(34)..(35): Xaa is C or S
GXARVVMNRHKRLIVNSSDDYYLVSTASLQTPAXXP

SEQ ID NO: 2405 - protein, 40 aa, Artificial Sequence
  GFR-binding peptide
  MOD_RES (2)..(4)..(36)..(37): Xaa is C or S
HXGXARVVMNYHYKLIVNSSDDKYLVSIPSLQTPAXXPKP

SEQ ID NO: 2406 - protein, 39 aa, Artificial Sequence
  GFR-binding peptide
  MOD_RES (2)..(4)..(38)..(39): Xaa is C or S
  MOD_RES (16)..(17)..(18)..(19)..(20): Xaa is A or G
  MOD_RES (21)..(22)..(23)..(24): Xaa is A or G or is absent
HXGXARVVMNRYKKLXXXXXXXXXFYLVSIANLQTPAXX

SEQ ID NO: 2407 - protein, 38 aa, Artificial Sequence
  GFR-binding peptide
  MOD_RES (33)..(34): Xaa is C or S
  MOD_RES (11)..(12)..(13)..(14)..(15): Xaa is A or G
  MOD_RES (16)..(17)..(18)..(19): Xaa is A or G or is absent
SKVIMRYKKLXXXXXXXXXFYLISIANLDQSVXXPSAS

SEQ ID NO: 2408 - protein, 34 aa, Artificial Sequence
  GFR-binding peptide
  MOD_RES (33)..(34): Xaa is C or S
  MOD_RES (11)..(12)..(13)..(14)..(15): Xaa is A or G
  MOD_RES (16)..(17)..(18)..(19): Xaa is A or G or is absent
RVVMNQYNKLXXXXXXXXXLYLVSIASLKTPAXX

SEQ ID NO: 2409 - protein, 32 aa, Artificial Sequence
  GFR-binding peptide
  MOD_RES (31)..(31): Xaa is C or S
RVVMNQYNKLIVNSSDDLYLVSIASLKTPAXT

SEQ ID NO: 2410 - protein, 41 aa, Artificial Sequence
  GFR-binding peptide
  MOD_RES (1)..(3)..(35)..(36): Xaa is C or S
XGXGEVVMEQYNKLVVKDYEDLYLMSIASLETPVXXAKPIS

SEQ ID NO: 2411 - protein, 34 aa, Artificial Sequence
  GFR-binding peptide
  MOD_RES (31)..(32): Xaa is C or S
SKVIMYHYKLIKPTKGIKYLISIPSLDQSVXXPS

SEQ ID NO: 2412 - protein, 38 aa, Artificial Sequence
  GFR-binding peptide
  MOD_RES (2)..(4)..(36)..(37): Xaa is C or S
RXGXGEVVMDYHYKLVVKENEDKYLMSIPSLETPVXXA

SEQ ID NO: 2413 - protein, 36 aa, Artificial Sequence
  GFR-binding peptide
  MOD_RES (2)..(35)..(36): Xaa is C or S
  MOD_RES (13)..(14)..(15)..(16)..(17): Xaa is A or G
  MOD_RES (18)..(19)..(20)..(21): Xaa is A or G or is absent
KXSKVIMRHKRLXXXXXXXXXYYLISTASLDQSVXX

SEQ ID NO: 2414 - protein, 41 aa, Artificial Sequence
  GFR-binding peptide
  MOD_RES (37)..(37): Xaa is C or S
ALHDELTRHKRLFIPKKRVIEYYLVSTASLQVQTPRXQVNR

SEQ ID NO: 2415 - protein, 39 aa, Artificial Sequence
  GFR-binding peptide
  MOD_RES (1)..(3)..(35)..(36): Xaa is C or S
XGXARVVMNYHYKLIVNSSDDKYLVSIPSLQTPAXXPKP

SEQ ID NO: 2416 - protein, 36 aa, Artificial Sequence
  GFR-binding peptide
  MOD_RES (35)..(35): Xaa is C or S
HDELTYHYKLFIPKKRVIEKYLVSIPSLQVQTPRXQ

SEQ ID NO: 2417 - protein, 38 aa, Artificial Sequence
  GFR-binding peptide
  MOD_RES (1)..(33)..(34): Xaa is C or S
XARVVMNYHYKLIVNSSDDKYLVSIPSLQTPAXXPKPV

SEQ ID NO: 2418 - protein, 36 aa, Artificial Sequence
  GFR-binding peptide
  MOD_RES (1)..(32)..(33): Xaa is C or S
XSKVIMRYKKLIKPTKGIFYLISIANLDQSVXXPSA

SEQ ID NO: 2419 - protein, 37 aa, Artificial Sequence
  GFR-binding peptide
  MOD_RES (1)..(3)..(34)..(35): Xaa is C or S
XKXSKVVMRHKRLVKPTRGVYYLISTASLDQPVXXPS

SEQ ID NO: 2420 - protein, 40 aa, Artificial Sequence
  GFR-binding peptide
  MOD_RES (2)..(4)..(36)..(37): Xaa is C or S
RXGXGEVVMEYHYKLVVKDYEDKYLMSIPSLETPVXXAKP

SEQ ID NO: 2421 - protein, 44 aa, Artificial Sequence
  GFR-binding peptide
  MOD_RES (1)..(3)..(40): Xaa is C or S
  MOD_RES (16)..(17)..(18)..(19)..(20): Xaa is A or G
  MOD_RES (21)..(22)..(23)..(24): Xaa is A or G or is absent
XKXALHDELTQYNKLXXXXXXXXXLYLVSIASLQVQTPRXQVNR

SEQ ID NO: 2422 - protein, 41 aa, Artificial Sequence
  GFR-binding peptide
  MOD_RES (1)..(38): Xaa is C or S
XALHDELTRYKKLFIPKKRVIEFYLVSIANLQVQTPRXQVN

SEQ ID NO: 2423 - protein, 37 aa, Artificial Sequence
  GFR-binding peptide
  MOD_RES (1)..(35)..(36): Xaa is C or S
  MOD_RES (13)..(14)..(15)..(16)..(17): Xaa is A or G
  MOD_RES (18)..(19)..(20)..(21): Xaa is A or G or is absent
XGEVVMDQYNKLXXXXXXXXXLYLMSIASLETPVXXA

SEQ ID NO: 2424 - protein, 35 aa, Artificial Sequence
  GFR-binding peptide
  MOD_RES (2)..(35): Xaa is C or S
  MOD_RES (13)..(14)..(15)..(16)..(17): Xaa is A or G
  MOD_RES (18)..(19)..(20)..(21): Xaa is A or G or is absent
KXSKVIMQYNKLXXXXXXXXXLYLISIASLDQSVX

SEQ ID NO: 2425 - protein, 35 aa, Artificial Sequence
  GFR-binding peptide
  MOD_RES (2)..(35): Xaa is C or S
  MOD_RES (13)..(14)..(15)..(16)..(17): Xaa is A or G
  MOD_RES (18)..(19)..(20)..(21): Xaa is A or G or is absent
KXSKVVMRHKRLXXXXXXXXXYYLISTASLDQPVX

SEQ ID NO: 2426 - protein, 35 aa, Artificial Sequence
  GFR-binding peptide
  MOD_RES (2)..(2): Xaa is C or S
  MOD_RES (14)..(15)..(16)..(17)..(18): Xaa is A or G
  MOD_RES (19)..(20)..(21)..(22): Xaa is A or G or is absent
GXGEVVMERYKKLXXXXXXXXXFYLMSIANLETPV

SEQ ID NO: 2427 - protein, 36 aa, Artificial Sequence
  GFR-binding peptide
  MOD_RES (1)..(33)..(34): Xaa is C or S
XGEVVMEYHYKLVVKDYEDKYLMSIPSLETPVXXAK

SEQ ID NO: 2428 - protein, 32 aa, Artificial Sequence
  GFR-binding peptide
  MOD_RES (32)..(32): Xaa is C or S
AKVVMNYHYKLIVNNSSDKYLVSIPSLKTPAX

SEQ ID NO: 2429 - protein, 37 aa, Artificial Sequence
  GFR-binding peptide
  MOD_RES (2)..(4)..(36)..(37): Xaa is C or S
RXGXGEVVMERHKRLVVKDYEDYYLMSTASLETPVXX

SEQ ID NO: 2430 - protein, 41 aa, Artificial Sequence
  GFR-binding peptide
  MOD_RES (37)..(37): Xaa is C or S
ALHDELTQYNKLFIPKKRVIELYLVSIASLQVQTPRXQVNR

SEQ ID NO: 2431 - protein, 40 aa, Artificial Sequence
  GFR-binding peptide
  MOD_RES (34)..(35): Xaa is C or S
  MOD_RES (12)..(13)..(14)..(15)..(16): Xaa is A or G
  MOD_RES (17)..(18)..(19)..(20): Xaa is A or G or is absent
GEVVMERHKRLXXXXXXXXXYYLMSTASLETPVXXAKPIS

SEQ ID NO: 2432 - protein, 35 aa, Artificial Sequence
  GFR-binding peptide
  MOD_RES (1)..(33)..(34): Xaa is C or S
XARVVMNRHKRLIVNSSDDYYLVSTASLQTPAXXP

SEQ ID NO: 2433 - protein, 37 aa, Artificial Sequence
  GFR-binding peptide
  MOD_RES (2)..(36)..(37): Xaa is C or S
  MOD_RES (14)..(15)..(16)..(17)..(18): Xaa is A or G
  MOD_RES (19)..(20)..(21)..(22): Xaa is A or G or is absent
GXGEVVMEYHYKLXXXXXXXXXKYLMSIPSLETPVXX

SEQ ID NO: 2434 - protein, 36 aa, Artificial Sequence
  GFR-binding peptide
  MOD_RES (1)..(1): Xaa is C or S
  MOD_RES (14)..(15)..(16)..(17)..(18): Xaa is A or G
  MOD_RES (19)..(20)..(21)..(22): Xaa is A or G or is absent
XALHDELTYHYKLXXXXXXXXXKYLVSIPSLQVQTP

SEQ ID NO: 2435 - protein, 42 aa, Artificial Sequence
  GFR-binding peptide
  MOD_RES (1)..(3)..(37)..(38): Xaa is C or S
  MOD_RES (15)..(16)..(17)..(18)..(19): Xaa is A or G
  MOD_RES (20)..(21)..(22)..(23): Xaa is A or G or is absent
XGXSRVVMNRYKKLXXXXXXXXXFYLVSIANLKTPAXXPKPV

SEQ ID NO: 2436 - protein, 42 aa, Artificial Sequence
  GFR-binding peptide
  MOD_RES (2)..(39): Xaa is C or S
  MOD_RES (15)..(16)..(17)..(18)..(19): Xaa is A or G
  MOD_RES (20)..(21)..(22)..(23): Xaa is A or G or is absent
KXALHDELTQYNKLXXXXXXXXXLYLVSIASLQVQTPRXQVN

SEQ ID NO: 2437 - protein, 41 aa, Artificial Sequence
  GFR-binding peptide
  MOD_RES (2)..(36)..(37): Xaa is C or S
  MOD_RES (14)..(15)..(16)..(17)..(18): Xaa is A or G
  MOD_RES (19)..(20)..(21)..(22): Xaa is A or G or is absent
GXGEVVMDRHKRLXXXXXXXXXYYLMSTASLETPVXXAKPI

SEQ ID NO: 2438 - protein, 34 aa, Artificial Sequence
  GFR-binding peptide
  MOD_RES (1)..(3)..(34): Xaa is C or S
XKXSRVIMQYNKLVKPKRGVLYLISIASLAQPVX

SEQ ID NO: 2439 - protein, 33 aa, Artificial Sequence
  GFR-binding peptide
  MOD_RES (31)..(32): Xaa is C or S
EVVMDRYKKLVVKENEDFYLMSIANLETPVXXA

SEQ ID NO: 2440 - protein, 36 aa, Artificial Sequence
  GFR-binding peptide
  MOD_RES (33)..(34): Xaa is C or S
EAVSMGERHKRLTPVGMDDYYLVSTASLKTPVXXAK

SEQ ID NO: 2441 - protein, 32 aa, Artificial Sequence
  GFR-binding peptide
  MOD_RES (11)..(12)..(13)..(14)..(15): Xaa is A or G
  MOD_RES (16)..(17)..(18)..(19): Xaa is A or G or is absent
HDELTYHYKLXXXXXXXXXKYLVSIPSLQVQT

SEQ ID NO: 2442 - protein, 35 aa, Artificial Sequence
  GFR-binding peptide
  MOD_RES (31)..(32): Xaa is C or S
EVVMERHKRLVVKDYEDYYLMSTASLETPVXXAKP

SEQ ID NO: 2443 - protein, 43 aa, Artificial Sequence
  GFR-binding peptide
  MOD_RES (2)..(4)..(37)..(38): Xaa is C or S
  MOD_RES (15)..(16)..(17)..(18)..(19): Xaa is A or G
  MOD_RES (20)..(21)..(22)..(23): Xaa is A or G or is absent
SXKXSRVIMRHKRLXXXXXXXXXYYLISTASLAQPVXXPAASA

SEQ ID NO: 2444 - protein, 37 aa, Artificial Sequence
  GFR-binding peptide
  MOD_RES (2)..(2): Xaa is C or S
KXALHDELTRHKRLFIPKKRVIEYYLVSTASLQVQTP

SEQ ID NO: 2445 - protein, 37 aa, Artificial Sequence
  GFR-binding peptide
  MOD_RES (2)..(36): Xaa is C or S
  MOD_RES (14)..(15)..(16)..(17)..(18): Xaa is A or G
  MOD_RES (19)..(20)..(21)..(22): Xaa is A or G or is absent
GXSRVVMNYHYKLXXXXXXXXXKYLVSIPSLKTPAXT

SEQ ID NO: 2446 - protein, 39 aa, Artificial Sequence
  GFR-binding peptide
  MOD_RES (2)..(35)..(36): Xaa is C or S
  MOD_RES (13)..(14)..(15)..(16)..(17): Xaa is A or G
  MOD_RES (18)..(19)..(20)..(21): Xaa is A or G or is absent
KXSKVVMRHKRLXXXXXXXXXYYLISTASLDQPVXXPSA

SEQ ID NO: 2447 - protein, 41 aa, Artificial Sequence
  GFR-binding peptide
  MOD_RES (1)..(3)..(40): Xaa is C or S
XKXALHDELTYHYKLFIPKKRVIEKYLVSIPSLQVQTPRXQ

SEQ ID NO: 2448 - protein, 31 aa, Artificial Sequence
  GFR-binding peptide
  MOD_RES (31)..(31): Xaa is C or S
EVVMDRYKKLVVKENEDFYLMSIANLETPVX

SEQ ID NO: 2449 - protein, 36 aa, Artificial Sequence
  GFR-binding peptide
  MOD_RES (1)..(3)..(36): Xaa is C or S
XGXEAVSMGEYHYKLTPVGMDDKYLVSIPSLKTPVX

SEQ ID NO: 2450 - protein, 33 aa, Artificial Sequence
  GFR-binding peptide
  MOD_RES (32)..(32): Xaa is C or S
SRVVMNRHKRLIVNSSDDYYLVSTASLKTPAXT

SEQ ID NO: 2451 - protein, 41 aa, Artificial Sequence
  GFR-binding peptide
  MOD_RES (1)..(3)..(37)..(38): Xaa is C or S
  MOD_RES (15)..(16)..(17)..(18)..(19): Xaa is A or G
  MOD_RES (20)..(21)..(22)..(23): Xaa is A or G or is absent
XGXARVVMNRHKRLXXXXXXXXXYYLVSTASLQTPAXXPKP

SEQ ID NO: 2452 - protein, 35 aa, Artificial Sequence
  GFR-binding peptide
  MOD_RES (2)..(2): Xaa is C or S
  MOD_RES (14)..(15)..(16)..(17)..(18): Xaa is A or G
  MOD_RES (19)..(20)..(21)..(22): Xaa is A or G or is absent
GXARVVMNYHYKLXXXXXXXXXKYLVSIPSLQTPA

SEQ ID NO: 2453 - protein, 38 aa, Artificial Sequence
  GFR-binding peptide
  MOD_RES (33)..(34): Xaa is C or S
  MOD_RES (11)..(12)..(13)..(14)..(15): Xaa is A or G
  MOD_RES (16)..(17)..(18)..(19): Xaa is A or G or is absent
EVVMDQYNKLXXXXXXXXXLYLMSIASLETPVXXAKPI

SEQ ID NO: 2454 - protein, 40 aa, Artificial Sequence
  GFR-binding peptide
  MOD_RES (2)..(4)..(36)..(37): Xaa is C or S
RXGXGEVVMDRYKKLVVKENEDFYLMSIANLETPVXXAKP

SEQ ID NO: 2455 - protein, 34 aa, Artificial Sequence
  GFR-binding peptide
  MOD_RES (1)..(3): Xaa is C or S
XGXSRVVMNRHKRLIVNSSDDYYLVSTASLKTPA

SEQ ID NO: 2456 - protein, 32 aa, Artificial Sequence
  GFR-binding peptide
  MOD_RES (31)..(32): Xaa is C or S
SKVIMQYNKLIKPTKGILYLISIASLDQSVXX

SEQ ID NO: 2457 - protein, 39 aa, Artificial Sequence
  GFR-binding peptide
  MOD_RES (1)..(3)..(35)..(36): Xaa is C or S
XGXAKVVMNRHKRLIVNNSSDYYLVSTASLKTPAXXAKP

SEQ ID NO: 2458 - protein, 33 aa, Artificial Sequence
  GFR-binding peptide
  MOD_RES (33)..(33): Xaa is C or S
  MOD_RES (11)..(12)..(13)..(14)..(15): Xaa is A or G
  MOD_RES (16)..(17)..(18)..(19): Xaa is A or G or is absent
EVVMERYKKLXXXXXXXXXFYLMSIANLETPVX

SEQ ID NO: 2459 - protein, 39 aa, Artificial Sequence
  GFR-binding peptide
  MOD_RES (33)..(34): Xaa is C or S
  MOD_RES (11)..(12)..(13)..(14)..(15): Xaa is A or G
  MOD_RES (16)..(17)..(18)..(19): Xaa is A or G or is absent
KVVMNYHYKLXXXXXXXXXKYLVSIPSLKTPAXXAKPVA

SEQ ID NO: 2460 - protein, 42 aa, Artificial Sequence
  GFR-binding peptide
  MOD_RES (1)..(38): Xaa is C or S
XALHDELTYHYKLFIPKKRVIEKYLVSIPSLQVQTPRXQVNR

SEQ ID NO: 2461 - protein, 35 aa, Artificial Sequence
  GFR-binding peptide
  MOD_RES (35)..(35): Xaa is C or S
  MOD_RES (13)..(14)..(15)..(16)..(17): Xaa is A or G
  MOD_RES (18)..(19)..(20)..(21): Xaa is A or G or is absent
EAVSMGERHKRLXXXXXXXXXYYLVSTASLKTPVX

SEQ ID NO: 2462 - protein, 38 aa, Artificial Sequence
  GFR-binding peptide
  MOD_RES (1)..(32)..(33): Xaa is C or S
XSRVIMQYNKLVKPKRGVLYLISIASLAQPVXXPAASA

SEQ ID NO: 2463 - protein, 36 aa, Artificial Sequence
  GFR-binding peptide
  MOD_RES (2)..(36): Xaa is C or S
  MOD_RES (14)..(15)..(16)..(17)..(18): Xaa is A or G
  MOD_RES (19)..(20)..(21)..(22): Xaa is A or G or is absent
GXSRVVMNRHKRLXXXXXXXXXYYLVSTASLKTPAX

SEQ ID NO: 2464 - protein, 33 aa, Artificial Sequence
  GFR-binding peptide
  MOD_RES (33)..(33): Xaa is C or S
  MOD_RES (11)..(12)..(13)..(14)..(15): Xaa is A or G
  MOD_RES (16)..(17)..(18)..(19): Xaa is A or G or is absent
SKVVMQYNKLXXXXXXXXXLYLISIASLDQPVX

SEQ ID NO: 2465 - protein, 35 aa, Artificial Sequence
  GFR-binding peptide
  MOD_RES (35)..(35): Xaa is C or S
  MOD_RES (13)..(14)..(15)..(16)..(17): Xaa is A or G
  MOD_RES (18)..(19)..(20)..(21): Xaa is A or G or is absent
EAVSMGEQYNKLXXXXXXXXXLYLVSIASLKTPVX

SEQ ID NO: 2466 - protein, 32 aa, Artificial Sequence
  GFR-binding peptide
  MOD_RES (1)..(32): Xaa is C or S
XSRVIMQYNKLVKPKRGVLYLISIASLAQPVX

SEQ ID NO: 2467 - protein, 41 aa, Artificial Sequence
  GFR-binding peptide
  MOD_RES (2)..(39): Xaa is C or S
  MOD_RES (15)..(16)..(17)..(18)..(19): Xaa is A or G
  MOD_RES (20)..(21)..(22)..(23): Xaa is A or G or is absent
KXALHDELTYHYKLXXXXXXXXXKYLVSIPSLQVQTPRXQV

SEQ ID NO: 2468 - protein, 39 aa, Artificial Sequence
  GFR-binding peptide
  MOD_RES (33)..(34): Xaa is C or S
  MOD_RES (11)..(12)..(13)..(14)..(15): Xaa is A or G
  MOD_RES (16)..(17)..(18)..(19): Xaa is A or G or is absent
RVVMNYHYKLXXXXXXXXXKYLVSIPSLQTPAXXPKPVT

SEQ ID NO: 2469 - protein, 40 aa, Artificial Sequence
  GFR-binding peptide
  MOD_RES (1)..(3)..(38)..(39): Xaa is C or S
  MOD_RES (16)..(17)..(18)..(19)..(20): Xaa is A or G
  MOD_RES (21)..(22)..(23)..(24): Xaa is A or G or is absent
XGXEAVSMGERHKRLXXXXXXXXXYYLVSTASLKTPVXXA

SEQ ID NO: 2470 - protein, 32 aa, Artificial Sequence
  GFR-binding peptide
  MOD_RES (11)..(12)..(13)..(14)..(15): Xaa is A or G
  MOD_RES (16)..(17)..(18)..(19): Xaa is A or G or is absent
RVVMNRYKKLXXXXXXXXXFYLVSIANLQTPA

SEQ ID NO: 2471 - protein, 35 aa, Artificial Sequence
  GFR-binding peptide
  MOD_RES (34)..(35): Xaa is C or S
  MOD_RES (12)..(13)..(14)..(15)..(16): Xaa is A or G
  MOD_RES (17)..(18)..(19)..(20): Xaa is A or G or is absent
AKVVMNQYNKLXXXXXXXXXLYLVSIASLKTPAXX

SEQ ID NO: 2472 - protein, 37 aa, Artificial Sequence
  GFR-binding peptide
  MOD_RES (32)..(33): Xaa is C or S
SRVVMNYHYKLIVNSSDDKYLVSIPSLKTPAXXPKPV

SEQ ID NO: 2473 - protein, 43 aa, Artificial Sequence
  GFR-binding peptide
  MOD_RES (2)..(4)..(39)..(40): Xaa is C or S
  MOD_RES (17)..(18)..(19)..(20)..(21): Xaa is A or G
  MOD_RES (22)..(23)..(24)..(25): Xaa is A or G or is absent
RXGXEAVSMGERYKKLXXXXXXXXXFYLVSIANLKTPVXXAKG

SEQ ID NO: 2474 - protein, 31 aa, Artificial Sequence
  GFR-binding peptide
  MOD_RES (1)..(1): Xaa is C or S
XSKVVMQYNKLVKPTRGVLYLISIASLDQPV

SEQ ID NO: 2475 - protein, 40 aa, Artificial Sequence
  GFR-binding peptide
  MOD_RES (1)..(3)..(34)..(35): Xaa is C or S
XKXSRVIMYHYKLVKPKRGVKYLISIPSLAQPVXXPAASA

SEQ ID NO: 2476 - protein, 39 aa, Artificial Sequence
  GFR-binding peptide
  MOD_RES (2)..(36)..(37): Xaa is C or S
  MOD_RES (14)..(15)..(16)..(17)..(18): Xaa is A or G
  MOD_RES (19)..(20)..(21)..(22): Xaa is A or G or is absent
GXARVVMNRYKKLXXXXXXXXXFYLVSIANLQTPAXXPK

SEQ ID NO: 2477 - protein, 38 aa, Artificial Sequence
  GFR-binding peptide
  MOD_RES (2)..(4): Xaa is C or S
  MOD_RES (17)..(18)..(19)..(20)..(21): Xaa is A or G
  MOD_RES (22)..(23)..(24)..(25): Xaa is A or G or is absent
RXGXEAVSMGERYKKLXXXXXXXXXFYLVSIANLKTPV

SEQ ID NO: 2478 - protein, 35 aa, Artificial Sequence
  GFR-binding peptide
  MOD_RES (31)..(32): Xaa is C or S
EVVMEYHYKLVVKDYEDKYLMSIPSLETPVXXAKP

SEQ ID NO: 2479 - protein, 40 aa, Artificial Sequence
  GFR-binding peptide
  MOD_RES (2)..(34)..(35): Xaa is C or S
GXGEVVMDQYNKLVVKENEDLYLMSIASLETPVXXAKPIK

SEQ ID NO: 2480 - protein, 36 aa, Artificial Sequence
  GFR-binding peptide
  MOD_RES (33)..(34): Xaa is C or S
  MOD_RES (11)..(12)..(13)..(14)..(15): Xaa is A or G
  MOD_RES (16)..(17)..(18)..(19): Xaa is A or G or is absent
EVVMEYHYKLXXXXXXXXXKYLMSIPSLETPVXXAK

SEQ ID NO: 2481 - protein, 37 aa, Artificial Sequence
  GFR-binding peptide
  MOD_RES (1)..(3)..(35)..(36): Xaa is C or S
XGXARVVMNYHYKLIVNSSDDKYLVSIPSLQTPAXXP

SEQ ID NO: 2482 - protein, 35 aa, Artificial Sequence
  GFR-binding peptide
  MOD_RES (1)..(1): Xaa is C or S
  MOD_RES (14)..(15)..(16)..(17)..(18): Xaa is A or G
  MOD_RES (19)..(20)..(21)..(22): Xaa is A or G or is absent
XEAVSMGERYKKLXXXXXXXXXFYLVSIANLKTPV

SEQ ID NO: 2483 - protein, 41 aa, Artificial Sequence
  GFR-binding peptide
  MOD_RES (2)..(4)..(36)..(37): Xaa is C or S
HXGXSRVVMNRYKKLIVNSSDDFYLVSIANLKTPAXXPKPV

SEQ ID NO: 2484 - protein, 40 aa, Artificial Sequence
  GFR-binding peptide
  MOD_RES (2)..(4)..(37)..(38): Xaa is C or S
  MOD_RES (15)..(16)..(17)..(18)..(19): Xaa is A or G
  MOD_RES (20)..(21)..(22)..(23): Xaa is A or G or is absent
SXKXSRVIMQYNKLXXXXXXXXXLYLISIASLAQPVXXPA

SEQ ID NO: 2485 - protein, 38 aa, Artificial Sequence
  GFR-binding peptide
  MOD_RES (32)..(33): Xaa is C or S
SRVVMNQYNKLIVNSSDDLYLVSIASLKTPAXXPKPVY

SEQ ID NO: 2486 - protein, 33 aa, Artificial Sequence
  GFR-binding peptide
  MOD_RES (1)..(33): Xaa is C or S
XSRVVMNRYKKLIVNSSDDFYLVSIANLKTPAX

SEQ ID NO: 2487 - protein, 39 aa, Artificial Sequence
  GFR-binding peptide
  MOD_RES (2)..(4)..(35)..(36): Xaa is C or S
SXKXSKVVMRYKKLVKPTRGVFYLISIANLDQPVXXPSA

SEQ ID NO: 2488 - protein, 37 aa, Artificial Sequence
  GFR-binding peptide
  MOD_RES (34)..(34): Xaa is C or S
  MOD_RES (12)..(13)..(14)..(15)..(16): Xaa is A or G
  MOD_RES (17)..(18)..(19)..(20): Xaa is A or G or is absent
SRVVMNRYKKLXXXXXXXXXFYLVSIANLKTPAXTPK

SEQ ID NO: 2489 - protein, 39 aa, Artificial Sequence
  GFR-binding peptide
  MOD_RES (34)..(35): Xaa is C or S
  MOD_RES (12)..(13)..(14)..(15)..(16): Xaa is A or G
  MOD_RES (17)..(18)..(19)..(20): Xaa is A or G or is absent
GEVVMERYKKLXXXXXXXXXFYLMSIANLETPVXXAKPI

SEQ ID NO: 2490 - protein, 35 aa, Artificial Sequence
  GFR-binding peptide
  MOD_RES (1)..(3): Xaa is C or S
  MOD_RES (14)..(15)..(16)..(17)..(18): Xaa is A or G
  MOD_RES (19)..(20)..(21)..(22): Xaa is A or G or is absent
XKXSKVIMQYNKLXXXXXXXXXLYLISIASLDQSV

SEQ ID NO: 2491 - protein, 40 aa, Artificial Sequence
  GFR-binding peptide
  MOD_RES (2)..(4)..(35)..(36): Xaa is C or S
SXKXSKVVMYHYKLVKPTRGVKYLISIPSLDQPVXXPSAS

SEQ ID NO: 2492 - protein, 43 aa, Artificial Sequence
  GFR-binding peptide
  MOD_RES (2)..(4)..(38)..(39): Xaa is C or S
  MOD_RES (16)..(17)..(18)..(19)..(20): Xaa is A or G
  MOD_RES (21)..(22)..(23)..(24): Xaa is A or G or is absent
RXGXGEVVMERHKRLXXXXXXXXXYYLMSTASLETPVXXAKPI

SEQ ID NO: 2493 - protein, 40 aa, Artificial Sequence
  GFR-binding peptide
  MOD_RES (2)..(34): Xaa is C or S
GXSRVVMNQYNKLIVNSSDDLYLVSIASLKTPAXTPKTVH

SEQ ID NO: 2494 - protein, 33 aa, Artificial Sequence
  GFR-binding peptide
LHDELTQYNKLFIPKKRVIELYLVSIASLQVQT

SEQ ID NO: 2495 - protein, 34 aa, Artificial Sequence
  GFR-binding peptide
  MOD_RES (1)..(32)..(33): Xaa is C or S
XSRVIMRHKRLVKPKRGVYYLISTASLAQPVXXP

SEQ ID NO: 2496 - protein, 38 aa, Artificial Sequence
  GFR-binding peptide
  MOD_RES (34)..(35): Xaa is C or S
  MOD_RES (12)..(13)..(14)..(15)..(16): Xaa is A or G
  MOD_RES (17)..(18)..(19)..(20): Xaa is A or G or is absent
GEVVMEYHYKLXXXXXXXXXKYLMSIPSLETPVXXAKP

SEQ ID NO: 2497 - protein, 38 aa, Artificial Sequence
  GFR-binding peptide
  MOD_RES (2)..(34)..(35): Xaa is C or S
GXGEVVMDYHYKLVVKENEDKYLMSIPSLETPVXXAKP

SEQ ID NO: 2498 - protein, 34 aa, Artificial Sequence
  GFR-binding peptide
  MOD_RES (1)..(3): Xaa is C or S
XGXSRVVMNQYNKLIVNSSDDLYLVSIASLKTPA

SEQ ID NO: 2499 - protein, 33 aa, Artificial Sequence
  GFR-binding peptide
HDELTYHYKLFIPKKRVIEKYLVSIPSLQVQTP

SEQ ID NO: 2500 - protein, 38 aa, Artificial Sequence
  GFR-binding peptide
  MOD_RES (2)..(4)..(35)..(36): Xaa is C or S
SXKXSKVVMQYNKLVKPTRGVLYLISIASLDQPVXXPS

SEQ ID NO: 2501 - protein, 37 aa, Artificial Sequence
  GFR-binding peptide
  MOD_RES (33)..(34): Xaa is C or S
  MOD_RES (11)..(12)..(13)..(14)..(15): Xaa is A or G
  MOD_RES (16)..(17)..(18)..(19): Xaa is A or G or is absent
EVVMDRHKRLXXXXXXXXXYYLMSTASLETPVXXAKP

SEQ ID NO: 2502 - protein, 34 aa, Artificial Sequence
  GFR-binding peptide
  MOD_RES (2)..(4): Xaa is C or S
SXKXSKVIMYHYKLIKPTKGIKYLISIPSLDQSV

SEQ ID NO: 2503 - protein, 34 aa, Artificial Sequence
  GFR-binding peptide
  MOD_RES (34)..(34): Xaa is C or S
  MOD_RES (12)..(13)..(14)..(15)..(16): Xaa is A or G
  MOD_RES (17)..(18)..(19)..(20): Xaa is A or G or is absent
ARVVMNRHKRLXXXXXXXXXYYLVSTASLQTPAX

SEQ ID NO: 2504 - protein, 38 aa, Artificial Sequence
  GFR-binding peptide
  MOD_RES (2)..(4)..(38): Xaa is C or S
  MOD_RES (16)..(17)..(18)..(19)..(20): Xaa is A or G
  MOD_RES (21)..(22)..(23)..(24): Xaa is A or G or is absent
HXGXARVVMNYHYKLXXXXXXXXXKYLVSIPSLQTPAX

SEQ ID NO: 2505 - protein, 38 aa, Artificial Sequence
  GFR-binding peptide
  MOD_RES (2)..(35)..(36): Xaa is C or S
  MOD_RES (13)..(14)..(15)..(16)..(17): Xaa is A or G
  MOD_RES (18)..(19)..(20)..(21): Xaa is A or G or is absent
KXSKVIMYHYKLXXXXXXXXXKYLISIPSLDQSVXXPS

SEQ ID NO: 2506 - protein, 32 aa, Artificial Sequence
  GFR-binding peptide
  MOD_RES (31)..(31): Xaa is C or S
RVVMNYHYKLIVNSSDDKYLVSIPSLKTPAXT

SEQ ID NO: 2507 - protein, 43 aa, Artificial Sequence
  GFR-binding peptide
  MOD_RES (2)..(39): Xaa is C or S
  MOD_RES (15)..(16)..(17)..(18)..(19): Xaa is A or G
  MOD_RES (20)..(21)..(22)..(23): Xaa is A or G or is absent
KXALHDELTYHYKLXXXXXXXXXKYLVSIPSLQVQTPRXQVNR

SEQ ID NO: 2508 - protein, 35 aa, Artificial Sequence
  GFR-binding peptide
  MOD_RES (33)..(33): Xaa is C or S
  MOD_RES (11)..(12)..(13)..(14)..(15): Xaa is A or G
  MOD_RES (16)..(17)..(18)..(19): Xaa is A or G or is absent
RVVMNYHYKLXXXXXXXXXKYLVSIPSLKTPAXTP

SEQ ID NO: 2509 - protein, 39 aa, Artificial Sequence
  GFR-binding peptide
  MOD_RES (1)..(3): Xaa is C or S
  MOD_RES (16)..(17)..(18)..(19)..(20): Xaa is A or G
  MOD_RES (21)..(22)..(23)..(24): Xaa is A or G or is absent
XKXALHDELTRYKKLXXXXXXXXXFYLVSIANLQVQTPR

SEQ ID NO: 2510 - protein, 36 aa, Artificial Sequence
  GFR-binding peptide
  MOD_RES (2)..(36): Xaa is C or S
  MOD_RES (14)..(15)..(16)..(17)..(18): Xaa is A or G
  MOD_RES (19)..(20)..(21)..(22): Xaa is A or G or is absent
GXAKVVMNQYNKLXXXXXXXXXLYLVSIASLKTPAX

SEQ ID NO: 2511 - protein, 38 aa, Artificial Sequence
  GFR-binding peptide
  MOD_RES (2)..(35)..(36): Xaa is C or S
GXEAVSMGEQYNKLTPVGMDDLYLVSIASLKTPVXXAK

SEQ ID NO: 2512 - protein, 39 aa, Artificial Sequence
  GFR-binding peptide
  MOD_RES (1)..(33)..(34): Xaa is C or S
XARVVMNYHYKLIVNSSDDKYLVSIPSLQTPAXXPKPVT

SEQ ID NO: 2513 - protein, 38 aa, Artificial Sequence
  GFR-binding peptide
  MOD_RES (1)..(3)..(35)..(36): Xaa is C or S
XGXGEVVMEYHYKLVVKDYEDKYLMSIPSLETPVXXAK

SEQ ID NO: 2514 - protein, 39 aa, Artificial Sequence
  GFR-binding peptide
  MOD_RES (35)..(36): Xaa is C or S
  MOD_RES (13)..(14)..(15)..(16)..(17): Xaa is A or G
  MOD_RES (18)..(19)..(20)..(21): Xaa is A or G or is absent
EAVSMGERYKKLXXXXXXXXXFYLVSIANLKTPVXXAKG

SEQ ID NO: 2515 - protein, 33 aa, Artificial Sequence
  GFR-binding peptide
  MOD_RES (32)..(32): Xaa is C or S
SRVVMNQYNKLIVNSSDDLYLVSIASLKTPAXT

SEQ ID NO: 2516 - protein, 39 aa, Artificial Sequence
  GFR-binding peptide
  MOD_RES (1)..(34)..(35): Xaa is C or S
XEAVSMGEYHYKLTPVGMDDKYLVSIPSLKTPVXXAKGV

SEQ ID NO: 2517 - protein, 42 aa, Artificial Sequence
  GFR-binding peptide
  MOD_RES (1)..(3)..(37): Xaa is C or S
  MOD_RES (15)..(16)..(17)..(18)..(19): Xaa is A or G
  MOD_RES (20)..(21)..(22)..(23): Xaa is A or G or is absent
XGXSRVVMNYHYKLXXXXXXXXXKYLVSIPSLKTPAXTPKTV

SEQ ID NO: 2518 - protein, 37 aa, Artificial Sequence
  GFR-binding peptide
  MOD_RES (33)..(34): Xaa is C or S
  MOD_RES (11)..(12)..(13)..(14)..(15): Xaa is A or G
  MOD_RES (16)..(17)..(18)..(19): Xaa is A or G or is absent
EVVMEQYNKLXXXXXXXXXLYLMSIASLETPVXXAKP

SEQ ID NO: 2519 - protein, 38 aa, Artificial Sequence
  GFR-binding peptide
  MOD_RES (34)..(35): Xaa is C or S
  MOD_RES (12)..(13)..(14)..(15)..(16): Xaa is A or G
  MOD_RES (17)..(18)..(19)..(20): Xaa is A or G or is absent
GEVVMERHKRLXXXXXXXXXYYLMSTASLETPVXXAKP

SEQ ID NO: 2520 - protein, 32 aa, Artificial Sequence
  GFR-binding peptide
  MOD_RES (2)..(2): Xaa is C or S
KXSRVIMRHKRLVKPKRGVYYLISTASLAQPV

SEQ ID NO: 2521 - protein, 34 aa, Artificial Sequence
  GFR-binding peptide
  MOD_RES (34)..(34): Xaa is C or S
  MOD_RES (12)..(13)..(14)..(15)..(16): Xaa is A or G
  MOD_RES (17)..(18)..(19)..(20): Xaa is A or G or is absent
ARVVMNYHYKLXXXXXXXXXKYLVSIPSLQTPAX

SEQ ID NO: 2522 - protein, 34 aa, Artificial Sequence
  GFR-binding peptide
  MOD_RES (34)..(34): Xaa is C or S
  MOD_RES (12)..(13)..(14)..(15)..(16): Xaa is A or G
  MOD_RES (17)..(18)..(19)..(20): Xaa is A or G or is absent
AKVVMNQYNKLXXXXXXXXXLYLVSIASLKTPAX

SEQ ID NO: 2523 - protein, 36 aa, Artificial Sequence
  GFR-binding peptide
  MOD_RES (2)..(36): Xaa is C or S
  MOD_RES (14)..(15)..(16)..(17)..(18): Xaa is A or G
  MOD_RES (19)..(20)..(21)..(22): Xaa is A or G or is absent
GXGEVVMDRHKRLXXXXXXXXXYYLMSTASLETPVX

SEQ ID NO: 2524 - protein, 44 aa, Artificial Sequence
  GFR-binding peptide
  MOD_RES (1)..(3)..(40): Xaa is C or S
  MOD_RES (16)..(17)..(18)..(19)..(20): Xaa is A or G
  MOD_RES (21)..(22)..(23)..(24): Xaa is A or G or is absent
XKXALHDELTYHYKLXXXXXXXXXKYLVSIPSLQVQTPRXQVNR

SEQ ID NO: 2525 - protein, 39 aa, Artificial Sequence
  GFR-binding peptide
  MOD_RES (1)..(3)..(34)..(35): Xaa is C or S
XKXSKVIMQYNKLIKPTKGILYLISIASLDQSVXXPSAS

SEQ ID NO: 2526 - protein, 37 aa, Artificial Sequence
  GFR-binding peptide
  MOD_RES (2)..(36): Xaa is C or S
  MOD_RES (14)..(15)..(16)..(17)..(18): Xaa is A or G
  MOD_RES (19)..(20)..(21)..(22): Xaa is A or G or is absent
GXSRVVMNQYNKLXXXXXXXXXLYLVSIASLKTPAXT

SEQ ID NO: 2527 - protein, 33 aa, Artificial Sequence
  GFR-binding peptide
HDELTRYKKLFIPKKRVIEFYLVSIANLQVQTP

SEQ ID NO: 2528 - protein, 35 aa, Artificial Sequence
  GFR-binding peptide
  MOD_RES (2)..(34): Xaa is C or S
GXSRVVMNRHKRLIVNSSDDYYLVSTASLKTPAXT

SEQ ID NO: 2529 - protein, 36 aa, Artificial Sequence
  GFR-binding peptide
  MOD_RES (1)..(33)..(34): Xaa is C or S
XARVVMNYHYKLIVNSSDDKYLVSIPSLQTPAXXPK

SEQ ID NO: 2530 - protein, 39 aa, Artificial Sequence
  GFR-binding peptide
  MOD_RES (1)..(38): Xaa is C or S
  MOD_RES (14)..(15)..(16)..(17)..(18): Xaa is A or G
  MOD_RES (19)..(20)..(21)..(22): Xaa is A or G or is absent
XALHDELTRYKKLXXXXXXXXXFYLVSIANLQVQTPRXQ

SEQ ID NO: 2531 - protein, 39 aa, Artificial Sequence
  GFR-binding peptide
  MOD_RES (2)..(4)..(38): Xaa is C or S
  MOD_RES (16)..(17)..(18)..(19)..(20): Xaa is A or G
  MOD_RES (21)..(22)..(23)..(24): Xaa is A or G or is absent
HXGXSRVVMNQYNKLXXXXXXXXXLYLVSIASLKTPAXT

SEQ ID NO: 2532 - protein, 36 aa, Artificial Sequence
  GFR-binding peptide
  MOD_RES (34)..(35): Xaa is C or S
  MOD_RES (12)..(13)..(14)..(15)..(16): Xaa is A or G
  MOD_RES (17)..(18)..(19)..(20): Xaa is A or G or is absent
SRVVMNYHYKLXXXXXXXXXKYLVSIPSLKTPAXXP

SEQ ID NO: 2533 - protein, 34 aa, Artificial Sequence
  GFR-binding peptide
  MOD_RES (32)..(33): Xaa is C or S
GEVVMERHKRLVVKDYEDYYLMSTASLETPVXXA

SEQ ID NO: 2534 - protein, 38 aa, Artificial Sequence
  GFR-binding peptide
  MOD_RES (2)..(2): Xaa is C or S
  MOD_RES (15)..(16)..(17)..(18)..(19): Xaa is A or G
  MOD_RES (20)..(21)..(22)..(23): Xaa is A or G or is absent
KXALHDELTQYNKLXXXXXXXXXLYLVSIASLQVQTPR

SEQ ID NO: 2535 - protein, 38 aa, Artificial Sequence
  GFR-binding peptide
  MOD_RES (1)..(34)..(35): Xaa is C or S
  MOD_RES (12)..(13)..(14)..(15)..(16): Xaa is A or G
  MOD_RES (17)..(18)..(19)..(20): Xaa is A or G or is absent
XSKVIMQYNKLXXXXXXXXXLYLISIASLDQSVXXPSA

SEQ ID NO: 2536 - protein, 39 aa, Artificial Sequence
  GFR-binding peptide
  MOD_RES (35)..(35): Xaa is C or S
HDELTYHYKLFIPKKRVIEKYLVSIPSLQVQTPRXQVNR

SEQ ID NO: 2537 - protein, 33 aa, Artificial Sequence
  GFR-binding peptide
  MOD_RES (2)..(2): Xaa is C or S
GXAKVVMNRYKKLIVNNSSDFYLVSIANLKTPA

SEQ ID NO: 2538 - protein, 36 aa, Artificial Sequence
  GFR-binding peptide
  MOD_RES (1)..(3)..(35)..(36): Xaa is C or S
XGXAKVVMNRYKKLIVNNSSDFYLVSIANLKTPAXX

SEQ ID NO: 2539 - protein, 37 aa, Artificial Sequence
  GFR-binding peptide
  MOD_RES (2)..(33)..(34): Xaa is C or S
KXSKVIMRYKKLIKPTKGIFYLISIANLDQSVXXPSA

SEQ ID NO: 2540 - protein, 43 aa, Artificial Sequence
  GFR-binding peptide
  MOD_RES (1)..(3)..(37)..(38): Xaa is C or S
  MOD_RES (15)..(16)..(17)..(18)..(19): Xaa is A or G
  MOD_RES (20)..(21)..(22)..(23): Xaa is A or G or is absent
XGXAKVVMNQYNKLXXXXXXXXXLYLVSIASLKTPAXXAKPVA

SEQ ID NO: 2541 - protein, 40 aa, Artificial Sequence
  GFR-binding peptide
  MOD_RES (34)..(35): Xaa is C or S
  MOD_RES (12)..(13)..(14)..(15)..(16): Xaa is A or G
  MOD_RES (17)..(18)..(19)..(20): Xaa is A or G or is absent
GEVVMEQYNKLXXXXXXXXXLYLMSIASLETPVXXAKPIS

SEQ ID NO: 2542 - protein, 40 aa, Artificial Sequence
  GFR-binding peptide
  MOD_RES (1)..(3)..(35)..(36): Xaa is C or S
XGXGEVVMDQYNKLVVKENEDLYLMSIASLETPVXXAKPI

SEQ ID NO: 2543 - protein, 41 aa, Artificial Sequence
  GFR-binding peptide
  MOD_RES (1)..(3)..(37)..(38): Xaa is C or S
  MOD_RES (15)..(16)..(17)..(18)..(19): Xaa is A or G
  MOD_RES (20)..(21)..(22)..(23): Xaa is A or G or is absent
XGXAKVVMNRYKKLXXXXXXXXXFYLVSIANLKTPAXXAKP

SEQ ID NO: 2544 - protein, 41 aa, Artificial Sequence
  GFR-binding peptide
  MOD_RES (2)..(4)..(36)..(37): Xaa is C or S
RXGXGEVVMDRYKKLVVKENEDFYLMSIANLETPVXXAKPI

SEQ ID NO: 2545 - protein, 41 aa, Artificial Sequence
  GFR-binding peptide
  MOD_RES (2)..(4)..(38)..(39): Xaa is C or S
  MOD_RES (16)..(17)..(18)..(19)..(20): Xaa is A or G
  MOD_RES (21)..(22)..(23)..(24): Xaa is A or G or is absent
HXGXAKVVMNQYNKLXXXXXXXXXLYLVSIASLKTPAXXAK

SEQ ID NO: 2546 - protein, 38 aa, Artificial Sequence
  GFR-binding peptide
  MOD_RES (1)..(35)..(36): Xaa is C or S
  MOD_RES (13)..(14)..(15)..(16)..(17): Xaa is A or G
  MOD_RES (18)..(19)..(20)..(21): Xaa is A or G or is absent
XAKVVMNRHKRLXXXXXXXXXYYLVSTASLKTPAXXAK

SEQ ID NO: 2547 - protein, 35 aa, Artificial Sequence
  GFR-binding peptide
  MOD_RES (2)..(34)..(35): Xaa is C or S
GXGEVVMDRHKRLVVKENEDYYLMSTASLETPVXX

SEQ ID NO: 2548 - protein, 35 aa, Artificial Sequence
  GFR-binding peptide
  MOD_RES (32)..(33): Xaa is C or S
ARVVMNRHKRLIVNSSDDYYLVSTASLQTPAXXPK

SEQ ID NO: 2549 - protein, 38 aa, Artificial Sequence
  GFR-binding peptide
  MOD_RES (2)..(35)..(36): Xaa is C or S
  MOD_RES (13)..(14)..(15)..(16)..(17): Xaa is A or G
  MOD_RES (18)..(19)..(20)..(21): Xaa is A or G or is absent
KXSKVVMQYNKLXXXXXXXXXLYLISIASLDQPVXXPS

SEQ ID NO: 2550 - protein, 34 aa, Artificial Sequence
  GFR-binding peptide
  MOD_RES (1)..(33): Xaa is C or S
XSRVVMNQYNKLIVNSSDDLYLVSIASLKTPAXT

SEQ ID NO: 2551 - protein, 41 aa, Artificial Sequence
  GFR-binding peptide
  MOD_RES (2)..(4)..(38)..(39): Xaa is C or S
  MOD_RES (16)..(17)..(18)..(19)..(20): Xaa is A or G
  MOD_RES (21)..(22)..(23)..(24): Xaa is A or G or is absent
RXGXGEVVMERYKKLXXXXXXXXXFYLMSIANLETPVXXAK

SEQ ID NO: 2552 - protein, 35 aa, Artificial Sequence
  GFR-binding peptide
  MOD_RES (2)..(34)..(35): Xaa is C or S
GXSRVVMNYHYKLIVNSSDDKYLVSIPSLKTPAXX

SEQ ID NO: 2553 - protein, 37 aa, Artificial Sequence
  GFR-binding peptide
  MOD_RES (2)..(4)..(37): Xaa is C or S
RXGXEAVSMGEYHYKLTPVGMDDKYLVSIPSLKTPVX

SEQ ID NO: 2554 - protein, 36 aa, Artificial Sequence
  GFR-binding peptide
  MOD_RES (32)..(33): Xaa is C or S
GEVVMERYKKLVVKDYEDFYLMSIANLETPVXXAKP

SEQ ID NO: 2555 - protein, 33 aa, Artificial Sequence
  GFR-binding peptide
  MOD_RES (31)..(32): Xaa is C or S
RVVMNYHYKLIVNSSDDKYLVSIPSLQTPAXXP

SEQ ID NO: 2556 - protein, 35 aa, Artificial Sequence
  GFR-binding peptide
  MOD_RES (1)..(3): Xaa is C or S
  MOD_RES (14)..(15)..(16)..(17)..(18): Xaa is A or G
  MOD_RES (19)..(20)..(21)..(22): Xaa is A or G or is absent
XKXSRVIMYHYKLXXXXXXXXXKYLISIPSLAQPV

SEQ ID NO: 2557 - protein, 37 aa, Artificial Sequence
  GFR-binding peptide
  MOD_RES (2)..(4): Xaa is C or S
  MOD_RES (16)..(17)..(18)..(19)..(20): Xaa is A or G
  MOD_RES (21)..(22)..(23)..(24): Xaa is A or G or is absent
HXGXSRVVMNQYNKLXXXXXXXXXLYLVSIASLKTPA

SEQ ID NO: 2558 - protein, 34 aa, Artificial Sequence
  GFR-binding peptide
  MOD_RES (2)..(4): Xaa is C or S
SXKXSRVIMRYKKLVKPKRGVFYLISIANLAQPV

SEQ ID NO: 2559 - protein, 38 aa, Artificial Sequence
  GFR-binding peptide
  MOD_RES (33)..(34): Xaa is C or S
EAVSMGEQYNKLTPVGMDDLYLVSIASLKTPVXXAKGV

SEQ ID NO: 2560 - protein, 36 aa, Artificial Sequence
  GFR-binding peptide
  MOD_RES (1)..(3)..(36): Xaa is C or S
  MOD_RES (14)..(15)..(16)..(17)..(18): Xaa is A or G
  MOD_RES (19)..(20)..(21)..(22): Xaa is A or G or is absent
XKXSKVIMRHKRLXXXXXXXXXYYLISTASLDQSVX

SEQ ID NO: 2561 - protein, 38 aa, Artificial Sequence
  GFR-binding peptide
  MOD_RES (1)..(3)..(35)..(36): Xaa is C or S
XGXAKVVMNYHYKLIVNNSSDKYLVSIPSLKTPAXXAK

SEQ ID NO: 2562 - protein, 36 aa, Artificial Sequence
  GFR-binding peptide
  MOD_RES (2)..(4)..(36): Xaa is C or S
RXGXGEVVMERHKRLVVKDYEDYYLMSTASLETPVX

SEQ ID NO: 2563 - protein, 40 aa, Artificial Sequence
  GFR-binding peptide
  MOD_RES (1)..(3)..(35)..(36): Xaa is C or S
XGXARVVMNRYKKLIVNSSDDFYLVSIANLQTPAXXPKPV

SEQ ID NO: 2564 - protein, 38 aa, Artificial Sequence
  GFR-binding peptide
  MOD_RES (1)..(34)..(35): Xaa is C or S
XEAVSMGEYHYKLTPVGMDDKYLVSIPSLKTPVXXAKG

SEQ ID NO: 2565 - protein, 40 aa, Artificial Sequence
  GFR-binding peptide
  MOD_RES (1)..(3)..(35)..(36): Xaa is C or S
XGXGEVVMDYHYKLVVKENEDKYLMSIPSLETPVXXAKPI

SEQ ID NO: 2566 - protein, 36 aa, Artificial Sequence
  GFR-binding peptide
  MOD_RES (1)..(3)..(36): Xaa is C or S
  MOD_RES (14)..(15)..(16)..(17)..(18): Xaa is A or G
  MOD_RES (19)..(20)..(21)..(22): Xaa is A or G or is absent
XKXSRVIMYHYKLXXXXXXXXXKYLISIPSLAQPVX

SEQ ID NO: 2567 - protein, 34 aa, Artificial Sequence
  GFR-binding peptide
  MOD_RES (32)..(33): Xaa is C or S
ARVVMNYHYKLIVNSSDDKYLVSIPSLQTPAXXP

SEQ ID NO: 2568 - protein, 39 aa, Artificial Sequence
  GFR-binding peptide
  MOD_RES (2)..(35)..(36): Xaa is C or S
GXEAVSMGERHKRLTPVGMDDYYLVSTASLKTPVXXAKG

SEQ ID NO: 2569 - protein, 35 aa, Artificial Sequence
  GFR-binding peptide
  MOD_RES (1)..(33)..(34): Xaa is C or S
XGEVVMERYKKLVVKDYEDFYLMSIANLETPVXXA

SEQ ID NO: 2570 - protein, 34 aa, Artificial Sequence
  GFR-binding peptide
  MOD_RES (2)..(2): Xaa is C or S
  MOD_RES (13)..(14)..(15)..(16)..(17): Xaa is A or G
  MOD_RES (18)..(19)..(20)..(21): Xaa is A or G or is absent
KXSKVVMRHKRLXXXXXXXXXYYLISTASLDQPV

SEQ ID NO: 2571 - protein, 39 aa, Artificial Sequence
  GFR-binding peptide
  MOD_RES (33)..(34): Xaa is C or S
  MOD_RES (11)..(12)..(13)..(14)..(15): Xaa is A or G
  MOD_RES (16)..(17)..(18)..(19): Xaa is A or G or is absent
RVVMNRHKRLXXXXXXXXXYYLVSTASLQTPAXXPKPVT

SEQ ID NO: 2572 - protein, 35 aa, Artificial Sequence
  GFR-binding peptide
  MOD_RES (31)..(31): Xaa is C or S
RVVMNRYKKLIVNSSDDFYLVSIANLKTPAXTPKT

SEQ ID NO: 2573 - protein, 39 aa, Artificial Sequence
  GFR-binding peptide
  MOD_RES (1)..(3)..(34)..(35): Xaa is C or S
XKXSKVVMQYNKLVKPTRGVLYLISIASLDQPVXXPSAS

SEQ ID NO: 2574 - protein, 35 aa, Artificial Sequence
  GFR-binding peptide
  MOD_RES (1)..(3): Xaa is C or S
  MOD_RES (14)..(15)..(16)..(17)..(18): Xaa is A or G
  MOD_RES (19)..(20)..(21)..(22): Xaa is A or G or is absent
XKXSKVIMRHKRLXXXXXXXXXYYLISTASLDQSV

SEQ ID NO: 2575 - protein, 42 aa, Artificial Sequence
  GFR-binding peptide
  MOD_RES (2)..(36)..(37): Xaa is C or S
  MOD_RES (14)..(15)..(16)..(17)..(18): Xaa is A or G
  MOD_RES (19)..(20)..(21)..(22): Xaa is A or G or is absent
GXAKVVMNRHKRLXXXXXXXXXYYLVSTASLKTPAXXAKPVA

SEQ ID NO: 2576 - protein, 39 aa, Artificial Sequence
  GFR-binding peptide
  MOD_RES (1)..(35)..(36): Xaa is C or S
  MOD_RES (13)..(14)..(15)..(16)..(17): Xaa is A or G
  MOD_RES (18)..(19)..(20)..(21): Xaa is A or G or is absent
XAKVVMNYHYKLXXXXXXXXXKYLVSIPSLKTPAXXAKP

SEQ ID NO: 2577 - protein, 36 aa, Artificial Sequence
  GFR-binding peptide
  MOD_RES (2)..(4): Xaa is C or S
  MOD_RES (15)..(16)..(17)..(18)..(19): Xaa is A or G
  MOD_RES (20)..(21)..(22)..(23): Xaa is A or G or is absent
SXKXSRVIMRHKRLXXXXXXXXXYYLISTASLAQPV

SEQ ID NO: 2578 - protein, 42 aa, Artificial Sequence
  GFR-binding peptide
  MOD_RES (2)..(4)..(38)..(39): Xaa is C or S
  MOD_RES (16)..(17)..(18)..(19)..(20): Xaa is A or G
  MOD_RES (21)..(22)..(23)..(24): Xaa is A or G or is absent
HXGXSRVVMNYHYKLXXXXXXXXXKYLVSIPSLKTPAXXPKP

SEQ ID NO: 2579 - protein, 38 aa, Artificial Sequence
  GFR-binding peptide
  MOD_RES (1)..(3)..(36)..(37): Xaa is C or S
  MOD_RES (14)..(15)..(16)..(17)..(18): Xaa is A or G
  MOD_RES (19)..(20)..(21)..(22): Xaa is A or G or is absent
XKXSRVIMRYKKLXXXXXXXXXFYLISIANLAQPVXXP

SEQ ID NO: 2580 - protein, 34 aa, Artificial Sequence
  GFR-binding peptide
LHDELTRYKKLFIPKKRVIEFYLVSIANLQVQTP

SEQ ID NO: 2581 - protein, 42 aa, Artificial Sequence
  GFR-binding peptide
  MOD_RES (1)..(3)..(37)..(38): Xaa is C or S
  MOD_RES (15)..(16)..(17)..(18)..(19): Xaa is A or G
  MOD_RES (20)..(21)..(22)..(23): Xaa is A or G or is absent
XGXGEVVMDYHYKLXXXXXXXXXKYLMSIPSLETPVXXAKPI

SEQ ID NO: 2582 - protein, 36 aa, Artificial Sequence
  GFR-binding peptide
  MOD_RES (1)..(3): Xaa is C or S
  MOD_RES (15)..(16)..(17)..(18)..(19): Xaa is A or G
  MOD_RES (20)..(21)..(22)..(23): Xaa is A or G or is absent
XGXAKVVMNRYKKLXXXXXXXXXFYLVSIANLKTPA

SEQ ID NO: 2583 - protein, 37 aa, Artificial Sequence
  GFR-binding peptide
  MOD_RES (35)..(35): Xaa is C or S
  MOD_RES (11)..(12)..(13)..(14)..(15): Xaa is A or G
  MOD_RES (16)..(17)..(18)..(19): Xaa is A or G or is absent
HDELTQYNKLXXXXXXXXXLYLVSIASLQVQTPRXQV

SEQ ID NO: 2584 - protein, 37 aa, Artificial Sequence
  GFR-binding peptide
  MOD_RES (1)..(3): Xaa is C or S
  MOD_RES (16)..(17)..(18)..(19)..(20): Xaa is A or G
  MOD_RES (21)..(22)..(23)..(24): Xaa is A or G or is absent
XKXALHDELTQYNKLXXXXXXXXXLYLVSIASLQVQT

SEQ ID NO: 2585 - protein, 36 aa, Artificial Sequence
  GFR-binding peptide
  MOD_RES (1)..(32)..(33): Xaa is C or S
XSKVIMQYNKLIKPTKGILYLISIASLDQSVXXPSA

SEQ ID NO: 2586 - protein, 38 aa, Artificial Sequence
  GFR-binding peptide
  MOD_RES (1)..(34)..(35): Xaa is C or S
  MOD_RES (12)..(13)..(14)..(15)..(16): Xaa is A or G
  MOD_RES (17)..(18)..(19)..(20): Xaa is A or G or is absent
XSKVIMRHKRLXXXXXXXXXYYLISTASLDQSVXXPSA

SEQ ID NO: 2587 - protein, 38 aa, Artificial Sequence
  GFR-binding peptide
  MOD_RES (2)..(4)..(35)..(36): Xaa is C or S
SXKXSKVIMYHYKLIKPTKGIKYLISIPSLDQSVXXPS

SEQ ID NO: 2588 - protein, 43 aa, Artificial Sequence
  GFR-binding peptide
  MOD_RES (2)..(39): Xaa is C or S
KXALHDELTRYKKLFIPKKRVIEFYLVSIANLQVQTPRXQVNR

SEQ ID NO: 2589 - protein, 37 aa, Artificial Sequence
  GFR-binding peptide
  MOD_RES (1)..(3)..(36)..(37): Xaa is C or S
  MOD_RES (14)..(15)..(16)..(17)..(18): Xaa is A or G
  MOD_RES (19)..(20)..(21)..(22): Xaa is A or G or is absent
XKXSKVIMQYNKLXXXXXXXXXLYLISIASLDQSVXX

SEQ ID NO: 2590 - protein, 33 aa, Artificial Sequence
  GFR-binding peptide
  MOD_RES (31)..(32): Xaa is C or S
RVVMNQYNKLIVNSSDDLYLVSIASLQTPAXXP

SEQ ID NO: 2591 - protein, 43 aa, Artificial Sequence
  GFR-binding peptide
  MOD_RES (2)..(4)..(39)..(40): Xaa is C or S
  MOD_RES (17)..(18)..(19)..(20)..(21): Xaa is A or G
  MOD_RES (22)..(23)..(24)..(25): Xaa is A or G or is absent
RXGXEAVSMGEYHYKLXXXXXXXXXKYLVSIPSLKTPVXXAKG

SEQ ID NO: 2592 - protein, 42 aa, Artificial Sequence
  GFR-binding peptide
  MOD_RES (2)..(4)..(36): Xaa is C or S
HXGXSRVVMNQYNKLIVNSSDDLYLVSIASLKTPAXTPKTVH

SEQ ID NO: 2593 - protein, 41 aa, Artificial Sequence
  GFR-binding peptide
  MOD_RES (2)..(36): Xaa is C or S
  MOD_RES (14)..(15)..(16)..(17)..(18): Xaa is A or G
  MOD_RES (19)..(20)..(21)..(22): Xaa is A or G or is absent
GXSRVVMNQYNKLXXXXXXXXXLYLVSIASLKTPAXTPKTV

SEQ ID NO: 2594 - protein, 36 aa, Artificial Sequence
  GFR-binding peptide
  MOD_RES (36)..(36): Xaa is C or S
LHDELTRHKRLFIPKKRVIEYYLVSTASLQVQTPRX

SEQ ID NO: 2595 - protein, 39 aa, Artificial Sequence
  GFR-binding peptide
  MOD_RES (1)..(38): Xaa is C or S
XALHDELTRYKKLFIPKKRVIEFYLVSIANLQVQTPRXQ

SEQ ID NO: 2596 - protein, 36 aa, Artificial Sequence
  GFR-binding peptide
  MOD_RES (1)..(35): Xaa is C or S
  MOD_RES (13)..(14)..(15)..(16)..(17): Xaa is A or G
  MOD_RES (18)..(19)..(20)..(21): Xaa is A or G or is absent
XSRVVMNRYKKLXXXXXXXXXFYLVSIANLKTPAXT

SEQ ID NO: 2597 - protein, 41 aa, Artificial Sequence
  GFR-binding peptide
  MOD_RES (2)..(36)..(37): Xaa is C or S
  MOD_RES (14)..(15)..(16)..(17)..(18): Xaa is A or G
  MOD_RES (19)..(20)..(21)..(22): Xaa is A or G or is absent
GXSRVVMNRYKKLXXXXXXXXXFYLVSIANLKTPAXXPKPV

SEQ ID NO: 2598 - protein, 34 aa, Artificial Sequence
  GFR-binding peptide
  MOD_RES (2)..(4): Xaa is C or S
SXKXSKVVMRHKRLVKPTRGVYYLISTASLDQPV

SEQ ID NO: 2599 - protein, 34 aa, Artificial Sequence
  GFR-binding peptide
  MOD_RES (1)..(33)..(34): Xaa is C or S
XARVVMNQYNKLIVNSSDDLYLVSIASLQTPAXX

SEQ ID NO: 2600 - protein, 36 aa, Artificial Sequence
  GFR-binding peptide
  MOD_RES (32)..(33): Xaa is C or S
SRVVMNRHKRLIVNSSDDYYLVSTASLKTPAXXPKP

SEQ ID NO: 2601 - protein, 35 aa, Artificial Sequence
  GFR-binding peptide
  MOD_RES (1)..(3): Xaa is C or S
XGXEAVSMGEYHYKLTPVGMDDKYLVSIPSLKTPV

SEQ ID NO: 2602 - protein, 36 aa, Artificial Sequence
  GFR-binding peptide
  MOD_RES (1)..(34)..(35): Xaa is C or S
  MOD_RES (12)..(13)..(14)..(15)..(16): Xaa is A or G
  MOD_RES (17)..(18)..(19)..(20): Xaa is A or G or is absent
XSKVVMRHKRLXXXXXXXXXYYLISTASLDQPVXXP

SEQ ID NO: 2603 - protein, 44 aa, Artificial Sequence
  GFR-binding peptide
  MOD_RES (2)..(4)..(38)..(39): Xaa is C or S
  MOD_RES (16)..(17)..(18)..(19)..(20): Xaa is A or G
  MOD_RES (21)..(22)..(23)..(24): Xaa is A or G or is absent
RXGXGEVVMEQYNKLXXXXXXXXXLYLMSIASLETPVXXAKPIS

SEQ ID NO: 2604 - protein, 32 aa, Artificial Sequence
  GFR-binding peptide
  MOD_RES (11)..(12)..(13)..(14)..(15): Xaa is A or G
  MOD_RES (16)..(17)..(18)..(19): Xaa is A or G or is absent
RVVMNRYKKLXXXXXXXXXFYLVSIANLKTPA

SEQ ID NO: 2605 - protein, 37 aa, Artificial Sequence
  GFR-binding peptide
  MOD_RES (1)..(3)..(35)..(36): Xaa is C or S
XGXSRVVMNRYKKLIVNSSDDFYLVSIANLKTPAXXP

SEQ ID NO: 2606 - protein, 39 aa, Artificial Sequence
  GFR-binding peptide
  MOD_RES (1)..(3)..(37): Xaa is C or S
  MOD_RES (15)..(16)..(17)..(18)..(19): Xaa is A or G
  MOD_RES (20)..(21)..(22)..(23): Xaa is A or G or is absent
XGXSRVVMNRYKKLXXXXXXXXXFYLVSIANLKTPAXTP

SEQ ID NO: 2607 - protein, 43 aa, Artificial Sequence
  GFR-binding peptide
  MOD_RES (1)..(3)..(37)..(38): Xaa is C or S
  MOD_RES (15)..(16)..(17)..(18)..(19): Xaa is A or G
  MOD_RES (20)..(21)..(22)..(23): Xaa is A or G or is absent
XGXAKVVMNYHYKLXXXXXXXXXKYLVSIPSLKTPAXXAKPVA

SEQ ID NO: 2608 - protein, 35 aa, Artificial Sequence
  GFR-binding peptide
  MOD_RES (2)..(4)..(35): Xaa is C or S
SXKXSKVVMRHKRLVKPTRGVYYLISTASLDQPVX

SEQ ID NO: 2609 - protein, 36 aa, Artificial Sequence
  GFR-binding peptide
  MOD_RES (2)..(34): Xaa is C or S
GXSRVVMNYHYKLIVNSSDDKYLVSIPSLKTPAXTP

SEQ ID NO: 2610 - protein, 32 aa, Artificial Sequence
  GFR-binding peptide
  MOD_RES (11)..(12)..(13)..(14)..(15): Xaa is A or G
  MOD_RES (16)..(17)..(18)..(19): Xaa is A or G or is absent
KVVMNRYKKLXXXXXXXXXFYLVSIANLKTPA

SEQ ID NO: 2611 - protein, 39 aa, Artificial Sequence
  GFR-binding peptide
  MOD_RES (1)..(3)..(38)..(39): Xaa is C or S
  MOD_RES (16)..(17)..(18)..(19)..(20): Xaa is A or G
  MOD_RES (21)..(22)..(23)..(24): Xaa is A or G or is absent
XGXEAVSMGERHKRLXXXXXXXXXYYLVSTASLKTPVXX

SEQ ID NO: 2612 - protein, 33 aa, Artificial Sequence
  GFR-binding peptide
  MOD_RES (1)..(1): Xaa is C or S
  MOD_RES (12)..(13)..(14)..(15)..(16): Xaa is A or G
  MOD_RES (17)..(18)..(19)..(20): Xaa is A or G or is absent
XSKVIMRYKKLXXXXXXXXXFYLISIANLDQSV

SEQ ID NO: 2613 - protein, 43 aa, Artificial Sequence
  GFR-binding peptide
  MOD_RES (2)..(4)..(38)..(39): Xaa is C or S
  MOD_RES (16)..(17)..(18)..(19)..(20): Xaa is A or G
  MOD_RES (21)..(22)..(23)..(24): Xaa is A or G or is absent
HXGXSRVVMNRHKRLXXXXXXXXXYYLVSTASLKTPAXXPKPV

SEQ ID NO: 2614 - protein, 35 aa, Artificial Sequence
  GFR-binding peptide
  MOD_RES (33)..(34): Xaa is C or S
  MOD_RES (11)..(12)..(13)..(14)..(15): Xaa is A or G
  MOD_RES (16)..(17)..(18)..(19): Xaa is A or G or is absent
SRVIMRYKKLXXXXXXXXXFYLISIANLAQPVXXP

SEQ ID NO: 2615 - protein, 38 aa, Artificial Sequence
  GFR-binding peptide
  MOD_RES (2)..(2): Xaa is C or S
KXALHDELTRYKKLFIPKKRVIEFYLVSIANLQVQTPR

SEQ ID NO: 2616 - protein, 38 aa, Artificial Sequence
  GFR-binding peptide
  MOD_RES (35)..(35): Xaa is C or S
HDELTYHYKLFIPKKRVIEKYLVSIPSLQVQTPRXQVN

SEQ ID NO: 2617 - protein, 37 aa, Artificial Sequence
  GFR-binding peptide
  MOD_RES (1)..(1): Xaa is C or S
XALHDELTYHYKLFIPKKRVIEKYLVSIPSLQVQTPR

SEQ ID NO: 2618 - protein, 40 aa, Artificial Sequence
  GFR-binding peptide
  MOD_RES (2)..(4)..(35)..(36): Xaa is C or S
SXKXSKVVMQYNKLVKPTRGVLYLISIASLDQPVXXPSAS

SEQ ID NO: 2619 - protein, 39 aa, Artificial Sequence
  GFR-binding peptide
  MOD_RES (1)..(3)..(35)..(36): Xaa is C or S
XGXGEVVMERHKRLVVKDYEDYYLMSTASLETPVXXAKP

SEQ ID NO: 2620 - protein, 36 aa, Artificial Sequence
  GFR-binding peptide
  MOD_RES (1)..(34)..(35): Xaa is C or S
  MOD_RES (12)..(13)..(14)..(15)..(16): Xaa is A or G
  MOD_RES (17)..(18)..(19)..(20): Xaa is A or G or is absent
XSKVVMQYNKLXXXXXXXXXLYLISIASLDQPVXXP

SEQ ID NO: 2621 - protein, 34 aa, Artificial Sequence
  GFR-binding peptide
  MOD_RES (31)..(32): Xaa is C or S
RVVMNRYKKLIVNSSDDFYLVSIANLQTPAXXPK

SEQ ID NO: 2622 - protein, 41 aa, Artificial Sequence
  GFR-binding peptide
  MOD_RES (1)..(3)..(35)..(36): Xaa is C or S
XGXARVVMNQYNKLIVNSSDDLYLVSIASLQTPAXXPKPVT

SEQ ID NO: 2623 - protein, 33 aa, Artificial Sequence
  GFR-binding peptide
  MOD_RES (1)..(33): Xaa is C or S
XARVVMNQYNKLIVNSSDDLYLVSIASLQTPAX

SEQ ID NO: 2624 - protein, 42 aa, Artificial Sequence
  GFR-binding peptide
  MOD_RES (2)..(4)..(37)..(38): Xaa is C or S
  MOD_RES (15)..(16)..(17)..(18)..(19): Xaa is A or G
  MOD_RES (20)..(21)..(22)..(23): Xaa is A or G or is absent
SXKXSRVIMRHKRLXXXXXXXXXYYLISTASLAQPVXXPAAS

SEQ ID NO: 2625 - protein, 33 aa, Artificial Sequence
  GFR-binding peptide
  MOD_RES (31)..(32): Xaa is C or S
SKVVMRHKRLVKPTRGVYYLISTASLDQPVXXP

SEQ ID NO: 2626 - protein, 35 aa, Artificial Sequence
  GFR-binding peptide
  MOD_RES (34)..(35): Xaa is C or S
  MOD_RES (12)..(13)..(14)..(15)..(16): Xaa is A or G
  MOD_RES (17)..(18)..(19)..(20): Xaa is A or G or is absent
GEVVMDYHYKLXXXXXXXXXKYLMSIPSLETPVXX

SEQ ID NO: 2627 - protein, 41 aa, Artificial Sequence
  GFR-binding peptide
  MOD_RES (2)..(4)..(35)..(36): Xaa is C or S
SXKXSKVIMYHYKLIKPTKGIKYLISIPSLDQSVXXPSASA

SEQ ID NO: 2628 - protein, 31 aa, Artificial Sequence
  GFR-binding peptide
  MOD_RES (31)..(31): Xaa is C or S
EVVMERYKKLVVKDYEDFYLMSIANLETPVX

SEQ ID NO: 2629 - protein, 37 aa, Artificial Sequence
  GFR-binding peptide
  MOD_RES (32)..(32): Xaa is C or S
SRVVMNQYNKLIVNSSDDLYLVSIASLKTPAXTPKTV

SEQ ID NO: 2630 - protein, 35 aa, Artificial Sequence
  GFR-binding peptide
  MOD_RES (34)..(34): Xaa is C or S
  MOD_RES (12)..(13)..(14)..(15)..(16): Xaa is A or G
  MOD_RES (17)..(18)..(19)..(20): Xaa is A or G or is absent
SRVVMNQYNKLXXXXXXXXXLYLVSIASLKTPAXT

SEQ ID NO: 2631 - protein, 36 aa, Artificial Sequence
  GFR-binding peptide
  MOD_RES (33)..(34): Xaa is C or S
  MOD_RES (11)..(12)..(13)..(14)..(15): Xaa is A or G
  MOD_RES (16)..(17)..(18)..(19): Xaa is A or G or is absent
EVVMERHKRLXXXXXXXXXYYLMSTASLETPVXXAK

SEQ ID NO: 2632 - protein, 41 aa, Artificial Sequence
  GFR-binding peptide
  MOD_RES (2)..(4)..(36)..(37): Xaa is C or S
RXGXGEVVMDQYNKLVVKENEDLYLMSIASLETPVXXAKPI

SEQ ID NO: 2633 - protein, 35 aa, Artificial Sequence
  GFR-binding peptide
ALHDELTQYNKLFIPKKRVIELYLVSIASLQVQTP

SEQ ID NO: 2634 - protein, 41 aa, Artificial Sequence
  GFR-binding peptide
  MOD_RES (2)..(35)..(36): Xaa is C or S
  MOD_RES (13)..(14)..(15)..(16)..(17): Xaa is A or G
  MOD_RES (18)..(19)..(20)..(21): Xaa is A or G or is absent
KXSRVIMQYNKLXXXXXXXXXLYLISIASLAQPVXXPAASA

SEQ ID NO: 2635 - protein, 37 aa, Artificial Sequence
  GFR-binding peptide
  MOD_RES (2)..(2): Xaa is C or S
KXALHDELTQYNKLFIPKKRVIELYLVSIASLQVQTP

SEQ ID NO: 2636 - protein, 39 aa, Artificial Sequence
  GFR-binding peptide
  MOD_RES (2)..(37)..(38): Xaa is C or S
  MOD_RES (15)..(16)..(17)..(18)..(19): Xaa is A or G
  MOD_RES (20)..(21)..(22)..(23): Xaa is A or G or is absent
GXEAVSMGEYHYKLXXXXXXXXXKYLVSIPSLKTPVXXA

SEQ ID NO: 2637 - protein, 39 aa, Artificial Sequence
  GFR-binding peptide
  MOD_RES (2)..(4)..(37)..(38): Xaa is C or S
  MOD_RES (15)..(16)..(17)..(18)..(19): Xaa is A or G
  MOD_RES (20)..(21)..(22)..(23): Xaa is A or G or is absent
SXKXSKVVMRYKKLXXXXXXXXXFYLISIANLDQPVXXP

SEQ ID NO: 2638 - protein, 37 aa, Artificial Sequence
  GFR-binding peptide
  MOD_RES (1)..(33)..(34): Xaa is C or S
XSRVVMNQYNKLIVNSSDDLYLVSIASLKTPAXXPKP

SEQ ID NO: 2639 - protein, 38 aa, Artificial Sequence
  GFR-binding peptide
  MOD_RES (34)..(34): Xaa is C or S
  MOD_RES (12)..(13)..(14)..(15)..(16): Xaa is A or G
  MOD_RES (17)..(18)..(19)..(20): Xaa is A or G or is absent
SRVVMNQYNKLXXXXXXXXXLYLVSIASLKTPAXTPKT

SEQ ID NO: 2640 - protein, 39 aa, Artificial Sequence
  GFR-binding peptide
  MOD_RES (2)..(36): Xaa is C or S
  MOD_RES (14)..(15)..(16)..(17)..(18): Xaa is A or G
  MOD_RES (19)..(20)..(21)..(22): Xaa is A or G or is absent
GXSRVVMNRHKRLXXXXXXXXXYYLVSTASLKTPAXTPK

SEQ ID NO: 2641 - protein, 37 aa, Artificial Sequence
  GFR-binding peptide
  MOD_RES (32)..(33): Xaa is C or S
GEVVMDYHYKLVVKENEDKYLMSIPSLETPVXXAKPI

SEQ ID NO: 2642 - protein, 37 aa, Artificial Sequence
  GFR-binding peptide
  MOD_RES (31)..(32): Xaa is C or S
EVVMDRYKKLVVKENEDFYLMSIANLETPVXXAKPIK

SEQ ID NO: 2643 - protein, 43 aa, Artificial Sequence
  GFR-binding peptide
  MOD_RES (2)..(4)..(37)..(38): Xaa is C or S
  MOD_RES (15)..(16)..(17)..(18)..(19): Xaa is A or G
  MOD_RES (20)..(21)..(22)..(23): Xaa is A or G or is absent
SXKXSKVIMYHYKLXXXXXXXXXKYLISIPSLDQSVXXPSASA

SEQ ID NO: 2644 - protein, 35 aa, Artificial Sequence
  GFR-binding peptide
ALHDELTRHKRLFIPKKRVIEYYLVSTASLQVQTP

SEQ ID NO: 2645 - protein, 37 aa, Artificial Sequence
  GFR-binding peptide
  MOD_RES (1)..(33): Xaa is C or S
XSRVVMNQYNKLIVNSSDDLYLVSIASLKTPAXTPKT

SEQ ID NO: 2646 - protein, 32 aa, Artificial Sequence
  GFR-binding peptide
  MOD_RES (1)..(1): Xaa is C or S
XSRVVMNQYNKLIVNSSDDLYLVSIASLKTPA

SEQ ID NO: 2647 - protein, 42 aa, Artificial Sequence
  GFR-binding peptide
  MOD_RES (1)..(38): Xaa is C or S
  MOD_RES (14)..(15)..(16)..(17)..(18): Xaa is A or G
  MOD_RES (19)..(20)..(21)..(22): Xaa is A or G or is absent
XALHDELTQYNKLXXXXXXXXXLYLVSIASLQVQTPRXQVNR

SEQ ID NO: 2648 - protein, 39 aa, Artificial Sequence
  GFR-binding peptide
  MOD_RES (2)..(34)..(35): Xaa is C or S
GXARVVMNYHYKLIVNSSDDKYLVSIPSLQTPAXXPKPV

SEQ ID NO: 2649 - protein, 39 aa, Artificial Sequence
  GFR-binding peptide
  MOD_RES (2)..(4)..(38)..(39): Xaa is C or S
  MOD_RES (16)..(17)..(18)..(19)..(20): Xaa is A or G
  MOD_RES (21)..(22)..(23)..(24): Xaa is A or G or is absent
HXGXSRVVMNYHYKLXXXXXXXXXKYLVSIPSLKTPAXX

SEQ ID NO: 2650 - protein, 37 aa, Artificial Sequence
  GFR-binding peptide
  MOD_RES (1)..(3)..(35)..(36): Xaa is C or S
XGXAKVVMNRHKRLIVNNSSDYYLVSTASLKTPAXXA

SEQ ID NO: 2651 - protein, 37 aa, Artificial Sequence
  GFR-binding peptide
  MOD_RES (1)..(36)..(37): Xaa is C or S
  MOD_RES (14)..(15)..(16)..(17)..(18): Xaa is A or G
  MOD_RES (19)..(20)..(21)..(22): Xaa is A or G or is absent
XEAVSMGEYHYKLXXXXXXXXXKYLVSIPSLKTPVXX

SEQ ID NO: 2652 - protein, 39 aa, Artificial Sequence
  GFR-binding peptide
  MOD_RES (2)..(4)..(35)..(36): Xaa is C or S
SXKXSRVIMQYNKLVKPKRGVLYLISIASLAQPVXXPAA

SEQ ID NO: 2653 - protein, 39 aa, Artificial Sequence
  GFR-binding peptide
  MOD_RES (34)..(34): Xaa is C or S
  MOD_RES (12)..(13)..(14)..(15)..(16): Xaa is A or G
  MOD_RES (17)..(18)..(19)..(20): Xaa is A or G or is absent
SRVVMNYHYKLXXXXXXXXXKYLVSIPSLKTPAXTPKTV

SEQ ID NO: 2654 - protein, 39 aa, Artificial Sequence
  GFR-binding peptide
  MOD_RES (2)..(35)..(36): Xaa is C or S
  MOD_RES (13)..(14)..(15)..(16)..(17): Xaa is A or G
  MOD_RES (18)..(19)..(20)..(21): Xaa is A or G or is absent
KXSKVIMRHKRLXXXXXXXXXYYLISTASLDQSVXXPSA

SEQ ID NO: 2655 - protein, 42 aa, Artificial Sequence
  GFR-binding peptide
  MOD_RES (1)..(38): Xaa is C or S
  MOD_RES (14)..(15)..(16)..(17)..(18): Xaa is A or G
  MOD_RES (19)..(20)..(21)..(22): Xaa is A or G or is absent
XALHDELTYHYKLXXXXXXXXXKYLVSIPSLQVQTPRXQVNR

SEQ ID NO: 2656 - protein, 37 aa, Artificial Sequence
  GFR-binding peptide
  MOD_RES (1)..(3)..(36)..(37): Xaa is C or S
  MOD_RES (14)..(15)..(16)..(17)..(18): Xaa is A or G
  MOD_RES (19)..(20)..(21)..(22): Xaa is A or G or is absent
XKXSKVIMRHKRLXXXXXXXXXYYLISTASLDQSVXX

SEQ ID NO: 2657 - protein, 36 aa, Artificial Sequence
  GFR-binding peptide
  MOD_RES (1)..(3): Xaa is C or S
  MOD_RES (15)..(16)..(17)..(18)..(19): Xaa is A or G
  MOD_RES (20)..(21)..(22)..(23): Xaa is A or G or is absent
XGXSRVVMNQYNKLXXXXXXXXXLYLVSIASLKTPA

SEQ ID NO: 2658 - protein, 38 aa, Artificial Sequence
  GFR-binding peptide
  MOD_RES (1)..(3)..(37)..(38): Xaa is C or S
  MOD_RES (15)..(16)..(17)..(18)..(19): Xaa is A or G
  MOD_RES (20)..(21)..(22)..(23): Xaa is A or G or is absent
XGXARVVMNRYKKLXXXXXXXXXFYLVSIANLQTPAXX

SEQ ID NO: 2659 - protein, 35 aa, Artificial Sequence
  GFR-binding peptide
  MOD_RES (2)..(4)..(35): Xaa is C or S
SXKXSRVIMRYKKLVKPKRGVFYLISIANLAQPVX

SEQ ID NO: 2660 - protein, 37 aa, Artificial Sequence
  GFR-binding peptide
  MOD_RES (2)..(33)..(34): Xaa is C or S
KXSKVIMQYNKLIKPTKGILYLISIASLDQSVXXPSA

SEQ ID NO: 2661 - protein, 35 aa, Artificial Sequence
  GFR-binding peptide
  MOD_RES (1)..(3)..(34)..(35): Xaa is C or S
XKXSRVIMQYNKLVKPKRGVLYLISIASLAQPVXX

SEQ ID NO: 2662 - protein, 38 aa, Artificial Sequence
  GFR-binding peptide
  MOD_RES (1)..(3)..(37)..(38): Xaa is C or S
  MOD_RES (15)..(16)..(17)..(18)..(19): Xaa is A or G
  MOD_RES (20)..(21)..(22)..(23): Xaa is A or G or is absent
XGXAKVVMNRYKKLXXXXXXXXXFYLVSIANLKTPAXX

SEQ ID NO: 2663 - protein, 37 aa, Artificial Sequence
  GFR-binding peptide
  MOD_RES (33)..(34): Xaa is C or S
  MOD_RES (11)..(12)..(13)..(14)..(15): Xaa is A or G
  MOD_RES (16)..(17)..(18)..(19): Xaa is A or G or is absent
EVVMDRYKKLXXXXXXXXXFYLMSIANLETPVXXAKP

SEQ ID NO: 2664 - protein, 36 aa, Artificial Sequence
  GFR-binding peptide
  MOD_RES (2)..(36): Xaa is C or S
  MOD_RES (14)..(15)..(16)..(17)..(18): Xaa is A or G
  MOD_RES (19)..(20)..(21)..(22): Xaa is A or G or is absent
GXGEVVMDRYKKLXXXXXXXXXFYLMSIANLETPVX

SEQ ID NO: 2665 - protein, 38 aa, Artificial Sequence
  GFR-binding peptide
  MOD_RES (1)..(38): Xaa is C or S
XALHDELTRYKKLFIPKKRVIEFYLVSIANLQVQTPRX

SEQ ID NO: 2666 - protein, 38 aa, Artificial Sequence
  GFR-binding peptide
  MOD_RES (1)..(35)..(36): Xaa is C or S
  MOD_RES (13)..(14)..(15)..(16)..(17): Xaa is A or G
  MOD_RES (18)..(19)..(20)..(21): Xaa is A or G or is absent
XARVVMNRHKRLXXXXXXXXXYYLVSTASLQTPAXXPK

SEQ ID NO: 2667 - protein, 33 aa, Artificial Sequence
  GFR-binding peptide
  MOD_RES (1)..(1): Xaa is C or S
  MOD_RES (12)..(13)..(14)..(15)..(16): Xaa is A or G
  MOD_RES (17)..(18)..(19)..(20): Xaa is A or G or is absent
XSKVVMQYNKLXXXXXXXXXLYLISIASLDQPV

SEQ ID NO: 2668 - protein, 34 aa, Artificial Sequence
  GFR-binding peptide
  MOD_RES (31)..(31): Xaa is C or S
RVVMNQYNKLIVNSSDDLYLVSIASLKTPAXTPK

SEQ ID NO: 2669 - protein, 40 aa, Artificial Sequence
  GFR-binding peptide
  MOD_RES (2)..(4)..(38)..(39): Xaa is C or S
  MOD_RES (16)..(17)..(18)..(19)..(20): Xaa is A or G
  MOD_RES (21)..(22)..(23)..(24): Xaa is A or G or is absent
RXGXGEVVMDRHKRLXXXXXXXXXYYLMSTASLETPVXXA

SEQ ID NO: 2670 - protein, 31 aa, Artificial Sequence
  GFR-binding peptide
  MOD_RES (31)..(31): Xaa is C or S
KVVMNYHYKLIVNNSSDKYLVSIPSLKTPAX

SEQ ID NO: 2671 - protein, 38 aa, Artificial Sequence
  GFR-binding peptide
  MOD_RES (35)..(36): Xaa is C or S
  MOD_RES (13)..(14)..(15)..(16)..(17): Xaa is A or G
  MOD_RES (18)..(19)..(20)..(21): Xaa is A or G or is absent
EAVSMGEYHYKLXXXXXXXXXKYLVSIPSLKTPVXXAK

SEQ ID NO: 2672 - protein, 39 aa, Artificial Sequence
  GFR-binding peptide
  MOD_RES (1)..(33)..(34): Xaa is C or S
XGEVVMEQYNKLVVKDYEDLYLMSIASLETPVXXAKPIS

SEQ ID NO: 2673 - protein, 38 aa, Artificial Sequence
  GFR-binding peptide
  MOD_RES (2)..(36)..(37): Xaa is C or S
  MOD_RES (14)..(15)..(16)..(17)..(18): Xaa is A or G
  MOD_RES (19)..(20)..(21)..(22): Xaa is A or G or is absent
GXGEVVMDYHYKLXXXXXXXXXKYLMSIPSLETPVXXA

SEQ ID NO: 2674 - protein, 33 aa, Artificial Sequence
  GFR-binding peptide
  MOD_RES (1)..(1): Xaa is C or S
XEAVSMGEYHYKLTPVGMDDKYLVSIPSLKTPV

SEQ ID NO: 2675 - protein, 38 aa, Artificial Sequence
  GFR-binding peptide
  MOD_RES (2)..(4)..(38): Xaa is C or S
  MOD_RES (16)..(17)..(18)..(19)..(20): Xaa is A or G
  MOD_RES (21)..(22)..(23)..(24): Xaa is A or G or is absent
HXGXAKVVMNRYKKLXXXXXXXXXFYLVSIANLKTPAX

SEQ ID NO: 2676 - protein, 37 aa, Artificial Sequence
  GFR-binding peptide
  MOD_RES (31)..(32): Xaa is C or S
RVVMNRHKRLIVNSSDDYYLVSTASLQTPAXXPKPVT

SEQ ID NO: 2677 - protein, 36 aa, Artificial Sequence
  GFR-binding peptide
  MOD_RES (1)..(3)..(36): Xaa is C or S
  MOD_RES (14)..(15)..(16)..(17)..(18): Xaa is A or G
  MOD_RES (19)..(20)..(21)..(22): Xaa is A or G or is absent
XKXSKVIMQYNKLXXXXXXXXXLYLISIASLDQSVX

SEQ ID NO: 2678 - protein, 38 aa, Artificial Sequence
  GFR-binding peptide
  MOD_RES (34)..(35): Xaa is C or S
  MOD_RES (12)..(13)..(14)..(15)..(16): Xaa is A or G
  MOD_RES (17)..(18)..(19)..(20): Xaa is A or G or is absent
ARVVMNRHKRLXXXXXXXXXYYLVSTASLQTPAXXPKP

SEQ ID NO: 2679 - protein, 35 aa, Artificial Sequence
  GFR-binding peptide
  MOD_RES (1)..(1): Xaa is C or S
  MOD_RES (14)..(15)..(16)..(17)..(18): Xaa is A or G
  MOD_RES (19)..(20)..(21)..(22): Xaa is A or G or is absent
XEAVSMGERHKRLXXXXXXXXXYYLVSTASLKTPV

SEQ ID NO: 2680 - protein, 35 aa, Artificial Sequence
  GFR-binding peptide
  MOD_RES (1)..(3)..(35): Xaa is C or S
XGXGEVVMDQYNKLVVKENEDLYLMSIASLETPVX

SEQ ID NO: 2681 - protein, 36 aa, Artificial Sequence
  GFR-binding peptide
  MOD_RES (32)..(33): Xaa is C or S
GEVVMDQYNKLVVKENEDLYLMSIASLETPVXXAKP

SEQ ID NO: 2682 - protein, 35 aa, Artificial Sequence
  GFR-binding peptide
  MOD_RES (1)..(33)..(34): Xaa is C or S
XGEVVMDRHKRLVVKENEDYYLMSTASLETPVXXA

SEQ ID NO: 2683 - protein, 35 aa, Artificial Sequence
  GFR-binding peptide
  MOD_RES (32)..(32): Xaa is C or S
SRVVMNQYNKLIVNSSDDLYLVSIASLKTPAXTPK

SEQ ID NO: 2684 - protein, 42 aa, Artificial Sequence
  GFR-binding peptide
  MOD_RES (2)..(36): Xaa is C or S
  MOD_RES (14)..(15)..(16)..(17)..(18): Xaa is A or G
  MOD_RES (19)..(20)..(21)..(22): Xaa is A or G or is absent
GXSRVVMNRHKRLXXXXXXXXXYYLVSTASLKTPAXTPKTVH

SEQ ID NO: 2685 - protein, 36 aa, Artificial Sequence
  GFR-binding peptide
  MOD_RES (1)..(3)..(35): Xaa is C or S
XGXSRVVMNYHYKLIVNSSDDKYLVSIPSLKTPAXT

SEQ ID NO: 2686 - protein, 36 aa, Artificial Sequence
  GFR-binding peptide
  MOD_RES (1)..(1): Xaa is C or S
XALHDELTYHYKLFIPKKRVIEKYLVSIPSLQVQTP

SEQ ID NO: 2687 - protein, 38 aa, Artificial Sequence
  GFR-binding peptide
  MOD_RES (34)..(35): Xaa is C or S
  MOD_RES (12)..(13)..(14)..(15)..(16): Xaa is A or G
  MOD_RES (17)..(18)..(19)..(20): Xaa is A or G or is absent
AKVVMNYHYKLXXXXXXXXXKYLVSIPSLKTPAXXAKP

SEQ ID NO: 2688 - protein, 40 aa, Artificial Sequence
  GFR-binding peptide
  MOD_RES (2)..(34): Xaa is C or S
GXSRVVMNRYKKLIVNSSDDFYLVSIANLKTPAXTPKTVH

SEQ ID NO: 2689 - protein, 38 aa, Artificial Sequence
  GFR-binding peptide
  MOD_RES (1)..(33)..(34): Xaa is C or S
XSRVVMNYHYKLIVNSSDDKYLVSIPSLKTPAXXPKPV

SEQ ID NO: 2690 - protein, 37 aa, Artificial Sequence
  GFR-binding peptide
  MOD_RES (2)..(4)..(36)..(37): Xaa is C or S
HXGXSRVVMNRYKKLIVNSSDDFYLVSIANLKTPAXX

SEQ ID NO: 2691 - protein, 38 aa, Artificial Sequence
  GFR-binding peptide
  MOD_RES (2)..(4)..(37)..(38): Xaa is C or S
  MOD_RES (15)..(16)..(17)..(18)..(19): Xaa is A or G
  MOD_RES (20)..(21)..(22)..(23): Xaa is A or G or is absent
SXKXSRVIMYHYKLXXXXXXXXXKYLISIPSLAQPVXX

SEQ ID NO: 2692 - protein, 36 aa, Artificial Sequence
  GFR-binding peptide
  MOD_RES (2)..(4): Xaa is C or S
  MOD_RES (15)..(16)..(17)..(18)..(19): Xaa is A or G
  MOD_RES (20)..(21)..(22)..(23): Xaa is A or G or is absent
SXKXSKVVMRHKRLXXXXXXXXXYYLISTASLDQPV

SEQ ID NO: 2693 - protein, 34 aa, Artificial Sequence
  GFR-binding peptide
  MOD_RES (34)..(34): Xaa is C or S
  MOD_RES (12)..(13)..(14)..(15)..(16): Xaa is A or G
  MOD_RES (17)..(18)..(19)..(20): Xaa is A or G or is absent
AKVVMNRHKRLXXXXXXXXXYYLVSTASLKTPAX

SEQ ID NO: 2694 - protein, 32 aa, Artificial Sequence
  GFR-binding peptide
  MOD_RES (31)..(32): Xaa is C or S
EVVMDYHYKLVVKENEDKYLMSIPSLETPVXX

SEQ ID NO: 2695 - protein, 36 aa, Artificial Sequence
  GFR-binding peptide
  MOD_RES (32)..(33): Xaa is C or S
AKVVMNRYKKLIVNNSSDFYLVSIANLKTPAXXAKP

SEQ ID NO: 2696 - protein, 43 aa, Artificial Sequence
  GFR-binding peptide
  MOD_RES (1)..(3)..(38)..(39): Xaa is C or S
  MOD_RES (16)..(17)..(18)..(19)..(20): Xaa is A or G
  MOD_RES (21)..(22)..(23)..(24): Xaa is A or G or is absent
XGXEAVSMGERYKKLXXXXXXXXXFYLVSIANLKTPVXXAKGV

SEQ ID NO: 2697 - protein, 41 aa, Artificial Sequence
  GFR-binding peptide
  MOD_RES (1)..(35)..(36): Xaa is C or S
  MOD_RES (13)..(14)..(15)..(16)..(17): Xaa is A or G
  MOD_RES (18)..(19)..(20)..(21): Xaa is A or G or is absent
XGEVVMEQYNKLXXXXXXXXXLYLMSIASLETPVXXAKPIS

SEQ ID NO: 2698 - protein, 34 aa, Artificial Sequence
  GFR-binding peptide
  MOD_RES (2)..(4): Xaa is C or S
SXKXSKVVMQYNKLVKPTRGVLYLISIASLDQPV

SEQ ID NO: 2699 - protein, 36 aa, Artificial Sequence
  GFR-binding peptide
  MOD_RES (2)..(35)..(36): Xaa is C or S
  MOD_RES (13)..(14)..(15)..(16)..(17): Xaa is A or G
  MOD_RES (18)..(19)..(20)..(21): Xaa is A or G or is absent
KXSKVVMRHKRLXXXXXXXXXYYLISTASLDQPVXX

SEQ ID NO: 2700 - protein, 35 aa, Artificial Sequence
  GFR-binding peptide
  MOD_RES (33)..(34): Xaa is C or S
  MOD_RES (11)..(12)..(13)..(14)..(15): Xaa is A or G
  MOD_RES (16)..(17)..(18)..(19): Xaa is A or G or is absent
EVVMEYHYKLXXXXXXXXXKYLMSIPSLETPVXXA

SEQ ID NO: 2701 - protein, 39 aa, Artificial Sequence
  GFR-binding peptide
  MOD_RES (1)..(38): Xaa is C or S
  MOD_RES (14)..(15)..(16)..(17)..(18): Xaa is A or G
  MOD_RES (19)..(20)..(21)..(22): Xaa is A or G or is absent
XALHDELTRHKRLXXXXXXXXXYYLVSTASLQVQTPRXQ

SEQ ID NO: 2702 - protein, 34 aa, Artificial Sequence
  GFR-binding peptide
  MOD_RES (2)..(33)..(34): Xaa is C or S
KXSKVIMYHYKLIKPTKGIKYLISIPSLDQSVXX

SEQ ID NO: 2703 - protein, 30 aa, Artificial Sequence
  GFR-binding peptide
SKVVMRYKKLVKPTRGVFYLISIANLDQPV

SEQ ID NO: 2704 - protein, 35 aa, Artificial Sequence
  GFR-binding peptide
  MOD_RES (33)..(33): Xaa is C or S
  MOD_RES (11)..(12)..(13)..(14)..(15): Xaa is A or G
  MOD_RES (16)..(17)..(18)..(19): Xaa is A or G or is absent
RVVMNRHKRLXXXXXXXXXYYLVSTASLKTPAXTP

SEQ ID NO: 2705 - protein, 35 aa, Artificial Sequence
  GFR-binding peptide
  MOD_RES (2)..(34)..(35): Xaa is C or S
GXGEVVMEQYNKLVVKDYEDLYLMSIASLETPVXX

SEQ ID NO: 2706 - protein, 37 aa, Artificial Sequence
  GFR-binding peptide
  MOD_RES (34)..(35): Xaa is C or S
  MOD_RES (12)..(13)..(14)..(15)..(16): Xaa is A or G
  MOD_RES (17)..(18)..(19)..(20): Xaa is A or G or is absent
GEVVMDRHKRLXXXXXXXXXYYLMSTASLETPVXXAK

SEQ ID NO: 2707 - protein, 37 aa, Artificial Sequence
  GFR-binding peptide
  MOD_RES (33)..(34): Xaa is C or S
  MOD_RES (11)..(12)..(13)..(14)..(15): Xaa is A or G
  MOD_RES (16)..(17)..(18)..(19): Xaa is A or G or is absent
RVVMNRHKRLXXXXXXXXXYYLVSTASLQTPAXXPKP

SEQ ID NO: 2708 - protein, 37 aa, Artificial Sequence
  GFR-binding peptide
  MOD_RES (1)..(3)..(36)..(37): Xaa is C or S
  MOD_RES (14)..(15)..(16)..(17)..(18): Xaa is A or G
  MOD_RES (19)..(20)..(21)..(22): Xaa is A or G or is absent
XKXSRVIMYHYKLXXXXXXXXXKYLISIPSLAQPVXX

SEQ ID NO: 2709 - protein, 34 aa, Artificial Sequence
  GFR-binding peptide
  MOD_RES (1)..(1): Xaa is C or S
  MOD_RES (13)..(14)..(15)..(16)..(17): Xaa is A or G
  MOD_RES (18)..(19)..(20)..(21): Xaa is A or G or is absent
XGEVVMEQYNKLXXXXXXXXXLYLMSIASLETPV

SEQ ID NO: 2710 - protein, 39 aa, Artificial Sequence
  GFR-binding peptide
  MOD_RES (1)..(3)..(35)..(36): Xaa is C or S
XGXGEVVMEQYNKLVVKDYEDLYLMSIASLETPVXXAKP

SEQ ID NO: 2711 - protein, 33 aa, Artificial Sequence
  GFR-binding peptide
  MOD_RES (33)..(33): Xaa is C or S
  MOD_RES (11)..(12)..(13)..(14)..(15): Xaa is A or G
  MOD_RES (16)..(17)..(18)..(19): Xaa is A or G or is absent
SRVIMRHKRLXXXXXXXXXYYLISTASLAQPVX

SEQ ID NO: 2712 - protein, 32 aa, Artificial Sequence
  GFR-binding peptide
  MOD_RES (11)..(12)..(13)..(14)..(15): Xaa is A or G
  MOD_RES (16)..(17)..(18)..(19): Xaa is A or G or is absent
HDELTRYKKLXXXXXXXXXFYLVSIANLQVQT

SEQ ID NO: 2713 - protein, 32 aa, Artificial Sequence
  GFR-binding peptide
  MOD_RES (11)..(12)..(13)..(14)..(15): Xaa is A or G
  MOD_RES (16)..(17)..(18)..(19): Xaa is A or G or is absent
RVVMNRHKRLXXXXXXXXXYYLVSTASLQTPA

SEQ ID NO: 2714 - protein, 34 aa, Artificial Sequence
  GFR-binding peptide
  MOD_RES (34)..(34): Xaa is C or S
  MOD_RES (12)..(13)..(14)..(15)..(16): Xaa is A or G
  MOD_RES (17)..(18)..(19)..(20): Xaa is A or G or is absent
GEVVMEQYNKLXXXXXXXXXLYLMSIASLETPVX

SEQ ID NO: 2715 - protein, 34 aa, Artificial Sequence
  GFR-binding peptide
  MOD_RES (1)..(34): Xaa is C or S
XEAVSMGEQYNKLTPVGMDDLYLVSIASLKTPVX

SEQ ID NO: 2716 - protein, 37 aa, Artificial Sequence
  GFR-binding peptide
  MOD_RES (33)..(34): Xaa is C or S
  MOD_RES (11)..(12)..(13)..(14)..(15): Xaa is A or G
  MOD_RES (16)..(17)..(18)..(19): Xaa is A or G or is absent
KVVMNYHYKLXXXXXXXXXKYLVSIPSLKTPAXXAKP

SEQ ID NO: 2717 - protein, 34 aa, Artificial Sequence
  GFR-binding peptide
  MOD_RES (31)..(31): Xaa is C or S
RVVMNYHYKLIVNSSDDKYLVSIPSLKTPAXTPK

SEQ ID NO: 2718 - protein, 39 aa, Artificial Sequence
  GFR-binding peptide
  MOD_RES (1)..(3)..(37)..(38): Xaa is C or S
  MOD_RES (15)..(16)..(17)..(18)..(19): Xaa is A or G
  MOD_RES (20)..(21)..(22)..(23): Xaa is A or G or is absent
XGXAKVVMNQYNKLXXXXXXXXXLYLVSIASLKTPAXXA

SEQ ID NO: 2719 - protein, 35 aa, Artificial Sequence
  GFR-binding peptide
  MOD_RES (34)..(35): Xaa is C or S
  MOD_RES (12)..(13)..(14)..(15)..(16): Xaa is A or G
  MOD_RES (17)..(18)..(19)..(20): Xaa is A or G or is absent
GEVVMEQYNKLXXXXXXXXXLYLMSIASLETPVXX

SEQ ID NO: 2720 - protein, 40 aa, Artificial Sequence
  GFR-binding peptide
  MOD_RES (2)..(4)..(38)..(39): Xaa is C or S
  MOD_RES (16)..(17)..(18)..(19)..(20): Xaa is A or G
  MOD_RES (21)..(22)..(23)..(24): Xaa is A or G or is absent
HXGXSRVVMNRHKRLXXXXXXXXXYYLVSTASLKTPAXXP

SEQ ID NO: 2721 - protein, 35 aa, Artificial Sequence
  GFR-binding peptide
  MOD_RES (2)..(35): Xaa is C or S
  MOD_RES (13)..(14)..(15)..(16)..(17): Xaa is A or G
  MOD_RES (18)..(19)..(20)..(21): Xaa is A or G or is absent
KXSKVIMRHKRLXXXXXXXXXYYLISTASLDQSVX

SEQ ID NO: 2722 - protein, 37 aa, Artificial Sequence
  GFR-binding peptide
  MOD_RES (1)..(35)..(36): Xaa is C or S
  MOD_RES (13)..(14)..(15)..(16)..(17): Xaa is A or G
  MOD_RES (18)..(19)..(20)..(21): Xaa is A or G or is absent
XGEVVMDRHKRLXXXXXXXXXYYLMSTASLETPVXXA

SEQ ID NO: 2723 - protein, 33 aa, Artificial Sequence
  GFR-binding peptide
  MOD_RES (32)..(33): Xaa is C or S
SRVVMNRYKKLIVNSSDDFYLVSIANLKTPAXX

SEQ ID NO: 2724 - protein, 44 aa, Artificial Sequence
  GFR-binding peptide
  MOD_RES (1)..(3)..(40): Xaa is C or S
XKXALHDELTRYKKLFIPKKRVIEFYLVSIANLQVQTPRXQVNR

SEQ ID NO: 2725 - protein, 39 aa, Artificial Sequence
  GFR-binding peptide
  MOD_RES (2)..(4)..(37)..(38): Xaa is C or S
  MOD_RES (15)..(16)..(17)..(18)..(19): Xaa is A or G
  MOD_RES (20)..(21)..(22)..(23): Xaa is A or G or is absent
SXKXSKVIMYHYKLXXXXXXXXXKYLISIPSLDQSVXXP

SEQ ID NO: 2726 - protein, 42 aa, Artificial Sequence
  GFR-binding peptide
  MOD_RES (2)..(4)..(38)..(39): Xaa is C or S
  MOD_RES (16)..(17)..(18)..(19)..(20): Xaa is A or G
  MOD_RES (21)..(22)..(23)..(24): Xaa is A or G or is absent
HXGXSRVVMNRHKRLXXXXXXXXXYYLVSTASLKTPAXXPKP

SEQ ID NO: 2727 - protein, 39 aa, Artificial Sequence
  GFR-binding peptide
  MOD_RES (1)..(3)..(35): Xaa is C or S
XGXSRVVMNRHKRLIVNSSDDYYLVSTASLKTPAXTPKT

SEQ ID NO: 2728 - protein, 36 aa, Artificial Sequence
  GFR-binding peptide
  MOD_RES (2)..(35)..(36): Xaa is C or S
  MOD_RES (13)..(14)..(15)..(16)..(17): Xaa is A or G
  MOD_RES (18)..(19)..(20)..(21): Xaa is A or G or is absent
KXSKVIMQYNKLXXXXXXXXXLYLISIASLDQSVXX

SEQ ID NO: 2729 - protein, 41 aa, Artificial Sequence
  GFR-binding peptide
  MOD_RES (1)..(38): Xaa is C or S
XALHDELTRHKRLFIPKKRVIEYYLVSTASLQVQTPRXQVN

SEQ ID NO: 2730 - protein, 34 aa, Artificial Sequence
  GFR-binding peptide
  MOD_RES (34)..(34): Xaa is C or S
  MOD_RES (12)..(13)..(14)..(15)..(16): Xaa is A or G
  MOD_RES (17)..(18)..(19)..(20): Xaa is A or G or is absent
SRVVMNRHKRLXXXXXXXXXYYLVSTASLKTPAX

SEQ ID NO: 2731 - protein, 36 aa, Artificial Sequence
  GFR-binding peptide
  MOD_RES (1)..(3)..(35)..(36): Xaa is C or S
XGXARVVMNYHYKLIVNSSDDKYLVSIPSLQTPAXX

SEQ ID NO: 2732 - protein, 38 aa, Artificial Sequence
  GFR-binding peptide
  MOD_RES (2)..(2): Xaa is C or S
  MOD_RES (15)..(16)..(17)..(18)..(19): Xaa is A or G
  MOD_RES (20)..(21)..(22)..(23): Xaa is A or G or is absent
KXALHDELTRHKRLXXXXXXXXXYYLVSTASLQVQTPR

SEQ ID NO: 2733 - protein, 37 aa, Artificial Sequence
  GFR-binding peptide
  MOD_RES (33)..(34): Xaa is C or S
  MOD_RES (11)..(12)..(13)..(14)..(15): Xaa is A or G
  MOD_RES (16)..(17)..(18)..(19): Xaa is A or G or is absent
RVVMNRYKKLXXXXXXXXXFYLVSIANLKTPAXXPKP

SEQ ID NO: 2734 - protein, 36 aa, Artificial Sequence
  GFR-binding peptide
  MOD_RES (2)..(34)..(35): Xaa is C or S
GXGEVVMEQYNKLVVKDYEDLYLMSIASLETPVXXA

SEQ ID NO: 2735 - protein, 36 aa, Artificial Sequence
  GFR-binding peptide
  MOD_RES (2)..(34)..(35): Xaa is C or S
GXSRVVMNQYNKLIVNSSDDLYLVSIASLKTPAXXP

SEQ ID NO: 2736 - protein, 32 aa, Artificial Sequence
  GFR-binding peptide
  MOD_RES (31)..(32): Xaa is C or S
EVVMDQYNKLVVKENEDLYLMSIASLETPVXX

SEQ ID NO: 2737 - protein, 39 aa, Artificial Sequence
  GFR-binding peptide
  MOD_RES (2)..(4)..(35)..(36): Xaa is C or S
SXKXSRVIMRHKRLVKPKRGVYYLISTASLAQPVXXPAA

SEQ ID NO: 2738 - protein, 30 aa, Artificial Sequence
  GFR-binding peptide
RVVMNQYNKLIVNSSDDLYLVSIASLKTPA

SEQ ID NO: 2739 - protein, 40 aa, Artificial Sequence
  GFR-binding peptide
  MOD_RES (2)..(4)..(36)..(37): Xaa is C or S
RXGXGEVVMDQYNKLVVKENEDLYLMSIASLETPVXXAKP

SEQ ID NO: 2740 - protein, 33 aa, Artificial Sequence
  GFR-binding peptide
  MOD_RES (32)..(33): Xaa is C or S
ARVVMNQYNKLIVNSSDDLYLVSIASLQTPAXX

SEQ ID NO: 2741 - protein, 33 aa, Artificial Sequence
  GFR-binding peptide
  MOD_RES (1)..(33): Xaa is C or S
XGEVVMDQYNKLVVKENEDLYLMSIASLETPVX

SEQ ID NO: 2742 - protein, 38 aa, Artificial Sequence
  GFR-binding peptide
  MOD_RES (1)..(33)..(34): Xaa is C or S
XGEVVMERHKRLVVKDYEDYYLMSTASLETPVXXAKPI

SEQ ID NO: 2743 - protein, 31 aa, Artificial Sequence
  GFR-binding peptide
  MOD_RES (31)..(31): Xaa is C or S
KVVMNQYNKLIVNNSSDLYLVSIASLKTPAX

SEQ ID NO: 2744 - protein, 41 aa, Artificial Sequence
  GFR-binding peptide
  MOD_RES (1)..(3)..(36)..(37): Xaa is C or S
XGXEAVSMGERHKRLTPVGMDDYYLVSTASLKTPVXXAKGV

SEQ ID NO: 2745 - protein, 35 aa, Artificial Sequence
  GFR-binding peptide
  MOD_RES (1)..(33)..(34): Xaa is C or S
XAKVVMNRYKKLIVNNSSDFYLVSIANLKTPAXXA

SEQ ID NO: 2746 - protein, 31 aa, Artificial Sequence
  GFR-binding peptide
  MOD_RES (1)..(1): Xaa is C or S
XSKVVMRYKKLVKPTRGVFYLISIANLDQPV

SEQ ID NO: 2747 - protein, 39 aa, Artificial Sequence
  GFR-binding peptide
  MOD_RES (1)..(34)..(35): Xaa is C or S
  MOD_RES (12)..(13)..(14)..(15)..(16): Xaa is A or G
  MOD_RES (17)..(18)..(19)..(20): Xaa is A or G or is absent
XSRVIMQYNKLXXXXXXXXXLYLISIASLAQPVXXPAAS

SEQ ID NO: 2748 - protein, 36 aa, Artificial Sequence
  GFR-binding peptide
  MOD_RES (1)..(3)..(34)..(35): Xaa is C or S
XKXSRVIMRHKRLVKPKRGVYYLISTASLAQPVXXP

SEQ ID NO: 2749 - protein, 33 aa, Artificial Sequence
  GFR-binding peptide
  MOD_RES (33)..(33): Xaa is C or S
  MOD_RES (11)..(12)..(13)..(14)..(15): Xaa is A or G
  MOD_RES (16)..(17)..(18)..(19): Xaa is A or G or is absent
EVVMERHKRLXXXXXXXXXYYLMSTASLETPVX

SEQ ID NO: 2750 - protein, 39 aa, Artificial Sequence
  GFR-binding peptide
  MOD_RES (33)..(34): Xaa is C or S
EAVSMGERHKRLTPVGMDDYYLVSTASLKTPVXXAKGVK

SEQ ID NO: 2751 - protein, 41 aa, Artificial Sequence
  GFR-binding peptide
  MOD_RES (2)..(4)..(37)..(38): Xaa is C or S
  MOD_RES (15)..(16)..(17)..(18)..(19): Xaa is A or G
  MOD_RES (20)..(21)..(22)..(23): Xaa is A or G or is absent
SXKXSKVIMRYKKLXXXXXXXXXFYLISIANLDQSVXXPSA

SEQ ID NO: 2752 - protein, 39 aa, Artificial Sequence
  GFR-binding peptide
  MOD_RES (2)..(4)..(35)..(36): Xaa is C or S
SXKXSRVIMYHYKLVKPKRGVKYLISIPSLAQPVXXPAA

SEQ ID NO: 2753 - protein, 39 aa, Artificial Sequence
  GFR-binding peptide
  MOD_RES (33)..(34): Xaa is C or S
  MOD_RES (11)..(12)..(13)..(14)..(15): Xaa is A or G
  MOD_RES (16)..(17)..(18)..(19): Xaa is A or G or is absent
RVVMNQYNKLXXXXXXXXXLYLVSIASLKTPAXXPKPVY

SEQ ID NO: 2754 - protein, 36 aa, Artificial Sequence
  GFR-binding peptide
  MOD_RES (2)..(4): Xaa is C or S
RXGXEAVSMGEQYNKLTPVGMDDLYLVSIASLKTPV

SEQ ID NO: 2755 - protein, 37 aa, Artificial Sequence
  GFR-binding peptide
  MOD_RES (1)..(33)..(34): Xaa is C or S
XSRVVMNRYKKLIVNSSDDFYLVSIANLKTPAXXPKP

SEQ ID NO: 2756 - protein, 37 aa, Artificial Sequence
  GFR-binding peptide
  MOD_RES (2)..(35)..(36): Xaa is C or S
GXEAVSMGERYKKLTPVGMDDFYLVSIANLKTPVXXA

SEQ ID NO: 2757 - protein, 33 aa, Artificial Sequence
  GFR-binding peptide
  MOD_RES (1)..(33): Xaa is C or S
XARVVMNRYKKLIVNSSDDFYLVSIANLQTPAX

SEQ ID NO: 2758 - protein, 40 aa, Artificial Sequence
  GFR-binding peptide
  MOD_RES (1)..(3)..(37)..(38): Xaa is C or S
  MOD_RES (15)..(16)..(17)..(18)..(19): Xaa is A or G
  MOD_RES (20)..(21)..(22)..(23): Xaa is A or G or is absent
XGXAKVVMNYHYKLXXXXXXXXXKYLVSIPSLKTPAXXAK

SEQ ID NO: 2759 - protein, 37 aa, Artificial Sequence
  GFR-binding peptide
  MOD_RES (32)..(33): Xaa is C or S
AKVVMNRHKRLIVNNSSDYYLVSTASLKTPAXXAKPV

SEQ ID NO: 2760 - protein, 43 aa, Artificial Sequence
  GFR-binding peptide
  MOD_RES (1)..(3)..(40): Xaa is C or S
  MOD_RES (16)..(17)..(18)..(19)..(20): Xaa is A or G
  MOD_RES (21)..(22)..(23)..(24): Xaa is A or G or is absent
XKXALHDELTYHYKLXXXXXXXXXKYLVSIPSLQVQTPRXQVN

SEQ ID NO: 2761 - protein, 37 aa, Artificial Sequence
  GFR-binding peptide
  MOD_RES (1)..(35)..(36): Xaa is C or S
  MOD_RES (13)..(14)..(15)..(16)..(17): Xaa is A or G
  MOD_RES (18)..(19)..(20)..(21): Xaa is A or G or is absent
XGEVVMEYHYKLXXXXXXXXXKYLMSIPSLETPVXXA

SEQ ID NO: 2762 - protein, 36 aa, Artificial Sequence
  GFR-binding peptide
  MOD_RES (2)..(2): Xaa is C or S
  MOD_RES (15)..(16)..(17)..(18)..(19): Xaa is A or G
  MOD_RES (20)..(21)..(22)..(23): Xaa is A or G or is absent
KXALHDELTYHYKLXXXXXXXXXKYLVSIPSLQVQT

SEQ ID NO: 2763 - protein, 33 aa, Artificial Sequence
  GFR-binding peptide
  MOD_RES (31)..(32): Xaa is C or S
RVVMNRYKKLIVNSSDDFYLVSIANLKTPAXXP

SEQ ID NO: 2764 - protein, 40 aa, Artificial Sequence
  GFR-binding peptide
  MOD_RES (1)..(3)..(37): Xaa is C or S
  MOD_RES (15)..(16)..(17)..(18)..(19): Xaa is A or G
  MOD_RES (20)..(21)..(22)..(23): Xaa is A or G or is absent
XGXSRVVMNYHYKLXXXXXXXXXKYLVSIPSLKTPAXTPK

SEQ ID NO: 2765 - protein, 37 aa, Artificial Sequence
  GFR-binding peptide
  MOD_RES (2)..(2): Xaa is C or S
  MOD_RES (15)..(16)..(17)..(18)..(19): Xaa is A or G
  MOD_RES (20)..(21)..(22)..(23): Xaa is A or G or is absent
KXALHDELTRYKKLXXXXXXXXXFYLVSIANLQVQTP

SEQ ID NO: 2766 - protein, 37 aa, Artificial Sequence
  GFR-binding peptide
  MOD_RES (1)..(35)..(36): Xaa is C or S
  MOD_RES (13)..(14)..(15)..(16)..(17): Xaa is A or G
  MOD_RES (18)..(19)..(20)..(21): Xaa is A or G or is absent
XARVVMNRYKKLXXXXXXXXXFYLVSIANLQTPAXXP

SEQ ID NO: 2767 - protein, 37 aa, Artificial Sequence
  GFR-binding peptide
  MOD_RES (2)..(4): Xaa is C or S
  MOD_RES (16)..(17)..(18)..(19)..(20): Xaa is A or G
  MOD_RES (21)..(22)..(23)..(24): Xaa is A or G or is absent
HXGXSRVVMNRHKRLXXXXXXXXXYYLVSTASLKTPA

SEQ ID NO: 2768 - protein, 41 aa, Artificial Sequence
  GFR-binding peptide
  MOD_RES (1)..(3)..(35)..(36): Xaa is C or S
XGXAKVVMNYHYKLIVNNSSDKYLVSIPSLKTPAXXAKPVA

SEQ ID NO: 2769 - protein, 40 aa, Artificial Sequence
  GFR-binding peptide
  MOD_RES (1)..(34)..(35): Xaa is C or S
  MOD_RES (12)..(13)..(14)..(15)..(16): Xaa is A or G
  MOD_RES (17)..(18)..(19)..(20): Xaa is A or G or is absent
XSKVVMRYKKLXXXXXXXXXFYLISIANLDQPVXXPSASA

SEQ ID NO: 2770 - protein, 36 aa, Artificial Sequence
  GFR-binding peptide
  MOD_RES (1)..(1): Xaa is C or S
XALHDELTQYNKLFIPKKRVIELYLVSIASLQVQTP

SEQ ID NO: 2771 - protein, 32 aa, Artificial Sequence
  GFR-binding peptide
  MOD_RES (11)..(12)..(13)..(14)..(15): Xaa is A or G
  MOD_RES (16)..(17)..(18)..(19): Xaa is A or G or is absent
RVVMNQYNKLXXXXXXXXXLYLVSIASLKTPA

SEQ ID NO: 2772 - protein, 37 aa, Artificial Sequence
  GFR-binding peptide
  MOD_RES (1)..(33)..(34): Xaa is C or S
XGEVVMDRHKRLVVKENEDYYLMSTASLETPVXXAKP

SEQ ID NO: 2773 - protein, 33 aa, Artificial Sequence
  GFR-binding peptide
  MOD_RES (1)..(33): Xaa is C or S
XGEVVMEQYNKLVVKDYEDLYLMSIASLETPVX

SEQ ID NO: 2774 - protein, 44 aa, Artificial Sequence
  GFR-binding peptide
  MOD_RES (2)..(4)..(38)..(39): Xaa is C or S
  MOD_RES (16)..(17)..(18)..(19)..(20): Xaa is A or G
  MOD_RES (21)..(22)..(23)..(24): Xaa is A or G or is absent
RXGXGEVVMEYHYKLXXXXXXXXXKYLMSIPSLETPVXXAKPIS

SEQ ID NO: 2775 - protein, 33 aa, Artificial Sequence
  GFR-binding peptide
  MOD_RES (1)..(3): Xaa is C or S
XKXSKVIMRHKRLIKPTKGIYYLISTASLDQSV

SEQ ID NO: 2776 - protein, 40 aa, Artificial Sequence
  GFR-binding peptide
  MOD_RES (2)..(4)..(35)..(36): Xaa is C or S
SXKXSKVVMRHKRLVKPTRGVYYLISTASLDQPVXXPSAS

SEQ ID NO: 2777 - protein, 35 aa, Artificial Sequence
  GFR-binding peptide
  MOD_RES (2)..(35): Xaa is C or S
  MOD_RES (13)..(14)..(15)..(16)..(17): Xaa is A or G
  MOD_RES (18)..(19)..(20)..(21): Xaa is A or G or is absent
KXSRVIMYHYKLXXXXXXXXXKYLISIPSLAQPVX

SEQ ID NO: 2778 - protein, 44 aa, Artificial Sequence
  GFR-binding peptide
  MOD_RES (2)..(4)..(41): Xaa is C or S
  MOD_RES (17)..(18)..(19)..(20)..(21): Xaa is A or G
  MOD_RES (22)..(23)..(24)..(25): Xaa is A or G or is absent
EXKXALHDELTQYNKLXXXXXXXXXLYLVSIASLQVQTPRXQVN

SEQ ID NO: 2779 - protein, 41 aa, Artificial Sequence
  GFR-binding peptide
  MOD_RES (1)..(35)..(36): Xaa is C or S
  MOD_RES (13)..(14)..(15)..(16)..(17): Xaa is A or G
  MOD_RES (18)..(19)..(20)..(21): Xaa is A or G or is absent
XAKVVMNRHKRLXXXXXXXXXYYLVSTASLKTPAXXAKPVA

SEQ ID NO: 2780 - protein, 37 aa, Artificial Sequence
  GFR-binding peptide
  MOD_RES (1)..(34)..(35): Xaa is C or S
  MOD_RES (12)..(13)..(14)..(15)..(16): Xaa is A or G
  MOD_RES (17)..(18)..(19)..(20): Xaa is A or G or is absent
XSRVIMRYKKLXXXXXXXXXFYLISIANLAQPVXXPA

SEQ ID NO: 2781 - protein, 34 aa, Artificial Sequence
  GFR-binding peptide
  MOD_RES (2)..(33)..(34): Xaa is C or S
KXSKVVMYHYKLVKPTRGVKYLISIPSLDQPVXX

SEQ ID NO: 2782 - protein, 32 aa, Artificial Sequence
  GFR-binding peptide
  MOD_RES (32)..(32): Xaa is C or S
ARVVMNRYKKLIVNSSDDFYLVSIANLQTPAX

SEQ ID NO: 2783 - protein, 39 aa, Artificial Sequence
  GFR-binding peptide
  MOD_RES (1)..(38): Xaa is C or S
XALHDELTRHKRLFIPKKRVIEYYLVSTASLQVQTPRXQ

SEQ ID NO: 2784 - protein, 42 aa, Artificial Sequence
  GFR-binding peptide
  MOD_RES (2)..(37)..(38): Xaa is C or S
  MOD_RES (15)..(16)..(17)..(18)..(19): Xaa is A or G
  MOD_RES (20)..(21)..(22)..(23): Xaa is A or G or is absent
GXEAVSMGERHKRLXXXXXXXXXYYLVSTASLKTPVXXAKGV

SEQ ID NO: 2785 - protein, 35 aa, Artificial Sequence
  GFR-binding peptide
  MOD_RES (2)..(4): Xaa is C or S
HXGXSRVVMNRYKKLIVNSSDDFYLVSIANLKTPA

SEQ ID NO: 2786 - protein, 41 aa, Artificial Sequence
  GFR-binding peptide
  MOD_RES (1)..(3)..(37)..(38): Xaa is C or S
  MOD_RES (15)..(16)..(17)..(18)..(19): Xaa is A or G
  MOD_RES (20)..(21)..(22)..(23): Xaa is A or G or is absent
XGXGEVVMEQYNKLXXXXXXXXXLYLMSIASLETPVXXAKP

SEQ ID NO: 2787 - protein, 33 aa, Artificial Sequence
  GFR-binding peptide
  MOD_RES (32)..(33): Xaa is C or S
SRVVMNRHKRLIVNSSDDYYLVSTASLKTPAXX

SEQ ID NO: 2788 - protein, 41 aa, Artificial Sequence
  GFR-binding peptide
  MOD_RES (37)..(37): Xaa is C or S
ALHDELTYHYKLFIPKKRVIEKYLVSIPSLQVQTPRXQVNR

SEQ ID NO: 2789 - protein, 35 aa, Artificial Sequence
  GFR-binding peptide
  MOD_RES (33)..(34): Xaa is C or S
  MOD_RES (11)..(12)..(13)..(14)..(15): Xaa is A or G
  MOD_RES (16)..(17)..(18)..(19): Xaa is A or G or is absent
SKVVMRYKKLXXXXXXXXXFYLISIANLDQPVXXP

SEQ ID NO: 2790 - protein, 35 aa, Artificial Sequence
  GFR-binding peptide
  MOD_RES (2)..(4)..(35): Xaa is C or S
SXKXSKVIMYHYKLIKPTKGIKYLISIPSLDQSVX

SEQ ID NO: 2791 - protein, 37 aa, Artificial Sequence
  GFR-binding peptide
  MOD_RES (1)..(3)..(34)..(35): Xaa is C or S
XKXSRVIMQYNKLVKPKRGVLYLISIASLAQPVXXPA

SEQ ID NO: 2792 - protein, 36 aa, Artificial Sequence
  GFR-binding peptide
  MOD_RES (32)..(33): Xaa is C or S
GEVVMDRYKKLVVKENEDFYLMSIANLETPVXXAKP

SEQ ID NO: 2793 - protein, 39 aa, Artificial Sequence
  GFR-binding peptide
  MOD_RES (37)..(37): Xaa is C or S
  MOD_RES (13)..(14)..(15)..(16)..(17): Xaa is A or G
  MOD_RES (18)..(19)..(20)..(21): Xaa is A or G or is absent
ALHDELTRYKKLXXXXXXXXXFYLVSIANLQVQTPRXQV

SEQ ID NO: 2794 - protein, 32 aa, Artificial Sequence
  GFR-binding peptide
  MOD_RES (31)..(32): Xaa is C or S
SKVVMQYNKLVKPTRGVLYLISIASLDQPVXX

SEQ ID NO: 2795 - protein, 43 aa, Artificial Sequence
  GFR-binding peptide
  MOD_RES (2)..(4)..(38)..(39): Xaa is C or S
  MOD_RES (16)..(17)..(18)..(19)..(20): Xaa is A or G
  MOD_RES (21)..(22)..(23)..(24): Xaa is A or G or is absent
HXGXAKVVMNRYKKLXXXXXXXXXFYLVSIANLKTPAXXAKPV

SEQ ID NO: 2796 - protein, 34 aa, Artificial Sequence
  GFR-binding peptide
  MOD_RES (31)..(32): Xaa is C or S
RVVMNRHKRLIVNSSDDYYLVSTASLKTPAXXPK

SEQ ID NO: 2797 - protein, 33 aa, Artificial Sequence
  GFR-binding peptide
  MOD_RES (1)..(33): Xaa is C or S
XSRVVMNRHKRLIVNSSDDYYLVSTASLKTPAX

SEQ ID NO: 2798 - protein, 39 aa, Artificial Sequence
  GFR-binding peptide
  MOD_RES (1)..(33)..(34): Xaa is C or S
XAKVVMNYHYKLIVNNSSDKYLVSIPSLKTPAXXAKPVA

SEQ ID NO: 2799 - protein, 42 aa, Artificial Sequence
  GFR-binding peptide
  MOD_RES (1)..(3)..(37)..(38): Xaa is C or S
  MOD_RES (15)..(16)..(17)..(18)..(19): Xaa is A or G
  MOD_RES (20)..(21)..(22)..(23): Xaa is A or G or is absent
XGXAKVVMNYHYKLXXXXXXXXXKYLVSIPSLKTPAXXAKPV

SEQ ID NO: 2800 - protein, 40 aa, Artificial Sequence
  GFR-binding peptide
  MOD_RES (2)..(4)..(37)..(38): Xaa is C or S
  MOD_RES (15)..(16)..(17)..(18)..(19): Xaa is A or G
  MOD_RES (20)..(21)..(22)..(23): Xaa is A or G or is absent
SXKXSRVIMYHYKLXXXXXXXXXKYLISIPSLAQPVXXPA

SEQ ID NO: 2801 - protein, 34 aa, Artificial Sequence
  GFR-binding peptide
  MOD_RES (2)..(34): Xaa is C or S
GXARVVMNRYKKLIVNSSDDFYLVSIANLQTPAX

SEQ ID NO: 2802 - protein, 37 aa, Artificial Sequence
  GFR-binding peptide
  MOD_RES (33)..(34): Xaa is C or S
EAVSMGERYKKLTPVGMDDFYLVSIANLKTPVXXAKG

SEQ ID NO: 2803 - protein, 34 aa, Artificial Sequence
  GFR-binding peptide
  MOD_RES (1)..(3): Xaa is C or S
XGXAKVVMNRHKRLIVNNSSDYYLVSTASLKTPA

SEQ ID NO: 2804 - protein, 34 aa, Artificial Sequence
  GFR-binding peptide
  MOD_RES (1)..(33)..(34): Xaa is C or S
XAKVVMNYHYKLIVNNSSDKYLVSIPSLKTPAXX

SEQ ID NO: 2805 - protein, 36 aa, Artificial Sequence
  GFR-binding peptide
  MOD_RES (2)..(33)..(34): Xaa is C or S
KXSKVIMYHYKLIKPTKGIKYLISIPSLDQSVXXPS

SEQ ID NO: 2806 - protein, 41 aa, Artificial Sequence
  GFR-binding peptide
  MOD_RES (1)..(3)..(37): Xaa is C or S
  MOD_RES (15)..(16)..(17)..(18)..(19): Xaa is A or G
  MOD_RES (20)..(21)..(22)..(23): Xaa is A or G or is absent
XGXSRVVMNYHYKLXXXXXXXXXKYLVSIPSLKTPAXTPKT

SEQ ID NO: 2807 - protein, 36 aa, Artificial Sequence
  GFR-binding peptide
  MOD_RES (1)..(33): Xaa is C or S
XSRVVMNYHYKLIVNSSDDKYLVSIPSLKTPAXTPK

SEQ ID NO: 2808 - protein, 40 aa, Artificial Sequence
  GFR-binding peptide
  MOD_RES (2)..(4)..(36)..(37): Xaa is C or S
HXGXAKVVMNRHKRLIVNNSSDYYLVSTASLKTPAXXAKP

SEQ ID NO: 2809 - protein, 40 aa, Artificial Sequence
  GFR-binding peptide
  MOD_RES (1)..(35)..(36): Xaa is C or S
  MOD_RES (13)..(14)..(15)..(16)..(17): Xaa is A or G
  MOD_RES (18)..(19)..(20)..(21): Xaa is A or G or is absent
XGEVVMERYKKLXXXXXXXXXFYLMSIANLETPVXXAKPI

SEQ ID NO: 2810 - protein, 35 aa, Artificial Sequence
  GFR-binding peptide
  MOD_RES (32)..(33): Xaa is C or S
GEVVMDRYKKLVVKENEDFYLMSIANLETPVXXAK

SEQ ID NO: 2811 - protein, 36 aa, Artificial Sequence
  GFR-binding peptide
  MOD_RES (2)..(36): Xaa is C or S
  MOD_RES (14)..(15)..(16)..(17)..(18): Xaa is A or G
  MOD_RES (19)..(20)..(21)..(22): Xaa is A or G or is absent
GXGEVVMERYKKLXXXXXXXXXFYLMSIANLETPVX

SEQ ID NO: 2812 - protein, 33 aa, Artificial Sequence
  GFR-binding peptide
  MOD_RES (1)..(1): Xaa is C or S
  MOD_RES (12)..(13)..(14)..(15)..(16): Xaa is A or G
  MOD_RES (17)..(18)..(19)..(20): Xaa is A or G or is absent
XSRVIMRYKKLXXXXXXXXXFYLISIANLAQPV

SEQ ID NO: 2813 - protein, 34 aa, Artificial Sequence
  GFR-binding peptide
  MOD_RES (33)..(34): Xaa is C or S
  MOD_RES (11)..(12)..(13)..(14)..(15): Xaa is A or G
  MOD_RES (16)..(17)..(18)..(19): Xaa is A or G or is absent
RVVMNRHKRLXXXXXXXXXYYLVSTASLQTPAXX

SEQ ID NO: 2814 - protein, 34 aa, Artificial Sequence
  GFR-binding peptide
  MOD_RES (34)..(34): Xaa is C or S
  MOD_RES (12)..(13)..(14)..(15)..(16): Xaa is A or G
  MOD_RES (17)..(18)..(19)..(20): Xaa is A or G or is absent
ARVVMNQYNKLXXXXXXXXXLYLVSIASLQTPAX

SEQ ID NO: 2815 - protein, 39 aa, Artificial Sequence
  GFR-binding peptide
  MOD_RES (2)..(4)..(38): Xaa is C or S
  MOD_RES (16)..(17)..(18)..(19)..(20): Xaa is A or G
  MOD_RES (21)..(22)..(23)..(24): Xaa is A or G or is absent
HXGXSRVVMNRHKRLXXXXXXXXXYYLVSTASLKTPAXT

SEQ ID NO: 2816 - protein, 34 aa, Artificial Sequence
  GFR-binding peptide
  MOD_RES (1)..(3)..(34): Xaa is C or S
XKXSKVVMRHKRLVKPTRGVYYLISTASLDQPVX

SEQ ID NO: 2817 - protein, 38 aa, Artificial Sequence
  GFR-binding peptide
  MOD_RES (2)..(36)..(37): Xaa is C or S
  MOD_RES (14)..(15)..(16)..(17)..(18): Xaa is A or G
  MOD_RES (19)..(20)..(21)..(22): Xaa is A or G or is absent
GXSRVVMNQYNKLXXXXXXXXXLYLVSIASLKTPAXXP

SEQ ID NO: 2818 - protein, 36 aa, Artificial Sequence
  GFR-binding peptide
  MOD_RES (2)..(4)..(36): Xaa is C or S
HXGXSRVVMNRHKRLIVNSSDDYYLVSTASLKTPAX

SEQ ID NO: 2819 - protein, 33 aa, Artificial Sequence
  GFR-binding peptide
  MOD_RES (32)..(33): Xaa is C or S
GEVVMDRYKKLVVKENEDFYLMSIANLETPVXX

SEQ ID NO: 2820 - protein, 41 aa, Artificial Sequence
  GFR-binding peptide
  MOD_RES (2)..(4)..(38)..(39): Xaa is C or S
  MOD_RES (16)..(17)..(18)..(19)..(20): Xaa is A or G
  MOD_RES (21)..(22)..(23)..(24): Xaa is A or G or is absent
HXGXAKVVMNRHKRLXXXXXXXXXYYLVSTASLKTPAXXAK

SEQ ID NO: 2821 - protein, 32 aa, Artificial Sequence
  GFR-binding peptide
  MOD_RES (11)..(12)..(13)..(14)..(15): Xaa is A or G
  MOD_RES (16)..(17)..(18)..(19): Xaa is A or G or is absent
RVVMNRHKRLXXXXXXXXXYYLVSTASLKTPA

SEQ ID NO: 2822 - protein, 36 aa, Artificial Sequence
  GFR-binding peptide
  MOD_RES (1)..(3)..(34)..(35): Xaa is C or S
XKXSKVIMYHYKLIKPTKGIKYLISIPSLDQSVXXP

SEQ ID NO: 2823 - protein, 39 aa, Artificial Sequence
  GFR-binding peptide
  MOD_RES (33)..(34): Xaa is C or S
  MOD_RES (11)..(12)..(13)..(14)..(15): Xaa is A or G
  MOD_RES (16)..(17)..(18)..(19): Xaa is A or G or is absent
EVVMDYHYKLXXXXXXXXXKYLMSIPSLETPVXXAKPIK

SEQ ID NO: 2824 - protein, 33 aa, Artificial Sequence
  GFR-binding peptide
  MOD_RES (31)..(32): Xaa is C or S
SKVVMYHYKLVKPTRGVKYLISIPSLDQPVXXP

SEQ ID NO: 2825 - protein, 40 aa, Artificial Sequence
  GFR-binding peptide
  MOD_RES (1)..(35)..(36): Xaa is C or S
  MOD_RES (13)..(14)..(15)..(16)..(17): Xaa is A or G
  MOD_RES (18)..(19)..(20)..(21): Xaa is A or G or is absent
XGEVVMDYHYKLXXXXXXXXXKYLMSIPSLETPVXXAKPI

SEQ ID NO: 2826 - protein, 32 aa, Artificial Sequence
  GFR-binding peptide
  MOD_RES (11)..(12)..(13)..(14)..(15): Xaa is A or G
  MOD_RES (16)..(17)..(18)..(19): Xaa is A or G or is absent
KVVMNRHKRLXXXXXXXXXYYLVSTASLKTPA

SEQ ID NO: 2827 - protein, 32 aa, Artificial Sequence
  GFR-binding peptide
  MOD_RES (1)..(32): Xaa is C or S
XSKVIMRHKRLIKPTKGIYYLISTASLDQSVX

SEQ ID NO: 2828 - protein, 32 aa, Artificial Sequence
  GFR-binding peptide
  MOD_RES (31)..(32): Xaa is C or S
SKVVMYHYKLVKPTRGVKYLISIPSLDQPVXX

SEQ ID NO: 2829 - protein, 39 aa, Artificial Sequence
  GFR-binding peptide
  MOD_RES (2)..(4)..(37)..(38): Xaa is C or S
  MOD_RES (15)..(16)..(17)..(18)..(19): Xaa is A or G
  MOD_RES (20)..(21)..(22)..(23): Xaa is A or G or is absent
SXKXSRVIMQYNKLXXXXXXXXXLYLISIASLAQPVXXP

SEQ ID NO: 2830 - protein, 40 aa, Artificial Sequence
  GFR-binding peptide
  MOD_RES (1)..(3)..(37)..(38): Xaa is C or S
  MOD_RES (15)..(16)..(17)..(18)..(19): Xaa is A or G
  MOD_RES (20)..(21)..(22)..(23): Xaa is A or G or is absent
XGXAKVVMNQYNKLXXXXXXXXXLYLVSIASLKTPAXXAK

SEQ ID NO: 2831 - protein, 39 aa, Artificial Sequence
  GFR-binding peptide
  MOD_RES (1)..(3)..(34)..(35): Xaa is C or S
XKXSRVIMRHKRLVKPKRGVYYLISTASLAQPVXXPAAS

SEQ ID NO: 2832 - protein, 38 aa, Artificial Sequence
  GFR-binding peptide
  MOD_RES (1)..(35)..(36): Xaa is C or S
  MOD_RES (13)..(14)..(15)..(16)..(17): Xaa is A or G
  MOD_RES (18)..(19)..(20)..(21): Xaa is A or G or is absent
XGEVVMDYHYKLXXXXXXXXXKYLMSIPSLETPVXXAK

SEQ ID NO: 2833 - protein, 37 aa, Artificial Sequence
  GFR-binding peptide
  MOD_RES (1)..(36)..(37): Xaa is C or S
  MOD_RES (14)..(15)..(16)..(17)..(18): Xaa is A or G
  MOD_RES (19)..(20)..(21)..(22): Xaa is A or G or is absent
XEAVSMGEQYNKLXXXXXXXXXLYLVSIASLKTPVXX

SEQ ID NO: 2834 - protein, 39 aa, Artificial Sequence
  GFR-binding peptide
  MOD_RES (2)..(4)..(36)..(37): Xaa is C or S
HXGXSRVVMNYHYKLIVNSSDDKYLVSIPSLKTPAXXPK

SEQ ID NO: 2835 - protein, 33 aa, Artificial Sequence
  GFR-binding peptide
LHDELTRHKRLFIPKKRVIEYYLVSTASLQVQT

SEQ ID NO: 2836 - protein, 35 aa, Artificial Sequence
  GFR-binding peptide
  MOD_RES (2)..(34)..(35): Xaa is C or S
GXAKVVMNRHKRLIVNNSSDYYLVSTASLKTPAXX

SEQ ID NO: 2837 - protein, 42 aa, Artificial Sequence
  GFR-binding peptide
  MOD_RES (1)..(3)..(37)..(38): Xaa is C or S
  MOD_RES (15)..(16)..(17)..(18)..(19): Xaa is A or G
  MOD_RES (20)..(21)..(22)..(23): Xaa is A or G or is absent
XGXGEVVMDRHKRLXXXXXXXXXYYLMSTASLETPVXXAKPI

SEQ ID NO: 2838 - protein, 36 aa, Artificial Sequence
  GFR-binding peptide
  MOD_RES (33)..(34): Xaa is C or S
  MOD_RES (11)..(12)..(13)..(14)..(15): Xaa is A or G
  MOD_RES (16)..(17)..(18)..(19): Xaa is A or G or is absent
SKVIMRHKRLXXXXXXXXXYYLISTASLDQSVXXPS

SEQ ID NO: 2839 - protein, 39 aa, Artificial Sequence
  GFR-binding peptide
  MOD_RES (2)..(4)..(39): Xaa is C or S
  MOD_RES (17)..(18)..(19)..(20)..(21): Xaa is A or G
  MOD_RES (22)..(23)..(24)..(25): Xaa is A or G or is absent
RXGXEAVSMGERHKRLXXXXXXXXXYYLVSTASLKTPVX

SEQ ID NO: 2840 - protein, 38 aa, Artificial Sequence
  GFR-binding peptide
  MOD_RES (1)..(3)..(36)..(37): Xaa is C or S
XGXEAVSMGEYHYKLTPVGMDDKYLVSIPSLKTPVXXA

SEQ ID NO: 2841 - protein, 39 aa, Artificial Sequence
  GFR-binding peptide
  MOD_RES (1)..(3)..(34)..(35): Xaa is C or S
XKXSRVIMYHYKLVKPKRGVKYLISIPSLAQPVXXPAAS

SEQ ID NO: 2842 - protein, 35 aa, Artificial Sequence
  GFR-binding peptide
  MOD_RES (34)..(35): Xaa is C or S
  MOD_RES (12)..(13)..(14)..(15)..(16): Xaa is A or G
  MOD_RES (17)..(18)..(19)..(20): Xaa is A or G or is absent
GEVVMDRHKRLXXXXXXXXXYYLMSTASLETPVXX

SEQ ID NO: 2843 - protein, 34 aa, Artificial Sequence
  GFR-binding peptide
  MOD_RES (33)..(34): Xaa is C or S
  MOD_RES (11)..(12)..(13)..(14)..(15): Xaa is A or G
  MOD_RES (16)..(17)..(18)..(19): Xaa is A or G or is absent
SKVVMYHYKLXXXXXXXXXKYLISIPSLDQPVXX

SEQ ID NO: 2844 - protein, 34 aa, Artificial Sequence
  GFR-binding peptide
  MOD_RES (34)..(34): Xaa is C or S
  MOD_RES (12)..(13)..(14)..(15)..(16): Xaa is A or G
  MOD_RES (17)..(18)..(19)..(20): Xaa is A or G or is absent
AKVVMNYHYKLXXXXXXXXXKYLVSIPSLKTPAX

SEQ ID NO: 2845 - protein, 38 aa, Artificial Sequence
  GFR-binding peptide
  MOD_RES (2)..(4)..(36): Xaa is C or S
HXGXSRVVMNYHYKLIVNSSDDKYLVSIPSLKTPAXTP

SEQ ID NO: 2846 - protein, 37 aa, Artificial Sequence
  GFR-binding peptide
  MOD_RES (1)..(32)..(33): Xaa is C or S
XSKVVMRHKRLVKPTRGVYYLISTASLDQPVXXPSAS

SEQ ID NO: 2847 - protein, 40 aa, Artificial Sequence
  GFR-binding peptide
  MOD_RES (2)..(36): Xaa is C or S
  MOD_RES (14)..(15)..(16)..(17)..(18): Xaa is A or G
  MOD_RES (19)..(20)..(21)..(22): Xaa is A or G or is absent
GXSRVVMNRYKKLXXXXXXXXXFYLVSIANLKTPAXTPKT

SEQ ID NO: 2848 - protein, 33 aa, Artificial Sequence
  GFR-binding peptide
  MOD_RES (1)..(3): Xaa is C or S
XKXSRVIMQYNKLVKPKRGVLYLISIASLAQPV

SEQ ID NO: 2849 - protein, 34 aa, Artificial Sequence
  GFR-binding peptide
  MOD_RES (1)..(1): Xaa is C or S
  MOD_RES (13)..(14)..(15)..(16)..(17): Xaa is A or G
  MOD_RES (18)..(19)..(20)..(21): Xaa is A or G or is absent
XGEVVMEYHYKLXXXXXXXXXKYLMSIPSLETPV

SEQ ID NO: 2850 - protein, 40 aa, Artificial Sequence
  GFR-binding peptide
  MOD_RES (1)..(3)..(37)..(38): Xaa is C or S
  MOD_RES (15)..(16)..(17)..(18)..(19): Xaa is A or G
  MOD_RES (20)..(21)..(22)..(23): Xaa is A or G or is absent
XGXARVVMNRYKKLXXXXXXXXXFYLVSIANLQTPAXXPK

SEQ ID NO: 2851 - protein, 39 aa, Artificial Sequence
  GFR-binding peptide
  MOD_RES (1)..(35)..(36): Xaa is C or S
  MOD_RES (13)..(14)..(15)..(16)..(17): Xaa is A or G
  MOD_RES (18)..(19)..(20)..(21): Xaa is A or G or is absent
XSRVVMNRHKRLXXXXXXXXXYYLVSTASLKTPAXXPKP

SEQ ID NO: 2852 - protein, 38 aa, Artificial Sequence
  GFR-binding peptide
  MOD_RES (32)..(33): Xaa is C or S
GEVVMERHKRLVVKDYEDYYLMSTASLETPVXXAKPIS

SEQ ID NO: 2853 - protein, 43 aa, Artificial Sequence
  GFR-binding peptide
  MOD_RES (1)..(3)..(37)..(38): Xaa is C or S
  MOD_RES (15)..(16)..(17)..(18)..(19): Xaa is A or G
  MOD_RES (20)..(21)..(22)..(23): Xaa is A or G or is absent
XGXGEVVMERYKKLXXXXXXXXXFYLMSIANLETPVXXAKPIS

SEQ ID NO: 2854 - protein, 37 aa, Artificial Sequence
  GFR-binding peptide
  MOD_RES (1)..(3): Xaa is C or S
XKXALHDELTRYKKLFIPKKRVIEFYLVSIANLQVQT

SEQ ID NO: 2855 - protein, 38 aa, Artificial Sequence
  GFR-binding peptide
  MOD_RES (2)..(4)..(36)..(37): Xaa is C or S
RXGXGEVVMERYKKLVVKDYEDFYLMSIANLETPVXXA

SEQ ID NO: 2856 - protein, 35 aa, Artificial Sequence
  GFR-binding peptide
  MOD_RES (1)..(3)..(35): Xaa is C or S
XGXGEVVMDRHKRLVVKENEDYYLMSTASLETPVX

SEQ ID NO: 2857 - protein, 40 aa, Artificial Sequence
  GFR-binding peptide
  MOD_RES (2)..(35)..(36): Xaa is C or S
  MOD_RES (13)..(14)..(15)..(16)..(17): Xaa is A or G
  MOD_RES (18)..(19)..(20)..(21): Xaa is A or G or is absent
KXSRVIMRHKRLXXXXXXXXXYYLISTASLAQPVXXPAAS

SEQ ID NO: 2858 - protein, 38 aa, Artificial Sequence
  GFR-binding peptide
  MOD_RES (1)..(3)..(35)..(36): Xaa is C or S
XGXGEVVMEQYNKLVVKDYEDLYLMSIASLETPVXXAK

SEQ ID NO: 2859 - protein, 37 aa, Artificial Sequence
  GFR-binding peptide
  MOD_RES (1)..(33)..(34): Xaa is C or S
XGEVVMDQYNKLVVKENEDLYLMSIASLETPVXXAKP

SEQ ID NO: 2860 - protein, 36 aa, Artificial Sequence
  GFR-binding peptide
  MOD_RES (1)..(1): Xaa is C or S
  MOD_RES (14)..(15)..(16)..(17)..(18): Xaa is A or G
  MOD_RES (19)..(20)..(21)..(22): Xaa is A or G or is absent
XALHDELTQYNKLXXXXXXXXXLYLVSIASLQVQTP

SEQ ID NO: 2861 - protein, 35 aa, Artificial Sequence
  GFR-binding peptide
  MOD_RES (13)..(14)..(15)..(16)..(17): Xaa is A or G
  MOD_RES (18)..(19)..(20)..(21): Xaa is A or G or is absent
ALHDELTYHYKLXXXXXXXXXKYLVSIPSLQVQTP

SEQ ID NO: 2862 - protein, 40 aa, Artificial Sequence
  GFR-binding peptide
  MOD_RES (1)..(3)..(37)..(38): Xaa is C or S
  MOD_RES (15)..(16)..(17)..(18)..(19): Xaa is A or G
  MOD_RES (20)..(21)..(22)..(23): Xaa is A or G or is absent
XGXSRVVMNRYKKLXXXXXXXXXFYLVSIANLKTPAXXPK

SEQ ID NO: 2863 - protein, 35 aa, Artificial Sequence
  GFR-binding peptide
  MOD_RES (2)..(4)..(35): Xaa is C or S
SXKXSKVVMQYNKLVKPTRGVLYLISIASLDQPVX

SEQ ID NO: 2864 - protein, 44 aa, Artificial Sequence
  GFR-binding peptide
  MOD_RES (2)..(4)..(38): Xaa is C or S
  MOD_RES (16)..(17)..(18)..(19)..(20): Xaa is A or G
  MOD_RES (21)..(22)..(23)..(24): Xaa is A or G or is absent
HXGXSRVVMNRYKKLXXXXXXXXXFYLVSIANLKTPAXTPKTVH

SEQ ID NO: 2865 - protein, 36 aa, Artificial Sequence
  GFR-binding peptide
  MOD_RES (2)..(35)..(36): Xaa is C or S
  MOD_RES (13)..(14)..(15)..(16)..(17): Xaa is A or G
  MOD_RES (18)..(19)..(20)..(21): Xaa is A or G or is absent
KXSRVIMYHYKLXXXXXXXXXKYLISIPSLAQPVXX

SEQ ID NO: 2866 - protein, 37 aa, Artificial Sequence
  GFR-binding peptide
  MOD_RES (1)..(3): Xaa is C or S
  MOD_RES (16)..(17)..(18)..(19)..(20): Xaa is A or G
  MOD_RES (21)..(22)..(23)..(24): Xaa is A or G or is absent
XGXEAVSMGEQYNKLXXXXXXXXXLYLVSIASLKTPV

SEQ ID NO: 2867 - protein, 42 aa, Artificial Sequence
  GFR-binding peptide
  MOD_RES (1)..(36)..(37): Xaa is C or S
  MOD_RES (14)..(15)..(16)..(17)..(18): Xaa is A or G
  MOD_RES (19)..(20)..(21)..(22): Xaa is A or G or is absent
XEAVSMGERHKRLXXXXXXXXXYYLVSTASLKTPVXXAKGVK

SEQ ID NO: 2868 - protein, 39 aa, Artificial Sequence
  GFR-binding peptide
  MOD_RES (33)..(34): Xaa is C or S
  MOD_RES (11)..(12)..(13)..(14)..(15): Xaa is A or G
  MOD_RES (16)..(17)..(18)..(19): Xaa is A or G or is absent
SRVIMRHKRLXXXXXXXXXYYLISTASLAQPVXXPAASA

SEQ ID NO: 2869 - protein, 38 aa, Artificial Sequence
  GFR-binding peptide
  MOD_RES (1)..(36)..(37): Xaa is C or S
  MOD_RES (14)..(15)..(16)..(17)..(18): Xaa is A or G
  MOD_RES (19)..(20)..(21)..(22): Xaa is A or G or is absent
XEAVSMGERHKRLXXXXXXXXXYYLVSTASLKTPVXXA

SEQ ID NO: 2870 - protein, 39 aa, Artificial Sequence
  GFR-binding peptide
  MOD_RES (1)..(34)..(35): Xaa is C or S
  MOD_RES (12)..(13)..(14)..(15)..(16): Xaa is A or G
  MOD_RES (17)..(18)..(19)..(20): Xaa is A or G or is absent
XSKVIMRYKKLXXXXXXXXXFYLISIANLDQSVXXPSAS

SEQ ID NO: 2871 - protein, 35 aa, Artificial Sequence
  GFR-binding peptide
  MOD_RES (1)..(34)..(35): Xaa is C or S
  MOD_RES (12)..(13)..(14)..(15)..(16): Xaa is A or G
  MOD_RES (17)..(18)..(19)..(20): Xaa is A or G or is absent
XSKVVMRYKKLXXXXXXXXXFYLISIANLDQPVXX

SEQ ID NO: 2872 - protein, 33 aa, Artificial Sequence
  GFR-binding peptide
  MOD_RES (33)..(33): Xaa is C or S
  MOD_RES (11)..(12)..(13)..(14)..(15): Xaa is A or G
  MOD_RES (16)..(17)..(18)..(19): Xaa is A or G or is absent
EVVMEYHYKLXXXXXXXXXKYLMSIPSLETPVX

SEQ ID NO: 2873 - protein, 39 aa, Artificial Sequence
  GFR-binding peptide
  MOD_RES (2)..(4): Xaa is C or S
  MOD_RES (17)..(18)..(19)..(20)..(21): Xaa is A or G
  MOD_RES (22)..(23)..(24)..(25): Xaa is A or G or is absent
EXKXALHDELTRYKKLXXXXXXXXXFYLVSIANLQVQTP

SEQ ID NO: 2874 - protein, 39 aa, Artificial Sequence
  GFR-binding peptide
  MOD_RES (1)..(34)..(35): Xaa is C or S
  MOD_RES (12)..(13)..(14)..(15)..(16): Xaa is A or G
  MOD_RES (17)..(18)..(19)..(20): Xaa is A or G or is absent
XSKVVMRHKRLXXXXXXXXXYYLISTASLDQPVXXPSAS

SEQ ID NO: 2875 - protein, 34 aa, Artificial Sequence
  GFR-binding peptide
  MOD_RES (1)..(32)..(33): Xaa is C or S
XSKVVMYHYKLVKPTRGVKYLISIPSLDQPVXXP

SEQ ID NO: 2876 - protein, 34 aa, Artificial Sequence
  GFR-binding peptide
  MOD_RES (32)..(33): Xaa is C or S
AKVVMNRYKKLIVNNSSDFYLVSIANLKTPAXXA

SEQ ID NO: 2877 - protein, 33 aa, Artificial Sequence
  GFR-binding peptide
  MOD_RES (32)..(33): Xaa is C or S
SRVVMNQYNKLIVNSSDDLYLVSIASLKTPAXX

SEQ ID NO: 2878 - protein, 33 aa, Artificial Sequence
  GFR-binding peptide
  MOD_RES (2)..(2): Xaa is C or S
GXSRVVMNRHKRLIVNSSDDYYLVSTASLKTPA

SEQ ID NO: 2879 - protein, 37 aa, Artificial Sequence
  GFR-binding peptide
  MOD_RES (2)..(36)..(37): Xaa is C or S
  MOD_RES (14)..(15)..(16)..(17)..(18): Xaa is A or G
  MOD_RES (19)..(20)..(21)..(22): Xaa is A or G or is absent
GXGEVVMDQYNKLXXXXXXXXXLYLMSIASLETPVXX

SEQ ID NO: 2880 - protein, 33 aa, Artificial Sequence
  GFR-binding peptide
  MOD_RES (1)..(33): Xaa is C or S
XSRVVMNQYNKLIVNSSDDLYLVSIASLKTPAX

SEQ ID NO: 2881 - protein, 31 aa, Artificial Sequence
  GFR-binding peptide
GEVVMERHKRLVVKDYEDYYLMSTASLETPV

SEQ ID NO: 2882 - protein, 37 aa, Artificial Sequence
  GFR-binding peptide
  MOD_RES (2)..(33)..(34): Xaa is C or S
KXSRVIMYHYKLVKPKRGVKYLISIPSLAQPVXXPAA

SEQ ID NO: 2883 - protein, 40 aa, Artificial Sequence
  GFR-binding peptide
  MOD_RES (2)..(4)..(38)..(39): Xaa is C or S
  MOD_RES (16)..(17)..(18)..(19)..(20): Xaa is A or G
  MOD_RES (21)..(22)..(23)..(24): Xaa is A or G or is absent
HXGXSRVVMNRYKKLXXXXXXXXXFYLVSIANLKTPAXXP

SEQ ID NO: 2884 - protein, 43 aa, Artificial Sequence
  GFR-binding peptide
  MOD_RES (2)..(4)..(37)..(38): Xaa is C or S
  MOD_RES (15)..(16)..(17)..(18)..(19): Xaa is A or G
  MOD_RES (20)..(21)..(22)..(23): Xaa is A or G or is absent
SXKXSKVIMRHKRLXXXXXXXXXYYLISTASLDQSVXXPSASA

SEQ ID NO: 2885 - protein, 41 aa, Artificial Sequence
  GFR-binding peptide
  MOD_RES (37)..(37): Xaa is C or S
  MOD_RES (13)..(14)..(15)..(16)..(17): Xaa is A or G
  MOD_RES (18)..(19)..(20)..(21): Xaa is A or G or is absent
ALHDELTQYNKLXXXXXXXXXLYLVSIASLQVQTPRXQVNR

SEQ ID NO: 2886 - protein, 36 aa, Artificial Sequence
  GFR-binding peptide
  MOD_RES (1)..(3)..(35)..(36): Xaa is C or S
XGXSRVVMNRYKKLIVNSSDDFYLVSIANLKTPAXX

SEQ ID NO: 2887 - protein, 40 aa, Artificial Sequence
  GFR-binding peptide
  MOD_RES (2)..(4)..(38)..(39): Xaa is C or S
  MOD_RES (16)..(17)..(18)..(19)..(20): Xaa is A or G
  MOD_RES (21)..(22)..(23)..(24): Xaa is A or G or is absent
RXGXGEVVMDYHYKLXXXXXXXXXKYLMSIPSLETPVXXA

SEQ ID NO: 2888 - protein, 34 aa, Artificial Sequence
  GFR-binding peptide
  MOD_RES (1)..(3): Xaa is C or S
XGXGEVVMDYHYKLVVKENEDKYLMSIPSLETPV

SEQ ID NO: 2889 - protein, 36 aa, Artificial Sequence
  GFR-binding peptide
  MOD_RES (1)..(3)..(35): Xaa is C or S
XGXSRVVMNRYKKLIVNSSDDFYLVSIANLKTPAXT

SEQ ID NO: 2890 - protein, 41 aa, Artificial Sequence
  GFR-binding peptide
  MOD_RES (2)..(4)..(38)..(39): Xaa is C or S
  MOD_RES (16)..(17)..(18)..(19)..(20): Xaa is A or G
  MOD_RES (21)..(22)..(23)..(24): Xaa is A or G or is absent
HXGXAKVVMNYHYKLXXXXXXXXXKYLVSIPSLKTPAXXAK

SEQ ID NO: 2891 - protein, 32 aa, Artificial Sequence
  GFR-binding peptide
  MOD_RES (11)..(12)..(13)..(14)..(15): Xaa is A or G
  MOD_RES (16)..(17)..(18)..(19): Xaa is A or G or is absent
KVVMNQYNKLXXXXXXXXXLYLVSIASLKTPA

SEQ ID NO: 2892 - protein, 39 aa, Artificial Sequence
  GFR-binding peptide
  MOD_RES (1)..(34)..(35): Xaa is C or S
  MOD_RES (12)..(13)..(14)..(15)..(16): Xaa is A or G
  MOD_RES (17)..(18)..(19)..(20): Xaa is A or G or is absent
XSKVVMQYNKLXXXXXXXXXLYLISIASLDQPVXXPSAS

SEQ ID NO: 2893 - protein, 39 aa, Artificial Sequence
  GFR-binding peptide
  MOD_RES (2)..(35)..(36): Xaa is C or S
  MOD_RES (13)..(14)..(15)..(16)..(17): Xaa is A or G
  MOD_RES (18)..(19)..(20)..(21): Xaa is A or G or is absent
KXSKVVMYHYKLXXXXXXXXXKYLISIPSLDQPVXXPSA

SEQ ID NO: 2894 - protein, 37 aa, Artificial Sequence
  GFR-binding peptide
  MOD_RES (2)..(35)..(36): Xaa is C or S
  MOD_RES (13)..(14)..(15)..(16)..(17): Xaa is A or G
  MOD_RES (18)..(19)..(20)..(21): Xaa is A or G or is absent
KXSRVIMRYKKLXXXXXXXXXFYLISIANLAQPVXXP

SEQ ID NO: 2895 - protein, 39 aa, Artificial Sequence
  GFR-binding peptide
  MOD_RES (1)..(36)..(37): Xaa is C or S
  MOD_RES (14)..(15)..(16)..(17)..(18): Xaa is A or G
  MOD_RES (19)..(20)..(21)..(22): Xaa is A or G or is absent
XEAVSMGEYHYKLXXXXXXXXXKYLVSIPSLKTPVXXAK

SEQ ID NO: 2896 - protein, 37 aa, Artificial Sequence
  GFR-binding peptide
  MOD_RES (2)..(4)..(35)..(36): Xaa is C or S
SXKXSKVVMRYKKLVKPTRGVFYLISIANLDQPVXXP

SEQ ID NO: 2897 - protein, 36 aa, Artificial Sequence
  GFR-binding peptide
  MOD_RES (1)..(35)..(36): Xaa is C or S
  MOD_RES (13)..(14)..(15)..(16)..(17): Xaa is A or G
  MOD_RES (18)..(19)..(20)..(21): Xaa is A or G or is absent
XAKVVMNRYKKLXXXXXXXXXFYLVSIANLKTPAXX

SEQ ID NO: 2898 - protein, 34 aa, Artificial Sequence
  GFR-binding peptide
  MOD_RES (1)..(1): Xaa is C or S
  MOD_RES (13)..(14)..(15)..(16)..(17): Xaa is A or G
  MOD_RES (18)..(19)..(20)..(21): Xaa is A or G or is absent
XGEVVMDRHKRLXXXXXXXXXYYLMSTASLETPV

SEQ ID NO: 2899 - protein, 41 aa, Artificial Sequence
  GFR-binding peptide
  MOD_RES (2)..(4)..(36): Xaa is C or S
HXGXSRVVMNRYKKLIVNSSDDFYLVSIANLKTPAXTPKTV

SEQ ID NO: 2900 - protein, 42 aa, Artificial Sequence
  GFR-binding peptide
  MOD_RES (2)..(36)..(37): Xaa is C or S
  MOD_RES (14)..(15)..(16)..(17)..(18): Xaa is A or G
  MOD_RES (19)..(20)..(21)..(22): Xaa is A or G or is absent
GXGEVVMDQYNKLXXXXXXXXXLYLMSIASLETPVXXAKPIK

SEQ ID NO: 2901 - protein, 35 aa, Artificial Sequence
  GFR-binding peptide
  MOD_RES (1)..(35): Xaa is C or S
  MOD_RES (13)..(14)..(15)..(16)..(17): Xaa is A or G
  MOD_RES (18)..(19)..(20)..(21): Xaa is A or G or is absent
XARVVMNYHYKLXXXXXXXXXKYLVSIPSLQTPAX

SEQ ID NO: 2902 - protein, 41 aa, Artificial Sequence
  GFR-binding peptide
  MOD_RES (37)..(37): Xaa is C or S
  MOD_RES (13)..(14)..(15)..(16)..(17): Xaa is A or G
  MOD_RES (18)..(19)..(20)..(21): Xaa is A or G or is absent
ALHDELTRHKRLXXXXXXXXXYYLVSTASLQVQTPRXQVNR

SEQ ID NO: 2903 - protein, 34 aa, Artificial Sequence
  GFR-binding peptide
  MOD_RES (33)..(34): Xaa is C or S
  MOD_RES (11)..(12)..(13)..(14)..(15): Xaa is A or G
  MOD_RES (16)..(17)..(18)..(19): Xaa is A or G or is absent
EVVMDQYNKLXXXXXXXXXLYLMSIASLETPVXX

SEQ ID NO: 2904 - protein, 32 aa, Artificial Sequence
  GFR-binding peptide
  MOD_RES (32)..(32): Xaa is C or S
ARVVMNQYNKLIVNSSDDLYLVSIASLQTPAX

SEQ ID NO: 2905 - protein, 44 aa, Artificial Sequence
  GFR-binding peptide
  MOD_RES (2)..(4)..(38)..(39): Xaa is C or S
  MOD_RES (16)..(17)..(18)..(19)..(20): Xaa is A or G
  MOD_RES (21)..(22)..(23)..(24): Xaa is A or G or is absent
RXGXGEVVMERHKRLXXXXXXXXXYYLMSTASLETPVXXAKPIS

SEQ ID NO: 2906 - protein, 32 aa, Artificial Sequence
  GFR-binding peptide
  MOD_RES (32)..(32): Xaa is C or S
SRVVMNRYKKLIVNSSDDFYLVSIANLKTPAX

SEQ ID NO: 2907 - protein, 31 aa, Artificial Sequence
  GFR-binding peptide
  MOD_RES (31)..(31): Xaa is C or S
RVVMNYHYKLIVNSSDDKYLVSIPSLKTPAX

SEQ ID NO: 2908 - protein, 38 aa, Artificial Sequence
  GFR-binding peptide
  MOD_RES (2)..(4)..(36)..(37): Xaa is C or S
HXGXSRVVMNYHYKLIVNSSDDKYLVSIPSLKTPAXXP

SEQ ID NO: 2909 - protein, 38 aa, Artificial Sequence
  GFR-binding peptide
  MOD_RES (2)..(4)..(37)..(38): Xaa is C or S
  MOD_RES (15)..(16)..(17)..(18)..(19): Xaa is A or G
  MOD_RES (20)..(21)..(22)..(23): Xaa is A or G or is absent
SXKXSRVIMRHKRLXXXXXXXXXYYLISTASLAQPVXX

SEQ ID NO: 2910 - protein, 36 aa, Artificial Sequence
  GFR-binding peptide
  MOD_RES (2)..(4): Xaa is C or S
  MOD_RES (15)..(16)..(17)..(18)..(19): Xaa is A or G
  MOD_RES (20)..(21)..(22)..(23): Xaa is A or G or is absent
SXKXSKVVMYHYKLXXXXXXXXXKYLISIPSLDQPV

SEQ ID NO: 2911 - protein, 35 aa, Artificial Sequence
  GFR-binding peptide
  MOD_RES (31)..(32): Xaa is C or S
RVVMNQYNKLIVNSSDDLYLVSIASLKTPAXXPKP

SEQ ID NO: 2912 - protein, 39 aa, Artificial Sequence
  GFR-binding peptide
  MOD_RES (33)..(34): Xaa is C or S
  MOD_RES (11)..(12)..(13)..(14)..(15): Xaa is A or G
  MOD_RES (16)..(17)..(18)..(19): Xaa is A or G or is absent
EVVMDQYNKLXXXXXXXXXLYLMSIASLETPVXXAKPIK

SEQ ID NO: 2913 - protein, 42 aa, Artificial Sequence
  GFR-binding peptide
  MOD_RES (2)..(4)..(37)..(38): Xaa is C or S
  MOD_RES (15)..(16)..(17)..(18)..(19): Xaa is A or G
  MOD_RES (20)..(21)..(22)..(23): Xaa is A or G or is absent
SXKXSKVVMRYKKLXXXXXXXXXFYLISIANLDQPVXXPSAS

SEQ ID NO: 2914 - protein, 38 aa, Artificial Sequence
  GFR-binding peptide
  MOD_RES (1)..(3)..(37)..(38): Xaa is C or S
  MOD_RES (15)..(16)..(17)..(18)..(19): Xaa is A or G
  MOD_RES (20)..(21)..(22)..(23): Xaa is A or G or is absent
XGXGEVVMDQYNKLXXXXXXXXXLYLMSIASLETPVXX

SEQ ID NO: 2915 - protein, 38 aa, Artificial Sequence
  GFR-binding peptide
  MOD_RES (37)..(37): Xaa is C or S
  MOD_RES (13)..(14)..(15)..(16)..(17): Xaa is A or G
  MOD_RES (18)..(19)..(20)..(21): Xaa is A or G or is absent
ALHDELTRYKKLXXXXXXXXXFYLVSIANLQVQTPRXQ

SEQ ID NO: 2916 - protein, 40 aa, Artificial Sequence
  GFR-binding peptide
  MOD_RES (1)..(3)..(36)..(37): Xaa is C or S
XGXEAVSMGEQYNKLTPVGMDDLYLVSIASLKTPVXXAKG

SEQ ID NO: 2917 - protein, 33 aa, Artificial Sequence
  GFR-binding peptide
  MOD_RES (33)..(33): Xaa is C or S
EAVSMGERYKKLTPVGMDDFYLVSIANLKTPVX

SEQ ID NO: 2918 - protein, 35 aa, Artificial Sequence
  GFR-binding peptide
  MOD_RES (33)..(34): Xaa is C or S
  MOD_RES (11)..(12)..(13)..(14)..(15): Xaa is A or G
  MOD_RES (16)..(17)..(18)..(19): Xaa is A or G or is absent
EVVMERYKKLXXXXXXXXXFYLMSIANLETPVXXA

SEQ ID NO: 2919 - protein, 40 aa, Artificial Sequence
  GFR-binding peptide
  MOD_RES (1)..(35)..(36): Xaa is C or S
  MOD_RES (13)..(14)..(15)..(16)..(17): Xaa is A or G
  MOD_RES (18)..(19)..(20)..(21): Xaa is A or G or is absent
XSRVVMNRYKKLXXXXXXXXXFYLVSIANLKTPAXXPKPV

SEQ ID NO: 2920 - protein, 37 aa, Artificial Sequence
  GFR-binding peptide
  MOD_RES (32)..(33): Xaa is C or S
ARVVMNRYKKLIVNSSDDFYLVSIANLQTPAXXPKPV

SEQ ID NO: 2921 - protein, 41 aa, Artificial Sequence
  GFR-binding peptide
  MOD_RES (2)..(35)..(36): Xaa is C or S
GXEAVSMGEQYNKLTPVGMDDLYLVSIASLKTPVXXAKGVK

SEQ ID NO: 2922 - protein, 39 aa, Artificial Sequence
  GFR-binding peptide
  MOD_RES (2)..(4)..(38)..(39): Xaa is C or S
  MOD_RES (16)..(17)..(18)..(19)..(20): Xaa is A or G
  MOD_RES (21)..(22)..(23)..(24): Xaa is A or G or is absent
HXGXAKVVMNRYKKLXXXXXXXXXFYLVSIANLKTPAXX

SEQ ID NO: 2923 - protein, 41 aa, Artificial Sequence
  GFR-binding peptide
  MOD_RES (2)..(4)..(39)..(40): Xaa is C or S
  MOD_RES (17)..(18)..(19)..(20)..(21): Xaa is A or G
  MOD_RES (22)..(23)..(24)..(25): Xaa is A or G or is absent
RXGXEAVSMGEQYNKLXXXXXXXXXLYLVSIASLKTPVXXA

SEQ ID NO: 2924 - protein, 40 aa, Artificial Sequence
  GFR-binding peptide
  MOD_RES (2)..(4)..(37)..(38): Xaa is C or S
  MOD_RES (15)..(16)..(17)..(18)..(19): Xaa is A or G
  MOD_RES (20)..(21)..(22)..(23): Xaa is A or G or is absent
SXKXSKVIMRYKKLXXXXXXXXXFYLISIANLDQSVXXPS

SEQ ID NO: 2925 - protein, 37 aa, Artificial Sequence
  GFR-binding peptide
  MOD_RES (1)..(3): Xaa is C or S
  MOD_RES (16)..(17)..(18)..(19)..(20): Xaa is A or G
  MOD_RES (21)..(22)..(23)..(24): Xaa is A or G or is absent
XGXEAVSMGERHKRLXXXXXXXXXYYLVSTASLKTPV

SEQ ID NO: 2926 - protein, 39 aa, Artificial Sequence
  GFR-binding peptide
  MOD_RES (2)..(36)..(37): Xaa is C or S
  MOD_RES (14)..(15)..(16)..(17)..(18): Xaa is A or G
  MOD_RES (19)..(20)..(21)..(22): Xaa is A or G or is absent
GXGEVVMEYHYKLXXXXXXXXXKYLMSIPSLETPVXXAK

SEQ ID NO: 2927 - protein, 42 aa, Artificial Sequence
  GFR-binding peptide
  MOD_RES (2)..(37)..(38): Xaa is C or S
  MOD_RES (15)..(16)..(17)..(18)..(19): Xaa is A or G
  MOD_RES (20)..(21)..(22)..(23): Xaa is A or G or is absent
GXEAVSMGEQYNKLXXXXXXXXXLYLVSIASLKTPVXXAKGV

SEQ ID NO: 2928 - protein, 40 aa, Artificial Sequence
  GFR-binding peptide
  MOD_RES (2)..(4)..(35)..(36): Xaa is C or S
SXKXSKVIMYHYKLIKPTKGIKYLISIPSLDQSVXXPSAS

SEQ ID NO: 2929 - protein, 40 aa, Artificial Sequence
  GFR-binding peptide
  MOD_RES (1)..(3)..(34)..(35): Xaa is C or S
XKXSKVVMQYNKLVKPTRGVLYLISIASLDQPVXXPSASA

SEQ ID NO: 2930 - protein, 40 aa, Artificial Sequence
  GFR-binding peptide
  MOD_RES (1)..(3)..(38)..(39): Xaa is C or S
  MOD_RES (16)..(17)..(18)..(19)..(20): Xaa is A or G
  MOD_RES (21)..(22)..(23)..(24): Xaa is A or G or is absent
XGXEAVSMGEQYNKLXXXXXXXXXLYLVSIASLKTPVXXA

SEQ ID NO: 2931 - protein, 37 aa, Artificial Sequence
  GFR-binding peptide
  MOD_RES (2)..(4): Xaa is C or S
  MOD_RES (16)..(17)..(18)..(19)..(20): Xaa is A or G
  MOD_RES (21)..(22)..(23)..(24): Xaa is A or G or is absent
HXGXARVVMNRYKKLXXXXXXXXXFYLVSIANLQTPA

SEQ ID NO: 2932 - protein, 35 aa, Artificial Sequence
  GFR-binding peptide
  MOD_RES (1)..(34)..(35): Xaa is C or S
XEAVSMGEQYNKLTPVGMDDLYLVSIASLKTPVXX

SEQ ID NO: 2933 - protein, 36 aa, Artificial Sequence
  GFR-binding peptide
  MOD_RES (2)..(2): Xaa is C or S
KXALHDELTRYKKLFIPKKRVIEFYLVSIANLQVQT

SEQ ID NO: 2934 - protein, 38 aa, Artificial Sequence
  GFR-binding peptide
  MOD_RES (2)..(34)..(35): Xaa is C or S
GXSRVVMNRHKRLIVNSSDDYYLVSTASLKTPAXXPKP

SEQ ID NO: 2935 - protein, 37 aa, Artificial Sequence
  GFR-binding peptide
  MOD_RES (2)..(4)..(37): Xaa is C or S
  MOD_RES (15)..(16)..(17)..(18)..(19): Xaa is A or G
  MOD_RES (20)..(21)..(22)..(23): Xaa is A or G or is absent
SXKXSKVIMQYNKLXXXXXXXXXLYLISIASLDQSVX

SEQ ID NO: 2936 - protein, 36 aa, Artificial Sequence
  GFR-binding peptide
  MOD_RES (34)..(35): Xaa is C or S
  MOD_RES (12)..(13)..(14)..(15)..(16): Xaa is A or G
  MOD_RES (17)..(18)..(19)..(20): Xaa is A or G or is absent
AKVVMNRYKKLXXXXXXXXXFYLVSIANLKTPAXXA

SEQ ID NO: 2937 - protein, 41 aa, Artificial Sequence
  GFR-binding peptide
  MOD_RES (1)..(3)..(35)..(36): Xaa is C or S
XGXGEVVMERHKRLVVKDYEDYYLMSTASLETPVXXAKPIS

SEQ ID NO: 2938 - protein, 37 aa, Artificial Sequence
  GFR-binding peptide
  MOD_RES (1)..(33)..(34): Xaa is C or S
XAKVVMNRYKKLIVNNSSDFYLVSIANLKTPAXXAKP

SEQ ID NO: 2939 - protein, 35 aa, Artificial Sequence
  GFR-binding peptide
  MOD_RES (1)..(3)..(34)..(35): Xaa is C or S
XKXSKVVMRHKRLVKPTRGVYYLISTASLDQPVXX

SEQ ID NO: 2940 - protein, 38 aa, Artificial Sequence
  GFR-binding peptide
  MOD_RES (2)..(34)..(35): Xaa is C or S
GXAKVVMNYHYKLIVNNSSDKYLVSIPSLKTPAXXAKP

SEQ ID NO: 2941 - protein, 38 aa, Artificial Sequence
  GFR-binding peptide
  MOD_RES (34)..(35): Xaa is C or S
  MOD_RES (12)..(13)..(14)..(15)..(16): Xaa is A or G
  MOD_RES (17)..(18)..(19)..(20): Xaa is A or G or is absent
SRVVMNYHYKLXXXXXXXXXKYLVSIPSLKTPAXXPKP

SEQ ID NO: 2942 - protein, 40 aa, Artificial Sequence
  GFR-binding peptide
  MOD_RES (2)..(4)..(38)..(39): Xaa is C or S
  MOD_RES (16)..(17)..(18)..(19)..(20): Xaa is A or G
  MOD_RES (21)..(22)..(23)..(24): Xaa is A or G or is absent
HXGXSRVVMNYHYKLXXXXXXXXXKYLVSIPSLKTPAXXP

SEQ ID NO: 2943 - protein, 35 aa, Artificial Sequence
  GFR-binding peptide
  MOD_RES (32)..(33): Xaa is C or S
SRVVMNQYNKLIVNSSDDLYLVSIASLKTPAXXPK

SEQ ID NO: 2944 - protein, 38 aa, Artificial Sequence
  GFR-binding peptide
  MOD_RES (34)..(35): Xaa is C or S
  MOD_RES (12)..(13)..(14)..(15)..(16): Xaa is A or G
  MOD_RES (17)..(18)..(19)..(20): Xaa is A or G or is absent
SRVVMNRHKRLXXXXXXXXXYYLVSTASLKTPAXXPKP

SEQ ID NO: 2945 - protein, 38 aa, Artificial Sequence
  GFR-binding peptide
  MOD_RES (2)..(4): Xaa is C or S
  MOD_RES (17)..(18)..(19)..(20)..(21): Xaa is A or G
  MOD_RES (22)..(23)..(24)..(25): Xaa is A or G or is absent
RXGXEAVSMGEYHYKLXXXXXXXXXKYLVSIPSLKTPV

SEQ ID NO: 2946 - protein, 37 aa, Artificial Sequence
  GFR-binding peptide
  MOD_RES (2)..(4)..(36)..(37): Xaa is C or S
RXGXGEVVMDQYNKLVVKENEDLYLMSIASLETPVXX

SEQ ID NO: 2947 - protein, 34 aa, Artificial Sequence
  GFR-binding peptide
  MOD_RES (1)..(1): Xaa is C or S
  MOD_RES (13)..(14)..(15)..(16)..(17): Xaa is A or G
  MOD_RES (18)..(19)..(20)..(21): Xaa is A or G or is absent
XARVVMNRYKKLXXXXXXXXXFYLVSIANLQTPA

SEQ ID NO: 2948 - protein, 34 aa, Artificial Sequence
  GFR-binding peptide
  MOD_RES (2)..(4): Xaa is C or S
SXKXSKVVMYHYKLVKPTRGVKYLISIPSLDQPV

SEQ ID NO: 2949 - protein, 38 aa, Artificial Sequence
  GFR-binding peptide
  MOD_RES (2)..(4)..(35)..(36): Xaa is C or S
SXKXSKVVMRHKRLVKPTRGVYYLISTASLDQPVXXPS

SEQ ID NO: 2950 - protein, 35 aa, Artificial Sequence
  GFR-binding peptide
  MOD_RES (1)..(33)..(34): Xaa is C or S
XSRVVMNRYKKLIVNSSDDFYLVSIANLKTPAXXP

SEQ ID NO: 2951 - protein, 39 aa, Artificial Sequence
  GFR-binding peptide
  MOD_RES (2)..(36): Xaa is C or S
  MOD_RES (14)..(15)..(16)..(17)..(18): Xaa is A or G
  MOD_RES (19)..(20)..(21)..(22): Xaa is A or G or is absent
GXSRVVMNRYKKLXXXXXXXXXFYLVSIANLKTPAXTPK

SEQ ID NO: 2952 - protein, 38 aa, Artificial Sequence
  GFR-binding peptide
  MOD_RES (1)..(34)..(35): Xaa is C or S
  MOD_RES (12)..(13)..(14)..(15)..(16): Xaa is A or G
  MOD_RES (17)..(18)..(19)..(20): Xaa is A or G or is absent
XSRVIMRYKKLXXXXXXXXXFYLISIANLAQPVXXPAA

SEQ ID NO: 2953 - protein, 32 aa, Artificial Sequence
  GFR-binding peptide
  MOD_RES (11)..(12)..(13)..(14)..(15): Xaa is A or G
  MOD_RES (16)..(17)..(18)..(19): Xaa is A or G or is absent
KVVMNYHYKLXXXXXXXXXKYLVSIPSLKTPA

SEQ ID NO: 2954 - protein, 41 aa, Artificial Sequence
  GFR-binding peptide
  MOD_RES (1)..(3)..(35): Xaa is C or S
XGXSRVVMNRHKRLIVNSSDDYYLVSTASLKTPAXTPKTVH

SEQ ID NO: 2955 - protein, 40 aa, Artificial Sequence
  GFR-binding peptide
  MOD_RES (1)..(34)..(35): Xaa is C or S
  MOD_RES (12)..(13)..(14)..(15)..(16): Xaa is A or G
  MOD_RES (17)..(18)..(19)..(20): Xaa is A or G or is absent
XSKVIMYHYKLXXXXXXXXXKYLISIPSLDQSVXXPSASA

SEQ ID NO: 2956 - protein, 31 aa, Artificial Sequence
  GFR-binding peptide
  MOD_RES (31)..(31): Xaa is C or S
SRVIMQYNKLVKPKRGVLYLISIASLAQPVX

SEQ ID NO: 2957 - protein, 41 aa, Artificial Sequence
  GFR-binding peptide
  MOD_RES (1)..(3)..(35)..(36): Xaa is C or S
XGXARVVMNRHKRLIVNSSDDYYLVSTASLQTPAXXPKPVT

SEQ ID NO: 2958 - protein, 39 aa, Artificial Sequence
  GFR-binding peptide
  MOD_RES (2)..(34): Xaa is C or S
GXSRVVMNRHKRLIVNSSDDYYLVSTASLKTPAXTPKTV

SEQ ID NO: 2959 - protein, 31 aa, Artificial Sequence
  GFR-binding peptide
  MOD_RES (31)..(31): Xaa is C or S
RVVMNQYNKLIVNSSDDLYLVSIASLKTPAX

SEQ ID NO: 2960 - protein, 41 aa, Artificial Sequence
  GFR-binding peptide
  MOD_RES (2)..(4)..(36): Xaa is C or S
HXGXSRVVMNRHKRLIVNSSDDYYLVSTASLKTPAXTPKTV

SEQ ID NO: 2961 - protein, 35 aa, Artificial Sequence
  GFR-binding peptide
  MOD_RES (31)..(32): Xaa is C or S
RVVMNYHYKLIVNSSDDKYLVSIPSLKTPAXXPKP

SEQ ID NO: 2962 - protein, 39 aa, Artificial Sequence
  GFR-binding peptide
  MOD_RES (1)..(3)..(36)..(37): Xaa is C or S
  MOD_RES (14)..(15)..(16)..(17)..(18): Xaa is A or G
  MOD_RES (19)..(20)..(21)..(22): Xaa is A or G or is absent
XKXSRVIMRHKRLXXXXXXXXXYYLISTASLAQPVXXPA

SEQ ID NO: 2963 - protein, 37 aa, Artificial Sequence
  GFR-binding peptide
  MOD_RES (1)..(35): Xaa is C or S
  MOD_RES (13)..(14)..(15)..(16)..(17): Xaa is A or G
  MOD_RES (18)..(19)..(20)..(21): Xaa is A or G or is absent
XSRVVMNYHYKLXXXXXXXXXKYLVSIPSLKTPAXTP

SEQ ID NO: 2964 - protein, 35 aa, Artificial Sequence
  GFR-binding peptide
  MOD_RES (2)..(4): Xaa is C or S
HXGXSRVVMNRHKRLIVNSSDDYYLVSTASLKTPA

SEQ ID NO: 2965 - protein, 36 aa, Artificial Sequence
  GFR-binding peptide
  MOD_RES (1)..(3): Xaa is C or S
  MOD_RES (15)..(16)..(17)..(18)..(19): Xaa is A or G
  MOD_RES (20)..(21)..(22)..(23): Xaa is A or G or is absent
XGXGEVVMERHKRLXXXXXXXXXYYLMSTASLETPV

SEQ ID NO: 2966 - protein, 34 aa, Artificial Sequence
  GFR-binding peptide
  MOD_RES (32)..(33): Xaa is C or S
AKVVMNQYNKLIVNNSSDLYLVSIASLKTPAXXA

SEQ ID NO: 2967 - protein, 36 aa, Artificial Sequence
  GFR-binding peptide
  MOD_RES (33)..(34): Xaa is C or S
  MOD_RES (11)..(12)..(13)..(14)..(15): Xaa is A or G
  MOD_RES (16)..(17)..(18)..(19): Xaa is A or G or is absent
SKVVMQYNKLXXXXXXXXXLYLISIASLDQPVXXPS

SEQ ID NO: 2968 - protein, 41 aa, Artificial Sequence
  GFR-binding peptide
  MOD_RES (2)..(4)..(36)..(37): Xaa is C or S
HXGXARVVMNQYNKLIVNSSDDLYLVSIASLQTPAXXPKPV

SEQ ID NO: 2969 - protein, 32 aa, Artificial Sequence
  GFR-binding peptide
  MOD_RES (11)..(12)..(13)..(14)..(15): Xaa is A or G
  MOD_RES (16)..(17)..(18)..(19): Xaa is A or G or is absent
RVVMNYHYKLXXXXXXXXXKYLVSIPSLKTPA

SEQ ID NO: 2970 - protein, 37 aa, Artificial Sequence
  GFR-binding peptide
  MOD_RES (2)..(36)..(37): Xaa is C or S
  MOD_RES (14)..(15)..(16)..(17)..(18): Xaa is A or G
  MOD_RES (19)..(20)..(21)..(22): Xaa is A or G or is absent
GXARVVMNRHKRLXXXXXXXXXYYLVSTASLQTPAXX

SEQ ID NO: 2971 - protein, 37 aa, Artificial Sequence
  GFR-binding peptide
  MOD_RES (1)..(34)..(35): Xaa is C or S
XEAVSMGERHKRLTPVGMDDYYLVSTASLKTPVXXAK

SEQ ID NO: 2972 - protein, 37 aa, Artificial Sequence
  GFR-binding peptide
  MOD_RES (35)..(35): Xaa is C or S
  MOD_RES (11)..(12)..(13)..(14)..(15): Xaa is A or G
  MOD_RES (16)..(17)..(18)..(19): Xaa is A or G or is absent
HDELTRYKKLXXXXXXXXXFYLVSIANLQVQTPRXQV

SEQ ID NO: 2973 - protein, 32 aa, Artificial Sequence
  GFR-binding peptide
  MOD_RES (31)..(32): Xaa is C or S
EVVMEYHYKLVVKDYEDKYLMSIPSLETPVXX

SEQ ID NO: 2974 - protein, 40 aa, Artificial Sequence
  GFR-binding peptide
  MOD_RES (2)..(34)..(35): Xaa is C or S
GXARVVMNYHYKLIVNSSDDKYLVSIPSLQTPAXXPKPVT

SEQ ID NO: 2975 - protein, 33 aa, Artificial Sequence
  GFR-binding peptide
  MOD_RES (33)..(33): Xaa is C or S
  MOD_RES (11)..(12)..(13)..(14)..(15): Xaa is A or G
  MOD_RES (16)..(17)..(18)..(19): Xaa is A or G or is absent
SRVIMYHYKLXXXXXXXXXKYLISIPSLAQPVX

SEQ ID NO: 2976 - protein, 38 aa, Artificial Sequence
  GFR-binding peptide
  MOD_RES (2)..(4)..(37)..(38): Xaa is C or S
  MOD_RES (15)..(16)..(17)..(18)..(19): Xaa is A or G
  MOD_RES (20)..(21)..(22)..(23): Xaa is A or G or is absent
SXKXSRVIMQYNKLXXXXXXXXXLYLISIASLAQPVXX

SEQ ID NO: 2977 - protein, 35 aa, Artificial Sequence
  GFR-binding peptide
  MOD_RES (33)..(34): Xaa is C or S
EAVSMGEYHYKLTPVGMDDKYLVSIPSLKTPVXXA

SEQ ID NO: 2978 - protein, 36 aa, Artificial Sequence
  GFR-binding peptide
  MOD_RES (33)..(34): Xaa is C or S
  MOD_RES (11)..(12)..(13)..(14)..(15): Xaa is A or G
  MOD_RES (16)..(17)..(18)..(19): Xaa is A or G or is absent
SKVIMYHYKLXXXXXXXXXKYLISIPSLDQSVXXPS

SEQ ID NO: 2979 - protein, 38 aa, Artificial Sequence
  GFR-binding peptide
  MOD_RES (36)..(36): Xaa is C or S
  MOD_RES (12)..(13)..(14)..(15)..(16): Xaa is A or G
  MOD_RES (17)..(18)..(19)..(20): Xaa is A or G or is absent
LHDELTRHKRLXXXXXXXXXYYLVSTASLQVQTPRXQV

SEQ ID NO: 2980 - protein, 40 aa, Artificial Sequence
  GFR-binding peptide
  MOD_RES (34)..(35): Xaa is C or S
  MOD_RES (12)..(13)..(14)..(15)..(16): Xaa is A or G
  MOD_RES (17)..(18)..(19)..(20): Xaa is A or G or is absent
GEVVMEYHYKLXXXXXXXXXKYLMSIPSLETPVXXAKPIS

SEQ ID NO: 2981 - protein, 38 aa, Artificial Sequence
  GFR-binding peptide
  MOD_RES (36)..(36): Xaa is C or S
  MOD_RES (12)..(13)..(14)..(15)..(16): Xaa is A or G
  MOD_RES (17)..(18)..(19)..(20): Xaa is A or G or is absent
LHDELTYHYKLXXXXXXXXXKYLVSIPSLQVQTPRXQV

SEQ ID NO: 2982 - protein, 39 aa, Artificial Sequence
  GFR-binding peptide
  MOD_RES (1)..(3)..(36)..(37): Xaa is C or S
  MOD_RES (14)..(15)..(16)..(17)..(18): Xaa is A or G
  MOD_RES (19)..(20)..(21)..(22): Xaa is A or G or is absent
XKXSKVIMRHKRLXXXXXXXXXYYLISTASLDQSVXXPS

SEQ ID NO: 2983 - protein, 40 aa, Artificial Sequence
  GFR-binding peptide
  MOD_RES (1)..(3)..(34)..(35): Xaa is C or S
XKXSRVIMRYKKLVKPKRGVFYLISIANLAQPVXXPAASA

SEQ ID NO: 2984 - protein, 36 aa, Artificial Sequence
  GFR-binding peptide
  MOD_RES (2)..(34)..(35): Xaa is C or S
GXAKVVMNRHKRLIVNNSSDYYLVSTASLKTPAXXA

SEQ ID NO: 2985 - protein, 34 aa, Artificial Sequence
  GFR-binding peptide
  MOD_RES (2)..(2): Xaa is C or S
GXEAVSMGEYHYKLTPVGMDDKYLVSIPSLKTPV

SEQ ID NO: 2986 - protein, 30 aa, Artificial Sequence
  GFR-binding peptide
RVVMNRYKKLIVNSSDDFYLVSIANLQTPA

SEQ ID NO: 2987 - protein, 39 aa, Artificial Sequence
  GFR-binding peptide
  MOD_RES (34)..(34): Xaa is C or S
  MOD_RES (12)..(13)..(14)..(15)..(16): Xaa is A or G
  MOD_RES (17)..(18)..(19)..(20): Xaa is A or G or is absent
SRVVMNQYNKLXXXXXXXXXLYLVSIASLKTPAXTPKTV

SEQ ID NO: 2988 - protein, 36 aa, Artificial Sequence
  GFR-binding peptide
  MOD_RES (1)..(32)..(33): Xaa is C or S
XSRVIMYHYKLVKPKRGVKYLISIPSLAQPVXXPAA

SEQ ID NO: 2989 - protein, 40 aa, Artificial Sequence
  GFR-binding peptide
  MOD_RES (1)..(35)..(36): Xaa is C or S
  MOD_RES (13)..(14)..(15)..(16)..(17): Xaa is A or G
  MOD_RES (18)..(19)..(20)..(21): Xaa is A or G or is absent
XARVVMNRYKKLXXXXXXXXXFYLVSIANLQTPAXXPKPV

SEQ ID NO: 2990 - protein, 37 aa, Artificial Sequence
  GFR-binding peptide
  MOD_RES (2)..(4): Xaa is C or S
  MOD_RES (16)..(17)..(18)..(19)..(20): Xaa is A or G
  MOD_RES (21)..(22)..(23)..(24): Xaa is A or G or is absent
HXGXSRVVMNYHYKLXXXXXXXXXKYLVSIPSLKTPA

SEQ ID NO: 2991 - protein, 40 aa, Artificial Sequence
  GFR-binding peptide
  MOD_RES (1)..(3)..(37)..(38): Xaa is C or S
  MOD_RES (15)..(16)..(17)..(18)..(19): Xaa is A or G
  MOD_RES (20)..(21)..(22)..(23): Xaa is A or G or is absent
XGXAKVVMNRHKRLXXXXXXXXXYYLVSTASLKTPAXXAK

SEQ ID NO: 2992 - protein, 37 aa, Artificial Sequence
  GFR-binding peptide
  MOD_RES (2)..(36)..(37): Xaa is C or S
  MOD_RES (14)..(15)..(16)..(17)..(18): Xaa is A or G
  MOD_RES (19)..(20)..(21)..(22): Xaa is A or G or is absent
GXAKVVMNRHKRLXXXXXXXXXYYLVSTASLKTPAXX

SEQ ID NO: 2993 - protein, 41 aa, Artificial Sequence
  GFR-binding peptide
  MOD_RES (1)..(3)..(40): Xaa is C or S
XKXALHDELTQYNKLFIPKKRVIELYLVSIASLQVQTPRXQ

SEQ ID NO: 2994 - protein, 32 aa, Artificial Sequence
  GFR-binding peptide
  MOD_RES (32)..(32): Xaa is C or S
ARVVMNRHKRLIVNSSDDYYLVSTASLQTPAX

SEQ ID NO: 2995 - protein, 33 aa, Artificial Sequence
  GFR-binding peptide
  MOD_RES (1)..(32)..(33): Xaa is C or S
XSKVVMRYKKLVKPTRGVFYLISIANLDQPVXX

SEQ ID NO: 2996 - protein, 38 aa, Artificial Sequence
  GFR-binding peptide
  MOD_RES (33)..(34): Xaa is C or S
  MOD_RES (11)..(12)..(13)..(14)..(15): Xaa is A or G
  MOD_RES (16)..(17)..(18)..(19): Xaa is A or G or is absent
RVVMNYHYKLXXXXXXXXXKYLVSIPSLKTPAXXPKPV

SEQ ID NO: 2997 - protein, 37 aa, Artificial Sequence
  GFR-binding peptide
  MOD_RES (36)..(36): Xaa is C or S
LHDELTRHKRLFIPKKRVIEYYLVSTASLQVQTPRXQ

SEQ ID NO: 2998 - protein, 30 aa, Artificial Sequence
  GFR-binding peptide
KVVMNQYNKLIVNNSSDLYLVSIASLKTPA

SEQ ID NO: 2999 - protein, 38 aa, Artificial Sequence
  GFR-binding peptide
  MOD_RES (2)..(4)..(38): Xaa is C or S
  MOD_RES (16)..(17)..(18)..(19)..(20): Xaa is A or G
  MOD_RES (21)..(22)..(23)..(24): Xaa is A or G or is absent
HXGXARVVMNQYNKLXXXXXXXXXLYLVSIASLQTPAX

SEQ ID NO: 3000 - protein, 38 aa, Artificial Sequence
  GFR-binding peptide
  MOD_RES (1)..(35)..(36): Xaa is C or S
  MOD_RES (13)..(14)..(15)..(16)..(17): Xaa is A or G
  MOD_RES (18)..(19)..(20)..(21): Xaa is A or G or is absent
XARVVMNQYNKLXXXXXXXXXLYLVSIASLQTPAXXPK

SEQ ID NO: 3001 - protein, 37 aa, Artificial Sequence
  GFR-binding peptide
  MOD_RES (2)..(4)..(35)..(36): Xaa is C or S
SXKXSRVIMRHKRLVKPKRGVYYLISTASLAQPVXXP

SEQ ID NO: 3002 - protein, 37 aa, Artificial Sequence
  GFR-binding peptide
  MOD_RES (2)..(34)..(35): Xaa is C or S
GXGEVVMEYHYKLVVKDYEDKYLMSIPSLETPVXXAK

SEQ ID NO: 3003 - protein, 39 aa, Artificial Sequence
  GFR-binding peptide
  MOD_RES (2)..(34)..(35): Xaa is C or S
GXGEVVMEYHYKLVVKDYEDKYLMSIPSLETPVXXAKPI

SEQ ID NO: 3004 - protein, 35 aa, Artificial Sequence
  GFR-binding peptide
  MOD_RES (1)..(34)..(35): Xaa is C or S
  MOD_RES (12)..(13)..(14)..(15)..(16): Xaa is A or G
  MOD_RES (17)..(18)..(19)..(20): Xaa is A or G or is absent
XSRVIMRYKKLXXXXXXXXXFYLISIANLAQPVXX

SEQ ID NO: 3005 - protein, 36 aa, Artificial Sequence
  GFR-binding peptide
  MOD_RES (33)..(33): Xaa is C or S
  MOD_RES (11)..(12)..(13)..(14)..(15): Xaa is A or G
  MOD_RES (16)..(17)..(18)..(19): Xaa is A or G or is absent
RVVMNQYNKLXXXXXXXXXLYLVSIASLKTPAXTPK

SEQ ID NO: 3006 - protein, 36 aa, Artificial Sequence
  GFR-binding peptide
  MOD_RES (2)..(4)..(36): Xaa is C or S
RXGXGEVVMDYHYKLVVKENEDKYLMSIPSLETPVX

SEQ ID NO: 3007 - protein, 39 aa, Artificial Sequence
  GFR-binding peptide
  MOD_RES (1)..(3)..(35)..(36): Xaa is C or S
XGXARVVMNRHKRLIVNSSDDYYLVSTASLQTPAXXPKP

SEQ ID NO: 3008 - protein, 37 aa, Artificial Sequence
  GFR-binding peptide
  MOD_RES (1)..(35)..(36): Xaa is C or S
  MOD_RES (13)..(14)..(15)..(16)..(17): Xaa is A or G
  MOD_RES (18)..(19)..(20)..(21): Xaa is A or G or is absent
XGEVVMEQYNKLXXXXXXXXXLYLMSIASLETPVXXA

SEQ ID NO: 3009 - protein, 41 aa, Artificial Sequence
  GFR-binding peptide
  MOD_RES (1)..(3)..(37)..(38): Xaa is C or S
  MOD_RES (15)..(16)..(17)..(18)..(19): Xaa is A or G
  MOD_RES (20)..(21)..(22)..(23): Xaa is A or G or is absent
XGXGEVVMDRHKRLXXXXXXXXXYYLMSTASLETPVXXAKP

SEQ ID NO: 3010 - protein, 34 aa, Artificial Sequence
  GFR-binding peptide
  MOD_RES (2)..(2): Xaa is C or S
GXEAVSMGERHKRLTPVGMDDYYLVSTASLKTPV

SEQ ID NO: 3011 - protein, 36 aa, Artificial Sequence
  GFR-binding peptide
  MOD_RES (2)..(34)..(35): Xaa is C or S
GXGEVVMDQYNKLVVKENEDLYLMSIASLETPVXXA

SEQ ID NO: 3012 - protein, 39 aa, Artificial Sequence
  GFR-binding peptide
  MOD_RES (2)..(36)..(37): Xaa is C or S
  MOD_RES (14)..(15)..(16)..(17)..(18): Xaa is A or G
  MOD_RES (19)..(20)..(21)..(22): Xaa is A or G or is absent
GXGEVVMDYHYKLXXXXXXXXXKYLMSIPSLETPVXXAK

SEQ ID NO: 3013 - protein, 33 aa, Artificial Sequence
  GFR-binding peptide
  MOD_RES (2)..(2): Xaa is C or S
GXGEVVMERYKKLVVKDYEDFYLMSIANLETPV

SEQ ID NO: 3014 - protein, 37 aa, Artificial Sequence
  GFR-binding peptide
  MOD_RES (1)..(3)..(37): Xaa is C or S
  MOD_RES (15)..(16)..(17)..(18)..(19): Xaa is A or G
  MOD_RES (20)..(21)..(22)..(23): Xaa is A or G or is absent
XGXGEVVMDQYNKLXXXXXXXXXLYLMSIASLETPVX

SEQ ID NO: 3015 - protein, 36 aa, Artificial Sequence
  GFR-binding peptide
ALHDELTRYKKLFIPKKRVIEFYLVSIANLQVQTPR

SEQ ID NO: 3016 - protein, 35 aa, Artificial Sequence
  GFR-binding peptide
  MOD_RES (1)..(32)..(33): Xaa is C or S
XSRVIMYHYKLVKPKRGVKYLISIPSLAQPVXXPA

SEQ ID NO: 3017 - protein, 34 aa, Artificial Sequence
  GFR-binding peptide
  MOD_RES (32)..(33): Xaa is C or S
SRVVMNRHKRLIVNSSDDYYLVSTASLKTPAXXP

SEQ ID NO: 3018 - protein, 38 aa, Artificial Sequence
  GFR-binding peptide
  MOD_RES (34)..(35): Xaa is C or S
  MOD_RES (12)..(13)..(14)..(15)..(16): Xaa is A or G
  MOD_RES (17)..(18)..(19)..(20): Xaa is A or G or is absent
ARVVMNQYNKLXXXXXXXXXLYLVSIASLQTPAXXPKP

SEQ ID NO: 3019 - protein, 37 aa, Artificial Sequence
  GFR-binding peptide
  MOD_RES (33)..(34): Xaa is C or S
  MOD_RES (11)..(12)..(13)..(14)..(15): Xaa is A or G
  MOD_RES (16)..(17)..(18)..(19): Xaa is A or G or is absent
RVVMNYHYKLXXXXXXXXXKYLVSIPSLQTPAXXPKP

SEQ ID NO: 3020 - protein, 43 aa, Artificial Sequence
  GFR-binding peptide
  MOD_RES (2)..(4)..(37)..(38): Xaa is C or S
  MOD_RES (15)..(16)..(17)..(18)..(19): Xaa is A or G
  MOD_RES (20)..(21)..(22)..(23): Xaa is A or G or is absent
SXKXSKVIMQYNKLXXXXXXXXXLYLISIASLDQSVXXPSASA

SEQ ID NO: 3021 - protein, 35 aa, Artificial Sequence
  GFR-binding peptide
  MOD_RES (1)..(34)..(35): Xaa is C or S
  MOD_RES (12)..(13)..(14)..(15)..(16): Xaa is A or G
  MOD_RES (17)..(18)..(19)..(20): Xaa is A or G or is absent
XSKVIMRHKRLXXXXXXXXXYYLISTASLDQSVXX

SEQ ID NO: 3022 - protein, 38 aa, Artificial Sequence
  GFR-binding peptide
  MOD_RES (2)..(34): Xaa is C or S
GXSRVVMNRHKRLIVNSSDDYYLVSTASLKTPAXTPKT

SEQ ID NO: 3023 - protein, 33 aa, Artificial Sequence
  GFR-binding peptide
  MOD_RES (31)..(32): Xaa is C or S
SKVIMRHKRLIKPTKGIYYLISTASLDQSVXXP

SEQ ID NO: 3024 - protein, 37 aa, Artificial Sequence
  GFR-binding peptide
  MOD_RES (32)..(32): Xaa is C or S
SRVVMNRHKRLIVNSSDDYYLVSTASLKTPAXTPKTV

SEQ ID NO: 3025 - protein, 40 aa, Artificial Sequence
  GFR-binding peptide
  MOD_RES (2)..(4)..(37)..(38): Xaa is C or S
  MOD_RES (15)..(16)..(17)..(18)..(19): Xaa is A or G
  MOD_RES (20)..(21)..(22)..(23): Xaa is A or G or is absent
SXKXSKVVMRYKKLXXXXXXXXXFYLISIANLDQPVXXPS

SEQ ID NO: 3026 - protein, 35 aa, Artificial Sequence
  GFR-binding peptide
  MOD_RES (1)..(3)..(35): Xaa is C or S
XGXSRVVMNQYNKLIVNSSDDLYLVSIASLKTPAX

SEQ ID NO: 3027 - protein, 35 aa, Artificial Sequence
  GFR-binding peptide
  MOD_RES (34)..(35): Xaa is C or S
  MOD_RES (12)..(13)..(14)..(15)..(16): Xaa is A or G
  MOD_RES (17)..(18)..(19)..(20): Xaa is A or G or is absent
ARVVMNRHKRLXXXXXXXXXYYLVSTASLQTPAXX

SEQ ID NO: 3028 - protein, 35 aa, Artificial Sequence
  GFR-binding peptide
  MOD_RES (32)..(33): Xaa is C or S
ARVVMNQYNKLIVNSSDDLYLVSIASLQTPAXXPK

SEQ ID NO: 3029 - protein, 38 aa, Artificial Sequence
  GFR-binding peptide
  MOD_RES (35)..(36): Xaa is C or S
  MOD_RES (13)..(14)..(15)..(16)..(17): Xaa is A or G
  MOD_RES (18)..(19)..(20)..(21): Xaa is A or G or is absent
EAVSMGEQYNKLXXXXXXXXXLYLVSIASLKTPVXXAK

SEQ ID NO: 3030 - protein, 39 aa, Artificial Sequence
  GFR-binding peptide
  MOD_RES (36)..(36): Xaa is C or S
LHDELTYHYKLFIPKKRVIEKYLVSIPSLQVQTPRXQVN

SEQ ID NO: 3031 - protein, 35 aa, Artificial Sequence
  GFR-binding peptide
  MOD_RES (1)..(34)..(35): Xaa is C or S
  MOD_RES (12)..(13)..(14)..(15)..(16): Xaa is A or G
  MOD_RES (17)..(18)..(19)..(20): Xaa is A or G or is absent
XSKVIMQYNKLXXXXXXXXXLYLISIASLDQSVXX

SEQ ID NO: 3032 - protein, 40 aa, Artificial Sequence
  GFR-binding peptide
  MOD_RES (2)..(4)..(35)..(36): Xaa is C or S
SXKXSRVIMRHKRLVKPKRGVYYLISTASLAQPVXXPAAS

SEQ ID NO: 3033 - protein, 35 aa, Artificial Sequence
  GFR-binding peptide
  MOD_RES (2)..(33)..(34): Xaa is C or S
KXSKVIMQYNKLIKPTKGILYLISIASLDQSVXXP

SEQ ID NO: 3034 - protein, 38 aa, Artificial Sequence
  GFR-binding peptide
  MOD_RES (35)..(36): Xaa is C or S
  MOD_RES (13)..(14)..(15)..(16)..(17): Xaa is A or G
  MOD_RES (18)..(19)..(20)..(21): Xaa is A or G or is absent
EAVSMGERHKRLXXXXXXXXXYYLVSTASLKTPVXXAK

SEQ ID NO: 3035 - protein, 35 aa, Artificial Sequence
  GFR-binding peptide
  MOD_RES (33)..(33): Xaa is C or S
  MOD_RES (11)..(12)..(13)..(14)..(15): Xaa is A or G
  MOD_RES (16)..(17)..(18)..(19): Xaa is A or G or is absent
RVVMNRYKKLXXXXXXXXXFYLVSIANLKTPAXTP

SEQ ID NO: 3036 - protein, 41 aa, Artificial Sequence
  GFR-binding peptide
  MOD_RES (2)..(4)..(36)..(37): Xaa is C or S
RXGXGEVVMEYHYKLVVKDYEDKYLMSIPSLETPVXXAKPI

SEQ ID NO: 3037 - protein, 42 aa, Artificial Sequence
  GFR-binding peptide
  MOD_RES (2)..(4)..(36)..(37): Xaa is C or S
RXGXGEVVMDRHKRLVVKENEDYYLMSTASLETPVXXAKPIK

SEQ ID NO: 3038 - protein, 36 aa, Artificial Sequence
  GFR-binding peptide
  MOD_RES (1)..(34)..(35): Xaa is C or S
  MOD_RES (12)..(13)..(14)..(15)..(16): Xaa is A or G
  MOD_RES (17)..(18)..(19)..(20): Xaa is A or G or is absent
XSKVVMYHYKLXXXXXXXXXKYLISIPSLDQPVXXP

SEQ ID NO: 3039 - protein, 39 aa, Artificial Sequence
  GFR-binding peptide
  MOD_RES (2)..(35)..(36): Xaa is C or S
  MOD_RES (13)..(14)..(15)..(16)..(17): Xaa is A or G
  MOD_RES (18)..(19)..(20)..(21): Xaa is A or G or is absent
KXSKVVMQYNKLXXXXXXXXXLYLISIASLDQPVXXPSA

SEQ ID NO: 3040 - protein, 40 aa, Artificial Sequence
  GFR-binding peptide
  MOD_RES (2)..(39): Xaa is C or S
KXALHDELTYHYKLFIPKKRVIEKYLVSIPSLQVQTPRXQ

SEQ ID NO: 3041 - protein, 38 aa, Artificial Sequence
  GFR-binding peptide
  MOD_RES (1)..(3)..(35): Xaa is C or S
XGXSRVVMNQYNKLIVNSSDDLYLVSIASLKTPAXTPK

SEQ ID NO: 3042 - protein, 35 aa, Artificial Sequence
  GFR-binding peptide
  MOD_RES (32)..(33): Xaa is C or S
GEVVMERYKKLVVKDYEDFYLMSIANLETPVXXAK

SEQ ID NO: 3043 - protein, 37 aa, Artificial Sequence
  GFR-binding peptide
  MOD_RES (2)..(2): Xaa is C or S
KXALHDELTYHYKLFIPKKRVIEKYLVSIPSLQVQTP

SEQ ID NO: 3044 - protein, 37 aa, Artificial Sequence
  GFR-binding peptide
  MOD_RES (2)..(33)..(34): Xaa is C or S
KXSKVVMRHKRLVKPTRGVYYLISTASLDQPVXXPSA

SEQ ID NO: 3045 - protein, 37 aa, Artificial Sequence
  GFR-binding peptide
  MOD_RES (1)..(1): Xaa is C or S
  MOD_RES (14)..(15)..(16)..(17)..(18): Xaa is A or G
  MOD_RES (19)..(20)..(21)..(22): Xaa is A or G or is absent
XALHDELTYHYKLXXXXXXXXXKYLVSIPSLQVQTPR

SEQ ID NO: 3046 - protein, 37 aa, Artificial Sequence
  GFR-binding peptide
  MOD_RES (2)..(33)..(34): Xaa is C or S
KXSKVVMQYNKLVKPTRGVLYLISIASLDQPVXXPSA

SEQ ID NO: 3047 - protein, 35 aa, Artificial Sequence
  GFR-binding peptide
  MOD_RES (35)..(35): Xaa is C or S
  MOD_RES (13)..(14)..(15)..(16)..(17): Xaa is A or G
  MOD_RES (18)..(19)..(20)..(21): Xaa is A or G or is absent
EAVSMGEYHYKLXXXXXXXXXKYLVSIPSLKTPVX

SEQ ID NO: 3048 - protein, 35 aa, Artificial Sequence
  GFR-binding peptide
  MOD_RES (34)..(35): Xaa is C or S
  MOD_RES (12)..(13)..(14)..(15)..(16): Xaa is A or G
  MOD_RES (17)..(18)..(19)..(20): Xaa is A or G or is absent
SRVVMNYHYKLXXXXXXXXXKYLVSIPSLKTPAXX

SEQ ID NO: 3049 - protein, 41 aa, Artificial Sequence
  GFR-binding peptide
  MOD_RES (2)..(4)..(35)..(36): Xaa is C or S
SXKXSKVVMQYNKLVKPTRGVLYLISIASLDQPVXXPSASA

SEQ ID NO: 3050 - protein, 41 aa, Artificial Sequence
  GFR-binding peptide
  MOD_RES (37)..(37): Xaa is C or S
  MOD_RES (13)..(14)..(15)..(16)..(17): Xaa is A or G
  MOD_RES (18)..(19)..(20)..(21): Xaa is A or G or is absent
ALHDELTYHYKLXXXXXXXXXKYLVSIPSLQVQTPRXQVNR

SEQ ID NO: 3051 - protein, 44 aa, Artificial Sequence
  GFR-binding peptide
  MOD_RES (2)..(4)..(38)..(39): Xaa is C or S
  MOD_RES (16)..(17)..(18)..(19)..(20): Xaa is A or G
  MOD_RES (21)..(22)..(23)..(24): Xaa is A or G or is absent
HXGXAKVVMNQYNKLXXXXXXXXXLYLVSIASLKTPAXXAKPVA

SEQ ID NO: 3052 - protein, 39 aa, Artificial Sequence
  GFR-binding peptide
  MOD_RES (1)..(35)..(36): Xaa is C or S
  MOD_RES (13)..(14)..(15)..(16)..(17): Xaa is A or G
  MOD_RES (18)..(19)..(20)..(21): Xaa is A or G or is absent
XSRVVMNQYNKLXXXXXXXXXLYLVSIASLKTPAXXPKP

SEQ ID NO: 3053 - protein, 43 aa, Artificial Sequence
  GFR-binding peptide
  MOD_RES (2)..(4)..(38)..(39): Xaa is C or S
  MOD_RES (16)..(17)..(18)..(19)..(20): Xaa is A or G
  MOD_RES (21)..(22)..(23)..(24): Xaa is A or G or is absent
RXGXGEVVMDQYNKLXXXXXXXXXLYLMSIASLETPVXXAKPI

SEQ ID NO: 3054 - protein, 38 aa, Artificial Sequence
  GFR-binding peptide
  MOD_RES (1)..(3)..(36)..(37): Xaa is C or S
  MOD_RES (14)..(15)..(16)..(17)..(18): Xaa is A or G
  MOD_RES (19)..(20)..(21)..(22): Xaa is A or G or is absent
XKXSKVVMRYKKLXXXXXXXXXFYLISIANLDQPVXXP

SEQ ID NO: 3055 - protein, 33 aa, Artificial Sequence
  GFR-binding peptide
  MOD_RES (32)..(33): Xaa is C or S
AKVVMNYHYKLIVNNSSDKYLVSIPSLKTPAXX

SEQ ID NO: 3056 - protein, 38 aa, Artificial Sequence
  GFR-binding peptide
  MOD_RES (1)..(3)..(37)..(38): Xaa is C or S
  MOD_RES (15)..(16)..(17)..(18)..(19): Xaa is A or G
  MOD_RES (20)..(21)..(22)..(23): Xaa is A or G or is absent
XGXGEVVMEYHYKLXXXXXXXXXKYLMSIPSLETPVXX

SEQ ID NO: 3057 - protein, 37 aa, Artificial Sequence
  GFR-binding peptide
  MOD_RES (34)..(35): Xaa is C or S
  MOD_RES (12)..(13)..(14)..(15)..(16): Xaa is A or G
  MOD_RES (17)..(18)..(19)..(20): Xaa is A or G or is absent
ARVVMNRYKKLXXXXXXXXXFYLVSIANLQTPAXXPK

SEQ ID NO: 3058 - protein, 40 aa, Artificial Sequence
  GFR-binding peptide
  MOD_RES (2)..(4)..(38)..(39): Xaa is C or S
  MOD_RES (16)..(17)..(18)..(19)..(20): Xaa is A or G
  MOD_RES (21)..(22)..(23)..(24): Xaa is A or G or is absent
HXGXAKVVMNRYKKLXXXXXXXXXFYLVSIANLKTPAXXA

SEQ ID NO: 3059 - protein, 40 aa, Artificial Sequence
  GFR-binding peptide
  MOD_RES (1)..(3)..(37): Xaa is C or S
  MOD_RES (15)..(16)..(17)..(18)..(19): Xaa is A or G
  MOD_RES (20)..(21)..(22)..(23): Xaa is A or G or is absent
XGXSRVVMNQYNKLXXXXXXXXXLYLVSIASLKTPAXTPK

SEQ ID NO: 3060 - protein, 36 aa, Artificial Sequence
  GFR-binding peptide
  MOD_RES (2)..(34): Xaa is C or S
GXSRVVMNRHKRLIVNSSDDYYLVSTASLKTPAXTP

SEQ ID NO: 3061 - protein, 32 aa, Artificial Sequence
  GFR-binding peptide
  MOD_RES (11)..(12)..(13)..(14)..(15): Xaa is A or G
  MOD_RES (16)..(17)..(18)..(19): Xaa is A or G or is absent
EVVMDRYKKLXXXXXXXXXFYLMSIANLETPV

SEQ ID NO: 3062 - protein, 37 aa, Artificial Sequence
  GFR-binding peptide
  MOD_RES (33)..(34): Xaa is C or S
  MOD_RES (11)..(12)..(13)..(14)..(15): Xaa is A or G
  MOD_RES (16)..(17)..(18)..(19): Xaa is A or G or is absent
SKVIMYHYKLXXXXXXXXXKYLISIPSLDQSVXXPSA

SEQ ID NO: 3063 - protein, 41 aa, Artificial Sequence
  GFR-binding peptide
  MOD_RES (1)..(38): Xaa is C or S
  MOD_RES (14)..(15)..(16)..(17)..(18): Xaa is A or G
  MOD_RES (19)..(20)..(21)..(22): Xaa is A or G or is absent
XALHDELTRHKRLXXXXXXXXXYYLVSTASLQVQTPRXQVN

SEQ ID NO: 3064 - protein, 35 aa, Artificial Sequence
  GFR-binding peptide
  MOD_RES (32)..(33): Xaa is C or S
SRVVMNRYKKLIVNSSDDFYLVSIANLKTPAXXPK

SEQ ID NO: 3065 - protein, 40 aa, Artificial Sequence
  GFR-binding peptide
  MOD_RES (2)..(34)..(35): Xaa is C or S
GXSRVVMNYHYKLIVNSSDDKYLVSIPSLKTPAXXPKPVY

SEQ ID NO: 3066 - protein, 39 aa, Artificial Sequence
  GFR-binding peptide
  MOD_RES (2)..(33)..(34): Xaa is C or S
KXSKVVMYHYKLVKPTRGVKYLISIPSLDQPVXXPSASA

SEQ ID NO: 3067 - protein, 42 aa, Artificial Sequence
  GFR-binding peptide
  MOD_RES (2)..(4)..(41): Xaa is C or S
  MOD_RES (17)..(18)..(19)..(20)..(21): Xaa is A or G
  MOD_RES (22)..(23)..(24)..(25): Xaa is A or G or is absent
EXKXALHDELTQYNKLXXXXXXXXXLYLVSIASLQVQTPRXQ

SEQ ID NO: 3068 - protein, 45 aa, Artificial Sequence
  GFR-binding peptide
  MOD_RES (2)..(4)..(41): Xaa is C or S
  MOD_RES (17)..(18)..(19)..(20)..(21): Xaa is A or G
  MOD_RES (22)..(23)..(24)..(25): Xaa is A or G or is absent
EXKXALHDELTQYNKLXXXXXXXXXLYLVSIASLQVQTPRXQVNR

SEQ ID NO: 3069 - protein, 36 aa, Artificial Sequence
  GFR-binding peptide
  MOD_RES (1)..(3): Xaa is C or S
  MOD_RES (15)..(16)..(17)..(18)..(19): Xaa is A or G
  MOD_RES (20)..(21)..(22)..(23): Xaa is A or G or is absent
XGXSRVVMNRHKRLXXXXXXXXXYYLVSTASLKTPA

SEQ ID NO: 3070 - protein, 36 aa, Artificial Sequence
  GFR-binding peptide
  MOD_RES (2)..(34)..(35): Xaa is C or S
GXSRVVMNRYKKLIVNSSDDFYLVSIANLKTPAXXP

SEQ ID NO: 3071 - protein, 38 aa, Artificial Sequence
  GFR-binding peptide
  MOD_RES (34)..(34): Xaa is C or S
  MOD_RES (12)..(13)..(14)..(15)..(16): Xaa is A or G
  MOD_RES (17)..(18)..(19)..(20): Xaa is A or G or is absent
SRVVMNRHKRLXXXXXXXXXYYLVSTASLKTPAXTPKT

SEQ ID NO: 3072 - protein, 39 aa, Artificial Sequence
  GFR-binding peptide
  MOD_RES (1)..(33)..(34): Xaa is C or S
XSRVVMNYHYKLIVNSSDDKYLVSIPSLKTPAXXPKPVY

SEQ ID NO: 3073 - protein, 35 aa, Artificial Sequence
  GFR-binding peptide
  MOD_RES (2)..(2): Xaa is C or S
  MOD_RES (14)..(15)..(16)..(17)..(18): Xaa is A or G
  MOD_RES (19)..(20)..(21)..(22): Xaa is A or G or is absent
GXAKVVMNYHYKLXXXXXXXXXKYLVSIPSLKTPA

SEQ ID NO: 3074 - protein, 31 aa, Artificial Sequence
  GFR-binding peptide
  MOD_RES (31)..(31): Xaa is C or S
SKVIMRYKKLIKPTKGIFYLISIANLDQSVX

SEQ ID NO: 3075 - protein, 41 aa, Artificial Sequence
  GFR-binding peptide
  MOD_RES (2)..(37)..(38): Xaa is C or S
  MOD_RES (15)..(16)..(17)..(18)..(19): Xaa is A or G
  MOD_RES (20)..(21)..(22)..(23): Xaa is A or G or is absent
GXEAVSMGERYKKLXXXXXXXXXFYLVSIANLKTPVXXAKG

SEQ ID NO: 3076 - protein, 40 aa, Artificial Sequence
  GFR-binding peptide
  MOD_RES (1)..(3)..(36)..(37): Xaa is C or S
  MOD_RES (14)..(15)..(16)..(17)..(18): Xaa is A or G
  MOD_RES (19)..(20)..(21)..(22): Xaa is A or G or is absent
XKXSKVIMRHKRLXXXXXXXXXYYLISTASLDQSVXXPSA

SEQ ID NO: 3077 - protein, 32 aa, Artificial Sequence
  GFR-binding peptide
  MOD_RES (31)..(32): Xaa is C or S
SKVIMRHKRLIKPTKGIYYLISTASLDQSVXX

SEQ ID NO: 3078 - protein, 34 aa, Artificial Sequence
  GFR-binding peptide
  MOD_RES (33)..(34): Xaa is C or S
  MOD_RES (11)..(12)..(13)..(14)..(15): Xaa is A or G
  MOD_RES (16)..(17)..(18)..(19): Xaa is A or G or is absent
SKVIMRYKKLXXXXXXXXXFYLISIANLDQSVXX

SEQ ID NO: 3079 - protein, 41 aa, Artificial Sequence
  GFR-binding peptide
  MOD_RES (2)..(36)..(37): Xaa is C or S
  MOD_RES (14)..(15)..(16)..(17)..(18): Xaa is A or G
  MOD_RES (19)..(20)..(21)..(22): Xaa is A or G or is absent
GXARVVMNRHKRLXXXXXXXXXYYLVSTASLQTPAXXPKPV

SEQ ID NO: 3080 - protein, 38 aa, Artificial Sequence
  GFR-binding peptide
  MOD_RES (2)..(4): Xaa is C or S
  MOD_RES (17)..(18)..(19)..(20)..(21): Xaa is A or G
  MOD_RES (22)..(23)..(24)..(25): Xaa is A or G or is absent
EXKXALHDELTRYKKLXXXXXXXXXFYLVSIANLQVQT

SEQ ID NO: 3081 - protein, 41 aa, Artificial Sequence
  GFR-binding peptide
  MOD_RES (1)..(3)..(40): Xaa is C or S
XKXALHDELTRHKRLFIPKKRVIEYYLVSTASLQVQTPRXQ

SEQ ID NO: 3082 - protein, 35 aa, Artificial Sequence
  GFR-binding peptide
  MOD_RES (1)..(33)..(34): Xaa is C or S
XARVVMNQYNKLIVNSSDDLYLVSIASLQTPAXXP

SEQ ID NO: 3083 - protein, 40 aa, Artificial Sequence
  GFR-binding peptide
  MOD_RES (2)..(4)..(38)..(39): Xaa is C or S
  MOD_RES (16)..(17)..(18)..(19)..(20): Xaa is A or G
  MOD_RES (21)..(22)..(23)..(24): Xaa is A or G or is absent
RXGXGEVVMERHKRLXXXXXXXXXYYLMSTASLETPVXXA

SEQ ID NO: 3084 - protein, 35 aa, Artificial Sequence
  GFR-binding peptide
  MOD_RES (1)..(1): Xaa is C or S
  MOD_RES (14)..(15)..(16)..(17)..(18): Xaa is A or G
  MOD_RES (19)..(20)..(21)..(22): Xaa is A or G or is absent
XALHDELTRYKKLXXXXXXXXXFYLVSIANLQVQT

SEQ ID NO: 3085 - protein, 35 aa, Artificial Sequence
  GFR-binding peptide
  MOD_RES (31)..(32): Xaa is C or S
EVVMDYHYKLVVKENEDKYLMSIPSLETPVXXAKP

SEQ ID NO: 3086 - protein, 34 aa, Artificial Sequence
  GFR-binding peptide
  MOD_RES (1)..(3): Xaa is C or S
XGXARVVMNRHKRLIVNSSDDYYLVSTASLQTPA

SEQ ID NO: 3087 - protein, 34 aa, Artificial Sequence
  GFR-binding peptide
  MOD_RES (1)..(32)..(33): Xaa is C or S
XSRVIMRYKKLVKPKRGVFYLISIANLAQPVXXP

SEQ ID NO: 3088 - protein, 38 aa, Artificial Sequence
  GFR-binding peptide
  MOD_RES (1)..(32)..(33): Xaa is C or S
XSRVIMRYKKLVKPKRGVFYLISIANLAQPVXXPAASA

SEQ ID NO: 3089 - protein, 38 aa, Artificial Sequence
  GFR-binding peptide
  MOD_RES (35)..(35): Xaa is C or S
  MOD_RES (11)..(12)..(13)..(14)..(15): Xaa is A or G
  MOD_RES (16)..(17)..(18)..(19): Xaa is A or G or is absent
HDELTQYNKLXXXXXXXXXLYLVSIASLQVQTPRXQVN

SEQ ID NO: 3090 - protein, 38 aa, Artificial Sequence
  GFR-binding peptide
  MOD_RES (2)..(4)..(38): Xaa is C or S
  MOD_RES (16)..(17)..(18)..(19)..(20): Xaa is A or G
  MOD_RES (21)..(22)..(23)..(24): Xaa is A or G or is absent
HXGXARVVMNRHKRLXXXXXXXXXYYLVSTASLQTPAX

SEQ ID NO: 3091 - protein, 40 aa, Artificial Sequence
  GFR-binding peptide
  MOD_RES (1)..(3)..(36)..(37): Xaa is C or S
  MOD_RES (14)..(15)..(16)..(17)..(18): Xaa is A or G
  MOD_RES (19)..(20)..(21)..(22): Xaa is A or G or is absent
XKXSRVIMRHKRLXXXXXXXXXYYLISTASLAQPVXXPAA

SEQ ID NO: 3092 - protein, 33 aa, Artificial Sequence
  GFR-binding peptide
  MOD_RES (12)..(13)..(14)..(15)..(16): Xaa is A or G
  MOD_RES (17)..(18)..(19)..(20): Xaa is A or G or is absent
ARVVMNQYNKLXXXXXXXXXLYLVSIASLQTPA

SEQ ID NO: 3093 - protein, 39 aa, Artificial Sequence
  GFR-binding peptide
  MOD_RES (2)..(4)..(38)..(39): Xaa is C or S
  MOD_RES (16)..(17)..(18)..(19)..(20): Xaa is A or G
  MOD_RES (21)..(22)..(23)..(24): Xaa is A or G or is absent
HXGXSRVVMNQYNKLXXXXXXXXXLYLVSIASLKTPAXX

SEQ ID NO: 3094 - protein, 38 aa, Artificial Sequence
  GFR-binding peptide
  MOD_RES (1)..(38): Xaa is C or S
  MOD_RES (14)..(15)..(16)..(17)..(18): Xaa is A or G
  MOD_RES (19)..(20)..(21)..(22): Xaa is A or G or is absent
XALHDELTRYKKLXXXXXXXXXFYLVSIANLQVQTPRX

SEQ ID NO: 3095 - protein, 40 aa, Artificial Sequence
  GFR-binding peptide
  MOD_RES (2)..(36)..(37): Xaa is C or S
  MOD_RES (14)..(15)..(16)..(17)..(18): Xaa is A or G
  MOD_RES (19)..(20)..(21)..(22): Xaa is A or G or is absent
GXGEVVMDYHYKLXXXXXXXXXKYLMSIPSLETPVXXAKP

SEQ ID NO: 3096 - protein, 39 aa, Artificial Sequence
  GFR-binding peptide
  MOD_RES (2)..(4)..(36): Xaa is C or S
HXGXSRVVMNRYKKLIVNSSDDFYLVSIANLKTPAXTPK

SEQ ID NO: 3097 - protein, 32 aa, Artificial Sequence
  GFR-binding peptide
  MOD_RES (11)..(12)..(13)..(14)..(15): Xaa is A or G
  MOD_RES (16)..(17)..(18)..(19): Xaa is A or G or is absent
RVVMNYHYKLXXXXXXXXXKYLVSIPSLQTPA

SEQ ID NO: 3098 - protein, 39 aa, Artificial Sequence
  GFR-binding peptide
  MOD_RES (2)..(35)..(36): Xaa is C or S
  MOD_RES (13)..(14)..(15)..(16)..(17): Xaa is A or G
  MOD_RES (18)..(19)..(20)..(21): Xaa is A or G or is absent
KXSRVIMYHYKLXXXXXXXXXKYLISIPSLAQPVXXPAA

SEQ ID NO: 3099 - protein, 37 aa, Artificial Sequence
  GFR-binding peptide
  MOD_RES (31)..(31): Xaa is C or S
RVVMNRYKKLIVNSSDDFYLVSIANLKTPAXTPKTVH

SEQ ID NO: 3100 - protein, 41 aa, Artificial Sequence
  GFR-binding peptide
  MOD_RES (2)..(39): Xaa is C or S
KXALHDELTRHKRLFIPKKRVIEYYLVSTASLQVQTPRXQV

SEQ ID NO: 3101 - protein, 37 aa, Artificial Sequence
  GFR-binding peptide
  MOD_RES (1)..(3)..(35)..(36): Xaa is C or S
XGXGEVVMDRYKKLVVKENEDFYLMSIANLETPVXXA

SEQ ID NO: 3102 - protein, 40 aa, Artificial Sequence
  GFR-binding peptide
  MOD_RES (34)..(35): Xaa is C or S
  MOD_RES (12)..(13)..(14)..(15)..(16): Xaa is A or G
  MOD_RES (17)..(18)..(19)..(20): Xaa is A or G or is absent
SRVVMNQYNKLXXXXXXXXXLYLVSIASLKTPAXXPKPVY

SEQ ID NO: 3103 - protein, 40 aa, Artificial Sequence
  GFR-binding peptide
  MOD_RES (1)..(38): Xaa is C or S
  MOD_RES (14)..(15)..(16)..(17)..(18): Xaa is A or G
  MOD_RES (19)..(20)..(21)..(22): Xaa is A or G or is absent
XALHDELTRYKKLXXXXXXXXXFYLVSIANLQVQTPRXQV

SEQ ID NO: 3104 - protein, 37 aa, Artificial Sequence
  GFR-binding peptide
  MOD_RES (31)..(32): Xaa is C or S
RVVMNRYKKLIVNSSDDFYLVSIANLKTPAXXPKPVY

SEQ ID NO: 3105 - protein, 37 aa, Artificial Sequence
  GFR-binding peptide
  MOD_RES (33)..(34): Xaa is C or S
  MOD_RES (11)..(12)..(13)..(14)..(15): Xaa is A or G
  MOD_RES (16)..(17)..(18)..(19): Xaa is A or G or is absent
SKVIMRHKRLXXXXXXXXXYYLISTASLDQSVXXPSA

SEQ ID NO: 3106 - protein, 36 aa, Artificial Sequence
  GFR-binding peptide
  MOD_RES (1)..(3)..(35)..(36): Xaa is C or S
XGXGEVVMDRHKRLVVKENEDYYLMSTASLETPVXX

SEQ ID NO: 3107 - protein, 40 aa, Artificial Sequence
  GFR-binding peptide
  MOD_RES (1)..(3)..(34)..(35): Xaa is C or S
XKXSKVIMQYNKLIKPTKGILYLISIASLDQSVXXPSASA

SEQ ID NO: 3108 - protein, 37 aa, Artificial Sequence
  GFR-binding peptide
  MOD_RES (34)..(35): Xaa is C or S
  MOD_RES (12)..(13)..(14)..(15)..(16): Xaa is A or G
  MOD_RES (17)..(18)..(19)..(20): Xaa is A or G or is absent
GEVVMDQYNKLXXXXXXXXXLYLMSIASLETPVXXAK

SEQ ID NO: 3109 - protein, 40 aa, Artificial Sequence
  GFR-binding peptide
  MOD_RES (1)..(34)..(35): Xaa is C or S
  MOD_RES (12)..(13)..(14)..(15)..(16): Xaa is A or G
  MOD_RES (17)..(18)..(19)..(20): Xaa is A or G or is absent
XSKVIMRHKRLXXXXXXXXXYYLISTASLDQSVXXPSASA

SEQ ID NO: 3110 - protein, 39 aa, Artificial Sequence
  GFR-binding peptide
  MOD_RES (1)..(3)..(35)..(36): Xaa is C or S
XGXSRVVMNRYKKLIVNSSDDFYLVSIANLKTPAXXPKP

SEQ ID NO: 3111 - protein, 36 aa, Artificial Sequence
  GFR-binding peptide
  MOD_RES (32)..(33): Xaa is C or S
ARVVMNYHYKLIVNSSDDKYLVSIPSLQTPAXXPKP

SEQ ID NO: 3112 - protein, 35 aa, Artificial Sequence
  GFR-binding peptide
  MOD_RES (1)..(3): Xaa is C or S
  MOD_RES (14)..(15)..(16)..(17)..(18): Xaa is A or G
  MOD_RES (19)..(20)..(21)..(22): Xaa is A or G or is absent
XKXSKVVMYHYKLXXXXXXXXXKYLISIPSLDQPV

SEQ ID NO: 3113 - protein, 30 aa, Artificial Sequence
  GFR-binding peptide
KVVMNRHKRLIVNNSSDYYLVSTASLKTPA

SEQ ID NO: 3114 - protein, 38 aa, Artificial Sequence
  GFR-binding peptide
  MOD_RES (2)..(36): Xaa is C or S
  MOD_RES (14)..(15)..(16)..(17)..(18): Xaa is A or G
  MOD_RES (19)..(20)..(21)..(22): Xaa is A or G or is absent
GXSRVVMNRHKRLXXXXXXXXXYYLVSTASLKTPAXTP

SEQ ID NO: 3115 - protein, 35 aa, Artificial Sequence
  GFR-binding peptide
  MOD_RES (33)..(34): Xaa is C or S
EAVSMGERHKRLTPVGMDDYYLVSTASLKTPVXXA

SEQ ID NO: 3116 - protein, 41 aa, Artificial Sequence
  GFR-binding peptide
  MOD_RES (2)..(36)..(37): Xaa is C or S
  MOD_RES (14)..(15)..(16)..(17)..(18): Xaa is A or G
  MOD_RES (19)..(20)..(21)..(22): Xaa is A or G or is absent
GXAKVVMNRHKRLXXXXXXXXXYYLVSTASLKTPAXXAKPV

SEQ ID NO: 3117 - protein, 40 aa, Artificial Sequence
  GFR-binding peptide
  MOD_RES (2)..(36)..(37): Xaa is C or S
  MOD_RES (14)..(15)..(16)..(17)..(18): Xaa is A or G
  MOD_RES (19)..(20)..(21)..(22): Xaa is A or G or is absent
GXSRVVMNQYNKLXXXXXXXXXLYLVSIASLKTPAXXPKP

SEQ ID NO: 3118 - protein, 37 aa, Artificial Sequence
  GFR-binding peptide
  MOD_RES (33)..(34): Xaa is C or S
  MOD_RES (11)..(12)..(13)..(14)..(15): Xaa is A or G
  MOD_RES (16)..(17)..(18)..(19): Xaa is A or G or is absent
SKVVMQYNKLXXXXXXXXXLYLISIASLDQPVXXPSA

SEQ ID NO: 3119 - protein, 34 aa, Artificial Sequence
  GFR-binding peptide
  MOD_RES (31)..(32): Xaa is C or S
RVVMNYHYKLIVNSSDDKYLVSIPSLKTPAXXPK

SEQ ID NO: 3120 - protein, 37 aa, Artificial Sequence
  GFR-binding peptide
  MOD_RES (33)..(34): Xaa is C or S
  MOD_RES (11)..(12)..(13)..(14)..(15): Xaa is A or G
  MOD_RES (16)..(17)..(18)..(19): Xaa is A or G or is absent
RVVMNYHYKLXXXXXXXXXKYLVSIPSLKTPAXXPKP

SEQ ID NO: 3121 - protein, 39 aa, Artificial Sequence
  GFR-binding peptide
  MOD_RES (2)..(35)..(36): Xaa is C or S
  MOD_RES (13)..(14)..(15)..(16)..(17): Xaa is A or G
  MOD_RES (18)..(19)..(20)..(21): Xaa is A or G or is absent
KXSRVIMQYNKLXXXXXXXXXLYLISIASLAQPVXXPAA

SEQ ID NO: 3122 - protein, 34 aa, Artificial Sequence
  GFR-binding peptide
  MOD_RES (32)..(32): Xaa is C or S
SRVVMNYHYKLIVNSSDDKYLVSIPSLKTPAXTP

SEQ ID NO: 3123 - protein, 33 aa, Artificial Sequence
  GFR-binding peptide
  MOD_RES (2)..(2): Xaa is C or S
GXAKVVMNQYNKLIVNNSSDLYLVSIASLKTPA

SEQ ID NO: 3124 - protein, 37 aa, Artificial Sequence
  GFR-binding peptide
  MOD_RES (2)..(4)..(37): Xaa is C or S
  MOD_RES (15)..(16)..(17)..(18)..(19): Xaa is A or G
  MOD_RES (20)..(21)..(22)..(23): Xaa is A or G or is absent
SXKXSKVVMRYKKLXXXXXXXXXFYLISIANLDQPVX

SEQ ID NO: 3125 - protein, 40 aa, Artificial Sequence
  GFR-binding peptide
  MOD_RES (1)..(34)..(35): Xaa is C or S
  MOD_RES (12)..(13)..(14)..(15)..(16): Xaa is A or G
  MOD_RES (17)..(18)..(19)..(20): Xaa is A or G or is absent
XSKVIMQYNKLXXXXXXXXXLYLISIASLDQSVXXPSASA

SEQ ID NO: 3126 - protein, 38 aa, Artificial Sequence
  GFR-binding peptide
  MOD_RES (1)..(34)..(35): Xaa is C or S
  MOD_RES (12)..(13)..(14)..(15)..(16): Xaa is A or G
  MOD_RES (17)..(18)..(19)..(20): Xaa is A or G or is absent
XSKVIMYHYKLXXXXXXXXXKYLISIPSLDQSVXXPSA

SEQ ID NO: 3127 - protein, 41 aa, Artificial Sequence
  GFR-binding peptide
  MOD_RES (2)..(36): Xaa is C or S
  MOD_RES (14)..(15)..(16)..(17)..(18): Xaa is A or G
  MOD_RES (19)..(20)..(21)..(22): Xaa is A or G or is absent
GXSRVVMNYHYKLXXXXXXXXXKYLVSIPSLKTPAXTPKTV

SEQ ID NO: 3128 - protein, 37 aa, Artificial Sequence
  GFR-binding peptide
  MOD_RES (2)..(36)..(37): Xaa is C or S
  MOD_RES (14)..(15)..(16)..(17)..(18): Xaa is A or G
  MOD_RES (19)..(20)..(21)..(22): Xaa is A or G or is absent
GXSRVVMNQYNKLXXXXXXXXXLYLVSIASLKTPAXX

SEQ ID NO: 3129 - protein, 35 aa, Artificial Sequence
  GFR-binding peptide
  MOD_RES (33)..(34): Xaa is C or S
  MOD_RES (11)..(12)..(13)..(14)..(15): Xaa is A or G
  MOD_RES (16)..(17)..(18)..(19): Xaa is A or G or is absent
EVVMERHKRLXXXXXXXXXYYLMSTASLETPVXXA

SEQ ID NO: 3130 - protein, 40 aa, Artificial Sequence
  GFR-binding peptide
  MOD_RES (1)..(3)..(36)..(37): Xaa is C or S
  MOD_RES (14)..(15)..(16)..(17)..(18): Xaa is A or G
  MOD_RES (19)..(20)..(21)..(22): Xaa is A or G or is absent
XKXSKVVMYHYKLXXXXXXXXXKYLISIPSLDQPVXXPSA

SEQ ID NO: 3131 - protein, 37 aa, Artificial Sequence
  GFR-binding peptide
  MOD_RES (2)..(34)..(35): Xaa is C or S
GXAKVVMNYHYKLIVNNSSDKYLVSIPSLKTPAXXAK

SEQ ID NO: 3132 - protein, 38 aa, Artificial Sequence
  GFR-binding peptide
  MOD_RES (1)..(35): Xaa is C or S
  MOD_RES (13)..(14)..(15)..(16)..(17): Xaa is A or G
  MOD_RES (18)..(19)..(20)..(21): Xaa is A or G or is absent
XSRVVMNRYKKLXXXXXXXXXFYLVSIANLKTPAXTPK

SEQ ID NO: 3133 - protein, 35 aa, Artificial Sequence
  GFR-binding peptide
  MOD_RES (34)..(35): Xaa is C or S
  MOD_RES (12)..(13)..(14)..(15)..(16): Xaa is A or G
  MOD_RES (17)..(18)..(19)..(20): Xaa is A or G or is absent
ARVVMNQYNKLXXXXXXXXXLYLVSIASLQTPAXX

SEQ ID NO: 3134 - protein, 39 aa, Artificial Sequence
  GFR-binding peptide
  MOD_RES (2)..(39): Xaa is C or S
  MOD_RES (15)..(16)..(17)..(18)..(19): Xaa is A or G
  MOD_RES (20)..(21)..(22)..(23): Xaa is A or G or is absent
KXALHDELTQYNKLXXXXXXXXXLYLVSIASLQVQTPRX

SEQ ID NO: 3135 - protein, 32 aa, Artificial Sequence
  GFR-binding peptide
  MOD_RES (31)..(32): Xaa is C or S
EVVMDRHKRLVVKENEDYYLMSTASLETPVXX

SEQ ID NO: 3136 - protein, 36 aa, Artificial Sequence
  GFR-binding peptide
  MOD_RES (1)..(3): Xaa is C or S
  MOD_RES (15)..(16)..(17)..(18)..(19): Xaa is A or G
  MOD_RES (20)..(21)..(22)..(23): Xaa is A or G or is absent
XGXAKVVMNQYNKLXXXXXXXXXLYLVSIASLKTPA

SEQ ID NO: 3137 - protein, 37 aa, Artificial Sequence
  GFR-binding peptide
  MOD_RES (1)..(3)..(35)..(36): Xaa is C or S
XGXARVVMNQYNKLIVNSSDDLYLVSIASLQTPAXXP

SEQ ID NO: 3138 - protein, 38 aa, Artificial Sequence
  GFR-binding peptide
  MOD_RES (34)..(35): Xaa is C or S
  MOD_RES (12)..(13)..(14)..(15)..(16): Xaa is A or G
  MOD_RES (17)..(18)..(19)..(20): Xaa is A or G or is absent
GEVVMDRYKKLXXXXXXXXXFYLMSIANLETPVXXAKP

SEQ ID NO: 3139 - protein, 32 aa, Artificial Sequence
  GFR-binding peptide
  MOD_RES (11)..(12)..(13)..(14)..(15): Xaa is A or G
  MOD_RES (16)..(17)..(18)..(19): Xaa is A or G or is absent
SKVIMQYNKLXXXXXXXXXLYLISIASLDQSV

SEQ ID NO: 3140 - protein, 38 aa, Artificial Sequence
  GFR-binding peptide
  MOD_RES (2)..(33)..(34): Xaa is C or S
KXSKVVMYHYKLVKPTRGVKYLISIPSLDQPVXXPSAS

SEQ ID NO: 3141 - protein, 37 aa, Artificial Sequence
  GFR-binding peptide
  MOD_RES (36)..(36): Xaa is C or S
  MOD_RES (12)..(13)..(14)..(15)..(16): Xaa is A or G
  MOD_RES (17)..(18)..(19)..(20): Xaa is A or G or is absent
LHDELTRYKKLXXXXXXXXXFYLVSIANLQVQTPRXQ

SEQ ID NO: 3142 - protein, 41 aa, Artificial Sequence
  GFR-binding peptide
  MOD_RES (2)..(39): Xaa is C or S
KXALHDELTQYNKLFIPKKRVIELYLVSIASLQVQTPRXQV

SEQ ID NO: 3143 - protein, 35 aa, Artificial Sequence
  GFR-binding peptide
  MOD_RES (35)..(35): Xaa is C or S
  MOD_RES (11)..(12)..(13)..(14)..(15): Xaa is A or G
  MOD_RES (16)..(17)..(18)..(19): Xaa is A or G or is absent
HDELTRYKKLXXXXXXXXXFYLVSIANLQVQTPRX

SEQ ID NO: 3144 - protein, 33 aa, Artificial Sequence
  GFR-binding peptide
  MOD_RES (33)..(33): Xaa is C or S
  MOD_RES (11)..(12)..(13)..(14)..(15): Xaa is A or G
  MOD_RES (16)..(17)..(18)..(19): Xaa is A or G or is absent
SRVIMQYNKLXXXXXXXXXLYLISIASLAQPVX

SEQ ID NO: 3145 - protein, 32 aa, Artificial Sequence
  GFR-binding peptide
  MOD_RES (1)..(32): Xaa is C or S
XSRVIMRHKRLVKPKRGVYYLISTASLAQPVX

SEQ ID NO: 3146 - protein, 32 aa, Artificial Sequence
  GFR-binding peptide
  MOD_RES (31)..(32): Xaa is C or S
SRVIMRHKRLVKPKRGVYYLISTASLAQPVXX

SEQ ID NO: 3147 - protein, 34 aa, Artificial Sequence
  GFR-binding peptide
  MOD_RES (31)..(32): Xaa is C or S
RVVMNQYNKLIVNSSDDLYLVSIASLKTPAXXPK

SEQ ID NO: 3148 - protein, 33 aa, Artificial Sequence
  GFR-binding peptide
  MOD_RES (1)..(3): Xaa is C or S
XKXSKVVMRHKRLVKPTRGVYYLISTASLDQPV

SEQ ID NO: 3149 - protein, 31 aa, Artificial Sequence
  GFR-binding peptide
  MOD_RES (31)..(31): Xaa is C or S
SRVIMRYKKLVKPKRGVFYLISIANLAQPVX

SEQ ID NO: 3150 - protein, 39 aa, Artificial Sequence
  GFR-binding peptide
  MOD_RES (1)..(3)..(36)..(37): Xaa is C or S
XGXEAVSMGEYHYKLTPVGMDDKYLVSIPSLKTPVXXAK

SEQ ID NO: 3151 - protein, 36 aa, Artificial Sequence
  GFR-binding peptide
  MOD_RES (2)..(4)..(35)..(36): Xaa is C or S
SXKXSRVIMRHKRLVKPKRGVYYLISTASLAQPVXX

SEQ ID NO: 3152 - protein, 38 aa, Artificial Sequence
  GFR-binding peptide
  MOD_RES (2)..(4)..(38): Xaa is C or S
  MOD_RES (16)..(17)..(18)..(19)..(20): Xaa is A or G
  MOD_RES (21)..(22)..(23)..(24): Xaa is A or G or is absent
HXGXAKVVMNYHYKLXXXXXXXXXKYLVSIPSLKTPAX

SEQ ID NO: 3153 - protein, 38 aa, Artificial Sequence
  GFR-binding peptide
  MOD_RES (2)..(34)..(35): Xaa is C or S
GXGEVVMEYHYKLVVKDYEDKYLMSIPSLETPVXXAKP

SEQ ID NO: 3154 - protein, 38 aa, Artificial Sequence
  GFR-binding peptide
  MOD_RES (1)..(3)..(37)..(38): Xaa is C or S
  MOD_RES (15)..(16)..(17)..(18)..(19): Xaa is A or G
  MOD_RES (20)..(21)..(22)..(23): Xaa is A or G or is absent
XGXSRVVMNYHYKLXXXXXXXXXKYLVSIPSLKTPAXX

SEQ ID NO: 3155 - protein, 34 aa, Artificial Sequence
  GFR-binding peptide
  MOD_RES (31)..(32): Xaa is C or S
EVVMDRHKRLVVKENEDYYLMSTASLETPVXXAK

SEQ ID NO: 3156 - protein, 38 aa, Artificial Sequence
  GFR-binding peptide
  MOD_RES (1)..(32)..(33): Xaa is C or S
XSKVIMYHYKLIKPTKGIKYLISIPSLDQSVXXPSASA

SEQ ID NO: 3157 - protein, 38 aa, Artificial Sequence
  GFR-binding peptide
  MOD_RES (32)..(33): Xaa is C or S
ARVVMNQYNKLIVNSSDDLYLVSIASLQTPAXXPKPVT

SEQ ID NO: 3158 - protein, 38 aa, Artificial Sequence
  GFR-binding peptide
  MOD_RES (2)..(35)..(36): Xaa is C or S
  MOD_RES (13)..(14)..(15)..(16)..(17): Xaa is A or G
  MOD_RES (18)..(19)..(20)..(21): Xaa is A or G or is absent
KXSKVVMYHYKLXXXXXXXXXKYLISIPSLDQPVXXPS

SEQ ID NO: 3159 - protein, 38 aa, Artificial Sequence
  GFR-binding peptide
  MOD_RES (2)..(4): Xaa is C or S
EXKXALHDELTQYNKLFIPKKRVIELYLVSIASLQVQT

SEQ ID NO: 3160 - protein, 36 aa, Artificial Sequence
  GFR-binding peptide
  MOD_RES (1)..(3): Xaa is C or S
  MOD_RES (15)..(16)..(17)..(18)..(19): Xaa is A or G
  MOD_RES (20)..(21)..(22)..(23): Xaa is A or G or is absent
XGXARVVMNYHYKLXXXXXXXXXKYLVSIPSLQTPA

SEQ ID NO: 3161 - protein, 44 aa, Artificial Sequence
  GFR-binding peptide
  MOD_RES (2)..(4)..(41): Xaa is C or S
EXKXALHDELTQYNKLFIPKKRVIELYLVSIASLQVQTPRXQVN

SEQ ID NO: 3162 - protein, 33 aa, Artificial Sequence
  GFR-binding peptide
  MOD_RES (12)..(13)..(14)..(15)..(16): Xaa is A or G
  MOD_RES (17)..(18)..(19)..(20): Xaa is A or G or is absent
GEVVMDQYNKLXXXXXXXXXLYLMSIASLETPV

SEQ ID NO: 3163 - protein, 37 aa, Artificial Sequence
  GFR-binding peptide
  MOD_RES (33)..(34): Xaa is C or S
  MOD_RES (11)..(12)..(13)..(14)..(15): Xaa is A or G
  MOD_RES (16)..(17)..(18)..(19): Xaa is A or G or is absent
EVVMDYHYKLXXXXXXXXXKYLMSIPSLETPVXXAKP

SEQ ID NO: 3164 - protein, 38 aa, Artificial Sequence
  GFR-binding peptide
  MOD_RES (2)..(4)..(36)..(37): Xaa is C or S
RXGXGEVVMERHKRLVVKDYEDYYLMSTASLETPVXXA

SEQ ID NO: 3165 - protein, 34 aa, Artificial Sequence
  GFR-binding peptide
  MOD_RES (1)..(3)..(34): Xaa is C or S
XKXSKVIMRHKRLIKPTKGIYYLISTASLDQSVX

SEQ ID NO: 3166 - protein, 40 aa, Artificial Sequence
  GFR-binding peptide
  MOD_RES (2)..(36)..(37): Xaa is C or S
  MOD_RES (14)..(15)..(16)..(17)..(18): Xaa is A or G
  MOD_RES (19)..(20)..(21)..(22): Xaa is A or G or is absent
GXGEVVMERHKRLXXXXXXXXXYYLMSTASLETPVXXAKP

SEQ ID NO: 3167 - protein, 37 aa, Artificial Sequence
  GFR-binding peptide
  MOD_RES (2)..(34)..(35): Xaa is C or S
GXSRVVMNRHKRLIVNSSDDYYLVSTASLKTPAXXPK

SEQ ID NO: 3168 - protein, 38 aa, Artificial Sequence
  GFR-binding peptide
  MOD_RES (33)..(34): Xaa is C or S
  MOD_RES (11)..(12)..(13)..(14)..(15): Xaa is A or G
  MOD_RES (16)..(17)..(18)..(19): Xaa is A or G or is absent
RVVMNRHKRLXXXXXXXXXYYLVSTASLKTPAXXPKPV

SEQ ID NO: 3169 - protein, 37 aa, Artificial Sequence
  GFR-binding peptide
  MOD_RES (2)..(4)..(36): Xaa is C or S
HXGXSRVVMNYHYKLIVNSSDDKYLVSIPSLKTPAXT

SEQ ID NO: 3170 - protein, 35 aa, Artificial Sequence
  GFR-binding peptide
  MOD_RES (1)..(3): Xaa is C or S
  MOD_RES (14)..(15)..(16)..(17)..(18): Xaa is A or G
  MOD_RES (19)..(20)..(21)..(22): Xaa is A or G or is absent
XKXSKVVMRYKKLXXXXXXXXXFYLISIANLDQPV

SEQ ID NO: 3171 - protein, 36 aa, Artificial Sequence
  GFR-binding peptide
  MOD_RES (2)..(4)..(35)..(36): Xaa is C or S
SXKXSKVVMRYKKLVKPTRGVFYLISIANLDQPVXX

SEQ ID NO: 3172 - protein, 40 aa, Artificial Sequence
  GFR-binding peptide
  MOD_RES (2)..(4)..(37)..(38): Xaa is C or S
RXGXEAVSMGERYKKLTPVGMDDFYLVSIANLKTPVXXAK

SEQ ID NO: 3173 - protein, 33 aa, Artificial Sequence
  GFR-binding peptide
  MOD_RES (2)..(33): Xaa is C or S
KXSKVVMYHYKLVKPTRGVKYLISIPSLDQPVX

SEQ ID NO: 3174 - protein, 34 aa, Artificial Sequence
  GFR-binding peptide
  MOD_RES (1)..(32)..(33): Xaa is C or S
XSRVIMQYNKLVKPKRGVLYLISIASLAQPVXXP

SEQ ID NO: 3175 - protein, 33 aa, Artificial Sequence
  GFR-binding peptide
  MOD_RES (33)..(33): Xaa is C or S
  MOD_RES (11)..(12)..(13)..(14)..(15): Xaa is A or G
  MOD_RES (16)..(17)..(18)..(19): Xaa is A or G or is absent
EVVMEQYNKLXXXXXXXXXLYLMSIASLETPVX

SEQ ID NO: 3176 - protein, 38 aa, Artificial Sequence
  GFR-binding peptide
  MOD_RES (2)..(4)..(35)..(36): Xaa is C or S
SXKXSRVIMRHKRLVKPKRGVYYLISTASLAQPVXXPA

SEQ ID NO: 3177 - protein, 34 aa, Artificial Sequence
  GFR-binding peptide
  MOD_RES (2)..(34): Xaa is C or S
GXGEVVMDRHKRLVVKENEDYYLMSTASLETPVX

SEQ ID NO: 3178 - protein, 34 aa, Artificial Sequence
  GFR-binding peptide
  MOD_RES (1)..(34): Xaa is C or S
  MOD_RES (12)..(13)..(14)..(15)..(16): Xaa is A or G
  MOD_RES (17)..(18)..(19)..(20): Xaa is A or G or is absent
XSRVIMRHKRLXXXXXXXXXYYLISTASLAQPVX

SEQ ID NO: 3179 - protein, 39 aa, Artificial Sequence
  GFR-binding peptide
  MOD_RES (1)..(3)..(36)..(37): Xaa is C or S
  MOD_RES (14)..(15)..(16)..(17)..(18): Xaa is A or G
  MOD_RES (19)..(20)..(21)..(22): Xaa is A or G or is absent
XKXSKVIMQYNKLXXXXXXXXXLYLISIASLDQSVXXPS

SEQ ID NO: 3180 - protein, 34 aa, Artificial Sequence
  GFR-binding peptide
  MOD_RES (2)..(34): Xaa is C or S
GXSRVVMNYHYKLIVNSSDDKYLVSIPSLKTPAX

SEQ ID NO: 3181 - protein, 37 aa, Artificial Sequence
  GFR-binding peptide
  MOD_RES (2)..(4)..(36)..(37): Xaa is C or S
HXGXAKVVMNRYKKLIVNNSSDFYLVSIANLKTPAXX

SEQ ID NO: 3182 - protein, 36 aa, Artificial Sequence
  GFR-binding peptide
  MOD_RES (1)..(34)..(35): Xaa is C or S
XEAVSMGERYKKLTPVGMDDFYLVSIANLKTPVXXA

SEQ ID NO: 3183 - protein, 42 aa, Artificial Sequence
  GFR-binding peptide
  MOD_RES (1)..(3)..(40): Xaa is C or S
  MOD_RES (16)..(17)..(18)..(19)..(20): Xaa is A or G
  MOD_RES (21)..(22)..(23)..(24): Xaa is A or G or is absent
XKXALHDELTQYNKLXXXXXXXXXLYLVSIASLQVQTPRXQV

SEQ ID NO: 3184 - protein, 34 aa, Artificial Sequence
  GFR-binding peptide
  MOD_RES (1)..(1): Xaa is C or S
  MOD_RES (13)..(14)..(15)..(16)..(17): Xaa is A or G
  MOD_RES (18)..(19)..(20)..(21): Xaa is A or G or is absent
XAKVVMNRYKKLXXXXXXXXXFYLVSIANLKTPA

SEQ ID NO: 3185 - protein, 41 aa, Artificial Sequence
  GFR-binding peptide
  MOD_RES (2)..(4)..(38): Xaa is C or S
  MOD_RES (16)..(17)..(18)..(19)..(20): Xaa is A or G
  MOD_RES (21)..(22)..(23)..(24): Xaa is A or G or is absent
HXGXSRVVMNQYNKLXXXXXXXXXLYLVSIASLKTPAXTPK

SEQ ID NO: 3186 - protein, 36 aa, Artificial Sequence
  GFR-binding peptide
  MOD_RES (1)..(3): Xaa is C or S
  MOD_RES (15)..(16)..(17)..(18)..(19): Xaa is A or G
  MOD_RES (20)..(21)..(22)..(23): Xaa is A or G or is absent
XGXGEVVMEYHYKLXXXXXXXXXKYLMSIPSLETPV

SEQ ID NO: 3187 - protein, 36 aa, Artificial Sequence
  GFR-binding peptide
  MOD_RES (2)..(36): Xaa is C or S
  MOD_RES (14)..(15)..(16)..(17)..(18): Xaa is A or G
  MOD_RES (19)..(20)..(21)..(22): Xaa is A or G or is absent
GXSRVVMNRYKKLXXXXXXXXXFYLVSIANLKTPAX

SEQ ID NO: 3188 - protein, 36 aa, Artificial Sequence
  GFR-binding peptide
  MOD_RES (34)..(35): Xaa is C or S
  MOD_RES (12)..(13)..(14)..(15)..(16): Xaa is A or G
  MOD_RES (17)..(18)..(19)..(20): Xaa is A or G or is absent
GEVVMEYHYKLXXXXXXXXXKYLMSIPSLETPVXXA

SEQ ID NO: 3189 - protein, 36 aa, Artificial Sequence
  GFR-binding peptide
  MOD_RES (1)..(3)..(35)..(36): Xaa is C or S
XGXGEVVMERYKKLVVKDYEDFYLMSIANLETPVXX

SEQ ID NO: 3190 - protein, 42 aa, Artificial Sequence
  GFR-binding peptide
  MOD_RES (2)..(4)..(38)..(39): Xaa is C or S
  MOD_RES (16)..(17)..(18)..(19)..(20): Xaa is A or G
  MOD_RES (21)..(22)..(23)..(24): Xaa is A or G or is absent
HXGXAKVVMNRYKKLXXXXXXXXXFYLVSIANLKTPAXXAKP

SEQ ID NO: 3191 - protein, 39 aa, Artificial Sequence
  GFR-binding peptide
  MOD_RES (34)..(34): Xaa is C or S
  MOD_RES (12)..(13)..(14)..(15)..(16): Xaa is A or G
  MOD_RES (17)..(18)..(19)..(20): Xaa is A or G or is absent
SRVVMNRHKRLXXXXXXXXXYYLVSTASLKTPAXTPKTV

SEQ ID NO: 3192 - protein, 34 aa, Artificial Sequence
  GFR-binding peptide
  MOD_RES (1)..(34): Xaa is C or S
  MOD_RES (12)..(13)..(14)..(15)..(16): Xaa is A or G
  MOD_RES (17)..(18)..(19)..(20): Xaa is A or G or is absent
XSRVIMQYNKLXXXXXXXXXLYLISIASLAQPVX

SEQ ID NO: 3193 - protein, 35 aa, Artificial Sequence
  GFR-binding peptide
ALHDELTYHYKLFIPKKRVIEKYLVSIPSLQVQTP

SEQ ID NO: 3194 - protein, 38 aa, Artificial Sequence
  GFR-binding peptide
  MOD_RES (34)..(35): Xaa is C or S
  MOD_RES (12)..(13)..(14)..(15)..(16): Xaa is A or G
  MOD_RES (17)..(18)..(19)..(20): Xaa is A or G or is absent
AKVVMNRHKRLXXXXXXXXXYYLVSTASLKTPAXXAKP

SEQ ID NO: 3195 - protein, 41 aa, Artificial Sequence
  GFR-binding peptide
  MOD_RES (1)..(3)..(36)..(37): Xaa is C or S
  MOD_RES (14)..(15)..(16)..(17)..(18): Xaa is A or G
  MOD_RES (19)..(20)..(21)..(22): Xaa is A or G or is absent
XKXSKVVMRYKKLXXXXXXXXXFYLISIANLDQPVXXPSAS

SEQ ID NO: 3196 - protein, 38 aa, Artificial Sequence
  GFR-binding peptide
  MOD_RES (1)..(3): Xaa is C or S
  MOD_RES (16)..(17)..(18)..(19)..(20): Xaa is A or G
  MOD_RES (21)..(22)..(23)..(24): Xaa is A or G or is absent
XKXALHDELTRYKKLXXXXXXXXXFYLVSIANLQVQTP

SEQ ID NO: 3197 - protein, 39 aa, Artificial Sequence
  GFR-binding peptide
  MOD_RES (2)..(4): Xaa is C or S
  MOD_RES (17)..(18)..(19)..(20)..(21): Xaa is A or G
  MOD_RES (22)..(23)..(24)..(25): Xaa is A or G or is absent
EXKXALHDELTYHYKLXXXXXXXXXKYLVSIPSLQVQTP

SEQ ID NO: 3198 - protein, 37 aa, Artificial Sequence
  GFR-binding peptide
  MOD_RES (1)..(3)..(35)..(36): Xaa is C or S
XGXGEVVMERHKRLVVKDYEDYYLMSTASLETPVXXA

SEQ ID NO: 3199 - protein, 38 aa, Artificial Sequence
  GFR-binding peptide
  MOD_RES (2)..(37)..(38): Xaa is C or S
  MOD_RES (15)..(16)..(17)..(18)..(19): Xaa is A or G
  MOD_RES (20)..(21)..(22)..(23): Xaa is A or G or is absent
GXEAVSMGEYHYKLXXXXXXXXXKYLVSIPSLKTPVXX

SEQ ID NO: 3200 - protein, 34 aa, Artificial Sequence
  GFR-binding peptide
  MOD_RES (2)..(2): Xaa is C or S
  MOD_RES (13)..(14)..(15)..(16)..(17): Xaa is A or G
  MOD_RES (18)..(19)..(20)..(21): Xaa is A or G or is absent
KXSRVIMYHYKLXXXXXXXXXKYLISIPSLAQPV

SEQ ID NO: 3201 - protein, 42 aa, Artificial Sequence
  GFR-binding peptide
  MOD_RES (1)..(3)..(37): Xaa is C or S
  MOD_RES (15)..(16)..(17)..(18)..(19): Xaa is A or G
  MOD_RES (20)..(21)..(22)..(23): Xaa is A or G or is absent
XGXSRVVMNQYNKLXXXXXXXXXLYLVSIASLKTPAXTPKTV

SEQ ID NO: 3202 - protein, 36 aa, Artificial Sequence
  GFR-binding peptide
  MOD_RES (2)..(33)..(34): Xaa is C or S
KXSKVVMYHYKLVKPTRGVKYLISIPSLDQPVXXPS

SEQ ID NO: 3203 - protein, 38 aa, Artificial Sequence
  GFR-binding peptide
  MOD_RES (33)..(34): Xaa is C or S
EAVSMGERYKKLTPVGMDDFYLVSIANLKTPVXXAKGV

SEQ ID NO: 3204 - protein, 33 aa, Artificial Sequence
  GFR-binding peptide
LHDELTYHYKLFIPKKRVIEKYLVSIPSLQVQT

SEQ ID NO: 3205 - protein, 40 aa, Artificial Sequence
  GFR-binding peptide
  MOD_RES (2)..(4)..(36)..(37): Xaa is C or S
HXGXAKVVMNYHYKLIVNNSSDKYLVSIPSLKTPAXXAKP

SEQ ID NO: 3206 - protein, 33 aa, Artificial Sequence
  GFR-binding peptide
  MOD_RES (2)..(33): Xaa is C or S
KXSRVIMRHKRLVKPKRGVYYLISTASLAQPVX

SEQ ID NO: 3207 - protein, 39 aa, Artificial Sequence
  GFR-binding peptide
  MOD_RES (34)..(35): Xaa is C or S
  MOD_RES (12)..(13)..(14)..(15)..(16): Xaa is A or G
  MOD_RES (17)..(18)..(19)..(20): Xaa is A or G or is absent
ARVVMNRYKKLXXXXXXXXXFYLVSIANLQTPAXXPKPV

SEQ ID NO: 3208 - protein, 34 aa, Artificial Sequence
  GFR-binding peptide
  MOD_RES (33)..(34): Xaa is C or S
  MOD_RES (11)..(12)..(13)..(14)..(15): Xaa is A or G
  MOD_RES (16)..(17)..(18)..(19): Xaa is A or G or is absent
RVVMNRYKKLXXXXXXXXXFYLVSIANLQTPAXX

SEQ ID NO: 3209 - protein, 40 aa, Artificial Sequence
  GFR-binding peptide
  MOD_RES (2)..(4)..(36)..(37): Xaa is C or S
HXGXSRVVMNQYNKLIVNSSDDLYLVSIASLKTPAXXPKP

SEQ ID NO: 3210 - protein, 34 aa, Artificial Sequence
  GFR-binding peptide
  MOD_RES (33)..(34): Xaa is C or S
EAVSMGEYHYKLTPVGMDDKYLVSIPSLKTPVXX

SEQ ID NO: 3211 - protein, 37 aa, Artificial Sequence
  GFR-binding peptide
  MOD_RES (1)..(35): Xaa is C or S
  MOD_RES (13)..(14)..(15)..(16)..(17): Xaa is A or G
  MOD_RES (18)..(19)..(20)..(21): Xaa is A or G or is absent
XSRVVMNQYNKLXXXXXXXXXLYLVSIASLKTPAXTP

SEQ ID NO: 3212 - protein, 40 aa, Artificial Sequence
  GFR-binding peptide
  MOD_RES (2)..(39): Xaa is C or S
  MOD_RES (15)..(16)..(17)..(18)..(19): Xaa is A or G
  MOD_RES (20)..(21)..(22)..(23): Xaa is A or G or is absent
KXALHDELTRYKKLXXXXXXXXXFYLVSIANLQVQTPRXQ

SEQ ID NO: 3213 - protein, 43 aa, Artificial Sequence
  GFR-binding peptide
  MOD_RES (2)..(37)..(38): Xaa is C or S
  MOD_RES (15)..(16)..(17)..(18)..(19): Xaa is A or G
  MOD_RES (20)..(21)..(22)..(23): Xaa is A or G or is absent
GXEAVSMGEYHYKLXXXXXXXXXKYLVSIPSLKTPVXXAKGVK

SEQ ID NO: 3214 - protein, 43 aa, Artificial Sequence
  GFR-binding peptide
  MOD_RES (2)..(4)..(37)..(38): Xaa is C or S
  MOD_RES (15)..(16)..(17)..(18)..(19): Xaa is A or G
  MOD_RES (20)..(21)..(22)..(23): Xaa is A or G or is absent
SXKXSRVIMYHYKLXXXXXXXXXKYLISIPSLAQPVXXPAASA

SEQ ID NO: 3215 - protein, 39 aa, Artificial Sequence
  GFR-binding peptide
  MOD_RES (2)..(34)..(35): Xaa is C or S
GXAKVVMNRHKRLIVNNSSDYYLVSTASLKTPAXXAKPV

SEQ ID NO: 3216 - protein, 34 aa, Artificial Sequence
  GFR-binding peptide
  MOD_RES (34)..(34): Xaa is C or S
  MOD_RES (12)..(13)..(14)..(15)..(16): Xaa is A or G
  MOD_RES (17)..(18)..(19)..(20): Xaa is A or G or is absent
SRVVMNYHYKLXXXXXXXXXKYLVSIPSLKTPAX

SEQ ID NO: 3217 - protein, 41 aa, Artificial Sequence
  GFR-binding peptide
  MOD_RES (2)..(35)..(36): Xaa is C or S
  MOD_RES (13)..(14)..(15)..(16)..(17): Xaa is A or G
  MOD_RES (18)..(19)..(20)..(21): Xaa is A or G or is absent
KXSKVIMRHKRLXXXXXXXXXYYLISTASLDQSVXXPSASA

SEQ ID NO: 3218 - protein, 35 aa, Artificial Sequence
  GFR-binding peptide
  MOD_RES (1)..(34)..(35): Xaa is C or S
XEAVSMGERYKKLTPVGMDDFYLVSIANLKTPVXX

SEQ ID NO: 3219 - protein, 40 aa, Artificial Sequence
  GFR-binding peptide
  MOD_RES (1)..(3)..(35)..(36): Xaa is C or S
XGXAKVVMNRYKKLIVNNSSDFYLVSIANLKTPAXXAKPV

SEQ ID NO: 3220 - protein, 39 aa, Artificial Sequence
  GFR-binding peptide
  MOD_RES (35)..(35): Xaa is C or S
  MOD_RES (11)..(12)..(13)..(14)..(15): Xaa is A or G
  MOD_RES (16)..(17)..(18)..(19): Xaa is A or G or is absent
HDELTQYNKLXXXXXXXXXLYLVSIASLQVQTPRXQVNR

SEQ ID NO: 3221 - protein, 37 aa, Artificial Sequence
  GFR-binding peptide
  MOD_RES (2)..(4)..(36)..(37): Xaa is C or S
HXGXAKVVMNRHKRLIVNNSSDYYLVSTASLKTPAXX

SEQ ID NO: 3222 - protein, 37 aa, Artificial Sequence
  GFR-binding peptide
  MOD_RES (2)..(36)..(37): Xaa is C or S
  MOD_RES (14)..(15)..(16)..(17)..(18): Xaa is A or G
  MOD_RES (19)..(20)..(21)..(22): Xaa is A or G or is absent
GXGEVVMEQYNKLXXXXXXXXXLYLMSIASLETPVXX

SEQ ID NO: 3223 - protein, 37 aa, Artificial Sequence
  GFR-binding peptide
  MOD_RES (2)..(4)..(36)..(37): Xaa is C or S
HXGXARVVMNRYKKLIVNSSDDFYLVSIANLQTPAXX

SEQ ID NO: 3224 - protein, 35 aa, Artificial Sequence
  GFR-binding peptide
LHDELTYHYKLFIPKKRVIEKYLVSIPSLQVQTPR

SEQ ID NO: 3225 - protein, 39 aa, Artificial Sequence
  GFR-binding peptide
  MOD_RES (2)..(35)..(36): Xaa is C or S
  MOD_RES (13)..(14)..(15)..(16)..(17): Xaa is A or G
  MOD_RES (18)..(19)..(20)..(21): Xaa is A or G or is absent
KXSKVIMYHYKLXXXXXXXXXKYLISIPSLDQSVXXPSA

SEQ ID NO: 3226 - protein, 35 aa, Artificial Sequence
  GFR-binding peptide
  MOD_RES (2)..(2): Xaa is C or S
  MOD_RES (14)..(15)..(16)..(17)..(18): Xaa is A or G
  MOD_RES (19)..(20)..(21)..(22): Xaa is A or G or is absent
GXSRVVMNRHKRLXXXXXXXXXYYLVSTASLKTPA

SEQ ID NO: 3227 - protein, 41 aa, Artificial Sequence
  GFR-binding peptide
  MOD_RES (2)..(4)..(35)..(36): Xaa is C or S
SXKXSKVVMYHYKLVKPTRGVKYLISIPSLDQPVXXPSASA

SEQ ID NO: 3228 - protein, 36 aa, Artificial Sequence
  GFR-binding peptide
  MOD_RES (2)..(35)..(36): Xaa is C or S
GXEAVSMGERHKRLTPVGMDDYYLVSTASLKTPVXX

SEQ ID NO: 3229 - protein, 43 aa, Artificial Sequence
  GFR-binding peptide
  MOD_RES (2)..(4)..(37)..(38): Xaa is C or S
  MOD_RES (15)..(16)..(17)..(18)..(19): Xaa is A or G
  MOD_RES (20)..(21)..(22)..(23): Xaa is A or G or is absent
SXKXSKVVMQYNKLXXXXXXXXXLYLISIASLDQPVXXPSASA

SEQ ID NO: 3230 - protein, 36 aa, Artificial Sequence
  GFR-binding peptide
  MOD_RES (31)..(32): Xaa is C or S
EVVMERHKRLVVKDYEDYYLMSTASLETPVXXAKPI

SEQ ID NO: 3231 - protein, 42 aa, Artificial Sequence
  GFR-binding peptide
  MOD_RES (2)..(4)..(36)..(37): Xaa is C or S
RXGXGEVVMDRYKKLVVKENEDFYLMSIANLETPVXXAKPIK

SEQ ID NO: 3232 - protein, 39 aa, Artificial Sequence
  GFR-binding peptide
  MOD_RES (1)..(33)..(34): Xaa is C or S
XGEVVMDYHYKLVVKENEDKYLMSIPSLETPVXXAKPIK

SEQ ID NO: 3233 - protein, 34 aa, Artificial Sequence
  GFR-binding peptide
  MOD_RES (33)..(34): Xaa is C or S
  MOD_RES (11)..(12)..(13)..(14)..(15): Xaa is A or G
  MOD_RES (16)..(17)..(18)..(19): Xaa is A or G or is absent
SKVVMRHKRLXXXXXXXXXYYLISTASLDQPVXX

SEQ ID NO: 3234 - protein, 34 aa, Artificial Sequence
  GFR-binding peptide
  MOD_RES (1)..(1): Xaa is C or S
  MOD_RES (13)..(14)..(15)..(16)..(17): Xaa is A or G
  MOD_RES (18)..(19)..(20)..(21): Xaa is A or G or is absent
XGEVVMDQYNKLXXXXXXXXXLYLMSIASLETPV

SEQ ID NO: 3235 - protein, 39 aa, Artificial Sequence
  GFR-binding peptide
  MOD_RES (1)..(3)..(36)..(37): Xaa is C or S
  MOD_RES (14)..(15)..(16)..(17)..(18): Xaa is A or G
  MOD_RES (19)..(20)..(21)..(22): Xaa is A or G or is absent
XKXSKVVMYHYKLXXXXXXXXXKYLISIPSLDQPVXXPS

SEQ ID NO: 3236 - protein, 39 aa, Artificial Sequence
  GFR-binding peptide
  MOD_RES (2)..(4)..(38): Xaa is C or S
  MOD_RES (16)..(17)..(18)..(19)..(20): Xaa is A or G
  MOD_RES (21)..(22)..(23)..(24): Xaa is A or G or is absent
HXGXSRVVMNYHYKLXXXXXXXXXKYLVSIPSLKTPAXT

SEQ ID NO: 3237 - protein, 33 aa, Artificial Sequence
  GFR-binding peptide
  MOD_RES (32)..(33): Xaa is C or S
ARVVMNRHKRLIVNSSDDYYLVSTASLQTPAXX

SEQ ID NO: 3238 - protein, 42 aa, Artificial Sequence
  GFR-binding peptide
  MOD_RES (2)..(4)..(38)..(39): Xaa is C or S
  MOD_RES (16)..(17)..(18)..(19)..(20): Xaa is A or G
  MOD_RES (21)..(22)..(23)..(24): Xaa is A or G or is absent
HXGXARVVMNQYNKLXXXXXXXXXLYLVSIASLQTPAXXPKP

SEQ ID NO: 3239 - protein, 42 aa, Artificial Sequence
  GFR-binding peptide
  MOD_RES (2)..(39): Xaa is C or S
  MOD_RES (15)..(16)..(17)..(18)..(19): Xaa is A or G
  MOD_RES (20)..(21)..(22)..(23): Xaa is A or G or is absent
KXALHDELTRHKRLXXXXXXXXXYYLVSTASLQVQTPRXQVN

SEQ ID NO: 3240 - protein, 35 aa, Artificial Sequence
  GFR-binding peptide
  MOD_RES (34)..(35): Xaa is C or S
  MOD_RES (12)..(13)..(14)..(15)..(16): Xaa is A or G
  MOD_RES (17)..(18)..(19)..(20): Xaa is A or G or is absent
AKVVMNYHYKLXXXXXXXXXKYLVSIPSLKTPAXX

SEQ ID NO: 3241 - protein, 33 aa, Artificial Sequence
  GFR-binding peptide
  MOD_RES (1)..(32)..(33): Xaa is C or S
XSKVVMQYNKLVKPTRGVLYLISIASLDQPVXX

SEQ ID NO: 3242 - protein, 31 aa, Artificial Sequence
  GFR-binding peptide
  MOD_RES (1)..(1): Xaa is C or S
XSRVIMYHYKLVKPKRGVKYLISIPSLAQPV

SEQ ID NO: 3243 - protein, 38 aa, Artificial Sequence
  GFR-binding peptide
  MOD_RES (1)..(32)..(33): Xaa is C or S
XSKVIMRHKRLIKPTKGIYYLISTASLDQSVXXPSASA

SEQ ID NO: 3244 - protein, 33 aa, Artificial Sequence
  GFR-binding peptide
  MOD_RES (33)..(33): Xaa is C or S
EAVSMGEQYNKLTPVGMDDLYLVSIASLKTPVX

SEQ ID NO: 3245 - protein, 36 aa, Artificial Sequence
  GFR-binding peptide
  MOD_RES (1)..(3)..(34)..(35): Xaa is C or S
XKXSKVIMRHKRLIKPTKGIYYLISTASLDQSVXXP

SEQ ID NO: 3246 - protein, 41 aa, Artificial Sequence
  GFR-binding peptide
  MOD_RES (2)..(35)..(36): Xaa is C or S
  MOD_RES (13)..(14)..(15)..(16)..(17): Xaa is A or G
  MOD_RES (18)..(19)..(20)..(21): Xaa is A or G or is absent
KXSRVIMRHKRLXXXXXXXXXYYLISTASLAQPVXXPAASA

SEQ ID NO: 3247 - protein, 40 aa, Artificial Sequence
  GFR-binding peptide
  MOD_RES (2)..(4)..(38)..(39): Xaa is C or S
  MOD_RES (16)..(17)..(18)..(19)..(20): Xaa is A or G
  MOD_RES (21)..(22)..(23)..(24): Xaa is A or G or is absent
RXGXGEVVMEYHYKLXXXXXXXXXKYLMSIPSLETPVXXA

SEQ ID NO: 3248 - protein, 33 aa, Artificial Sequence
  GFR-binding peptide
  MOD_RES (31)..(32): Xaa is C or S
SKVVMQYNKLVKPTRGVLYLISIASLDQPVXXP

SEQ ID NO: 3249 - protein, 34 aa, Artificial Sequence
  GFR-binding peptide
  MOD_RES (2)..(33)..(34): Xaa is C or S
KXSRVIMRHKRLVKPKRGVYYLISTASLAQPVXX

SEQ ID NO: 3250 - protein, 33 aa, Artificial Sequence
  GFR-binding peptide
  MOD_RES (31)..(32): Xaa is C or S
SRVIMRYKKLVKPKRGVFYLISIANLAQPVXXP

SEQ ID NO: 3251 - protein, 36 aa, Artificial Sequence
  GFR-binding peptide
  MOD_RES (34)..(35): Xaa is C or S
  MOD_RES (12)..(13)..(14)..(15)..(16): Xaa is A or G
  MOD_RES (17)..(18)..(19)..(20): Xaa is A or G or is absent
SRVVMNRHKRLXXXXXXXXXYYLVSTASLKTPAXXP

SEQ ID NO: 3252 - protein, 43 aa, Artificial Sequence
  GFR-binding peptide
  MOD_RES (2)..(4)..(41): Xaa is C or S
  MOD_RES (17)..(18)..(19)..(20)..(21): Xaa is A or G
  MOD_RES (22)..(23)..(24)..(25): Xaa is A or G or is absent
EXKXALHDELTQYNKLXXXXXXXXXLYLVSIASLQVQTPRXQV

SEQ ID NO: 3253 - protein, 32 aa, Artificial Sequence
  GFR-binding peptide
  MOD_RES (1)..(1): Xaa is C or S
XAKVVMNYHYKLIVNNSSDKYLVSIPSLKTPA

SEQ ID NO: 3254 - protein, 35 aa, Artificial Sequence
  GFR-binding peptide
  MOD_RES (31)..(32): Xaa is C or S
EVVMDQYNKLVVKENEDLYLMSIASLETPVXXAKP

SEQ ID NO: 3255 - protein, 41 aa, Artificial Sequence
  GFR-binding peptide
  MOD_RES (1)..(3)..(37)..(38): Xaa is C or S
  MOD_RES (15)..(16)..(17)..(18)..(19): Xaa is A or G
  MOD_RES (20)..(21)..(22)..(23): Xaa is A or G or is absent
XGXGEVVMDYHYKLXXXXXXXXXKYLMSIPSLETPVXXAKP

SEQ ID NO: 3256 - protein, 32 aa, Artificial Sequence
  GFR-binding peptide
  MOD_RES (2)..(2): Xaa is C or S
KXSRVIMQYNKLVKPKRGVLYLISIASLAQPV

SEQ ID NO: 3257 - protein, 35 aa, Artificial Sequence
  GFR-binding peptide
  MOD_RES (1)..(35): Xaa is C or S
  MOD_RES (13)..(14)..(15)..(16)..(17): Xaa is A or G
  MOD_RES (18)..(19)..(20)..(21): Xaa is A or G or is absent
XAKVVMNRYKKLXXXXXXXXXFYLVSIANLKTPAX

SEQ ID NO: 3258 - protein, 37 aa, Artificial Sequence
  GFR-binding peptide
  MOD_RES (2)..(4)..(37): Xaa is C or S
  MOD_RES (15)..(16)..(17)..(18)..(19): Xaa is A or G
  MOD_RES (20)..(21)..(22)..(23): Xaa is A or G or is absent
SXKXSRVIMYHYKLXXXXXXXXXKYLISIPSLAQPVX

SEQ ID NO: 3259 - protein, 39 aa, Artificial Sequence
  GFR-binding peptide
  MOD_RES (1)..(3)..(36)..(37): Xaa is C or S
  MOD_RES (14)..(15)..(16)..(17)..(18): Xaa is A or G
  MOD_RES (19)..(20)..(21)..(22): Xaa is A or G or is absent
XKXSRVIMQYNKLXXXXXXXXXLYLISIASLAQPVXXPA

SEQ ID NO: 3260 - protein, 38 aa, Artificial Sequence
  GFR-binding peptide
  MOD_RES (1)..(3)..(35)..(36): Xaa is C or S
XGXSRVVMNRYKKLIVNSSDDFYLVSIANLKTPAXXPK

SEQ ID NO: 3261 - protein, 36 aa, Artificial Sequence
  GFR-binding peptide
  MOD_RES (2)..(4)..(36): Xaa is C or S
HXGXARVVMNQYNKLIVNSSDDLYLVSIASLQTPAX

SEQ ID NO: 3262 - protein, 32 aa, Artificial Sequence
  GFR-binding peptide
  MOD_RES (2)..(2): Xaa is C or S
KXSKVIMRHKRLIKPTKGIYYLISTASLDQSV

SEQ ID NO: 3263 - protein, 36 aa, Artificial Sequence
  GFR-binding peptide
  MOD_RES (1)..(33)..(34): Xaa is C or S
XAKVVMNYHYKLIVNNSSDKYLVSIPSLKTPAXXAK

SEQ ID NO: 3264 - protein, 32 aa, Artificial Sequence
  GFR-binding peptide
  MOD_RES (11)..(12)..(13)..(14)..(15): Xaa is A or G
  MOD_RES (16)..(17)..(18)..(19): Xaa is A or G or is absent
RVVMNQYNKLXXXXXXXXXLYLVSIASLQTPA

SEQ ID NO: 3265 - protein, 37 aa, Artificial Sequence
  GFR-binding peptide
  MOD_RES (1)..(3)..(37): Xaa is C or S
  MOD_RES (15)..(16)..(17)..(18)..(19): Xaa is A or G
  MOD_RES (20)..(21)..(22)..(23): Xaa is A or G or is absent
XGXAKVVMNRHKRLXXXXXXXXXYYLVSTASLKTPAX

SEQ ID NO: 3266 - protein, 37 aa, Artificial Sequence
  GFR-binding peptide
  MOD_RES (35)..(35): Xaa is C or S
  MOD_RES (11)..(12)..(13)..(14)..(15): Xaa is A or G
  MOD_RES (16)..(17)..(18)..(19): Xaa is A or G or is absent
HDELTRHKRLXXXXXXXXXYYLVSTASLQVQTPRXQV

SEQ ID NO: 3267 - protein, 40 aa, Artificial Sequence
  GFR-binding peptide
  MOD_RES (1)..(35)..(36): Xaa is C or S
  MOD_RES (13)..(14)..(15)..(16)..(17): Xaa is A or G
  MOD_RES (18)..(19)..(20)..(21): Xaa is A or G or is absent
XAKVVMNRHKRLXXXXXXXXXYYLVSTASLKTPAXXAKPV

SEQ ID NO: 3268 - protein, 30 aa, Artificial Sequence
  GFR-binding peptide
EVVMERHKRLVVKDYEDYYLMSTASLETPV

SEQ ID NO: 3269 - protein, 42 aa, Artificial Sequence
  GFR-binding peptide
  MOD_RES (2)..(4)..(36)..(37): Xaa is C or S
HXGXSRVVMNQYNKLIVNSSDDLYLVSIASLKTPAXXPKPVY

SEQ ID NO: 3270 - protein, 35 aa, Artificial Sequence
  GFR-binding peptide
  MOD_RES (2)..(4): Xaa is C or S
RXGXGEVVMDYHYKLVVKENEDKYLMSIPSLETPV

SEQ ID NO: 3271 - protein, 42 aa, Artificial Sequence
  GFR-binding peptide
  MOD_RES (1)..(3)..(37)..(38): Xaa is C or S
  MOD_RES (15)..(16)..(17)..(18)..(19): Xaa is A or G
  MOD_RES (20)..(21)..(22)..(23): Xaa is A or G or is absent
XGXGEVVMDQYNKLXXXXXXXXXLYLMSIASLETPVXXAKPI

SEQ ID NO: 3272 - protein, 42 aa, Artificial Sequence
  GFR-binding peptide
  MOD_RES (2)..(4)..(36)..(37): Xaa is C or S
RXGXGEVVMERYKKLVVKDYEDFYLMSIANLETPVXXAKPIS

SEQ ID NO: 3273 - protein, 37 aa, Artificial Sequence
  GFR-binding peptide
  MOD_RES (33)..(33): Xaa is C or S
  MOD_RES (11)..(12)..(13)..(14)..(15): Xaa is A or G
  MOD_RES (16)..(17)..(18)..(19): Xaa is A or G or is absent
RVVMNYHYKLXXXXXXXXXKYLVSIPSLKTPAXTPKT

SEQ ID NO: 3274 - protein, 38 aa, Artificial Sequence
  GFR-binding peptide
  MOD_RES (1)..(3)..(37)..(38): Xaa is C or S
  MOD_RES (15)..(16)..(17)..(18)..(19): Xaa is A or G
  MOD_RES (20)..(21)..(22)..(23): Xaa is A or G or is absent
XGXSRVVMNRYKKLXXXXXXXXXFYLVSIANLKTPAXX

SEQ ID NO: 3275 - protein, 33 aa, Artificial Sequence
  GFR-binding peptide
  MOD_RES (12)..(13)..(14)..(15)..(16): Xaa is A or G
  MOD_RES (17)..(18)..(19)..(20): Xaa is A or G or is absent
AKVVMNRHKRLXXXXXXXXXYYLVSTASLKTPA

SEQ ID NO: 3276 - protein, 35 aa, Artificial Sequence
  GFR-binding peptide
  MOD_RES (33)..(34): Xaa is C or S
  MOD_RES (11)..(12)..(13)..(14)..(15): Xaa is A or G
  MOD_RES (16)..(17)..(18)..(19): Xaa is A or G or is absent
RVVMNQYNKLXXXXXXXXXLYLVSIASLQTPAXXP

SEQ ID NO: 3277 - protein, 39 aa, Artificial Sequence
  GFR-binding peptide
  MOD_RES (1)..(33)..(34): Xaa is C or S
XGEVVMEYHYKLVVKDYEDKYLMSIPSLETPVXXAKPIS

SEQ ID NO: 3278 - protein, 41 aa, Artificial Sequence
  GFR-binding peptide
  MOD_RES (2)..(35)..(36): Xaa is C or S
GXEAVSMGERYKKLTPVGMDDFYLVSIANLKTPVXXAKGVK

SEQ ID NO: 3279 - protein, 40 aa, Artificial Sequence
  GFR-binding peptide
  MOD_RES (2)..(36)..(37): Xaa is C or S
  MOD_RES (14)..(15)..(16)..(17)..(18): Xaa is A or G
  MOD_RES (19)..(20)..(21)..(22): Xaa is A or G or is absent
GXARVVMNRHKRLXXXXXXXXXYYLVSTASLQTPAXXPKP

SEQ ID NO: 3280 - protein, 32 aa, Artificial Sequence
  GFR-binding peptide
  MOD_RES (1)..(1): Xaa is C or S
XSRVVMNRYKKLIVNSSDDFYLVSIANLKTPA

SEQ ID NO: 3281 - protein, 33 aa, Artificial Sequence
  GFR-binding peptide
  MOD_RES (2)..(33): Xaa is C or S
KXSRVIMRYKKLVKPKRGVFYLISIANLAQPVX

SEQ ID NO: 3282 - protein, 41 aa, Artificial Sequence
  GFR-binding peptide
  MOD_RES (2)..(35)..(36): Xaa is C or S
  MOD_RES (13)..(14)..(15)..(16)..(17): Xaa is A or G
  MOD_RES (18)..(19)..(20)..(21): Xaa is A or G or is absent
KXSKVVMRHKRLXXXXXXXXXYYLISTASLDQPVXXPSASA

SEQ ID NO: 3283 - protein, 35 aa, Artificial Sequence
  GFR-binding peptide
  MOD_RES (1)..(35): Xaa is C or S
  MOD_RES (13)..(14)..(15)..(16)..(17): Xaa is A or G
  MOD_RES (18)..(19)..(20)..(21): Xaa is A or G or is absent
XARVVMNRYKKLXXXXXXXXXFYLVSIANLQTPAX

SEQ ID NO: 3284 - protein, 34 aa, Artificial Sequence
  GFR-binding peptide
  MOD_RES (31)..(32): Xaa is C or S
SKVVMRHKRLVKPTRGVYYLISTASLDQPVXXPS

SEQ ID NO: 3285 - protein, 37 aa, Artificial Sequence
  GFR-binding peptide
  MOD_RES (1)..(3)..(36)..(37): Xaa is C or S
  MOD_RES (14)..(15)..(16)..(17)..(18): Xaa is A or G
  MOD_RES (19)..(20)..(21)..(22): Xaa is A or G or is absent
XKXSRVIMRHKRLXXXXXXXXXYYLISTASLAQPVXX

SEQ ID NO: 3286 - protein, 35 aa, Artificial Sequence
  GFR-binding peptide
  MOD_RES (1)..(3)..(34)..(35): Xaa is C or S
XKXSRVIMYHYKLVKPKRGVKYLISIPSLAQPVXX

SEQ ID NO: 3287 - protein, 39 aa, Artificial Sequence
  GFR-binding peptide
  MOD_RES (1)..(35)..(36): Xaa is C or S
  MOD_RES (13)..(14)..(15)..(16)..(17): Xaa is A or G
  MOD_RES (18)..(19)..(20)..(21): Xaa is A or G or is absent
XAKVVMNRHKRLXXXXXXXXXYYLVSTASLKTPAXXAKP

SEQ ID NO: 3288 - protein, 36 aa, Artificial Sequence
  GFR-binding peptide
  MOD_RES (2)..(4)..(36): Xaa is C or S
HXGXSRVVMNQYNKLIVNSSDDLYLVSIASLKTPAX

SEQ ID NO: 3289 - protein, 37 aa, Artificial Sequence
  GFR-binding peptide
  MOD_RES (1)..(33)..(34): Xaa is C or S
XARVVMNRHKRLIVNSSDDYYLVSTASLQTPAXXPKP

SEQ ID NO: 3290 - protein, 42 aa, Artificial Sequence
  GFR-binding peptide
  MOD_RES (2)..(36)..(37): Xaa is C or S
  MOD_RES (14)..(15)..(16)..(17)..(18): Xaa is A or G
  MOD_RES (19)..(20)..(21)..(22): Xaa is A or G or is absent
GXARVVMNRHKRLXXXXXXXXXYYLVSTASLQTPAXXPKPVT

SEQ ID NO: 3291 - protein, 32 aa, Artificial Sequence
  GFR-binding peptide
  MOD_RES (1)..(1): Xaa is C or S
XSRVVMNYHYKLIVNSSDDKYLVSIPSLKTPA

SEQ ID NO: 3292 - protein, 41 aa, Artificial Sequence
  GFR-binding peptide
  MOD_RES (1)..(3)..(36)..(37): Xaa is C or S
  MOD_RES (14)..(15)..(16)..(17)..(18): Xaa is A or G
  MOD_RES (19)..(20)..(21)..(22): Xaa is A or G or is absent
XKXSKVIMRYKKLXXXXXXXXXFYLISIANLDQSVXXPSAS

SEQ ID NO: 3293 - protein, 42 aa, Artificial Sequence
  GFR-binding peptide
  MOD_RES (2)..(4)..(38)..(39): Xaa is C or S
  MOD_RES (16)..(17)..(18)..(19)..(20): Xaa is A or G
  MOD_RES (21)..(22)..(23)..(24): Xaa is A or G or is absent
RXGXGEVVMDRHKRLXXXXXXXXXYYLMSTASLETPVXXAKP

SEQ ID NO: 3294 - protein, 33 aa, Artificial Sequence
  GFR-binding peptide
  MOD_RES (2)..(33): Xaa is C or S
KXSRVIMYHYKLVKPKRGVKYLISIPSLAQPVX

SEQ ID NO: 3295 - protein, 35 aa, Artificial Sequence
  GFR-binding peptide
  MOD_RES (1)..(1): Xaa is C or S
XALHDELTQYNKLFIPKKRVIELYLVSIASLQVQT

SEQ ID NO: 3296 - protein, 36 aa, Artificial Sequence
  GFR-binding peptide
  MOD_RES (1)..(35)..(36): Xaa is C or S
  MOD_RES (13)..(14)..(15)..(16)..(17): Xaa is A or G
  MOD_RES (18)..(19)..(20)..(21): Xaa is A or G or is absent
XAKVVMNYHYKLXXXXXXXXXKYLVSIPSLKTPAXX

SEQ ID NO: 3297 - protein, 37 aa, Artificial Sequence
  GFR-binding peptide
  MOD_RES (2)..(4): Xaa is C or S
  MOD_RES (16)..(17)..(18)..(19)..(20): Xaa is A or G
  MOD_RES (21)..(22)..(23)..(24): Xaa is A or G or is absent
RXGXGEVVMDQYNKLXXXXXXXXXLYLMSIASLETPV

SEQ ID NO: 3298 - protein, 39 aa, Artificial Sequence
  GFR-binding peptide
  MOD_RES (1)..(36)..(37): Xaa is C or S
  MOD_RES (14)..(15)..(16)..(17)..(18): Xaa is A or G
  MOD_RES (19)..(20)..(21)..(22): Xaa is A or G or is absent
XEAVSMGEQYNKLXXXXXXXXXLYLVSIASLKTPVXXAK

SEQ ID NO: 3299 - protein, 35 aa, Artificial Sequence
  GFR-binding peptide
  MOD_RES (2)..(2): Xaa is C or S
  MOD_RES (14)..(15)..(16)..(17)..(18): Xaa is A or G
  MOD_RES (19)..(20)..(21)..(22): Xaa is A or G or is absent
GXSRVVMNRYKKLXXXXXXXXXFYLVSIANLKTPA

SEQ ID NO: 3300 - protein, 41 aa, Artificial Sequence
  GFR-binding peptide
  MOD_RES (1)..(3)..(37)..(38): Xaa is C or S
  MOD_RES (15)..(16)..(17)..(18)..(19): Xaa is A or G
  MOD_RES (20)..(21)..(22)..(23): Xaa is A or G or is absent
XGXSRVVMNRHKRLXXXXXXXXXYYLVSTASLKTPAXXPKP

SEQ ID NO: 3301 - protein, 36 aa, Artificial Sequence
  GFR-binding peptide
  MOD_RES (2)..(34)..(35): Xaa is C or S
GXARVVMNQYNKLIVNSSDDLYLVSIASLQTPAXXP

SEQ ID NO: 3302 - protein, 37 aa, Artificial Sequence
  GFR-binding peptide
  MOD_RES (31)..(31): Xaa is C or S
RVVMNQYNKLIVNSSDDLYLVSIASLKTPAXTPKTVH

SEQ ID NO: 3303 - protein, 43 aa, Artificial Sequence
  GFR-binding peptide
  MOD_RES (2)..(39): Xaa is C or S
KXALHDELTQYNKLFIPKKRVIELYLVSIASLQVQTPRXQVNR

SEQ ID NO: 3304 - protein, 32 aa, Artificial Sequence
  GFR-binding peptide
  MOD_RES (11)..(12)..(13)..(14)..(15): Xaa is A or G
  MOD_RES (16)..(17)..(18)..(19): Xaa is A or G or is absent
EVVMDRHKRLXXXXXXXXXYYLMSTASLETPV

SEQ ID NO: 3305 - protein, 31 aa, Artificial Sequence
  GFR-binding peptide
  MOD_RES (31)..(31): Xaa is C or S
EVVMEYHYKLVVKDYEDKYLMSIPSLETPVX

SEQ ID NO: 3306 - protein, 36 aa, Artificial Sequence
  GFR-binding peptide
  MOD_RES (1)..(3)..(34)..(35): Xaa is C or S
XKXSKVVMRHKRLVKPTRGVYYLISTASLDQPVXXP

SEQ ID NO: 3307 - protein, 41 aa, Artificial Sequence
  GFR-binding peptide
  MOD_RES (35)..(36): Xaa is C or S
  MOD_RES (13)..(14)..(15)..(16)..(17): Xaa is A or G
  MOD_RES (18)..(19)..(20)..(21): Xaa is A or G or is absent
EAVSMGEQYNKLXXXXXXXXXLYLVSIASLKTPVXXAKGVK

SEQ ID NO: 3308 - protein, 41 aa, Artificial Sequence
  GFR-binding peptide
  MOD_RES (2)..(4)..(38)..(39): Xaa is C or S
  MOD_RES (16)..(17)..(18)..(19)..(20): Xaa is A or G
  MOD_RES (21)..(22)..(23)..(24): Xaa is A or G or is absent
HXGXARVVMNYHYKLXXXXXXXXXKYLVSIPSLQTPAXXPK

SEQ ID NO: 3309 - protein, 34 aa, Artificial Sequence
  GFR-binding peptide
  MOD_RES (1)..(34): Xaa is C or S
XEAVSMGERHKRLTPVGMDDYYLVSTASLKTPVX

SEQ ID NO: 3310 - protein, 38 aa, Artificial Sequence
  GFR-binding peptide
  MOD_RES (1)..(3): Xaa is C or S
XKXALHDELTRHKRLFIPKKRVIEYYLVSTASLQVQTP

SEQ ID NO: 3311 - protein, 37 aa, Artificial Sequence
  GFR-binding peptide
  MOD_RES (31)..(32): Xaa is C or S
RVVMNRHKRLIVNSSDDYYLVSTASLKTPAXXPKPVY

SEQ ID NO: 3312 - protein, 40 aa, Artificial Sequence
  GFR-binding peptide
  MOD_RES (1)..(35)..(36): Xaa is C or S
  MOD_RES (13)..(14)..(15)..(16)..(17): Xaa is A or G
  MOD_RES (18)..(19)..(20)..(21): Xaa is A or G or is absent
XSRVVMNYHYKLXXXXXXXXXKYLVSIPSLKTPAXXPKPV

SEQ ID NO: 3313 - protein, 38 aa, Artificial Sequence
  GFR-binding peptide
  MOD_RES (2)..(4): Xaa is C or S
EXKXALHDELTRYKKLFIPKKRVIEFYLVSIANLQVQT

SEQ ID NO: 3314 - protein, 43 aa, Artificial Sequence
  GFR-binding peptide
  MOD_RES (1)..(3)..(37)..(38): Xaa is C or S
  MOD_RES (15)..(16)..(17)..(18)..(19): Xaa is A or G
  MOD_RES (20)..(21)..(22)..(23): Xaa is A or G or is absent
XGXARVVMNRHKRLXXXXXXXXXYYLVSTASLQTPAXXPKPVT

SEQ ID NO: 3315 - protein, 37 aa, Artificial Sequence
  GFR-binding peptide
  MOD_RES (32)..(33): Xaa is C or S
AKVVMNYHYKLIVNNSSDKYLVSIPSLKTPAXXAKPV

SEQ ID NO: 3316 - protein, 34 aa, Artificial Sequence
  GFR-binding peptide
  MOD_RES (2)..(2): Xaa is C or S
GXEAVSMGERYKKLTPVGMDDFYLVSIANLKTPV

SEQ ID NO: 3317 - protein, 43 aa, Artificial Sequence
  GFR-binding peptide
  MOD_RES (1)..(3)..(37): Xaa is C or S
  MOD_RES (15)..(16)..(17)..(18)..(19): Xaa is A or G
  MOD_RES (20)..(21)..(22)..(23): Xaa is A or G or is absent
XGXSRVVMNRYKKLXXXXXXXXXFYLVSIANLKTPAXTPKTVH

SEQ ID NO: 3318 - protein, 43 aa, Artificial Sequence
  GFR-binding peptide
  MOD_RES (1)..(3)..(40): Xaa is C or S
  MOD_RES (16)..(17)..(18)..(19)..(20): Xaa is A or G
  MOD_RES (21)..(22)..(23)..(24): Xaa is A or G or is absent
XKXALHDELTRYKKLXXXXXXXXXFYLVSIANLQVQTPRXQVN

SEQ ID NO: 3319 - protein, 33 aa, Artificial Sequence
  GFR-binding peptide
  MOD_RES (1)..(1): Xaa is C or S
XEAVSMGERHKRLTPVGMDDYYLVSTASLKTPV

SEQ ID NO: 3320 - protein, 30 aa, Artificial Sequence
  GFR-binding peptide
SKVIMRHKRLIKPTKGIYYLISTASLDQSV

SEQ ID NO: 3321 - protein, 40 aa, Artificial Sequence
  GFR-binding peptide
  MOD_RES (1)..(3)..(37)..(38): Xaa is C or S
  MOD_RES (15)..(16)..(17)..(18)..(19): Xaa is A or G
  MOD_RES (20)..(21)..(22)..(23): Xaa is A or G or is absent
XGXGEVVMDRYKKLXXXXXXXXXFYLMSIANLETPVXXAK

SEQ ID NO: 3322 - protein, 37 aa, Artificial Sequence
  GFR-binding peptide
  MOD_RES (1)..(3)..(37): Xaa is C or S
  MOD_RES (15)..(16)..(17)..(18)..(19): Xaa is A or G
  MOD_RES (20)..(21)..(22)..(23): Xaa is A or G or is absent
XGXSRVVMNQYNKLXXXXXXXXXLYLVSIASLKTPAX

SEQ ID NO: 3323 - protein, 36 aa, Artificial Sequence
  GFR-binding peptide
  MOD_RES (2)..(4)..(36): Xaa is C or S
HXGXAKVVMNQYNKLIVNNSSDLYLVSIASLKTPAX

SEQ ID NO: 3324 - protein, 38 aa, Artificial Sequence
  GFR-binding peptide
  MOD_RES (2)..(36)..(37): Xaa is C or S
  MOD_RES (14)..(15)..(16)..(17)..(18): Xaa is A or G
  MOD_RES (19)..(20)..(21)..(22): Xaa is A or G or is absent
GXGEVVMEYHYKLXXXXXXXXXKYLMSIPSLETPVXXA

SEQ ID NO: 3325 - protein, 40 aa, Artificial Sequence
  GFR-binding peptide
  MOD_RES (1)..(38): Xaa is C or S
XALHDELTQYNKLFIPKKRVIELYLVSIASLQVQTPRXQV

SEQ ID NO: 3326 - protein, 39 aa, Artificial Sequence
  GFR-binding peptide
  MOD_RES (33)..(34): Xaa is C or S
EAVSMGEQYNKLTPVGMDDLYLVSIASLKTPVXXAKGVK

SEQ ID NO: 3327 - protein, 40 aa, Artificial Sequence
  GFR-binding peptide
  MOD_RES (1)..(3)..(36)..(37): Xaa is C or S
  MOD_RES (14)..(15)..(16)..(17)..(18): Xaa is A or G
  MOD_RES (19)..(20)..(21)..(22): Xaa is A or G or is absent
XKXSRVIMYHYKLXXXXXXXXXKYLISIPSLAQPVXXPAA

SEQ ID NO: 3328 - protein, 38 aa, Artificial Sequence
  GFR-binding peptide
  MOD_RES (34)..(34): Xaa is C or S
  MOD_RES (12)..(13)..(14)..(15)..(16): Xaa is A or G
  MOD_RES (17)..(18)..(19)..(20): Xaa is A or G or is absent
SRVVMNYHYKLXXXXXXXXXKYLVSIPSLKTPAXTPKT

SEQ ID NO: 3329 - protein, 35 aa, Artificial Sequence
  GFR-binding peptide
  MOD_RES (2)..(4): Xaa is C or S
RXGXGEVVMEYHYKLVVKDYEDKYLMSIPSLETPV

SEQ ID NO: 3330 - protein, 39 aa, Artificial Sequence
  GFR-binding peptide
  MOD_RES (1)..(33)..(34): Xaa is C or S
XGEVVMERYKKLVVKDYEDFYLMSIANLETPVXXAKPIS

SEQ ID NO: 3331 - protein, 40 aa, Artificial Sequence
  GFR-binding peptide
  MOD_RES (2)..(4)..(37)..(38): Xaa is C or S
  MOD_RES (15)..(16)..(17)..(18)..(19): Xaa is A or G
  MOD_RES (20)..(21)..(22)..(23): Xaa is A or G or is absent
SXKXSKVIMYHYKLXXXXXXXXXKYLISIPSLDQSVXXPS

SEQ ID NO: 3332 - protein, 38 aa, Artificial Sequence
  GFR-binding peptide
  MOD_RES (1)..(3)..(36)..(37): Xaa is C or S
  MOD_RES (14)..(15)..(16)..(17)..(18): Xaa is A or G
  MOD_RES (19)..(20)..(21)..(22): Xaa is A or G or is absent
XKXSKVVMQYNKLXXXXXXXXXLYLISIASLDQPVXXP

SEQ ID NO: 3333 - protein, 41 aa, Artificial Sequence
  GFR-binding peptide
  MOD_RES (2)..(4)..(35)..(36): Xaa is C or S
SXKXSKVIMRHKRLIKPTKGIYYLISTASLDQSVXXPSASA

SEQ ID NO: 3334 - protein, 39 aa, Artificial Sequence
  GFR-binding peptide
  MOD_RES (2)..(33)..(34): Xaa is C or S
KXSRVIMRHKRLVKPKRGVYYLISTASLAQPVXXPAASA

SEQ ID NO: 3335 - protein, 43 aa, Artificial Sequence
  GFR-binding peptide
  MOD_RES (2)..(4)..(41): Xaa is C or S
  MOD_RES (17)..(18)..(19)..(20)..(21): Xaa is A or G
  MOD_RES (22)..(23)..(24)..(25): Xaa is A or G or is absent
EXKXALHDELTYHYKLXXXXXXXXXKYLVSIPSLQVQTPRXQV

SEQ ID NO: 3336 - protein, 41 aa, Artificial Sequence
  GFR-binding peptide
  MOD_RES (35)..(36): Xaa is C or S
  MOD_RES (13)..(14)..(15)..(16)..(17): Xaa is A or G
  MOD_RES (18)..(19)..(20)..(21): Xaa is A or G or is absent
EAVSMGERHKRLXXXXXXXXXYYLVSTASLKTPVXXAKGVK

SEQ ID NO: 3337 - protein, 36 aa, Artificial Sequence
  GFR-binding peptide
  MOD_RES (2)..(36): Xaa is C or S
  MOD_RES (14)..(15)..(16)..(17)..(18): Xaa is A or G
  MOD_RES (19)..(20)..(21)..(22): Xaa is A or G or is absent
GXARVVMNRHKRLXXXXXXXXXYYLVSTASLQTPAX

SEQ ID NO: 3338 - protein, 41 aa, Artificial Sequence
  GFR-binding peptide
  MOD_RES (2)..(4)..(38): Xaa is C or S
  MOD_RES (16)..(17)..(18)..(19)..(20): Xaa is A or G
  MOD_RES (21)..(22)..(23)..(24): Xaa is A or G or is absent
HXGXSRVVMNRHKRLXXXXXXXXXYYLVSTASLKTPAXTPK

SEQ ID NO: 3339 - protein, 37 aa, Artificial Sequence
  GFR-binding peptide
  MOD_RES (1)..(32)..(33): Xaa is C or S
XSKVIMQYNKLIKPTKGILYLISIASLDQSVXXPSAS

SEQ ID NO: 3340 - protein, 37 aa, Artificial Sequence
  GFR-binding peptide
  MOD_RES (2)..(4)..(37): Xaa is C or S
  MOD_RES (15)..(16)..(17)..(18)..(19): Xaa is A or G
  MOD_RES (20)..(21)..(22)..(23): Xaa is A or G or is absent
SXKXSKVVMYHYKLXXXXXXXXXKYLISIPSLDQPVX

SEQ ID NO: 3341 - protein, 37 aa, Artificial Sequence
  GFR-binding peptide
  MOD_RES (2)..(35)..(36): Xaa is C or S
  MOD_RES (13)..(14)..(15)..(16)..(17): Xaa is A or G
  MOD_RES (18)..(19)..(20)..(21): Xaa is A or G or is absent
KXSKVVMRYKKLXXXXXXXXXFYLISIANLDQPVXXP

SEQ ID NO: 3342 - protein, 37 aa, Artificial Sequence
  GFR-binding peptide
  MOD_RES (1)..(32)..(33): Xaa is C or S
XSKVIMRYKKLIKPTKGIFYLISIANLDQSVXXPSAS

SEQ ID NO: 3343 - protein, 40 aa, Artificial Sequence
  GFR-binding peptide
  MOD_RES (2)..(4)..(36)..(37): Xaa is C or S
RXGXGEVVMDRHKRLVVKENEDYYLMSTASLETPVXXAKP

SEQ ID NO: 3344 - protein, 41 aa, Artificial Sequence
  GFR-binding peptide
  MOD_RES (1)..(35)..(36): Xaa is C or S
  MOD_RES (13)..(14)..(15)..(16)..(17): Xaa is A or G
  MOD_RES (18)..(19)..(20)..(21): Xaa is A or G or is absent
XSRVVMNQYNKLXXXXXXXXXLYLVSIASLKTPAXXPKPVY

SEQ ID NO: 3345 - protein, 40 aa, Artificial Sequence
  GFR-binding peptide
  MOD_RES (37)..(37): Xaa is C or S
  MOD_RES (13)..(14)..(15)..(16)..(17): Xaa is A or G
  MOD_RES (18)..(19)..(20)..(21): Xaa is A or G or is absent
ALHDELTRHKRLXXXXXXXXXYYLVSTASLQVQTPRXQVN

SEQ ID NO: 3346 - protein, 40 aa, Artificial Sequence
  GFR-binding peptide
  MOD_RES (1)..(38): Xaa is C or S
XALHDELTRHKRLFIPKKRVIEYYLVSTASLQVQTPRXQV

SEQ ID NO: 3347 - protein, 36 aa, Artificial Sequence
  GFR-binding peptide
  MOD_RES (2)..(4): Xaa is C or S
  MOD_RES (15)..(16)..(17)..(18)..(19): Xaa is A or G
  MOD_RES (20)..(21)..(22)..(23): Xaa is A or G or is absent
SXKXSRVIMQYNKLXXXXXXXXXLYLISIASLAQPV

SEQ ID NO: 3348 - protein, 42 aa, Artificial Sequence
  GFR-binding peptide
  MOD_RES (2)..(4)..(38)..(39): Xaa is C or S
  MOD_RES (16)..(17)..(18)..(19)..(20): Xaa is A or G
  MOD_RES (21)..(22)..(23)..(24): Xaa is A or G or is absent
HXGXSRVVMNRYKKLXXXXXXXXXFYLVSIANLKTPAXXPKP

SEQ ID NO: 3349 - protein, 35 aa, Artificial Sequence
  GFR-binding peptide
  MOD_RES (1)..(3)..(34)..(35): Xaa is C or S
XKXSKVIMRHKRLIKPTKGIYYLISTASLDQSVXX

SEQ ID NO: 3350 - protein, 37 aa, Artificial Sequence
  GFR-binding peptide
  MOD_RES (2)..(35)..(36): Xaa is C or S
  MOD_RES (13)..(14)..(15)..(16)..(17): Xaa is A or G
  MOD_RES (18)..(19)..(20)..(21): Xaa is A or G or is absent
KXSKVVMQYNKLXXXXXXXXXLYLISIASLDQPVXXP

SEQ ID NO: 3351 - protein, 40 aa, Artificial Sequence
  GFR-binding peptide
  MOD_RES (34)..(35): Xaa is C or S
  MOD_RES (12)..(13)..(14)..(15)..(16): Xaa is A or G
  MOD_RES (17)..(18)..(19)..(20): Xaa is A or G or is absent
SRVVMNRHKRLXXXXXXXXXYYLVSTASLKTPAXXPKPVY

SEQ ID NO: 3352 - protein, 33 aa, Artificial Sequence
  GFR-binding peptide
  MOD_RES (33)..(33): Xaa is C or S
  MOD_RES (11)..(12)..(13)..(14)..(15): Xaa is A or G
  MOD_RES (16)..(17)..(18)..(19): Xaa is A or G or is absent
SKVIMRHKRLXXXXXXXXXYYLISTASLDQSVX

SEQ ID NO: 3353 - protein, 36 aa, Artificial Sequence
  GFR-binding peptide
  MOD_RES (2)..(34)..(35): Xaa is C or S
GXARVVMNYHYKLIVNSSDDKYLVSIPSLQTPAXXP

SEQ ID NO: 3354 - protein, 35 aa, Artificial Sequence
  GFR-binding peptide
  MOD_RES (2)..(4): Xaa is C or S
HXGXAKVVMNQYNKLIVNNSSDLYLVSIASLKTPA

SEQ ID NO: 3355 - protein, 38 aa, Artificial Sequence
  GFR-binding peptide
  MOD_RES (2)..(4)..(37)..(38): Xaa is C or S
  MOD_RES (15)..(16)..(17)..(18)..(19): Xaa is A or G
  MOD_RES (20)..(21)..(22)..(23): Xaa is A or G or is absent
SXKXSKVIMYHYKLXXXXXXXXXKYLISIPSLDQSVXX

SEQ ID NO: 3356 - protein, 43 aa, Artificial Sequence
  GFR-binding peptide
  MOD_RES (1)..(3)..(37)..(38): Xaa is C or S
  MOD_RES (15)..(16)..(17)..(18)..(19): Xaa is A or G
  MOD_RES (20)..(21)..(22)..(23): Xaa is A or G or is absent
XGXGEVVMDRYKKLXXXXXXXXXFYLMSIANLETPVXXAKPIK

SEQ ID NO: 3357 - protein, 31 aa, Artificial Sequence
  GFR-binding peptide
  MOD_RES (31)..(31): Xaa is C or S
SRVIMRHKRLVKPKRGVYYLISTASLAQPVX

SEQ ID NO: 3358 - protein, 36 aa, Artificial Sequence
  GFR-binding peptide
  MOD_RES (1)..(35)..(36): Xaa is C or S
  MOD_RES (13)..(14)..(15)..(16)..(17): Xaa is A or G
  MOD_RES (18)..(19)..(20)..(21): Xaa is A or G or is absent
XARVVMNQYNKLXXXXXXXXXLYLVSIASLQTPAXX

SEQ ID NO: 3359 - protein, 39 aa, Artificial Sequence
  GFR-binding peptide
  MOD_RES (34)..(35): Xaa is C or S
  MOD_RES (12)..(13)..(14)..(15)..(16): Xaa is A or G
  MOD_RES (17)..(18)..(19)..(20): Xaa is A or G or is absent
AKVVMNRHKRLXXXXXXXXXYYLVSTASLKTPAXXAKPV

SEQ ID NO: 3360 - protein, 34 aa, Artificial Sequence
  GFR-binding peptide
  MOD_RES (1)..(32)..(33): Xaa is C or S
XSRVIMYHYKLVKPKRGVKYLISIPSLAQPVXXP

SEQ ID NO: 3361 - protein, 40 aa, Artificial Sequence
  GFR-binding peptide
  MOD_RES (37)..(37): Xaa is C or S
  MOD_RES (13)..(14)..(15)..(16)..(17): Xaa is A or G
  MOD_RES (18)..(19)..(20)..(21): Xaa is A or G or is absent
ALHDELTQYNKLXXXXXXXXXLYLVSIASLQVQTPRXQVN

SEQ ID NO: 3362 - protein, 42 aa, Artificial Sequence
  GFR-binding peptide
  MOD_RES (2)..(4)..(37)..(38): Xaa is C or S
  MOD_RES (15)..(16)..(17)..(18)..(19): Xaa is A or G
  MOD_RES (20)..(21)..(22)..(23): Xaa is A or G or is absent
SXKXSKVVMYHYKLXXXXXXXXXKYLISIPSLDQPVXXPSAS

SEQ ID NO: 3363 - protein, 31 aa, Artificial Sequence
  GFR-binding peptide
AKVVMNYHYKLIVNNSSDKYLVSIPSLKTPA

SEQ ID NO: 3364 - protein, 33 aa, Artificial Sequence
  GFR-binding peptide
  MOD_RES (31)..(32): Xaa is C or S
KVVMNRYKKLIVNNSSDFYLVSIANLKTPAXXA

SEQ ID NO: 3365 - protein, 38 aa, Artificial Sequence
  GFR-binding peptide
  MOD_RES (2)..(4)..(36)..(37): Xaa is C or S
HXGXAKVVMNRHKRLIVNNSSDYYLVSTASLKTPAXXA

SEQ ID NO: 3366 - protein, 33 aa, Artificial Sequence
  GFR-binding peptide
HDELTQYNKLFIPKKRVIELYLVSIASLQVQTP

SEQ ID NO: 3367 - protein, 36 aa, Artificial Sequence
  GFR-binding peptide
  MOD_RES (1)..(3)..(35)..(36): Xaa is C or S
XGXGEVVMDQYNKLVVKENEDLYLMSIASLETPVXX

SEQ ID NO: 3368 - protein, 37 aa, Artificial Sequence
  GFR-binding peptide
  MOD_RES (2)..(4)..(36)..(37): Xaa is C or S
RXGXGEVVMERYKKLVVKDYEDFYLMSIANLETPVXX

SEQ ID NO: 3369 - protein, 37 aa, Artificial Sequence
  GFR-binding peptide
  MOD_RES (2)..(4)..(36)..(37): Xaa is C or S
HXGXARVVMNYHYKLIVNSSDDKYLVSIPSLQTPAXX

SEQ ID NO: 3370 - protein, 36 aa, Artificial Sequence
  GFR-binding peptide
  MOD_RES (1)..(35)..(36): Xaa is C or S
  MOD_RES (13)..(14)..(15)..(16)..(17): Xaa is A or G
  MOD_RES (18)..(19)..(20)..(21): Xaa is A or G or is absent
XARVVMNRYKKLXXXXXXXXXFYLVSIANLQTPAXX

SEQ ID NO: 3371 - protein, 41 aa, Artificial Sequence
  GFR-binding peptide
  MOD_RES (1)..(3)..(37): Xaa is C or S
  MOD_RES (15)..(16)..(17)..(18)..(19): Xaa is A or G
  MOD_RES (20)..(21)..(22)..(23): Xaa is A or G or is absent
XGXSRVVMNRYKKLXXXXXXXXXFYLVSIANLKTPAXTPKT

SEQ ID NO: 3372 - protein, 37 aa, Artificial Sequence
  GFR-binding peptide
  MOD_RES (1)..(3)..(37): Xaa is C or S
  MOD_RES (15)..(16)..(17)..(18)..(19): Xaa is A or G
  MOD_RES (20)..(21)..(22)..(23): Xaa is A or G or is absent
XGXARVVMNRYKKLXXXXXXXXXFYLVSIANLQTPAX

SEQ ID NO: 3373 - protein, 37 aa, Artificial Sequence
  GFR-binding peptide
  MOD_RES (1)..(3)..(34)..(35): Xaa is C or S
XKXSRVIMRYKKLVKPKRGVFYLISIANLAQPVXXPA

SEQ ID NO: 3374 - protein, 37 aa, Artificial Sequence
  GFR-binding peptide
  MOD_RES (1)..(3)..(37): Xaa is C or S
  MOD_RES (15)..(16)..(17)..(18)..(19): Xaa is A or G
  MOD_RES (20)..(21)..(22)..(23): Xaa is A or G or is absent
XGXARVVMNRHKRLXXXXXXXXXYYLVSTASLQTPAX

SEQ ID NO: 3375 - protein, 34 aa, Artificial Sequence
  GFR-binding peptide
  MOD_RES (13)..(14)..(15)..(16)..(17): Xaa is A or G
  MOD_RES (18)..(19)..(20)..(21): Xaa is A or G or is absent
ALHDELTRHKRLXXXXXXXXXYYLVSTASLQVQT

SEQ ID NO: 3376 - protein, 38 aa, Artificial Sequence
  GFR-binding peptide
  MOD_RES (32)..(33): Xaa is C or S
GEVVMDQYNKLVVKENEDLYLMSIASLETPVXXAKPIK

SEQ ID NO: 3377 - protein, 36 aa, Artificial Sequence
  GFR-binding peptide
  MOD_RES (2)..(33)..(34): Xaa is C or S
KXSKVVMQYNKLVKPTRGVLYLISIASLDQPVXXPS

SEQ ID NO: 3378 - protein, 42 aa, Artificial Sequence
  GFR-binding peptide
  MOD_RES (1)..(3)..(37)..(38): Xaa is C or S
  MOD_RES (15)..(16)..(17)..(18)..(19): Xaa is A or G
  MOD_RES (20)..(21)..(22)..(23): Xaa is A or G or is absent
XGXARVVMNRYKKLXXXXXXXXXFYLVSIANLQTPAXXPKPV

SEQ ID NO: 3379 - protein, 40 aa, Artificial Sequence
  GFR-binding peptide
  MOD_RES (2)..(34)..(35): Xaa is C or S
GXGEVVMEYHYKLVVKDYEDKYLMSIPSLETPVXXAKPIS

SEQ ID NO: 3380 - protein, 37 aa, Artificial Sequence
  GFR-binding peptide
  MOD_RES (1)..(33)..(34): Xaa is C or S
XGEVVMERHKRLVVKDYEDYYLMSTASLETPVXXAKP

SEQ ID NO: 3381 - protein, 36 aa, Artificial Sequence
  GFR-binding peptide
  MOD_RES (1)..(3)..(34)..(35): Xaa is C or S
XKXSKVVMQYNKLVKPTRGVLYLISIASLDQPVXXP

SEQ ID NO: 3382 - protein, 36 aa, Artificial Sequence
  GFR-binding peptide
  MOD_RES (1)..(35)..(36): Xaa is C or S
  MOD_RES (13)..(14)..(15)..(16)..(17): Xaa is A or G
  MOD_RES (18)..(19)..(20)..(21): Xaa is A or G or is absent
XGEVVMEYHYKLXXXXXXXXXKYLMSIPSLETPVXX

SEQ ID NO: 3383 - protein, 38 aa, Artificial Sequence
  GFR-binding peptide
  MOD_RES (2)..(4)..(38): Xaa is C or S
  MOD_RES (16)..(17)..(18)..(19)..(20): Xaa is A or G
  MOD_RES (21)..(22)..(23)..(24): Xaa is A or G or is absent
HXGXAKVVMNQYNKLXXXXXXXXXLYLVSIASLKTPAX

SEQ ID NO: 3384 - protein, 39 aa, Artificial Sequence
  GFR-binding peptide
  MOD_RES (34)..(35): Xaa is C or S
  MOD_RES (12)..(13)..(14)..(15)..(16): Xaa is A or G
  MOD_RES (17)..(18)..(19)..(20): Xaa is A or G or is absent
GEVVMDQYNKLXXXXXXXXXLYLMSIASLETPVXXAKPI

SEQ ID NO: 3385 - protein, 34 aa, Artificial Sequence
  GFR-binding peptide
  MOD_RES (13)..(14)..(15)..(16)..(17): Xaa is A or G
  MOD_RES (18)..(19)..(20)..(21): Xaa is A or G or is absent
ALHDELTQYNKLXXXXXXXXXLYLVSIASLQVQT

SEQ ID NO: 3386 - protein, 40 aa, Artificial Sequence
  GFR-binding peptide
  MOD_RES (1)..(3)..(40): Xaa is C or S
XKXALHDELTRHKRLFIPKKRVIEYYLVSTASLQVQTPRX

SEQ ID NO: 3387 - protein, 37 aa, Artificial Sequence
  GFR-binding peptide
  MOD_RES (31)..(32): Xaa is C or S
SRVIMRHKRLVKPKRGVYYLISTASLAQPVXXPAASA

SEQ ID NO: 3388 - protein, 36 aa, Artificial Sequence
  GFR-binding peptide
  MOD_RES (2)..(4)..(36): Xaa is C or S
RXGXGEVVMDRYKKLVVKENEDFYLMSIANLETPVX

SEQ ID NO: 3389 - protein, 32 aa, Artificial Sequence
  GFR-binding peptide
  MOD_RES (11)..(12)..(13)..(14)..(15): Xaa is A or G
  MOD_RES (16)..(17)..(18)..(19): Xaa is A or G or is absent
SRVIMQYNKLXXXXXXXXXLYLISIASLAQPV

SEQ ID NO: 3390 - protein, 36 aa, Artificial Sequence
  GFR-binding peptide
  MOD_RES (31)..(32): Xaa is C or S
SKVVMRHKRLVKPTRGVYYLISTASLDQPVXXPSAS

SEQ ID NO: 3391 - protein, 35 aa, Artificial Sequence
  GFR-binding peptide
LHDELTQYNKLFIPKKRVIELYLVSIASLQVQTPR

SEQ ID NO: 3392 - protein, 31 aa, Artificial Sequence
  GFR-binding peptide
  MOD_RES (31)..(31): Xaa is C or S
EVVMEQYNKLVVKDYEDLYLMSIASLETPVX

SEQ ID NO: 3393 - protein, 36 aa, Artificial Sequence
  GFR-binding peptide
  MOD_RES (33)..(34): Xaa is C or S
EAVSMGEQYNKLTPVGMDDLYLVSIASLKTPVXXAK

SEQ ID NO: 3394 - protein, 41 aa, Artificial Sequence
  GFR-binding peptide
  MOD_RES (2)..(4)..(37)..(38): Xaa is C or S
  MOD_RES (15)..(16)..(17)..(18)..(19): Xaa is A or G
  MOD_RES (20)..(21)..(22)..(23): Xaa is A or G or is absent
SXKXSKVVMRHKRLXXXXXXXXXYYLISTASLDQPVXXPSA

SEQ ID NO: 3395 - protein, 41 aa, Artificial Sequence
  GFR-binding peptide
  MOD_RES (2)..(4)..(38)..(39): Xaa is C or S
  MOD_RES (16)..(17)..(18)..(19)..(20): Xaa is A or G
  MOD_RES (21)..(22)..(23)..(24): Xaa is A or G or is absent
RXGXGEVVMEYHYKLXXXXXXXXXKYLMSIPSLETPVXXAK

SEQ ID NO: 3396 - protein, 34 aa, Artificial Sequence
  GFR-binding peptide
  MOD_RES (1)..(33)..(34): Xaa is C or S
XSRVVMNRHKRLIVNSSDDYYLVSTASLKTPAXX

SEQ ID NO: 3397 - protein, 40 aa, Artificial Sequence
  GFR-binding peptide
  MOD_RES (2)..(36)..(37): Xaa is C or S
  MOD_RES (14)..(15)..(16)..(17)..(18): Xaa is A or G
  MOD_RES (19)..(20)..(21)..(22): Xaa is A or G or is absent
GXGEVVMDRHKRLXXXXXXXXXYYLMSTASLETPVXXAKP

SEQ ID NO: 3398 - protein, 34 aa, Artificial Sequence
  GFR-binding peptide
  MOD_RES (1)..(33)..(34): Xaa is C or S
XAKVVMNQYNKLIVNNSSDLYLVSIASLKTPAXX

SEQ ID NO: 3399 - protein, 37 aa, Artificial Sequence
  GFR-binding peptide
  MOD_RES (1)..(34)..(35): Xaa is C or S
  MOD_RES (12)..(13)..(14)..(15)..(16): Xaa is A or G
  MOD_RES (17)..(18)..(19)..(20): Xaa is A or G or is absent
XSKVIMYHYKLXXXXXXXXXKYLISIPSLDQSVXXPS

SEQ ID NO: 3400 - protein, 36 aa, Artificial Sequence
  GFR-binding peptide
  MOD_RES (1)..(36): Xaa is C or S
  MOD_RES (14)..(15)..(16)..(17)..(18): Xaa is A or G
  MOD_RES (19)..(20)..(21)..(22): Xaa is A or G or is absent
XEAVSMGEQYNKLXXXXXXXXXLYLVSIASLKTPVX

SEQ ID NO: 3401 - protein, 40 aa, Artificial Sequence
  GFR-binding peptide
  MOD_RES (2)..(35)..(36): Xaa is C or S
  MOD_RES (13)..(14)..(15)..(16)..(17): Xaa is A or G
  MOD_RES (18)..(19)..(20)..(21): Xaa is A or G or is absent
KXSKVIMRHKRLXXXXXXXXXYYLISTASLDQSVXXPSAS

SEQ ID NO: 3402 - protein, 40 aa, Artificial Sequence
  GFR-binding peptide
  MOD_RES (37)..(37): Xaa is C or S
ALHDELTRYKKLFIPKKRVIEFYLVSIANLQVQTPRXQVN

SEQ ID NO: 3403 - protein, 39 aa, Artificial Sequence
  GFR-binding peptide
  MOD_RES (2)..(34)..(35): Xaa is C or S
GXGEVVMDQYNKLVVKENEDLYLMSIASLETPVXXAKPI

SEQ ID NO: 3404 - protein, 35 aa, Artificial Sequence
  GFR-binding peptide
  MOD_RES (2)..(34)..(35): Xaa is C or S
GXARVVMNRYKKLIVNSSDDFYLVSIANLQTPAXX

SEQ ID NO: 3405 - protein, 35 aa, Artificial Sequence
  GFR-binding peptide
  MOD_RES (1)..(1): Xaa is C or S
  MOD_RES (14)..(15)..(16)..(17)..(18): Xaa is A or G
  MOD_RES (19)..(20)..(21)..(22): Xaa is A or G or is absent
XALHDELTRHKRLXXXXXXXXXYYLVSTASLQVQT

SEQ ID NO: 3406 - protein, 39 aa, Artificial Sequence
  GFR-binding peptide
  MOD_RES (2)..(34)..(35): Xaa is C or S
GXAKVVMNYHYKLIVNNSSDKYLVSIPSLKTPAXXAKPV

SEQ ID NO: 3407 - protein, 41 aa, Artificial Sequence
  GFR-binding peptide
  MOD_RES (2)..(4)..(36)..(37): Xaa is C or S
HXGXSRVVMNRHKRLIVNSSDDYYLVSTASLKTPAXXPKPV

SEQ ID NO: 3408 - protein, 37 aa, Artificial Sequence
  GFR-binding peptide
  MOD_RES (31)..(32): Xaa is C or S
EVVMEYHYKLVVKDYEDKYLMSIPSLETPVXXAKPIS

SEQ ID NO: 3409 - protein, 34 aa, Artificial Sequence
  GFR-binding peptide
  MOD_RES (1)..(33): Xaa is C or S
XSRVVMNYHYKLIVNSSDDKYLVSIPSLKTPAXT

SEQ ID NO: 3410 - protein, 35 aa, Artificial Sequence
  GFR-binding peptide
  MOD_RES (2)..(2): Xaa is C or S
  MOD_RES (14)..(15)..(16)..(17)..(18): Xaa is A or G
  MOD_RES (19)..(20)..(21)..(22): Xaa is A or G or is absent
GXSRVVMNYHYKLXXXXXXXXXKYLVSIPSLKTPA

SEQ ID NO: 3411 - protein, 40 aa, Artificial Sequence
  GFR-binding peptide
  MOD_RES (1)..(34)..(35): Xaa is C or S
  MOD_RES (12)..(13)..(14)..(15)..(16): Xaa is A or G
  MOD_RES (17)..(18)..(19)..(20): Xaa is A or G or is absent
XSRVIMRYKKLXXXXXXXXXFYLISIANLAQPVXXPAASA

SEQ ID NO: 3412 - protein, 42 aa, Artificial Sequence
  GFR-binding peptide
  MOD_RES (2)..(36)..(37): Xaa is C or S
  MOD_RES (14)..(15)..(16)..(17)..(18): Xaa is A or G
  MOD_RES (19)..(20)..(21)..(22): Xaa is A or G or is absent
GXSRVVMNRHKRLXXXXXXXXXYYLVSTASLKTPAXXPKPVY

SEQ ID NO: 3413 - protein, 39 aa, Artificial Sequence
  GFR-binding peptide
  MOD_RES (33)..(34): Xaa is C or S
  MOD_RES (11)..(12)..(13)..(14)..(15): Xaa is A or G
  MOD_RES (16)..(17)..(18)..(19): Xaa is A or G or is absent
RVVMNRYKKLXXXXXXXXXFYLVSIANLKTPAXXPKPVY

SEQ ID NO: 3414 - protein, 36 aa, Artificial Sequence
  GFR-binding peptide
  MOD_RES (2)..(33)..(34): Xaa is C or S
KXSKVIMQYNKLIKPTKGILYLISIASLDQSVXXPS

SEQ ID NO: 3415 - protein, 31 aa, Artificial Sequence
  GFR-binding peptide
GEVVMDRHKRLVVKENEDYYLMSTASLETPV

SEQ ID NO: 3416 - protein, 41 aa, Artificial Sequence
  GFR-binding peptide
  MOD_RES (2)..(4)..(36)..(37): Xaa is C or S
HXGXAKVVMNRHKRLIVNNSSDYYLVSTASLKTPAXXAKPV

SEQ ID NO: 3417 - protein, 40 aa, Artificial Sequence
  GFR-binding peptide
  MOD_RES (2)..(34)..(35): Xaa is C or S
GXSRVVMNRYKKLIVNSSDDFYLVSIANLKTPAXXPKPVY

SEQ ID NO: 3418 - protein, 36 aa, Artificial Sequence
  GFR-binding peptide
  MOD_RES (33)..(34): Xaa is C or S
  MOD_RES (11)..(12)..(13)..(14)..(15): Xaa is A or G
  MOD_RES (16)..(17)..(18)..(19): Xaa is A or G or is absent
SKVIMRYKKLXXXXXXXXXFYLISIANLDQSVXXPS

SEQ ID NO: 3419 - protein, 39 aa, Artificial Sequence
  GFR-binding peptide
  MOD_RES (1)..(35)..(36): Xaa is C or S
  MOD_RES (13)..(14)..(15)..(16)..(17): Xaa is A or G
  MOD_RES (18)..(19)..(20)..(21): Xaa is A or G or is absent
XGEVVMERHKRLXXXXXXXXXYYLMSTASLETPVXXAKP

SEQ ID NO: 3420 - protein, 35 aa, Artificial Sequence
  GFR-binding peptide
  MOD_RES (32)..(33): Xaa is C or S
GEVVMEYHYKLVVKDYEDKYLMSIPSLETPVXXAK

SEQ ID NO: 3421 - protein, 31 aa, Artificial Sequence
  GFR-binding peptide
GEVVMEYHYKLVVKDYEDKYLMSIPSLETPV

SEQ ID NO: 3422 - protein, 35 aa, Artificial Sequence
  GFR-binding peptide
  MOD_RES (35)..(35): Xaa is C or S
  MOD_RES (11)..(12)..(13)..(14)..(15): Xaa is A or G
  MOD_RES (16)..(17)..(18)..(19): Xaa is A or G or is absent
HDELTYHYKLXXXXXXXXXKYLVSIPSLQVQTPRX

SEQ ID NO: 3423 - protein, 36 aa, Artificial Sequence
  GFR-binding peptide
  MOD_RES (1)..(34)..(35): Xaa is C or S
  MOD_RES (12)..(13)..(14)..(15)..(16): Xaa is A or G
  MOD_RES (17)..(18)..(19)..(20): Xaa is A or G or is absent
XSRVIMYHYKLXXXXXXXXXKYLISIPSLAQPVXXP

SEQ ID NO: 3424 - protein, 33 aa, Artificial Sequence
  GFR-binding peptide
  MOD_RES (12)..(13)..(14)..(15)..(16): Xaa is A or G
  MOD_RES (17)..(18)..(19)..(20): Xaa is A or G or is absent
SRVVMNYHYKLXXXXXXXXXKYLVSIPSLKTPA

SEQ ID NO: 3425 - protein, 34 aa, Artificial Sequence
  GFR-binding peptide
ALHDELTRYKKLFIPKKRVIEFYLVSIANLQVQT

SEQ ID NO: 3426 - protein, 40 aa, Artificial Sequence
  GFR-binding peptide
  MOD_RES (2)..(4)..(36): Xaa is C or S
HXGXSRVVMNYHYKLIVNSSDDKYLVSIPSLKTPAXTPKT

SEQ ID NO: 3427 - protein, 43 aa, Artificial Sequence
  GFR-binding peptide
  MOD_RES (2)..(4)..(38)..(39): Xaa is C or S
  MOD_RES (16)..(17)..(18)..(19)..(20): Xaa is A or G
  MOD_RES (21)..(22)..(23)..(24): Xaa is A or G or is absent
RXGXGEVVMERYKKLXXXXXXXXXFYLMSIANLETPVXXAKPI

SEQ ID NO: 3428 - protein, 40 aa, Artificial Sequence
  GFR-binding peptide
  MOD_RES (2)..(35)..(36): Xaa is C or S
GXEAVSMGEYHYKLTPVGMDDKYLVSIPSLKTPVXXAKGV

SEQ ID NO: 3429 - protein, 34 aa, Artificial Sequence
  GFR-binding peptide
  MOD_RES (34)..(34): Xaa is C or S
  MOD_RES (12)..(13)..(14)..(15)..(16): Xaa is A or G
  MOD_RES (17)..(18)..(19)..(20): Xaa is A or G or is absent
GEVVMDRHKRLXXXXXXXXXYYLMSTASLETPVX

SEQ ID NO: 3430 - protein, 37 aa, Artificial Sequence
  GFR-binding peptide
  MOD_RES (1)..(33): Xaa is C or S
XSRVVMNYHYKLIVNSSDDKYLVSIPSLKTPAXTPKT

SEQ ID NO: 3431 - protein, 38 aa, Artificial Sequence
  GFR-binding peptide
  MOD_RES (2)..(35)..(36): Xaa is C or S
  MOD_RES (13)..(14)..(15)..(16)..(17): Xaa is A or G
  MOD_RES (18)..(19)..(20)..(21): Xaa is A or G or is absent
KXSKVIMRHKRLXXXXXXXXXYYLISTASLDQSVXXPS

SEQ ID NO: 3432 - protein, 35 aa, Artificial Sequence
  GFR-binding peptide
  MOD_RES (1)..(33)..(34): Xaa is C or S
XAKVVMNQYNKLIVNNSSDLYLVSIASLKTPAXXA

SEQ ID NO: 3433 - protein, 38 aa, Artificial Sequence
  GFR-binding peptide
  MOD_RES (1)..(3)..(37)..(38): Xaa is C or S
  MOD_RES (15)..(16)..(17)..(18)..(19): Xaa is A or G
  MOD_RES (20)..(21)..(22)..(23): Xaa is A or G or is absent
XGXSRVVMNRHKRLXXXXXXXXXYYLVSTASLKTPAXX

SEQ ID NO: 3434 - protein, 35 aa, Artificial Sequence
  GFR-binding peptide
  MOD_RES (1)..(33)..(34): Xaa is C or S
XGEVVMEQYNKLVVKDYEDLYLMSIASLETPVXXA

SEQ ID NO: 3435 - protein, 38 aa, Artificial Sequence
  GFR-binding peptide
  MOD_RES (2)..(34)..(35): Xaa is C or S
GXGEVVMEQYNKLVVKDYEDLYLMSIASLETPVXXAKP

SEQ ID NO: 3436 - protein, 32 aa, Artificial Sequence
  GFR-binding peptide
  MOD_RES (1)..(1): Xaa is C or S
XGEVVMDQYNKLVVKENEDLYLMSIASLETPV

SEQ ID NO: 3437 - protein, 38 aa, Artificial Sequence
  GFR-binding peptide
  MOD_RES (1)..(35)..(36): Xaa is C or S
  MOD_RES (13)..(14)..(15)..(16)..(17): Xaa is A or G
  MOD_RES (18)..(19)..(20)..(21): Xaa is A or G or is absent
XGEVVMDQYNKLXXXXXXXXXLYLMSIASLETPVXXAK

SEQ ID NO: 3438 - protein, 37 aa, Artificial Sequence
  GFR-binding peptide
  MOD_RES (33)..(34): Xaa is C or S
  MOD_RES (11)..(12)..(13)..(14)..(15): Xaa is A or G
  MOD_RES (16)..(17)..(18)..(19): Xaa is A or G or is absent
EVVMDQYNKLXXXXXXXXXLYLMSIASLETPVXXAKP

SEQ ID NO: 3439 - protein, 40 aa, Artificial Sequence
  GFR-binding peptide
  MOD_RES (2)..(4)..(35)..(36): Xaa is C or S
SXKXSKVVMRYKKLVKPTRGVFYLISIANLDQPVXXPSAS

SEQ ID NO: 3440 - protein, 40 aa, Artificial Sequence
  GFR-binding peptide
  MOD_RES (2)..(36)..(37): Xaa is C or S
  MOD_RES (14)..(15)..(16)..(17)..(18): Xaa is A or G
  MOD_RES (19)..(20)..(21)..(22): Xaa is A or G or is absent
GXARVVMNRYKKLXXXXXXXXXFYLVSIANLQTPAXXPKP

SEQ ID NO: 3441 - protein, 35 aa, Artificial Sequence
  GFR-binding peptide
  MOD_RES (34)..(35): Xaa is C or S
  MOD_RES (12)..(13)..(14)..(15)..(16): Xaa is A or G
  MOD_RES (17)..(18)..(19)..(20): Xaa is A or G or is absent
GEVVMDQYNKLXXXXXXXXXLYLMSIASLETPVXX

SEQ ID NO: 3442 - protein, 30 aa, Artificial Sequence
  GFR-binding peptide
SKVVMQYNKLVKPTRGVLYLISIASLDQPV

SEQ ID NO: 3443 - protein, 37 aa, Artificial Sequence
  GFR-binding peptide
  MOD_RES (1)..(33)..(34): Xaa is C or S
XAKVVMNRHKRLIVNNSSDYYLVSTASLKTPAXXAKP

SEQ ID NO: 3444 - protein, 34 aa, Artificial Sequence
  GFR-binding peptide
  MOD_RES (1)..(33): Xaa is C or S
XSRVVMNRYKKLIVNSSDDFYLVSIANLKTPAXT

SEQ ID NO: 3445 - protein, 42 aa, Artificial Sequence
  GFR-binding peptide
  MOD_RES (1)..(3)..(38)..(39): Xaa is C or S
  MOD_RES (16)..(17)..(18)..(19)..(20): Xaa is A or G
  MOD_RES (21)..(22)..(23)..(24): Xaa is A or G or is absent
XGXEAVSMGERHKRLXXXXXXXXXYYLVSTASLKTPVXXAKG

SEQ ID NO: 3446 - protein, 32 aa, Artificial Sequence
  GFR-binding peptide
  MOD_RES (11)..(12)..(13)..(14)..(15): Xaa is A or G
  MOD_RES (16)..(17)..(18)..(19): Xaa is A or G or is absent
EVVMDYHYKLXXXXXXXXXKYLMSIPSLETPV

SEQ ID NO: 3447 - protein, 42 aa, Artificial Sequence
  GFR-binding peptide
  MOD_RES (1)..(3)..(38)..(39): Xaa is C or S
  MOD_RES (16)..(17)..(18)..(19)..(20): Xaa is A or G
  MOD_RES (21)..(22)..(23)..(24): Xaa is A or G or is absent
XGXEAVSMGEQYNKLXXXXXXXXXLYLVSIASLKTPVXXAKG

SEQ ID NO: 3448 - protein, 40 aa, Artificial Sequence
  GFR-binding peptide
  MOD_RES (2)..(36)..(37): Xaa is C or S
  MOD_RES (14)..(15)..(16)..(17)..(18): Xaa is A or G
  MOD_RES (19)..(20)..(21)..(22): Xaa is A or G or is absent
GXAKVVMNRHKRLXXXXXXXXXYYLVSTASLKTPAXXAKP

SEQ ID NO: 3449 - protein, 40 aa, Artificial Sequence
  GFR-binding peptide
  MOD_RES (2)..(4)..(37)..(38): Xaa is C or S
RXGXEAVSMGEQYNKLTPVGMDDLYLVSIASLKTPVXXAK

SEQ ID NO: 3450 - protein, 40 aa, Artificial Sequence
  GFR-binding peptide
  MOD_RES (1)..(3)..(36)..(37): Xaa is C or S
XGXEAVSMGERHKRLTPVGMDDYYLVSTASLKTPVXXAKG

SEQ ID NO: 3451 - protein, 37 aa, Artificial Sequence
  GFR-binding peptide
  MOD_RES (34)..(35): Xaa is C or S
  MOD_RES (12)..(13)..(14)..(15)..(16): Xaa is A or G
  MOD_RES (17)..(18)..(19)..(20): Xaa is A or G or is absent
GEVVMEQYNKLXXXXXXXXXLYLMSIASLETPVXXAK

SEQ ID NO: 3452 - protein, 33 aa, Artificial Sequence
  GFR-binding peptide
  MOD_RES (32)..(33): Xaa is C or S
GEVVMDYHYKLVVKENEDKYLMSIPSLETPVXX

SEQ ID NO: 3453 - protein, 38 aa, Artificial Sequence
  GFR-binding peptide
  MOD_RES (1)..(3)..(36)..(37): Xaa is C or S
  MOD_RES (14)..(15)..(16)..(17)..(18): Xaa is A or G
  MOD_RES (19)..(20)..(21)..(22): Xaa is A or G or is absent
XKXSKVIMRHKRLXXXXXXXXXYYLISTASLDQSVXXP

SEQ ID NO: 3454 - protein, 45 aa, Artificial Sequence
  GFR-binding peptide
  MOD_RES (2)..(4)..(41): Xaa is C or S
  MOD_RES (17)..(18)..(19)..(20)..(21): Xaa is A or G
  MOD_RES (22)..(23)..(24)..(25): Xaa is A or G or is absent
EXKXALHDELTRYKKLXXXXXXXXXFYLVSIANLQVQTPRXQVNR

SEQ ID NO: 3455 - protein, 37 aa, Artificial Sequence
  GFR-binding peptide
  MOD_RES (36)..(36): Xaa is C or S
LHDELTRYKKLFIPKKRVIEFYLVSIANLQVQTPRXQ

SEQ ID NO: 3456 - protein, 33 aa, Artificial Sequence
  GFR-binding peptide
  MOD_RES (12)..(13)..(14)..(15)..(16): Xaa is A or G
  MOD_RES (17)..(18)..(19)..(20): Xaa is A or G or is absent
SRVVMNRHKRLXXXXXXXXXYYLVSTASLKTPA

SEQ ID NO: 3457 - protein, 36 aa, Artificial Sequence
  GFR-binding peptide
  MOD_RES (33)..(34): Xaa is C or S
  MOD_RES (11)..(12)..(13)..(14)..(15): Xaa is A or G
  MOD_RES (16)..(17)..(18)..(19): Xaa is A or G or is absent
KVVMNQYNKLXXXXXXXXXLYLVSIASLKTPAXXAK

SEQ ID NO: 3458 - protein, 40 aa, Artificial Sequence
  GFR-binding peptide
  MOD_RES (1)..(3)..(37): Xaa is C or S
  MOD_RES (15)..(16)..(17)..(18)..(19): Xaa is A or G
  MOD_RES (20)..(21)..(22)..(23): Xaa is A or G or is absent
XGXSRVVMNRHKRLXXXXXXXXXYYLVSTASLKTPAXTPK

SEQ ID NO: 3459 - protein, 38 aa, Artificial Sequence
  GFR-binding peptide
  MOD_RES (1)..(32)..(33): Xaa is C or S
XSKVVMQYNKLVKPTRGVLYLISIASLDQPVXXPSASA

SEQ ID NO: 3460 - protein, 38 aa, Artificial Sequence
  GFR-binding peptide
  MOD_RES (2)..(35)..(36): Xaa is C or S
  MOD_RES (13)..(14)..(15)..(16)..(17): Xaa is A or G
  MOD_RES (18)..(19)..(20)..(21): Xaa is A or G or is absent
KXSRVIMYHYKLXXXXXXXXXKYLISIPSLAQPVXXPA

SEQ ID NO: 3461 - protein, 38 aa, Artificial Sequence
  GFR-binding peptide
  MOD_RES (1)..(3): Xaa is C or S
XKXALHDELTQYNKLFIPKKRVIELYLVSIASLQVQTP

SEQ ID NO: 3462 - protein, 39 aa, Artificial Sequence
  GFR-binding peptide
  MOD_RES (1)..(33)..(34): Xaa is C or S
XSRVVMNRYKKLIVNSSDDFYLVSIANLKTPAXXPKPVY

SEQ ID NO: 3463 - protein, 44 aa, Artificial Sequence
  GFR-binding peptide
  MOD_RES (2)..(4)..(38)..(39): Xaa is C or S
  MOD_RES (16)..(17)..(18)..(19)..(20): Xaa is A or G
  MOD_RES (21)..(22)..(23)..(24): Xaa is A or G or is absent
HXGXAKVVMNRHKRLXXXXXXXXXYYLVSTASLKTPAXXAKPVA

SEQ ID NO: 3464 - protein, 41 aa, Artificial Sequence
  GFR-binding peptide
  MOD_RES (2)..(4)..(37)..(38): Xaa is C or S
  MOD_RES (15)..(16)..(17)..(18)..(19): Xaa is A or G
  MOD_RES (20)..(21)..(22)..(23): Xaa is A or G or is absent
SXKXSKVIMYHYKLXXXXXXXXXKYLISIPSLDQSVXXPSA

SEQ ID NO: 3465 - protein, 34 aa, Artificial Sequence
  GFR-binding peptide
  MOD_RES (31)..(32): Xaa is C or S
EVVMERYKKLVVKDYEDFYLMSIANLETPVXXAK

SEQ ID NO: 3466 - protein, 41 aa, Artificial Sequence
  GFR-binding peptide
  MOD_RES (2)..(4)..(37)..(38): Xaa is C or S
RXGXEAVSMGEYHYKLTPVGMDDKYLVSIPSLKTPVXXAKG

SEQ ID NO: 3467 - protein, 36 aa, Artificial Sequence
  GFR-binding peptide
  MOD_RES (2)..(4)..(36): Xaa is C or S
HXGXARVVMNYHYKLIVNSSDDKYLVSIPSLQTPAX

SEQ ID NO: 3468 - protein, 39 aa, Artificial Sequence
  GFR-binding peptide
  MOD_RES (2)..(34)..(35): Xaa is C or S
GXGEVVMERYKKLVVKDYEDFYLMSIANLETPVXXAKPI

SEQ ID NO: 3469 - protein, 36 aa, Artificial Sequence
  GFR-binding peptide
  MOD_RES (1)..(34)..(35): Xaa is C or S
XEAVSMGEQYNKLTPVGMDDLYLVSIASLKTPVXXA

SEQ ID NO: 3470 - protein, 37 aa, Artificial Sequence
  GFR-binding peptide
  MOD_RES (1)..(3)..(37): Xaa is C or S
  MOD_RES (15)..(16)..(17)..(18)..(19): Xaa is A or G
  MOD_RES (20)..(21)..(22)..(23): Xaa is A or G or is absent
XGXGEVVMEQYNKLXXXXXXXXXLYLMSIASLETPVX

SEQ ID NO: 3471 - protein, 33 aa, Artificial Sequence
  GFR-binding peptide
  MOD_RES (2)..(2): Xaa is C or S
GXGEVVMEYHYKLVVKDYEDKYLMSIPSLETPV

SEQ ID NO: 3472 - protein, 33 aa, Artificial Sequence
  GFR-binding peptide
  MOD_RES (2)..(2): Xaa is C or S
GXSRVVMNRYKKLIVNSSDDFYLVSIANLKTPA

SEQ ID NO: 3473 - protein, 38 aa, Artificial Sequence
  GFR-binding peptide
  MOD_RES (1)..(3)..(35)..(36): Xaa is C or S
XGXGEVVMERHKRLVVKDYEDYYLMSTASLETPVXXAK

SEQ ID NO: 3474 - protein, 34 aa, Artificial Sequence
  GFR-binding peptide
  MOD_RES (2)..(33)..(34): Xaa is C or S
KXSKVVMRHKRLVKPTRGVYYLISTASLDQPVXX

SEQ ID NO: 3475 - protein, 37 aa, Artificial Sequence
  GFR-binding peptide
  MOD_RES (34)..(35): Xaa is C or S
  MOD_RES (12)..(13)..(14)..(15)..(16): Xaa is A or G
  MOD_RES (17)..(18)..(19)..(20): Xaa is A or G or is absent
GEVVMERYKKLXXXXXXXXXFYLMSIANLETPVXXAK

SEQ ID NO: 3476 - protein, 42 aa, Artificial Sequence
  GFR-binding peptide
  MOD_RES (1)..(3)..(37)..(38): Xaa is C or S
  MOD_RES (15)..(16)..(17)..(18)..(19): Xaa is A or G
  MOD_RES (20)..(21)..(22)..(23): Xaa is A or G or is absent
XGXAKVVMNRYKKLXXXXXXXXXFYLVSIANLKTPAXXAKPV

SEQ ID NO: 3477 - protein, 34 aa, Artificial Sequence
  GFR-binding peptide
  MOD_RES (2)..(4): Xaa is C or S
SXKXSKVIMRYKKLIKPTKGIFYLISIANLDQSV

SEQ ID NO: 3478 - protein, 39 aa, Artificial Sequence
  GFR-binding peptide
  MOD_RES (1)..(3)..(35)..(36): Xaa is C or S
XGXAKVVMNYHYKLIVNNSSDKYLVSIPSLKTPAXXAKP

SEQ ID NO: 3479 - protein, 37 aa, Artificial Sequence
  GFR-binding peptide
  MOD_RES (31)..(32): Xaa is C or S
EVVMERHKRLVVKDYEDYYLMSTASLETPVXXAKPIS

SEQ ID NO: 3480 - protein, 35 aa, Artificial Sequence
  GFR-binding peptide
  MOD_RES (33)..(34): Xaa is C or S
  MOD_RES (11)..(12)..(13)..(14)..(15): Xaa is A or G
  MOD_RES (16)..(17)..(18)..(19): Xaa is A or G or is absent
SKVVMYHYKLXXXXXXXXXKYLISIPSLDQPVXXP

SEQ ID NO: 3481 - protein, 35 aa, Artificial Sequence
  GFR-binding peptide
  MOD_RES (31)..(32): Xaa is C or S
EVVMDRYKKLVVKENEDFYLMSIANLETPVXXAKP

SEQ ID NO: 3482 - protein, 35 aa, Artificial Sequence
  GFR-binding peptide
  MOD_RES (1)..(3): Xaa is C or S
XGXEAVSMGEQYNKLTPVGMDDLYLVSIASLKTPV

SEQ ID NO: 3483 - protein, 34 aa, Artificial Sequence
  GFR-binding peptide
  MOD_RES (31)..(31): Xaa is C or S
RVVMNRYKKLIVNSSDDFYLVSIANLKTPAXTPK

SEQ ID NO: 3484 - protein, 41 aa, Artificial Sequence
  GFR-binding peptide
  MOD_RES (2)..(4)..(41): Xaa is C or S
EXKXALHDELTYHYKLFIPKKRVIEKYLVSIPSLQVQTPRX

SEQ ID NO: 3485 - protein, 35 aa, Artificial Sequence
  GFR-binding peptide
  MOD_RES (2)..(34): Xaa is C or S
GXSRVVMNYHYKLIVNSSDDKYLVSIPSLKTPAXT

SEQ ID NO: 3486 - protein, 37 aa, Artificial Sequence
  GFR-binding peptide
  MOD_RES (1)..(33): Xaa is C or S
XSRVVMNRYKKLIVNSSDDFYLVSIANLKTPAXTPKT

SEQ ID NO: 3487 - protein, 35 aa, Artificial Sequence
  GFR-binding peptide
  MOD_RES (34)..(35): Xaa is C or S
  MOD_RES (12)..(13)..(14)..(15)..(16): Xaa is A or G
  MOD_RES (17)..(18)..(19)..(20): Xaa is A or G or is absent
GEVVMDRYKKLXXXXXXXXXFYLMSIANLETPVXX

SEQ ID NO: 3488 - protein, 40 aa, Artificial Sequence
  GFR-binding peptide
  MOD_RES (1)..(3)..(36)..(37): Xaa is C or S
  MOD_RES (14)..(15)..(16)..(17)..(18): Xaa is A or G
  MOD_RES (19)..(20)..(21)..(22): Xaa is A or G or is absent
XKXSKVIMYHYKLXXXXXXXXXKYLISIPSLDQSVXXPSA

SEQ ID NO: 3489 - protein, 40 aa, Artificial Sequence
  GFR-binding peptide
  MOD_RES (1)..(35)..(36): Xaa is C or S
  MOD_RES (13)..(14)..(15)..(16)..(17): Xaa is A or G
  MOD_RES (18)..(19)..(20)..(21): Xaa is A or G or is absent
XGEVVMDRHKRLXXXXXXXXXYYLMSTASLETPVXXAKPI

SEQ ID NO: 3490 - protein, 39 aa, Artificial Sequence
  GFR-binding peptide
  MOD_RES (1)..(3)..(35)..(36): Xaa is C or S
XGXARVVMNRYKKLIVNSSDDFYLVSIANLQTPAXXPKP

SEQ ID NO: 3491 - protein, 38 aa, Artificial Sequence
  GFR-binding peptide
  MOD_RES (2)..(4)..(37)..(38): Xaa is C or S
  MOD_RES (15)..(16)..(17)..(18)..(19): Xaa is A or G
  MOD_RES (20)..(21)..(22)..(23): Xaa is A or G or is absent
SXKXSKVVMRHKRLXXXXXXXXXYYLISTASLDQPVXX

SEQ ID NO: 3492 - protein, 38 aa, Artificial Sequence
  GFR-binding peptide
  MOD_RES (1)..(3)..(36)..(37): Xaa is C or S
  MOD_RES (14)..(15)..(16)..(17)..(18): Xaa is A or G
  MOD_RES (19)..(20)..(21)..(22): Xaa is A or G or is absent
XKXSKVVMRHKRLXXXXXXXXXYYLISTASLDQPVXXP

SEQ ID NO: 3493 - protein, 41 aa, Artificial Sequence
  GFR-binding peptide
  MOD_RES (1)..(3)..(36)..(37): Xaa is C or S
  MOD_RES (14)..(15)..(16)..(17)..(18): Xaa is A or G
  MOD_RES (19)..(20)..(21)..(22): Xaa is A or G or is absent
XKXSRVIMRYKKLXXXXXXXXXFYLISIANLAQPVXXPAAS

SEQ ID NO: 3494 - protein, 37 aa, Artificial Sequence
  GFR-binding peptide
  MOD_RES (33)..(34): Xaa is C or S
  MOD_RES (11)..(12)..(13)..(14)..(15): Xaa is A or G
  MOD_RES (16)..(17)..(18)..(19): Xaa is A or G or is absent
RVVMNQYNKLXXXXXXXXXLYLVSIASLKTPAXXPKP

SEQ ID NO: 3495 - protein, 30 aa, Artificial Sequence
  GFR-binding peptide
SKVVMYHYKLVKPTRGVKYLISIPSLDQPV

SEQ ID NO: 3496 - protein, 34 aa, Artificial Sequence
  GFR-binding peptide
  MOD_RES (33)..(34): Xaa is C or S
  MOD_RES (11)..(12)..(13)..(14)..(15): Xaa is A or G
  MOD_RES (16)..(17)..(18)..(19): Xaa is A or G or is absent
SKVVMRYKKLXXXXXXXXXFYLISIANLDQPVXX

SEQ ID NO: 3497 - protein, 32 aa, Artificial Sequence
  GFR-binding peptide
  MOD_RES (11)..(12)..(13)..(14)..(15): Xaa is A or G
  MOD_RES (16)..(17)..(18)..(19): Xaa is A or G or is absent
SKVIMYHYKLXXXXXXXXXKYLISIPSLDQSV

SEQ ID NO: 3498 - protein, 33 aa, Artificial Sequence
  GFR-binding peptide
  MOD_RES (33)..(33): Xaa is C or S
  MOD_RES (11)..(12)..(13)..(14)..(15): Xaa is A or G
  MOD_RES (16)..(17)..(18)..(19): Xaa is A or G or is absent
SKVIMYHYKLXXXXXXXXXKYLISIPSLDQSVX

SEQ ID NO: 3499 - protein, 39 aa, Artificial Sequence
  GFR-binding peptide
  MOD_RES (2)..(36)..(37): Xaa is C or S
  MOD_RES (14)..(15)..(16)..(17)..(18): Xaa is A or G
  MOD_RES (19)..(20)..(21)..(22): Xaa is A or G or is absent
GXSRVVMNQYNKLXXXXXXXXXLYLVSIASLKTPAXXPK

SEQ ID NO: 3500 - protein, 36 aa, Artificial Sequence
  GFR-binding peptide
  MOD_RES (34)..(35): Xaa is C or S
  MOD_RES (12)..(13)..(14)..(15)..(16): Xaa is A or G
  MOD_RES (17)..(18)..(19)..(20): Xaa is A or G or is absent
AKVVMNYHYKLXXXXXXXXXKYLVSIPSLKTPAXXA

SEQ ID NO: 3501 - protein, 37 aa, Artificial Sequence
  GFR-binding peptide
  MOD_RES (1)..(3)..(34)..(35): Xaa is C or S
XKXSKVVMYHYKLVKPTRGVKYLISIPSLDQPVXXPS

SEQ ID NO: 3502 - protein, 40 aa, Artificial Sequence
  GFR-binding peptide
  MOD_RES (2)..(4)..(35)..(36): Xaa is C or S
SXKXSKVIMRHKRLIKPTKGIYYLISTASLDQSVXXPSAS

SEQ ID NO: 3503 - protein, 40 aa, Artificial Sequence
  GFR-binding peptide
  MOD_RES (1)..(3)..(35)..(36): Xaa is C or S
XGXSRVVMNRYKKLIVNSSDDFYLVSIANLKTPAXXPKPV

SEQ ID NO: 3504 - protein, 36 aa, Artificial Sequence
  GFR-binding peptide
  MOD_RES (32)..(33): Xaa is C or S
AKVVMNRHKRLIVNNSSDYYLVSTASLKTPAXXAKP

SEQ ID NO: 3505 - protein, 38 aa, Artificial Sequence
  GFR-binding peptide
  MOD_RES (1)..(3)..(34)..(35): Xaa is C or S
XKXSRVIMYHYKLVKPKRGVKYLISIPSLAQPVXXPAA

SEQ ID NO: 3506 - protein, 40 aa, Artificial Sequence
  GFR-binding peptide
  MOD_RES (2)..(4)..(36)..(37): Xaa is C or S
HXGXSRVVMNYHYKLIVNSSDDKYLVSIPSLKTPAXXPKP

SEQ ID NO: 3507 - protein, 42 aa, Artificial Sequence
  GFR-binding peptide
  MOD_RES (2)..(4)..(38)..(39): Xaa is C or S
  MOD_RES (16)..(17)..(18)..(19)..(20): Xaa is A or G
  MOD_RES (21)..(22)..(23)..(24): Xaa is A or G or is absent
HXGXAKVVMNYHYKLXXXXXXXXXKYLVSIPSLKTPAXXAKP

SEQ ID NO: 3508 - protein, 39 aa, Artificial Sequence
  GFR-binding peptide
  MOD_RES (1)..(35): Xaa is C or S
  MOD_RES (13)..(14)..(15)..(16)..(17): Xaa is A or G
  MOD_RES (18)..(19)..(20)..(21): Xaa is A or G or is absent
XSRVVMNRYKKLXXXXXXXXXFYLVSIANLKTPAXTPKT

SEQ ID NO: 3509 - protein, 35 aa, Artificial Sequence
  GFR-binding peptide
  MOD_RES (2)..(2): Xaa is C or S
  MOD_RES (14)..(15)..(16)..(17)..(18): Xaa is A or G
  MOD_RES (19)..(20)..(21)..(22): Xaa is A or G or is absent
GXGEVVMDYHYKLXXXXXXXXXKYLMSIPSLETPV

SEQ ID NO: 3510 - protein, 43 aa, Artificial Sequence
  GFR-binding peptide
  MOD_RES (1)..(3)..(38)..(39): Xaa is C or S
  MOD_RES (16)..(17)..(18)..(19)..(20): Xaa is A or G
  MOD_RES (21)..(22)..(23)..(24): Xaa is A or G or is absent
XGXEAVSMGEYHYKLXXXXXXXXXKYLVSIPSLKTPVXXAKGV

SEQ ID NO: 3511 - protein, 39 aa, Artificial Sequence
  GFR-binding peptide
  MOD_RES (1)..(35): Xaa is C or S
  MOD_RES (13)..(14)..(15)..(16)..(17): Xaa is A or G
  MOD_RES (18)..(19)..(20)..(21): Xaa is A or G or is absent
XSRVVMNYHYKLXXXXXXXXXKYLVSIPSLKTPAXTPKT

SEQ ID NO: 3512 - protein, 34 aa, Artificial Sequence
  GFR-binding peptide
  MOD_RES (32)..(32): Xaa is C or S
SRVVMNQYNKLIVNSSDDLYLVSIASLKTPAXTP

SEQ ID NO: 3513 - protein, 40 aa, Artificial Sequence
  GFR-binding peptide
  MOD_RES (1)..(3)..(40): Xaa is C or S
XKXALHDELTQYNKLFIPKKRVIELYLVSIASLQVQTPRX

SEQ ID NO: 3514 - protein, 34 aa, Artificial Sequence
  GFR-binding peptide
  MOD_RES (34)..(34): Xaa is C or S
  MOD_RES (12)..(13)..(14)..(15)..(16): Xaa is A or G
  MOD_RES (17)..(18)..(19)..(20): Xaa is A or G or is absent
GEVVMDRYKKLXXXXXXXXXFYLMSIANLETPVX

SEQ ID NO: 3515 - protein, 37 aa, Artificial Sequence
  GFR-binding peptide
  MOD_RES (2)..(4)..(35)..(36): Xaa is C or S
SXKXSKVIMRYKKLIKPTKGIFYLISIANLDQSVXXP

SEQ ID NO: 3516 - protein, 37 aa, Artificial Sequence
  GFR-binding peptide
  MOD_RES (1)..(3)..(36)..(37): Xaa is C or S
  MOD_RES (14)..(15)..(16)..(17)..(18): Xaa is A or G
  MOD_RES (19)..(20)..(21)..(22): Xaa is A or G or is absent
XKXSRVIMQYNKLXXXXXXXXXLYLISIASLAQPVXX

SEQ ID NO: 3517 - protein, 34 aa, Artificial Sequence
  GFR-binding peptide
  MOD_RES (2)..(34): Xaa is C or S
GXARVVMNQYNKLIVNSSDDLYLVSIASLQTPAX

SEQ ID NO: 3518 - protein, 37 aa, Artificial Sequence
  GFR-binding peptide
  MOD_RES (1)..(35): Xaa is C or S
  MOD_RES (13)..(14)..(15)..(16)..(17): Xaa is A or G
  MOD_RES (18)..(19)..(20)..(21): Xaa is A or G or is absent
XSRVVMNRYKKLXXXXXXXXXFYLVSIANLKTPAXTP

SEQ ID NO: 3519 - protein, 38 aa, Artificial Sequence
  GFR-binding peptide
  MOD_RES (35)..(35): Xaa is C or S
HDELTRYKKLFIPKKRVIEFYLVSIANLQVQTPRXQVN

SEQ ID NO: 3520 - protein, 32 aa, Artificial Sequence
  GFR-binding peptide
  MOD_RES (1)..(1): Xaa is C or S
XARVVMNRYKKLIVNSSDDFYLVSIANLQTPA

SEQ ID NO: 3521 - protein, 42 aa, Artificial Sequence
  GFR-binding peptide
  MOD_RES (2)..(4)..(36): Xaa is C or S
HXGXSRVVMNRYKKLIVNSSDDFYLVSIANLKTPAXTPKTVH

SEQ ID NO: 3522 - protein, 41 aa, Artificial Sequence
  GFR-binding peptide
  MOD_RES (2)..(4)..(37)..(38): Xaa is C or S
  MOD_RES (15)..(16)..(17)..(18)..(19): Xaa is A or G
  MOD_RES (20)..(21)..(22)..(23): Xaa is A or G or is absent
SXKXSKVVMRYKKLXXXXXXXXXFYLISIANLDQPVXXPSA

SEQ ID NO: 3523 - protein, 40 aa, Artificial Sequence
  GFR-binding peptide
  MOD_RES (2)..(34)..(35): Xaa is C or S
GXAKVVMNRYKKLIVNNSSDFYLVSIANLKTPAXXAKPVA

SEQ ID NO: 3524 - protein, 34 aa, Artificial Sequence
  GFR-binding peptide
  MOD_RES (1)..(32)..(33): Xaa is C or S
XSKVIMQYNKLIKPTKGILYLISIASLDQSVXXP

SEQ ID NO: 3525 - protein, 35 aa, Artificial Sequence
  GFR-binding peptide
  MOD_RES (1)..(1): Xaa is C or S
XALHDELTRYKKLFIPKKRVIEFYLVSIANLQVQT

SEQ ID NO: 3526 - protein, 32 aa, Artificial Sequence
  GFR-binding peptide
  MOD_RES (1)..(1): Xaa is C or S
XARVVMNYHYKLIVNSSDDKYLVSIPSLQTPA

SEQ ID NO: 3527 - protein, 36 aa, Artificial Sequence
  GFR-binding peptide
  MOD_RES (1)..(3)..(34)..(35): Xaa is C or S
XKXSKVIMRYKKLIKPTKGIFYLISIANLDQSVXXP

SEQ ID NO: 3528 - protein, 38 aa, Artificial Sequence
  GFR-binding peptide
  MOD_RES (2)..(4)..(35)..(36): Xaa is C or S
SXKXSKVIMQYNKLIKPTKGILYLISIASLDQSVXXPS

SEQ ID NO: 3529 - protein, 38 aa, Artificial Sequence
  GFR-binding peptide
  MOD_RES (34)..(35): Xaa is C or S
  MOD_RES (12)..(13)..(14)..(15)..(16): Xaa is A or G
  MOD_RES (17)..(18)..(19)..(20): Xaa is A or G or is absent
AKVVMNQYNKLXXXXXXXXXLYLVSIASLKTPAXXAKP

SEQ ID NO: 3530 - protein, 36 aa, Artificial Sequence
  GFR-binding peptide
  MOD_RES (32)..(33): Xaa is C or S
AKVVMNQYNKLIVNNSSDLYLVSIASLKTPAXXAKP

SEQ ID NO: 3531 - protein, 39 aa, Artificial Sequence
  GFR-binding peptide
  MOD_RES (2)..(35)..(36): Xaa is C or S
GXEAVSMGEYHYKLTPVGMDDKYLVSIPSLKTPVXXAKG

SEQ ID NO: 3532 - protein, 38 aa, Artificial Sequence
  GFR-binding peptide
  MOD_RES (34)..(35): Xaa is C or S
  MOD_RES (12)..(13)..(14)..(15)..(16): Xaa is A or G
  MOD_RES (17)..(18)..(19)..(20): Xaa is A or G or is absent
AKVVMNRYKKLXXXXXXXXXFYLVSIANLKTPAXXAKP

SEQ ID NO: 3533 - protein, 39 aa, Artificial Sequence
  GFR-binding peptide
  MOD_RES (37)..(37): Xaa is C or S
ALHDELTRYKKLFIPKKRVIEFYLVSIANLQVQTPRXQV

SEQ ID NO: 3534 - protein, 35 aa, Artificial Sequence
  GFR-binding peptide
  MOD_RES (1)..(34)..(35): Xaa is C or S
  MOD_RES (12)..(13)..(14)..(15)..(16): Xaa is A or G
  MOD_RES (17)..(18)..(19)..(20): Xaa is A or G or is absent
XSKVVMYHYKLXXXXXXXXXKYLISIPSLDQPVXX

SEQ ID NO: 3535 - protein, 36 aa, Artificial Sequence
  GFR-binding peptide
  MOD_RES (1)..(3)..(36): Xaa is C or S
  MOD_RES (14)..(15)..(16)..(17)..(18): Xaa is A or G
  MOD_RES (19)..(20)..(21)..(22): Xaa is A or G or is absent
XKXSKVVMYHYKLXXXXXXXXXKYLISIPSLDQPVX

SEQ ID NO: 3536 - protein, 34 aa, Artificial Sequence
  GFR-binding peptide
  MOD_RES (1)..(34): Xaa is C or S
  MOD_RES (12)..(13)..(14)..(15)..(16): Xaa is A or G
  MOD_RES (17)..(18)..(19)..(20): Xaa is A or G or is absent
XSRVIMYHYKLXXXXXXXXXKYLISIPSLAQPVX

SEQ ID NO: 3537 - protein, 36 aa, Artificial Sequence
  GFR-binding peptide
  MOD_RES (32)..(33): Xaa is C or S
ARVVMNQYNKLIVNSSDDLYLVSIASLQTPAXXPKP

SEQ ID NO: 3538 - protein, 35 aa, Artificial Sequence
  GFR-binding peptide
  MOD_RES (2)..(33)..(34): Xaa is C or S
KXSRVIMRHKRLVKPKRGVYYLISTASLAQPVXXP

SEQ ID NO: 3539 - protein, 37 aa, Artificial Sequence
  GFR-binding peptide
  MOD_RES (2)..(35)..(36): Xaa is C or S
GXEAVSMGEQYNKLTPVGMDDLYLVSIASLKTPVXXA

SEQ ID NO: 3540 - protein, 41 aa, Artificial Sequence
  GFR-binding peptide
  MOD_RES (1)..(3)..(37): Xaa is C or S
  MOD_RES (15)..(16)..(17)..(18)..(19): Xaa is A or G
  MOD_RES (20)..(21)..(22)..(23): Xaa is A or G or is absent
XGXSRVVMNRHKRLXXXXXXXXXYYLVSTASLKTPAXTPKT

SEQ ID NO: 3541 - protein, 39 aa, Artificial Sequence
  GFR-binding peptide
  MOD_RES (2)..(4): Xaa is C or S
EXKXALHDELTRYKKLFIPKKRVIEFYLVSIANLQVQTP

SEQ ID NO: 3542 - protein, 38 aa, Artificial Sequence
  GFR-binding peptide
  MOD_RES (2)..(4)..(38): Xaa is C or S
  MOD_RES (16)..(17)..(18)..(19)..(20): Xaa is A or G
  MOD_RES (21)..(22)..(23)..(24): Xaa is A or G or is absent
HXGXAKVVMNRHKRLXXXXXXXXXYYLVSTASLKTPAX

SEQ ID NO: 3543 - protein, 38 aa, Artificial Sequence
  GFR-binding peptide
  MOD_RES (1)..(3)..(35)..(36): Xaa is C or S
XGXAKVVMNRYKKLIVNNSSDFYLVSIANLKTPAXXAK

SEQ ID NO: 3544 - protein, 37 aa, Artificial Sequence
  GFR-binding peptide
  MOD_RES (2)..(36)..(37): Xaa is C or S
  MOD_RES (14)..(15)..(16)..(17)..(18): Xaa is A or G
  MOD_RES (19)..(20)..(21)..(22): Xaa is A or G or is absent
GXSRVVMNRHKRLXXXXXXXXXYYLVSTASLKTPAXX

SEQ ID NO: 3545 - protein, 35 aa, Artificial Sequence
  GFR-binding peptide
  MOD_RES (1)..(35): Xaa is C or S
  MOD_RES (13)..(14)..(15)..(16)..(17): Xaa is A or G
  MOD_RES (18)..(19)..(20)..(21): Xaa is A or G or is absent
XGEVVMDRHKRLXXXXXXXXXYYLMSTASLETPVX

SEQ ID NO: 3546 - protein, 40 aa, Artificial Sequence
  GFR-binding peptide
  MOD_RES (2)..(34)..(35): Xaa is C or S
GXAKVVMNRHKRLIVNNSSDYYLVSTASLKTPAXXAKPVA

SEQ ID NO: 3547 - protein, 34 aa, Artificial Sequence
  GFR-binding peptide
  MOD_RES (2)..(33)..(34): Xaa is C or S
KXSRVIMQYNKLVKPKRGVLYLISIASLAQPVXX

SEQ ID NO: 3548 - protein, 39 aa, Artificial Sequence
  GFR-binding peptide
  MOD_RES (1)..(35)..(36): Xaa is C or S
  MOD_RES (13)..(14)..(15)..(16)..(17): Xaa is A or G
  MOD_RES (18)..(19)..(20)..(21): Xaa is A or G or is absent
XGEVVMEQYNKLXXXXXXXXXLYLMSIASLETPVXXAKP

SEQ ID NO: 3549 - protein, 34 aa, Artificial Sequence
  GFR-binding peptide
  MOD_RES (2)..(2): Xaa is C or S
  MOD_RES (13)..(14)..(15)..(16)..(17): Xaa is A or G
  MOD_RES (18)..(19)..(20)..(21): Xaa is A or G or is absent
KXSRVIMRYKKLXXXXXXXXXFYLISIANLAQPV

SEQ ID NO: 3550 - protein, 40 aa, Artificial Sequence
  GFR-binding peptide
  MOD_RES (2)..(4)..(38)..(39): Xaa is C or S
  MOD_RES (16)..(17)..(18)..(19)..(20): Xaa is A or G
  MOD_RES (21)..(22)..(23)..(24): Xaa is A or G or is absent
RXGXGEVVMDRYKKLXXXXXXXXXFYLMSIANLETPVXXA

SEQ ID NO: 3551 - protein, 34 aa, Artificial Sequence
  GFR-binding peptide
  MOD_RES (32)..(33): Xaa is C or S
SRVVMNQYNKLIVNSSDDLYLVSIASLKTPAXXP

SEQ ID NO: 3552 - protein, 37 aa, Artificial Sequence
  GFR-binding peptide
  MOD_RES (2)..(4)..(37): Xaa is C or S
RXGXEAVSMGERYKKLTPVGMDDFYLVSIANLKTPVX

SEQ ID NO: 3553 - protein, 33 aa, Artificial Sequence
  GFR-binding peptide
  MOD_RES (2)..(2): Xaa is C or S
GXAKVVMNYHYKLIVNNSSDKYLVSIPSLKTPA

SEQ ID NO: 3554 - protein, 39 aa, Artificial Sequence
  GFR-binding peptide
  MOD_RES (1)..(33)..(34): Xaa is C or S
XGEVVMERHKRLVVKDYEDYYLMSTASLETPVXXAKPIS

SEQ ID NO: 3555 - protein, 41 aa, Artificial Sequence
  GFR-binding peptide
  MOD_RES (1)..(3)..(36)..(37): Xaa is C or S
XGXEAVSMGEQYNKLTPVGMDDLYLVSIASLKTPVXXAKGV

SEQ ID NO: 3556 - protein, 39 aa, Artificial Sequence
  GFR-binding peptide
  MOD_RES (2)..(33)..(34): Xaa is C or S
KXSRVIMRYKKLVKPKRGVFYLISIANLAQPVXXPAASA

SEQ ID NO: 3557 - protein, 35 aa, Artificial Sequence
  GFR-binding peptide
  MOD_RES (32)..(33): Xaa is C or S
ARVVMNYHYKLIVNSSDDKYLVSIPSLQTPAXXPK

SEQ ID NO: 3558 - protein, 33 aa, Artificial Sequence
  GFR-binding peptide
  MOD_RES (12)..(13)..(14)..(15)..(16): Xaa is A or G
  MOD_RES (17)..(18)..(19)..(20): Xaa is A or G or is absent
AKVVMNYHYKLXXXXXXXXXKYLVSIPSLKTPA

SEQ ID NO: 3559 - protein, 39 aa, Artificial Sequence
  GFR-binding peptide
  MOD_RES (2)..(4)..(36)..(37): Xaa is C or S
RXGXGEVVMERHKRLVVKDYEDYYLMSTASLETPVXXAK

SEQ ID NO: 3560 - protein, 39 aa, Artificial Sequence
  GFR-binding peptide
  MOD_RES (1)..(3)..(37)..(38): Xaa is C or S
  MOD_RES (15)..(16)..(17)..(18)..(19): Xaa is A or G
  MOD_RES (20)..(21)..(22)..(23): Xaa is A or G or is absent
XGXGEVVMEQYNKLXXXXXXXXXLYLMSIASLETPVXXA

SEQ ID NO: 3561 - protein, 33 aa, Artificial Sequence
  GFR-binding peptide
  MOD_RES (1)..(33): Xaa is C or S
XGEVVMDYHYKLVVKENEDKYLMSIPSLETPVX

SEQ ID NO: 3562 - protein, 35 aa, Artificial Sequence
  GFR-binding peptide
  MOD_RES (2)..(4): Xaa is C or S
RXGXGEVVMERYKKLVVKDYEDFYLMSIANLETPV

SEQ ID NO: 3563 - protein, 36 aa, Artificial Sequence
  GFR-binding peptide
  MOD_RES (31)..(32): Xaa is C or S
SKVIMRYKKLIKPTKGIFYLISIANLDQSVXXPSAS

SEQ ID NO: 3564 - protein, 32 aa, Artificial Sequence
  GFR-binding peptide
  MOD_RES (11)..(12)..(13)..(14)..(15): Xaa is A or G
  MOD_RES (16)..(17)..(18)..(19): Xaa is A or G or is absent
SKVIMRHKRLXXXXXXXXXYYLISTASLDQSV

SEQ ID NO: 3565 - protein, 42 aa, Artificial Sequence
  GFR-binding peptide
  MOD_RES (2)..(4)..(38): Xaa is C or S
  MOD_RES (16)..(17)..(18)..(19)..(20): Xaa is A or G
  MOD_RES (21)..(22)..(23)..(24): Xaa is A or G or is absent
HXGXSRVVMNRYKKLXXXXXXXXXFYLVSIANLKTPAXTPKT

SEQ ID NO: 3566 - protein, 35 aa, Artificial Sequence
  GFR-binding peptide
  MOD_RES (1)..(33): Xaa is C or S
XSRVVMNRHKRLIVNSSDDYYLVSTASLKTPAXTP

SEQ ID NO: 3567 - protein, 37 aa, Artificial Sequence
  GFR-binding peptide
  MOD_RES (33)..(34): Xaa is C or S
  MOD_RES (11)..(12)..(13)..(14)..(15): Xaa is A or G
  MOD_RES (16)..(17)..(18)..(19): Xaa is A or G or is absent
KVVMNQYNKLXXXXXXXXXLYLVSIASLKTPAXXAKP

SEQ ID NO: 3568 - protein, 41 aa, Artificial Sequence
  GFR-binding peptide
  MOD_RES (1)..(3)..(35)..(36): Xaa is C or S
XGXAKVVMNRHKRLIVNNSSDYYLVSTASLKTPAXXAKPVA

SEQ ID NO: 3569 - protein, 34 aa, Artificial Sequence
  GFR-binding peptide
  MOD_RES (33)..(33): Xaa is C or S
  MOD_RES (11)..(12)..(13)..(14)..(15): Xaa is A or G
  MOD_RES (16)..(17)..(18)..(19): Xaa is A or G or is absent
RVVMNRHKRLXXXXXXXXXYYLVSTASLKTPAXT

SEQ ID NO: 3570 - protein, 35 aa, Artificial Sequence
  GFR-binding peptide
  MOD_RES (2)..(34)..(35): Xaa is C or S
GXSRVVMNRHKRLIVNSSDDYYLVSTASLKTPAXX

SEQ ID NO: 3571 - protein, 30 aa, Artificial Sequence
  GFR-binding peptide
SKVIMRYKKLIKPTKGIFYLISIANLDQSV

SEQ ID NO: 3572 - protein, 38 aa, Artificial Sequence
  GFR-binding peptide
  MOD_RES (2)..(4)..(38): Xaa is C or S
  MOD_RES (16)..(17)..(18)..(19)..(20): Xaa is A or G
  MOD_RES (21)..(22)..(23)..(24): Xaa is A or G or is absent
HXGXSRVVMNYHYKLXXXXXXXXXKYLVSIPSLKTPAX

SEQ ID NO: 3573 - protein, 38 aa, Artificial Sequence
  GFR-binding peptide
  MOD_RES (2)..(4)..(35)..(36): Xaa is C or S
SXKXSKVIMRYKKLIKPTKGIFYLISIANLDQSVXXPS

SEQ ID NO: 3574 - protein, 43 aa, Artificial Sequence
  GFR-binding peptide
  MOD_RES (2)..(39): Xaa is C or S
  MOD_RES (15)..(16)..(17)..(18)..(19): Xaa is A or G
  MOD_RES (20)..(21)..(22)..(23): Xaa is A or G or is absent
KXALHDELTQYNKLXXXXXXXXXLYLVSIASLQVQTPRXQVNR

SEQ ID NO: 3575 - protein, 36 aa, Artificial Sequence
  GFR-binding peptide
  MOD_RES (2)..(35)..(36): Xaa is C or S
  MOD_RES (13)..(14)..(15)..(16)..(17): Xaa is A or G
  MOD_RES (18)..(19)..(20)..(21): Xaa is A or G or is absent
KXSRVIMQYNKLXXXXXXXXXLYLISIASLAQPVXX

SEQ ID NO: 3576 - protein, 40 aa, Artificial Sequence
  GFR-binding peptide
  MOD_RES (2)..(36)..(37): Xaa is C or S
  MOD_RES (14)..(15)..(16)..(17)..(18): Xaa is A or G
  MOD_RES (19)..(20)..(21)..(22): Xaa is A or G or is absent
GXGEVVMDRYKKLXXXXXXXXXFYLMSIANLETPVXXAKP

SEQ ID NO: 3577 - protein, 32 aa, Artificial Sequence
  GFR-binding peptide
  MOD_RES (1)..(1): Xaa is C or S
XSRVVMNRHKRLIVNSSDDYYLVSTASLKTPA

SEQ ID NO: 3578 - protein, 44 aa, Artificial Sequence
  GFR-binding peptide
  MOD_RES (1)..(3)..(40): Xaa is C or S
XKXALHDELTRHKRLFIPKKRVIEYYLVSTASLQVQTPRXQVNR

SEQ ID NO: 3579 - protein, 37 aa, Artificial Sequence
  GFR-binding peptide
  MOD_RES (2)..(36)..(37): Xaa is C or S
  MOD_RES (14)..(15)..(16)..(17)..(18): Xaa is A or G
  MOD_RES (19)..(20)..(21)..(22): Xaa is A or G or is absent
GXGEVVMDYHYKLXXXXXXXXXKYLMSIPSLETPVXX

SEQ ID NO: 3580 - protein, 42 aa, Artificial Sequence
  GFR-binding peptide
  MOD_RES (1)..(36)..(37): Xaa is C or S
  MOD_RES (14)..(15)..(16)..(17)..(18): Xaa is A or G
  MOD_RES (19)..(20)..(21)..(22): Xaa is A or G or is absent
XEAVSMGEYHYKLXXXXXXXXXKYLVSIPSLKTPVXXAKGVK

SEQ ID NO: 3581 - protein, 32 aa, Artificial Sequence
  GFR-binding peptide
  MOD_RES (32)..(32): Xaa is C or S
AKVVMNRHKRLIVNNSSDYYLVSTASLKTPAX

SEQ ID NO: 3582 - protein, 37 aa, Artificial Sequence
  GFR-binding peptide
  MOD_RES (34)..(35): Xaa is C or S
  MOD_RES (12)..(13)..(14)..(15)..(16): Xaa is A or G
  MOD_RES (17)..(18)..(19)..(20): Xaa is A or G or is absent
AKVVMNRYKKLXXXXXXXXXFYLVSIANLKTPAXXAK

SEQ ID NO: 3583 - protein, 38 aa, Artificial Sequence
  GFR-binding peptide
  MOD_RES (32)..(33): Xaa is C or S
ARVVMNRHKRLIVNSSDDYYLVSTASLQTPAXXPKPVT

SEQ ID NO: 3584 - protein, 36 aa, Artificial Sequence
  GFR-binding peptide
  MOD_RES (35)..(35): Xaa is C or S
  MOD_RES (11)..(12)..(13)..(14)..(15): Xaa is A or G
  MOD_RES (16)..(17)..(18)..(19): Xaa is A or G or is absent
HDELTQYNKLXXXXXXXXXLYLVSIASLQVQTPRXQ

SEQ ID NO: 3585 - protein, 34 aa, Artificial Sequence
  GFR-binding peptide
  MOD_RES (1)..(33)..(34): Xaa is C or S
XARVVMNYHYKLIVNSSDDKYLVSIPSLQTPAXX

SEQ ID NO: 3586 - protein, 39 aa, Artificial Sequence
  GFR-binding peptide
  MOD_RES (2)..(4)..(36)..(37): Xaa is C or S
HXGXARVVMNRHKRLIVNSSDDYYLVSTASLQTPAXXPK

SEQ ID NO: 3587 - protein, 38 aa, Artificial Sequence
  GFR-binding peptide
  MOD_RES (1)..(3)..(37)..(38): Xaa is C or S
  MOD_RES (15)..(16)..(17)..(18)..(19): Xaa is A or G
  MOD_RES (20)..(21)..(22)..(23): Xaa is A or G or is absent
XGXGEVVMDRHKRLXXXXXXXXXYYLMSTASLETPVXX

SEQ ID NO: 3588 - protein, 42 aa, Artificial Sequence
  GFR-binding peptide
  MOD_RES (1)..(3)..(40): Xaa is C or S
  MOD_RES (16)..(17)..(18)..(19)..(20): Xaa is A or G
  MOD_RES (21)..(22)..(23)..(24): Xaa is A or G or is absent
XKXALHDELTYHYKLXXXXXXXXXKYLVSIPSLQVQTPRXQV

SEQ ID NO: 3589 - protein, 36 aa, Artificial Sequence
  GFR-binding peptide
  MOD_RES (1)..(3)..(36): Xaa is C or S
  MOD_RES (14)..(15)..(16)..(17)..(18): Xaa is A or G
  MOD_RES (19)..(20)..(21)..(22): Xaa is A or G or is absent
XKXSKVIMRYKKLXXXXXXXXXFYLISIANLDQSVX

SEQ ID NO: 3590 - protein, 39 aa, Artificial Sequence
  GFR-binding peptide
  MOD_RES (2)..(34)..(35): Xaa is C or S
GXAKVVMNQYNKLIVNNSSDLYLVSIASLKTPAXXAKPV

SEQ ID NO: 3591 - protein, 40 aa, Artificial Sequence
  GFR-binding peptide
  MOD_RES (1)..(3)..(37)..(38): Xaa is C or S
  MOD_RES (15)..(16)..(17)..(18)..(19): Xaa is A or G
  MOD_RES (20)..(21)..(22)..(23): Xaa is A or G or is absent
XGXGEVVMEYHYKLXXXXXXXXXKYLMSIPSLETPVXXAK

SEQ ID NO: 3592 - protein, 40 aa, Artificial Sequence
  GFR-binding peptide
  MOD_RES (1)..(3)..(34)..(35): Xaa is C or S
XKXSKVIMYHYKLIKPTKGIKYLISIPSLDQSVXXPSASA

SEQ ID NO: 3593 - protein, 41 aa, Artificial Sequence
  GFR-binding peptide
  MOD_RES (1)..(3)..(36)..(37): Xaa is C or S
XGXEAVSMGERYKKLTPVGMDDFYLVSIANLKTPVXXAKGV

SEQ ID NO: 3594 - protein, 40 aa, Artificial Sequence
  GFR-binding peptide
  MOD_RES (37)..(37): Xaa is C or S
  MOD_RES (13)..(14)..(15)..(16)..(17): Xaa is A or G
  MOD_RES (18)..(19)..(20)..(21): Xaa is A or G or is absent
ALHDELTRYKKLXXXXXXXXXFYLVSIANLQVQTPRXQVN

SEQ ID NO: 3595 - protein, 42 aa, Artificial Sequence
  GFR-binding peptide
  MOD_RES (1)..(3)..(36)..(37): Xaa is C or S
  MOD_RES (14)..(15)..(16)..(17)..(18): Xaa is A or G
  MOD_RES (19)..(20)..(21)..(22): Xaa is A or G or is absent
XKXSKVVMRHKRLXXXXXXXXXYYLISTASLDQPVXXPSASA

SEQ ID NO: 3596 - protein, 38 aa, Artificial Sequence
  GFR-binding peptide
  MOD_RES (2)..(4)..(36): Xaa is C or S
HXGXSRVVMNQYNKLIVNSSDDLYLVSIASLKTPAXTP

SEQ ID NO: 3597 - protein, 36 aa, Artificial Sequence
  GFR-binding peptide
  MOD_RES (1)..(3)..(35)..(36): Xaa is C or S
XGXAKVVMNYHYKLIVNNSSDKYLVSIPSLKTPAXX

SEQ ID NO: 3598 - protein, 34 aa, Artificial Sequence
  GFR-binding peptide
LHDELTYHYKLFIPKKRVIEKYLVSIPSLQVQTP

SEQ ID NO: 3599 - protein, 32 aa, Artificial Sequence
  GFR-binding peptide
  MOD_RES (31)..(32): Xaa is C or S
EVVMEQYNKLVVKDYEDLYLMSIASLETPVXX

SEQ ID NO: 3600 - protein, 38 aa, Artificial Sequence
  GFR-binding peptide
  MOD_RES (1)..(3)..(36)..(37): Xaa is C or S
XGXEAVSMGERHKRLTPVGMDDYYLVSTASLKTPVXXA

SEQ ID NO: 3601 - protein, 42 aa, Artificial Sequence
  GFR-binding peptide
  MOD_RES (1)..(3)..(36)..(37): Xaa is C or S
  MOD_RES (14)..(15)..(16)..(17)..(18): Xaa is A or G
  MOD_RES (19)..(20)..(21)..(22): Xaa is A or G or is absent
XKXSKVVMQYNKLXXXXXXXXXLYLISIASLDQPVXXPSASA

SEQ ID NO: 3602 - protein, 43 aa, Artificial Sequence
  GFR-binding peptide
  MOD_RES (2)..(39): Xaa is C or S
  MOD_RES (15)..(16)..(17)..(18)..(19): Xaa is A or G
  MOD_RES (20)..(21)..(22)..(23): Xaa is A or G or is absent
KXALHDELTRHKRLXXXXXXXXXYYLVSTASLQVQTPRXQVNR

SEQ ID NO: 3603 - protein, 35 aa, Artificial Sequence
  GFR-binding peptide
  MOD_RES (1)..(3): Xaa is C or S
  MOD_RES (14)..(15)..(16)..(17)..(18): Xaa is A or G
  MOD_RES (19)..(20)..(21)..(22): Xaa is A or G or is absent
XKXSRVIMRHKRLXXXXXXXXXYYLISTASLAQPV

SEQ ID NO: 3604 - protein, 39 aa, Artificial Sequence
  GFR-binding peptide
  MOD_RES (2)..(36)..(37): Xaa is C or S
  MOD_RES (14)..(15)..(16)..(17)..(18): Xaa is A or G
  MOD_RES (19)..(20)..(21)..(22): Xaa is A or G or is absent
GXSRVVMNRHKRLXXXXXXXXXYYLVSTASLKTPAXXPK

SEQ ID NO: 3605 - protein, 39 aa, Artificial Sequence
  GFR-binding peptide
  MOD_RES (2)..(4)..(38)..(39): Xaa is C or S
  MOD_RES (16)..(17)..(18)..(19)..(20): Xaa is A or G
  MOD_RES (21)..(22)..(23)..(24): Xaa is A or G or is absent
RXGXGEVVMDRHKRLXXXXXXXXXYYLMSTASLETPVXX

SEQ ID NO: 3606 - protein, 37 aa, Artificial Sequence
  GFR-binding peptide
  MOD_RES (1)..(3)..(37): Xaa is C or S
  MOD_RES (15)..(16)..(17)..(18)..(19): Xaa is A or G
  MOD_RES (20)..(21)..(22)..(23): Xaa is A or G or is absent
XGXGEVVMEYHYKLXXXXXXXXXKYLMSIPSLETPVX

SEQ ID NO: 3607 - protein, 38 aa, Artificial Sequence
  GFR-binding peptide
  MOD_RES (1)..(34)..(35): Xaa is C or S
XEAVSMGERYKKLTPVGMDDFYLVSIANLKTPVXXAKG

SEQ ID NO: 3608 - protein, 41 aa, Artificial Sequence
  GFR-binding peptide
  MOD_RES (1)..(3)..(35)..(36): Xaa is C or S
XGXSRVVMNRYKKLIVNSSDDFYLVSIANLKTPAXXPKPVY

SEQ ID NO: 3609 - protein, 39 aa, Artificial Sequence
  GFR-binding peptide
  MOD_RES (1)..(3)..(34)..(35): Xaa is C or S
XKXSRVIMRYKKLVKPKRGVFYLISIANLAQPVXXPAAS

SEQ ID NO: 3610 - protein, 36 aa, Artificial Sequence
  GFR-binding peptide
  MOD_RES (31)..(32): Xaa is C or S
RVVMNYHYKLIVNSSDDKYLVSIPSLKTPAXXPKPV

SEQ ID NO: 3611 - protein, 31 aa, Artificial Sequence
  GFR-binding peptide
SRVVMNRYKKLIVNSSDDFYLVSIANLKTPA

SEQ ID NO: 3612 - protein, 35 aa, Artificial Sequence
  GFR-binding peptide
  MOD_RES (31)..(32): Xaa is C or S
EVVMDRHKRLVVKENEDYYLMSTASLETPVXXAKP

SEQ ID NO: 3613 - protein, 40 aa, Artificial Sequence
  GFR-binding peptide
  MOD_RES (2)..(4)..(38)..(39): Xaa is C or S
  MOD_RES (16)..(17)..(18)..(19)..(20): Xaa is A or G
  MOD_RES (21)..(22)..(23)..(24): Xaa is A or G or is absent
HXGXARVVMNRHKRLXXXXXXXXXYYLVSTASLQTPAXXP

SEQ ID NO: 3614 - protein, 34 aa, Artificial Sequence
  GFR-binding peptide
ALHDELTQYNKLFIPKKRVIELYLVSIASLQVQT

SEQ ID NO: 3615 - protein, 34 aa, Artificial Sequence
  GFR-binding peptide
  MOD_RES (31)..(32): Xaa is C or S
SKVVMRYKKLVKPTRGVFYLISIANLDQPVXXPS

SEQ ID NO: 3616 - protein, 34 aa, Artificial Sequence
  GFR-binding peptide
ALHDELTRHKRLFIPKKRVIEYYLVSTASLQVQT

SEQ ID NO: 3617 - protein, 42 aa, Artificial Sequence
  GFR-binding peptide
  MOD_RES (2)..(4)..(36)..(37): Xaa is C or S
RXGXGEVVMEYHYKLVVKDYEDKYLMSIPSLETPVXXAKPIS

SEQ ID NO: 3618 - protein, 38 aa, Artificial Sequence
  GFR-binding peptide
  MOD_RES (33)..(34): Xaa is C or S
  MOD_RES (11)..(12)..(13)..(14)..(15): Xaa is A or G
  MOD_RES (16)..(17)..(18)..(19): Xaa is A or G or is absent
EVVMEQYNKLXXXXXXXXXLYLMSIASLETPVXXAKPI

SEQ ID NO: 3619 - protein, 35 aa, Artificial Sequence
  GFR-binding peptide
  MOD_RES (35)..(35): Xaa is C or S
  MOD_RES (11)..(12)..(13)..(14)..(15): Xaa is A or G
  MOD_RES (16)..(17)..(18)..(19): Xaa is A or G or is absent
HDELTRHKRLXXXXXXXXXYYLVSTASLQVQTPRX

SEQ ID NO: 3620 - protein, 39 aa, Artificial Sequence
  GFR-binding peptide
  MOD_RES (2)..(4)..(36)..(37): Xaa is C or S
RXGXGEVVMDYHYKLVVKENEDKYLMSIPSLETPVXXAK

SEQ ID NO: 3621 - protein, 40 aa, Artificial Sequence
  GFR-binding peptide
  MOD_RES (2)..(4)..(37)..(38): Xaa is C or S
  MOD_RES (15)..(16)..(17)..(18)..(19): Xaa is A or G
  MOD_RES (20)..(21)..(22)..(23): Xaa is A or G or is absent
SXKXSKVIMQYNKLXXXXXXXXXLYLISIASLDQSVXXPS

SEQ ID NO: 3622 - protein, 35 aa, Artificial Sequence
  GFR-binding peptide
  MOD_RES (2)..(35): Xaa is C or S
GXEAVSMGERYKKLTPVGMDDFYLVSIANLKTPVX

SEQ ID NO: 3623 - protein, 43 aa, Artificial Sequence
  GFR-binding peptide
  MOD_RES (2)..(4)..(37)..(38): Xaa is C or S
RXGXEAVSMGEYHYKLTPVGMDDKYLVSIPSLKTPVXXAKGVK

SEQ ID NO: 3624 - protein, 43 aa, Artificial Sequence
  GFR-binding peptide
  MOD_RES (2)..(39): Xaa is C or S
KXALHDELTRHKRLFIPKKRVIEYYLVSTASLQVQTPRXQVNR

SEQ ID NO: 3625 - protein, 33 aa, Artificial Sequence
  GFR-binding peptide
  MOD_RES (12)..(13)..(14)..(15)..(16): Xaa is A or G
  MOD_RES (17)..(18)..(19)..(20): Xaa is A or G or is absent
LHDELTYHYKLXXXXXXXXXKYLVSIPSLQVQT

SEQ ID NO: 3626 - protein, 33 aa, Artificial Sequence
  GFR-binding peptide
  MOD_RES (1)..(33): Xaa is C or S
XGEVVMDRYKKLVVKENEDFYLMSIANLETPVX

SEQ ID NO: 3627 - protein, 37 aa, Artificial Sequence
  GFR-binding peptide
  MOD_RES (1)..(3)..(36)..(37): Xaa is C or S
  MOD_RES (14)..(15)..(16)..(17)..(18): Xaa is A or G
  MOD_RES (19)..(20)..(21)..(22): Xaa is A or G or is absent
XKXSKVIMYHYKLXXXXXXXXXKYLISIPSLDQSVXX

SEQ ID NO: 3628 - protein, 43 aa, Artificial Sequence
  GFR-binding peptide
  MOD_RES (1)..(3)..(37)..(38): Xaa is C or S
  MOD_RES (15)..(16)..(17)..(18)..(19): Xaa is A or G
  MOD_RES (20)..(21)..(22)..(23): Xaa is A or G or is absent
XGXARVVMNRYKKLXXXXXXXXXFYLVSIANLQTPAXXPKPVT

SEQ ID NO: 3629 - protein, 37 aa, Artificial Sequence
  GFR-binding peptide
  MOD_RES (1)..(34)..(35): Xaa is C or S
  MOD_RES (12)..(13)..(14)..(15)..(16): Xaa is A or G
  MOD_RES (17)..(18)..(19)..(20): Xaa is A or G or is absent
XSKVVMRHKRLXXXXXXXXXYYLISTASLDQPVXXPS

SEQ ID NO: 3630 - protein, 38 aa, Artificial Sequence
  GFR-binding peptide
  MOD_RES (33)..(34): Xaa is C or S
  MOD_RES (11)..(12)..(13)..(14)..(15): Xaa is A or G
  MOD_RES (16)..(17)..(18)..(19): Xaa is A or G or is absent
EVVMDRYKKLXXXXXXXXXFYLMSIANLETPVXXAKPI

SEQ ID NO: 3631 - protein, 34 aa, Artificial Sequence
  GFR-binding peptide
  MOD_RES (1)..(33)..(34): Xaa is C or S
XGEVVMDRYKKLVVKENEDFYLMSIANLETPVXX

SEQ ID NO: 3632 - protein, 39 aa, Artificial Sequence
  GFR-binding peptide
  MOD_RES (33)..(34): Xaa is C or S
EAVSMGERYKKLTPVGMDDFYLVSIANLKTPVXXAKGVK

SEQ ID NO: 3633 - protein, 35 aa, Artificial Sequence
  GFR-binding peptide
  MOD_RES (2)..(34)..(35): Xaa is C or S
GXARVVMNRHKRLIVNSSDDYYLVSTASLQTPAXX

SEQ ID NO: 3634 - protein, 37 aa, Artificial Sequence
  GFR-binding peptide
  MOD_RES (1)..(3)..(34)..(35): Xaa is C or S
XKXSRVIMYHYKLVKPKRGVKYLISIPSLAQPVXXPA

SEQ ID NO: 3635 - protein, 37 aa, Artificial Sequence
  GFR-binding peptide
  MOD_RES (2)..(35)..(36): Xaa is C or S
  MOD_RES (13)..(14)..(15)..(16)..(17): Xaa is A or G
  MOD_RES (18)..(19)..(20)..(21): Xaa is A or G or is absent
KXSKVVMRHKRLXXXXXXXXXYYLISTASLDQPVXXP

SEQ ID NO: 3636 - protein, 40 aa, Artificial Sequence
  GFR-binding peptide
  MOD_RES (1)..(34)..(35): Xaa is C or S
  MOD_RES (12)..(13)..(14)..(15)..(16): Xaa is A or G
  MOD_RES (17)..(18)..(19)..(20): Xaa is A or G or is absent
XSKVVMYHYKLXXXXXXXXXKYLISIPSLDQPVXXPSASA

SEQ ID NO: 3637 - protein, 35 aa, Artificial Sequence
  GFR-binding peptide
  MOD_RES (2)..(35): Xaa is C or S
  MOD_RES (13)..(14)..(15)..(16)..(17): Xaa is A or G
  MOD_RES (18)..(19)..(20)..(21): Xaa is A or G or is absent
KXSRVIMRYKKLXXXXXXXXXFYLISIANLAQPVX

SEQ ID NO: 3638 - protein, 34 aa, Artificial Sequence
  GFR-binding peptide
  MOD_RES (1)..(33)..(34): Xaa is C or S
XGEVVMDYHYKLVVKENEDKYLMSIPSLETPVXX

SEQ ID NO: 3639 - protein, 36 aa, Artificial Sequence
  GFR-binding peptide
  MOD_RES (2)..(4)..(35)..(36): Xaa is C or S
SXKXSKVIMRYKKLIKPTKGIFYLISIANLDQSVXX

SEQ ID NO: 3640 - protein, 36 aa, Artificial Sequence
  GFR-binding peptide
  MOD_RES (1)..(35)..(36): Xaa is C or S
  MOD_RES (13)..(14)..(15)..(16)..(17): Xaa is A or G
  MOD_RES (18)..(19)..(20)..(21): Xaa is A or G or is absent
XGEVVMDRYKKLXXXXXXXXXFYLMSIANLETPVXX

SEQ ID NO: 3641 - protein, 38 aa, Artificial Sequence
  GFR-binding peptide
  MOD_RES (1)..(3)..(38): Xaa is C or S
  MOD_RES (16)..(17)..(18)..(19)..(20): Xaa is A or G
  MOD_RES (21)..(22)..(23)..(24): Xaa is A or G or is absent
XGXEAVSMGEYHYKLXXXXXXXXXKYLVSIPSLKTPVX

SEQ ID NO: 3642 - protein, 42 aa, Artificial Sequence
  GFR-binding peptide
  MOD_RES (2)..(4)..(38)..(39): Xaa is C or S
  MOD_RES (16)..(17)..(18)..(19)..(20): Xaa is A or G
  MOD_RES (21)..(22)..(23)..(24): Xaa is A or G or is absent
HXGXARVVMNRHKRLXXXXXXXXXYYLVSTASLQTPAXXPKP

SEQ ID NO: 3643 - protein, 32 aa, Artificial Sequence
  GFR-binding peptide
  MOD_RES (1)..(1): Xaa is C or S
XARVVMNQYNKLIVNSSDDLYLVSIASLQTPA

SEQ ID NO: 3644 - protein, 38 aa, Artificial Sequence
  GFR-binding peptide
  MOD_RES (1)..(33)..(34): Xaa is C or S
XGEVVMERYKKLVVKDYEDFYLMSIANLETPVXXAKPI

SEQ ID NO: 3645 - protein, 37 aa, Artificial Sequence
  GFR-binding peptide
  MOD_RES (31)..(32): Xaa is C or S
RVVMNQYNKLIVNSSDDLYLVSIASLKTPAXXPKPVY

SEQ ID NO: 3646 - protein, 42 aa, Artificial Sequence
  GFR-binding peptide
  MOD_RES (2)..(36)..(37): Xaa is C or S
  MOD_RES (14)..(15)..(16)..(17)..(18): Xaa is A or G
  MOD_RES (19)..(20)..(21)..(22): Xaa is A or G or is absent
GXGEVVMERHKRLXXXXXXXXXYYLMSTASLETPVXXAKPIS

SEQ ID NO: 3647 - protein, 43 aa, Artificial Sequence
  GFR-binding peptide
  MOD_RES (2)..(4)..(38)..(39): Xaa is C or S
  MOD_RES (16)..(17)..(18)..(19)..(20): Xaa is A or G
  MOD_RES (21)..(22)..(23)..(24): Xaa is A or G or is absent
HXGXARVVMNYHYKLXXXXXXXXXKYLVSIPSLQTPAXXPKPV

SEQ ID NO: 3648 - protein, 38 aa, Artificial Sequence
  GFR-binding peptide
  MOD_RES (2)..(36)..(37): Xaa is C or S
  MOD_RES (14)..(15)..(16)..(17)..(18): Xaa is A or G
  MOD_RES (19)..(20)..(21)..(22): Xaa is A or G or is absent
GXGEVVMERYKKLXXXXXXXXXFYLMSIANLETPVXXA

SEQ ID NO: 3649 - protein, 37 aa, Artificial Sequence
  GFR-binding peptide
  MOD_RES (1)..(34)..(35): Xaa is C or S
  MOD_RES (12)..(13)..(14)..(15)..(16): Xaa is A or G
  MOD_RES (17)..(18)..(19)..(20): Xaa is A or G or is absent
XSKVVMQYNKLXXXXXXXXXLYLISIASLDQPVXXPS

SEQ ID NO: 3650 - protein, 39 aa, Artificial Sequence
  GFR-binding peptide
  MOD_RES (1)..(3)..(35): Xaa is C or S
XGXSRVVMNYHYKLIVNSSDDKYLVSIPSLKTPAXTPKT

SEQ ID NO: 3651 - protein, 35 aa, Artificial Sequence
  GFR-binding peptide
  MOD_RES (1)..(3): Xaa is C or S
  MOD_RES (14)..(15)..(16)..(17)..(18): Xaa is A or G
  MOD_RES (19)..(20)..(21)..(22): Xaa is A or G or is absent
XKXSKVIMYHYKLXXXXXXXXXKYLISIPSLDQSV

SEQ ID NO: 3652 - protein, 31 aa, Artificial Sequence
  GFR-binding peptide
GEVVMDQYNKLVVKENEDLYLMSIASLETPV

SEQ ID NO: 3653 - protein, 37 aa, Artificial Sequence
  GFR-binding peptide
  MOD_RES (2)..(34)..(35): Xaa is C or S
GXGEVVMEQYNKLVVKDYEDLYLMSIASLETPVXXAK

SEQ ID NO: 3654 - protein, 44 aa, Artificial Sequence
  GFR-binding peptide
  MOD_RES (1)..(3)..(38)..(39): Xaa is C or S
  MOD_RES (16)..(17)..(18)..(19)..(20): Xaa is A or G
  MOD_RES (21)..(22)..(23)..(24): Xaa is A or G or is absent
XGXEAVSMGEYHYKLXXXXXXXXXKYLVSIPSLKTPVXXAKGVK

SEQ ID NO: 3655 - protein, 39 aa, Artificial Sequence
  GFR-binding peptide
  MOD_RES (2)..(4)..(39): Xaa is C or S
  MOD_RES (17)..(18)..(19)..(20)..(21): Xaa is A or G
  MOD_RES (22)..(23)..(24)..(25): Xaa is A or G or is absent
RXGXEAVSMGEYHYKLXXXXXXXXXKYLVSIPSLKTPVX

SEQ ID NO: 3656 - protein, 35 aa, Artificial Sequence
  GFR-binding peptide
  MOD_RES (32)..(33): Xaa is C or S
GEVVMDRHKRLVVKENEDYYLMSTASLETPVXXAK

SEQ ID NO: 3657 - protein, 40 aa, Artificial Sequence
  GFR-binding peptide
  MOD_RES (1)..(3)..(34)..(35): Xaa is C or S
XKXSKVVMRHKRLVKPTRGVYYLISTASLDQPVXXPSASA

SEQ ID NO: 3658 - protein, 36 aa, Artificial Sequence
  GFR-binding peptide
  MOD_RES (32)..(33): Xaa is C or S
GEVVMEQYNKLVVKDYEDLYLMSIASLETPVXXAKP

SEQ ID NO: 3659 - protein, 39 aa, Artificial Sequence
  GFR-binding peptide
  MOD_RES (1)..(3)..(34)..(35): Xaa is C or S
XKXSKVVMYHYKLVKPTRGVKYLISIPSLDQPVXXPSAS

SEQ ID NO: 3660 - protein, 32 aa, Artificial Sequence
  GFR-binding peptide
  MOD_RES (32)..(32): Xaa is C or S
GEVVMERHKRLVVKDYEDYYLMSTASLETPVX

SEQ ID NO: 3661 - protein, 36 aa, Artificial Sequence
  GFR-binding peptide
  MOD_RES (1)..(3)..(35)..(36): Xaa is C or S
XGXARVVMNQYNKLIVNSSDDLYLVSIASLQTPAXX

SEQ ID NO: 3662 - protein, 34 aa, Artificial Sequence
  GFR-binding peptide
  MOD_RES (33)..(34): Xaa is C or S
  MOD_RES (11)..(12)..(13)..(14)..(15): Xaa is A or G
  MOD_RES (16)..(17)..(18)..(19): Xaa is A or G or is absent
KVVMNRYKKLXXXXXXXXXFYLVSIANLKTPAXX

SEQ ID NO: 3663 - protein, 37 aa, Artificial Sequence
  GFR-binding peptide
  MOD_RES (2)..(4)..(37): Xaa is C or S
  MOD_RES (15)..(16)..(17)..(18)..(19): Xaa is A or G
  MOD_RES (20)..(21)..(22)..(23): Xaa is A or G or is absent
SXKXSKVVMQYNKLXXXXXXXXXLYLISIASLDQPVX

SEQ ID NO: 3664 - protein, 37 aa, Artificial Sequence
  GFR-binding peptide
  MOD_RES (37)..(37): Xaa is C or S
  MOD_RES (13)..(14)..(15)..(16)..(17): Xaa is A or G
  MOD_RES (18)..(19)..(20)..(21): Xaa is A or G or is absent
ALHDELTRYKKLXXXXXXXXXFYLVSIANLQVQTPRX

SEQ ID NO: 3665 - protein, 35 aa, Artificial Sequence
  GFR-binding peptide
  MOD_RES (1)..(34)..(35): Xaa is C or S
  MOD_RES (12)..(13)..(14)..(15)..(16): Xaa is A or G
  MOD_RES (17)..(18)..(19)..(20): Xaa is A or G or is absent
XSKVIMYHYKLXXXXXXXXXKYLISIPSLDQSVXX

SEQ ID NO: 3666 - protein, 36 aa, Artificial Sequence
  GFR-binding peptide
  MOD_RES (32)..(32): Xaa is C or S
SRVVMNYHYKLIVNSSDDKYLVSIPSLKTPAXTPKT

SEQ ID NO: 3667 - protein, 39 aa, Artificial Sequence
  GFR-binding peptide
  MOD_RES (34)..(35): Xaa is C or S
  MOD_RES (12)..(13)..(14)..(15)..(16): Xaa is A or G
  MOD_RES (17)..(18)..(19)..(20): Xaa is A or G or is absent
AKVVMNYHYKLXXXXXXXXXKYLVSIPSLKTPAXXAKPV

SEQ ID NO: 3668 - protein, 41 aa, Artificial Sequence
  GFR-binding peptide
  MOD_RES (1)..(3)..(35)..(36): Xaa is C or S
XGXGEVVMDRYKKLVVKENEDFYLMSIANLETPVXXAKPIK

SEQ ID NO: 3669 - protein, 34 aa, Artificial Sequence
  GFR-binding peptide
  MOD_RES (33)..(34): Xaa is C or S
  MOD_RES (11)..(12)..(13)..(14)..(15): Xaa is A or G
  MOD_RES (16)..(17)..(18)..(19): Xaa is A or G or is absent
RVVMNRYKKLXXXXXXXXXFYLVSIANLKTPAXX

SEQ ID NO: 3670 - protein, 34 aa, Artificial Sequence
  GFR-binding peptide
  MOD_RES (12)..(13)..(14)..(15)..(16): Xaa is A or G
  MOD_RES (17)..(18)..(19)..(20): Xaa is A or G or is absent
LHDELTRHKRLXXXXXXXXXYYLVSTASLQVQTP

SEQ ID NO: 3671 - protein, 35 aa, Artificial Sequence
  GFR-binding peptide
  MOD_RES (2)..(34)..(35): Xaa is C or S
GXAKVVMNQYNKLIVNNSSDLYLVSIASLKTPAXX

SEQ ID NO: 3672 - protein, 37 aa, Artificial Sequence
  GFR-binding peptide
  MOD_RES (2)..(4)..(36): Xaa is C or S
HXGXSRVVMNRYKKLIVNSSDDFYLVSIANLKTPAXT

SEQ ID NO: 3673 - protein, 37 aa, Artificial Sequence
  GFR-binding peptide
  MOD_RES (1)..(3)..(37): Xaa is C or S
  MOD_RES (15)..(16)..(17)..(18)..(19): Xaa is A or G
  MOD_RES (20)..(21)..(22)..(23): Xaa is A or G or is absent
XGXGEVVMDYHYKLXXXXXXXXXKYLMSIPSLETPVX

SEQ ID NO: 3674 - protein, 39 aa, Artificial Sequence
  GFR-binding peptide
  MOD_RES (1)..(35)..(36): Xaa is C or S
  MOD_RES (13)..(14)..(15)..(16)..(17): Xaa is A or G
  MOD_RES (18)..(19)..(20)..(21): Xaa is A or G or is absent
XAKVVMNQYNKLXXXXXXXXXLYLVSIASLKTPAXXAKP

SEQ ID NO: 3675 - protein, 40 aa, Artificial Sequence
  GFR-binding peptide
  MOD_RES (1)..(35)..(36): Xaa is C or S
  MOD_RES (13)..(14)..(15)..(16)..(17): Xaa is A or G
  MOD_RES (18)..(19)..(20)..(21): Xaa is A or G or is absent
XGEVVMDQYNKLXXXXXXXXXLYLMSIASLETPVXXAKPI

SEQ ID NO: 3676 - protein, 40 aa, Artificial Sequence
  GFR-binding peptide
  MOD_RES (1)..(3)..(35)..(36): Xaa is C or S
XGXGEVVMERHKRLVVKDYEDYYLMSTASLETPVXXAKPI

SEQ ID NO: 3677 - protein, 39 aa, Artificial Sequence
  GFR-binding peptide
  MOD_RES (1)..(3)..(37)..(38): Xaa is C or S
  MOD_RES (15)..(16)..(17)..(18)..(19): Xaa is A or G
  MOD_RES (20)..(21)..(22)..(23): Xaa is A or G or is absent
XGXGEVVMDYHYKLXXXXXXXXXKYLMSIPSLETPVXXA

SEQ ID NO: 3678 - protein, 41 aa, Artificial Sequence
  GFR-binding peptide
  MOD_RES (1)..(3)..(37)..(38): Xaa is C or S
  MOD_RES (15)..(16)..(17)..(18)..(19): Xaa is A or G
  MOD_RES (20)..(21)..(22)..(23): Xaa is A or G or is absent
XGXARVVMNYHYKLXXXXXXXXXKYLVSIPSLQTPAXXPKP

SEQ ID NO: 3679 - protein, 41 aa, Artificial Sequence
  GFR-binding peptide
  MOD_RES (2)..(4)..(41): Xaa is C or S
EXKXALHDELTQYNKLFIPKKRVIELYLVSIASLQVQTPRX

SEQ ID NO: 3680 - protein, 36 aa, Artificial Sequence
  GFR-binding peptide
  MOD_RES (34)..(35): Xaa is C or S
  MOD_RES (12)..(13)..(14)..(15)..(16): Xaa is A or G
  MOD_RES (17)..(18)..(19)..(20): Xaa is A or G or is absent
GEVVMERHKRLXXXXXXXXXYYLMSTASLETPVXXA

SEQ ID NO: 3681 - protein, 39 aa, Artificial Sequence
  GFR-binding peptide
  MOD_RES (1)..(35)..(36): Xaa is C or S
  MOD_RES (13)..(14)..(15)..(16)..(17): Xaa is A or G
  MOD_RES (18)..(19)..(20)..(21): Xaa is A or G or is absent
XSRVVMNYHYKLXXXXXXXXXKYLVSIPSLKTPAXXPKP

SEQ ID NO: 3682 - protein, 34 aa, Artificial Sequence
  GFR-binding peptide
  MOD_RES (1)..(32)..(33): Xaa is C or S
XSKVIMRYKKLIKPTKGIFYLISIANLDQSVXXP

SEQ ID NO: 3683 - protein, 35 aa, Artificial Sequence
  GFR-binding peptide
  MOD_RES (33)..(34): Xaa is C or S
  MOD_RES (11)..(12)..(13)..(14)..(15): Xaa is A or G
  MOD_RES (16)..(17)..(18)..(19): Xaa is A or G or is absent
SKVVMRHKRLXXXXXXXXXYYLISTASLDQPVXXP

SEQ ID NO: 3684 - protein, 38 aa, Artificial Sequence
  GFR-binding peptide
  MOD_RES (2)..(33)..(34): Xaa is C or S
KXSKVIMRHKRLIKPTKGIYYLISTASLDQSVXXPSAS

SEQ ID NO: 3685 - protein, 35 aa, Artificial Sequence
  GFR-binding peptide
  MOD_RES (33)..(34): Xaa is C or S
  MOD_RES (11)..(12)..(13)..(14)..(15): Xaa is A or G
  MOD_RES (16)..(17)..(18)..(19): Xaa is A or G or is absent
EVVMEQYNKLXXXXXXXXXLYLMSIASLETPVXXA

SEQ ID NO: 3686 - protein, 37 aa, Artificial Sequence
  GFR-binding peptide
  MOD_RES (33)..(34): Xaa is C or S
  MOD_RES (11)..(12)..(13)..(14)..(15): Xaa is A or G
  MOD_RES (16)..(17)..(18)..(19): Xaa is A or G or is absent
SRVIMYHYKLXXXXXXXXXKYLISIPSLAQPVXXPAA

SEQ ID NO: 3687 - protein, 38 aa, Artificial Sequence
  GFR-binding peptide
  MOD_RES (1)..(3)..(37)..(38): Xaa is C or S
  MOD_RES (15)..(16)..(17)..(18)..(19): Xaa is A or G
  MOD_RES (20)..(21)..(22)..(23): Xaa is A or G or is absent
XGXGEVVMERYKKLXXXXXXXXXFYLMSIANLETPVXX

SEQ ID NO: 3688 - protein, 38 aa, Artificial Sequence
  GFR-binding peptide
  MOD_RES (2)..(35)..(36): Xaa is C or S
  MOD_RES (13)..(14)..(15)..(16)..(17): Xaa is A or G
  MOD_RES (18)..(19)..(20)..(21): Xaa is A or G or is absent
KXSRVIMQYNKLXXXXXXXXXLYLISIASLAQPVXXPA

SEQ ID NO: 3689 - protein, 41 aa, Artificial Sequence
  GFR-binding peptide
  MOD_RES (2)..(4)..(35)..(36): Xaa is C or S
SXKXSKVIMQYNKLIKPTKGILYLISIASLDQSVXXPSASA

SEQ ID NO: 3690 - protein, 41 aa, Artificial Sequence
  GFR-binding peptide
  MOD_RES (1)..(35)..(36): Xaa is C or S
  MOD_RES (13)..(14)..(15)..(16)..(17): Xaa is A or G
  MOD_RES (18)..(19)..(20)..(21): Xaa is A or G or is absent
XSRVVMNYHYKLXXXXXXXXXKYLVSIPSLKTPAXXPKPVY

SEQ ID NO: 3691 - protein, 40 aa, Artificial Sequence
  GFR-binding peptide
  MOD_RES (1)..(3)..(34)..(35): Xaa is C or S
XKXSRVIMQYNKLVKPKRGVLYLISIASLAQPVXXPAASA

SEQ ID NO: 3692 - protein, 34 aa, Artificial Sequence
  GFR-binding peptide
  MOD_RES (2)..(34): Xaa is C or S
GXGEVVMERYKKLVVKDYEDFYLMSIANLETPVX

SEQ ID NO: 3693 - protein, 38 aa, Artificial Sequence
  GFR-binding peptide
  MOD_RES (1)..(3)..(37)..(38): Xaa is C or S
  MOD_RES (15)..(16)..(17)..(18)..(19): Xaa is A or G
  MOD_RES (20)..(21)..(22)..(23): Xaa is A or G or is absent
XGXGEVVMERHKRLXXXXXXXXXYYLMSTASLETPVXX

SEQ ID NO: 3694 - protein, 33 aa, Artificial Sequence
  GFR-binding peptide
  MOD_RES (12)..(13)..(14)..(15)..(16): Xaa is A or G
  MOD_RES (17)..(18)..(19)..(20): Xaa is A or G or is absent
ARVVMNRHKRLXXXXXXXXXYYLVSTASLQTPA

SEQ ID NO: 3695 - protein, 41 aa, Artificial Sequence
  GFR-binding peptide
  MOD_RES (2)..(35)..(36): Xaa is C or S
  MOD_RES (13)..(14)..(15)..(16)..(17): Xaa is A or G
  MOD_RES (18)..(19)..(20)..(21): Xaa is A or G or is absent
KXSKVVMQYNKLXXXXXXXXXLYLISIASLDQPVXXPSASA

SEQ ID NO: 3696 - protein, 34 aa, Artificial Sequence
  GFR-binding peptide
  MOD_RES (1)..(33)..(34): Xaa is C or S
XARVVMNRYKKLIVNSSDDFYLVSIANLQTPAXX

SEQ ID NO: 3697 - protein, 37 aa, Artificial Sequence
  GFR-binding peptide
  MOD_RES (31)..(32): Xaa is C or S
SRVIMRYKKLVKPKRGVFYLISIANLAQPVXXPAASA

SEQ ID NO: 3698 - protein, 36 aa, Artificial Sequence
  GFR-binding peptide
  MOD_RES (1)..(36): Xaa is C or S
  MOD_RES (14)..(15)..(16)..(17)..(18): Xaa is A or G
  MOD_RES (19)..(20)..(21)..(22): Xaa is A or G or is absent
XEAVSMGERYKKLXXXXXXXXXFYLVSIANLKTPVX

SEQ ID NO: 3699 - protein, 41 aa, Artificial Sequence
  GFR-binding peptide
  MOD_RES (2)..(4)..(37)..(38): Xaa is C or S
RXGXEAVSMGERYKKLTPVGMDDFYLVSIANLKTPVXXAKG

SEQ ID NO: 3700 - protein, 42 aa, Artificial Sequence
  GFR-binding peptide
  MOD_RES (2)..(36)..(37): Xaa is C or S
  MOD_RES (14)..(15)..(16)..(17)..(18): Xaa is A or G
  MOD_RES (19)..(20)..(21)..(22): Xaa is A or G or is absent
GXARVVMNQYNKLXXXXXXXXXLYLVSIASLQTPAXXPKPVT

SEQ ID NO: 3701 - protein, 40 aa, Artificial Sequence
  GFR-binding peptide
  MOD_RES (1)..(38): Xaa is C or S
  MOD_RES (14)..(15)..(16)..(17)..(18): Xaa is A or G
  MOD_RES (19)..(20)..(21)..(22): Xaa is A or G or is absent
XALHDELTQYNKLXXXXXXXXXLYLVSIASLQVQTPRXQV

SEQ ID NO: 3702 - protein, 36 aa, Artificial Sequence
  GFR-binding peptide
  MOD_RES (2)..(4)..(35)..(36): Xaa is C or S
SXKXSKVIMQYNKLIKPTKGILYLISIASLDQSVXX

SEQ ID NO: 3703 - protein, 31 aa, Artificial Sequence
  GFR-binding peptide
ARVVMNYHYKLIVNSSDDKYLVSIPSLQTPA

SEQ ID NO: 3704 - protein, 36 aa, Artificial Sequence
  GFR-binding peptide
  MOD_RES (31)..(32): Xaa is C or S
RVVMNQYNKLIVNSSDDLYLVSIASLKTPAXXPKPV

SEQ ID NO: 3705 - protein, 40 aa, Artificial Sequence
  GFR-binding peptide
  MOD_RES (2)..(34)..(35): Xaa is C or S
GXGEVVMEQYNKLVVKDYEDLYLMSIASLETPVXXAKPIS

SEQ ID NO: 3706 - protein, 33 aa, Artificial Sequence
  GFR-binding peptide
  MOD_RES (32)..(33): Xaa is C or S
GEVVMERYKKLVVKDYEDFYLMSIANLETPVXX

SEQ ID NO: 3707 - protein, 36 aa, Artificial Sequence
  GFR-binding peptide
  MOD_RES (33)..(34): Xaa is C or S
  MOD_RES (11)..(12)..(13)..(14)..(15): Xaa is A or G
  MOD_RES (16)..(17)..(18)..(19): Xaa is A or G or is absent
RVVMNQYNKLXXXXXXXXXLYLVSIASLQTPAXXPK

SEQ ID NO: 3708 - protein, 33 aa, Artificial Sequence
  GFR-binding peptide
  MOD_RES (33)..(33): Xaa is C or S
  MOD_RES (11)..(12)..(13)..(14)..(15): Xaa is A or G
  MOD_RES (16)..(17)..(18)..(19): Xaa is A or G or is absent
EVVMDRHKRLXXXXXXXXXYYLMSTASLETPVX

SEQ ID NO: 3709 - protein, 42 aa, Artificial Sequence
  GFR-binding peptide
  MOD_RES (2)..(4)..(39)..(40): Xaa is C or S
  MOD_RES (17)..(18)..(19)..(20)..(21): Xaa is A or G
  MOD_RES (22)..(23)..(24)..(25): Xaa is A or G or is absent
RXGXEAVSMGEYHYKLXXXXXXXXXKYLVSIPSLKTPVXXAK

SEQ ID NO: 3710 - protein, 37 aa, Artificial Sequence
  GFR-binding peptide
  MOD_RES (2)..(4)..(36)..(37): Xaa is C or S
RXGXGEVVMDRYKKLVVKENEDFYLMSIANLETPVXX

SEQ ID NO: 3711 - protein, 38 aa, Artificial Sequence
  GFR-binding peptide
  MOD_RES (1)..(3)..(36)..(37): Xaa is C or S
  MOD_RES (14)..(15)..(16)..(17)..(18): Xaa is A or G
  MOD_RES (19)..(20)..(21)..(22): Xaa is A or G or is absent
XKXSKVIMQYNKLXXXXXXXXXLYLISIASLDQSVXXP

SEQ ID NO: 3712 - protein, 38 aa, Artificial Sequence
  GFR-binding peptide
  MOD_RES (2)..(4)..(36)..(37): Xaa is C or S
HXGXSRVVMNRHKRLIVNSSDDYYLVSTASLKTPAXXP

SEQ ID NO: 3713 - protein, 45 aa, Artificial Sequence
  GFR-binding peptide
  MOD_RES (2)..(4)..(39)..(40): Xaa is C or S
  MOD_RES (17)..(18)..(19)..(20)..(21): Xaa is A or G
  MOD_RES (22)..(23)..(24)..(25): Xaa is A or G or is absent
RXGXEAVSMGEYHYKLXXXXXXXXXKYLVSIPSLKTPVXXAKGVK

SEQ ID NO: 3714 - protein, 35 aa, Artificial Sequence
  GFR-binding peptide
  MOD_RES (34)..(35): Xaa is C or S
  MOD_RES (12)..(13)..(14)..(15)..(16): Xaa is A or G
  MOD_RES (17)..(18)..(19)..(20): Xaa is A or G or is absent
AKVVMNRHKRLXXXXXXXXXYYLVSTASLKTPAXX

SEQ ID NO: 3715 - protein, 37 aa, Artificial Sequence
  GFR-binding peptide
  MOD_RES (1)..(3): Xaa is C or S
XKXALHDELTRHKRLFIPKKRVIEYYLVSTASLQVQT

SEQ ID NO: 3716 - protein, 36 aa, Artificial Sequence
  GFR-binding peptide
  MOD_RES (31)..(32): Xaa is C or S
SKVVMRYKKLVKPTRGVFYLISIANLDQPVXXPSAS

SEQ ID NO: 3717 - protein, 35 aa, Artificial Sequence
  GFR-binding peptide
  MOD_RES (2)..(4)..(35): Xaa is C or S
SXKXSRVIMRHKRLVKPKRGVYYLISTASLAQPVX

SEQ ID NO: 3718 - protein, 35 aa, Artificial Sequence
  GFR-binding peptide
  MOD_RES (1)..(3)..(35): Xaa is C or S
XGXGEVVMERHKRLVVKDYEDYYLMSTASLETPVX

SEQ ID NO: 3719 - protein, 35 aa, Artificial Sequence
  GFR-binding peptide
  MOD_RES (2)..(4)..(35): Xaa is C or S
SXKXSRVIMYHYKLVKPKRGVKYLISIPSLAQPVX

SEQ ID NO: 3720 - protein, 39 aa, Artificial Sequence
  GFR-binding peptide
  MOD_RES (2)..(4)..(38)..(39): Xaa is C or S
  MOD_RES (16)..(17)..(18)..(19)..(20): Xaa is A or G
  MOD_RES (21)..(22)..(23)..(24): Xaa is A or G or is absent
HXGXARVVMNYHYKLXXXXXXXXXKYLVSIPSLQTPAXX

SEQ ID NO: 3721 - protein, 39 aa, Artificial Sequence
  GFR-binding peptide
  MOD_RES (1)..(3)..(34)..(35): Xaa is C or S
XKXSKVIMYHYKLIKPTKGIKYLISIPSLDQSVXXPSAS

SEQ ID NO: 3722 - protein, 39 aa, Artificial Sequence
  GFR-binding peptide
  MOD_RES (2)..(34)..(35): Xaa is C or S
GXGEVVMDYHYKLVVKENEDKYLMSIPSLETPVXXAKPI

SEQ ID NO: 3723 - protein, 38 aa, Artificial Sequence
  GFR-binding peptide
  MOD_RES (2)..(35)..(36): Xaa is C or S
  MOD_RES (13)..(14)..(15)..(16)..(17): Xaa is A or G
  MOD_RES (18)..(19)..(20)..(21): Xaa is A or G or is absent
KXSKVIMQYNKLXXXXXXXXXLYLISIASLDQSVXXPS

SEQ ID NO: 3724 - protein, 39 aa, Artificial Sequence
  GFR-binding peptide
  MOD_RES (2)..(33)..(34): Xaa is C or S
KXSRVIMYHYKLVKPKRGVKYLISIPSLAQPVXXPAASA

SEQ ID NO: 3725 - protein, 39 aa, Artificial Sequence
  GFR-binding peptide
  MOD_RES (2)..(35)..(36): Xaa is C or S
  MOD_RES (13)..(14)..(15)..(16)..(17): Xaa is A or G
  MOD_RES (18)..(19)..(20)..(21): Xaa is A or G or is absent
KXSRVIMRHKRLXXXXXXXXXYYLISTASLAQPVXXPAA

SEQ ID NO: 3726 - protein, 34 aa, Artificial Sequence
  GFR-binding peptide
  MOD_RES (2)..(2): Xaa is C or S
  MOD_RES (13)..(14)..(15)..(16)..(17): Xaa is A or G
  MOD_RES (18)..(19)..(20)..(21): Xaa is A or G or is absent
KXSKVIMRHKRLXXXXXXXXXYYLISTASLDQSV

SEQ ID NO: 3727 - protein, 40 aa, Artificial Sequence
  GFR-binding peptide
  MOD_RES (1)..(3)..(35): Xaa is C or S
XGXSRVVMNYHYKLIVNSSDDKYLVSIPSLKTPAXTPKTV

SEQ ID NO: 3728 - protein, 36 aa, Artificial Sequence
  GFR-binding peptide
  MOD_RES (1)..(3)..(35)..(36): Xaa is C or S
XGXARVVMNRYKKLIVNSSDDFYLVSIANLQTPAXX

SEQ ID NO: 3729 - protein, 42 aa, Artificial Sequence
  GFR-binding peptide
  MOD_RES (2)..(37)..(38): Xaa is C or S
  MOD_RES (15)..(16)..(17)..(18)..(19): Xaa is A or G
  MOD_RES (20)..(21)..(22)..(23): Xaa is A or G or is absent
GXEAVSMGEYHYKLXXXXXXXXXKYLVSIPSLKTPVXXAKGV

SEQ ID NO: 3730 - protein, 40 aa, Artificial Sequence
  GFR-binding peptide
  MOD_RES (2)..(4)..(36)..(37): Xaa is C or S
RXGXGEVVMERHKRLVVKDYEDYYLMSTASLETPVXXAKP

SEQ ID NO: 3731 - protein, 38 aa, Artificial Sequence
  GFR-binding peptide
  MOD_RES (1)..(35)..(36): Xaa is C or S
  MOD_RES (13)..(14)..(15)..(16)..(17): Xaa is A or G
  MOD_RES (18)..(19)..(20)..(21): Xaa is A or G or is absent
XARVVMNRYKKLXXXXXXXXXFYLVSIANLQTPAXXPK

SEQ ID NO: 3732 - protein, 39 aa, Artificial Sequence
  GFR-binding peptide
  MOD_RES (33)..(34): Xaa is C or S
  MOD_RES (11)..(12)..(13)..(14)..(15): Xaa is A or G
  MOD_RES (16)..(17)..(18)..(19): Xaa is A or G or is absent
EVVMERYKKLXXXXXXXXXFYLMSIANLETPVXXAKPIS

SEQ ID NO: 3733 - protein, 37 aa, Artificial Sequence
  GFR-binding peptide
  MOD_RES (2)..(36)..(37): Xaa is C or S
  MOD_RES (14)..(15)..(16)..(17)..(18): Xaa is A or G
  MOD_RES (19)..(20)..(21)..(22): Xaa is A or G or is absent
GXAKVVMNYHYKLXXXXXXXXXKYLVSIPSLKTPAXX

SEQ ID NO: 3734 - protein, 37 aa, Artificial Sequence
  GFR-binding peptide
  MOD_RES (1)..(3)..(35): Xaa is C or S
XGXSRVVMNRYKKLIVNSSDDFYLVSIANLKTPAXTP

SEQ ID NO: 3735 - protein, 40 aa, Artificial Sequence
  GFR-binding peptide
  MOD_RES (2)..(36)..(37): Xaa is C or S
  MOD_RES (14)..(15)..(16)..(17)..(18): Xaa is A or G
  MOD_RES (19)..(20)..(21)..(22): Xaa is A or G or is absent
GXAKVVMNRYKKLXXXXXXXXXFYLVSIANLKTPAXXAKP

SEQ ID NO: 3736 - protein, 37 aa, Artificial Sequence
  GFR-binding peptide
  MOD_RES (31)..(31): Xaa is C or S
RVVMNYHYKLIVNSSDDKYLVSIPSLKTPAXTPKTVH

SEQ ID NO: 3737 - protein, 33 aa, Artificial Sequence
  GFR-binding peptide
  MOD_RES (1)..(1): Xaa is C or S
XEAVSMGERYKKLTPVGMDDFYLVSIANLKTPV

SEQ ID NO: 3738 - protein, 39 aa, Artificial Sequence
  GFR-binding peptide
  MOD_RES (34)..(35): Xaa is C or S
  MOD_RES (12)..(13)..(14)..(15)..(16): Xaa is A or G
  MOD_RES (17)..(18)..(19)..(20): Xaa is A or G or is absent
GEVVMDRYKKLXXXXXXXXXFYLMSIANLETPVXXAKPI

SEQ ID NO: 3739 - protein, 37 aa, Artificial Sequence
  GFR-binding peptide
  MOD_RES (35)..(36): Xaa is C or S
  MOD_RES (13)..(14)..(15)..(16)..(17): Xaa is A or G
  MOD_RES (18)..(19)..(20)..(21): Xaa is A or G or is absent
EAVSMGEYHYKLXXXXXXXXXKYLVSIPSLKTPVXXA

SEQ ID NO: 3740 - protein, 38 aa, Artificial Sequence
  GFR-binding peptide
  MOD_RES (2)..(35)..(36): Xaa is C or S
GXEAVSMGEYHYKLTPVGMDDKYLVSIPSLKTPVXXAK

SEQ ID NO: 3741 - protein, 40 aa, Artificial Sequence
  GFR-binding peptide
  MOD_RES (1)..(34)..(35): Xaa is C or S
XEAVSMGEQYNKLTPVGMDDLYLVSIASLKTPVXXAKGVK

SEQ ID NO: 3742 - protein, 37 aa, Artificial Sequence
  GFR-binding peptide
  MOD_RES (34)..(35): Xaa is C or S
  MOD_RES (12)..(13)..(14)..(15)..(16): Xaa is A or G
  MOD_RES (17)..(18)..(19)..(20): Xaa is A or G or is absent
AKVVMNQYNKLXXXXXXXXXLYLVSIASLKTPAXXAK

SEQ ID NO: 3743 - protein, 45 aa, Artificial Sequence
  GFR-binding peptide
  MOD_RES (2)..(4)..(41): Xaa is C or S
EXKXALHDELTQYNKLFIPKKRVIELYLVSIASLQVQTPRXQVNR

SEQ ID NO: 3744 - protein, 37 aa, Artificial Sequence
  GFR-binding peptide
  MOD_RES (31)..(32): Xaa is C or S
RVVMNYHYKLIVNSSDDKYLVSIPSLKTPAXXPKPVY

SEQ ID NO: 3745 - protein, 32 aa, Artificial Sequence
  GFR-binding peptide
  MOD_RES (2)..(2): Xaa is C or S
KXSKVVMRHKRLVKPTRGVYYLISTASLDQPV

SEQ ID NO: 3746 - protein, 38 aa, Artificial Sequence
  GFR-binding peptide
  MOD_RES (32)..(33): Xaa is C or S
GEVVMEYHYKLVVKDYEDKYLMSIPSLETPVXXAKPIS

SEQ ID NO: 3747 - protein, 36 aa, Artificial Sequence
  GFR-binding peptide
  MOD_RES (1)..(3): Xaa is C or S
  MOD_RES (15)..(16)..(17)..(18)..(19): Xaa is A or G
  MOD_RES (20)..(21)..(22)..(23): Xaa is A or G or is absent
XGXARVVMNQYNKLXXXXXXXXXLYLVSIASLQTPA

SEQ ID NO: 3748 - protein, 38 aa, Artificial Sequence
  GFR-binding peptide
  MOD_RES (35)..(36): Xaa is C or S
  MOD_RES (13)..(14)..(15)..(16)..(17): Xaa is A or G
  MOD_RES (18)..(19)..(20)..(21): Xaa is A or G or is absent
EAVSMGERYKKLXXXXXXXXXFYLVSIANLKTPVXXAK

SEQ ID NO: 3749 - protein, 37 aa, Artificial Sequence
  GFR-binding peptide
  MOD_RES (2)..(4)..(37): Xaa is C or S
  MOD_RES (15)..(16)..(17)..(18)..(19): Xaa is A or G
  MOD_RES (20)..(21)..(22)..(23): Xaa is A or G or is absent
SXKXSRVIMRYKKLXXXXXXXXXFYLISIANLAQPVX

SEQ ID NO: 3750 - protein, 39 aa, Artificial Sequence
  GFR-binding peptide
  MOD_RES (1)..(3)..(34)..(35): Xaa is C or S
XKXSKVIMRYKKLIKPTKGIFYLISIANLDQSVXXPSAS

SEQ ID NO: 3751 - protein, 36 aa, Artificial Sequence
  GFR-binding peptide
ALHDELTQYNKLFIPKKRVIELYLVSIASLQVQTPR

SEQ ID NO: 3752 - protein, 37 aa, Artificial Sequence
  GFR-binding peptide
  MOD_RES (1)..(35)..(36): Xaa is C or S
  MOD_RES (13)..(14)..(15)..(16)..(17): Xaa is A or G
  MOD_RES (18)..(19)..(20)..(21): Xaa is A or G or is absent
XARVVMNQYNKLXXXXXXXXXLYLVSIASLQTPAXXP

SEQ ID NO: 3753 - protein, 34 aa, Artificial Sequence
  GFR-binding peptide
  MOD_RES (1)..(3): Xaa is C or S
XGXARVVMNYHYKLIVNSSDDKYLVSIPSLQTPA

SEQ ID NO: 3754 - protein, 33 aa, Artificial Sequence
  GFR-binding peptide
  MOD_RES (11)..(12)..(13)..(14)..(15): Xaa is A or G
  MOD_RES (16)..(17)..(18)..(19): Xaa is A or G or is absent
HDELTYHYKLXXXXXXXXXKYLVSIPSLQVQTP

SEQ ID NO: 3755 - protein, 38 aa, Artificial Sequence
  GFR-binding peptide
  MOD_RES (2)..(36)..(37): Xaa is C or S
  MOD_RES (14)..(15)..(16)..(17)..(18): Xaa is A or G
  MOD_RES (19)..(20)..(21)..(22): Xaa is A or G or is absent
GXARVVMNRYKKLXXXXXXXXXFYLVSIANLQTPAXXP

SEQ ID NO: 3756 - protein, 37 aa, Artificial Sequence
  GFR-binding peptide
  MOD_RES (34)..(35): Xaa is C or S
  MOD_RES (12)..(13)..(14)..(15)..(16): Xaa is A or G
  MOD_RES (17)..(18)..(19)..(20): Xaa is A or G or is absent
SRVVMNQYNKLXXXXXXXXXLYLVSIASLKTPAXXPK

SEQ ID NO: 3757 - protein, 40 aa, Artificial Sequence
  GFR-binding peptide
  MOD_RES (1)..(3)..(37)..(38): Xaa is C or S
  MOD_RES (15)..(16)..(17)..(18)..(19): Xaa is A or G
  MOD_RES (20)..(21)..(22)..(23): Xaa is A or G or is absent
XGXAKVVMNRYKKLXXXXXXXXXFYLVSIANLKTPAXXAK

SEQ ID NO: 3758 - protein, 38 aa, Artificial Sequence
  GFR-binding peptide
  MOD_RES (2)..(4)..(38): Xaa is C or S
  MOD_RES (16)..(17)..(18)..(19)..(20): Xaa is A or G
  MOD_RES (21)..(22)..(23)..(24): Xaa is A or G or is absent
RXGXGEVVMERYKKLXXXXXXXXXFYLMSIANLETPVX

SEQ ID NO: 3759 - protein, 41 aa, Artificial Sequence
  GFR-binding peptide
  MOD_RES (2)..(4)..(41): Xaa is C or S
  MOD_RES (17)..(18)..(19)..(20)..(21): Xaa is A or G
  MOD_RES (22)..(23)..(24)..(25): Xaa is A or G or is absent
EXKXALHDELTQYNKLXXXXXXXXXLYLVSIASLQVQTPRX

SEQ ID NO: 3760 - protein, 36 aa, Artificial Sequence
  GFR-binding peptide
  MOD_RES (2)..(35)..(36): Xaa is C or S
  MOD_RES (13)..(14)..(15)..(16)..(17): Xaa is A or G
  MOD_RES (18)..(19)..(20)..(21): Xaa is A or G or is absent
KXSKVVMQYNKLXXXXXXXXXLYLISIASLDQPVXX

SEQ ID NO: 3761 - protein, 37 aa, Artificial Sequence
  GFR-binding peptide
  MOD_RES (31)..(32): Xaa is C or S
EVVMERYKKLVVKDYEDFYLMSIANLETPVXXAKPIS

SEQ ID NO: 3762 - protein, 37 aa, Artificial Sequence
  GFR-binding peptide
  MOD_RES (34)..(35): Xaa is C or S
  MOD_RES (12)..(13)..(14)..(15)..(16): Xaa is A or G
  MOD_RES (17)..(18)..(19)..(20): Xaa is A or G or is absent
SRVVMNRYKKLXXXXXXXXXFYLVSIANLKTPAXXPK

SEQ ID NO: 3763 - protein, 35 aa, Artificial Sequence
  GFR-binding peptide
  MOD_RES (2)..(4): Xaa is C or S
HXGXAKVVMNRYKKLIVNNSSDFYLVSIANLKTPA

SEQ ID NO: 3764 - protein, 38 aa, Artificial Sequence
  GFR-binding peptide
  MOD_RES (35)..(35): Xaa is C or S
  MOD_RES (11)..(12)..(13)..(14)..(15): Xaa is A or G
  MOD_RES (16)..(17)..(18)..(19): Xaa is A or G or is absent
HDELTRYKKLXXXXXXXXXFYLVSIANLQVQTPRXQVN

SEQ ID NO: 3765 - protein, 41 aa, Artificial Sequence
  GFR-binding peptide
  MOD_RES (2)..(36)..(37): Xaa is C or S
  MOD_RES (14)..(15)..(16)..(17)..(18): Xaa is A or G
  MOD_RES (19)..(20)..(21)..(22): Xaa is A or G or is absent
GXARVVMNRYKKLXXXXXXXXXFYLVSIANLQTPAXXPKPV

SEQ ID NO: 3766 - protein, 38 aa, Artificial Sequence
  GFR-binding peptide
  MOD_RES (2)..(4): Xaa is C or S
  MOD_RES (17)..(18)..(19)..(20)..(21): Xaa is A or G
  MOD_RES (22)..(23)..(24)..(25): Xaa is A or G or is absent
RXGXEAVSMGERHKRLXXXXXXXXXYYLVSTASLKTPV

SEQ ID NO: 3767 - protein, 35 aa, Artificial Sequence
  GFR-binding peptide
  MOD_RES (2)..(35): Xaa is C or S
  MOD_RES (13)..(14)..(15)..(16)..(17): Xaa is A or G
  MOD_RES (18)..(19)..(20)..(21): Xaa is A or G or is absent
KXSKVIMYHYKLXXXXXXXXXKYLISIPSLDQSVX

SEQ ID NO: 3768 - protein, 37 aa, Artificial Sequence
  GFR-binding peptide
  MOD_RES (33)..(34): Xaa is C or S
  MOD_RES (11)..(12)..(13)..(14)..(15): Xaa is A or G
  MOD_RES (16)..(17)..(18)..(19): Xaa is A or G or is absent
SKVVMRYKKLXXXXXXXXXFYLISIANLDQPVXXPSA

SEQ ID NO: 3769 - protein, 40 aa, Artificial Sequence
  GFR-binding peptide
  MOD_RES (35)..(36): Xaa is C or S
  MOD_RES (13)..(14)..(15)..(16)..(17): Xaa is A or G
  MOD_RES (18)..(19)..(20)..(21): Xaa is A or G or is absent
EAVSMGEYHYKLXXXXXXXXXKYLVSIPSLKTPVXXAKGV

SEQ ID NO: 3770 - protein, 38 aa, Artificial Sequence
  GFR-binding peptide
  MOD_RES (2)..(34)..(35): Xaa is C or S
GXSRVVMNQYNKLIVNSSDDLYLVSIASLKTPAXXPKP

SEQ ID NO: 3771 - protein, 34 aa, Artificial Sequence
  GFR-binding peptide
  MOD_RES (33)..(34): Xaa is C or S
  MOD_RES (11)..(12)..(13)..(14)..(15): Xaa is A or G
  MOD_RES (16)..(17)..(18)..(19): Xaa is A or G or is absent
RVVMNQYNKLXXXXXXXXXLYLVSIASLQTPAXX

SEQ ID NO: 3772 - protein, 42 aa, Artificial Sequence
  GFR-binding peptide
  MOD_RES (2)..(4)..(37)..(38): Xaa is C or S
RXGXEAVSMGEYHYKLTPVGMDDKYLVSIPSLKTPVXXAKGV

SEQ ID NO: 3773 - protein, 38 aa, Artificial Sequence
  GFR-binding peptide
  MOD_RES (2)..(35)..(36): Xaa is C or S
  MOD_RES (13)..(14)..(15)..(16)..(17): Xaa is A or G
  MOD_RES (18)..(19)..(20)..(21): Xaa is A or G or is absent
KXSRVIMRHKRLXXXXXXXXXYYLISTASLAQPVXXPA

SEQ ID NO: 3774 - protein, 38 aa, Artificial Sequence
  GFR-binding peptide
  MOD_RES (2)..(34)..(35): Xaa is C or S
GXSRVVMNYHYKLIVNSSDDKYLVSIPSLKTPAXXPKP

SEQ ID NO: 3775 - protein, 36 aa, Artificial Sequence
  GFR-binding peptide
ALHDELTRHKRLFIPKKRVIEYYLVSTASLQVQTPR

SEQ ID NO: 3776 - protein, 40 aa, Artificial Sequence
  GFR-binding peptide
  MOD_RES (1)..(3)..(35)..(36): Xaa is C or S
XGXGEVVMDRHKRLVVKENEDYYLMSTASLETPVXXAKPI

SEQ ID NO: 3777 - protein, 36 aa, Artificial Sequence
  GFR-binding peptide
  MOD_RES (1)..(35)..(36): Xaa is C or S
  MOD_RES (13)..(14)..(15)..(16)..(17): Xaa is A or G
  MOD_RES (18)..(19)..(20)..(21): Xaa is A or G or is absent
XGEVVMEQYNKLXXXXXXXXXLYLMSIASLETPVXX

SEQ ID NO: 3778 - protein, 36 aa, Artificial Sequence
  GFR-binding peptide
  MOD_RES (2)..(4)..(36): Xaa is C or S
HXGXAKVVMNRHKRLIVNNSSDYYLVSTASLKTPAX

SEQ ID NO: 3779 - protein, 31 aa, Artificial Sequence
  GFR-binding peptide
  MOD_RES (1)..(1): Xaa is C or S
XSRVIMQYNKLVKPKRGVLYLISIASLAQPV

SEQ ID NO: 3780 - protein, 44 aa, Artificial Sequence
  GFR-binding peptide
  MOD_RES (2)..(4)..(41): Xaa is C or S
EXKXALHDELTRYKKLFIPKKRVIEFYLVSIANLQVQTPRXQVN

SEQ ID NO: 3781 - protein, 39 aa, Artificial Sequence
  GFR-binding peptide
  MOD_RES (1)..(3)..(36)..(37): Xaa is C or S
  MOD_RES (14)..(15)..(16)..(17)..(18): Xaa is A or G
  MOD_RES (19)..(20)..(21)..(22): Xaa is A or G or is absent
XKXSKVVMQYNKLXXXXXXXXXLYLISIASLDQPVXXPS

SEQ ID NO: 3782 - protein, 42 aa, Artificial Sequence
  GFR-binding peptide
  MOD_RES (2)..(36)..(37): Xaa is C or S
  MOD_RES (14)..(15)..(16)..(17)..(18): Xaa is A or G
  MOD_RES (19)..(20)..(21)..(22): Xaa is A or G or is absent
GXAKVVMNYHYKLXXXXXXXXXKYLVSIPSLKTPAXXAKPVA

SEQ ID NO: 3783 - protein, 34 aa, Artificial Sequence
  GFR-binding peptide
  MOD_RES (1)..(34): Xaa is C or S
XEAVSMGERYKKLTPVGMDDFYLVSIANLKTPVX

SEQ ID NO: 3784 - protein, 41 aa, Artificial Sequence
  GFR-binding peptide
  MOD_RES (2)..(4)..(36)..(37): Xaa is C or S
RXGXGEVVMDYHYKLVVKENEDKYLMSIPSLETPVXXAKPI

SEQ ID NO: 3785 - protein, 35 aa, Artificial Sequence
  GFR-binding peptide
  MOD_RES (1)..(3)..(35): Xaa is C or S
XGXARVVMNRHKRLIVNSSDDYYLVSTASLQTPAX

SEQ ID NO: 3786 - protein, 36 aa, Artificial Sequence
  GFR-binding peptide
  MOD_RES (1)..(3): Xaa is C or S
  MOD_RES (15)..(16)..(17)..(18)..(19): Xaa is A or G
  MOD_RES (20)..(21)..(22)..(23): Xaa is A or G or is absent
XGXGEVVMERYKKLXXXXXXXXXFYLMSIANLETPV

SEQ ID NO: 3787 - protein, 35 aa, Artificial Sequence
  GFR-binding peptide
  MOD_RES (1)..(3)..(35): Xaa is C or S
XGXSRVVMNRHKRLIVNSSDDYYLVSTASLKTPAX

SEQ ID NO: 3788 - protein, 35 aa, Artificial Sequence
  GFR-binding peptide
  MOD_RES (2)..(2): Xaa is C or S
  MOD_RES (14)..(15)..(16)..(17)..(18): Xaa is A or G
  MOD_RES (19)..(20)..(21)..(22): Xaa is A or G or is absent
GXGEVVMDQYNKLXXXXXXXXXLYLMSIASLETPV

SEQ ID NO: 3789 - protein, 41 aa, Artificial Sequence
  GFR-binding peptide
  MOD_RES (2)..(4)..(36)..(37): Xaa is C or S
RXGXGEVVMEQYNKLVVKDYEDLYLMSIASLETPVXXAKPI

SEQ ID NO: 3790 - protein, 38 aa, Artificial Sequence
  GFR-binding peptide
  MOD_RES (2)..(36): Xaa is C or S
  MOD_RES (14)..(15)..(16)..(17)..(18): Xaa is A or G
  MOD_RES (19)..(20)..(21)..(22): Xaa is A or G or is absent
GXSRVVMNRYKKLXXXXXXXXXFYLVSIANLKTPAXTP

SEQ ID NO: 3791 - protein, 37 aa, Artificial Sequence
  GFR-binding peptide
  MOD_RES (1)..(3)..(35)..(36): Xaa is C or S
XGXAKVVMNYHYKLIVNNSSDKYLVSIPSLKTPAXXA

SEQ ID NO: 3792 - protein, 33 aa, Artificial Sequence
  GFR-binding peptide
  MOD_RES (1)..(33): Xaa is C or S
XAKVVMNQYNKLIVNNSSDLYLVSIASLKTPAX

SEQ ID NO: 3793 - protein, 38 aa, Artificial Sequence
  GFR-binding peptide
  MOD_RES (33)..(34): Xaa is C or S
  MOD_RES (11)..(12)..(13)..(14)..(15): Xaa is A or G
  MOD_RES (16)..(17)..(18)..(19): Xaa is A or G or is absent
KVVMNRYKKLXXXXXXXXXFYLVSIANLKTPAXXAKPV

SEQ ID NO: 3794 - protein, 31 aa, Artificial Sequence
  GFR-binding peptide
AKVVMNQYNKLIVNNSSDLYLVSIASLKTPA

SEQ ID NO: 3795 - protein, 40 aa, Artificial Sequence
  GFR-binding peptide
  MOD_RES (2)..(36)..(37): Xaa is C or S
  MOD_RES (14)..(15)..(16)..(17)..(18): Xaa is A or G
  MOD_RES (19)..(20)..(21)..(22): Xaa is A or G or is absent
GXGEVVMERYKKLXXXXXXXXXFYLMSIANLETPVXXAKP

SEQ ID NO: 3796 - protein, 43 aa, Artificial Sequence
  GFR-binding peptide
  MOD_RES (1)..(3)..(37)..(38): Xaa is C or S
  MOD_RES (15)..(16)..(17)..(18)..(19): Xaa is A or G
  MOD_RES (20)..(21)..(22)..(23): Xaa is A or G or is absent
XGXGEVVMDYHYKLXXXXXXXXXKYLMSIPSLETPVXXAKPIK

SEQ ID NO: 3797 - protein, 36 aa, Artificial Sequence
  GFR-binding peptide
  MOD_RES (2)..(4)..(36): Xaa is C or S
RXGXGEVVMDQYNKLVVKENEDLYLMSIASLETPVX

SEQ ID NO: 3798 - protein, 40 aa, Artificial Sequence
  GFR-binding peptide
  MOD_RES (2)..(4)..(35)..(36): Xaa is C or S
SXKXSRVIMYHYKLVKPKRGVKYLISIPSLAQPVXXPAAS

SEQ ID NO: 3799 - protein, 33 aa, Artificial Sequence
  GFR-binding peptide
  MOD_RES (33)..(33): Xaa is C or S
  MOD_RES (11)..(12)..(13)..(14)..(15): Xaa is A or G
  MOD_RES (16)..(17)..(18)..(19): Xaa is A or G or is absent
EVVMDYHYKLXXXXXXXXXKYLMSIPSLETPVX

SEQ ID NO: 3800 - protein, 34 aa, Artificial Sequence
  GFR-binding peptide
  MOD_RES (33)..(33): Xaa is C or S
  MOD_RES (11)..(12)..(13)..(14)..(15): Xaa is A or G
  MOD_RES (16)..(17)..(18)..(19): Xaa is A or G or is absent
RVVMNYHYKLXXXXXXXXXKYLVSIPSLKTPAXT

SEQ ID NO: 3801 - protein, 39 aa, Artificial Sequence
  GFR-binding peptide
  MOD_RES (33)..(34): Xaa is C or S
  MOD_RES (11)..(12)..(13)..(14)..(15): Xaa is A or G
  MOD_RES (16)..(17)..(18)..(19): Xaa is A or G or is absent
RVVMNRYKKLXXXXXXXXXFYLVSIANLQTPAXXPKPVT

SEQ ID NO: 3802 - protein, 35 aa, Artificial Sequence
  GFR-binding peptide
  MOD_RES (2)..(4): Xaa is C or S
HXGXARVVMNRHKRLIVNSSDDYYLVSTASLQTPA

SEQ ID NO: 3803 - protein, 34 aa, Artificial Sequence
  GFR-binding peptide
  MOD_RES (1)..(33)..(34): Xaa is C or S
XGEVVMDQYNKLVVKENEDLYLMSIASLETPVXX

SEQ ID NO: 3804 - protein, 42 aa, Artificial Sequence
  GFR-binding peptide
  MOD_RES (2)..(4)..(41): Xaa is C or S
EXKXALHDELTYHYKLFIPKKRVIEKYLVSIPSLQVQTPRXQ

SEQ ID NO: 3805 - protein, 39 aa, Artificial Sequence
  GFR-binding peptide
  MOD_RES (2)..(4)..(37)..(38): Xaa is C or S
  MOD_RES (15)..(16)..(17)..(18)..(19): Xaa is A or G
  MOD_RES (20)..(21)..(22)..(23): Xaa is A or G or is absent
SXKXSKVIMQYNKLXXXXXXXXXLYLISIASLDQSVXXP

SEQ ID NO: 3806 - protein, 38 aa, Artificial Sequence
  GFR-binding peptide
  MOD_RES (1)..(3): Xaa is C or S
  MOD_RES (16)..(17)..(18)..(19)..(20): Xaa is A or G
  MOD_RES (21)..(22)..(23)..(24): Xaa is A or G or is absent
XKXALHDELTRHKRLXXXXXXXXXYYLVSTASLQVQTP

SEQ ID NO: 3807 - protein, 35 aa, Artificial Sequence
  GFR-binding peptide
  MOD_RES (1)..(32)..(33): Xaa is C or S
XSKVVMRHKRLVKPTRGVYYLISTASLDQPVXXPS

SEQ ID NO: 3808 - protein, 36 aa, Artificial Sequence
  GFR-binding peptide
  MOD_RES (1)..(3)..(34)..(35): Xaa is C or S
XKXSRVIMYHYKLVKPKRGVKYLISIPSLAQPVXXP

SEQ ID NO: 3809 - protein, 35 aa, Artificial Sequence
  GFR-binding peptide
  MOD_RES (1)..(34)..(35): Xaa is C or S
  MOD_RES (12)..(13)..(14)..(15)..(16): Xaa is A or G
  MOD_RES (17)..(18)..(19)..(20): Xaa is A or G or is absent
XSKVIMRYKKLXXXXXXXXXFYLISIANLDQSVXX

SEQ ID NO: 3810 - protein, 33 aa, Artificial Sequence
  GFR-binding peptide
  MOD_RES (2)..(2): Xaa is C or S
GXGEVVMDRHKRLVVKENEDYYLMSTASLETPV

SEQ ID NO: 3811 - protein, 42 aa, Artificial Sequence
  GFR-binding peptide
  MOD_RES (1)..(3)..(40): Xaa is C or S
  MOD_RES (16)..(17)..(18)..(19)..(20): Xaa is A or G
  MOD_RES (21)..(22)..(23)..(24): Xaa is A or G or is absent
XKXALHDELTRYKKLXXXXXXXXXFYLVSIANLQVQTPRXQV

SEQ ID NO: 3812 - protein, 39 aa, Artificial Sequence
  GFR-binding peptide
  MOD_RES (1)..(35): Xaa is C or S
  MOD_RES (13)..(14)..(15)..(16)..(17): Xaa is A or G
  MOD_RES (18)..(19)..(20)..(21): Xaa is A or G or is absent
XSRVVMNRHKRLXXXXXXXXXYYLVSTASLKTPAXTPKT

SEQ ID NO: 3813 - protein, 38 aa, Artificial Sequence
  GFR-binding peptide
  MOD_RES (2)..(33)..(34): Xaa is C or S
KXSKVVMRHKRLVKPTRGVYYLISTASLDQPVXXPSAS

SEQ ID NO: 3814 - protein, 40 aa, Artificial Sequence
  GFR-binding peptide
  MOD_RES (1)..(3)..(35)..(36): Xaa is C or S
XGXAKVVMNYHYKLIVNNSSDKYLVSIPSLKTPAXXAKPV

SEQ ID NO: 3815 - protein, 37 aa, Artificial Sequence
  GFR-binding peptide
  MOD_RES (34)..(35): Xaa is C or S
  MOD_RES (12)..(13)..(14)..(15)..(16): Xaa is A or G
  MOD_RES (17)..(18)..(19)..(20): Xaa is A or G or is absent
GEVVMDYHYKLXXXXXXXXXKYLMSIPSLETPVXXAK

SEQ ID NO: 3816 - protein, 38 aa, Artificial Sequence
  GFR-binding peptide
  MOD_RES (2)..(4)..(36)..(37): Xaa is C or S
HXGXAKVVMNQYNKLIVNNSSDLYLVSIASLKTPAXXA

SEQ ID NO: 3817 - protein, 38 aa, Artificial Sequence
  GFR-binding peptide
  MOD_RES (1)..(3)..(36)..(37): Xaa is C or S
  MOD_RES (14)..(15)..(16)..(17)..(18): Xaa is A or G
  MOD_RES (19)..(20)..(21)..(22): Xaa is A or G or is absent
XKXSRVIMQYNKLXXXXXXXXXLYLISIASLAQPVXXP

SEQ ID NO: 3818 - protein, 39 aa, Artificial Sequence
  GFR-binding peptide
  MOD_RES (1)..(33)..(34): Xaa is C or S
XSRVVMNQYNKLIVNSSDDLYLVSIASLKTPAXXPKPVY

SEQ ID NO: 3819 - protein, 40 aa, Artificial Sequence
  GFR-binding peptide
  MOD_RES (36)..(36): Xaa is C or S
  MOD_RES (12)..(13)..(14)..(15)..(16): Xaa is A or G
  MOD_RES (17)..(18)..(19)..(20): Xaa is A or G or is absent
LHDELTQYNKLXXXXXXXXXLYLVSIASLQVQTPRXQVNR

SEQ ID NO: 3820 - protein, 35 aa, Artificial Sequence
  GFR-binding peptide
  MOD_RES (2)..(33)..(34): Xaa is C or S
KXSRVIMRYKKLVKPKRGVFYLISIANLAQPVXXP

SEQ ID NO: 3821 - protein, 31 aa, Artificial Sequence
  GFR-binding peptide
AKVVMNRYKKLIVNNSSDFYLVSIANLKTPA

SEQ ID NO: 3822 - protein, 38 aa, Artificial Sequence
  GFR-binding peptide
  MOD_RES (1)..(32)..(33): Xaa is C or S
XSRVIMYHYKLVKPKRGVKYLISIPSLAQPVXXPAASA

SEQ ID NO: 3823 - protein, 36 aa, Artificial Sequence
  GFR-binding peptide
  MOD_RES (2)..(4)..(36): Xaa is C or S
HXGXSRVVMNRYKKLIVNSSDDFYLVSIANLKTPAX

SEQ ID NO: 3824 - protein, 34 aa, Artificial Sequence
  GFR-binding peptide
  MOD_RES (1)..(3): Xaa is C or S
XGXSRVVMNYHYKLIVNSSDDKYLVSIPSLKTPA

SEQ ID NO: 3825 - protein, 35 aa, Artificial Sequence
  GFR-binding peptide
  MOD_RES (31)..(32): Xaa is C or S
EVVMERYKKLVVKDYEDFYLMSIANLETPVXXAKP

SEQ ID NO: 3826 - protein, 35 aa, Artificial Sequence
  GFR-binding peptide
  MOD_RES (2)..(33)..(34): Xaa is C or S
KXSRVIMYHYKLVKPKRGVKYLISIPSLAQPVXXP

SEQ ID NO: 3827 - protein, 40 aa, Artificial Sequence
  GFR-binding peptide
  MOD_RES (1)..(38): Xaa is C or S
  MOD_RES (14)..(15)..(16)..(17)..(18): Xaa is A or G
  MOD_RES (19)..(20)..(21)..(22): Xaa is A or G or is absent
XALHDELTYHYKLXXXXXXXXXKYLVSIPSLQVQTPRXQV

SEQ ID NO: 3828 - protein, 37 aa, Artificial Sequence
  GFR-binding peptide
  MOD_RES (33)..(34): Xaa is C or S
  MOD_RES (11)..(12)..(13)..(14)..(15): Xaa is A or G
  MOD_RES (16)..(17)..(18)..(19): Xaa is A or G or is absent
EVVMEYHYKLXXXXXXXXXKYLMSIPSLETPVXXAKP

SEQ ID NO: 3829 - protein, 32 aa, Artificial Sequence
  GFR-binding peptide
  MOD_RES (1)..(1): Xaa is C or S
XGEVVMDRYKKLVVKENEDFYLMSIANLETPV

SEQ ID NO: 3830 - protein, 35 aa, Artificial Sequence
  GFR-binding peptide
  MOD_RES (34)..(35): Xaa is C or S
  MOD_RES (12)..(13)..(14)..(15)..(16): Xaa is A or G
  MOD_RES (17)..(18)..(19)..(20): Xaa is A or G or is absent
SRVVMNRHKRLXXXXXXXXXYYLVSTASLKTPAXX

SEQ ID NO: 3831 - protein, 35 aa, Artificial Sequence
  GFR-binding peptide
  MOD_RES (2)..(34)..(35): Xaa is C or S
GXAKVVMNYHYKLIVNNSSDKYLVSIPSLKTPAXX

SEQ ID NO: 3832 - protein, 43 aa, Artificial Sequence
  GFR-binding peptide
  MOD_RES (1)..(3)..(37)..(38): Xaa is C or S
  MOD_RES (15)..(16)..(17)..(18)..(19): Xaa is A or G
  MOD_RES (20)..(21)..(22)..(23): Xaa is A or G or is absent
XGXGEVVMEQYNKLXXXXXXXXXLYLMSIASLETPVXXAKPIS

SEQ ID NO: 3833 - protein, 36 aa, Artificial Sequence
  GFR-binding peptide
  MOD_RES (1)..(35)..(36): Xaa is C or S
  MOD_RES (13)..(14)..(15)..(16)..(17): Xaa is A or G
  MOD_RES (18)..(19)..(20)..(21): Xaa is A or G or is absent
XARVVMNYHYKLXXXXXXXXXKYLVSIPSLQTPAXX

SEQ ID NO: 3834 - protein, 39 aa, Artificial Sequence
  GFR-binding peptide
  MOD_RES (33)..(34): Xaa is C or S
  MOD_RES (11)..(12)..(13)..(14)..(15): Xaa is A or G
  MOD_RES (16)..(17)..(18)..(19): Xaa is A or G or is absent
EVVMDRHKRLXXXXXXXXXYYLMSTASLETPVXXAKPIK

SEQ ID NO: 3835 - protein, 41 aa, Artificial Sequence
  GFR-binding peptide
  MOD_RES (2)..(39): Xaa is C or S
  MOD_RES (15)..(16)..(17)..(18)..(19): Xaa is A or G
  MOD_RES (20)..(21)..(22)..(23): Xaa is A or G or is absent
KXALHDELTRYKKLXXXXXXXXXFYLVSIANLQVQTPRXQV

SEQ ID NO: 3836 - protein, 38 aa, Artificial Sequence
  GFR-binding peptide
  MOD_RES (33)..(34): Xaa is C or S
EAVSMGEYHYKLTPVGMDDKYLVSIPSLKTPVXXAKGV

SEQ ID NO: 3837 - protein, 36 aa, Artificial Sequence
  GFR-binding peptide
  MOD_RES (32)..(33): Xaa is C or S
GEVVMDRHKRLVVKENEDYYLMSTASLETPVXXAKP

SEQ ID NO: 3838 - protein, 40 aa, Artificial Sequence
  GFR-binding peptide
  MOD_RES (1)..(3)..(35)..(36): Xaa is C or S
XGXGEVVMEQYNKLVVKDYEDLYLMSIASLETPVXXAKPI

SEQ ID NO: 3839 - protein, 38 aa, Artificial Sequence
  GFR-binding peptide
  MOD_RES (1)..(33)..(34): Xaa is C or S
XGEVVMEYHYKLVVKDYEDKYLMSIPSLETPVXXAKPI

SEQ ID NO: 3840 - protein, 39 aa, Artificial Sequence
  GFR-binding peptide
  MOD_RES (2)..(34): Xaa is C or S
GXSRVVMNQYNKLIVNSSDDLYLVSIASLKTPAXTPKTV

SEQ ID NO: 3841 - protein, 39 aa, Artificial Sequence
  GFR-binding peptide
  MOD_RES (35)..(35): Xaa is C or S
HDELTRHKRLFIPKKRVIEYYLVSTASLQVQTPRXQVNR

SEQ ID NO: 3842 - protein, 39 aa, Artificial Sequence
  GFR-binding peptide
  MOD_RES (37)..(37): Xaa is C or S
ALHDELTYHYKLFIPKKRVIEKYLVSIPSLQVQTPRXQV

SEQ ID NO: 3843 - protein, 42 aa, Artificial Sequence
  GFR-binding peptide
  MOD_RES (1)..(3)..(36)..(37): Xaa is C or S
  MOD_RES (14)..(15)..(16)..(17)..(18): Xaa is A or G
  MOD_RES (19)..(20)..(21)..(22): Xaa is A or G or is absent
XKXSKVIMYHYKLXXXXXXXXXKYLISIPSLDQSVXXPSASA

SEQ ID NO: 3844 - protein, 35 aa, Artificial Sequence
  GFR-binding peptide
  MOD_RES (1)..(33): Xaa is C or S
XSRVVMNYHYKLIVNSSDDKYLVSIPSLKTPAXTP

SEQ ID NO: 3845 - protein, 40 aa, Artificial Sequence
  GFR-binding peptide
  MOD_RES (2)..(34)..(35): Xaa is C or S
GXARVVMNQYNKLIVNSSDDLYLVSIASLQTPAXXPKPVT

SEQ ID NO: 3846 - protein, 34 aa, Artificial Sequence
  GFR-binding peptide
  MOD_RES (2)..(33)..(34): Xaa is C or S
KXSRVIMRYKKLVKPKRGVFYLISIANLAQPVXX

SEQ ID NO: 3847 - protein, 39 aa, Artificial Sequence
  GFR-binding peptide
  MOD_RES (1)..(3)..(36)..(37): Xaa is C or S
  MOD_RES (14)..(15)..(16)..(17)..(18): Xaa is A or G
  MOD_RES (19)..(20)..(21)..(22): Xaa is A or G or is absent
XKXSKVIMYHYKLXXXXXXXXXKYLISIPSLDQSVXXPS

SEQ ID NO: 3848 - protein, 42 aa, Artificial Sequence
  GFR-binding peptide
  MOD_RES (1)..(3)..(37)..(38): Xaa is C or S
  MOD_RES (15)..(16)..(17)..(18)..(19): Xaa is A or G
  MOD_RES (20)..(21)..(22)..(23): Xaa is A or G or is absent
XGXARVVMNYHYKLXXXXXXXXXKYLVSIPSLQTPAXXPKPV

SEQ ID NO: 3849 - protein, 36 aa, Artificial Sequence
  GFR-binding peptide
  MOD_RES (33)..(34): Xaa is C or S
  MOD_RES (11)..(12)..(13)..(14)..(15): Xaa is A or G
  MOD_RES (16)..(17)..(18)..(19): Xaa is A or G or is absent
EVVMERYKKLXXXXXXXXXFYLMSIANLETPVXXAK

SEQ ID NO: 3850 - protein, 41 aa, Artificial Sequence
  GFR-binding peptide
  MOD_RES (2)..(36)..(37): Xaa is C or S
  MOD_RES (14)..(15)..(16)..(17)..(18): Xaa is A or G
  MOD_RES (19)..(20)..(21)..(22): Xaa is A or G or is absent
GXSRVVMNRHKRLXXXXXXXXXYYLVSTASLKTPAXXPKPV

SEQ ID NO: 3851 - protein, 40 aa, Artificial Sequence
  GFR-binding peptide
  MOD_RES (36)..(36): Xaa is C or S
LHDELTRHKRLFIPKKRVIEYYLVSTASLQVQTPRXQVNR

SEQ ID NO: 3852 - protein, 37 aa, Artificial Sequence
  GFR-binding peptide
  MOD_RES (37)..(37): Xaa is C or S
ALHDELTYHYKLFIPKKRVIEKYLVSIPSLQVQTPRX

SEQ ID NO: 3853 - protein, 31 aa, Artificial Sequence
  GFR-binding peptide
  MOD_RES (31)..(31): Xaa is C or S
EVVMERHKRLVVKDYEDYYLMSTASLETPVX

SEQ ID NO: 3854 - protein, 37 aa, Artificial Sequence
  GFR-binding peptide
  MOD_RES (1)..(35)..(36): Xaa is C or S
  MOD_RES (13)..(14)..(15)..(16)..(17): Xaa is A or G
  MOD_RES (18)..(19)..(20)..(21): Xaa is A or G or is absent
XAKVVMNRYKKLXXXXXXXXXFYLVSIANLKTPAXXA

SEQ ID NO: 3855 - protein, 36 aa, Artificial Sequence
  GFR-binding peptide
  MOD_RES (1)..(3)..(34)..(35): Xaa is C or S
XKXSKVVMRYKKLVKPTRGVFYLISIANLDQPVXXP

SEQ ID NO: 3856 - protein, 37 aa, Artificial Sequence
  GFR-binding peptide
  MOD_RES (2)..(34)..(35): Xaa is C or S
GXARVVMNYHYKLIVNSSDDKYLVSIPSLQTPAXXPK

SEQ ID NO: 3857 - protein, 38 aa, Artificial Sequence
  GFR-binding peptide
  MOD_RES (2)..(36)..(37): Xaa is C or S
  MOD_RES (14)..(15)..(16)..(17)..(18): Xaa is A or G
  MOD_RES (19)..(20)..(21)..(22): Xaa is A or G or is absent
GXARVVMNYHYKLXXXXXXXXXKYLVSIPSLQTPAXXP

SEQ ID NO: 3858 - protein, 39 aa, Artificial Sequence
  GFR-binding peptide
  MOD_RES (2)..(39): Xaa is C or S
KXALHDELTRYKKLFIPKKRVIEFYLVSIANLQVQTPRX

SEQ ID NO: 3859 - protein, 38 aa, Artificial Sequence
  GFR-binding peptide
  MOD_RES (34)..(35): Xaa is C or S
  MOD_RES (12)..(13)..(14)..(15)..(16): Xaa is A or G
  MOD_RES (17)..(18)..(19)..(20): Xaa is A or G or is absent
GEVVMERYKKLXXXXXXXXXFYLMSIANLETPVXXAKP

SEQ ID NO: 3860 - protein, 41 aa, Artificial Sequence
  GFR-binding peptide
  MOD_RES (2)..(4)..(38)..(39): Xaa is C or S
  MOD_RES (16)..(17)..(18)..(19)..(20): Xaa is A or G
  MOD_RES (21)..(22)..(23)..(24): Xaa is A or G or is absent
HXGXAKVVMNRYKKLXXXXXXXXXFYLVSIANLKTPAXXAK

SEQ ID NO: 3861 - protein, 40 aa, Artificial Sequence
  GFR-binding peptide
  MOD_RES (34)..(35): Xaa is C or S
  MOD_RES (12)..(13)..(14)..(15)..(16): Xaa is A or G
  MOD_RES (17)..(18)..(19)..(20): Xaa is A or G or is absent
GEVVMDRYKKLXXXXXXXXXFYLMSIANLETPVXXAKPIK

SEQ ID NO: 3862 - protein, 34 aa, Artificial Sequence
  GFR-binding peptide
  MOD_RES (31)..(32): Xaa is C or S
EVVMERHKRLVVKDYEDYYLMSTASLETPVXXAK

SEQ ID NO: 3863 - protein, 35 aa, Artificial Sequence
  GFR-binding peptide
  MOD_RES (1)..(33): Xaa is C or S
XSRVVMNRYKKLIVNSSDDFYLVSIANLKTPAXTP

SEQ ID NO: 3864 - protein, 42 aa, Artificial Sequence
  GFR-binding peptide
  MOD_RES (2)..(36)..(37): Xaa is C or S
  MOD_RES (14)..(15)..(16)..(17)..(18): Xaa is A or G
  MOD_RES (19)..(20)..(21)..(22): Xaa is A or G or is absent
GXAKVVMNRYKKLXXXXXXXXXFYLVSIANLKTPAXXAKPVA

SEQ ID NO: 3865 - protein, 38 aa, Artificial Sequence
  GFR-binding peptide
  MOD_RES (33)..(34): Xaa is C or S
  MOD_RES (11)..(12)..(13)..(14)..(15): Xaa is A or G
  MOD_RES (16)..(17)..(18)..(19): Xaa is A or G or is absent
SKVVMRHKRLXXXXXXXXXYYLISTASLDQPVXXPSAS

SEQ ID NO: 3866 - protein, 42 aa, Artificial Sequence
  GFR-binding peptide
  MOD_RES (2)..(4)..(37)..(38): Xaa is C or S
  MOD_RES (15)..(16)..(17)..(18)..(19): Xaa is A or G
  MOD_RES (20)..(21)..(22)..(23): Xaa is A or G or is absent
SXKXSRVIMYHYKLXXXXXXXXXKYLISIPSLAQPVXXPAAS

SEQ ID NO: 3867 - protein, 37 aa, Artificial Sequence
  GFR-binding peptide
  MOD_RES (1)..(1): Xaa is C or S
  MOD_RES (14)..(15)..(16)..(17)..(18): Xaa is A or G
  MOD_RES (19)..(20)..(21)..(22): Xaa is A or G or is absent
XALHDELTQYNKLXXXXXXXXXLYLVSIASLQVQTPR

SEQ ID NO: 3868 - protein, 38 aa, Artificial Sequence
  GFR-binding peptide
  MOD_RES (1)..(3)..(35)..(36): Xaa is C or S
XGXARVVMNQYNKLIVNSSDDLYLVSIASLQTPAXXPK

SEQ ID NO: 3869 - protein, 33 aa, Artificial Sequence
  GFR-binding peptide
  MOD_RES (2)..(33): Xaa is C or S
KXSKVVMRHKRLVKPTRGVYYLISTASLDQPVX

SEQ ID NO: 3870 - protein, 39 aa, Artificial Sequence
  GFR-binding peptide
  MOD_RES (1)..(3)..(35)..(36): Xaa is C or S
XGXGEVVMDRHKRLVVKENEDYYLMSTASLETPVXXAKP

SEQ ID NO: 3871 - protein, 37 aa, Artificial Sequence
  GFR-binding peptide
  MOD_RES (1)..(1): Xaa is C or S
XALHDELTRHKRLFIPKKRVIEYYLVSTASLQVQTPR

SEQ ID NO: 3872 - protein, 41 aa, Artificial Sequence
  GFR-binding peptide
  MOD_RES (2)..(36)..(37): Xaa is C or S
  MOD_RES (14)..(15)..(16)..(17)..(18): Xaa is A or G
  MOD_RES (19)..(20)..(21)..(22): Xaa is A or G or is absent
GXAKVVMNRYKKLXXXXXXXXXFYLVSIANLKTPAXXAKPV

SEQ ID NO: 3873 - protein, 35 aa, Artificial Sequence
  GFR-binding peptide
  MOD_RES (1)..(1): Xaa is C or S
XALHDELTYHYKLFIPKKRVIEKYLVSIPSLQVQT

SEQ ID NO: 3874 - protein, 37 aa, Artificial Sequence
  GFR-binding peptide
  MOD_RES (1)..(3)..(36)..(37): Xaa is C or S
  MOD_RES (14)..(15)..(16)..(17)..(18): Xaa is A or G
  MOD_RES (19)..(20)..(21)..(22): Xaa is A or G or is absent
XKXSKVVMYHYKLXXXXXXXXXKYLISIPSLDQPVXX

SEQ ID NO: 3875 - protein, 36 aa, Artificial Sequence
  GFR-binding peptide
  MOD_RES (2)..(4)..(36): Xaa is C or S
HXGXARVVMNRYKKLIVNSSDDFYLVSIANLQTPAX

SEQ ID NO: 3876 - protein, 42 aa, Artificial Sequence
  GFR-binding peptide
  MOD_RES (2)..(4)..(37)..(38): Xaa is C or S
  MOD_RES (15)..(16)..(17)..(18)..(19): Xaa is A or G
  MOD_RES (20)..(21)..(22)..(23): Xaa is A or G or is absent
SXKXSKVVMQYNKLXXXXXXXXXLYLISIASLDQPVXXPSAS

SEQ ID NO: 3877 - protein, 33 aa, Artificial Sequence
  GFR-binding peptide
  MOD_RES (32)..(33): Xaa is C or S
ARVVMNRYKKLIVNSSDDFYLVSIANLQTPAXX

SEQ ID NO: 3878 - protein, 39 aa, Artificial Sequence
  GFR-binding peptide
  MOD_RES (36)..(36): Xaa is C or S
LHDELTRYKKLFIPKKRVIEFYLVSIANLQVQTPRXQVN

SEQ ID NO: 3879 - protein, 37 aa, Artificial Sequence
  GFR-binding peptide
  MOD_RES (1)..(34)..(35): Xaa is C or S
XEAVSMGEQYNKLTPVGMDDLYLVSIASLKTPVXXAK

SEQ ID NO: 3880 - protein, 36 aa, Artificial Sequence
  GFR-binding peptide
  MOD_RES (35)..(35): Xaa is C or S
HDELTRYKKLFIPKKRVIEFYLVSIANLQVQTPRXQ

SEQ ID NO: 3881 - protein, 33 aa, Artificial Sequence
  GFR-binding peptide
  MOD_RES (31)..(32): Xaa is C or S
KVVMNRHKRLIVNNSSDYYLVSTASLKTPAXXA

SEQ ID NO: 3882 - protein, 36 aa, Artificial Sequence
  GFR-binding peptide
  MOD_RES (31)..(32): Xaa is C or S
KVVMNRYKKLIVNNSSDFYLVSIANLKTPAXXAKPV

SEQ ID NO: 3883 - protein, 39 aa, Artificial Sequence
  GFR-binding peptide
  MOD_RES (1)..(3)..(35)..(36): Xaa is C or S
XGXARVVMNQYNKLIVNSSDDLYLVSIASLQTPAXXPKP

SEQ ID NO: 3884 - protein, 40 aa, Artificial Sequence
  GFR-binding peptide
  MOD_RES (1)..(3)..(37)..(38): Xaa is C or S
  MOD_RES (15)..(16)..(17)..(18)..(19): Xaa is A or G
  MOD_RES (20)..(21)..(22)..(23): Xaa is A or G or is absent
XGXGEVVMDYHYKLXXXXXXXXXKYLMSIPSLETPVXXAK

SEQ ID NO: 3885 - protein, 38 aa, Artificial Sequence
  GFR-binding peptide
  MOD_RES (1)..(3)..(35)..(36): Xaa is C or S
XGXGEVVMDRHKRLVVKENEDYYLMSTASLETPVXXAK

SEQ ID NO: 3886 - protein, 33 aa, Artificial Sequence
  GFR-binding peptide
  MOD_RES (2)..(2): Xaa is C or S
GXARVVMNRYKKLIVNSSDDFYLVSIANLQTPA

SEQ ID NO: 3887 - protein, 40 aa, Artificial Sequence
  GFR-binding peptide
  MOD_RES (35)..(36): Xaa is C or S
  MOD_RES (13)..(14)..(15)..(16)..(17): Xaa is A or G
  MOD_RES (18)..(19)..(20)..(21): Xaa is A or G or is absent
EAVSMGERYKKLXXXXXXXXXFYLVSIANLKTPVXXAKGV

SEQ ID NO: 3888 - protein, 38 aa, Artificial Sequence
  GFR-binding peptide
  MOD_RES (1)..(3)..(34)..(35): Xaa is C or S
XKXSRVIMRYKKLVKPKRGVFYLISIANLAQPVXXPAA

SEQ ID NO: 3889 - protein, 34 aa, Artificial Sequence
  GFR-binding peptide
  MOD_RES (1)..(1): Xaa is C or S
  MOD_RES (13)..(14)..(15)..(16)..(17): Xaa is A or G
  MOD_RES (18)..(19)..(20)..(21): Xaa is A or G or is absent
XSRVVMNRHKRLXXXXXXXXXYYLVSTASLKTPA

SEQ ID NO: 3890 - protein, 38 aa, Artificial Sequence
  GFR-binding peptide
  MOD_RES (1)..(35): Xaa is C or S
  MOD_RES (13)..(14)..(15)..(16)..(17): Xaa is A or G
  MOD_RES (18)..(19)..(20)..(21): Xaa is A or G or is absent
XSRVVMNRHKRLXXXXXXXXXYYLVSTASLKTPAXTPK

SEQ ID NO: 3891 - protein, 37 aa, Artificial Sequence
  GFR-binding peptide
  MOD_RES (2)..(4)..(35)..(36): Xaa is C or S
SXKXSKVVMYHYKLVKPTRGVKYLISIPSLDQPVXXP

SEQ ID NO: 3892 - protein, 41 aa, Artificial Sequence
  GFR-binding peptide
  MOD_RES (37)..(37): Xaa is C or S
  MOD_RES (13)..(14)..(15)..(16)..(17): Xaa is A or G
  MOD_RES (18)..(19)..(20)..(21): Xaa is A or G or is absent
ALHDELTRYKKLXXXXXXXXXFYLVSIANLQVQTPRXQVNR

SEQ ID NO: 3893 - protein, 42 aa, Artificial Sequence
  GFR-binding peptide
  MOD_RES (2)..(4)..(39)..(40): Xaa is C or S
  MOD_RES (17)..(18)..(19)..(20)..(21): Xaa is A or G
  MOD_RES (22)..(23)..(24)..(25): Xaa is A or G or is absent
RXGXEAVSMGERHKRLXXXXXXXXXYYLVSTASLKTPVXXAK

SEQ ID NO: 3894 - protein, 34 aa, Artificial Sequence
  GFR-binding peptide
  MOD_RES (33)..(34): Xaa is C or S
  MOD_RES (11)..(12)..(13)..(14)..(15): Xaa is A or G
  MOD_RES (16)..(17)..(18)..(19): Xaa is A or G or is absent
RVVMNYHYKLXXXXXXXXXKYLVSIPSLQTPAXX

SEQ ID NO: 3895 - protein, 40 aa, Artificial Sequence
  GFR-binding peptide
  MOD_RES (1)..(3)..(35)..(36): Xaa is C or S
XGXSRVVMNQYNKLIVNSSDDLYLVSIASLKTPAXXPKPV

SEQ ID NO: 3896 - protein, 34 aa, Artificial Sequence
  GFR-binding peptide
  MOD_RES (1)..(3): Xaa is C or S
XGXGEVVMDRYKKLVVKENEDFYLMSIANLETPV

SEQ ID NO: 3897 - protein, 37 aa, Artificial Sequence
  GFR-binding peptide
  MOD_RES (32)..(33): Xaa is C or S
GEVVMERHKRLVVKDYEDYYLMSTASLETPVXXAKPI

SEQ ID NO: 3898 - protein, 42 aa, Artificial Sequence
  GFR-binding peptide
  MOD_RES (2)..(4)..(36)..(37): Xaa is C or S
HXGXARVVMNRYKKLIVNSSDDFYLVSIANLQTPAXXPKPVT

SEQ ID NO: 3899 - protein, 36 aa, Artificial Sequence
  GFR-binding peptide
  MOD_RES (2)..(34)..(35): Xaa is C or S
GXGEVVMERYKKLVVKDYEDFYLMSIANLETPVXXA

SEQ ID NO: 3900 - protein, 35 aa, Artificial Sequence
  GFR-binding peptide
  MOD_RES (35)..(35): Xaa is C or S
  MOD_RES (11)..(12)..(13)..(14)..(15): Xaa is A or G
  MOD_RES (16)..(17)..(18)..(19): Xaa is A or G or is absent
HDELTQYNKLXXXXXXXXXLYLVSIASLQVQTPRX

SEQ ID NO: 3901 - protein, 37 aa, Artificial Sequence
  GFR-binding peptide
  MOD_RES (2)..(4)..(35)..(36): Xaa is C or S
SXKXSRVIMQYNKLVKPKRGVLYLISIASLAQPVXXP

SEQ ID NO: 3902 - protein, 36 aa, Artificial Sequence
  GFR-binding peptide
  MOD_RES (1)..(33)..(34): Xaa is C or S
XAKVVMNRHKRLIVNNSSDYYLVSTASLKTPAXXAK

SEQ ID NO: 3903 - protein, 36 aa, Artificial Sequence
  GFR-binding peptide
  MOD_RES (31)..(32): Xaa is C or S
RVVMNYHYKLIVNSSDDKYLVSIPSLQTPAXXPKPV

SEQ ID NO: 3904 - protein, 34 aa, Artificial Sequence
  GFR-binding peptide
  MOD_RES (1)..(33)..(34): Xaa is C or S
XSRVVMNYHYKLIVNSSDDKYLVSIPSLKTPAXX

SEQ ID NO: 3905 - protein, 32 aa, Artificial Sequence
  GFR-binding peptide
  MOD_RES (1)..(1): Xaa is C or S
XGEVVMDYHYKLVVKENEDKYLMSIPSLETPV

SEQ ID NO: 3906 - protein, 39 aa, Artificial Sequence
  GFR-binding peptide
  MOD_RES (1)..(3)..(36)..(37): Xaa is C or S
  MOD_RES (14)..(15)..(16)..(17)..(18): Xaa is A or G
  MOD_RES (19)..(20)..(21)..(22): Xaa is A or G or is absent
XKXSRVIMYHYKLXXXXXXXXXKYLISIPSLAQPVXXPA

SEQ ID NO: 3907 - protein, 37 aa, Artificial Sequence
  GFR-binding peptide
  MOD_RES (1)..(3)..(37): Xaa is C or S
  MOD_RES (15)..(16)..(17)..(18)..(19): Xaa is A or G
  MOD_RES (20)..(21)..(22)..(23): Xaa is A or G or is absent
XGXGEVVMDRYKKLXXXXXXXXXFYLMSIANLETPVX

SEQ ID NO: 3908 - protein, 34 aa, Artificial Sequence
  GFR-binding peptide
  MOD_RES (32)..(33): Xaa is C or S
SRVVMNRYKKLIVNSSDDFYLVSIANLKTPAXXP

SEQ ID NO: 3909 - protein, 37 aa, Artificial Sequence
  GFR-binding peptide
  MOD_RES (2)..(35)..(36): Xaa is C or S
  MOD_RES (13)..(14)..(15)..(16)..(17): Xaa is A or G
  MOD_RES (18)..(19)..(20)..(21): Xaa is A or G or is absent
KXSRVIMRHKRLXXXXXXXXXYYLISTASLAQPVXXP

SEQ ID NO: 3910 - protein, 35 aa, Artificial Sequence
  GFR-binding peptide
  MOD_RES (31)..(32): Xaa is C or S
SRVIMRYKKLVKPKRGVFYLISIANLAQPVXXPAA

SEQ ID NO: 3911 - protein, 41 aa, Artificial Sequence
  GFR-binding peptide
  MOD_RES (2)..(35)..(36): Xaa is C or S
  MOD_RES (13)..(14)..(15)..(16)..(17): Xaa is A or G
  MOD_RES (18)..(19)..(20)..(21): Xaa is A or G or is absent
KXSKVVMRYKKLXXXXXXXXXFYLISIANLDQPVXXPSASA

SEQ ID NO: 3912 - protein, 41 aa, Artificial Sequence
  GFR-binding peptide
  MOD_RES (2)..(35)..(36): Xaa is C or S
  MOD_RES (13)..(14)..(15)..(16)..(17): Xaa is A or G
  MOD_RES (18)..(19)..(20)..(21): Xaa is A or G or is absent
KXSKVVMYHYKLXXXXXXXXXKYLISIPSLDQPVXXPSASA

SEQ ID NO: 3913 - protein, 33 aa, Artificial Sequence
  GFR-binding peptide
  MOD_RES (31)..(32): Xaa is C or S
KVVMNYHYKLIVNNSSDKYLVSIPSLKTPAXXA

SEQ ID NO: 3914 - protein, 40 aa, Artificial Sequence
  GFR-binding peptide
  MOD_RES (2)..(35)..(36): Xaa is C or S
GXEAVSMGERYKKLTPVGMDDFYLVSIANLKTPVXXAKGV

SEQ ID NO: 3915 - protein, 40 aa, Artificial Sequence
  GFR-binding peptide
  MOD_RES (36)..(36): Xaa is C or S
  MOD_RES (12)..(13)..(14)..(15)..(16): Xaa is A or G
  MOD_RES (17)..(18)..(19)..(20): Xaa is A or G or is absent
LHDELTRYKKLXXXXXXXXXFYLVSIANLQVQTPRXQVNR

SEQ ID NO: 3916 - protein, 35 aa, Artificial Sequence
  GFR-binding peptide
  MOD_RES (1)..(34)..(35): Xaa is C or S
XEAVSMGERHKRLTPVGMDDYYLVSTASLKTPVXX

SEQ ID NO: 3917 - protein, 37 aa, Artificial Sequence
  GFR-binding peptide
  MOD_RES (33)..(34): Xaa is C or S
  MOD_RES (11)..(12)..(13)..(14)..(15): Xaa is A or G
  MOD_RES (16)..(17)..(18)..(19): Xaa is A or G or is absent
SRVIMRHKRLXXXXXXXXXYYLISTASLAQPVXXPAA

SEQ ID NO: 3918 - protein, 39 aa, Artificial Sequence
  GFR-binding peptide
  MOD_RES (33)..(34): Xaa is C or S
  MOD_RES (11)..(12)..(13)..(14)..(15): Xaa is A or G
  MOD_RES (16)..(17)..(18)..(19): Xaa is A or G or is absent
SKVIMRYKKLXXXXXXXXXFYLISIANLDQSVXXPSASA

SEQ ID NO: 3919 - protein, 34 aa, Artificial Sequence
  GFR-binding peptide
  MOD_RES (2)..(33)..(34): Xaa is C or S
KXSRVIMYHYKLVKPKRGVKYLISIPSLAQPVXX

SEQ ID NO: 3920 - protein, 37 aa, Artificial Sequence
  GFR-binding peptide
  MOD_RES (32)..(32): Xaa is C or S
SRVVMNRYKKLIVNSSDDFYLVSIANLKTPAXTPKTV

SEQ ID NO: 3921 - protein, 41 aa, Artificial Sequence
  GFR-binding peptide
  MOD_RES (1)..(36)..(37): Xaa is C or S
  MOD_RES (14)..(15)..(16)..(17)..(18): Xaa is A or G
  MOD_RES (19)..(20)..(21)..(22): Xaa is A or G or is absent
XEAVSMGERHKRLXXXXXXXXXYYLVSTASLKTPVXXAKGV

SEQ ID NO: 3922 - protein, 43 aa, Artificial Sequence
  GFR-binding peptide
  MOD_RES (2)..(4)..(38): Xaa is C or S
  MOD_RES (16)..(17)..(18)..(19)..(20): Xaa is A or G
  MOD_RES (21)..(22)..(23)..(24): Xaa is A or G or is absent
HXGXSRVVMNRYKKLXXXXXXXXXFYLVSIANLKTPAXTPKTV

SEQ ID NO: 3923 - protein, 37 aa, Artificial Sequence
  GFR-binding peptide
  MOD_RES (2)..(4)..(36): Xaa is C or S
HXGXSRVVMNQYNKLIVNSSDDLYLVSIASLKTPAXT

SEQ ID NO: 3924 - protein, 36 aa, Artificial Sequence
  GFR-binding peptide
  MOD_RES (1)..(35)..(36): Xaa is C or S
  MOD_RES (13)..(14)..(15)..(16)..(17): Xaa is A or G
  MOD_RES (18)..(19)..(20)..(21): Xaa is A or G or is absent
XAKVVMNRHKRLXXXXXXXXXYYLVSTASLKTPAXX

SEQ ID NO: 3925 - protein, 36 aa, Artificial Sequence
  GFR-binding peptide
  MOD_RES (31)..(32): Xaa is C or S
RVVMNRHKRLIVNSSDDYYLVSTASLKTPAXXPKPV

SEQ ID NO: 3926 - protein, 40 aa, Artificial Sequence
  GFR-binding peptide
  MOD_RES (2)..(4)..(38)..(39): Xaa is C or S
  MOD_RES (16)..(17)..(18)..(19)..(20): Xaa is A or G
  MOD_RES (21)..(22)..(23)..(24): Xaa is A or G or is absent
HXGXAKVVMNYHYKLXXXXXXXXXKYLVSIPSLKTPAXXA

SEQ ID NO: 3927 - protein, 38 aa, Artificial Sequence
  GFR-binding peptide
  MOD_RES (33)..(34): Xaa is C or S
  MOD_RES (11)..(12)..(13)..(14)..(15): Xaa is A or G
  MOD_RES (16)..(17)..(18)..(19): Xaa is A or G or is absent
RVVMNRYKKLXXXXXXXXXFYLVSIANLQTPAXXPKPV

SEQ ID NO: 3928 - protein, 41 aa, Artificial Sequence
  GFR-binding peptide
  MOD_RES (2)..(36): Xaa is C or S
  MOD_RES (14)..(15)..(16)..(17)..(18): Xaa is A or G
  MOD_RES (19)..(20)..(21)..(22): Xaa is A or G or is absent
GXSRVVMNRYKKLXXXXXXXXXFYLVSIANLKTPAXTPKTV

SEQ ID NO: 3929 - protein, 42 aa, Artificial Sequence
  GFR-binding peptide
  MOD_RES (2)..(4)..(38): Xaa is C or S
  MOD_RES (16)..(17)..(18)..(19)..(20): Xaa is A or G
  MOD_RES (21)..(22)..(23)..(24): Xaa is A or G or is absent
HXGXSRVVMNYHYKLXXXXXXXXXKYLVSIPSLKTPAXTPKT

SEQ ID NO: 3930 - protein, 35 aa, Artificial Sequence
  GFR-binding peptide
  MOD_RES (1)..(33)..(34): Xaa is C or S
XGEVVMDRYKKLVVKENEDFYLMSIANLETPVXXA

SEQ ID NO: 3931 - protein, 35 aa, Artificial Sequence
  GFR-binding peptide
  MOD_RES (33)..(34): Xaa is C or S
  MOD_RES (11)..(12)..(13)..(14)..(15): Xaa is A or G
  MOD_RES (16)..(17)..(18)..(19): Xaa is A or G or is absent
EVVMDRYKKLXXXXXXXXXFYLMSIANLETPVXXA

SEQ ID NO: 3932 - protein, 35 aa, Artificial Sequence
  GFR-binding peptide
  MOD_RES (1)..(33)..(34): Xaa is C or S
XGEVVMDYHYKLVVKENEDKYLMSIPSLETPVXXA

SEQ ID NO: 3933 - protein, 35 aa, Artificial Sequence
  GFR-binding peptide
  MOD_RES (1)..(3)..(34)..(35): Xaa is C or S
XKXSKVIMRYKKLIKPTKGIFYLISIANLDQSVXX

SEQ ID NO: 3934 - protein, 34 aa, Artificial Sequence
  GFR-binding peptide
  MOD_RES (1)..(1): Xaa is C or S
  MOD_RES (13)..(14)..(15)..(16)..(17): Xaa is A or G
  MOD_RES (18)..(19)..(20)..(21): Xaa is A or G or is absent
XSRVVMNYHYKLXXXXXXXXXKYLVSIPSLKTPA

SEQ ID NO: 3935 - protein, 44 aa, Artificial Sequence
  GFR-binding peptide
  MOD_RES (2)..(4)..(38): Xaa is C or S
  MOD_RES (16)..(17)..(18)..(19)..(20): Xaa is A or G
  MOD_RES (21)..(22)..(23)..(24): Xaa is A or G or is absent
HXGXSRVVMNRHKRLXXXXXXXXXYYLVSTASLKTPAXTPKTVH

SEQ ID NO: 3936 - protein, 32 aa, Artificial Sequence
  GFR-binding peptide
  MOD_RES (31)..(32): Xaa is C or S
EVVMERHKRLVVKDYEDYYLMSTASLETPVXX

SEQ ID NO: 3937 - protein, 39 aa, Artificial Sequence
  GFR-binding peptide
  MOD_RES (2)..(39): Xaa is C or S
  MOD_RES (15)..(16)..(17)..(18)..(19): Xaa is A or G
  MOD_RES (20)..(21)..(22)..(23): Xaa is A or G or is absent
KXALHDELTRYKKLXXXXXXXXXFYLVSIANLQVQTPRX

SEQ ID NO: 3938 - protein, 34 aa, Artificial Sequence
  GFR-binding peptide
  MOD_RES (33)..(34): Xaa is C or S
  MOD_RES (11)..(12)..(13)..(14)..(15): Xaa is A or G
  MOD_RES (16)..(17)..(18)..(19): Xaa is A or G or is absent
EVVMDRHKRLXXXXXXXXXYYLMSTASLETPVXX

SEQ ID NO: 3939 - protein, 43 aa, Artificial Sequence
  GFR-binding peptide
  MOD_RES (1)..(3)..(40): Xaa is C or S
XKXALHDELTRYKKLFIPKKRVIEFYLVSIANLQVQTPRXQVN

SEQ ID NO: 3940 - protein, 33 aa, Artificial Sequence
  GFR-binding peptide
  MOD_RES (1)..(32)..(33): Xaa is C or S
XSRVIMYHYKLVKPKRGVKYLISIPSLAQPVXX

SEQ ID NO: 3941 - protein, 38 aa, Artificial Sequence
  GFR-binding peptide
  MOD_RES (1)..(33): Xaa is C or S
XSRVVMNQYNKLIVNSSDDLYLVSIASLKTPAXTPKTV

SEQ ID NO: 3942 - protein, 38 aa, Artificial Sequence
  GFR-binding peptide
  MOD_RES (2)..(4)..(37)..(38): Xaa is C or S
  MOD_RES (15)..(16)..(17)..(18)..(19): Xaa is A or G
  MOD_RES (20)..(21)..(22)..(23): Xaa is A or G or is absent
SXKXSKVIMQYNKLXXXXXXXXXLYLISIASLDQSVXX

SEQ ID NO: 3943 - protein, 35 aa, Artificial Sequence
  GFR-binding peptide
  MOD_RES (1)..(3)..(34)..(35): Xaa is C or S
XKXSRVIMRYKKLVKPKRGVFYLISIANLAQPVXX

SEQ ID NO: 3944 - protein, 40 aa, Artificial Sequence
  GFR-binding peptide
  MOD_RES (1)..(35)..(36): Xaa is C or S
  MOD_RES (13)..(14)..(15)..(16)..(17): Xaa is A or G
  MOD_RES (18)..(19)..(20)..(21): Xaa is A or G or is absent
XSRVVMNRHKRLXXXXXXXXXYYLVSTASLKTPAXXPKPV

SEQ ID NO: 3945 - protein, 44 aa, Artificial Sequence
  GFR-binding peptide
  MOD_RES (1)..(3)..(40): Xaa is C or S
XKXALHDELTQYNKLFIPKKRVIELYLVSIASLQVQTPRXQVNR

SEQ ID NO: 3946 - protein, 40 aa, Artificial Sequence
  GFR-binding peptide
  MOD_RES (1)..(3)..(36)..(37): Xaa is C or S
  MOD_RES (14)..(15)..(16)..(17)..(18): Xaa is A or G
  MOD_RES (19)..(20)..(21)..(22): Xaa is A or G or is absent
XKXSKVVMRHKRLXXXXXXXXXYYLISTASLDQPVXXPSA

SEQ ID NO: 3947 - protein, 41 aa, Artificial Sequence
  GFR-binding peptide
  MOD_RES (1)..(3)..(35): Xaa is C or S
XGXSRVVMNQYNKLIVNSSDDLYLVSIASLKTPAXTPKTVH

SEQ ID NO: 3948 - protein, 39 aa, Artificial Sequence
  GFR-binding peptide
  MOD_RES (1)..(3)..(37)..(38): Xaa is C or S
  MOD_RES (15)..(16)..(17)..(18)..(19): Xaa is A or G
  MOD_RES (20)..(21)..(22)..(23): Xaa is A or G or is absent
XGXGEVVMDQYNKLXXXXXXXXXLYLMSIASLETPVXXA

SEQ ID NO: 3949 - protein, 39 aa, Artificial Sequence
  GFR-binding peptide
  MOD_RES (2)..(36)..(37): Xaa is C or S
  MOD_RES (14)..(15)..(16)..(17)..(18): Xaa is A or G
  MOD_RES (19)..(20)..(21)..(22): Xaa is A or G or is absent
GXGEVVMERYKKLXXXXXXXXXFYLMSIANLETPVXXAK

SEQ ID NO: 3950 - protein, 34 aa, Artificial Sequence
  GFR-binding peptide
  MOD_RES (1)..(3): Xaa is C or S
XGXGEVVMERYKKLVVKDYEDFYLMSIANLETPV

SEQ ID NO: 3951 - protein, 36 aa, Artificial Sequence
  GFR-binding peptide
  MOD_RES (34)..(35): Xaa is C or S
  MOD_RES (12)..(13)..(14)..(15)..(16): Xaa is A or G
  MOD_RES (17)..(18)..(19)..(20): Xaa is A or G or is absent
ARVVMNRHKRLXXXXXXXXXYYLVSTASLQTPAXXP

SEQ ID NO: 3952 - protein, 40 aa, Artificial Sequence
  GFR-binding peptide
  MOD_RES (34)..(35): Xaa is C or S
  MOD_RES (12)..(13)..(14)..(15)..(16): Xaa is A or G
  MOD_RES (17)..(18)..(19)..(20): Xaa is A or G or is absent
GEVVMDQYNKLXXXXXXXXXLYLMSIASLETPVXXAKPIK

SEQ ID NO: 3953 - protein, 34 aa, Artificial Sequence
  GFR-binding peptide
  MOD_RES (31)..(32): Xaa is C or S
SKVIMRHKRLIKPTKGIYYLISTASLDQSVXXPS

SEQ ID NO: 3954 - protein, 38 aa, Artificial Sequence
  GFR-binding peptide
  MOD_RES (2)..(2): Xaa is C or S
KXALHDELTQYNKLFIPKKRVIELYLVSIASLQVQTPR

SEQ ID NO: 3955 - protein, 39 aa, Artificial Sequence
  GFR-binding peptide
  MOD_RES (2)..(4)..(36)..(37): Xaa is C or S
RXGXGEVVMDRYKKLVVKENEDFYLMSIANLETPVXXAK

SEQ ID NO: 3956 - protein, 43 aa, Artificial Sequence
  GFR-binding peptide
  MOD_RES (2)..(4)..(37)..(38): Xaa is C or S
  MOD_RES (15)..(16)..(17)..(18)..(19): Xaa is A or G
  MOD_RES (20)..(21)..(22)..(23): Xaa is A or G or is absent
SXKXSRVIMQYNKLXXXXXXXXXLYLISIASLAQPVXXPAASA

SEQ ID NO: 3957 - protein, 37 aa, Artificial Sequence
  GFR-binding peptide
  MOD_RES (2)..(4): Xaa is C or S
  MOD_RES (16)..(17)..(18)..(19)..(20): Xaa is A or G
  MOD_RES (21)..(22)..(23)..(24): Xaa is A or G or is absent
HXGXAKVVMNYHYKLXXXXXXXXXKYLVSIPSLKTPA

SEQ ID NO: 3958 - protein, 41 aa, Artificial Sequence
  GFR-binding peptide
  MOD_RES (1)..(3)..(35)..(36): Xaa is C or S
XGXGEVVMEYHYKLVVKDYEDKYLMSIPSLETPVXXAKPIS

SEQ ID NO: 3959 - protein, 38 aa, Artificial Sequence
  GFR-binding peptide
  MOD_RES (2)..(4)..(36): Xaa is C or S
HXGXSRVVMNRYKKLIVNSSDDFYLVSIANLKTPAXTP

SEQ ID NO: 3960 - protein, 38 aa, Artificial Sequence
  GFR-binding peptide
  MOD_RES (33)..(34): Xaa is C or S
  MOD_RES (11)..(12)..(13)..(14)..(15): Xaa is A or G
  MOD_RES (16)..(17)..(18)..(19): Xaa is A or G or is absent
SKVVMQYNKLXXXXXXXXXLYLISIASLDQPVXXPSAS

SEQ ID NO: 3961 - protein, 37 aa, Artificial Sequence
  GFR-binding peptide
  MOD_RES (37)..(37): Xaa is C or S
ALHDELTRYKKLFIPKKRVIEFYLVSIANLQVQTPRX

SEQ ID NO: 3962 - protein, 36 aa, Artificial Sequence
  GFR-binding peptide
  MOD_RES (1)..(3): Xaa is C or S
  MOD_RES (15)..(16)..(17)..(18)..(19): Xaa is A or G
  MOD_RES (20)..(21)..(22)..(23): Xaa is A or G or is absent
XGXGEVVMDRHKRLXXXXXXXXXYYLMSTASLETPV

SEQ ID NO: 3963 - protein, 37 aa, Artificial Sequence
  GFR-binding peptide
  MOD_RES (2)..(34)..(35): Xaa is C or S
GXSRVVMNYHYKLIVNSSDDKYLVSIPSLKTPAXXPK

SEQ ID NO: 3964 - protein, 39 aa, Artificial Sequence
  GFR-binding peptide
  MOD_RES (36)..(36): Xaa is C or S
LHDELTQYNKLFIPKKRVIELYLVSIASLQVQTPRXQVN

SEQ ID NO: 3965 - protein, 34 aa, Artificial Sequence
  GFR-binding peptide
  MOD_RES (1)..(34): Xaa is C or S
  MOD_RES (12)..(13)..(14)..(15)..(16): Xaa is A or G
  MOD_RES (17)..(18)..(19)..(20): Xaa is A or G or is absent
XSKVIMRHKRLXXXXXXXXXYYLISTASLDQSVX

SEQ ID NO: 3966 - protein, 35 aa, Artificial Sequence
  GFR-binding peptide
  MOD_RES (1)..(35): Xaa is C or S
  MOD_RES (13)..(14)..(15)..(16)..(17): Xaa is A or G
  MOD_RES (18)..(19)..(20)..(21): Xaa is A or G or is absent
XSRVVMNYHYKLXXXXXXXXXKYLVSIPSLKTPAX

SEQ ID NO: 3967 - protein, 37 aa, Artificial Sequence
  GFR-binding peptide
  MOD_RES (2)..(4)..(36)..(37): Xaa is C or S
RXGXGEVVMEQYNKLVVKDYEDLYLMSIASLETPVXX

SEQ ID NO: 3968 - protein, 34 aa, Artificial Sequence
  GFR-binding peptide
  MOD_RES (1)..(34): Xaa is C or S
  MOD_RES (12)..(13)..(14)..(15)..(16): Xaa is A or G
  MOD_RES (17)..(18)..(19)..(20): Xaa is A or G or is absent
XSKVIMQYNKLXXXXXXXXXLYLISIASLDQSVX

SEQ ID NO: 3969 - protein, 34 aa, Artificial Sequence
  GFR-binding peptide
  MOD_RES (1)..(33)..(34): Xaa is C or S
XSRVVMNRYKKLIVNSSDDFYLVSIANLKTPAXX

SEQ ID NO: 3970 - protein, 39 aa, Artificial Sequence
  GFR-binding peptide
  MOD_RES (1)..(3)..(37)..(38): Xaa is C or S
  MOD_RES (15)..(16)..(17)..(18)..(19): Xaa is A or G
  MOD_RES (20)..(21)..(22)..(23): Xaa is A or G or is absent
XGXAKVVMNYHYKLXXXXXXXXXKYLVSIPSLKTPAXXA

SEQ ID NO: 3971 - protein, 41 aa, Artificial Sequence
  GFR-binding peptide
  MOD_RES (2)..(4)..(37)..(38): Xaa is C or S
  MOD_RES (15)..(16)..(17)..(18)..(19): Xaa is A or G
  MOD_RES (20)..(21)..(22)..(23): Xaa is A or G or is absent
SXKXSRVIMRHKRLXXXXXXXXXYYLISTASLAQPVXXPAA

SEQ ID NO: 3972 - protein, 39 aa, Artificial Sequence
  GFR-binding peptide
  MOD_RES (33)..(34): Xaa is C or S
  MOD_RES (11)..(12)..(13)..(14)..(15): Xaa is A or G
  MOD_RES (16)..(17)..(18)..(19): Xaa is A or G or is absent
SKVVMQYNKLXXXXXXXXXLYLISIASLDQPVXXPSASA

SEQ ID NO: 3973 - protein, 38 aa, Artificial Sequence
  GFR-binding peptide
  MOD_RES (2)..(34): Xaa is C or S
GXSRVVMNRYKKLIVNSSDDFYLVSIANLKTPAXTPKT

SEQ ID NO: 3974 - protein, 36 aa, Artificial Sequence
  GFR-binding peptide
  MOD_RES (13)..(14)..(15)..(16)..(17): Xaa is A or G
  MOD_RES (18)..(19)..(20)..(21): Xaa is A or G or is absent
ALHDELTRHKRLXXXXXXXXXYYLVSTASLQVQTPR

SEQ ID NO: 3975 - protein, 37 aa, Artificial Sequence
  GFR-binding peptide
  MOD_RES (2)..(4)..(37): Xaa is C or S
  MOD_RES (15)..(16)..(17)..(18)..(19): Xaa is A or G
  MOD_RES (20)..(21)..(22)..(23): Xaa is A or G or is absent
SXKXSKVIMRHKRLXXXXXXXXXYYLISTASLDQSVX

SEQ ID NO: 3976 - protein, 34 aa, Artificial Sequence
  GFR-binding peptide
  MOD_RES (31)..(32): Xaa is C or S
SKVIMRYKKLIKPTKGIFYLISIANLDQSVXXPS

SEQ ID NO: 3977 - protein, 42 aa, Artificial Sequence
  GFR-binding peptide
  MOD_RES (1)..(3)..(40): Xaa is C or S
XKXALHDELTYHYKLFIPKKRVIEKYLVSIPSLQVQTPRXQV

SEQ ID NO: 3978 - protein, 36 aa, Artificial Sequence
  GFR-binding peptide
  MOD_RES (1)..(3)..(34)..(35): Xaa is C or S
XKXSRVIMRYKKLVKPKRGVFYLISIANLAQPVXXP

SEQ ID NO: 3979 - protein, 34 aa, Artificial Sequence
  GFR-binding peptide
  MOD_RES (1)..(3): Xaa is C or S
XGXAKVVMNQYNKLIVNNSSDLYLVSIASLKTPA

SEQ ID NO: 3980 - protein, 36 aa, Artificial Sequence
  GFR-binding peptide
  MOD_RES (13)..(14)..(15)..(16)..(17): Xaa is A or G
  MOD_RES (18)..(19)..(20)..(21): Xaa is A or G or is absent
ALHDELTQYNKLXXXXXXXXXLYLVSIASLQVQTPR

SEQ ID NO: 3981 - protein, 41 aa, Artificial Sequence
  GFR-binding peptide
  MOD_RES (1)..(3)..(37)..(38): Xaa is C or S
  MOD_RES (15)..(16)..(17)..(18)..(19): Xaa is A or G
  MOD_RES (20)..(21)..(22)..(23): Xaa is A or G or is absent
XGXGEVVMDRYKKLXXXXXXXXXFYLMSIANLETPVXXAKP

SEQ ID NO: 3982 - protein, 39 aa, Artificial Sequence
  GFR-binding peptide
  MOD_RES (2)..(35)..(36): Xaa is C or S
  MOD_RES (13)..(14)..(15)..(16)..(17): Xaa is A or G
  MOD_RES (18)..(19)..(20)..(21): Xaa is A or G or is absent
KXSKVVMRYKKLXXXXXXXXXFYLISIANLDQPVXXPSA

SEQ ID NO: 3983 - protein, 38 aa, Artificial Sequence
  GFR-binding peptide
  MOD_RES (1)..(35): Xaa is C or S
  MOD_RES (13)..(14)..(15)..(16)..(17): Xaa is A or G
  MOD_RES (18)..(19)..(20)..(21): Xaa is A or G or is absent
XSRVVMNQYNKLXXXXXXXXXLYLVSIASLKTPAXTPK

SEQ ID NO: 3984 - protein, 38 aa, Artificial Sequence
  GFR-binding peptide
  MOD_RES (33)..(34): Xaa is C or S
  MOD_RES (11)..(12)..(13)..(14)..(15): Xaa is A or G
  MOD_RES (16)..(17)..(18)..(19): Xaa is A or G or is absent
SKVVMYHYKLXXXXXXXXXKYLISIPSLDQPVXXPSAS

SEQ ID NO: 3985 - protein, 36 aa, Artificial Sequence
  GFR-binding peptide
  MOD_RES (1)..(34)..(35): Xaa is C or S
  MOD_RES (12)..(13)..(14)..(15)..(16): Xaa is A or G
  MOD_RES (17)..(18)..(19)..(20): Xaa is A or G or is absent
XSRVIMRYKKLXXXXXXXXXFYLISIANLAQPVXXP

SEQ ID NO: 3986 - protein, 35 aa, Artificial Sequence
  GFR-binding peptide
  MOD_RES (31)..(32): Xaa is C or S
EVVMEQYNKLVVKDYEDLYLMSIASLETPVXXAKP

SEQ ID NO: 3987 - protein, 32 aa, Artificial Sequence
  GFR-binding peptide
  MOD_RES (32)..(32): Xaa is C or S
GEVVMDYHYKLVVKENEDKYLMSIPSLETPVX

SEQ ID NO: 3988 - protein, 40 aa, Artificial Sequence
  GFR-binding peptide
  MOD_RES (1)..(3)..(37)..(38): Xaa is C or S
  MOD_RES (15)..(16)..(17)..(18)..(19): Xaa is A or G
  MOD_RES (20)..(21)..(22)..(23): Xaa is A or G or is absent
XGXSRVVMNRHKRLXXXXXXXXXYYLVSTASLKTPAXXPK

SEQ ID NO: 3989 - protein, 33 aa, Artificial Sequence
  GFR-binding peptide
  MOD_RES (31)..(32): Xaa is C or S
KVVMNQYNKLIVNNSSDLYLVSIASLKTPAXXA

SEQ ID NO: 3990 - protein, 39 aa, Artificial Sequence
  GFR-binding peptide
  MOD_RES (1)..(35): Xaa is C or S
  MOD_RES (13)..(14)..(15)..(16)..(17): Xaa is A or G
  MOD_RES (18)..(19)..(20)..(21): Xaa is A or G or is absent
XSRVVMNQYNKLXXXXXXXXXLYLVSIASLKTPAXTPKT

SEQ ID NO: 3991 - protein, 38 aa, Artificial Sequence
  GFR-binding peptide
  MOD_RES (2)..(4)..(35)..(36): Xaa is C or S
SXKXSKVVMYHYKLVKPTRGVKYLISIPSLDQPVXXPS

SEQ ID NO: 3992 - protein, 37 aa, Artificial Sequence
  GFR-binding peptide
  MOD_RES (33)..(34): Xaa is C or S
  MOD_RES (11)..(12)..(13)..(14)..(15): Xaa is A or G
  MOD_RES (16)..(17)..(18)..(19): Xaa is A or G or is absent
KVVMNRHKRLXXXXXXXXXYYLVSTASLKTPAXXAKP

SEQ ID NO: 3993 - protein, 36 aa, Artificial Sequence
  GFR-binding peptide
  MOD_RES (1)..(1): Xaa is C or S
XALHDELTRYKKLFIPKKRVIEFYLVSIANLQVQTP

SEQ ID NO: 3994 - protein, 39 aa, Artificial Sequence
  GFR-binding peptide
  MOD_RES (2)..(4)..(37)..(38): Xaa is C or S
RXGXEAVSMGERHKRLTPVGMDDYYLVSTASLKTPVXXA

SEQ ID NO: 3995 - protein, 32 aa, Artificial Sequence
  GFR-binding peptide
  MOD_RES (32)..(32): Xaa is C or S
SRVVMNYHYKLIVNSSDDKYLVSIPSLKTPAX

SEQ ID NO: 3996 - protein, 35 aa, Artificial Sequence
  GFR-binding peptide
  MOD_RES (34)..(34): Xaa is C or S
  MOD_RES (12)..(13)..(14)..(15)..(16): Xaa is A or G
  MOD_RES (17)..(18)..(19)..(20): Xaa is A or G or is absent
SRVVMNRHKRLXXXXXXXXXYYLVSTASLKTPAXT

SEQ ID NO: 3997 - protein, 37 aa, Artificial Sequence
  GFR-binding peptide
  MOD_RES (1)..(3)..(35)..(36): Xaa is C or S
XGXGEVVMDQYNKLVVKENEDLYLMSIASLETPVXXA

SEQ ID NO: 3998 - protein, 36 aa, Artificial Sequence
  GFR-binding peptide
  MOD_RES (34)..(35): Xaa is C or S
  MOD_RES (12)..(13)..(14)..(15)..(16): Xaa is A or G
  MOD_RES (17)..(18)..(19)..(20): Xaa is A or G or is absent
GEVVMDRHKRLXXXXXXXXXYYLMSTASLETPVXXA

SEQ ID NO: 3999 - protein, 38 aa, Artificial Sequence
  GFR-binding peptide
  MOD_RES (1)..(3)..(34)..(35): Xaa is C or S
XKXSKVIMYHYKLIKPTKGIKYLISIPSLDQSVXXPSA

SEQ ID NO: 4000 - protein, 36 aa, Artificial Sequence
  GFR-binding peptide
  MOD_RES (31)..(32): Xaa is C or S
RVVMNRYKKLIVNSSDDFYLVSIANLQTPAXXPKPV

SEQ ID NO: 4001 - protein, 41 aa, Artificial Sequence
  GFR-binding peptide
  MOD_RES (2)..(4)..(35)..(36): Xaa is C or S
SXKXSRVIMRHKRLVKPKRGVYYLISTASLAQPVXXPAASA

SEQ ID NO: 4002 - protein, 37 aa, Artificial Sequence
  GFR-binding peptide
  MOD_RES (2)..(4): Xaa is C or S
  MOD_RES (16)..(17)..(18)..(19)..(20): Xaa is A or G
  MOD_RES (21)..(22)..(23)..(24): Xaa is A or G or is absent
RXGXGEVVMDRHKRLXXXXXXXXXYYLMSTASLETPV

SEQ ID NO: 4003 - protein, 39 aa, Artificial Sequence
  GFR-binding peptide
  MOD_RES (1)..(3)..(35)..(36): Xaa is C or S
XGXSRVVMNQYNKLIVNSSDDLYLVSIASLKTPAXXPKP

SEQ ID NO: 4004 - protein, 40 aa, Artificial Sequence
  GFR-binding peptide
  MOD_RES (1)..(3)..(37)..(38): Xaa is C or S
  MOD_RES (15)..(16)..(17)..(18)..(19): Xaa is A or G
  MOD_RES (20)..(21)..(22)..(23): Xaa is A or G or is absent
XGXGEVVMEQYNKLXXXXXXXXXLYLMSIASLETPVXXAK

SEQ ID NO: 4005 - protein, 37 aa, Artificial Sequence
  GFR-binding peptide
  MOD_RES (33)..(34): Xaa is C or S
  MOD_RES (11)..(12)..(13)..(14)..(15): Xaa is A or G
  MOD_RES (16)..(17)..(18)..(19): Xaa is A or G or is absent
EVVMERHKRLXXXXXXXXXYYLMSTASLETPVXXAKP

SEQ ID NO: 4006 - protein, 37 aa, Artificial Sequence
  GFR-binding peptide
  MOD_RES (1)..(3)..(34)..(35): Xaa is C or S
XKXSKVIMYHYKLIKPTKGIKYLISIPSLDQSVXXPS

SEQ ID NO: 4007 - protein, 36 aa, Artificial Sequence
  GFR-binding peptide
  MOD_RES (1)..(32)..(33): Xaa is C or S
XSRVIMRYKKLVKPKRGVFYLISIANLAQPVXXPAA

SEQ ID NO: 4008 - protein, 42 aa, Artificial Sequence
  GFR-binding peptide
  MOD_RES (1)..(3)..(36)..(37): Xaa is C or S
XGXEAVSMGERHKRLTPVGMDDYYLVSTASLKTPVXXAKGVK

SEQ ID NO: 4009 - protein, 36 aa, Artificial Sequence
  GFR-binding peptide
  MOD_RES (1)..(35)..(36): Xaa is C or S
  MOD_RES (13)..(14)..(15)..(16)..(17): Xaa is A or G
  MOD_RES (18)..(19)..(20)..(21): Xaa is A or G or is absent
XARVVMNRHKRLXXXXXXXXXYYLVSTASLQTPAXX

SEQ ID NO: 4010 - protein, 41 aa, Artificial Sequence
  GFR-binding peptide
  MOD_RES (2)..(4)..(39)..(40): Xaa is C or S
  MOD_RES (17)..(18)..(19)..(20)..(21): Xaa is A or G
  MOD_RES (22)..(23)..(24)..(25): Xaa is A or G or is absent
RXGXEAVSMGERYKKLXXXXXXXXXFYLVSIANLKTPVXXA

SEQ ID NO: 4011 - protein, 36 aa, Artificial Sequence
  GFR-binding peptide
  MOD_RES (2)..(34)..(35): Xaa is C or S
GXAKVVMNRYKKLIVNNSSDFYLVSIANLKTPAXXA

SEQ ID NO: 4012 - protein, 38 aa, Artificial Sequence
  GFR-binding peptide
  MOD_RES (2)..(33)..(34): Xaa is C or S
KXSRVIMYHYKLVKPKRGVKYLISIPSLAQPVXXPAAS

SEQ ID NO: 4013 - protein, 34 aa, Artificial Sequence
  GFR-binding peptide
  MOD_RES (2)..(2): Xaa is C or S
  MOD_RES (13)..(14)..(15)..(16)..(17): Xaa is A or G
  MOD_RES (18)..(19)..(20)..(21): Xaa is A or G or is absent
KXSKVIMQYNKLXXXXXXXXXLYLISIASLDQSV

SEQ ID NO: 4014 - protein, 38 aa, Artificial Sequence
  GFR-binding peptide
  MOD_RES (1)..(3)..(35)..(36): Xaa is C or S
XGXSRVVMNQYNKLIVNSSDDLYLVSIASLKTPAXXPK

SEQ ID NO: 4015 - protein, 39 aa, Artificial Sequence
  GFR-binding peptide
  MOD_RES (33)..(34): Xaa is C or S
  MOD_RES (11)..(12)..(13)..(14)..(15): Xaa is A or G
  MOD_RES (16)..(17)..(18)..(19): Xaa is A or G or is absent
SKVVMRHKRLXXXXXXXXXYYLISTASLDQPVXXPSASA

SEQ ID NO: 4016 - protein, 37 aa, Artificial Sequence
  GFR-binding peptide
  MOD_RES (1)..(32)..(33): Xaa is C or S
XSKVVMQYNKLVKPTRGVLYLISIASLDQPVXXPSAS

SEQ ID NO: 4017 - protein, 39 aa, Artificial Sequence
  GFR-binding peptide
  MOD_RES (1)..(35)..(36): Xaa is C or S
  MOD_RES (13)..(14)..(15)..(16)..(17): Xaa is A or G
  MOD_RES (18)..(19)..(20)..(21): Xaa is A or G or is absent
XSRVVMNRYKKLXXXXXXXXXFYLVSIANLKTPAXXPKP

SEQ ID NO: 4018 - protein, 42 aa, Artificial Sequence
  GFR-binding peptide
  MOD_RES (2)..(4)..(37)..(38): Xaa is C or S
  MOD_RES (15)..(16)..(17)..(18)..(19): Xaa is A or G
  MOD_RES (20)..(21)..(22)..(23): Xaa is A or G or is absent
SXKXSKVIMRHKRLXXXXXXXXXYYLISTASLDQSVXXPSAS

SEQ ID NO: 4019 - protein, 38 aa, Artificial Sequence
  GFR-binding peptide
  MOD_RES (1)..(38): Xaa is C or S
XALHDELTYHYKLFIPKKRVIEKYLVSIPSLQVQTPRX

SEQ ID NO: 4020 - protein, 34 aa, Artificial Sequence
  GFR-binding peptide
  MOD_RES (33)..(33): Xaa is C or S
  MOD_RES (11)..(12)..(13)..(14)..(15): Xaa is A or G
  MOD_RES (16)..(17)..(18)..(19): Xaa is A or G or is absent
RVVMNQYNKLXXXXXXXXXLYLVSIASLKTPAXT

SEQ ID NO: 4021 - protein, 37 aa, Artificial Sequence
  GFR-binding peptide
  MOD_RES (1)..(3)..(34)..(35): Xaa is C or S
XKXSKVIMRHKRLIKPTKGIYYLISTASLDQSVXXPS

SEQ ID NO: 4022 - protein, 36 aa, Artificial Sequence
  GFR-binding peptide
  MOD_RES (1)..(35)..(36): Xaa is C or S
  MOD_RES (13)..(14)..(15)..(16)..(17): Xaa is A or G
  MOD_RES (18)..(19)..(20)..(21): Xaa is A or G or is absent
XGEVVMERHKRLXXXXXXXXXYYLMSTASLETPVXX

SEQ ID NO: 4023 - protein, 38 aa, Artificial Sequence
  GFR-binding peptide
  MOD_RES (2)..(4)..(37)..(38): Xaa is C or S
RXGXEAVSMGEYHYKLTPVGMDDKYLVSIPSLKTPVXX

SEQ ID NO: 4024 - protein, 37 aa, Artificial Sequence
  GFR-binding peptide
  MOD_RES (1)..(3)..(35)..(36): Xaa is C or S
XGXARVVMNRYKKLIVNSSDDFYLVSIANLQTPAXXP

SEQ ID NO: 4025 - protein, 37 aa, Artificial Sequence
  GFR-binding peptide
  MOD_RES (2)..(36)..(37): Xaa is C or S
  MOD_RES (14)..(15)..(16)..(17)..(18): Xaa is A or G
  MOD_RES (19)..(20)..(21)..(22): Xaa is A or G or is absent
GXARVVMNRYKKLXXXXXXXXXFYLVSIANLQTPAXX

SEQ ID NO: 4026 - protein, 42 aa, Artificial Sequence
  GFR-binding peptide
  MOD_RES (2)..(4)..(36)..(37): Xaa is C or S
RXGXGEVVMDQYNKLVVKENEDLYLMSIASLETPVXXAKPIK

SEQ ID NO: 4027 - protein, 40 aa, Artificial Sequence
  GFR-binding peptide
  MOD_RES (37)..(37): Xaa is C or S
ALHDELTRHKRLFIPKKRVIEYYLVSTASLQVQTPRXQVN

SEQ ID NO: 4028 - protein, 33 aa, Artificial Sequence
  GFR-binding peptide
  MOD_RES (11)..(12)..(13)..(14)..(15): Xaa is A or G
  MOD_RES (16)..(17)..(18)..(19): Xaa is A or G or is absent
HDELTQYNKLXXXXXXXXXLYLVSIASLQVQTP

SEQ ID NO: 4029 - protein, 36 aa, Artificial Sequence
  GFR-binding peptide
  MOD_RES (33)..(34): Xaa is C or S
EAVSMGEYHYKLTPVGMDDKYLVSIPSLKTPVXXAK

SEQ ID NO: 4030 - protein, 36 aa, Artificial Sequence
  GFR-binding peptide
  MOD_RES (1)..(36): Xaa is C or S
  MOD_RES (14)..(15)..(16)..(17)..(18): Xaa is A or G
  MOD_RES (19)..(20)..(21)..(22): Xaa is A or G or is absent
XEAVSMGEYHYKLXXXXXXXXXKYLVSIPSLKTPVX

SEQ ID NO: 4031 - protein, 32 aa, Artificial Sequence
  GFR-binding peptide
  MOD_RES (1)..(1): Xaa is C or S
XAKVVMNQYNKLIVNNSSDLYLVSIASLKTPA

SEQ ID NO: 4032 - protein, 34 aa, Artificial Sequence
  GFR-binding peptide
  MOD_RES (2)..(34): Xaa is C or S
GXGEVVMERHKRLVVKDYEDYYLMSTASLETPVX

SEQ ID NO: 4033 - protein, 41 aa, Artificial Sequence
  GFR-binding peptide
  MOD_RES (1)..(3)..(37)..(38): Xaa is C or S
  MOD_RES (15)..(16)..(17)..(18)..(19): Xaa is A or G
  MOD_RES (20)..(21)..(22)..(23): Xaa is A or G or is absent
XGXARVVMNRYKKLXXXXXXXXXFYLVSIANLQTPAXXPKP

SEQ ID NO: 4034 - protein, 33 aa, Artificial Sequence
  GFR-binding peptide
  MOD_RES (1)..(1): Xaa is C or S
  MOD_RES (12)..(13)..(14)..(15)..(16): Xaa is A or G
  MOD_RES (17)..(18)..(19)..(20): Xaa is A or G or is absent
XSRVIMYHYKLXXXXXXXXXKYLISIPSLAQPV

SEQ ID NO: 4035 - protein, 40 aa, Artificial Sequence
  GFR-binding peptide
  MOD_RES (1)..(34)..(35): Xaa is C or S
XEAVSMGEYHYKLTPVGMDDKYLVSIPSLKTPVXXAKGVK

SEQ ID NO: 4036 - protein, 35 aa, Artificial Sequence
  GFR-binding peptide
  MOD_RES (33)..(34): Xaa is C or S
  MOD_RES (11)..(12)..(13)..(14)..(15): Xaa is A or G
  MOD_RES (16)..(17)..(18)..(19): Xaa is A or G or is absent
RVVMNYHYKLXXXXXXXXXKYLVSIPSLQTPAXXP

SEQ ID NO: 4037 - protein, 37 aa, Artificial Sequence
  GFR-binding peptide
  MOD_RES (2)..(35)..(36): Xaa is C or S
  MOD_RES (13)..(14)..(15)..(16)..(17): Xaa is A or G
  MOD_RES (18)..(19)..(20)..(21): Xaa is A or G or is absent
KXSKVVMYHYKLXXXXXXXXXKYLISIPSLDQPVXXP

SEQ ID NO: 4038 - protein, 44 aa, Artificial Sequence
  GFR-binding peptide
  MOD_RES (2)..(4)..(38)..(39): Xaa is C or S
  MOD_RES (16)..(17)..(18)..(19)..(20): Xaa is A or G
  MOD_RES (21)..(22)..(23)..(24): Xaa is A or G or is absent
RXGXGEVVMDRHKRLXXXXXXXXXYYLMSTASLETPVXXAKPIK

SEQ ID NO: 4039 - protein, 39 aa, Artificial Sequence
  GFR-binding peptide
  MOD_RES (1)..(34)..(35): Xaa is C or S
XEAVSMGEQYNKLTPVGMDDLYLVSIASLKTPVXXAKGV

SEQ ID NO: 4040 - protein, 43 aa, Artificial Sequence
  GFR-binding peptide
  MOD_RES (1)..(3)..(37)..(38): Xaa is C or S
  MOD_RES (15)..(16)..(17)..(18)..(19): Xaa is A or G
  MOD_RES (20)..(21)..(22)..(23): Xaa is A or G or is absent
XGXSRVVMNRHKRLXXXXXXXXXYYLVSTASLKTPAXXPKPVY

SEQ ID NO: 4041 - protein, 38 aa, Artificial Sequence
  GFR-binding peptide
  MOD_RES (1)..(34)..(35): Xaa is C or S
  MOD_RES (12)..(13)..(14)..(15)..(16): Xaa is A or G
  MOD_RES (17)..(18)..(19)..(20): Xaa is A or G or is absent
XSRVIMYHYKLXXXXXXXXXKYLISIPSLAQPVXXPAA

SEQ ID NO: 4042 - protein, 42 aa, Artificial Sequence
  GFR-binding peptide
  MOD_RES (2)..(4)..(38)..(39): Xaa is C or S
  MOD_RES (16)..(17)..(18)..(19)..(20): Xaa is A or G
  MOD_RES (21)..(22)..(23)..(24): Xaa is A or G or is absent
RXGXGEVVMDQYNKLXXXXXXXXXLYLMSIASLETPVXXAKP

SEQ ID NO: 4043 - protein, 36 aa, Artificial Sequence
  GFR-binding peptide
  MOD_RES (36)..(36): Xaa is C or S
LHDELTQYNKLFIPKKRVIELYLVSIASLQVQTPRX

SEQ ID NO: 4044 - protein, 33 aa, Artificial Sequence
  GFR-binding peptide
  MOD_RES (1)..(32)..(33): Xaa is C or S
XSRVIMRHKRLVKPKRGVYYLISTASLAQPVXX

SEQ ID NO: 4045 - protein, 36 aa, Artificial Sequence
  GFR-binding peptide
  MOD_RES (2)..(2): Xaa is C or S
  MOD_RES (15)..(16)..(17)..(18)..(19): Xaa is A or G
  MOD_RES (20)..(21)..(22)..(23): Xaa is A or G or is absent
GXEAVSMGEYHYKLXXXXXXXXXKYLVSIPSLKTPV

SEQ ID NO: 4046 - protein, 37 aa, Artificial Sequence
  GFR-binding peptide
  MOD_RES (1)..(3)..(36)..(37): Xaa is C or S
XGXEAVSMGERHKRLTPVGMDDYYLVSTASLKTPVXX

SEQ ID NO: 4047 - protein, 40 aa, Artificial Sequence
  GFR-binding peptide
  MOD_RES (2)..(4)..(38)..(39): Xaa is C or S
  MOD_RES (16)..(17)..(18)..(19)..(20): Xaa is A or G
  MOD_RES (21)..(22)..(23)..(24): Xaa is A or G or is absent
RXGXGEVVMDQYNKLXXXXXXXXXLYLMSIASLETPVXXA

SEQ ID NO: 4048 - protein, 37 aa, Artificial Sequence
  GFR-binding peptide
  MOD_RES (37)..(37): Xaa is C or S
  MOD_RES (13)..(14)..(15)..(16)..(17): Xaa is A or G
  MOD_RES (18)..(19)..(20)..(21): Xaa is A or G or is absent
ALHDELTYHYKLXXXXXXXXXKYLVSIPSLQVQTPRX

SEQ ID NO: 4049 - protein, 40 aa, Artificial Sequence
  GFR-binding peptide
  MOD_RES (1)..(35)..(36): Xaa is C or S
  MOD_RES (13)..(14)..(15)..(16)..(17): Xaa is A or G
  MOD_RES (18)..(19)..(20)..(21): Xaa is A or G or is absent
XSRVVMNQYNKLXXXXXXXXXLYLVSIASLKTPAXXPKPV

SEQ ID NO: 4050 - protein, 40 aa, Artificial Sequence
  GFR-binding peptide
  MOD_RES (2)..(35)..(36): Xaa is C or S
  MOD_RES (13)..(14)..(15)..(16)..(17): Xaa is A or G
  MOD_RES (18)..(19)..(20)..(21): Xaa is A or G or is absent
KXSKVVMRYKKLXXXXXXXXXFYLISIANLDQPVXXPSAS

SEQ ID NO: 4051 - protein, 41 aa, Artificial Sequence
  GFR-binding peptide
  MOD_RES (2)..(39): Xaa is C or S
KXALHDELTRYKKLFIPKKRVIEFYLVSIANLQVQTPRXQV

SEQ ID NO: 4052 - protein, 35 aa, Artificial Sequence
  GFR-binding peptide
  MOD_RES (34)..(35): Xaa is C or S
  MOD_RES (12)..(13)..(14)..(15)..(16): Xaa is A or G
  MOD_RES (17)..(18)..(19)..(20): Xaa is A or G or is absent
GEVVMERHKRLXXXXXXXXXYYLMSTASLETPVXX

SEQ ID NO: 4053 - protein, 36 aa, Artificial Sequence
  GFR-binding peptide
  MOD_RES (2)..(36): Xaa is C or S
  MOD_RES (14)..(15)..(16)..(17)..(18): Xaa is A or G
  MOD_RES (19)..(20)..(21)..(22): Xaa is A or G or is absent
GXGEVVMERHKRLXXXXXXXXXYYLMSTASLETPVX

SEQ ID NO: 4054 - protein, 39 aa, Artificial Sequence
  GFR-binding peptide
  MOD_RES (33)..(34): Xaa is C or S
  MOD_RES (11)..(12)..(13)..(14)..(15): Xaa is A or G
  MOD_RES (16)..(17)..(18)..(19): Xaa is A or G or is absent
KVVMNRYKKLXXXXXXXXXFYLVSIANLKTPAXXAKPVA

SEQ ID NO: 4055 - protein, 42 aa, Artificial Sequence
  GFR-binding peptide
  MOD_RES (1)..(36)..(37): Xaa is C or S
  MOD_RES (14)..(15)..(16)..(17)..(18): Xaa is A or G
  MOD_RES (19)..(20)..(21)..(22): Xaa is A or G or is absent
XEAVSMGERYKKLXXXXXXXXXFYLVSIANLKTPVXXAKGVK

SEQ ID NO: 4056 - protein, 40 aa, Artificial Sequence
  GFR-binding peptide
  MOD_RES (1)..(34)..(35): Xaa is C or S
  MOD_RES (12)..(13)..(14)..(15)..(16): Xaa is A or G
  MOD_RES (17)..(18)..(19)..(20): Xaa is A or G or is absent
XSRVIMRHKRLXXXXXXXXXYYLISTASLAQPVXXPAASA

SEQ ID NO: 4057 - protein, 35 aa, Artificial Sequence
  GFR-binding peptide
  MOD_RES (1)..(3): Xaa is C or S
  MOD_RES (14)..(15)..(16)..(17)..(18): Xaa is A or G
  MOD_RES (19)..(20)..(21)..(22): Xaa is A or G or is absent
XKXSRVIMQYNKLXXXXXXXXXLYLISIASLAQPV

SEQ ID NO: 4058 - protein, 38 aa, Artificial Sequence
  GFR-binding peptide
  MOD_RES (2)..(4)..(36)..(37): Xaa is C or S
RXGXGEVVMDRYKKLVVKENEDFYLMSIANLETPVXXA

SEQ ID NO: 4059 - protein, 36 aa, Artificial Sequence
  GFR-binding peptide
  MOD_RES (2)..(4): Xaa is C or S
  MOD_RES (15)..(16)..(17)..(18)..(19): Xaa is A or G
  MOD_RES (20)..(21)..(22)..(23): Xaa is A or G or is absent
SXKXSKVIMQYNKLXXXXXXXXXLYLISIASLDQSV

SEQ ID NO: 4060 - protein, 35 aa, Artificial Sequence
  GFR-binding peptide
  MOD_RES (2)..(34): Xaa is C or S
GXSRVVMNQYNKLIVNSSDDLYLVSIASLKTPAXT

SEQ ID NO: 4061 - protein, 34 aa, Artificial Sequence
  GFR-binding peptide
  MOD_RES (31)..(31): Xaa is C or S
RVVMNRHKRLIVNSSDDYYLVSTASLKTPAXTPK

SEQ ID NO: 4062 - protein, 40 aa, Artificial Sequence
  GFR-binding peptide
  MOD_RES (1)..(3)..(37)..(38): Xaa is C or S
  MOD_RES (15)..(16)..(17)..(18)..(19): Xaa is A or G
  MOD_RES (20)..(21)..(22)..(23): Xaa is A or G or is absent
XGXARVVMNYHYKLXXXXXXXXXKYLVSIPSLQTPAXXPK

SEQ ID NO: 4063 - protein, 37 aa, Artificial Sequence
  GFR-binding peptide
  MOD_RES (1)..(34)..(35): Xaa is C or S
  MOD_RES (12)..(13)..(14)..(15)..(16): Xaa is A or G
  MOD_RES (17)..(18)..(19)..(20): Xaa is A or G or is absent
XSRVIMYHYKLXXXXXXXXXKYLISIPSLAQPVXXPA

SEQ ID NO: 4064 - protein, 32 aa, Artificial Sequence
  GFR-binding peptide
  MOD_RES (2)..(2): Xaa is C or S
KXSRVIMRYKKLVKPKRGVFYLISIANLAQPV

SEQ ID NO: 4065 - protein, 33 aa, Artificial Sequence
  GFR-binding peptide
  MOD_RES (33)..(33): Xaa is C or S
  MOD_RES (11)..(12)..(13)..(14)..(15): Xaa is A or G
  MOD_RES (16)..(17)..(18)..(19): Xaa is A or G or is absent
EVVMDQYNKLXXXXXXXXXLYLMSIASLETPVX

SEQ ID NO: 4066 - protein, 35 aa, Artificial Sequence
  GFR-binding peptide
  MOD_RES (1)..(32)..(33): Xaa is C or S
XSKVIMYHYKLIKPTKGIKYLISIPSLDQSVXXPS

SEQ ID NO: 4067 - protein, 35 aa, Artificial Sequence
  GFR-binding peptide
  MOD_RES (32)..(33): Xaa is C or S
AKVVMNQYNKLIVNNSSDLYLVSIASLKTPAXXAK

SEQ ID NO: 4068 - protein, 34 aa, Artificial Sequence
  GFR-binding peptide
  MOD_RES (34)..(34): Xaa is C or S
  MOD_RES (12)..(13)..(14)..(15)..(16): Xaa is A or G
  MOD_RES (17)..(18)..(19)..(20): Xaa is A or G or is absent
GEVVMERHKRLXXXXXXXXXYYLMSTASLETPVX

SEQ ID NO: 4069 - protein, 35 aa, Artificial Sequence
  GFR-binding peptide
  MOD_RES (33)..(34): Xaa is C or S
  MOD_RES (11)..(12)..(13)..(14)..(15): Xaa is A or G
  MOD_RES (16)..(17)..(18)..(19): Xaa is A or G or is absent
KVVMNYHYKLXXXXXXXXXKYLVSIPSLKTPAXXA

SEQ ID NO: 4070 - protein, 40 aa, Artificial Sequence
  GFR-binding peptide
  MOD_RES (2)..(4)..(38)..(39): Xaa is C or S
  MOD_RES (16)..(17)..(18)..(19)..(20): Xaa is A or G
  MOD_RES (21)..(22)..(23)..(24): Xaa is A or G or is absent
HXGXSRVVMNQYNKLXXXXXXXXXLYLVSIASLKTPAXXP

SEQ ID NO: 4071 - protein, 35 aa, Artificial Sequence
  GFR-binding peptide
  MOD_RES (32)..(33): Xaa is C or S
SRVVMNRHKRLIVNSSDDYYLVSTASLKTPAXXPK

SEQ ID NO: 4072 - protein, 33 aa, Artificial Sequence
  GFR-binding peptide
LHDELTRYKKLFIPKKRVIEFYLVSIANLQVQT

SEQ ID NO: 4073 - protein, 39 aa, Artificial Sequence
  GFR-binding peptide
  MOD_RES (1)..(35)..(36): Xaa is C or S
  MOD_RES (13)..(14)..(15)..(16)..(17): Xaa is A or G
  MOD_RES (18)..(19)..(20)..(21): Xaa is A or G or is absent
XGEVVMDRYKKLXXXXXXXXXFYLMSIANLETPVXXAKP

SEQ ID NO: 4074 - protein, 38 aa, Artificial Sequence
  GFR-binding peptide
  MOD_RES (2)..(4): Xaa is C or S
  MOD_RES (17)..(18)..(19)..(20)..(21): Xaa is A or G
  MOD_RES (22)..(23)..(24)..(25): Xaa is A or G or is absent
RXGXEAVSMGEQYNKLXXXXXXXXXLYLVSIASLKTPV

SEQ ID NO: 4075 - protein, 39 aa, Artificial Sequence
  GFR-binding peptide
  MOD_RES (1)..(33)..(34): Xaa is C or S
XGEVVMDQYNKLVVKENEDLYLMSIASLETPVXXAKPIK

SEQ ID NO: 4076 - protein, 43 aa, Artificial Sequence
  GFR-binding peptide
  MOD_RES (2)..(4)..(41): Xaa is C or S
EXKXALHDELTYHYKLFIPKKRVIEKYLVSIPSLQVQTPRXQV

SEQ ID NO: 4077 - protein, 37 aa, Artificial Sequence
  GFR-binding peptide
  MOD_RES (1)..(32)..(33): Xaa is C or S
XSRVIMYHYKLVKPKRGVKYLISIPSLAQPVXXPAAS

SEQ ID NO: 4078 - protein, 39 aa, Artificial Sequence
  GFR-binding peptide
  MOD_RES (1)..(3)..(36)..(37): Xaa is C or S
  MOD_RES (14)..(15)..(16)..(17)..(18): Xaa is A or G
  MOD_RES (19)..(20)..(21)..(22): Xaa is A or G or is absent
XKXSKVVMRHKRLXXXXXXXXXYYLISTASLDQPVXXPS

SEQ ID NO: 4079 - protein, 39 aa, Artificial Sequence
  GFR-binding peptide
  MOD_RES (2)..(4)..(38)..(39): Xaa is C or S
  MOD_RES (16)..(17)..(18)..(19)..(20): Xaa is A or G
  MOD_RES (21)..(22)..(23)..(24): Xaa is A or G or is absent
HXGXAKVVMNYHYKLXXXXXXXXXKYLVSIPSLKTPAXX

SEQ ID NO: 4080 - protein, 41 aa, Artificial Sequence
  GFR-binding peptide
  MOD_RES (35)..(36): Xaa is C or S
  MOD_RES (13)..(14)..(15)..(16)..(17): Xaa is A or G
  MOD_RES (18)..(19)..(20)..(21): Xaa is A or G or is absent
EAVSMGERYKKLXXXXXXXXXFYLVSIANLKTPVXXAKGVK

SEQ ID NO: 4081 - protein, 40 aa, Artificial Sequence
  GFR-binding peptide
  MOD_RES (2)..(4)..(36)..(37): Xaa is C or S
HXGXSRVVMNRYKKLIVNSSDDFYLVSIANLKTPAXXPKP

SEQ ID NO: 4082 - protein, 35 aa, Artificial Sequence
  GFR-binding peptide
  MOD_RES (33)..(34): Xaa is C or S
  MOD_RES (11)..(12)..(13)..(14)..(15): Xaa is A or G
  MOD_RES (16)..(17)..(18)..(19): Xaa is A or G or is absent
SKVVMQYNKLXXXXXXXXXLYLISIASLDQPVXXP

SEQ ID NO: 4083 - protein, 38 aa, Artificial Sequence
  GFR-binding peptide
  MOD_RES (1)..(3)..(34)..(35): Xaa is C or S
XKXSKVIMRHKRLIKPTKGIYYLISTASLDQSVXXPSA

SEQ ID NO: 4084 - protein, 37 aa, Artificial Sequence
  GFR-binding peptide
  MOD_RES (2)..(4): Xaa is C or S
  MOD_RES (16)..(17)..(18)..(19)..(20): Xaa is A or G
  MOD_RES (21)..(22)..(23)..(24): Xaa is A or G or is absent
HXGXARVVMNYHYKLXXXXXXXXXKYLVSIPSLQTPA

SEQ ID NO: 4085 - protein, 33 aa, Artificial Sequence
  GFR-binding peptide
  MOD_RES (12)..(13)..(14)..(15)..(16): Xaa is A or G
  MOD_RES (17)..(18)..(19)..(20): Xaa is A or G or is absent
GEVVMERHKRLXXXXXXXXXYYLMSTASLETPV

SEQ ID NO: 4086 - protein, 36 aa, Artificial Sequence
  GFR-binding peptide
  MOD_RES (1)..(3): Xaa is C or S
  MOD_RES (15)..(16)..(17)..(18)..(19): Xaa is A or G
  MOD_RES (20)..(21)..(22)..(23): Xaa is A or G or is absent
XGXSRVVMNRYKKLXXXXXXXXXFYLVSIANLKTPA

SEQ ID NO: 4087 - protein, 38 aa, Artificial Sequence
  GFR-binding peptide
  MOD_RES (34)..(35): Xaa is C or S
  MOD_RES (12)..(13)..(14)..(15)..(16): Xaa is A or G
  MOD_RES (17)..(18)..(19)..(20): Xaa is A or G or is absent
GEVVMEQYNKLXXXXXXXXXLYLMSIASLETPVXXAKP

SEQ ID NO: 4088 - protein, 30 aa, Artificial Sequence
  GFR-binding peptide
SKVIMQYNKLIKPTKGILYLISIASLDQSV

SEQ ID NO: 4089 - protein, 38 aa, Artificial Sequence
  GFR-binding peptide
  MOD_RES (1)..(3)..(37)..(38): Xaa is C or S
  MOD_RES (15)..(16)..(17)..(18)..(19): Xaa is A or G
  MOD_RES (20)..(21)..(22)..(23): Xaa is A or G or is absent
XGXARVVMNQYNKLXXXXXXXXXLYLVSIASLQTPAXX

SEQ ID NO: 4090 - protein, 36 aa, Artificial Sequence
  GFR-binding peptide
  MOD_RES (33)..(34): Xaa is C or S
  MOD_RES (11)..(12)..(13)..(14)..(15): Xaa is A or G
  MOD_RES (16)..(17)..(18)..(19): Xaa is A or G or is absent
SRVIMRYKKLXXXXXXXXXFYLISIANLAQPVXXPA

SEQ ID NO: 4091 - protein, 39 aa, Artificial Sequence
  GFR-binding peptide
  MOD_RES (2)..(34): Xaa is C or S
GXSRVVMNYHYKLIVNSSDDKYLVSIPSLKTPAXTPKTV

SEQ ID NO: 4092 - protein, 35 aa, Artificial Sequence
  GFR-binding peptide
  MOD_RES (32)..(32): Xaa is C or S
SRVVMNRHKRLIVNSSDDYYLVSTASLKTPAXTPK

SEQ ID NO: 4093 - protein, 38 aa, Artificial Sequence
  GFR-binding peptide
  MOD_RES (2)..(4)..(36)..(37): Xaa is C or S
HXGXARVVMNRHKRLIVNSSDDYYLVSTASLQTPAXXP

SEQ ID NO: 4094 - protein, 38 aa, Artificial Sequence
  GFR-binding peptide
  MOD_RES (2)..(34)..(35): Xaa is C or S
GXGEVVMDQYNKLVVKENEDLYLMSIASLETPVXXAKP

SEQ ID NO: 4095 - protein, 41 aa, Artificial Sequence
  GFR-binding peptide
  MOD_RES (1)..(38): Xaa is C or S
XALHDELTQYNKLFIPKKRVIELYLVSIASLQVQTPRXQVN

SEQ ID NO: 4096 - protein, 40 aa, Artificial Sequence
  GFR-binding peptide
  MOD_RES (1)..(36)..(37): Xaa is C or S
  MOD_RES (14)..(15)..(16)..(17)..(18): Xaa is A or G
  MOD_RES (19)..(20)..(21)..(22): Xaa is A or G or is absent
XEAVSMGERHKRLXXXXXXXXXYYLVSTASLKTPVXXAKG

SEQ ID NO: 4097 - protein, 42 aa, Artificial Sequence
  GFR-binding peptide
  MOD_RES (2)..(4)..(41): Xaa is C or S
  MOD_RES (17)..(18)..(19)..(20)..(21): Xaa is A or G
  MOD_RES (22)..(23)..(24)..(25): Xaa is A or G or is absent
EXKXALHDELTYHYKLXXXXXXXXXKYLVSIPSLQVQTPRXQ

SEQ ID NO: 4098 - protein, 40 aa, Artificial Sequence
  GFR-binding peptide
  MOD_RES (1)..(3)..(34)..(35): Xaa is C or S
XKXSKVIMRYKKLIKPTKGIFYLISIANLDQSVXXPSASA

SEQ ID NO: 4099 - protein, 38 aa, Artificial Sequence
  GFR-binding peptide
  MOD_RES (1)..(33)..(34): Xaa is C or S
XAKVVMNQYNKLIVNNSSDLYLVSIASLKTPAXXAKPV

SEQ ID NO: 4100 - protein, 34 aa, Artificial Sequence
  GFR-binding peptide
  MOD_RES (1)..(34): Xaa is C or S
  MOD_RES (12)..(13)..(14)..(15)..(16): Xaa is A or G
  MOD_RES (17)..(18)..(19)..(20): Xaa is A or G or is absent
XSRVIMRYKKLXXXXXXXXXFYLISIANLAQPVX

SEQ ID NO: 4101 - protein, 38 aa, Artificial Sequence
  GFR-binding peptide
  MOD_RES (1)..(32)..(33): Xaa is C or S
XSKVIMRYKKLIKPTKGIFYLISIANLDQSVXXPSASA

SEQ ID NO: 4102 - protein, 37 aa, Artificial Sequence
  GFR-binding peptide
  MOD_RES (2)..(37): Xaa is C or S
  MOD_RES (15)..(16)..(17)..(18)..(19): Xaa is A or G
  MOD_RES (20)..(21)..(22)..(23): Xaa is A or G or is absent
GXEAVSMGERYKKLXXXXXXXXXFYLVSIANLKTPVX

SEQ ID NO: 4103 - protein, 36 aa, Artificial Sequence
  GFR-binding peptide
  MOD_RES (1)..(35)..(36): Xaa is C or S
  MOD_RES (13)..(14)..(15)..(16)..(17): Xaa is A or G
  MOD_RES (18)..(19)..(20)..(21): Xaa is A or G or is absent
XAKVVMNQYNKLXXXXXXXXXLYLVSIASLKTPAXX

SEQ ID NO: 4104 - protein, 39 aa, Artificial Sequence
  GFR-binding peptide
  MOD_RES (1)..(3)..(34)..(35): Xaa is C or S
XKXSKVVMRYKKLVKPTRGVFYLISIANLDQPVXXPSAS

SEQ ID NO: 4105 - protein, 38 aa, Artificial Sequence
  GFR-binding peptide
  MOD_RES (2)..(35)..(36): Xaa is C or S
GXEAVSMGERYKKLTPVGMDDFYLVSIANLKTPVXXAK

SEQ ID NO: 4106 - protein, 37 aa, Artificial Sequence
  GFR-binding peptide
  MOD_RES (36)..(36): Xaa is C or S
  MOD_RES (12)..(13)..(14)..(15)..(16): Xaa is A or G
  MOD_RES (17)..(18)..(19)..(20): Xaa is A or G or is absent
LHDELTYHYKLXXXXXXXXXKYLVSIPSLQVQTPRXQ

SEQ ID NO: 4107 - protein, 34 aa, Artificial Sequence
  GFR-binding peptide
  MOD_RES (31)..(32): Xaa is C or S
SKVVMQYNKLVKPTRGVLYLISIASLDQPVXXPS

SEQ ID NO: 4108 - protein, 38 aa, Artificial Sequence
  GFR-binding peptide
  MOD_RES (37)..(37): Xaa is C or S
  MOD_RES (13)..(14)..(15)..(16)..(17): Xaa is A or G
  MOD_RES (18)..(19)..(20)..(21): Xaa is A or G or is absent
ALHDELTQYNKLXXXXXXXXXLYLVSIASLQVQTPRXQ

SEQ ID NO: 4109 - protein, 42 aa, Artificial Sequence
  GFR-binding peptide
  MOD_RES (1)..(3)..(37)..(38): Xaa is C or S
  MOD_RES (15)..(16)..(17)..(18)..(19): Xaa is A or G
  MOD_RES (20)..(21)..(22)..(23): Xaa is A or G or is absent
XGXGEVVMEQYNKLXXXXXXXXXLYLMSIASLETPVXXAKPI

SEQ ID NO: 4110 - protein, 37 aa, Artificial Sequence
  GFR-binding peptide
  MOD_RES (1)..(34)..(35): Xaa is C or S
XEAVSMGEYHYKLTPVGMDDKYLVSIPSLKTPVXXAK

SEQ ID NO: 4111 - protein, 41 aa, Artificial Sequence
  GFR-binding peptide
  MOD_RES (2)..(36)..(37): Xaa is C or S
  MOD_RES (14)..(15)..(16)..(17)..(18): Xaa is A or G
  MOD_RES (19)..(20)..(21)..(22): Xaa is A or G or is absent
GXGEVVMERYKKLXXXXXXXXXFYLMSIANLETPVXXAKPI

SEQ ID NO: 4112 - protein, 38 aa, Artificial Sequence
  GFR-binding peptide
  MOD_RES (1)..(3)..(34)..(35): Xaa is C or S
XKXSKVVMYHYKLVKPTRGVKYLISIPSLDQPVXXPSA

SEQ ID NO: 4113 - protein, 35 aa, Artificial Sequence
  GFR-binding peptide
  MOD_RES (33)..(34): Xaa is C or S
  MOD_RES (11)..(12)..(13)..(14)..(15): Xaa is A or G
  MOD_RES (16)..(17)..(18)..(19): Xaa is A or G or is absent
KVVMNQYNKLXXXXXXXXXLYLVSIASLKTPAXXA

SEQ ID NO: 4114 - protein, 44 aa, Artificial Sequence
  GFR-binding peptide
  MOD_RES (1)..(3)..(40): Xaa is C or S
  MOD_RES (16)..(17)..(18)..(19)..(20): Xaa is A or G
  MOD_RES (21)..(22)..(23)..(24): Xaa is A or G or is absent
XKXALHDELTRHKRLXXXXXXXXXYYLVSTASLQVQTPRXQVNR

SEQ ID NO: 4115 - protein, 37 aa, Artificial Sequence
  GFR-binding peptide
  MOD_RES (1)..(33)..(34): Xaa is C or S
XGEVVMEYHYKLVVKDYEDKYLMSIPSLETPVXXAKP

SEQ ID NO: 4116 - protein, 38 aa, Artificial Sequence
  GFR-binding peptide
  MOD_RES (37)..(37): Xaa is C or S
  MOD_RES (13)..(14)..(15)..(16)..(17): Xaa is A or G
  MOD_RES (18)..(19)..(20)..(21): Xaa is A or G or is absent
ALHDELTRHKRLXXXXXXXXXYYLVSTASLQVQTPRXQ

SEQ ID NO: 4117 - protein, 37 aa, Artificial Sequence
  GFR-binding peptide
  MOD_RES (33)..(33): Xaa is C or S
  MOD_RES (11)..(12)..(13)..(14)..(15): Xaa is A or G
  MOD_RES (16)..(17)..(18)..(19): Xaa is A or G or is absent
RVVMNRHKRLXXXXXXXXXYYLVSTASLKTPAXTPKT

SEQ ID NO: 4118 - protein, 37 aa, Artificial Sequence
  GFR-binding peptide
  MOD_RES (1)..(33): Xaa is C or S
XSRVVMNRHKRLIVNSSDDYYLVSTASLKTPAXTPKT

SEQ ID NO: 4119 - protein, 36 aa, Artificial Sequence
  GFR-binding peptide
  MOD_RES (2)..(4)..(35)..(36): Xaa is C or S
SXKXSRVIMQYNKLVKPKRGVLYLISIASLAQPVXX

SEQ ID NO: 4120 - protein, 36 aa, Artificial Sequence
  GFR-binding peptide
  MOD_RES (1)..(33)..(34): Xaa is C or S
XGEVVMERYKKLVVKDYEDFYLMSIANLETPVXXAK

SEQ ID NO: 4121 - protein, 37 aa, Artificial Sequence
  GFR-binding peptide
  MOD_RES (1)..(3): Xaa is C or S
XKXALHDELTQYNKLFIPKKRVIELYLVSIASLQVQT

SEQ ID NO: 4122 - protein, 36 aa, Artificial Sequence
  GFR-binding peptide
  MOD_RES (31)..(32): Xaa is C or S
RVVMNQYNKLIVNSSDDLYLVSIASLQTPAXXPKPV

SEQ ID NO: 4123 - protein, 40 aa, Artificial Sequence
  GFR-binding peptide
  MOD_RES (2)..(4)..(39)..(40): Xaa is C or S
  MOD_RES (17)..(18)..(19)..(20)..(21): Xaa is A or G
  MOD_RES (22)..(23)..(24)..(25): Xaa is A or G or is absent
RXGXEAVSMGEQYNKLXXXXXXXXXLYLVSIASLKTPVXX

SEQ ID NO: 4124 - protein, 37 aa, Artificial Sequence
  GFR-binding peptide
  MOD_RES (2)..(4)..(36)..(37): Xaa is C or S
RXGXGEVVMDYHYKLVVKENEDKYLMSIPSLETPVXX

SEQ ID NO: 4125 - protein, 35 aa, Artificial Sequence
  GFR-binding peptide
  MOD_RES (1)..(32)..(33): Xaa is C or S
XSKVVMYHYKLVKPTRGVKYLISIPSLDQPVXXPS

SEQ ID NO: 4126 - protein, 35 aa, Artificial Sequence
  GFR-binding peptide
  MOD_RES (31)..(32): Xaa is C or S
SRVIMQYNKLVKPKRGVLYLISIASLAQPVXXPAA

SEQ ID NO: 4127 - protein, 35 aa, Artificial Sequence
  GFR-binding peptide
LHDELTRYKKLFIPKKRVIEFYLVSIANLQVQTPR

SEQ ID NO: 4128 - protein, 38 aa, Artificial Sequence
  GFR-binding peptide
  MOD_RES (34)..(35): Xaa is C or S
  MOD_RES (12)..(13)..(14)..(15)..(16): Xaa is A or G
  MOD_RES (17)..(18)..(19)..(20): Xaa is A or G or is absent
ARVVMNYHYKLXXXXXXXXXKYLVSIPSLQTPAXXPKP

SEQ ID NO: 4129 - protein, 37 aa, Artificial Sequence
  GFR-binding peptide
  MOD_RES (1)..(32)..(33): Xaa is C or S
XSKVVMRYKKLVKPTRGVFYLISIANLDQPVXXPSAS

SEQ ID NO: 4130 - protein, 34 aa, Artificial Sequence
  GFR-binding peptide
  MOD_RES (13)..(14)..(15)..(16)..(17): Xaa is A or G
  MOD_RES (18)..(19)..(20)..(21): Xaa is A or G or is absent
ALHDELTRYKKLXXXXXXXXXFYLVSIANLQVQT

SEQ ID NO: 4131 - protein, 39 aa, Artificial Sequence
  GFR-binding peptide
  MOD_RES (2)..(4)..(37)..(38): Xaa is C or S
RXGXEAVSMGEQYNKLTPVGMDDLYLVSIASLKTPVXXA

SEQ ID NO: 4132 - protein, 40 aa, Artificial Sequence
  GFR-binding peptide
  MOD_RES (2)..(4)..(37)..(38): Xaa is C or S
  MOD_RES (15)..(16)..(17)..(18)..(19): Xaa is A or G
  MOD_RES (20)..(21)..(22)..(23): Xaa is A or G or is absent
SXKXSKVVMRHKRLXXXXXXXXXYYLISTASLDQPVXXPS

SEQ ID NO: 4133 - protein, 34 aa, Artificial Sequence
  GFR-binding peptide
  MOD_RES (2)..(34): Xaa is C or S
GXAKVVMNRHKRLIVNNSSDYYLVSTASLKTPAX

SEQ ID NO: 4134 - protein, 37 aa, Artificial Sequence
  GFR-binding peptide
  MOD_RES (1)..(33)..(34): Xaa is C or S
XGEVVMERYKKLVVKDYEDFYLMSIANLETPVXXAKP

SEQ ID NO: 4135 - protein, 41 aa, Artificial Sequence
  GFR-binding peptide
  MOD_RES (2)..(4)..(37)..(38): Xaa is C or S
  MOD_RES (15)..(16)..(17)..(18)..(19): Xaa is A or G
  MOD_RES (20)..(21)..(22)..(23): Xaa is A or G or is absent
SXKXSKVIMQYNKLXXXXXXXXXLYLISIASLDQSVXXPSA

SEQ ID NO: 4136 - protein, 37 aa, Artificial Sequence
  GFR-binding peptide
  MOD_RES (2)..(36)..(37): Xaa is C or S
  MOD_RES (14)..(15)..(16)..(17)..(18): Xaa is A or G
  MOD_RES (19)..(20)..(21)..(22): Xaa is A or G or is absent
GXAKVVMNRYKKLXXXXXXXXXFYLVSIANLKTPAXX

SEQ ID NO: 4137 - protein, 38 aa, Artificial Sequence
  GFR-binding peptide
  MOD_RES (2)..(34)..(35): Xaa is C or S
GXARVVMNYHYKLIVNSSDDKYLVSIPSLQTPAXXPKP

SEQ ID NO: 4138 - protein, 36 aa, Artificial Sequence
  GFR-binding peptide
  MOD_RES (33)..(33): Xaa is C or S
  MOD_RES (11)..(12)..(13)..(14)..(15): Xaa is A or G
  MOD_RES (16)..(17)..(18)..(19): Xaa is A or G or is absent
RVVMNRYKKLXXXXXXXXXFYLVSIANLKTPAXTPK

SEQ ID NO: 4139 - protein, 39 aa, Artificial Sequence
  GFR-binding peptide
  MOD_RES (2)..(34)..(35): Xaa is C or S
GXARVVMNRHKRLIVNSSDDYYLVSTASLQTPAXXPKPV

SEQ ID NO: 4140 - protein, 40 aa, Artificial Sequence
  GFR-binding peptide
  MOD_RES (2)..(37)..(38): Xaa is C or S
  MOD_RES (15)..(16)..(17)..(18)..(19): Xaa is A or G
  MOD_RES (20)..(21)..(22)..(23): Xaa is A or G or is absent
GXEAVSMGERYKKLXXXXXXXXXFYLVSIANLKTPVXXAK

SEQ ID NO: 4141 - protein, 43 aa, Artificial Sequence
  GFR-binding peptide
  MOD_RES (2)..(4)..(38)..(39): Xaa is C or S
  MOD_RES (16)..(17)..(18)..(19)..(20): Xaa is A or G
  MOD_RES (21)..(22)..(23)..(24): Xaa is A or G or is absent
HXGXAKVVMNRHKRLXXXXXXXXXYYLVSTASLKTPAXXAKPV

SEQ ID NO: 4142 - protein, 38 aa, Artificial Sequence
  GFR-binding peptide
  MOD_RES (1)..(3)..(34)..(35): Xaa is C or S
XKXSKVVMRHKRLVKPTRGVYYLISTASLDQPVXXPSA

SEQ ID NO: 4143 - protein, 36 aa, Artificial Sequence
  GFR-binding peptide
  MOD_RES (2)..(35)..(36): Xaa is C or S
  MOD_RES (13)..(14)..(15)..(16)..(17): Xaa is A or G
  MOD_RES (18)..(19)..(20)..(21): Xaa is A or G or is absent
KXSRVIMRHKRLXXXXXXXXXYYLISTASLAQPVXX

SEQ ID NO: 4144 - protein, 40 aa, Artificial Sequence
  GFR-binding peptide
  MOD_RES (1)..(34)..(35): Xaa is C or S
  MOD_RES (12)..(13)..(14)..(15)..(16): Xaa is A or G
  MOD_RES (17)..(18)..(19)..(20): Xaa is A or G or is absent
XSRVIMQYNKLXXXXXXXXXLYLISIASLAQPVXXPAASA

SEQ ID NO: 4145 - protein, 35 aa, Artificial Sequence
  GFR-binding peptide
  MOD_RES (1)..(32)..(33): Xaa is C or S
XSKVIMRHKRLIKPTKGIYYLISTASLDQSVXXPS

SEQ ID NO: 4146 - protein, 38 aa, Artificial Sequence
  GFR-binding peptide
  MOD_RES (34)..(35): Xaa is C or S
  MOD_RES (12)..(13)..(14)..(15)..(16): Xaa is A or G
  MOD_RES (17)..(18)..(19)..(20): Xaa is A or G or is absent
GEVVMDYHYKLXXXXXXXXXKYLMSIPSLETPVXXAKP

SEQ ID NO: 4147 - protein, 34 aa, Artificial Sequence
  GFR-binding peptide
  MOD_RES (1)..(1): Xaa is C or S
  MOD_RES (13)..(14)..(15)..(16)..(17): Xaa is A or G
  MOD_RES (18)..(19)..(20)..(21): Xaa is A or G or is absent
XSRVVMNQYNKLXXXXXXXXXLYLVSIASLKTPA

SEQ ID NO: 4148 - protein, 43 aa, Artificial Sequence
  GFR-binding peptide
  MOD_RES (1)..(3)..(40): Xaa is C or S
  MOD_RES (16)..(17)..(18)..(19)..(20): Xaa is A or G
  MOD_RES (21)..(22)..(23)..(24): Xaa is A or G or is absent
XKXALHDELTQYNKLXXXXXXXXXLYLVSIASLQVQTPRXQVN

SEQ ID NO: 4149 - protein, 37 aa, Artificial Sequence
  GFR-binding peptide
  MOD_RES (2)..(4)..(36)..(37): Xaa is C or S
HXGXAKVVMNQYNKLIVNNSSDLYLVSIASLKTPAXX

SEQ ID NO: 4150 - protein, 40 aa, Artificial Sequence
  GFR-binding peptide
  MOD_RES (1)..(34)..(35): Xaa is C or S
  MOD_RES (12)..(13)..(14)..(15)..(16): Xaa is A or G
  MOD_RES (17)..(18)..(19)..(20): Xaa is A or G or is absent
XSKVIMRYKKLXXXXXXXXXFYLISIANLDQSVXXPSASA

SEQ ID NO: 4151 - protein, 35 aa, Artificial Sequence
  GFR-binding peptide
  MOD_RES (1)..(3)..(35): Xaa is C or S
XGXAKVVMNRYKKLIVNNSSDFYLVSIANLKTPAX

SEQ ID NO: 4152 - protein, 34 aa, Artificial Sequence
  GFR-binding peptide
  MOD_RES (2)..(2): Xaa is C or S
  MOD_RES (13)..(14)..(15)..(16)..(17): Xaa is A or G
  MOD_RES (18)..(19)..(20)..(21): Xaa is A or G or is absent
KXSKVIMYHYKLXXXXXXXXXKYLISIPSLDQSV

SEQ ID NO: 4153 - protein, 32 aa, Artificial Sequence
  GFR-binding peptide
  MOD_RES (2)..(2): Xaa is C or S
KXSRVIMYHYKLVKPKRGVKYLISIPSLAQPV

SEQ ID NO: 4154 - protein, 36 aa, Artificial Sequence
  GFR-binding peptide
  MOD_RES (1)..(1): Xaa is C or S
  MOD_RES (14)..(15)..(16)..(17)..(18): Xaa is A or G
  MOD_RES (19)..(20)..(21)..(22): Xaa is A or G or is absent
XALHDELTRHKRLXXXXXXXXXYYLVSTASLQVQTP

SEQ ID NO: 4155 - protein, 38 aa, Artificial Sequence
  GFR-binding peptide
  MOD_RES (2)..(4)..(36)..(37): Xaa is C or S
RXGXGEVVMEQYNKLVVKDYEDLYLMSIASLETPVXXA

SEQ ID NO: 4156 - protein, 36 aa, Artificial Sequence
  GFR-binding peptide
  MOD_RES (31)..(32): Xaa is C or S
KVVMNQYNKLIVNNSSDLYLVSIASLKTPAXXAKPV

SEQ ID NO: 4157 - protein, 35 aa, Artificial Sequence
  GFR-binding peptide
  MOD_RES (1)..(33)..(34): Xaa is C or S
XSRVVMNRHKRLIVNSSDDYYLVSTASLKTPAXXP

SEQ ID NO: 4158 - protein, 33 aa, Artificial Sequence
  GFR-binding peptide
  MOD_RES (31)..(32): Xaa is C or S
RVVMNRYKKLIVNSSDDFYLVSIANLQTPAXXP

SEQ ID NO: 4159 - protein, 39 aa, Artificial Sequence
  GFR-binding peptide
  MOD_RES (2)..(4)..(36): Xaa is C or S
HXGXSRVVMNQYNKLIVNSSDDLYLVSIASLKTPAXTPK

SEQ ID NO: 4160 - protein, 38 aa, Artificial Sequence
  GFR-binding peptide
  MOD_RES (2)..(36)..(37): Xaa is C or S
  MOD_RES (14)..(15)..(16)..(17)..(18): Xaa is A or G
  MOD_RES (19)..(20)..(21)..(22): Xaa is A or G or is absent
GXAKVVMNRYKKLXXXXXXXXXFYLVSIANLKTPAXXA

SEQ ID NO: 4161 - protein, 40 aa, Artificial Sequence
  GFR-binding peptide
  MOD_RES (2)..(34)..(35): Xaa is C or S
GXGEVVMDYHYKLVVKENEDKYLMSIPSLETPVXXAKPIK

SEQ ID NO: 4162 - protein, 37 aa, Artificial Sequence
  GFR-binding peptide
  MOD_RES (2)..(4)..(36)..(37): Xaa is C or S
HXGXSRVVMNYHYKLIVNSSDDKYLVSIPSLKTPAXX

SEQ ID NO: 4163 - protein, 35 aa, Artificial Sequence
  GFR-binding peptide
  MOD_RES (31)..(32): Xaa is C or S
SRVIMYHYKLVKPKRGVKYLISIPSLAQPVXXPAA

SEQ ID NO: 4164 - protein, 40 aa, Artificial Sequence
  GFR-binding peptide
  MOD_RES (2)..(36): Xaa is C or S
  MOD_RES (14)..(15)..(16)..(17)..(18): Xaa is A or G
  MOD_RES (19)..(20)..(21)..(22): Xaa is A or G or is absent
GXSRVVMNYHYKLXXXXXXXXXKYLVSIPSLKTPAXTPKT

SEQ ID NO: 4165 - protein, 42 aa, Artificial Sequence
  GFR-binding peptide
  MOD_RES (2)..(39): Xaa is C or S
KXALHDELTRYKKLFIPKKRVIEFYLVSIANLQVQTPRXQVN

SEQ ID NO: 4166 - protein, 37 aa, Artificial Sequence
  GFR-binding peptide
  MOD_RES (1)..(32)..(33): Xaa is C or S
XSRVIMRHKRLVKPKRGVYYLISTASLAQPVXXPAAS

SEQ ID NO: 4167 - protein, 40 aa, Artificial Sequence
  GFR-binding peptide
  MOD_RES (37)..(37): Xaa is C or S
ALHDELTQYNKLFIPKKRVIELYLVSIASLQVQTPRXQVN

SEQ ID NO: 4168 - protein, 39 aa, Artificial Sequence
  GFR-binding peptide
  MOD_RES (2)..(4)..(38)..(39): Xaa is C or S
  MOD_RES (16)..(17)..(18)..(19)..(20): Xaa is A or G
  MOD_RES (21)..(22)..(23)..(24): Xaa is A or G or is absent
RXGXGEVVMDQYNKLXXXXXXXXXLYLMSIASLETPVXX

SEQ ID NO: 4169 - protein, 35 aa, Artificial Sequence
  GFR-binding peptide
  MOD_RES (2)..(2): Xaa is C or S
  MOD_RES (14)..(15)..(16)..(17)..(18): Xaa is A or G
  MOD_RES (19)..(20)..(21)..(22): Xaa is A or G or is absent
GXARVVMNQYNKLXXXXXXXXXLYLVSIASLQTPA

SEQ ID NO: 4170 - protein, 34 aa, Artificial Sequence
  GFR-binding peptide
  MOD_RES (33)..(34): Xaa is C or S
EAVSMGERYKKLTPVGMDDFYLVSIANLKTPVXX

SEQ ID NO: 4171 - protein, 35 aa, Artificial Sequence
  GFR-binding peptide
  MOD_RES (32)..(33): Xaa is C or S
AKVVMNRYKKLIVNNSSDFYLVSIANLKTPAXXAK

SEQ ID NO: 4172 - protein, 37 aa, Artificial Sequence
  GFR-binding peptide
  MOD_RES (31)..(32): Xaa is C or S
EVVMEQYNKLVVKDYEDLYLMSIASLETPVXXAKPIS

SEQ ID NO: 4173 - protein, 40 aa, Artificial Sequence
  GFR-binding peptide
  MOD_RES (34)..(34): Xaa is C or S
  MOD_RES (12)..(13)..(14)..(15)..(16): Xaa is A or G
  MOD_RES (17)..(18)..(19)..(20): Xaa is A or G or is absent
SRVVMNRYKKLXXXXXXXXXFYLVSIANLKTPAXTPKTVH

SEQ ID NO: 4174 - protein, 38 aa, Artificial Sequence
  GFR-binding peptide
  MOD_RES (2)..(4)..(38): Xaa is C or S
  MOD_RES (16)..(17)..(18)..(19)..(20): Xaa is A or G
  MOD_RES (21)..(22)..(23)..(24): Xaa is A or G or is absent
HXGXARVVMNRYKKLXXXXXXXXXFYLVSIANLQTPAX

SEQ ID NO: 4175 - protein, 36 aa, Artificial Sequence
  GFR-binding peptide
  MOD_RES (2)..(4): Xaa is C or S
RXGXEAVSMGEYHYKLTPVGMDDKYLVSIPSLKTPV

SEQ ID NO: 4176 - protein, 35 aa, Artificial Sequence
  GFR-binding peptide
  MOD_RES (1)..(35): Xaa is C or S
  MOD_RES (13)..(14)..(15)..(16)..(17): Xaa is A or G
  MOD_RES (18)..(19)..(20)..(21): Xaa is A or G or is absent
XSRVVMNQYNKLXXXXXXXXXLYLVSIASLKTPAX

SEQ ID NO: 4177 - protein, 37 aa, Artificial Sequence
  GFR-binding peptide
  MOD_RES (1)..(35)..(36): Xaa is C or S
  MOD_RES (13)..(14)..(15)..(16)..(17): Xaa is A or G
  MOD_RES (18)..(19)..(20)..(21): Xaa is A or G or is absent
XARVVMNRHKRLXXXXXXXXXYYLVSTASLQTPAXXP

SEQ ID NO: 4178 - protein, 38 aa, Artificial Sequence
  GFR-binding peptide
  MOD_RES (1)..(3)..(37): Xaa is C or S
  MOD_RES (15)..(16)..(17)..(18)..(19): Xaa is A or G
  MOD_RES (20)..(21)..(22)..(23): Xaa is A or G or is absent
XGXSRVVMNQYNKLXXXXXXXXXLYLVSIASLKTPAXT

SEQ ID NO: 4179 - protein, 43 aa, Artificial Sequence
  GFR-binding peptide
  MOD_RES (2)..(4)..(38)..(39): Xaa is C or S
  MOD_RES (16)..(17)..(18)..(19)..(20): Xaa is A or G
  MOD_RES (21)..(22)..(23)..(24): Xaa is A or G or is absent
RXGXGEVVMEYHYKLXXXXXXXXXKYLMSIPSLETPVXXAKPI

SEQ ID NO: 4180 - protein, 41 aa, Artificial Sequence
  GFR-binding peptide
  MOD_RES (1)..(35)..(36): Xaa is C or S
  MOD_RES (13)..(14)..(15)..(16)..(17): Xaa is A or G
  MOD_RES (18)..(19)..(20)..(21): Xaa is A or G or is absent
XSRVVMNRYKKLXXXXXXXXXFYLVSIANLKTPAXXPKPVY

SEQ ID NO: 4181 - protein, 39 aa, Artificial Sequence
  GFR-binding peptide
  MOD_RES (1)..(34)..(35): Xaa is C or S
  MOD_RES (12)..(13)..(14)..(15)..(16): Xaa is A or G
  MOD_RES (17)..(18)..(19)..(20): Xaa is A or G or is absent
XSRVIMYHYKLXXXXXXXXXKYLISIPSLAQPVXXPAAS

SEQ ID NO: 4182 - protein, 38 aa, Artificial Sequence
  GFR-binding peptide
  MOD_RES (2)..(4)..(35)..(36): Xaa is C or S
SXKXSRVIMQYNKLVKPKRGVLYLISIASLAQPVXXPA

SEQ ID NO: 4183 - protein, 35 aa, Artificial Sequence
  GFR-binding peptide
  MOD_RES (1)..(33)..(34): Xaa is C or S
XARVVMNRYKKLIVNSSDDFYLVSIANLQTPAXXP

SEQ ID NO: 4184 - protein, 38 aa, Artificial Sequence
  GFR-binding peptide
  MOD_RES (1)..(35)..(36): Xaa is C or S
  MOD_RES (13)..(14)..(15)..(16)..(17): Xaa is A or G
  MOD_RES (18)..(19)..(20)..(21): Xaa is A or G or is absent
XSRVVMNRHKRLXXXXXXXXXYYLVSTASLKTPAXXPK

SEQ ID NO: 4185 - protein, 37 aa, Artificial Sequence
  GFR-binding peptide
  MOD_RES (2)..(34): Xaa is C or S
GXSRVVMNRYKKLIVNSSDDFYLVSIANLKTPAXTPK

SEQ ID NO: 4186 - protein, 38 aa, Artificial Sequence
  GFR-binding peptide
  MOD_RES (1)..(32)..(33): Xaa is C or S
XSKVVMRYKKLVKPTRGVFYLISIANLDQPVXXPSASA

SEQ ID NO: 4187 - protein, 39 aa, Artificial Sequence
  GFR-binding peptide
  MOD_RES (1)..(3): Xaa is C or S
  MOD_RES (16)..(17)..(18)..(19)..(20): Xaa is A or G
  MOD_RES (21)..(22)..(23)..(24): Xaa is A or G or is absent
XKXALHDELTYHYKLXXXXXXXXXKYLVSIPSLQVQTPR

SEQ ID NO: 4188 - protein, 44 aa, Artificial Sequence
  GFR-binding peptide
  MOD_RES (2)..(4)..(39)..(40): Xaa is C or S
  MOD_RES (17)..(18)..(19)..(20)..(21): Xaa is A or G
  MOD_RES (22)..(23)..(24)..(25): Xaa is A or G or is absent
RXGXEAVSMGEYHYKLXXXXXXXXXKYLVSIPSLKTPVXXAKGV

SEQ ID NO: 4189 - protein, 34 aa, Artificial Sequence
  GFR-binding peptide
  MOD_RES (32)..(33): Xaa is C or S
GEVVMDRYKKLVVKENEDFYLMSIANLETPVXXA

SEQ ID NO: 4190 - protein, 42 aa, Artificial Sequence
  GFR-binding peptide
  MOD_RES (2)..(39): Xaa is C or S
  MOD_RES (15)..(16)..(17)..(18)..(19): Xaa is A or G
  MOD_RES (20)..(21)..(22)..(23): Xaa is A or G or is absent
KXALHDELTRYKKLXXXXXXXXXFYLVSIANLQVQTPRXQVN

SEQ ID NO: 4191 - protein, 36 aa, Artificial Sequence
  GFR-binding peptide
  MOD_RES (31)..(32): Xaa is C or S
KVVMNYHYKLIVNNSSDKYLVSIPSLKTPAXXAKPV

SEQ ID NO: 4192 - protein, 40 aa, Artificial Sequence
  GFR-binding peptide
  MOD_RES (34)..(35): Xaa is C or S
  MOD_RES (12)..(13)..(14)..(15)..(16): Xaa is A or G
  MOD_RES (17)..(18)..(19)..(20): Xaa is A or G or is absent
ARVVMNRHKRLXXXXXXXXXYYLVSTASLQTPAXXPKPVT

SEQ ID NO: 4193 - protein, 41 aa, Artificial Sequence
  GFR-binding peptide
  MOD_RES (1)..(3)..(37)..(38): Xaa is C or S
  MOD_RES (15)..(16)..(17)..(18)..(19): Xaa is A or G
  MOD_RES (20)..(21)..(22)..(23): Xaa is A or G or is absent
XGXGEVVMEYHYKLXXXXXXXXXKYLMSIPSLETPVXXAKP

SEQ ID NO: 4194 - protein, 37 aa, Artificial Sequence
  GFR-binding peptide
  MOD_RES (2)..(34)..(35): Xaa is C or S
GXGEVVMDYHYKLVVKENEDKYLMSIPSLETPVXXAK

SEQ ID NO: 4195 - protein, 42 aa, Artificial Sequence
  GFR-binding peptide
  MOD_RES (1)..(3)..(36)..(37): Xaa is C or S
  MOD_RES (14)..(15)..(16)..(17)..(18): Xaa is A or G
  MOD_RES (19)..(20)..(21)..(22): Xaa is A or G or is absent
XKXSRVIMYHYKLXXXXXXXXXKYLISIPSLAQPVXXPAASA

SEQ ID NO: 4196 - protein, 38 aa, Artificial Sequence
  GFR-binding peptide
  MOD_RES (1)..(3)..(35): Xaa is C or S
XGXSRVVMNRHKRLIVNSSDDYYLVSTASLKTPAXTPK

SEQ ID NO: 4197 - protein, 37 aa, Artificial Sequence
  GFR-binding peptide
  MOD_RES (1)..(3)..(35)..(36): Xaa is C or S
XGXGEVVMEQYNKLVVKDYEDLYLMSIASLETPVXXA

SEQ ID NO: 4198 - protein, 36 aa, Artificial Sequence
  GFR-binding peptide
  MOD_RES (35)..(36): Xaa is C or S
  MOD_RES (13)..(14)..(15)..(16)..(17): Xaa is A or G
  MOD_RES (18)..(19)..(20)..(21): Xaa is A or G or is absent
EAVSMGEQYNKLXXXXXXXXXLYLVSIASLKTPVXX

SEQ ID NO: 4199 - protein, 35 aa, Artificial Sequence
  GFR-binding peptide
  MOD_RES (1)..(33)..(34): Xaa is C or S
XARVVMNYHYKLIVNSSDDKYLVSIPSLQTPAXXP

SEQ ID NO: 4200 - protein, 33 aa, Artificial Sequence
  GFR-binding peptide
  MOD_RES (31)..(32): Xaa is C or S
RVVMNRHKRLIVNSSDDYYLVSTASLQTPAXXP

SEQ ID NO: 4201 - protein, 41 aa, Artificial Sequence
  GFR-binding peptide
  MOD_RES (2)..(4)..(35)..(36): Xaa is C or S
SXKXSKVVMRYKKLVKPTRGVFYLISIANLDQPVXXPSASA

SEQ ID NO: 4202 - protein, 32 aa, Artificial Sequence
  GFR-binding peptide
  MOD_RES (11)..(12)..(13)..(14)..(15): Xaa is A or G
  MOD_RES (16)..(17)..(18)..(19): Xaa is A or G or is absent
SKVVMRYKKLXXXXXXXXXFYLISIANLDQPV

SEQ ID NO: 4203 - protein, 38 aa, Artificial Sequence
  GFR-binding peptide
  MOD_RES (33)..(34): Xaa is C or S
EAVSMGERHKRLTPVGMDDYYLVSTASLKTPVXXAKGV

SEQ ID NO: 4204 - protein, 34 aa, Artificial Sequence
  GFR-binding peptide
  MOD_RES (31)..(32): Xaa is C or S
SKVVMYHYKLVKPTRGVKYLISIPSLDQPVXXPS

SEQ ID NO: 4205 - protein, 37 aa, Artificial Sequence
  GFR-binding peptide
  MOD_RES (1)..(3)..(37): Xaa is C or S
  MOD_RES (15)..(16)..(17)..(18)..(19): Xaa is A or G
  MOD_RES (20)..(21)..(22)..(23): Xaa is A or G or is absent
XGXAKVVMNRYKKLXXXXXXXXXFYLVSIANLKTPAX

SEQ ID NO: 4206 - protein, 35 aa, Artificial Sequence
  GFR-binding peptide
  MOD_RES (1)..(3): Xaa is C or S
  MOD_RES (14)..(15)..(16)..(17)..(18): Xaa is A or G
  MOD_RES (19)..(20)..(21)..(22): Xaa is A or G or is absent
XKXSKVVMRHKRLXXXXXXXXXYYLISTASLDQPV

SEQ ID NO: 4207 - protein, 38 aa, Artificial Sequence
  GFR-binding peptide
  MOD_RES (2)..(36)..(37): Xaa is C or S
  MOD_RES (14)..(15)..(16)..(17)..(18): Xaa is A or G
  MOD_RES (19)..(20)..(21)..(22): Xaa is A or G or is absent
GXGEVVMDRYKKLXXXXXXXXXFYLMSIANLETPVXXA

SEQ ID NO: 4208 - protein, 36 aa, Artificial Sequence
  GFR-binding peptide
  MOD_RES (35)..(36): Xaa is C or S
  MOD_RES (13)..(14)..(15)..(16)..(17): Xaa is A or G
  MOD_RES (18)..(19)..(20)..(21): Xaa is A or G or is absent
EAVSMGERHKRLXXXXXXXXXYYLVSTASLKTPVXX

SEQ ID NO: 4209 - protein, 41 aa, Artificial Sequence
  GFR-binding peptide
  MOD_RES (2)..(4)..(41): Xaa is C or S
EXKXALHDELTRHKRLFIPKKRVIEYYLVSTASLQVQTPRX

SEQ ID NO: 4210 - protein, 38 aa, Artificial Sequence
  GFR-binding peptide
  MOD_RES (1)..(35)..(36): Xaa is C or S
  MOD_RES (13)..(14)..(15)..(16)..(17): Xaa is A or G
  MOD_RES (18)..(19)..(20)..(21): Xaa is A or G or is absent
XGEVVMDRHKRLXXXXXXXXXYYLMSTASLETPVXXAK

SEQ ID NO: 4211 - protein, 33 aa, Artificial Sequence
  GFR-binding peptide
  MOD_RES (33)..(33): Xaa is C or S
  MOD_RES (11)..(12)..(13)..(14)..(15): Xaa is A or G
  MOD_RES (16)..(17)..(18)..(19): Xaa is A or G or is absent
SKVVMRYKKLXXXXXXXXXFYLISIANLDQPVX

SEQ ID NO: 4212 - protein, 38 aa, Artificial Sequence
  GFR-binding peptide
  MOD_RES (2)..(36)..(37): Xaa is C or S
  MOD_RES (14)..(15)..(16)..(17)..(18): Xaa is A or G
  MOD_RES (19)..(20)..(21)..(22): Xaa is A or G or is absent
GXSRVVMNRHKRLXXXXXXXXXYYLVSTASLKTPAXXP

SEQ ID NO: 4213 - protein, 36 aa, Artificial Sequence
  GFR-binding peptide
  MOD_RES (2)..(35)..(36): Xaa is C or S
  MOD_RES (13)..(14)..(15)..(16)..(17): Xaa is A or G
  MOD_RES (18)..(19)..(20)..(21): Xaa is A or G or is absent
KXSKVVMYHYKLXXXXXXXXXKYLISIPSLDQPVXX

SEQ ID NO: 4214 - protein, 35 aa, Artificial Sequence
  GFR-binding peptide
  MOD_RES (2)..(2): Xaa is C or S
  MOD_RES (14)..(15)..(16)..(17)..(18): Xaa is A or G
  MOD_RES (19)..(20)..(21)..(22): Xaa is A or G or is absent
GXAKVVMNQYNKLXXXXXXXXXLYLVSIASLKTPA

SEQ ID NO: 4215 - protein, 37 aa, Artificial Sequence
  GFR-binding peptide
  MOD_RES (1)..(35)..(36): Xaa is C or S
  MOD_RES (13)..(14)..(15)..(16)..(17): Xaa is A or G
  MOD_RES (18)..(19)..(20)..(21): Xaa is A or G or is absent
XGEVVMERYKKLXXXXXXXXXFYLMSIANLETPVXXA

SEQ ID NO: 4216 - protein, 38 aa, Artificial Sequence
  GFR-binding peptide
  MOD_RES (1)..(32)..(33): Xaa is C or S
XSRVIMRHKRLVKPKRGVYYLISTASLAQPVXXPAASA

SEQ ID NO: 4217 - protein, 30 aa, Artificial Sequence
  GFR-binding peptide
SKVIMYHYKLIKPTKGIKYLISIPSLDQSV

SEQ ID NO: 4218 - protein, 36 aa, Artificial Sequence
  GFR-binding peptide
  MOD_RES (1)..(3)..(35)..(36): Xaa is C or S
XGXGEVVMEQYNKLVVKDYEDLYLMSIASLETPVXX

SEQ ID NO: 4219 - protein, 36 aa, Artificial Sequence
  GFR-binding peptide
  MOD_RES (36)..(36): Xaa is C or S
LHDELTRYKKLFIPKKRVIEFYLVSIANLQVQTPRX

SEQ ID NO: 4220 - protein, 32 aa, Artificial Sequence
  GFR-binding peptide
  MOD_RES (1)..(32): Xaa is C or S
XSRVIMRYKKLVKPKRGVFYLISIANLAQPVX

SEQ ID NO: 4221 - protein, 31 aa, Artificial Sequence
  GFR-binding peptide
  MOD_RES (1)..(1): Xaa is C or S
XSRVIMRYKKLVKPKRGVFYLISIANLAQPV

SEQ ID NO: 4222 - protein, 41 aa, Artificial Sequence
  GFR-binding peptide
  MOD_RES (1)..(38): Xaa is C or S
  MOD_RES (14)..(15)..(16)..(17)..(18): Xaa is A or G
  MOD_RES (19)..(20)..(21)..(22): Xaa is A or G or is absent
XALHDELTRYKKLXXXXXXXXXFYLVSIANLQVQTPRXQVN

SEQ ID NO: 4223 - protein, 37 aa, Artificial Sequence
  GFR-binding peptide
  MOD_RES (2)..(36)..(37): Xaa is C or S
  MOD_RES (14)..(15)..(16)..(17)..(18): Xaa is A or G
  MOD_RES (19)..(20)..(21)..(22): Xaa is A or G or is absent
GXGEVVMDRYKKLXXXXXXXXXFYLMSIANLETPVXX

SEQ ID NO: 4224 - protein, 36 aa, Artificial Sequence
  GFR-binding peptide
  MOD_RES (2)..(4)..(35)..(36): Xaa is C or S
SXKXSKVVMYHYKLVKPTRGVKYLISIPSLDQPVXX

SEQ ID NO: 4225 - protein, 35 aa, Artificial Sequence
  GFR-binding peptide
  MOD_RES (2)..(4)..(35): Xaa is C or S
SXKXSKVIMRHKRLIKPTKGIYYLISTASLDQSVX

SEQ ID NO: 4226 - protein, 40 aa, Artificial Sequence
  GFR-binding peptide
  MOD_RES (1)..(3)..(34)..(35): Xaa is C or S
XKXSKVVMRYKKLVKPTRGVFYLISIANLDQPVXXPSASA

SEQ ID NO: 4227 - protein, 38 aa, Artificial Sequence
  GFR-binding peptide
  MOD_RES (1)..(34)..(35): Xaa is C or S
  MOD_RES (12)..(13)..(14)..(15)..(16): Xaa is A or G
  MOD_RES (17)..(18)..(19)..(20): Xaa is A or G or is absent
XSKVIMRYKKLXXXXXXXXXFYLISIANLDQSVXXPSA

SEQ ID NO: 4228 - protein, 36 aa, Artificial Sequence
  GFR-binding peptide
  MOD_RES (1)..(33)..(34): Xaa is C or S
XSRVVMNRYKKLIVNSSDDFYLVSIANLKTPAXXPK

SEQ ID NO: 4229 - protein, 39 aa, Artificial Sequence
  GFR-binding peptide
  MOD_RES (1)..(33)..(34): Xaa is C or S
XARVVMNRYKKLIVNSSDDFYLVSIANLQTPAXXPKPVT

SEQ ID NO: 4230 - protein, 37 aa, Artificial Sequence
  GFR-binding peptide
  MOD_RES (2)..(4)..(35)..(36): Xaa is C or S
SXKXSRVIMRYKKLVKPKRGVFYLISIANLAQPVXXP

SEQ ID NO: 4231 - protein, 34 aa, Artificial Sequence
  GFR-binding peptide
  MOD_RES (31)..(32): Xaa is C or S
KVVMNRHKRLIVNNSSDYYLVSTASLKTPAXXAK

SEQ ID NO: 4232 - protein, 42 aa, Artificial Sequence
  GFR-binding peptide
  MOD_RES (1)..(38): Xaa is C or S
  MOD_RES (14)..(15)..(16)..(17)..(18): Xaa is A or G
  MOD_RES (19)..(20)..(21)..(22): Xaa is A or G or is absent
XALHDELTRYKKLXXXXXXXXXFYLVSIANLQVQTPRXQVNR

SEQ ID NO: 4233 - protein, 35 aa, Artificial Sequence
  GFR-binding peptide
  MOD_RES (1)..(3)..(34)..(35): Xaa is C or S
XKXSKVIMYHYKLIKPTKGIKYLISIPSLDQSVXX

SEQ ID NO: 4234 - protein, 42 aa, Artificial Sequence
  GFR-binding peptide
  MOD_RES (2)..(4)..(37)..(38): Xaa is C or S
  MOD_RES (15)..(16)..(17)..(18)..(19): Xaa is A or G
  MOD_RES (20)..(21)..(22)..(23): Xaa is A or G or is absent
SXKXSRVIMRYKKLXXXXXXXXXFYLISIANLAQPVXXPAAS

SEQ ID NO: 4235 - protein, 36 aa, Artificial Sequence
  GFR-binding peptide
  MOD_RES (2)..(4)..(36): Xaa is C or S
RXGXGEVVMDRHKRLVVKENEDYYLMSTASLETPVX

SEQ ID NO: 4236 - protein, 38 aa, Artificial Sequence
  GFR-binding peptide
  MOD_RES (1)..(33)..(34): Xaa is C or S
XAKVVMNRYKKLIVNNSSDFYLVSIANLKTPAXXAKPV

SEQ ID NO: 4237 - protein, 39 aa, Artificial Sequence
  GFR-binding peptide
  MOD_RES (1)..(3)..(37): Xaa is C or S
  MOD_RES (15)..(16)..(17)..(18)..(19): Xaa is A or G
  MOD_RES (20)..(21)..(22)..(23): Xaa is A or G or is absent
XGXSRVVMNRHKRLXXXXXXXXXYYLVSTASLKTPAXTP

SEQ ID NO: 4238 - protein, 43 aa, Artificial Sequence
  GFR-binding peptide
  MOD_RES (1)..(3)..(37): Xaa is C or S
  MOD_RES (15)..(16)..(17)..(18)..(19): Xaa is A or G
  MOD_RES (20)..(21)..(22)..(23): Xaa is A or G or is absent
XGXSRVVMNQYNKLXXXXXXXXXLYLVSIASLKTPAXTPKTVH

SEQ ID NO: 4239 - protein, 33 aa, Artificial Sequence
  GFR-binding peptide
  MOD_RES (11)..(12)..(13)..(14)..(15): Xaa is A or G
  MOD_RES (16)..(17)..(18)..(19): Xaa is A or G or is absent
HDELTRYKKLXXXXXXXXXFYLVSIANLQVQTP

SEQ ID NO: 4240 - protein, 37 aa, Artificial Sequence
  GFR-binding peptide
  MOD_RES (1)..(3)..(35)..(36): Xaa is C or S
XGXGEVVMDRHKRLVVKENEDYYLMSTASLETPVXXA

SEQ ID NO: 4241 - protein, 37 aa, Artificial Sequence
  GFR-binding peptide
  MOD_RES (2)..(2): Xaa is C or S
  MOD_RES (15)..(16)..(17)..(18)..(19): Xaa is A or G
  MOD_RES (20)..(21)..(22)..(23): Xaa is A or G or is absent
KXALHDELTRHKRLXXXXXXXXXYYLVSTASLQVQTP

SEQ ID NO: 4242 - protein, 36 aa, Artificial Sequence
  GFR-binding peptide
  MOD_RES (36)..(36): Xaa is C or S
  MOD_RES (12)..(13)..(14)..(15)..(16): Xaa is A or G
  MOD_RES (17)..(18)..(19)..(20): Xaa is A or G or is absent
LHDELTRHKRLXXXXXXXXXYYLVSTASLQVQTPRX

SEQ ID NO: 4243 - protein, 44 aa, Artificial Sequence
  GFR-binding peptide
  MOD_RES (2)..(4)..(38)..(39): Xaa is C or S
  MOD_RES (16)..(17)..(18)..(19)..(20): Xaa is A or G
  MOD_RES (21)..(22)..(23)..(24): Xaa is A or G or is absent
HXGXARVVMNQYNKLXXXXXXXXXLYLVSIASLQTPAXXPKPVT

SEQ ID NO: 4244 - protein, 41 aa, Artificial Sequence
  GFR-binding peptide
  MOD_RES (1)..(3)..(38)..(39): Xaa is C or S
  MOD_RES (16)..(17)..(18)..(19)..(20): Xaa is A or G
  MOD_RES (21)..(22)..(23)..(24): Xaa is A or G or is absent
XGXEAVSMGERHKRLXXXXXXXXXYYLVSTASLKTPVXXAK

SEQ ID NO: 4245 - protein, 38 aa, Artificial Sequence
  GFR-binding peptide
  MOD_RES (2)..(35)..(36): Xaa is C or S
GXEAVSMGERHKRLTPVGMDDYYLVSTASLKTPVXXAK

SEQ ID NO: 4246 - protein, 37 aa, Artificial Sequence
  GFR-binding peptide
  MOD_RES (2)..(35)..(36): Xaa is C or S
  MOD_RES (13)..(14)..(15)..(16)..(17): Xaa is A or G
  MOD_RES (18)..(19)..(20)..(21): Xaa is A or G or is absent
KXSRVIMYHYKLXXXXXXXXXKYLISIPSLAQPVXXP

SEQ ID NO: 4247 - protein, 39 aa, Artificial Sequence
  GFR-binding peptide
  MOD_RES (2)..(36)..(37): Xaa is C or S
  MOD_RES (14)..(15)..(16)..(17)..(18): Xaa is A or G
  MOD_RES (19)..(20)..(21)..(22): Xaa is A or G or is absent
GXGEVVMDRHKRLXXXXXXXXXYYLMSTASLETPVXXAK

SEQ ID NO: 4248 - protein, 31 aa, Artificial Sequence
  GFR-binding peptide
  MOD_RES (31)..(31): Xaa is C or S
SKVIMRHKRLIKPTKGIYYLISTASLDQSVX

SEQ ID NO: 4249 - protein, 38 aa, Artificial Sequence
  GFR-binding peptide
  MOD_RES (1)..(33): Xaa is C or S
XSRVVMNYHYKLIVNSSDDKYLVSIPSLKTPAXTPKTV

SEQ ID NO: 4250 - protein, 37 aa, Artificial Sequence
  GFR-binding peptide
  MOD_RES (2)..(36): Xaa is C or S
  MOD_RES (14)..(15)..(16)..(17)..(18): Xaa is A or G
  MOD_RES (19)..(20)..(21)..(22): Xaa is A or G or is absent
GXSRVVMNRYKKLXXXXXXXXXFYLVSIANLKTPAXT

SEQ ID NO: 4251 - protein, 35 aa, Artificial Sequence
  GFR-binding peptide
  MOD_RES (2)..(4)..(35): Xaa is C or S
SXKXSKVVMRYKKLVKPTRGVFYLISIANLDQPVX

SEQ ID NO: 4252 - protein, 35 aa, Artificial Sequence
  GFR-binding peptide
  MOD_RES (1)..(3)..(35): Xaa is C or S
XGXGEVVMEYHYKLVVKDYEDKYLMSIPSLETPVX

SEQ ID NO: 4253 - protein, 35 aa, Artificial Sequence
  GFR-binding peptide
  MOD_RES (2)..(35): Xaa is C or S
GXEAVSMGEQYNKLTPVGMDDLYLVSIASLKTPVX

SEQ ID NO: 4254 - protein, 37 aa, Artificial Sequence
  GFR-binding peptide
  MOD_RES (31)..(32): Xaa is C or S
EVVMDRHKRLVVKENEDYYLMSTASLETPVXXAKPIK

SEQ ID NO: 4255 - protein, 41 aa, Artificial Sequence
  GFR-binding peptide
  MOD_RES (1)..(38): Xaa is C or S
XALHDELTYHYKLFIPKKRVIEKYLVSIPSLQVQTPRXQVN

SEQ ID NO: 4256 - protein, 41 aa, Artificial Sequence
  GFR-binding peptide
  MOD_RES (2)..(4)..(36)..(37): Xaa is C or S
RXGXGEVVMERYKKLVVKDYEDFYLMSIANLETPVXXAKPI

SEQ ID NO: 4257 - protein, 41 aa, Artificial Sequence
  GFR-binding peptide
  MOD_RES (1)..(3)..(35): Xaa is C or S
XGXSRVVMNRYKKLIVNSSDDFYLVSIANLKTPAXTPKTVH

SEQ ID NO: 4258 - protein, 39 aa, Artificial Sequence
  GFR-binding peptide
  MOD_RES (34)..(35): Xaa is C or S
  MOD_RES (12)..(13)..(14)..(15)..(16): Xaa is A or G
  MOD_RES (17)..(18)..(19)..(20): Xaa is A or G or is absent
SRVVMNYHYKLXXXXXXXXXKYLVSIPSLKTPAXXPKPV

SEQ ID NO: 4259 - protein, 37 aa, Artificial Sequence
  GFR-binding peptide
  MOD_RES (2)..(4)..(35)..(36): Xaa is C or S
SXKXSKVVMRHKRLVKPTRGVYYLISTASLDQPVXXP

SEQ ID NO: 4260 - protein, 44 aa, Artificial Sequence
  GFR-binding peptide
  MOD_RES (2)..(4)..(41): Xaa is C or S
EXKXALHDELTRHKRLFIPKKRVIEYYLVSTASLQVQTPRXQVN

SEQ ID NO: 4261 - protein, 41 aa, Artificial Sequence
  GFR-binding peptide
  MOD_RES (1)..(38): Xaa is C or S
  MOD_RES (14)..(15)..(16)..(17)..(18): Xaa is A or G
  MOD_RES (19)..(20)..(21)..(22): Xaa is A or G or is absent
XALHDELTYHYKLXXXXXXXXXKYLVSIPSLQVQTPRXQVN

SEQ ID NO: 4262 - protein, 39 aa, Artificial Sequence
  GFR-binding peptide
  MOD_RES (33)..(33): Xaa is C or S
  MOD_RES (11)..(12)..(13)..(14)..(15): Xaa is A or G
  MOD_RES (16)..(17)..(18)..(19): Xaa is A or G or is absent
RVVMNYHYKLXXXXXXXXXKYLVSIPSLKTPAXTPKTVH

SEQ ID NO: 4263 - protein, 37 aa, Artificial Sequence
  GFR-binding peptide
  MOD_RES (34)..(34): Xaa is C or S
  MOD_RES (12)..(13)..(14)..(15)..(16): Xaa is A or G
  MOD_RES (17)..(18)..(19)..(20): Xaa is A or G or is absent
SRVVMNQYNKLXXXXXXXXXLYLVSIASLKTPAXTPK

SEQ ID NO: 4264 - protein, 34 aa, Artificial Sequence
  GFR-binding peptide
  MOD_RES (1)..(3)..(34): Xaa is C or S
XKXSKVIMYHYKLIKPTKGIKYLISIPSLDQSVX

SEQ ID NO: 4265 - protein, 36 aa, Artificial Sequence
  GFR-binding peptide
  MOD_RES (2)..(33)..(34): Xaa is C or S
KXSRVIMQYNKLVKPKRGVLYLISIASLAQPVXXPA

SEQ ID NO: 4266 - protein, 36 aa, Artificial Sequence
  GFR-binding peptide
  MOD_RES (2)..(35)..(36): Xaa is C or S
GXEAVSMGEQYNKLTPVGMDDLYLVSIASLKTPVXX

SEQ ID NO: 4267 - protein, 38 aa, Artificial Sequence
  GFR-binding peptide
  MOD_RES (35)..(35): Xaa is C or S
  MOD_RES (11)..(12)..(13)..(14)..(15): Xaa is A or G
  MOD_RES (16)..(17)..(18)..(19): Xaa is A or G or is absent
HDELTYHYKLXXXXXXXXXKYLVSIPSLQVQTPRXQVN

SEQ ID NO: 4268 - protein, 39 aa, Artificial Sequence
  GFR-binding peptide
  MOD_RES (35)..(35): Xaa is C or S
  MOD_RES (11)..(12)..(13)..(14)..(15): Xaa is A or G
  MOD_RES (16)..(17)..(18)..(19): Xaa is A or G or is absent
HDELTYHYKLXXXXXXXXXKYLVSIPSLQVQTPRXQVNR

SEQ ID NO: 4269 - protein, 35 aa, Artificial Sequence
  GFR-binding peptide
ALHDELTRYKKLFIPKKRVIEFYLVSIANLQVQTP

SEQ ID NO: 4270 - protein, 42 aa, Artificial Sequence
  GFR-binding peptide
  MOD_RES (1)..(38): Xaa is C or S
XALHDELTRYKKLFIPKKRVIEFYLVSIANLQVQTPRXQVNR

SEQ ID NO: 4271 - protein, 42 aa, Artificial Sequence
  GFR-binding peptide
  MOD_RES (1)..(3)..(37)..(38): Xaa is C or S
  MOD_RES (15)..(16)..(17)..(18)..(19): Xaa is A or G
  MOD_RES (20)..(21)..(22)..(23): Xaa is A or G or is absent
XGXARVVMNQYNKLXXXXXXXXXLYLVSIASLQTPAXXPKPV

SEQ ID NO: 4272 - protein, 34 aa, Artificial Sequence
  GFR-binding peptide
  MOD_RES (1)..(32)..(33): Xaa is C or S
XSKVVMQYNKLVKPTRGVLYLISIASLDQPVXXP

SEQ ID NO: 4273 - protein, 40 aa, Artificial Sequence
  GFR-binding peptide
  MOD_RES (36)..(36): Xaa is C or S
  MOD_RES (12)..(13)..(14)..(15)..(16): Xaa is A or G
  MOD_RES (17)..(18)..(19)..(20): Xaa is A or G or is absent
LHDELTRHKRLXXXXXXXXXYYLVSTASLQVQTPRXQVNR

SEQ ID NO: 4274 - protein, 42 aa, Artificial Sequence
  GFR-binding peptide
  MOD_RES (2)..(4)..(37)..(38): Xaa is C or S
RXGXEAVSMGERYKKLTPVGMDDFYLVSIANLKTPVXXAKGV

SEQ ID NO: 4275 - protein, 39 aa, Artificial Sequence
  GFR-binding peptide
  MOD_RES (2)..(36)..(37): Xaa is C or S
  MOD_RES (14)..(15)..(16)..(17)..(18): Xaa is A or G
  MOD_RES (19)..(20)..(21)..(22): Xaa is A or G or is absent
GXARVVMNQYNKLXXXXXXXXXLYLVSIASLQTPAXXPK

SEQ ID NO: 4276 - protein, 36 aa, Artificial Sequence
  GFR-binding peptide
  MOD_RES (1)..(35): Xaa is C or S
  MOD_RES (13)..(14)..(15)..(16)..(17): Xaa is A or G
  MOD_RES (18)..(19)..(20)..(21): Xaa is A or G or is absent
XSRVVMNYHYKLXXXXXXXXXKYLVSIPSLKTPAXT

SEQ ID NO: 4277 - protein, 34 aa, Artificial Sequence
  GFR-binding peptide
  MOD_RES (1)..(1): Xaa is C or S
  MOD_RES (13)..(14)..(15)..(16)..(17): Xaa is A or G
  MOD_RES (18)..(19)..(20)..(21): Xaa is A or G or is absent
XGEVVMERYKKLXXXXXXXXXFYLMSIANLETPV

SEQ ID NO: 4278 - protein, 39 aa, Artificial Sequence
  GFR-binding peptide
  MOD_RES (1)..(33): Xaa is C or S
XSRVVMNQYNKLIVNSSDDLYLVSIASLKTPAXTPKTVH

SEQ ID NO: 4279 - protein, 37 aa, Artificial Sequence
  GFR-binding peptide
  MOD_RES (2)..(4)..(36): Xaa is C or S
HXGXSRVVMNRHKRLIVNSSDDYYLVSTASLKTPAXT

SEQ ID NO: 4280 - protein, 40 aa, Artificial Sequence
  GFR-binding peptide
  MOD_RES (34)..(34): Xaa is C or S
  MOD_RES (12)..(13)..(14)..(15)..(16): Xaa is A or G
  MOD_RES (17)..(18)..(19)..(20): Xaa is A or G or is absent
SRVVMNQYNKLXXXXXXXXXLYLVSIASLKTPAXTPKTVH

SEQ ID NO: 4281 - protein, 33 aa, Artificial Sequence
  GFR-binding peptide
  MOD_RES (31)..(31): Xaa is C or S
RVVMNYHYKLIVNSSDDKYLVSIPSLKTPAXTP

SEQ ID NO: 4282 - protein, 44 aa, Artificial Sequence
  GFR-binding peptide
  MOD_RES (2)..(4)..(38)..(39): Xaa is C or S
  MOD_RES (16)..(17)..(18)..(19)..(20): Xaa is A or G
  MOD_RES (21)..(22)..(23)..(24): Xaa is A or G or is absent
HXGXSRVVMNYHYKLXXXXXXXXXKYLVSIPSLKTPAXXPKPVY

SEQ ID NO: 4283 - protein, 39 aa, Artificial Sequence
  GFR-binding peptide
  MOD_RES (2)..(33)..(34): Xaa is C or S
KXSRVIMQYNKLVKPKRGVLYLISIASLAQPVXXPAASA

SEQ ID NO: 4284 - protein, 35 aa, Artificial Sequence
  GFR-binding peptide
  MOD_RES (1)..(3)..(34)..(35): Xaa is C or S
XKXSRVIMRHKRLVKPKRGVYYLISTASLAQPVXX

SEQ ID NO: 4285 - protein, 44 aa, Artificial Sequence
  GFR-binding peptide
  MOD_RES (2)..(4)..(38)..(39): Xaa is C or S
  MOD_RES (16)..(17)..(18)..(19)..(20): Xaa is A or G
  MOD_RES (21)..(22)..(23)..(24): Xaa is A or G or is absent
HXGXSRVVMNRHKRLXXXXXXXXXYYLVSTASLKTPAXXPKPVY

SEQ ID NO: 4286 - protein, 37 aa, Artificial Sequence
  GFR-binding peptide
  MOD_RES (1)..(3)..(37): Xaa is C or S
  MOD_RES (15)..(16)..(17)..(18)..(19): Xaa is A or G
  MOD_RES (20)..(21)..(22)..(23): Xaa is A or G or is absent
XGXARVVMNQYNKLXXXXXXXXXLYLVSIASLQTPAX

SEQ ID NO: 4287 - protein, 38 aa, Artificial Sequence
  GFR-binding peptide
  MOD_RES (36)..(36): Xaa is C or S
  MOD_RES (12)..(13)..(14)..(15)..(16): Xaa is A or G
  MOD_RES (17)..(18)..(19)..(20): Xaa is A or G or is absent
LHDELTRYKKLXXXXXXXXXFYLVSIANLQVQTPRXQV

SEQ ID NO: 4288 - protein, 43 aa, Artificial Sequence
  GFR-binding peptide
  MOD_RES (1)..(3)..(37)..(38): Xaa is C or S
  MOD_RES (15)..(16)..(17)..(18)..(19): Xaa is A or G
  MOD_RES (20)..(21)..(22)..(23): Xaa is A or G or is absent
XGXGEVVMEYHYKLXXXXXXXXXKYLMSIPSLETPVXXAKPIS

SEQ ID NO: 4289 - protein, 40 aa, Artificial Sequence
  GFR-binding peptide
  MOD_RES (2)..(39): Xaa is C or S
  MOD_RES (15)..(16)..(17)..(18)..(19): Xaa is A or G
  MOD_RES (20)..(21)..(22)..(23): Xaa is A or G or is absent
KXALHDELTYHYKLXXXXXXXXXKYLVSIPSLQVQTPRXQ

SEQ ID NO: 4290 - protein, 40 aa, Artificial Sequence
  GFR-binding peptide
  MOD_RES (2)..(35)..(36): Xaa is C or S
  MOD_RES (13)..(14)..(15)..(16)..(17): Xaa is A or G
  MOD_RES (18)..(19)..(20)..(21): Xaa is A or G or is absent
KXSKVVMYHYKLXXXXXXXXXKYLISIPSLDQPVXXPSAS

SEQ ID NO: 4291 - protein, 40 aa, Artificial Sequence
  GFR-binding peptide
  MOD_RES (2)..(4)..(36)..(37): Xaa is C or S
HXGXAKVVMNQYNKLIVNNSSDLYLVSIASLKTPAXXAKP

SEQ ID NO: 4292 - protein, 37 aa, Artificial Sequence
  GFR-binding peptide
  MOD_RES (34)..(35): Xaa is C or S
  MOD_RES (12)..(13)..(14)..(15)..(16): Xaa is A or G
  MOD_RES (17)..(18)..(19)..(20): Xaa is A or G or is absent
ARVVMNYHYKLXXXXXXXXXKYLVSIPSLQTPAXXPK

SEQ ID NO: 4293 - protein, 41 aa, Artificial Sequence
  GFR-binding peptide
  MOD_RES (2)..(37)..(38): Xaa is C or S
  MOD_RES (15)..(16)..(17)..(18)..(19): Xaa is A or G
  MOD_RES (20)..(21)..(22)..(23): Xaa is A or G or is absent
GXEAVSMGEYHYKLXXXXXXXXXKYLVSIPSLKTPVXXAKG

SEQ ID NO: 4294 - protein, 38 aa, Artificial Sequence
  GFR-binding peptide
  MOD_RES (33)..(34): Xaa is C or S
  MOD_RES (11)..(12)..(13)..(14)..(15): Xaa is A or G
  MOD_RES (16)..(17)..(18)..(19): Xaa is A or G or is absent
EVVMERYKKLXXXXXXXXXFYLMSIANLETPVXXAKPI

SEQ ID NO: 4295 - protein, 33 aa, Artificial Sequence
  GFR-binding peptide
  MOD_RES (2)..(33): Xaa is C or S
KXSKVVMRYKKLVKPTRGVFYLISIANLDQPVX

SEQ ID NO: 4296 - protein, 36 aa, Artificial Sequence
  GFR-binding peptide
  MOD_RES (31)..(32): Xaa is C or S
KVVMNRHKRLIVNNSSDYYLVSTASLKTPAXXAKPV

SEQ ID NO: 4297 - protein, 39 aa, Artificial Sequence
  GFR-binding peptide
  MOD_RES (2)..(4)..(38)..(39): Xaa is C or S
  MOD_RES (16)..(17)..(18)..(19)..(20): Xaa is A or G
  MOD_RES (21)..(22)..(23)..(24): Xaa is A or G or is absent
RXGXGEVVMERYKKLXXXXXXXXXFYLMSIANLETPVXX

SEQ ID NO: 4298 - protein, 33 aa, Artificial Sequence
  GFR-binding peptide
  MOD_RES (2)..(33): Xaa is C or S
KXSKVIMRYKKLIKPTKGIFYLISIANLDQSVX

SEQ ID NO: 4299 - protein, 37 aa, Artificial Sequence
  GFR-binding peptide
  MOD_RES (2)..(36)..(37): Xaa is C or S
  MOD_RES (14)..(15)..(16)..(17)..(18): Xaa is A or G
  MOD_RES (19)..(20)..(21)..(22): Xaa is A or G or is absent
GXGEVVMERYKKLXXXXXXXXXFYLMSIANLETPVXX

SEQ ID NO: 4300 - protein, 36 aa, Artificial Sequence
  GFR-binding peptide
  MOD_RES (2)..(33)..(34): Xaa is C or S
KXSKVVMRHKRLVKPTRGVYYLISTASLDQPVXXPS

SEQ ID NO: 4301 - protein, 40 aa, Artificial Sequence
  GFR-binding peptide
  MOD_RES (2)..(34): Xaa is C or S
GXSRVVMNYHYKLIVNSSDDKYLVSIPSLKTPAXTPKTVH

SEQ ID NO: 4302 - protein, 36 aa, Artificial Sequence
  GFR-binding peptide
  MOD_RES (34)..(35): Xaa is C or S
  MOD_RES (12)..(13)..(14)..(15)..(16): Xaa is A or G
  MOD_RES (17)..(18)..(19)..(20): Xaa is A or G or is absent
GEVVMDYHYKLXXXXXXXXXKYLMSIPSLETPVXXA

SEQ ID NO: 4303 - protein, 37 aa, Artificial Sequence
  GFR-binding peptide
  MOD_RES (2)..(34)..(35): Xaa is C or S
GXGEVVMDQYNKLVVKENEDLYLMSIASLETPVXXAK

SEQ ID NO: 4304 - protein, 38 aa, Artificial Sequence
  GFR-binding peptide
  MOD_RES (1)..(35)..(36): Xaa is C or S
  MOD_RES (13)..(14)..(15)..(16)..(17): Xaa is A or G
  MOD_RES (18)..(19)..(20)..(21): Xaa is A or G or is absent
XSRVVMNQYNKLXXXXXXXXXLYLVSIASLKTPAXXPK

SEQ ID NO: 4305 - protein, 40 aa, Artificial Sequence
  GFR-binding peptide
  MOD_RES (2)..(4)..(36)..(37): Xaa is C or S
RXGXGEVVMERYKKLVVKDYEDFYLMSIANLETPVXXAKP

SEQ ID NO: 4306 - protein, 36 aa, Artificial Sequence
  GFR-binding peptide
  MOD_RES (2)..(4)..(35)..(36): Xaa is C or S
SXKXSKVVMQYNKLVKPTRGVLYLISIASLDQPVXX

SEQ ID NO: 4307 - protein, 40 aa, Artificial Sequence
  GFR-binding peptide
  MOD_RES (2)..(35)..(36): Xaa is C or S
GXEAVSMGERHKRLTPVGMDDYYLVSTASLKTPVXXAKGV

SEQ ID NO: 4308 - protein, 32 aa, Artificial Sequence
  GFR-binding peptide
  MOD_RES (31)..(32): Xaa is C or S
EVVMERYKKLVVKDYEDFYLMSIANLETPVXX

SEQ ID NO: 4309 - protein, 36 aa, Artificial Sequence
  GFR-binding peptide
  MOD_RES (35)..(35): Xaa is C or S
  MOD_RES (11)..(12)..(13)..(14)..(15): Xaa is A or G
  MOD_RES (16)..(17)..(18)..(19): Xaa is A or G or is absent
HDELTRYKKLXXXXXXXXXFYLVSIANLQVQTPRXQ

SEQ ID NO: 4310 - protein, 33 aa, Artificial Sequence
  GFR-binding peptide
  MOD_RES (33)..(33): Xaa is C or S
  MOD_RES (11)..(12)..(13)..(14)..(15): Xaa is A or G
  MOD_RES (16)..(17)..(18)..(19): Xaa is A or G or is absent
SKVIMQYNKLXXXXXXXXXLYLISIASLDQSVX

SEQ ID NO: 4311 - protein, 41 aa, Artificial Sequence
  GFR-binding peptide
  MOD_RES (1)..(35)..(36): Xaa is C or S
  MOD_RES (13)..(14)..(15)..(16)..(17): Xaa is A or G
  MOD_RES (18)..(19)..(20)..(21): Xaa is A or G or is absent
XARVVMNYHYKLXXXXXXXXXKYLVSIPSLQTPAXXPKPVT

SEQ ID NO: 4312 - protein, 36 aa, Artificial Sequence
  GFR-binding peptide
  MOD_RES (1)..(34)..(35): Xaa is C or S
XEAVSMGERHKRLTPVGMDDYYLVSTASLKTPVXXA

SEQ ID NO: 4313 - protein, 32 aa, Artificial Sequence
  GFR-binding peptide
  MOD_RES (1)..(1): Xaa is C or S
XGEVVMERYKKLVVKDYEDFYLMSIANLETPV

SEQ ID NO: 4314 - protein, 41 aa, Artificial Sequence
  GFR-binding peptide
  MOD_RES (1)..(3)..(35)..(36): Xaa is C or S
XGXGEVVMDQYNKLVVKENEDLYLMSIASLETPVXXAKPIK

SEQ ID NO: 4315 - protein, 39 aa, Artificial Sequence
  GFR-binding peptide
  MOD_RES (2)..(33)..(34): Xaa is C or S
KXSKVVMRHKRLVKPTRGVYYLISTASLDQPVXXPSASA

SEQ ID NO: 4316 - protein, 38 aa, Artificial Sequence
  GFR-binding peptide
  MOD_RES (1)..(3)..(35)..(36): Xaa is C or S
XGXGEVVMDYHYKLVVKENEDKYLMSIPSLETPVXXAK

SEQ ID NO: 4317 - protein, 39 aa, Artificial Sequence
  GFR-binding peptide
  MOD_RES (35)..(36): Xaa is C or S
  MOD_RES (13)..(14)..(15)..(16)..(17): Xaa is A or G
  MOD_RES (18)..(19)..(20)..(21): Xaa is A or G or is absent
EAVSMGEYHYKLXXXXXXXXXKYLVSIPSLKTPVXXAKG

SEQ ID NO: 4318 - protein, 41 aa, Artificial Sequence
  GFR-binding peptide
  MOD_RES (1)..(35): Xaa is C or S
  MOD_RES (13)..(14)..(15)..(16)..(17): Xaa is A or G
  MOD_RES (18)..(19)..(20)..(21): Xaa is A or G or is absent
XSRVVMNYHYKLXXXXXXXXXKYLVSIPSLKTPAXTPKTVH

SEQ ID NO: 4319 - protein, 36 aa, Artificial Sequence
  GFR-binding peptide
  MOD_RES (1)..(3)..(35)..(36): Xaa is C or S
XGXSRVVMNRHKRLIVNSSDDYYLVSTASLKTPAXX

SEQ ID NO: 4320 - protein, 36 aa, Artificial Sequence
  GFR-binding peptide
  MOD_RES (2)..(36): Xaa is C or S
  MOD_RES (14)..(15)..(16)..(17)..(18): Xaa is A or G
  MOD_RES (19)..(20)..(21)..(22): Xaa is A or G or is absent
GXAKVVMNRYKKLXXXXXXXXXFYLVSIANLKTPAX

SEQ ID NO: 4321 - protein, 38 aa, Artificial Sequence
  GFR-binding peptide
  MOD_RES (1)..(35): Xaa is C or S
  MOD_RES (13)..(14)..(15)..(16)..(17): Xaa is A or G
  MOD_RES (18)..(19)..(20)..(21): Xaa is A or G or is absent
XSRVVMNYHYKLXXXXXXXXXKYLVSIPSLKTPAXTPK

SEQ ID NO: 4322 - protein, 38 aa, Artificial Sequence
  GFR-binding peptide
  MOD_RES (33)..(34): Xaa is C or S
  MOD_RES (11)..(12)..(13)..(14)..(15): Xaa is A or G
  MOD_RES (16)..(17)..(18)..(19): Xaa is A or G or is absent
RVVMNQYNKLXXXXXXXXXLYLVSIASLKTPAXXPKPV

SEQ ID NO: 4323 - protein, 34 aa, Artificial Sequence
  GFR-binding peptide
  MOD_RES (2)..(34): Xaa is C or S
GXARVVMNRHKRLIVNSSDDYYLVSTASLQTPAX

SEQ ID NO: 4324 - protein, 38 aa, Artificial Sequence
  GFR-binding peptide
  MOD_RES (2)..(34)..(35): Xaa is C or S
GXAKVVMNRYKKLIVNNSSDFYLVSIANLKTPAXXAKP

SEQ ID NO: 4325 - protein, 37 aa, Artificial Sequence
  GFR-binding peptide
  MOD_RES (31)..(32): Xaa is C or S
KVVMNYHYKLIVNNSSDKYLVSIPSLKTPAXXAKPVA

SEQ ID NO: 4326 - protein, 33 aa, Artificial Sequence
  GFR-binding peptide
  MOD_RES (31)..(32): Xaa is C or S
SRVIMYHYKLVKPKRGVKYLISIPSLAQPVXXP

SEQ ID NO: 4327 - protein, 35 aa, Artificial Sequence
  GFR-binding peptide
  MOD_RES (31)..(32): Xaa is C or S
SRVIMRHKRLVKPKRGVYYLISTASLAQPVXXPAA

SEQ ID NO: 4328 - protein, 38 aa, Artificial Sequence
  GFR-binding peptide
  MOD_RES (1)..(3)..(36)..(37): Xaa is C or S
  MOD_RES (14)..(15)..(16)..(17)..(18): Xaa is A or G
  MOD_RES (19)..(20)..(21)..(22): Xaa is A or G or is absent
XKXSKVVMYHYKLXXXXXXXXXKYLISIPSLDQPVXXP

SEQ ID NO: 4329 - protein, 38 aa, Artificial Sequence
  GFR-binding peptide
  MOD_RES (1)..(33)..(34): Xaa is C or S
XARVVMNRYKKLIVNSSDDFYLVSIANLQTPAXXPKPV

SEQ ID NO: 4330 - protein, 37 aa, Artificial Sequence
  GFR-binding peptide
  MOD_RES (2)..(4)..(35)..(36): Xaa is C or S
SXKXSKVIMYHYKLIKPTKGIKYLISIPSLDQSVXXP

SEQ ID NO: 4331 - protein, 35 aa, Artificial Sequence
  GFR-binding peptide
  MOD_RES (34)..(35): Xaa is C or S
  MOD_RES (12)..(13)..(14)..(15)..(16): Xaa is A or G
  MOD_RES (17)..(18)..(19)..(20): Xaa is A or G or is absent
ARVVMNRYKKLXXXXXXXXXFYLVSIANLQTPAXX

SEQ ID NO: 4332 - protein, 36 aa, Artificial Sequence
  GFR-binding peptide
  MOD_RES (2)..(36): Xaa is C or S
  MOD_RES (14)..(15)..(16)..(17)..(18): Xaa is A or G
  MOD_RES (19)..(20)..(21)..(22): Xaa is A or G or is absent
GXSRVVMNQYNKLXXXXXXXXXLYLVSIASLKTPAX

SEQ ID NO: 4333 - protein, 35 aa, Artificial Sequence
  GFR-binding peptide
  MOD_RES (12)..(13)..(14)..(15)..(16): Xaa is A or G
  MOD_RES (17)..(18)..(19)..(20): Xaa is A or G or is absent
LHDELTYHYKLXXXXXXXXXKYLVSIPSLQVQTPR

SEQ ID NO: 4334 - protein, 39 aa, Artificial Sequence
  GFR-binding peptide
  MOD_RES (1)..(38): Xaa is C or S
  MOD_RES (14)..(15)..(16)..(17)..(18): Xaa is A or G
  MOD_RES (19)..(20)..(21)..(22): Xaa is A or G or is absent
XALHDELTYHYKLXXXXXXXXXKYLVSIPSLQVQTPRXQ

SEQ ID NO: 4335 - protein, 33 aa, Artificial Sequence
  GFR-binding peptide
  MOD_RES (1)..(1): Xaa is C or S
  MOD_RES (12)..(13)..(14)..(15)..(16): Xaa is A or G
  MOD_RES (17)..(18)..(19)..(20): Xaa is A or G or is absent
XSKVVMRYKKLXXXXXXXXXFYLISIANLDQPV

SEQ ID NO: 4336 - protein, 39 aa, Artificial Sequence
  GFR-binding peptide
  MOD_RES (2)..(39): Xaa is C or S
KXALHDELTRHKRLFIPKKRVIEYYLVSTASLQVQTPRX

SEQ ID NO: 4337 - protein, 35 aa, Artificial Sequence
  GFR-binding peptide
  MOD_RES (2)..(2): Xaa is C or S
  MOD_RES (14)..(15)..(16)..(17)..(18): Xaa is A or G
  MOD_RES (19)..(20)..(21)..(22): Xaa is A or G or is absent
GXGEVVMEQYNKLXXXXXXXXXLYLMSIASLETPV

SEQ ID NO: 4338 - protein, 34 aa, Artificial Sequence
  GFR-binding peptide
  MOD_RES (1)..(34): Xaa is C or S
  MOD_RES (12)..(13)..(14)..(15)..(16): Xaa is A or G
  MOD_RES (17)..(18)..(19)..(20): Xaa is A or G or is absent
XSKVIMRYKKLXXXXXXXXXFYLISIANLDQSVX

SEQ ID NO: 4339 - protein, 36 aa, Artificial Sequence
  GFR-binding peptide
  MOD_RES (32)..(33): Xaa is C or S
GEVVMEYHYKLVVKDYEDKYLMSIPSLETPVXXAKP

SEQ ID NO: 4340 - protein, 39 aa, Artificial Sequence
  GFR-binding peptide
  MOD_RES (2)..(33)..(34): Xaa is C or S
KXSKVIMRHKRLIKPTKGIYYLISTASLDQSVXXPSASA

SEQ ID NO: 4341 - protein, 37 aa, Artificial Sequence
  GFR-binding peptide
  MOD_RES (37)..(37): Xaa is C or S
ALHDELTRHKRLFIPKKRVIEYYLVSTASLQVQTPRX

SEQ ID NO: 4342 - protein, 36 aa, Artificial Sequence
  GFR-binding peptide
  MOD_RES (2)..(34)..(35): Xaa is C or S
GXGEVVMEYHYKLVVKDYEDKYLMSIPSLETPVXXA

SEQ ID NO: 4343 - protein, 42 aa, Artificial Sequence
  GFR-binding peptide
  MOD_RES (2)..(4)..(41): Xaa is C or S
  MOD_RES (17)..(18)..(19)..(20)..(21): Xaa is A or G
  MOD_RES (22)..(23)..(24)..(25): Xaa is A or G or is absent
EXKXALHDELTRYKKLXXXXXXXXXFYLVSIANLQVQTPRXQ

SEQ ID NO: 4344 - protein, 36 aa, Artificial Sequence
  GFR-binding peptide
  MOD_RES (1)..(32)..(33): Xaa is C or S
XSKVIMYHYKLIKPTKGIKYLISIPSLDQSVXXPSA

SEQ ID NO: 4345 - protein, 37 aa, Artificial Sequence
  GFR-binding peptide
  MOD_RES (1)..(3)..(37): Xaa is C or S
  MOD_RES (15)..(16)..(17)..(18)..(19): Xaa is A or G
  MOD_RES (20)..(21)..(22)..(23): Xaa is A or G or is absent
XGXGEVVMERHKRLXXXXXXXXXYYLMSTASLETPVX

SEQ ID NO: 4346 - protein, 32 aa, Artificial Sequence
  GFR-binding peptide
  MOD_RES (11)..(12)..(13)..(14)..(15): Xaa is A or G
  MOD_RES (16)..(17)..(18)..(19): Xaa is A or G or is absent
SKVVMQYNKLXXXXXXXXXLYLISIASLDQPV

SEQ ID NO: 4347 - protein, 40 aa, Artificial Sequence
  GFR-binding peptide
  MOD_RES (2)..(4)..(37)..(38): Xaa is C or S
  MOD_RES (15)..(16)..(17)..(18)..(19): Xaa is A or G
  MOD_RES (20)..(21)..(22)..(23): Xaa is A or G or is absent
SXKXSKVVMYHYKLXXXXXXXXXKYLISIPSLDQPVXXPS

SEQ ID NO: 4348 - protein, 35 aa, Artificial Sequence
  GFR-binding peptide
  MOD_RES (35)..(35): Xaa is C or S
HDELTRYKKLFIPKKRVIEFYLVSIANLQVQTPRX

SEQ ID NO: 4349 - protein, 39 aa, Artificial Sequence
  GFR-binding peptide
  MOD_RES (1)..(3)..(37)..(38): Xaa is C or S
  MOD_RES (15)..(16)..(17)..(18)..(19): Xaa is A or G
  MOD_RES (20)..(21)..(22)..(23): Xaa is A or G or is absent
XGXARVVMNQYNKLXXXXXXXXXLYLVSIASLQTPAXXP

SEQ ID NO: 4350 - protein, 33 aa, Artificial Sequence
  GFR-binding peptide
  MOD_RES (33)..(33): Xaa is C or S
  MOD_RES (11)..(12)..(13)..(14)..(15): Xaa is A or G
  MOD_RES (16)..(17)..(18)..(19): Xaa is A or G or is absent
RVVMNRYKKLXXXXXXXXXFYLVSIANLQTPAX

SEQ ID NO: 4351 - protein, 34 aa, Artificial Sequence
  GFR-binding peptide
  MOD_RES (1)..(32)..(33): Xaa is C or S
XSKVVMRYKKLVKPTRGVFYLISIANLDQPVXXP

SEQ ID NO: 4352 - protein, 38 aa, Artificial Sequence
  GFR-binding peptide
  MOD_RES (37)..(37): Xaa is C or S
ALHDELTQYNKLFIPKKRVIELYLVSIASLQVQTPRXQ

SEQ ID NO: 4353 - protein, 37 aa, Artificial Sequence
  GFR-binding peptide
  MOD_RES (2)..(4)..(36)..(37): Xaa is C or S
HXGXAKVVMNYHYKLIVNNSSDKYLVSIPSLKTPAXX

SEQ ID NO: 4354 - protein, 33 aa, Artificial Sequence
  GFR-binding peptide
  MOD_RES (1)..(1): Xaa is C or S
XEAVSMGEQYNKLTPVGMDDLYLVSIASLKTPV

SEQ ID NO: 4355 - protein, 36 aa, Artificial Sequence
  GFR-binding peptide
  MOD_RES (31)..(32): Xaa is C or S
RVVMNRYKKLIVNSSDDFYLVSIANLKTPAXXPKPV

SEQ ID NO: 4356 - protein, 37 aa, Artificial Sequence
  GFR-binding peptide
  MOD_RES (2)..(4)..(36)..(37): Xaa is C or S
RXGXGEVVMDRHKRLVVKENEDYYLMSTASLETPVXX

SEQ ID NO: 4357 - protein, 37 aa, Artificial Sequence
  GFR-binding peptide
  MOD_RES (2)..(4): Xaa is C or S
  MOD_RES (16)..(17)..(18)..(19)..(20): Xaa is A or G
  MOD_RES (21)..(22)..(23)..(24): Xaa is A or G or is absent
RXGXGEVVMDRYKKLXXXXXXXXXFYLMSIANLETPV

SEQ ID NO: 4358 - protein, 36 aa, Artificial Sequence
  GFR-binding peptide
  MOD_RES (2)..(36): Xaa is C or S
  MOD_RES (14)..(15)..(16)..(17)..(18): Xaa is A or G
  MOD_RES (19)..(20)..(21)..(22): Xaa is A or G or is absent
GXGEVVMDQYNKLXXXXXXXXXLYLMSIASLETPVX

SEQ ID NO: 4359 - protein, 42 aa, Artificial Sequence
  GFR-binding peptide
  MOD_RES (2)..(4)..(38)..(39): Xaa is C or S
  MOD_RES (16)..(17)..(18)..(19)..(20): Xaa is A or G
  MOD_RES (21)..(22)..(23)..(24): Xaa is A or G or is absent
RXGXGEVVMDRYKKLXXXXXXXXXFYLMSIANLETPVXXAKP

SEQ ID NO: 4360 - protein, 42 aa, Artificial Sequence
  GFR-binding peptide
  MOD_RES (2)..(36)..(37): Xaa is C or S
  MOD_RES (14)..(15)..(16)..(17)..(18): Xaa is A or G
  MOD_RES (19)..(20)..(21)..(22): Xaa is A or G or is absent
GXGEVVMDRYKKLXXXXXXXXXFYLMSIANLETPVXXAKPIK

SEQ ID NO: 4361 - protein, 35 aa, Artificial Sequence
  GFR-binding peptide
  MOD_RES (31)..(32): Xaa is C or S
SKVVMYHYKLVKPTRGVKYLISIPSLDQPVXXPSA

SEQ ID NO: 4362 - protein, 32 aa, Artificial Sequence
  GFR-binding peptide
  MOD_RES (32)..(32): Xaa is C or S
ARVVMNYHYKLIVNSSDDKYLVSIPSLQTPAX

SEQ ID NO: 4363 - protein, 40 aa, Artificial Sequence
  GFR-binding peptide
  MOD_RES (1)..(3)..(35)..(36): Xaa is C or S
XGXSRVVMNYHYKLIVNSSDDKYLVSIPSLKTPAXXPKPV

SEQ ID NO: 4364 - protein, 34 aa, Artificial Sequence
  GFR-binding peptide
  MOD_RES (1)..(1): Xaa is C or S
  MOD_RES (13)..(14)..(15)..(16)..(17): Xaa is A or G
  MOD_RES (18)..(19)..(20)..(21): Xaa is A or G or is absent
XSRVVMNRYKKLXXXXXXXXXFYLVSIANLKTPA

SEQ ID NO: 4365 - protein, 39 aa, Artificial Sequence
  GFR-binding peptide
  MOD_RES (1)..(35)..(36): Xaa is C or S
  MOD_RES (13)..(14)..(15)..(16)..(17): Xaa is A or G
  MOD_RES (18)..(19)..(20)..(21): Xaa is A or G or is absent
XGEVVMDQYNKLXXXXXXXXXLYLMSIASLETPVXXAKP

SEQ ID NO: 4366 - protein, 38 aa, Artificial Sequence
  GFR-binding peptide
  MOD_RES (37)..(37): Xaa is C or S
ALHDELTRHKRLFIPKKRVIEYYLVSTASLQVQTPRXQ

SEQ ID NO: 4367 - protein, 36 aa, Artificial Sequence
  GFR-binding peptide
  MOD_RES (13)..(14)..(15)..(16)..(17): Xaa is A or G
  MOD_RES (18)..(19)..(20)..(21): Xaa is A or G or is absent
ALHDELTYHYKLXXXXXXXXXKYLVSIPSLQVQTPR

SEQ ID NO: 4368 - protein, 39 aa, Artificial Sequence
  GFR-binding peptide
  MOD_RES (2)..(35)..(36): Xaa is C or S
GXEAVSMGEQYNKLTPVGMDDLYLVSIASLKTPVXXAKG

SEQ ID NO: 4369 - protein, 35 aa, Artificial Sequence
  GFR-binding peptide
  MOD_RES (33)..(34): Xaa is C or S
  MOD_RES (11)..(12)..(13)..(14)..(15): Xaa is A or G
  MOD_RES (16)..(17)..(18)..(19): Xaa is A or G or is absent
RVVMNRYKKLXXXXXXXXXFYLVSIANLKTPAXXP

SEQ ID NO: 4370 - protein, 39 aa, Artificial Sequence
  GFR-binding peptide
  MOD_RES (2)..(36): Xaa is C or S
  MOD_RES (14)..(15)..(16)..(17)..(18): Xaa is A or G
  MOD_RES (19)..(20)..(21)..(22): Xaa is A or G or is absent
GXSRVVMNQYNKLXXXXXXXXXLYLVSIASLKTPAXTPK

SEQ ID NO: 4371 - protein, 39 aa, Artificial Sequence
  GFR-binding peptide
  MOD_RES (34)..(35): Xaa is C or S
  MOD_RES (12)..(13)..(14)..(15)..(16): Xaa is A or G
  MOD_RES (17)..(18)..(19)..(20): Xaa is A or G or is absent
GEVVMEQYNKLXXXXXXXXXLYLMSIASLETPVXXAKPI

SEQ ID NO: 4372 - protein, 35 aa, Artificial Sequence
  GFR-binding peptide
  MOD_RES (35)..(35): Xaa is C or S
  MOD_RES (13)..(14)..(15)..(16)..(17): Xaa is A or G
  MOD_RES (18)..(19)..(20)..(21): Xaa is A or G or is absent
EAVSMGERYKKLXXXXXXXXXFYLVSIANLKTPVX

SEQ ID NO: 4373 - protein, 36 aa, Artificial Sequence
  GFR-binding peptide
  MOD_RES (2)..(34): Xaa is C or S
GXSRVVMNQYNKLIVNSSDDLYLVSIASLKTPAXTP

SEQ ID NO: 4374 - protein, 37 aa, Artificial Sequence
  GFR-binding peptide
  MOD_RES (37)..(37): Xaa is C or S
ALHDELTQYNKLFIPKKRVIELYLVSIASLQVQTPRX

SEQ ID NO: 4375 - protein, 39 aa, Artificial Sequence
  GFR-binding peptide
  MOD_RES (1)..(33)..(34): Xaa is C or S
XAKVVMNQYNKLIVNNSSDLYLVSIASLKTPAXXAKPVA

SEQ ID NO: 4376 - protein, 40 aa, Artificial Sequence
  GFR-binding peptide
  MOD_RES (2)..(34)..(35): Xaa is C or S
GXARVVMNRYKKLIVNSSDDFYLVSIANLQTPAXXPKPVT

SEQ ID NO: 4377 - protein, 39 aa, Artificial Sequence
  GFR-binding peptide
  MOD_RES (1)..(3)..(36)..(37): Xaa is C or S
XGXEAVSMGERHKRLTPVGMDDYYLVSTASLKTPVXXAK

SEQ ID NO: 4378 - protein, 41 aa, Artificial Sequence
  GFR-binding peptide
  MOD_RES (2)..(4)..(38): Xaa is C or S
  MOD_RES (16)..(17)..(18)..(19)..(20): Xaa is A or G
  MOD_RES (21)..(22)..(23)..(24): Xaa is A or G or is absent
HXGXSRVVMNRYKKLXXXXXXXXXFYLVSIANLKTPAXTPK

SEQ ID NO: 4379 - protein, 39 aa, Artificial Sequence
  GFR-binding peptide
  MOD_RES (2)..(4)..(35)..(36): Xaa is C or S
SXKXSKVIMRHKRLIKPTKGIYYLISTASLDQSVXXPSA

SEQ ID NO: 4380 - protein, 37 aa, Artificial Sequence
  GFR-binding peptide
  MOD_RES (2)..(34)..(35): Xaa is C or S
GXSRVVMNRYKKLIVNSSDDFYLVSIANLKTPAXXPK

SEQ ID NO: 4381 - protein, 35 aa, Artificial Sequence
  GFR-binding peptide
  MOD_RES (1)..(3): Xaa is C or S
  MOD_RES (14)..(15)..(16)..(17)..(18): Xaa is A or G
  MOD_RES (19)..(20)..(21)..(22): Xaa is A or G or is absent
XKXSKVVMQYNKLXXXXXXXXXLYLISIASLDQPV

SEQ ID NO: 4382 - protein, 37 aa, Artificial Sequence
  GFR-binding peptide
  MOD_RES (1)..(3)..(37): Xaa is C or S
  MOD_RES (15)..(16)..(17)..(18)..(19): Xaa is A or G
  MOD_RES (20)..(21)..(22)..(23): Xaa is A or G or is absent
XGXGEVVMDRHKRLXXXXXXXXXYYLMSTASLETPVX

SEQ ID NO: 4383 - protein, 40 aa, Artificial Sequence
  GFR-binding peptide
  MOD_RES (2)..(4)..(37)..(38): Xaa is C or S
  MOD_RES (15)..(16)..(17)..(18)..(19): Xaa is A or G
  MOD_RES (20)..(21)..(22)..(23): Xaa is A or G or is absent
SXKXSKVIMRHKRLXXXXXXXXXYYLISTASLDQSVXXPS

SEQ ID NO: 4384 - protein, 40 aa, Artificial Sequence
  GFR-binding peptide
  MOD_RES (2)..(4)..(38)..(39): Xaa is C or S
  MOD_RES (16)..(17)..(18)..(19)..(20): Xaa is A or G
  MOD_RES (21)..(22)..(23)..(24): Xaa is A or G or is absent
HXGXAKVVMNQYNKLXXXXXXXXXLYLVSIASLKTPAXXA

SEQ ID NO: 4385 - protein, 36 aa, Artificial Sequence
  GFR-binding peptide
  MOD_RES (2)..(36): Xaa is C or S
  MOD_RES (14)..(15)..(16)..(17)..(18): Xaa is A or G
  MOD_RES (19)..(20)..(21)..(22): Xaa is A or G or is absent
GXAKVVMNRHKRLXXXXXXXXXYYLVSTASLKTPAX

SEQ ID NO: 4386 - protein, 36 aa, Artificial Sequence
  GFR-binding peptide
  MOD_RES (2)..(4): Xaa is C or S
  MOD_RES (15)..(16)..(17)..(18)..(19): Xaa is A or G
  MOD_RES (20)..(21)..(22)..(23): Xaa is A or G or is absent
SXKXSRVIMRYKKLXXXXXXXXXFYLISIANLAQPV

SEQ ID NO: 4387 - protein, 42 aa, Artificial Sequence
  GFR-binding peptide
  MOD_RES (2)..(4)..(38): Xaa is C or S
  MOD_RES (16)..(17)..(18)..(19)..(20): Xaa is A or G
  MOD_RES (21)..(22)..(23)..(24): Xaa is A or G or is absent
HXGXSRVVMNQYNKLXXXXXXXXXLYLVSIASLKTPAXTPKT

SEQ ID NO: 4388 - protein, 42 aa, Artificial Sequence
  GFR-binding peptide
  MOD_RES (2)..(4)..(38)..(39): Xaa is C or S
  MOD_RES (16)..(17)..(18)..(19)..(20): Xaa is A or G
  MOD_RES (21)..(22)..(23)..(24): Xaa is A or G or is absent
RXGXGEVVMERYKKLXXXXXXXXXFYLMSIANLETPVXXAKP

SEQ ID NO: 4389 - protein, 33 aa, Artificial Sequence
  GFR-binding peptide
  MOD_RES (32)..(33): Xaa is C or S
AKVVMNQYNKLIVNNSSDLYLVSIASLKTPAXX

SEQ ID NO: 4390 - protein, 33 aa, Artificial Sequence
  GFR-binding peptide
  MOD_RES (1)..(3): Xaa is C or S
XKXSKVVMQYNKLVKPTRGVLYLISIASLDQPV

SEQ ID NO: 4391 - protein, 34 aa, Artificial Sequence
  GFR-binding peptide
LHDELTQYNKLFIPKKRVIELYLVSIASLQVQTP

SEQ ID NO: 4392 - protein, 37 aa, Artificial Sequence
  GFR-binding peptide
  MOD_RES (35)..(35): Xaa is C or S
HDELTRYKKLFIPKKRVIEFYLVSIANLQVQTPRXQV

SEQ ID NO: 4393 - protein, 33 aa, Artificial Sequence
  GFR-binding peptide
  MOD_RES (32)..(33): Xaa is C or S
SRVVMNYHYKLIVNSSDDKYLVSIPSLKTPAXX

SEQ ID NO: 4394 - protein, 38 aa, Artificial Sequence
  GFR-binding peptide
  MOD_RES (33)..(34): Xaa is C or S
  MOD_RES (11)..(12)..(13)..(14)..(15): Xaa is A or G
  MOD_RES (16)..(17)..(18)..(19): Xaa is A or G or is absent
SRVIMQYNKLXXXXXXXXXLYLISIASLAQPVXXPAAS

SEQ ID NO: 4395 - protein, 35 aa, Artificial Sequence
  GFR-binding peptide
  MOD_RES (2)..(33)..(34): Xaa is C or S
KXSKVVMRHKRLVKPTRGVYYLISTASLDQPVXXP

SEQ ID NO: 4396 - protein, 40 aa, Artificial Sequence
  GFR-binding peptide
  MOD_RES (34)..(35): Xaa is C or S
  MOD_RES (12)..(13)..(14)..(15)..(16): Xaa is A or G
  MOD_RES (17)..(18)..(19)..(20): Xaa is A or G or is absent
AKVVMNYHYKLXXXXXXXXXKYLVSIPSLKTPAXXAKPVA

SEQ ID NO: 4397 - protein, 39 aa, Artificial Sequence
  GFR-binding peptide
  MOD_RES (33)..(34): Xaa is C or S
  MOD_RES (11)..(12)..(13)..(14)..(15): Xaa is A or G
  MOD_RES (16)..(17)..(18)..(19): Xaa is A or G or is absent
EVVMEQYNKLXXXXXXXXXLYLMSIASLETPVXXAKPIS

SEQ ID NO: 4398 - protein, 41 aa, Artificial Sequence
  GFR-binding peptide
  MOD_RES (2)..(4)..(36)..(37): Xaa is C or S
HXGXARVVMNRHKRLIVNSSDDYYLVSTASLQTPAXXPKPV

SEQ ID NO: 4399 - protein, 33 aa, Artificial Sequence
  GFR-binding peptide
  MOD_RES (1)..(33): Xaa is C or S
XSRVVMNYHYKLIVNSSDDKYLVSIPSLKTPAX

SEQ ID NO: 4400 - protein, 38 aa, Artificial Sequence
  GFR-binding peptide
  MOD_RES (1)..(38): Xaa is C or S
  MOD_RES (14)..(15)..(16)..(17)..(18): Xaa is A or G
  MOD_RES (19)..(20)..(21)..(22): Xaa is A or G or is absent
XALHDELTQYNKLXXXXXXXXXLYLVSIASLQVQTPRX

SEQ ID NO: 4401 - protein, 38 aa, Artificial Sequence
  GFR-binding peptide
  MOD_RES (1)..(3)..(34)..(35): Xaa is C or S
XKXSRVIMRHKRLVKPKRGVYYLISTASLAQPVXXPAA

SEQ ID NO: 4402 - protein, 34 aa, Artificial Sequence
  GFR-binding peptide
  MOD_RES (1)..(3): Xaa is C or S
XGXAKVVMNRYKKLIVNNSSDFYLVSIANLKTPA

SEQ ID NO: 4403 - protein, 35 aa, Artificial Sequence
  GFR-binding peptide
  MOD_RES (2)..(34)..(35): Xaa is C or S
GXSRVVMNRYKKLIVNSSDDFYLVSIANLKTPAXX

SEQ ID NO: 4404 - protein, 35 aa, Artificial Sequence
  GFR-binding peptide
  MOD_RES (1)..(1): Xaa is C or S
  MOD_RES (14)..(15)..(16)..(17)..(18): Xaa is A or G
  MOD_RES (19)..(20)..(21)..(22): Xaa is A or G or is absent
XEAVSMGEYHYKLXXXXXXXXXKYLVSIPSLKTPV

SEQ ID NO: 4405 - protein, 34 aa, Artificial Sequence
  GFR-binding peptide
  MOD_RES (31)..(32): Xaa is C or S
RVVMNRHKRLIVNSSDDYYLVSTASLQTPAXXPK

SEQ ID NO: 4406 - protein, 40 aa, Artificial Sequence
  GFR-binding peptide
  MOD_RES (2)..(4)..(36)..(37): Xaa is C or S
HXGXARVVMNRYKKLIVNSSDDFYLVSIANLQTPAXXPKP

SEQ ID NO: 4407 - protein, 43 aa, Artificial Sequence
  GFR-binding peptide
  MOD_RES (2)..(37)..(38): Xaa is C or S
  MOD_RES (15)..(16)..(17)..(18)..(19): Xaa is A or G
  MOD_RES (20)..(21)..(22)..(23): Xaa is A or G or is absent
GXEAVSMGERYKKLXXXXXXXXXFYLVSIANLKTPVXXAKGVK

SEQ ID NO: 4408 - protein, 43 aa, Artificial Sequence
  GFR-binding peptide
  MOD_RES (2)..(39): Xaa is C or S
KXALHDELTYHYKLFIPKKRVIEKYLVSIPSLQVQTPRXQVNR

SEQ ID NO: 4409 - protein, 34 aa, Artificial Sequence
  GFR-binding peptide
  MOD_RES (2)..(34): Xaa is C or S
GXGEVVMDRYKKLVVKENEDFYLMSIANLETPVX

SEQ ID NO: 4410 - protein, 38 aa, Artificial Sequence
  GFR-binding peptide
  MOD_RES (33)..(34): Xaa is C or S
  MOD_RES (11)..(12)..(13)..(14)..(15): Xaa is A or G
  MOD_RES (16)..(17)..(18)..(19): Xaa is A or G or is absent
KVVMNQYNKLXXXXXXXXXLYLVSIASLKTPAXXAKPV

SEQ ID NO: 4411 - protein, 42 aa, Artificial Sequence
  GFR-binding peptide
  MOD_RES (1)..(38): Xaa is C or S
  MOD_RES (14)..(15)..(16)..(17)..(18): Xaa is A or G
  MOD_RES (19)..(20)..(21)..(22): Xaa is A or G or is absent
XALHDELTRHKRLXXXXXXXXXYYLVSTASLQVQTPRXQVNR

SEQ ID NO: 4412 - protein, 35 aa, Artificial Sequence
  GFR-binding peptide
  MOD_RES (2)..(33)..(34): Xaa is C or S
KXSRVIMQYNKLVKPKRGVLYLISIASLAQPVXXP

SEQ ID NO: 4413 - protein, 33 aa, Artificial Sequence
  GFR-binding peptide
  MOD_RES (1)..(32)..(33): Xaa is C or S
XSKVVMYHYKLVKPTRGVKYLISIPSLDQPVXX

SEQ ID NO: 4414 - protein, 35 aa, Artificial Sequence
  GFR-binding peptide
  MOD_RES (1)..(3)..(34)..(35): Xaa is C or S
XKXSKVVMRYKKLVKPTRGVFYLISIANLDQPVXX

SEQ ID NO: 4415 - protein, 35 aa, Artificial Sequence
  GFR-binding peptide
  MOD_RES (31)..(32): Xaa is C or S
KVVMNRYKKLIVNNSSDFYLVSIANLKTPAXXAKP

SEQ ID NO: 4416 - protein, 40 aa, Artificial Sequence
  GFR-binding peptide
  MOD_RES (35)..(36): Xaa is C or S
  MOD_RES (13)..(14)..(15)..(16)..(17): Xaa is A or G
  MOD_RES (18)..(19)..(20)..(21): Xaa is A or G or is absent
EAVSMGERHKRLXXXXXXXXXYYLVSTASLKTPVXXAKGV

SEQ ID NO: 4417 - protein, 33 aa, Artificial Sequence
  GFR-binding peptide
  MOD_RES (31)..(32): Xaa is C or S
SKVVMRYKKLVKPTRGVFYLISIANLDQPVXXP

SEQ ID NO: 4418 - protein, 36 aa, Artificial Sequence
  GFR-binding peptide
  MOD_RES (2)..(35)..(36): Xaa is C or S
  MOD_RES (13)..(14)..(15)..(16)..(17): Xaa is A or G
  MOD_RES (18)..(19)..(20)..(21): Xaa is A or G or is absent
KXSKVIMRYKKLXXXXXXXXXFYLISIANLDQSVXX

SEQ ID NO: 4419 - protein, 33 aa, Artificial Sequence
  GFR-binding peptide
  MOD_RES (31)..(32): Xaa is C or S
SRVIMQYNKLVKPKRGVLYLISIASLAQPVXXP

SEQ ID NO: 4420 - protein, 40 aa, Artificial Sequence
  GFR-binding peptide
  MOD_RES (35)..(36): Xaa is C or S
  MOD_RES (13)..(14)..(15)..(16)..(17): Xaa is A or G
  MOD_RES (18)..(19)..(20)..(21): Xaa is A or G or is absent
EAVSMGEQYNKLXXXXXXXXXLYLVSIASLKTPVXXAKGV

SEQ ID NO: 4421 - protein, 34 aa, Artificial Sequence
  GFR-binding peptide
  MOD_RES (2)..(4): Xaa is C or S
SXKXSRVIMRHKRLVKPKRGVYYLISTASLAQPV

SEQ ID NO: 4422 - protein, 40 aa, Artificial Sequence
  GFR-binding peptide
  MOD_RES (2)..(36): Xaa is C or S
  MOD_RES (14)..(15)..(16)..(17)..(18): Xaa is A or G
  MOD_RES (19)..(20)..(21)..(22): Xaa is A or G or is absent
GXSRVVMNQYNKLXXXXXXXXXLYLVSIASLKTPAXTPKT

SEQ ID NO: 4423 - protein, 34 aa, Artificial Sequence
  GFR-binding peptide
  MOD_RES (1)..(34): Xaa is C or S
  MOD_RES (12)..(13)..(14)..(15)..(16): Xaa is A or G
  MOD_RES (17)..(18)..(19)..(20): Xaa is A or G or is absent
XSKVVMYHYKLXXXXXXXXXKYLISIPSLDQPVX

SEQ ID NO: 4424 - protein, 41 aa, Artificial Sequence
  GFR-binding peptide
  MOD_RES (1)..(3)..(37)..(38): Xaa is C or S
  MOD_RES (15)..(16)..(17)..(18)..(19): Xaa is A or G
  MOD_RES (20)..(21)..(22)..(23): Xaa is A or G or is absent
XGXSRVVMNYHYKLXXXXXXXXXKYLVSIPSLKTPAXXPKP

SEQ ID NO: 4425 - protein, 36 aa, Artificial Sequence
  GFR-binding peptide
  MOD_RES (2)..(4): Xaa is C or S
RXGXEAVSMGERYKKLTPVGMDDFYLVSIANLKTPV

SEQ ID NO: 4426 - protein, 33 aa, Artificial Sequence
  GFR-binding peptide
  MOD_RES (31)..(32): Xaa is C or S
RVVMNQYNKLIVNSSDDLYLVSIASLKTPAXXP

SEQ ID NO: 4427 - protein, 41 aa, Artificial Sequence
  GFR-binding peptide
  MOD_RES (2)..(36)..(37): Xaa is C or S
  MOD_RES (14)..(15)..(16)..(17)..(18): Xaa is A or G
  MOD_RES (19)..(20)..(21)..(22): Xaa is A or G or is absent
GXGEVVMDQYNKLXXXXXXXXXLYLMSIASLETPVXXAKPI

SEQ ID NO: 4428 - protein, 38 aa, Artificial Sequence
  GFR-binding peptide
  MOD_RES (2)..(33)..(34): Xaa is C or S
KXSRVIMRYKKLVKPKRGVFYLISIANLAQPVXXPAAS

SEQ ID NO: 4429 - protein, 36 aa, Artificial Sequence
  GFR-binding peptide
  MOD_RES (1)..(34)..(35): Xaa is C or S
  MOD_RES (12)..(13)..(14)..(15)..(16): Xaa is A or G
  MOD_RES (17)..(18)..(19)..(20): Xaa is A or G or is absent
XSKVVMRYKKLXXXXXXXXXFYLISIANLDQPVXXP

SEQ ID NO: 4430 - protein, 36 aa, Artificial Sequence
  GFR-binding peptide
  MOD_RES (33)..(34): Xaa is C or S
  MOD_RES (11)..(12)..(13)..(14)..(15): Xaa is A or G
  MOD_RES (16)..(17)..(18)..(19): Xaa is A or G or is absent
RVVMNRYKKLXXXXXXXXXFYLVSIANLQTPAXXPK

SEQ ID NO: 4431 - protein, 35 aa, Artificial Sequence
  GFR-binding peptide
  MOD_RES (2)..(4): Xaa is C or S
RXGXGEVVMDRHKRLVVKENEDYYLMSTASLETPV

SEQ ID NO: 4432 - protein, 34 aa, Artificial Sequence
  GFR-binding peptide
  MOD_RES (2)..(2): Xaa is C or S
  MOD_RES (13)..(14)..(15)..(16)..(17): Xaa is A or G
  MOD_RES (18)..(19)..(20)..(21): Xaa is A or G or is absent
KXSKVVMRYKKLXXXXXXXXXFYLISIANLDQPV

SEQ ID NO: 4433 - protein, 34 aa, Artificial Sequence
  GFR-binding peptide
  MOD_RES (1)..(33)..(34): Xaa is C or S
XGEVVMERHKRLVVKDYEDYYLMSTASLETPVXX

SEQ ID NO: 4434 - protein, 35 aa, Artificial Sequence
  GFR-binding peptide
  MOD_RES (2)..(34)..(35): Xaa is C or S
GXGEVVMEYHYKLVVKDYEDKYLMSIPSLETPVXX

SEQ ID NO: 4435 - protein, 33 aa, Artificial Sequence
  GFR-binding peptide
  MOD_RES (1)..(32)..(33): Xaa is C or S
XSRVIMRYKKLVKPKRGVFYLISIANLAQPVXX

SEQ ID NO: 4436 - protein, 36 aa, Artificial Sequence
  GFR-binding peptide
  MOD_RES (1)..(1): Xaa is C or S
  MOD_RES (14)..(15)..(16)..(17)..(18): Xaa is A or G
  MOD_RES (19)..(20)..(21)..(22): Xaa is A or G or is absent
XALHDELTRYKKLXXXXXXXXXFYLVSIANLQVQTP

SEQ ID NO: 4437 - protein, 38 aa, Artificial Sequence
  GFR-binding peptide
  MOD_RES (1)..(3)..(36)..(37): Xaa is C or S
XGXEAVSMGERYKKLTPVGMDDFYLVSIANLKTPVXXA

SEQ ID NO: 4438 - protein, 41 aa, Artificial Sequence
  GFR-binding peptide
  MOD_RES (2)..(36)..(37): Xaa is C or S
  MOD_RES (14)..(15)..(16)..(17)..(18): Xaa is A or G
  MOD_RES (19)..(20)..(21)..(22): Xaa is A or G or is absent
GXAKVVMNQYNKLXXXXXXXXXLYLVSIASLKTPAXXAKPV

SEQ ID NO: 4439 - protein, 36 aa, Artificial Sequence
  GFR-binding peptide
  MOD_RES (32)..(33): Xaa is C or S
GEVVMDYHYKLVVKENEDKYLMSIPSLETPVXXAKP

SEQ ID NO: 4440 - protein, 39 aa, Artificial Sequence
  GFR-binding peptide
  MOD_RES (2)..(34)..(35): Xaa is C or S
GXGEVVMDRHKRLVVKENEDYYLMSTASLETPVXXAKPI

SEQ ID NO: 4441 - protein, 34 aa, Artificial Sequence
  GFR-binding peptide
  MOD_RES (1)..(34): Xaa is C or S
XEAVSMGEYHYKLTPVGMDDKYLVSIPSLKTPVX

SEQ ID NO: 4442 - protein, 35 aa, Artificial Sequence
  GFR-binding peptide
  MOD_RES (33)..(34): Xaa is C or S
  MOD_RES (11)..(12)..(13)..(14)..(15): Xaa is A or G
  MOD_RES (16)..(17)..(18)..(19): Xaa is A or G or is absent
RVVMNRHKRLXXXXXXXXXYYLVSTASLQTPAXXP

SEQ ID NO: 4443 - protein, 32 aa, Artificial Sequence
  GFR-binding peptide
  MOD_RES (2)..(2): Xaa is C or S
KXSKVIMQYNKLIKPTKGILYLISIASLDQSV

SEQ ID NO: 4444 - protein, 34 aa, Artificial Sequence
  GFR-binding peptide
  MOD_RES (33)..(34): Xaa is C or S
EAVSMGEQYNKLTPVGMDDLYLVSIASLKTPVXX

SEQ ID NO: 4445 - protein, 39 aa, Artificial Sequence
  GFR-binding peptide
  MOD_RES (33)..(33): Xaa is C or S
  MOD_RES (11)..(12)..(13)..(14)..(15): Xaa is A or G
  MOD_RES (16)..(17)..(18)..(19): Xaa is A or G or is absent
RVVMNRHKRLXXXXXXXXXYYLVSTASLKTPAXTPKTVH

SEQ ID NO: 4446 - protein, 38 aa, Artificial Sequence
  GFR-binding peptide
  MOD_RES (34)..(35): Xaa is C or S
  MOD_RES (12)..(13)..(14)..(15)..(16): Xaa is A or G
  MOD_RES (17)..(18)..(19)..(20): Xaa is A or G or is absent
SRVVMNRYKKLXXXXXXXXXFYLVSIANLKTPAXXPKP

SEQ ID NO: 4447 - protein, 36 aa, Artificial Sequence
  GFR-binding peptide
  MOD_RES (31)..(32): Xaa is C or S
RVVMNRHKRLIVNSSDDYYLVSTASLQTPAXXPKPV

SEQ ID NO: 4448 - protein, 38 aa, Artificial Sequence
  GFR-binding peptide
  MOD_RES (2)..(34)..(35): Xaa is C or S
GXARVVMNQYNKLIVNSSDDLYLVSIASLQTPAXXPKP

SEQ ID NO: 4449 - protein, 41 aa, Artificial Sequence
  GFR-binding peptide
  MOD_RES (1)..(3)..(38)..(39): Xaa is C or S
  MOD_RES (16)..(17)..(18)..(19)..(20): Xaa is A or G
  MOD_RES (21)..(22)..(23)..(24): Xaa is A or G or is absent
XGXEAVSMGEYHYKLXXXXXXXXXKYLVSIPSLKTPVXXAK

SEQ ID NO: 4450 - protein, 39 aa, Artificial Sequence
  GFR-binding peptide
  MOD_RES (2)..(4)..(35)..(36): Xaa is C or S
SXKXSKVIMQYNKLIKPTKGILYLISIASLDQSVXXPSA

SEQ ID NO: 4451 - protein, 35 aa, Artificial Sequence
  GFR-binding peptide
  MOD_RES (33)..(34): Xaa is C or S
  MOD_RES (11)..(12)..(13)..(14)..(15): Xaa is A or G
  MOD_RES (16)..(17)..(18)..(19): Xaa is A or G or is absent
KVVMNRYKKLXXXXXXXXXFYLVSIANLKTPAXXA

SEQ ID NO: 4452 - protein, 33 aa, Artificial Sequence
  GFR-binding peptide
  MOD_RES (31)..(32): Xaa is C or S
EVVMDRHKRLVVKENEDYYLMSTASLETPVXXA

SEQ ID NO: 4453 - protein, 32 aa, Artificial Sequence
  GFR-binding peptide
  MOD_RES (11)..(12)..(13)..(14)..(15): Xaa is A or G
  MOD_RES (16)..(17)..(18)..(19): Xaa is A or G or is absent
EVVMERYKKLXXXXXXXXXFYLMSIANLETPV

SEQ ID NO: 4454 - protein, 43 aa, Artificial Sequence
  GFR-binding peptide
  MOD_RES (2)..(4)..(37)..(38): Xaa is C or S
  MOD_RES (15)..(16)..(17)..(18)..(19): Xaa is A or G
  MOD_RES (20)..(21)..(22)..(23): Xaa is A or G or is absent
SXKXSKVIMRYKKLXXXXXXXXXFYLISIANLDQSVXXPSASA

SEQ ID NO: 4455 - protein, 39 aa, Artificial Sequence
  GFR-binding peptide
  MOD_RES (1)..(3): Xaa is C or S
XKXALHDELTYHYKLFIPKKRVIEKYLVSIPSLQVQTPR

SEQ ID NO: 4456 - protein, 38 aa, Artificial Sequence
  GFR-binding peptide
  MOD_RES (1)..(34)..(35): Xaa is C or S
XEAVSMGEQYNKLTPVGMDDLYLVSIASLKTPVXXAKG

SEQ ID NO: 4457 - protein, 39 aa, Artificial Sequence
  GFR-binding peptide
  MOD_RES (2)..(34)..(35): Xaa is C or S
GXARVVMNQYNKLIVNSSDDLYLVSIASLQTPAXXPKPV

SEQ ID NO: 4458 - protein, 41 aa, Artificial Sequence
  GFR-binding peptide
  MOD_RES (2)..(36)..(37): Xaa is C or S
  MOD_RES (14)..(15)..(16)..(17)..(18): Xaa is A or G
  MOD_RES (19)..(20)..(21)..(22): Xaa is A or G or is absent
GXARVVMNQYNKLXXXXXXXXXLYLVSIASLQTPAXXPKPV

SEQ ID NO: 4459 - protein, 36 aa, Artificial Sequence
  GFR-binding peptide
  MOD_RES (2)..(4): Xaa is C or S
  MOD_RES (15)..(16)..(17)..(18)..(19): Xaa is A or G
  MOD_RES (20)..(21)..(22)..(23): Xaa is A or G or is absent
SXKXSKVVMRYKKLXXXXXXXXXFYLISIANLDQPV

SEQ ID NO: 4460 - protein, 36 aa, Artificial Sequence
  GFR-binding peptide
  MOD_RES (1)..(34)..(35): Xaa is C or S
  MOD_RES (12)..(13)..(14)..(15)..(16): Xaa is A or G
  MOD_RES (17)..(18)..(19)..(20): Xaa is A or G or is absent
XSKVIMRHKRLXXXXXXXXXYYLISTASLDQSVXXP

SEQ ID NO: 4461 - protein, 34 aa, Artificial Sequence
  GFR-binding peptide
  MOD_RES (1)..(3)..(34): Xaa is C or S
XKXSKVIMRYKKLIKPTKGIFYLISIANLDQSVX

SEQ ID NO: 4462 - protein, 34 aa, Artificial Sequence
  GFR-binding peptide
  MOD_RES (13)..(14)..(15)..(16)..(17): Xaa is A or G
  MOD_RES (18)..(19)..(20)..(21): Xaa is A or G or is absent
EAVSMGEQYNKLXXXXXXXXXLYLVSIASLKTPV

SEQ ID NO: 4463 - protein, 40 aa, Artificial Sequence
  GFR-binding peptide
  MOD_RES (2)..(4)..(37)..(38): Xaa is C or S
  MOD_RES (15)..(16)..(17)..(18)..(19): Xaa is A or G
  MOD_RES (20)..(21)..(22)..(23): Xaa is A or G or is absent
SXKXSKVVMQYNKLXXXXXXXXXLYLISIASLDQPVXXPS

SEQ ID NO: 4464 - protein, 35 aa, Artificial Sequence
  GFR-binding peptide
  MOD_RES (1)..(33)..(34): Xaa is C or S
XGEVVMEYHYKLVVKDYEDKYLMSIPSLETPVXXA

SEQ ID NO: 4465 - protein, 35 aa, Artificial Sequence
  GFR-binding peptide
  MOD_RES (32)..(33): Xaa is C or S
AKVVMNRHKRLIVNNSSDYYLVSTASLKTPAXXAK

SEQ ID NO: 4466 - protein, 34 aa, Artificial Sequence
  GFR-binding peptide
  MOD_RES (31)..(32): Xaa is C or S
EVVMEQYNKLVVKDYEDLYLMSIASLETPVXXAK

SEQ ID NO: 4467 - protein, 44 aa, Artificial Sequence
  GFR-binding peptide
  MOD_RES (2)..(4)..(38)..(39): Xaa is C or S
  MOD_RES (16)..(17)..(18)..(19)..(20): Xaa is A or G
  MOD_RES (21)..(22)..(23)..(24): Xaa is A or G or is absent
HXGXSRVVMNQYNKLXXXXXXXXXLYLVSIASLKTPAXXPKPVY

SEQ ID NO: 4468 - protein, 33 aa, Artificial Sequence
  GFR-binding peptide
  MOD_RES (2)..(2): Xaa is C or S
GXAKVVMNRHKRLIVNNSSDYYLVSTASLKTPA

SEQ ID NO: 4469 - protein, 34 aa, Artificial Sequence
  GFR-binding peptide
  MOD_RES (13)..(14)..(15)..(16)..(17): Xaa is A or G
  MOD_RES (18)..(19)..(20)..(21): Xaa is A or G or is absent
EAVSMGERHKRLXXXXXXXXXYYLVSTASLKTPV

SEQ ID NO: 4470 - protein, 38 aa, Artificial Sequence
  GFR-binding peptide
  MOD_RES (2)..(35)..(36): Xaa is C or S
  MOD_RES (13)..(14)..(15)..(16)..(17): Xaa is A or G
  MOD_RES (18)..(19)..(20)..(21): Xaa is A or G or is absent
KXSKVVMRYKKLXXXXXXXXXFYLISIANLDQPVXXPS

SEQ ID NO: 4471 - protein, 39 aa, Artificial Sequence
  GFR-binding peptide
  MOD_RES (34)..(35): Xaa is C or S
  MOD_RES (12)..(13)..(14)..(15)..(16): Xaa is A or G
  MOD_RES (17)..(18)..(19)..(20): Xaa is A or G or is absent
SRVVMNRHKRLXXXXXXXXXYYLVSTASLKTPAXXPKPV

SEQ ID NO: 4472 - protein, 37 aa, Artificial Sequence
  GFR-binding peptide
  MOD_RES (2)..(34)..(35): Xaa is C or S
GXSRVVMNQYNKLIVNSSDDLYLVSIASLKTPAXXPK

SEQ ID NO: 4473 - protein, 33 aa, Artificial Sequence
  GFR-binding peptide
  MOD_RES (2)..(2): Xaa is C or S
GXGEVVMERHKRLVVKDYEDYYLMSTASLETPV

SEQ ID NO: 4474 - protein, 40 aa, Artificial Sequence
  GFR-binding peptide
  MOD_RES (2)..(4)..(39)..(40): Xaa is C or S
  MOD_RES (17)..(18)..(19)..(20)..(21): Xaa is A or G
  MOD_RES (22)..(23)..(24)..(25): Xaa is A or G or is absent
RXGXEAVSMGERYKKLXXXXXXXXXFYLVSIANLKTPVXX

SEQ ID NO: 4475 - protein, 39 aa, Artificial Sequence
  GFR-binding peptide
  MOD_RES (1)..(34)..(35): Xaa is C or S
  MOD_RES (12)..(13)..(14)..(15)..(16): Xaa is A or G
  MOD_RES (17)..(18)..(19)..(20): Xaa is A or G or is absent
XSKVIMYHYKLXXXXXXXXXKYLISIPSLDQSVXXPSAS

SEQ ID NO: 4476 - protein, 36 aa, Artificial Sequence
  GFR-binding peptide
  MOD_RES (33)..(34): Xaa is C or S
  MOD_RES (11)..(12)..(13)..(14)..(15): Xaa is A or G
  MOD_RES (16)..(17)..(18)..(19): Xaa is A or G or is absent
RVVMNYHYKLXXXXXXXXXKYLVSIPSLQTPAXXPK

SEQ ID NO: 4477 - protein, 38 aa, Artificial Sequence
  GFR-binding peptide
  MOD_RES (2)..(4)..(38): Xaa is C or S
  MOD_RES (16)..(17)..(18)..(19)..(20): Xaa is A or G
  MOD_RES (21)..(22)..(23)..(24): Xaa is A or G or is absent
RXGXGEVVMEYHYKLXXXXXXXXXKYLMSIPSLETPVX

SEQ ID NO: 4478 - protein, 38 aa, Artificial Sequence
  GFR-binding peptide
  MOD_RES (2)..(2): Xaa is C or S
KXALHDELTRHKRLFIPKKRVIEYYLVSTASLQVQTPR

SEQ ID NO: 4479 - protein, 34 aa, Artificial Sequence
  GFR-binding peptide
  MOD_RES (33)..(34): Xaa is C or S
  MOD_RES (11)..(12)..(13)..(14)..(15): Xaa is A or G
  MOD_RES (16)..(17)..(18)..(19): Xaa is A or G or is absent
SKVVMQYNKLXXXXXXXXXLYLISIASLDQPVXX

SEQ ID NO: 4480 - protein, 35 aa, Artificial Sequence
  GFR-binding peptide
  MOD_RES (31)..(32): Xaa is C or S
SKVVMRHKRLVKPTRGVYYLISTASLDQPVXXPSA

SEQ ID NO: 4481 - protein, 38 aa, Artificial Sequence
  GFR-binding peptide
  MOD_RES (1)..(3)..(37)..(38): Xaa is C or S
  MOD_RES (15)..(16)..(17)..(18)..(19): Xaa is A or G
  MOD_RES (20)..(21)..(22)..(23): Xaa is A or G or is absent
XGXAKVVMNRHKRLXXXXXXXXXYYLVSTASLKTPAXX

SEQ ID NO: 4482 - protein, 40 aa, Artificial Sequence
  GFR-binding peptide
  MOD_RES (2)..(35)..(36): Xaa is C or S
  MOD_RES (13)..(14)..(15)..(16)..(17): Xaa is A or G
  MOD_RES (18)..(19)..(20)..(21): Xaa is A or G or is absent
KXSKVIMYHYKLXXXXXXXXXKYLISIPSLDQSVXXPSAS

SEQ ID NO: 4483 - protein, 39 aa, Artificial Sequence
  GFR-binding peptide
  MOD_RES (1)..(34)..(35): Xaa is C or S
  MOD_RES (12)..(13)..(14)..(15)..(16): Xaa is A or G
  MOD_RES (17)..(18)..(19)..(20): Xaa is A or G or is absent
XSRVIMRYKKLXXXXXXXXXFYLISIANLAQPVXXPAAS

SEQ ID NO: 4484 - protein, 39 aa, Artificial Sequence
  GFR-binding peptide
  MOD_RES (33)..(34): Xaa is C or S
  MOD_RES (11)..(12)..(13)..(14)..(15): Xaa is A or G
  MOD_RES (16)..(17)..(18)..(19): Xaa is A or G or is absent
SKVIMYHYKLXXXXXXXXXKYLISIPSLDQSVXXPSASA

SEQ ID NO: 4485 - protein, 37 aa, Artificial Sequence
  GFR-binding peptide
  MOD_RES (2)..(33)..(34): Xaa is C or S
KXSKVIMYHYKLIKPTKGIKYLISIPSLDQSVXXPSA

SEQ ID NO: 4486 - protein, 34 aa, Artificial Sequence
  GFR-binding peptide
  MOD_RES (2)..(33)..(34): Xaa is C or S
KXSKVIMQYNKLIKPTKGILYLISIASLDQSVXX

SEQ ID NO: 4487 - protein, 36 aa, Artificial Sequence
  GFR-binding peptide
  MOD_RES (33)..(34): Xaa is C or S
  MOD_RES (11)..(12)..(13)..(14)..(15): Xaa is A or G
  MOD_RES (16)..(17)..(18)..(19): Xaa is A or G or is absent
SRVIMRHKRLXXXXXXXXXYYLISTASLAQPVXXPA

SEQ ID NO: 4488 - protein, 41 aa, Artificial Sequence
  GFR-binding peptide
  MOD_RES (1)..(3)..(35)..(36): Xaa is C or S
XGXSRVVMNQYNKLIVNSSDDLYLVSIASLKTPAXXPKPVY

SEQ ID NO: 4489 - protein, 33 aa, Artificial Sequence
  GFR-binding peptide
  MOD_RES (32)..(33): Xaa is C or S
GEVVMEQYNKLVVKDYEDLYLMSIASLETPVXX

SEQ ID NO: 4490 - protein, 38 aa, Artificial Sequence
  GFR-binding peptide
  MOD_RES (1)..(32)..(33): Xaa is C or S
XSKVIMQYNKLIKPTKGILYLISIASLDQSVXXPSASA

SEQ ID NO: 4491 - protein, 35 aa, Artificial Sequence
  GFR-binding peptide
  MOD_RES (1)..(33)..(34): Xaa is C or S
XAKVVMNYHYKLIVNNSSDKYLVSIPSLKTPAXXA

SEQ ID NO: 4492 - protein, 38 aa, Artificial Sequence
  GFR-binding peptide
  MOD_RES (1)..(3)..(34)..(35): Xaa is C or S
XKXSKVVMQYNKLVKPTRGVLYLISIASLDQPVXXPSA

SEQ ID NO: 4493 - protein, 41 aa, Artificial Sequence
  GFR-binding peptide
  MOD_RES (1)..(3)..(35)..(36): Xaa is C or S
XGXSRVVMNYHYKLIVNSSDDKYLVSIPSLKTPAXXPKPVY

SEQ ID NO: 4494 - protein, 38 aa, Artificial Sequence
  GFR-binding peptide
  MOD_RES (1)..(3): Xaa is C or S
  MOD_RES (16)..(17)..(18)..(19)..(20): Xaa is A or G
  MOD_RES (21)..(22)..(23)..(24): Xaa is A or G or is absent
XKXALHDELTQYNKLXXXXXXXXXLYLVSIASLQVQTP

SEQ ID NO: 4495 - protein, 36 aa, Artificial Sequence
  GFR-binding peptide
  MOD_RES (1)..(34)..(35): Xaa is C or S
  MOD_RES (12)..(13)..(14)..(15)..(16): Xaa is A or G
  MOD_RES (17)..(18)..(19)..(20): Xaa is A or G or is absent
XSKVIMQYNKLXXXXXXXXXLYLISIASLDQSVXXP

SEQ ID NO: 4496 - protein, 42 aa, Artificial Sequence
  GFR-binding peptide
  MOD_RES (1)..(3)..(36)..(37): Xaa is C or S
  MOD_RES (14)..(15)..(16)..(17)..(18): Xaa is A or G
  MOD_RES (19)..(20)..(21)..(22): Xaa is A or G or is absent
XKXSKVVMYHYKLXXXXXXXXXKYLISIPSLDQPVXXPSASA

SEQ ID NO: 4497 - protein, 40 aa, Artificial Sequence
  GFR-binding peptide
  MOD_RES (2)..(36)..(37): Xaa is C or S
  MOD_RES (14)..(15)..(16)..(17)..(18): Xaa is A or G
  MOD_RES (19)..(20)..(21)..(22): Xaa is A or G or is absent
GXSRVVMNRHKRLXXXXXXXXXYYLVSTASLKTPAXXPKP

SEQ ID NO: 4498 - protein, 40 aa, Artificial Sequence
  GFR-binding peptide
  MOD_RES (2)..(35)..(36): Xaa is C or S
  MOD_RES (13)..(14)..(15)..(16)..(17): Xaa is A or G
  MOD_RES (18)..(19)..(20)..(21): Xaa is A or G or is absent
KXSKVVMQYNKLXXXXXXXXXLYLISIASLDQPVXXPSAS

SEQ ID NO: 4499 - protein, 37 aa, Artificial Sequence
  GFR-binding peptide
  MOD_RES (2)..(34)..(35): Xaa is C or S
GXGEVVMERYKKLVVKDYEDFYLMSIANLETPVXXAK

SEQ ID NO: 4500 - protein, 39 aa, Artificial Sequence
  GFR-binding peptide
  MOD_RES (34)..(35): Xaa is C or S
  MOD_RES (12)..(13)..(14)..(15)..(16): Xaa is A or G
  MOD_RES (17)..(18)..(19)..(20): Xaa is A or G or is absent
GEVVMDYHYKLXXXXXXXXXKYLMSIPSLETPVXXAKPI

SEQ ID NO: 4501 - protein, 34 aa, Artificial Sequence
  GFR-binding peptide
  MOD_RES (2)..(2): Xaa is C or S
  MOD_RES (13)..(14)..(15)..(16)..(17): Xaa is A or G
  MOD_RES (18)..(19)..(20)..(21): Xaa is A or G or is absent
KXSKVIMRYKKLXXXXXXXXXFYLISIANLDQSV

SEQ ID NO: 4502 - protein, 40 aa, Artificial Sequence
  GFR-binding peptide
  MOD_RES (2)..(36)..(37): Xaa is C or S
  MOD_RES (14)..(15)..(16)..(17)..(18): Xaa is A or G
  MOD_RES (19)..(20)..(21)..(22): Xaa is A or G or is absent
GXGEVVMEQYNKLXXXXXXXXXLYLMSIASLETPVXXAKP

SEQ ID NO: 4503 - protein, 37 aa, Artificial Sequence
  GFR-binding peptide
  MOD_RES (31)..(32): Xaa is C or S
KVVMNRHKRLIVNNSSDYYLVSTASLKTPAXXAKPVA

SEQ ID NO: 4504 - protein, 39 aa, Artificial Sequence
  GFR-binding peptide
  MOD_RES (1)..(33)..(34): Xaa is C or S
XARVVMNRHKRLIVNSSDDYYLVSTASLQTPAXXPKPVT

SEQ ID NO: 4505 - protein, 37 aa, Artificial Sequence
  GFR-binding peptide
  MOD_RES (2)..(4)..(35)..(36): Xaa is C or S
SXKXSKVVMQYNKLVKPTRGVLYLISIASLDQPVXXP

SEQ ID NO: 4506 - protein, 43 aa, Artificial Sequence
  GFR-binding peptide
  MOD_RES (2)..(4)..(39)..(40): Xaa is C or S
  MOD_RES (17)..(18)..(19)..(20)..(21): Xaa is A or G
  MOD_RES (22)..(23)..(24)..(25): Xaa is A or G or is absent
RXGXEAVSMGEQYNKLXXXXXXXXXLYLVSIASLKTPVXXAKG

SEQ ID NO: 4507 - protein, 41 aa, Artificial Sequence
  GFR-binding peptide
  MOD_RES (1)..(3)..(35)..(36): Xaa is C or S
XGXGEVVMDRHKRLVVKENEDYYLMSTASLETPVXXAKPIK

SEQ ID NO: 4508 - protein, 42 aa, Artificial Sequence
  GFR-binding peptide
  MOD_RES (1)..(3)..(37)..(38): Xaa is C or S
  MOD_RES (15)..(16)..(17)..(18)..(19): Xaa is A or G
  MOD_RES (20)..(21)..(22)..(23): Xaa is A or G or is absent
XGXSRVVMNRHKRLXXXXXXXXXYYLVSTASLKTPAXXPKPV

SEQ ID NO: 4509 - protein, 36 aa, Artificial Sequence
  GFR-binding peptide
  MOD_RES (1)..(35): Xaa is C or S
  MOD_RES (13)..(14)..(15)..(16)..(17): Xaa is A or G
  MOD_RES (18)..(19)..(20)..(21): Xaa is A or G or is absent
XSRVVMNQYNKLXXXXXXXXXLYLVSIASLKTPAXT

SEQ ID NO: 4510 - protein, 41 aa, Artificial Sequence
  GFR-binding peptide
  MOD_RES (1)..(38): Xaa is C or S
  MOD_RES (14)..(15)..(16)..(17)..(18): Xaa is A or G
  MOD_RES (19)..(20)..(21)..(22): Xaa is A or G or is absent
XALHDELTQYNKLXXXXXXXXXLYLVSIASLQVQTPRXQVN

SEQ ID NO: 4511 - protein, 37 aa, Artificial Sequence
  GFR-binding peptide
  MOD_RES (2)..(35)..(36): Xaa is C or S
  MOD_RES (13)..(14)..(15)..(16)..(17): Xaa is A or G
  MOD_RES (18)..(19)..(20)..(21): Xaa is A or G or is absent
KXSKVIMRHKRLXXXXXXXXXYYLISTASLDQSVXXP

SEQ ID NO: 4512 - protein, 34 aa, Artificial Sequence
  GFR-binding peptide
  MOD_RES (1)..(1): Xaa is C or S
  MOD_RES (13)..(14)..(15)..(16)..(17): Xaa is A or G
  MOD_RES (18)..(19)..(20)..(21): Xaa is A or G or is absent
XAKVVMNQYNKLXXXXXXXXXLYLVSIASLKTPA

SEQ ID NO: 4513 - protein, 35 aa, Artificial Sequence
  GFR-binding peptide
  MOD_RES (34)..(35): Xaa is C or S
  MOD_RES (12)..(13)..(14)..(15)..(16): Xaa is A or G
  MOD_RES (17)..(18)..(19)..(20): Xaa is A or G or is absent
GEVVMERYKKLXXXXXXXXXFYLMSIANLETPVXX

SEQ ID NO: 4514 - protein, 39 aa, Artificial Sequence
  GFR-binding peptide
  MOD_RES (2)..(36)..(37): Xaa is C or S
  MOD_RES (14)..(15)..(16)..(17)..(18): Xaa is A or G
  MOD_RES (19)..(20)..(21)..(22): Xaa is A or G or is absent
GXGEVVMDRYKKLXXXXXXXXXFYLMSIANLETPVXXAK

SEQ ID NO: 4515 - protein, 37 aa, Artificial Sequence
  GFR-binding peptide
  MOD_RES (2)..(34): Xaa is C or S
GXSRVVMNRHKRLIVNSSDDYYLVSTASLKTPAXTPK

SEQ ID NO: 4516 - protein, 37 aa, Artificial Sequence
  GFR-binding peptide
  MOD_RES (33)..(34): Xaa is C or S
  MOD_RES (11)..(12)..(13)..(14)..(15): Xaa is A or G
  MOD_RES (16)..(17)..(18)..(19): Xaa is A or G or is absent
SKVVMRHKRLXXXXXXXXXYYLISTASLDQPVXXPSA

SEQ ID NO: 4517 - protein, 43 aa, Artificial Sequence
  GFR-binding peptide
  MOD_RES (2)..(4)..(38): Xaa is C or S
  MOD_RES (16)..(17)..(18)..(19)..(20): Xaa is A or G
  MOD_RES (21)..(22)..(23)..(24): Xaa is A or G or is absent
HXGXSRVVMNRHKRLXXXXXXXXXYYLVSTASLKTPAXTPKTV

SEQ ID NO: 4518 - protein, 37 aa, Artificial Sequence
  GFR-binding peptide
  MOD_RES (1)..(3)..(35)..(36): Xaa is C or S
XGXSRVVMNRHKRLIVNSSDDYYLVSTASLKTPAXXP

SEQ ID NO: 4519 - protein, 38 aa, Artificial Sequence
  GFR-binding peptide
  MOD_RES (32)..(33): Xaa is C or S
AKVVMNRHKRLIVNNSSDYYLVSTASLKTPAXXAKPVA

SEQ ID NO: 4520 - protein, 33 aa, Artificial Sequence
  GFR-binding peptide
  MOD_RES (31)..(32): Xaa is C or S
RVVMNRHKRLIVNSSDDYYLVSTASLKTPAXXP

SEQ ID NO: 4521 - protein, 37 aa, Artificial Sequence
  GFR-binding peptide
  MOD_RES (34)..(35): Xaa is C or S
  MOD_RES (12)..(13)..(14)..(15)..(16): Xaa is A or G
  MOD_RES (17)..(18)..(19)..(20): Xaa is A or G or is absent
ARVVMNRHKRLXXXXXXXXXYYLVSTASLQTPAXXPK

SEQ ID NO: 4522 - protein, 36 aa, Artificial Sequence
  GFR-binding peptide
  MOD_RES (1)..(33): Xaa is C or S
XSRVVMNQYNKLIVNSSDDLYLVSIASLKTPAXTPK

SEQ ID NO: 4523 - protein, 35 aa, Artificial Sequence
  GFR-binding peptide
  MOD_RES (33)..(34): Xaa is C or S
  MOD_RES (11)..(12)..(13)..(14)..(15): Xaa is A or G
  MOD_RES (16)..(17)..(18)..(19): Xaa is A or G or is absent
SKVIMRYKKLXXXXXXXXXFYLISIANLDQSVXXP

SEQ ID NO: 4524 - protein, 36 aa, Artificial Sequence
  GFR-binding peptide
  MOD_RES (1)..(3): Xaa is C or S
  MOD_RES (15)..(16)..(17)..(18)..(19): Xaa is A or G
  MOD_RES (20)..(21)..(22)..(23): Xaa is A or G or is absent
XGXARVVMNRHKRLXXXXXXXXXYYLVSTASLQTPA

SEQ ID NO: 4525 - protein, 34 aa, Artificial Sequence
  GFR-binding peptide
  MOD_RES (11)..(12)..(13)..(14)..(15): Xaa is A or G
  MOD_RES (16)..(17)..(18)..(19): Xaa is A or G or is absent
HDELTRYKKLXXXXXXXXXFYLVSIANLQVQTPR

SEQ ID NO: 4526 - protein, 35 aa, Artificial Sequence
  GFR-binding peptide
  MOD_RES (32)..(33): Xaa is C or S
GEVVMERHKRLVVKDYEDYYLMSTASLETPVXXAK

SEQ ID NO: 4527 - protein, 37 aa, Artificial Sequence
  GFR-binding peptide
  MOD_RES (1)..(3)..(37): Xaa is C or S
  MOD_RES (15)..(16)..(17)..(18)..(19): Xaa is A or G
  MOD_RES (20)..(21)..(22)..(23): Xaa is A or G or is absent
XGXARVVMNYHYKLXXXXXXXXXKYLVSIPSLQTPAX

SEQ ID NO: 4528 - protein, 38 aa, Artificial Sequence
  GFR-binding peptide
  MOD_RES (2)..(4)..(36)..(37): Xaa is C or S
HXGXAKVVMNYHYKLIVNNSSDKYLVSIPSLKTPAXXA

SEQ ID NO: 4529 - protein, 34 aa, Artificial Sequence
  GFR-binding peptide
  MOD_RES (2)..(4): Xaa is C or S
SXKXSRVIMQYNKLVKPKRGVLYLISIASLAQPV

SEQ ID NO: 4530 - protein, 33 aa, Artificial Sequence
  GFR-binding peptide
  MOD_RES (32)..(33): Xaa is C or S
AKVVMNRHKRLIVNNSSDYYLVSTASLKTPAXX

SEQ ID NO: 4531 - protein, 37 aa, Artificial Sequence
  GFR-binding peptide
  MOD_RES (33)..(33): Xaa is C or S
  MOD_RES (11)..(12)..(13)..(14)..(15): Xaa is A or G
  MOD_RES (16)..(17)..(18)..(19): Xaa is A or G or is absent
RVVMNQYNKLXXXXXXXXXLYLVSIASLKTPAXTPKT

SEQ ID NO: 4532 - protein, 41 aa, Artificial Sequence
  GFR-binding peptide
  MOD_RES (2)..(4)..(39)..(40): Xaa is C or S
  MOD_RES (17)..(18)..(19)..(20)..(21): Xaa is A or G
  MOD_RES (22)..(23)..(24)..(25): Xaa is A or G or is absent
RXGXEAVSMGERHKRLXXXXXXXXXYYLVSTASLKTPVXXA

SEQ ID NO: 4533 - protein, 39 aa, Artificial Sequence
  GFR-binding peptide
  MOD_RES (1)..(35)..(36): Xaa is C or S
  MOD_RES (13)..(14)..(15)..(16)..(17): Xaa is A or G
  MOD_RES (18)..(19)..(20)..(21): Xaa is A or G or is absent
XGEVVMDYHYKLXXXXXXXXXKYLMSIPSLETPVXXAKP

SEQ ID NO: 4534 - protein, 36 aa, Artificial Sequence
  GFR-binding peptide
  MOD_RES (32)..(33): Xaa is C or S
ARVVMNRYKKLIVNSSDDFYLVSIANLQTPAXXPKP

SEQ ID NO: 4535 - protein, 38 aa, Artificial Sequence
  GFR-binding peptide
  MOD_RES (2)..(4)..(36): Xaa is C or S
HXGXSRVVMNRHKRLIVNSSDDYYLVSTASLKTPAXTP

SEQ ID NO: 4536 - protein, 43 aa, Artificial Sequence
  GFR-binding peptide
  MOD_RES (2)..(4)..(41): Xaa is C or S
  MOD_RES (17)..(18)..(19)..(20)..(21): Xaa is A or G
  MOD_RES (22)..(23)..(24)..(25): Xaa is A or G or is absent
EXKXALHDELTRHKRLXXXXXXXXXYYLVSTASLQVQTPRXQV

SEQ ID NO: 4537 - protein, 35 aa, Artificial Sequence
  GFR-binding peptide
  MOD_RES (2)..(4): Xaa is C or S
HXGXAKVVMNYHYKLIVNNSSDKYLVSIPSLKTPA

SEQ ID NO: 4538 - protein, 34 aa, Artificial Sequence
  GFR-binding peptide
  MOD_RES (2)..(33)..(34): Xaa is C or S
KXSKVIMRYKKLIKPTKGIFYLISIANLDQSVXX

SEQ ID NO: 4539 - protein, 34 aa, Artificial Sequence
  GFR-binding peptide
  MOD_RES (32)..(33): Xaa is C or S
AKVVMNYHYKLIVNNSSDKYLVSIPSLKTPAXXA

SEQ ID NO: 4540 - protein, 34 aa, Artificial Sequence
  GFR-binding peptide
  MOD_RES (2)..(34): Xaa is C or S
GXAKVVMNRYKKLIVNNSSDFYLVSIANLKTPAX

SEQ ID NO: 4541 - protein, 37 aa, Artificial Sequence
  GFR-binding peptide
  MOD_RES (34)..(34): Xaa is C or S
  MOD_RES (12)..(13)..(14)..(15)..(16): Xaa is A or G
  MOD_RES (17)..(18)..(19)..(20): Xaa is A or G or is absent
SRVVMNRHKRLXXXXXXXXXYYLVSTASLKTPAXTPK

SEQ ID NO: 4542 - protein, 38 aa, Artificial Sequence
  GFR-binding peptide
  MOD_RES (2)..(34): Xaa is C or S
GXSRVVMNQYNKLIVNSSDDLYLVSIASLKTPAXTPKT

SEQ ID NO: 4543 - protein, 40 aa, Artificial Sequence
  GFR-binding peptide
  MOD_RES (1)..(3)..(34)..(35): Xaa is C or S
XKXSKVIMRHKRLIKPTKGIYYLISTASLDQSVXXPSASA

SEQ ID NO: 4544 - protein, 34 aa, Artificial Sequence
  GFR-binding peptide
  MOD_RES (32)..(32): Xaa is C or S
SRVVMNRYKKLIVNSSDDFYLVSIANLKTPAXTP

SEQ ID NO: 4545 - protein, 39 aa, Artificial Sequence
  GFR-binding peptide
  MOD_RES (2)..(4)..(36)..(37): Xaa is C or S
HXGXARVVMNQYNKLIVNSSDDLYLVSIASLQTPAXXPK

SEQ ID NO: 4546 - protein, 36 aa, Artificial Sequence
  GFR-binding peptide
  MOD_RES (2)..(4)..(36): Xaa is C or S
RXGXGEVVMEQYNKLVVKDYEDLYLMSIASLETPVX

SEQ ID NO: 4547 - protein, 41 aa, Artificial Sequence
  GFR-binding peptide
  MOD_RES (2)..(4)..(38)..(39): Xaa is C or S
  MOD_RES (16)..(17)..(18)..(19)..(20): Xaa is A or G
  MOD_RES (21)..(22)..(23)..(24): Xaa is A or G or is absent
HXGXSRVVMNRHKRLXXXXXXXXXYYLVSTASLKTPAXXPK

SEQ ID NO: 4548 - protein, 39 aa, Artificial Sequence
  GFR-binding peptide
  MOD_RES (37)..(37): Xaa is C or S
  MOD_RES (13)..(14)..(15)..(16)..(17): Xaa is A or G
  MOD_RES (18)..(19)..(20)..(21): Xaa is A or G or is absent
ALHDELTYHYKLXXXXXXXXXKYLVSIPSLQVQTPRXQV

SEQ ID NO: 4549 - protein, 41 aa, Artificial Sequence
  GFR-binding peptide
  MOD_RES (1)..(35): Xaa is C or S
  MOD_RES (13)..(14)..(15)..(16)..(17): Xaa is A or G
  MOD_RES (18)..(19)..(20)..(21): Xaa is A or G or is absent
XSRVVMNQYNKLXXXXXXXXXLYLVSIASLKTPAXTPKTVH

SEQ ID NO: 4550 - protein, 38 aa, Artificial Sequence
  GFR-binding peptide
  MOD_RES (1)..(35)..(36): Xaa is C or S
  MOD_RES (13)..(14)..(15)..(16)..(17): Xaa is A or G
  MOD_RES (18)..(19)..(20)..(21): Xaa is A or G or is absent
XGEVVMERHKRLXXXXXXXXXYYLMSTASLETPVXXAK

SEQ ID NO: 4551 - protein, 40 aa, Artificial Sequence
  GFR-binding peptide
  MOD_RES (1)..(35)..(36): Xaa is C or S
  MOD_RES (13)..(14)..(15)..(16)..(17): Xaa is A or G
  MOD_RES (18)..(19)..(20)..(21): Xaa is A or G or is absent
XGEVVMERHKRLXXXXXXXXXYYLMSTASLETPVXXAKPI

SEQ ID NO: 4552 - protein, 34 aa, Artificial Sequence
  GFR-binding peptide
  MOD_RES (31)..(32): Xaa is C or S
EVVMEYHYKLVVKDYEDKYLMSIPSLETPVXXAK

SEQ ID NO: 4553 - protein, 40 aa, Artificial Sequence
  GFR-binding peptide
  MOD_RES (34)..(35): Xaa is C or S
  MOD_RES (12)..(13)..(14)..(15)..(16): Xaa is A or G
  MOD_RES (17)..(18)..(19)..(20): Xaa is A or G or is absent
GEVVMERYKKLXXXXXXXXXFYLMSIANLETPVXXAKPIS

SEQ ID NO: 4554 - protein, 33 aa, Artificial Sequence
  GFR-binding peptide
  MOD_RES (33)..(33): Xaa is C or S
  MOD_RES (11)..(12)..(13)..(14)..(15): Xaa is A or G
  MOD_RES (16)..(17)..(18)..(19): Xaa is A or G or is absent
RVVMNQYNKLXXXXXXXXXLYLVSIASLKTPAX

SEQ ID NO: 4555 - protein, 36 aa, Artificial Sequence
  GFR-binding peptide
  MOD_RES (2)..(34): Xaa is C or S
GXSRVVMNRYKKLIVNSSDDFYLVSIANLKTPAXTP

SEQ ID NO: 4556 - protein, 36 aa, Artificial Sequence
  GFR-binding peptide
  MOD_RES (1)..(33)..(34): Xaa is C or S
XARVVMNRYKKLIVNSSDDFYLVSIANLQTPAXXPK

SEQ ID NO: 4557 - protein, 33 aa, Artificial Sequence
  GFR-binding peptide
  MOD_RES (33)..(33): Xaa is C or S
  MOD_RES (11)..(12)..(13)..(14)..(15): Xaa is A or G
  MOD_RES (16)..(17)..(18)..(19): Xaa is A or G or is absent
KVVMNQYNKLXXXXXXXXXLYLVSIASLKTPAX

SEQ ID NO: 4558 - protein, 35 aa, Artificial Sequence
  GFR-binding peptide
  MOD_RES (2)..(2): Xaa is C or S
  MOD_RES (14)..(15)..(16)..(17)..(18): Xaa is A or G
  MOD_RES (19)..(20)..(21)..(22): Xaa is A or G or is absent
GXARVVMNRYKKLXXXXXXXXXFYLVSIANLQTPA

SEQ ID NO: 4559 - protein, 38 aa, Artificial Sequence
  GFR-binding peptide
  MOD_RES (1)..(3)..(36)..(37): Xaa is C or S
  MOD_RES (14)..(15)..(16)..(17)..(18): Xaa is A or G
  MOD_RES (19)..(20)..(21)..(22): Xaa is A or G or is absent
XKXSRVIMRHKRLXXXXXXXXXYYLISTASLAQPVXXP

SEQ ID NO: 4560 - protein, 39 aa, Artificial Sequence
  GFR-binding peptide
  MOD_RES (2)..(4)..(37)..(38): Xaa is C or S
  MOD_RES (15)..(16)..(17)..(18)..(19): Xaa is A or G
  MOD_RES (20)..(21)..(22)..(23): Xaa is A or G or is absent
SXKXSKVVMRHKRLXXXXXXXXXYYLISTASLDQPVXXP

SEQ ID NO: 4561 - protein, 38 aa, Artificial Sequence
  GFR-binding peptide
  MOD_RES (1)..(33)..(34): Xaa is C or S
XSRVVMNRHKRLIVNSSDDYYLVSTASLKTPAXXPKPV

SEQ ID NO: 4562 - protein, 37 aa, Artificial Sequence
  GFR-binding peptide
  MOD_RES (1)..(35)..(36): Xaa is C or S
  MOD_RES (13)..(14)..(15)..(16)..(17): Xaa is A or G
  MOD_RES (18)..(19)..(20)..(21): Xaa is A or G or is absent
XAKVVMNYHYKLXXXXXXXXXKYLVSIPSLKTPAXXA

SEQ ID NO: 4563 - protein, 33 aa, Artificial Sequence
  GFR-binding peptide
  MOD_RES (11)..(12)..(13)..(14)..(15): Xaa is A or G
  MOD_RES (16)..(17)..(18)..(19): Xaa is A or G or is absent
HDELTRHKRLXXXXXXXXXYYLVSTASLQVQTP

SEQ ID NO: 4564 - protein, 39 aa, Artificial Sequence
  GFR-binding peptide
  MOD_RES (1)..(3): Xaa is C or S
XKXALHDELTRHKRLFIPKKRVIEYYLVSTASLQVQTPR

SEQ ID NO: 4565 - protein, 36 aa, Artificial Sequence
  GFR-binding peptide
  MOD_RES (34)..(34): Xaa is C or S
  MOD_RES (12)..(13)..(14)..(15)..(16): Xaa is A or G
  MOD_RES (17)..(18)..(19)..(20): Xaa is A or G or is absent
SRVVMNRHKRLXXXXXXXXXYYLVSTASLKTPAXTP

SEQ ID NO: 4566 - protein, 38 aa, Artificial Sequence
  GFR-binding peptide
  MOD_RES (1)..(3)..(36)..(37): Xaa is C or S
  MOD_RES (14)..(15)..(16)..(17)..(18): Xaa is A or G
  MOD_RES (19)..(20)..(21)..(22): Xaa is A or G or is absent
XKXSKVIMRYKKLXXXXXXXXXFYLISIANLDQSVXXP

SEQ ID NO: 4567 - protein, 37 aa, Artificial Sequence
  GFR-binding peptide
  MOD_RES (1)..(3)..(37): Xaa is C or S
  MOD_RES (15)..(16)..(17)..(18)..(19): Xaa is A or G
  MOD_RES (20)..(21)..(22)..(23): Xaa is A or G or is absent
XGXSRVVMNRHKRLXXXXXXXXXYYLVSTASLKTPAX

SEQ ID NO: 4568 - protein, 36 aa, Artificial Sequence
  GFR-binding peptide
  MOD_RES (2)..(33)..(34): Xaa is C or S
KXSKVIMRHKRLIKPTKGIYYLISTASLDQSVXXPS

SEQ ID NO: 4569 - protein, 37 aa, Artificial Sequence
  GFR-binding peptide
  MOD_RES (2)..(2): Xaa is C or S
  MOD_RES (15)..(16)..(17)..(18)..(19): Xaa is A or G
  MOD_RES (20)..(21)..(22)..(23): Xaa is A or G or is absent
KXALHDELTQYNKLXXXXXXXXXLYLVSIASLQVQTP

SEQ ID NO: 4570 - protein, 39 aa, Artificial Sequence
  GFR-binding peptide
  MOD_RES (1)..(3)..(35)..(36): Xaa is C or S
XGXGEVVMERYKKLVVKDYEDFYLMSIANLETPVXXAKP

SEQ ID NO: 4571 - protein, 43 aa, Artificial Sequence
  GFR-binding peptide
  MOD_RES (2)..(4)..(38)..(39): Xaa is C or S
  MOD_RES (16)..(17)..(18)..(19)..(20): Xaa is A or G
  MOD_RES (21)..(22)..(23)..(24): Xaa is A or G or is absent
HXGXAKVVMNQYNKLXXXXXXXXXLYLVSIASLKTPAXXAKPV

SEQ ID NO: 4572 - protein, 37 aa, Artificial Sequence
  GFR-binding peptide
  MOD_RES (2)..(4): Xaa is C or S
  MOD_RES (16)..(17)..(18)..(19)..(20): Xaa is A or G
  MOD_RES (21)..(22)..(23)..(24): Xaa is A or G or is absent
RXGXGEVVMEYHYKLXXXXXXXXXKYLMSIPSLETPV

SEQ ID NO: 4573 - protein, 37 aa, Artificial Sequence
  GFR-binding peptide
  MOD_RES (34)..(35): Xaa is C or S
  MOD_RES (12)..(13)..(14)..(15)..(16): Xaa is A or G
  MOD_RES (17)..(18)..(19)..(20): Xaa is A or G or is absent
SRVVMNRHKRLXXXXXXXXXYYLVSTASLKTPAXXPK

SEQ ID NO: 4574 - protein, 41 aa, Artificial Sequence
  GFR-binding peptide
  MOD_RES (1)..(3)..(40): Xaa is C or S
  MOD_RES (16)..(17)..(18)..(19)..(20): Xaa is A or G
  MOD_RES (21)..(22)..(23)..(24): Xaa is A or G or is absent
XKXALHDELTRYKKLXXXXXXXXXFYLVSIANLQVQTPRXQ

SEQ ID NO: 4575 - protein, 41 aa, Artificial Sequence
  GFR-binding peptide
  MOD_RES (1)..(3)..(35)..(36): Xaa is C or S
XGXGEVVMDYHYKLVVKENEDKYLMSIPSLETPVXXAKPIK

SEQ ID NO: 4576 - protein, 40 aa, Artificial Sequence
  GFR-binding peptide
  MOD_RES (2)..(4)..(38): Xaa is C or S
  MOD_RES (16)..(17)..(18)..(19)..(20): Xaa is A or G
  MOD_RES (21)..(22)..(23)..(24): Xaa is A or G or is absent
HXGXSRVVMNRYKKLXXXXXXXXXFYLVSIANLKTPAXTP

SEQ ID NO: 4577 - protein, 39 aa, Artificial Sequence
  GFR-binding peptide
  MOD_RES (35)..(35): Xaa is C or S
  MOD_RES (11)..(12)..(13)..(14)..(15): Xaa is A or G
  MOD_RES (16)..(17)..(18)..(19): Xaa is A or G or is absent
HDELTRHKRLXXXXXXXXXYYLVSTASLQVQTPRXQVNR

SEQ ID NO: 4578 - protein, 40 aa, Artificial Sequence
  GFR-binding peptide
  MOD_RES (1)..(3)..(36)..(37): Xaa is C or S
  MOD_RES (14)..(15)..(16)..(17)..(18): Xaa is A or G
  MOD_RES (19)..(20)..(21)..(22): Xaa is A or G or is absent
XKXSKVVMQYNKLXXXXXXXXXLYLISIASLDQPVXXPSA

SEQ ID NO: 4579 - protein, 38 aa, Artificial Sequence
  GFR-binding peptide
  MOD_RES (32)..(33): Xaa is C or S
GEVVMDYHYKLVVKENEDKYLMSIPSLETPVXXAKPIK

SEQ ID NO: 4580 - protein, 32 aa, Artificial Sequence
  GFR-binding peptide
  MOD_RES (11)..(12)..(13)..(14)..(15): Xaa is A or G
  MOD_RES (16)..(17)..(18)..(19): Xaa is A or G or is absent
SRVIMRHKRLXXXXXXXXXYYLISTASLAQPV

SEQ ID NO: 4581 - protein, 37 aa, Artificial Sequence
  GFR-binding peptide
  MOD_RES (36)..(36): Xaa is C or S
  MOD_RES (12)..(13)..(14)..(15)..(16): Xaa is A or G
  MOD_RES (17)..(18)..(19)..(20): Xaa is A or G or is absent
LHDELTRHKRLXXXXXXXXXYYLVSTASLQVQTPRXQ

SEQ ID NO: 4582 - protein, 35 aa, Artificial Sequence
  GFR-binding peptide
  MOD_RES (34)..(34): Xaa is C or S
  MOD_RES (12)..(13)..(14)..(15)..(16): Xaa is A or G
  MOD_RES (17)..(18)..(19)..(20): Xaa is A or G or is absent
SRVVMNRYKKLXXXXXXXXXFYLVSIANLKTPAXT

SEQ ID NO: 4583 - protein, 37 aa, Artificial Sequence
  GFR-binding peptide
  MOD_RES (2)..(35)..(36): Xaa is C or S
  MOD_RES (13)..(14)..(15)..(16)..(17): Xaa is A or G
  MOD_RES (18)..(19)..(20)..(21): Xaa is A or G or is absent
KXSRVIMQYNKLXXXXXXXXXLYLISIASLAQPVXXP

SEQ ID NO: 4584 - protein, 35 aa, Artificial Sequence
  GFR-binding peptide
  MOD_RES (2)..(2): Xaa is C or S
  MOD_RES (14)..(15)..(16)..(17)..(18): Xaa is A or G
  MOD_RES (19)..(20)..(21)..(22): Xaa is A or G or is absent
GXARVVMNRHKRLXXXXXXXXXYYLVSTASLQTPA

SEQ ID NO: 4585 - protein, 31 aa, Artificial Sequence
  GFR-binding peptide
SRVVMNQYNKLIVNSSDDLYLVSIASLKTPA

SEQ ID NO: 4586 - protein, 41 aa, Artificial Sequence
  GFR-binding peptide
  MOD_RES (37)..(37): Xaa is C or S
ALHDELTRYKKLFIPKKRVIEFYLVSIANLQVQTPRXQVNR

SEQ ID NO: 4587 - protein, 38 aa, Artificial Sequence
  GFR-binding peptide
  MOD_RES (2)..(4)..(38): Xaa is C or S
  MOD_RES (16)..(17)..(18)..(19)..(20): Xaa is A or G
  MOD_RES (21)..(22)..(23)..(24): Xaa is A or G or is absent
RXGXGEVVMERHKRLXXXXXXXXXYYLMSTASLETPVX

SEQ ID NO: 4588 - protein, 35 aa, Artificial Sequence
  GFR-binding peptide
  MOD_RES (2)..(35): Xaa is C or S
  MOD_RES (13)..(14)..(15)..(16)..(17): Xaa is A or G
  MOD_RES (18)..(19)..(20)..(21): Xaa is A or G or is absent
KXSKVIMRYKKLXXXXXXXXXFYLISIANLDQSVX

SEQ ID NO: 4589 - protein, 37 aa, Artificial Sequence
  GFR-binding peptide
  MOD_RES (1)..(35)..(36): Xaa is C or S
  MOD_RES (13)..(14)..(15)..(16)..(17): Xaa is A or G
  MOD_RES (18)..(19)..(20)..(21): Xaa is A or G or is absent
XGEVVMDRYKKLXXXXXXXXXFYLMSIANLETPVXXA

SEQ ID NO: 4590 - protein, 36 aa, Artificial Sequence
  GFR-binding peptide
ALHDELTYHYKLFIPKKRVIEKYLVSIPSLQVQTPR

SEQ ID NO: 4591 - protein, 33 aa, Artificial Sequence
  GFR-binding peptide
  MOD_RES (31)..(31): Xaa is C or S
RVVMNQYNKLIVNSSDDLYLVSIASLKTPAXTP

SEQ ID NO: 4592 - protein, 33 aa, Artificial Sequence
  GFR-binding peptide
  MOD_RES (1)..(32)..(33): Xaa is C or S
XSRVIMQYNKLVKPKRGVLYLISIASLAQPVXX

SEQ ID NO: 4593 - protein, 37 aa, Artificial Sequence
  GFR-binding peptide
  MOD_RES (2)..(36)..(37): Xaa is C or S
  MOD_RES (14)..(15)..(16)..(17)..(18): Xaa is A or G
  MOD_RES (19)..(20)..(21)..(22): Xaa is A or G or is absent
GXGEVVMERHKRLXXXXXXXXXYYLMSTASLETPVXX

SEQ ID NO: 4594 - protein, 37 aa, Artificial Sequence
  GFR-binding peptide
  MOD_RES (1)..(35)..(36): Xaa is C or S
  MOD_RES (13)..(14)..(15)..(16)..(17): Xaa is A or G
  MOD_RES (18)..(19)..(20)..(21): Xaa is A or G or is absent
XARVVMNYHYKLXXXXXXXXXKYLVSIPSLQTPAXXP

SEQ ID NO: 4595 - protein, 41 aa, Artificial Sequence
  GFR-binding peptide
  MOD_RES (1)..(35)..(36): Xaa is C or S
  MOD_RES (13)..(14)..(15)..(16)..(17): Xaa is A or G
  MOD_RES (18)..(19)..(20)..(21): Xaa is A or G or is absent
XARVVMNQYNKLXXXXXXXXXLYLVSIASLQTPAXXPKPVT

SEQ ID NO: 4596 - protein, 36 aa, Artificial Sequence
  GFR-binding peptide
  MOD_RES (1)..(33)..(34): Xaa is C or S
XARVVMNQYNKLIVNSSDDLYLVSIASLQTPAXXPK

SEQ ID NO: 4597 - protein, 36 aa, Artificial Sequence
  GFR-binding peptide
  MOD_RES (33)..(34): Xaa is C or S
  MOD_RES (11)..(12)..(13)..(14)..(15): Xaa is A or G
  MOD_RES (16)..(17)..(18)..(19): Xaa is A or G or is absent
KVVMNRYKKLXXXXXXXXXFYLVSIANLKTPAXXAK

SEQ ID NO: 4598 - protein, 40 aa, Artificial Sequence
  GFR-binding peptide
  MOD_RES (1)..(3)..(35)..(36): Xaa is C or S
XGXARVVMNRHKRLIVNSSDDYYLVSTASLQTPAXXPKPV

SEQ ID NO: 4599 - protein, 34 aa, Artificial Sequence
  GFR-binding peptide
  MOD_RES (1)..(3)..(34): Xaa is C or S
XKXSRVIMRHKRLVKPKRGVYYLISTASLAQPVX

SEQ ID NO: 4600 - protein, 38 aa, Artificial Sequence
  GFR-binding peptide
  MOD_RES (2)..(4)..(36)..(37): Xaa is C or S
HXGXSRVVMNRYKKLIVNSSDDFYLVSIANLKTPAXXP

SEQ ID NO: 4601 - protein, 34 aa, Artificial Sequence
  GFR-binding peptide
  MOD_RES (1)..(3)..(34): Xaa is C or S
XKXSKVVMRYKKLVKPTRGVFYLISIANLDQPVX

SEQ ID NO: 4602 - protein, 38 aa, Artificial Sequence
  GFR-binding peptide
  MOD_RES (1)..(35)..(36): Xaa is C or S
  MOD_RES (13)..(14)..(15)..(16)..(17): Xaa is A or G
  MOD_RES (18)..(19)..(20)..(21): Xaa is A or G or is absent
XSRVVMNYHYKLXXXXXXXXXKYLVSIPSLKTPAXXPK

SEQ ID NO: 4603 - protein, 36 aa, Artificial Sequence
  GFR-binding peptide
  MOD_RES (36)..(36): Xaa is C or S
  MOD_RES (12)..(13)..(14)..(15)..(16): Xaa is A or G
  MOD_RES (17)..(18)..(19)..(20): Xaa is A or G or is absent
LHDELTQYNKLXXXXXXXXXLYLVSIASLQVQTPRX

SEQ ID NO: 4604 - protein, 37 aa, Artificial Sequence
  GFR-binding peptide
  MOD_RES (37)..(37): Xaa is C or S
  MOD_RES (13)..(14)..(15)..(16)..(17): Xaa is A or G
  MOD_RES (18)..(19)..(20)..(21): Xaa is A or G or is absent
ALHDELTQYNKLXXXXXXXXXLYLVSIASLQVQTPRX

SEQ ID NO: 4605 - protein, 42 aa, Artificial Sequence
  GFR-binding peptide
  MOD_RES (2)..(4)..(38): Xaa is C or S
  MOD_RES (16)..(17)..(18)..(19)..(20): Xaa is A or G
  MOD_RES (21)..(22)..(23)..(24): Xaa is A or G or is absent
HXGXSRVVMNRHKRLXXXXXXXXXYYLVSTASLKTPAXTPKT

SEQ ID NO: 4606 - protein, 39 aa, Artificial Sequence
  GFR-binding peptide
  MOD_RES (2)..(34)..(35): Xaa is C or S
GXARVVMNRYKKLIVNSSDDFYLVSIANLQTPAXXPKPV

SEQ ID NO: 4607 - protein, 36 aa, Artificial Sequence
  GFR-binding peptide
  MOD_RES (2)..(4)..(35)..(36): Xaa is C or S
SXKXSKVIMYHYKLIKPTKGIKYLISIPSLDQSVXX

SEQ ID NO: 4608 - protein, 39 aa, Artificial Sequence
  GFR-binding peptide
  MOD_RES (1)..(3)..(35): Xaa is C or S
XGXSRVVMNRYKKLIVNSSDDFYLVSIANLKTPAXTPKT

SEQ ID NO: 4609 - protein, 38 aa, Artificial Sequence
  GFR-binding peptide
  MOD_RES (1)..(36)..(37): Xaa is C or S
  MOD_RES (14)..(15)..(16)..(17)..(18): Xaa is A or G
  MOD_RES (19)..(20)..(21)..(22): Xaa is A or G or is absent
XEAVSMGEQYNKLXXXXXXXXXLYLVSIASLKTPVXXA

SEQ ID NO: 4610 - protein, 34 aa, Artificial Sequence
  GFR-binding peptide
  MOD_RES (31)..(32): Xaa is C or S
KVVMNYHYKLIVNNSSDKYLVSIPSLKTPAXXAK

SEQ ID NO: 4611 - protein, 38 aa, Artificial Sequence
  GFR-binding peptide
  MOD_RES (36)..(36): Xaa is C or S
LHDELTRHKRLFIPKKRVIEYYLVSTASLQVQTPRXQV

SEQ ID NO: 4612 - protein, 38 aa, Artificial Sequence
  GFR-binding peptide
  MOD_RES (1)..(3): Xaa is C or S
XKXALHDELTRYKKLFIPKKRVIEFYLVSIANLQVQTP

SEQ ID NO: 4613 - protein, 40 aa, Artificial Sequence
  GFR-binding peptide
  MOD_RES (1)..(3)..(35): Xaa is C or S
XGXSRVVMNRHKRLIVNSSDDYYLVSTASLKTPAXTPKTV

SEQ ID NO: 4614 - protein, 36 aa, Artificial Sequence
  GFR-binding peptide
  MOD_RES (1)..(3)..(35)..(36): Xaa is C or S
XGXSRVVMNQYNKLIVNSSDDLYLVSIASLKTPAXX

SEQ ID NO: 4615 - protein, 43 aa, Artificial Sequence
  GFR-binding peptide
  MOD_RES (1)..(3)..(37): Xaa is C or S
  MOD_RES (15)..(16)..(17)..(18)..(19): Xaa is A or G
  MOD_RES (20)..(21)..(22)..(23): Xaa is A or G or is absent
XGXSRVVMNYHYKLXXXXXXXXXKYLVSIPSLKTPAXTPKTVH

SEQ ID NO: 4616 - protein, 37 aa, Artificial Sequence
  GFR-binding peptide
  MOD_RES (2)..(34)..(35): Xaa is C or S
GXAKVVMNQYNKLIVNNSSDLYLVSIASLKTPAXXAK

SEQ ID NO: 4617 - protein, 41 aa, Artificial Sequence
  GFR-binding peptide
  MOD_RES (1)..(3)..(37)..(38): Xaa is C or S
  MOD_RES (15)..(16)..(17)..(18)..(19): Xaa is A or G
  MOD_RES (20)..(21)..(22)..(23): Xaa is A or G or is absent
XGXAKVVMNRHKRLXXXXXXXXXYYLVSTASLKTPAXXAKP

SEQ ID NO: 4618 - protein, 40 aa, Artificial Sequence
  GFR-binding peptide
  MOD_RES (1)..(35)..(36): Xaa is C or S
  MOD_RES (13)..(14)..(15)..(16)..(17): Xaa is A or G
  MOD_RES (18)..(19)..(20)..(21): Xaa is A or G or is absent
XAKVVMNYHYKLXXXXXXXXXKYLVSIPSLKTPAXXAKPV

SEQ ID NO: 4619 - protein, 33 aa, Artificial Sequence
  GFR-binding peptide
  MOD_RES (1)..(33): Xaa is C or S
XARVVMNYHYKLIVNSSDDKYLVSIPSLQTPAX

SEQ ID NO: 4620 - protein, 38 aa, Artificial Sequence
  GFR-binding peptide
  MOD_RES (1)..(3)..(36)..(37): Xaa is C or S
XGXEAVSMGEQYNKLTPVGMDDLYLVSIASLKTPVXXA

SEQ ID NO: 4621 - protein, 31 aa, Artificial Sequence
  GFR-binding peptide
  MOD_RES (1)..(1): Xaa is C or S
XSKVIMRHKRLIKPTKGIYYLISTASLDQSV

SEQ ID NO: 4622 - protein, 43 aa, Artificial Sequence
  GFR-binding peptide
  MOD_RES (2)..(39): Xaa is C or S
  MOD_RES (15)..(16)..(17)..(18)..(19): Xaa is A or G
  MOD_RES (20)..(21)..(22)..(23): Xaa is A or G or is absent
KXALHDELTRYKKLXXXXXXXXXFYLVSIANLQVQTPRXQVNR

SEQ ID NO: 4623 - protein, 41 aa, Artificial Sequence
  GFR-binding peptide
  MOD_RES (2)..(4)..(38)..(39): Xaa is C or S
  MOD_RES (16)..(17)..(18)..(19)..(20): Xaa is A or G
  MOD_RES (21)..(22)..(23)..(24): Xaa is A or G or is absent
HXGXSRVVMNYHYKLXXXXXXXXXKYLVSIPSLKTPAXXPK

SEQ ID NO: 4624 - protein, 37 aa, Artificial Sequence
  GFR-binding peptide
  MOD_RES (1)..(3)..(35): Xaa is C or S
XGXSRVVMNQYNKLIVNSSDDLYLVSIASLKTPAXTP

SEQ ID NO: 4625 - protein, 36 aa, Artificial Sequence
  GFR-binding peptide
  MOD_RES (1)..(32)..(33): Xaa is C or S
XSRVIMQYNKLVKPKRGVLYLISIASLAQPVXXPAA

SEQ ID NO: 4626 - protein, 34 aa, Artificial Sequence
  GFR-binding peptide
  MOD_RES (31)..(32): Xaa is C or S
KVVMNQYNKLIVNNSSDLYLVSIASLKTPAXXAK

SEQ ID NO: 4627 - protein, 33 aa, Artificial Sequence
  GFR-binding peptide
  MOD_RES (1)..(3): Xaa is C or S
XKXSKVIMRYKKLIKPTKGIFYLISIANLDQSV

SEQ ID NO: 4628 - protein, 41 aa, Artificial Sequence
  GFR-binding peptide
  MOD_RES (2)..(4)..(41): Xaa is C or S
  MOD_RES (17)..(18)..(19)..(20)..(21): Xaa is A or G
  MOD_RES (22)..(23)..(24)..(25): Xaa is A or G or is absent
EXKXALHDELTRHKRLXXXXXXXXXYYLVSTASLQVQTPRX

SEQ ID NO: 4629 - protein, 37 aa, Artificial Sequence
  GFR-binding peptide
  MOD_RES (2)..(34)..(35): Xaa is C or S
GXARVVMNQYNKLIVNSSDDLYLVSIASLQTPAXXPK

SEQ ID NO: 4630 - protein, 39 aa, Artificial Sequence
  GFR-binding peptide
  MOD_RES (1)..(34)..(35): Xaa is C or S
  MOD_RES (12)..(13)..(14)..(15)..(16): Xaa is A or G
  MOD_RES (17)..(18)..(19)..(20): Xaa is A or G or is absent
XSKVVMRYKKLXXXXXXXXXFYLISIANLDQPVXXPSAS

SEQ ID NO: 4631 - protein, 37 aa, Artificial Sequence
  GFR-binding peptide
  MOD_RES (1)..(3)..(37): Xaa is C or S
  MOD_RES (15)..(16)..(17)..(18)..(19): Xaa is A or G
  MOD_RES (20)..(21)..(22)..(23): Xaa is A or G or is absent
XGXAKVVMNQYNKLXXXXXXXXXLYLVSIASLKTPAX

SEQ ID NO: 4632 - protein, 42 aa, Artificial Sequence
  GFR-binding peptide
  MOD_RES (1)..(3)..(37)..(38): Xaa is C or S
  MOD_RES (15)..(16)..(17)..(18)..(19): Xaa is A or G
  MOD_RES (20)..(21)..(22)..(23): Xaa is A or G or is absent
XGXGEVVMDRYKKLXXXXXXXXXFYLMSIANLETPVXXAKPI

SEQ ID NO: 4633 - protein, 38 aa, Artificial Sequence
  GFR-binding peptide
  MOD_RES (2)..(4)..(36)..(37): Xaa is C or S
HXGXSRVVMNQYNKLIVNSSDDLYLVSIASLKTPAXXP

SEQ ID NO: 4634 - protein, 36 aa, Artificial Sequence
  GFR-binding peptide
  MOD_RES (1)..(3): Xaa is C or S
  MOD_RES (15)..(16)..(17)..(18)..(19): Xaa is A or G
  MOD_RES (20)..(21)..(22)..(23): Xaa is A or G or is absent
XGXAKVVMNRHKRLXXXXXXXXXYYLVSTASLKTPA

SEQ ID NO: 4635 - protein, 35 aa, Artificial Sequence
  GFR-binding peptide
  MOD_RES (32)..(33): Xaa is C or S
SRVVMNYHYKLIVNSSDDKYLVSIPSLKTPAXXPK

SEQ ID NO: 4636 - protein, 38 aa, Artificial Sequence
  GFR-binding peptide
  MOD_RES (33)..(33): Xaa is C or S
  MOD_RES (11)..(12)..(13)..(14)..(15): Xaa is A or G
  MOD_RES (16)..(17)..(18)..(19): Xaa is A or G or is absent
RVVMNYHYKLXXXXXXXXXKYLVSIPSLKTPAXTPKTV

SEQ ID NO: 4637 - protein, 39 aa, Artificial Sequence
  GFR-binding peptide
  MOD_RES (2)..(4)..(36)..(37): Xaa is C or S
RXGXGEVVMEQYNKLVVKDYEDLYLMSIASLETPVXXAK

SEQ ID NO: 4638 - protein, 34 aa, Artificial Sequence
  GFR-binding peptide
  MOD_RES (2)..(2): Xaa is C or S
GXEAVSMGEQYNKLTPVGMDDLYLVSIASLKTPV

SEQ ID NO: 4639 - protein, 41 aa, Artificial Sequence
  GFR-binding peptide
  MOD_RES (2)..(4)..(36)..(37): Xaa is C or S
HXGXAKVVMNRYKKLIVNNSSDFYLVSIANLKTPAXXAKPV

SEQ ID NO: 4640 - protein, 33 aa, Artificial Sequence
  GFR-binding peptide
  MOD_RES (2)..(2): Xaa is C or S
GXGEVVMDYHYKLVVKENEDKYLMSIPSLETPV

SEQ ID NO: 4641 - protein, 38 aa, Artificial Sequence
  GFR-binding peptide
  MOD_RES (1)..(3)..(34)..(35): Xaa is C or S
XKXSKVVMRYKKLVKPTRGVFYLISIANLDQPVXXPSA

SEQ ID NO: 4642 - protein, 39 aa, Artificial Sequence
  GFR-binding peptide
  MOD_RES (34)..(35): Xaa is C or S
  MOD_RES (12)..(13)..(14)..(15)..(16): Xaa is A or G
  MOD_RES (17)..(18)..(19)..(20): Xaa is A or G or is absent
ARVVMNRHKRLXXXXXXXXXYYLVSTASLQTPAXXPKPV

SEQ ID NO: 4643 - protein, 39 aa, Artificial Sequence
  GFR-binding peptide
  MOD_RES (2)..(35)..(36): Xaa is C or S
  MOD_RES (13)..(14)..(15)..(16)..(17): Xaa is A or G
  MOD_RES (18)..(19)..(20)..(21): Xaa is A or G or is absent
KXSKVIMRYKKLXXXXXXXXXFYLISIANLDQSVXXPSA

SEQ ID NO: 4644 - protein, 40 aa, Artificial Sequence
  GFR-binding peptide
  MOD_RES (1)..(3)..(35)..(36): Xaa is C or S
XGXGEVVMEYHYKLVVKDYEDKYLMSIPSLETPVXXAKPI

SEQ ID NO: 4645 - protein, 38 aa, Artificial Sequence
  GFR-binding peptide
  MOD_RES (1)..(34)..(35): Xaa is C or S
  MOD_RES (12)..(13)..(14)..(15)..(16): Xaa is A or G
  MOD_RES (17)..(18)..(19)..(20): Xaa is A or G or is absent
XSKVVMQYNKLXXXXXXXXXLYLISIASLDQPVXXPSA

SEQ ID NO: 4646 - protein, 36 aa, Artificial Sequence
  GFR-binding peptide
  MOD_RES (1)..(33)..(34): Xaa is C or S
XSRVVMNRHKRLIVNSSDDYYLVSTASLKTPAXXPK

SEQ ID NO: 4647 - protein, 43 aa, Artificial Sequence
  GFR-binding peptide
  MOD_RES (1)..(3)..(40): Xaa is C or S
XKXALHDELTQYNKLFIPKKRVIELYLVSIASLQVQTPRXQVN

SEQ ID NO: 4648 - protein, 41 aa, Artificial Sequence
  GFR-binding peptide
  MOD_RES (2)..(4)..(37)..(38): Xaa is C or S
  MOD_RES (15)..(16)..(17)..(18)..(19): Xaa is A or G
  MOD_RES (20)..(21)..(22)..(23): Xaa is A or G or is absent
SXKXSKVIMRHKRLXXXXXXXXXYYLISTASLDQSVXXPSA

SEQ ID NO: 4649 - protein, 38 aa, Artificial Sequence
  GFR-binding peptide
  MOD_RES (1)..(3)..(34)..(35): Xaa is C or S
XKXSKVIMRYKKLIKPTKGIFYLISIANLDQSVXXPSA

SEQ ID NO: 4650 - protein, 37 aa, Artificial Sequence
  GFR-binding peptide
  MOD_RES (2)..(33)..(34): Xaa is C or S
KXSRVIMRHKRLVKPKRGVYYLISTASLAQPVXXPAA

SEQ ID NO: 4651 - protein, 37 aa, Artificial Sequence
  GFR-binding peptide
  MOD_RES (32)..(32): Xaa is C or S
SRVVMNYHYKLIVNSSDDKYLVSIPSLKTPAXTPKTV

SEQ ID NO: 4652 - protein, 35 aa, Artificial Sequence
  GFR-binding peptide
  MOD_RES (33)..(34): Xaa is C or S
  MOD_RES (11)..(12)..(13)..(14)..(15): Xaa is A or G
  MOD_RES (16)..(17)..(18)..(19): Xaa is A or G or is absent
RVVMNRYKKLXXXXXXXXXFYLVSIANLQTPAXXP

SEQ ID NO: 4653 - protein, 39 aa, Artificial Sequence
  GFR-binding peptide
  MOD_RES (1)..(3)..(34)..(35): Xaa is C or S
XKXSKVVMRHKRLVKPTRGVYYLISTASLDQPVXXPSAS

SEQ ID NO: 4654 - protein, 37 aa, Artificial Sequence
  GFR-binding peptide
  MOD_RES (1)..(3)..(35): Xaa is C or S
XGXSRVVMNYHYKLIVNSSDDKYLVSIPSLKTPAXTP

SEQ ID NO: 4655 - protein, 31 aa, Artificial Sequence
  GFR-binding peptide
  MOD_RES (1)..(1): Xaa is C or S
XSKVVMYHYKLVKPTRGVKYLISIPSLDQPV

SEQ ID NO: 4656 - protein, 38 aa, Artificial Sequence
  GFR-binding peptide
  MOD_RES (1)..(34)..(35): Xaa is C or S
  MOD_RES (12)..(13)..(14)..(15)..(16): Xaa is A or G
  MOD_RES (17)..(18)..(19)..(20): Xaa is A or G or is absent
XSKVVMRHKRLXXXXXXXXXYYLISTASLDQPVXXPSA

SEQ ID NO: 4657 - protein, 32 aa, Artificial Sequence
  GFR-binding peptide
  MOD_RES (32)..(32): Xaa is C or S
GEVVMDRHKRLVVKENEDYYLMSTASLETPVX

SEQ ID NO: 4658 - protein, 34 aa, Artificial Sequence
  GFR-binding peptide
  MOD_RES (34)..(34): Xaa is C or S
  MOD_RES (12)..(13)..(14)..(15)..(16): Xaa is A or G
  MOD_RES (17)..(18)..(19)..(20): Xaa is A or G or is absent
GEVVMERYKKLXXXXXXXXXFYLMSIANLETPVX

SEQ ID NO: 4659 - protein, 39 aa, Artificial Sequence
  GFR-binding peptide
  MOD_RES (2)..(37)..(38): Xaa is C or S
  MOD_RES (15)..(16)..(17)..(18)..(19): Xaa is A or G
  MOD_RES (20)..(21)..(22)..(23): Xaa is A or G or is absent
GXEAVSMGERYKKLXXXXXXXXXFYLVSIANLKTPVXXA

SEQ ID NO: 4660 - protein, 38 aa, Artificial Sequence
  GFR-binding peptide
  MOD_RES (1)..(38): Xaa is C or S
  MOD_RES (14)..(15)..(16)..(17)..(18): Xaa is A or G
  MOD_RES (19)..(20)..(21)..(22): Xaa is A or G or is absent
XALHDELTYHYKLXXXXXXXXXKYLVSIPSLQVQTPRX

SEQ ID NO: 4661 - protein, 43 aa, Artificial Sequence
  GFR-binding peptide
  MOD_RES (2)..(4)..(38): Xaa is C or S
  MOD_RES (16)..(17)..(18)..(19)..(20): Xaa is A or G
  MOD_RES (21)..(22)..(23)..(24): Xaa is A or G or is absent
HXGXSRVVMNYHYKLXXXXXXXXXKYLVSIPSLKTPAXTPKTV

SEQ ID NO: 4662 - protein, 31 aa, Artificial Sequence
  GFR-binding peptide
GEVVMDRYKKLVVKENEDFYLMSIANLETPV

SEQ ID NO: 4663 - protein, 35 aa, Artificial Sequence
  GFR-binding peptide
  MOD_RES (33)..(34): Xaa is C or S
  MOD_RES (11)..(12)..(13)..(14)..(15): Xaa is A or G
  MOD_RES (16)..(17)..(18)..(19): Xaa is A or G or is absent
EVVMDQYNKLXXXXXXXXXLYLMSIASLETPVXXA

SEQ ID NO: 4664 - protein, 38 aa, Artificial Sequence
  GFR-binding peptide
  MOD_RES (2)..(36)..(37): Xaa is C or S
  MOD_RES (14)..(15)..(16)..(17)..(18): Xaa is A or G
  MOD_RES (19)..(20)..(21)..(22): Xaa is A or G or is absent
GXAKVVMNYHYKLXXXXXXXXXKYLVSIPSLKTPAXXA

SEQ ID NO: 4665 - protein, 40 aa, Artificial Sequence
  GFR-binding peptide
  MOD_RES (34)..(35): Xaa is C or S
  MOD_RES (12)..(13)..(14)..(15)..(16): Xaa is A or G
  MOD_RES (17)..(18)..(19)..(20): Xaa is A or G or is absent
ARVVMNYHYKLXXXXXXXXXKYLVSIPSLQTPAXXPKPVT

SEQ ID NO: 4666 - protein, 40 aa, Artificial Sequence
  GFR-binding peptide
  MOD_RES (1)..(3)..(35)..(36): Xaa is C or S
XGXARVVMNQYNKLIVNSSDDLYLVSIASLQTPAXXPKPV

SEQ ID NO: 4667 - protein, 38 aa, Artificial Sequence
  GFR-binding peptide
  MOD_RES (33)..(34): Xaa is C or S
  MOD_RES (11)..(12)..(13)..(14)..(15): Xaa is A or G
  MOD_RES (16)..(17)..(18)..(19): Xaa is A or G or is absent
SKVVMRYKKLXXXXXXXXXFYLISIANLDQPVXXPSAS

SEQ ID NO: 4668 - protein, 39 aa, Artificial Sequence
  GFR-binding peptide
  MOD_RES (1)..(3)..(34)..(35): Xaa is C or S
XKXSKVIMRHKRLIKPTKGIYYLISTASLDQSVXXPSAS

SEQ ID NO: 4669 - protein, 37 aa, Artificial Sequence
  GFR-binding peptide
  MOD_RES (32)..(33): Xaa is C or S
ARVVMNRHKRLIVNSSDDYYLVSTASLQTPAXXPKPV

SEQ ID NO: 4670 - protein, 37 aa, Artificial Sequence
  GFR-binding peptide
  MOD_RES (2)..(36)..(37): Xaa is C or S
  MOD_RES (14)..(15)..(16)..(17)..(18): Xaa is A or G
  MOD_RES (19)..(20)..(21)..(22): Xaa is A or G or is absent
GXARVVMNYHYKLXXXXXXXXXKYLVSIPSLQTPAXX

SEQ ID NO: 4671 - protein, 35 aa, Artificial Sequence
  GFR-binding peptide
  MOD_RES (33)..(34): Xaa is C or S
  MOD_RES (11)..(12)..(13)..(14)..(15): Xaa is A or G
  MOD_RES (16)..(17)..(18)..(19): Xaa is A or G or is absent
KVVMNRHKRLXXXXXXXXXYYLVSTASLKTPAXXA

SEQ ID NO: 4672 - protein, 42 aa, Artificial Sequence
  GFR-binding peptide
  MOD_RES (1)..(3)..(37): Xaa is C or S
  MOD_RES (15)..(16)..(17)..(18)..(19): Xaa is A or G
  MOD_RES (20)..(21)..(22)..(23): Xaa is A or G or is absent
XGXSRVVMNRYKKLXXXXXXXXXFYLVSIANLKTPAXTPKTV

SEQ ID NO: 4673 - protein, 32 aa, Artificial Sequence
  GFR-binding peptide
  MOD_RES (11)..(12)..(13)..(14)..(15): Xaa is A or G
  MOD_RES (16)..(17)..(18)..(19): Xaa is A or G or is absent
EVVMERHKRLXXXXXXXXXYYLMSTASLETPV

SEQ ID NO: 4674 - protein, 33 aa, Artificial Sequence
  GFR-binding peptide
  MOD_RES (1)..(1): Xaa is C or S
  MOD_RES (12)..(13)..(14)..(15)..(16): Xaa is A or G
  MOD_RES (17)..(18)..(19)..(20): Xaa is A or G or is absent
XSKVIMQYNKLXXXXXXXXXLYLISIASLDQSV

SEQ ID NO: 4675 - protein, 38 aa, Artificial Sequence
  GFR-binding peptide
  MOD_RES (35)..(35): Xaa is C or S
  MOD_RES (11)..(12)..(13)..(14)..(15): Xaa is A or G
  MOD_RES (16)..(17)..(18)..(19): Xaa is A or G or is absent
HDELTRHKRLXXXXXXXXXYYLVSTASLQVQTPRXQVN

SEQ ID NO: 4676 - protein, 38 aa, Artificial Sequence
  GFR-binding peptide
  MOD_RES (34)..(34): Xaa is C or S
  MOD_RES (12)..(13)..(14)..(15)..(16): Xaa is A or G
  MOD_RES (17)..(18)..(19)..(20): Xaa is A or G or is absent
SRVVMNRYKKLXXXXXXXXXFYLVSIANLKTPAXTPKT

SEQ ID NO: 4677 - protein, 37 aa, Artificial Sequence
  GFR-binding peptide
  MOD_RES (37)..(37): Xaa is C or S
  MOD_RES (13)..(14)..(15)..(16)..(17): Xaa is A or G
  MOD_RES (18)..(19)..(20)..(21): Xaa is A or G or is absent
ALHDELTRHKRLXXXXXXXXXYYLVSTASLQVQTPRX

SEQ ID NO: 4678 - protein, 36 aa, Artificial Sequence
  GFR-binding peptide
  MOD_RES (1)..(33): Xaa is C or S
XSRVVMNRYKKLIVNSSDDFYLVSIANLKTPAXTPK

SEQ ID NO: 4679 - protein, 40 aa, Artificial Sequence
  GFR-binding peptide
  MOD_RES (2)..(34)..(35): Xaa is C or S
GXSRVVMNRHKRLIVNSSDDYYLVSTASLKTPAXXPKPVY

SEQ ID NO: 4680 - protein, 40 aa, Artificial Sequence
  GFR-binding peptide
  MOD_RES (1)..(3)..(40): Xaa is C or S
XKXALHDELTRYKKLFIPKKRVIEFYLVSIANLQVQTPRX

SEQ ID NO: 4681 - protein, 37 aa, Artificial Sequence
  GFR-binding peptide
  MOD_RES (1)..(3)..(34)..(35): Xaa is C or S
XKXSRVIMRHKRLVKPKRGVYYLISTASLAQPVXXPA

SEQ ID NO: 4682 - protein, 36 aa, Artificial Sequence
  GFR-binding peptide
  MOD_RES (2)..(33)..(34): Xaa is C or S
KXSKVIMRYKKLIKPTKGIFYLISIANLDQSVXXPS

SEQ ID NO: 4683 - protein, 42 aa, Artificial Sequence
  GFR-binding peptide
  MOD_RES (1)..(38): Xaa is C or S
XALHDELTRHKRLFIPKKRVIEYYLVSTASLQVQTPRXQVNR

SEQ ID NO: 4684 - protein, 36 aa, Artificial Sequence
  GFR-binding peptide
  MOD_RES (2)..(2): Xaa is C or S
KXALHDELTYHYKLFIPKKRVIEKYLVSIPSLQVQT

SEQ ID NO: 4685 - protein, 32 aa, Artificial Sequence
  GFR-binding peptide
  MOD_RES (1)..(32): Xaa is C or S
XSKVVMRYKKLVKPTRGVFYLISIANLDQPVX

SEQ ID NO: 4686 - protein, 36 aa, Artificial Sequence
  GFR-binding peptide
  MOD_RES (2)..(35)..(36): Xaa is C or S
  MOD_RES (13)..(14)..(15)..(16)..(17): Xaa is A or G
  MOD_RES (18)..(19)..(20)..(21): Xaa is A or G or is absent
KXSKVVMRYKKLXXXXXXXXXFYLISIANLDQPVXX

SEQ ID NO: 4687 - protein, 38 aa, Artificial Sequence
  GFR-binding peptide
  MOD_RES (1)..(3)..(37)..(38): Xaa is C or S
  MOD_RES (15)..(16)..(17)..(18)..(19): Xaa is A or G
  MOD_RES (20)..(21)..(22)..(23): Xaa is A or G or is absent
XGXARVVMNRHKRLXXXXXXXXXYYLVSTASLQTPAXX

SEQ ID NO: 4688 - protein, 32 aa, Artificial Sequence
  GFR-binding peptide
  MOD_RES (31)..(32): Xaa is C or S
RVVMNRYKKLIVNSSDDFYLVSIANLKTPAXX

SEQ ID NO: 4689 - protein, 38 aa, Artificial Sequence
  GFR-binding peptide
  MOD_RES (1)..(33)..(34): Xaa is C or S
XSRVVMNRYKKLIVNSSDDFYLVSIANLKTPAXXPKPV

SEQ ID NO: 4690 - protein, 36 aa, Artificial Sequence
  GFR-binding peptide
  MOD_RES (2)..(36): Xaa is C or S
  MOD_RES (14)..(15)..(16)..(17)..(18): Xaa is A or G
  MOD_RES (19)..(20)..(21)..(22): Xaa is A or G or is absent
GXSRVVMNYHYKLXXXXXXXXXKYLVSIPSLKTPAX

SEQ ID NO: 4691 - protein, 36 aa, Artificial Sequence
  GFR-binding peptide
  MOD_RES (1)..(35)..(36): Xaa is C or S
  MOD_RES (13)..(14)..(15)..(16)..(17): Xaa is A or G
  MOD_RES (18)..(19)..(20)..(21): Xaa is A or G or is absent
XSRVVMNRYKKLXXXXXXXXXFYLVSIANLKTPAXX

SEQ ID NO: 4692 - protein, 41 aa, Artificial Sequence
  GFR-binding peptide
  MOD_RES (1)..(3)..(36)..(37): Xaa is C or S
XGXEAVSMGEYHYKLTPVGMDDKYLVSIPSLKTPVXXAKGV

SEQ ID NO: 4693 - protein, 34 aa, Artificial Sequence
  GFR-binding peptide
  MOD_RES (13)..(14)..(15)..(16)..(17): Xaa is A or G
  MOD_RES (18)..(19)..(20)..(21): Xaa is A or G or is absent
ALHDELTYHYKLXXXXXXXXXKYLVSIPSLQVQT

SEQ ID NO: 4694 - protein, 41 aa, Artificial Sequence
  GFR-binding peptide
  MOD_RES (2)..(36)..(37): Xaa is C or S
  MOD_RES (14)..(15)..(16)..(17)..(18): Xaa is A or G
  MOD_RES (19)..(20)..(21)..(22): Xaa is A or G or is absent
GXAKVVMNYHYKLXXXXXXXXXKYLVSIPSLKTPAXXAKPV

SEQ ID NO: 4695 - protein, 34 aa, Artificial Sequence
  GFR-binding peptide
  MOD_RES (33)..(34): Xaa is C or S
  MOD_RES (11)..(12)..(13)..(14)..(15): Xaa is A or G
  MOD_RES (16)..(17)..(18)..(19): Xaa is A or G or is absent
SRVIMRHKRLXXXXXXXXXYYLISTASLAQPVXX

SEQ ID NO: 4696 - protein, 36 aa, Artificial Sequence
  GFR-binding peptide
  MOD_RES (1)..(34)..(35): Xaa is C or S
  MOD_RES (12)..(13)..(14)..(15)..(16): Xaa is A or G
  MOD_RES (17)..(18)..(19)..(20): Xaa is A or G or is absent
XSRVIMQYNKLXXXXXXXXXLYLISIASLAQPVXXP

SEQ ID NO: 4697 - protein, 33 aa, Artificial Sequence
  GFR-binding peptide
  MOD_RES (33)..(33): Xaa is C or S
  MOD_RES (11)..(12)..(13)..(14)..(15): Xaa is A or G
  MOD_RES (16)..(17)..(18)..(19): Xaa is A or G or is absent
RVVMNRYKKLXXXXXXXXXFYLVSIANLKTPAX

SEQ ID NO: 4698 - protein, 39 aa, Artificial Sequence
  GFR-binding peptide
  MOD_RES (1)..(33)..(34): Xaa is C or S
XAKVVMNRYKKLIVNNSSDFYLVSIANLKTPAXXAKPVA

SEQ ID NO: 4699 - protein, 34 aa, Artificial Sequence
  GFR-binding peptide
  MOD_RES (2)..(33)..(34): Xaa is C or S
KXSKVVMRYKKLVKPTRGVFYLISIANLDQPVXX

SEQ ID NO: 4700 - protein, 37 aa, Artificial Sequence
  GFR-binding peptide
  MOD_RES (2)..(36)..(37): Xaa is C or S
  MOD_RES (14)..(15)..(16)..(17)..(18): Xaa is A or G
  MOD_RES (19)..(20)..(21)..(22): Xaa is A or G or is absent
GXARVVMNQYNKLXXXXXXXXXLYLVSIASLQTPAXX

SEQ ID NO: 4701 - protein, 38 aa, Artificial Sequence
  GFR-binding peptide
  MOD_RES (1)..(33)..(34): Xaa is C or S
XARVVMNQYNKLIVNSSDDLYLVSIASLQTPAXXPKPV

SEQ ID NO: 4702 - protein, 36 aa, Artificial Sequence
  GFR-binding peptide
  MOD_RES (1)..(33)..(34): Xaa is C or S
XGEVVMEQYNKLVVKDYEDLYLMSIASLETPVXXAK

SEQ ID NO: 4703 - protein, 43 aa, Artificial Sequence
  GFR-binding peptide
  MOD_RES (1)..(3)..(37)..(38): Xaa is C or S
  MOD_RES (15)..(16)..(17)..(18)..(19): Xaa is A or G
  MOD_RES (20)..(21)..(22)..(23): Xaa is A or G or is absent
XGXSRVVMNRYKKLXXXXXXXXXFYLVSIANLKTPAXXPKPVY

SEQ ID NO: 4704 - protein, 31 aa, Artificial Sequence
  GFR-binding peptide
  MOD_RES (31)..(31): Xaa is C or S
EVVMDQYNKLVVKENEDLYLMSIASLETPVX

SEQ ID NO: 4705 - protein, 34 aa, Artificial Sequence
  GFR-binding peptide
  MOD_RES (2)..(34): Xaa is C or S
GXGEVVMDQYNKLVVKENEDLYLMSIASLETPVX

SEQ ID NO: 4706 - protein, 36 aa, Artificial Sequence
  GFR-binding peptide
  MOD_RES (1)..(34)..(35): Xaa is C or S
  MOD_RES (12)..(13)..(14)..(15)..(16): Xaa is A or G
  MOD_RES (17)..(18)..(19)..(20): Xaa is A or G or is absent
XSRVIMRHKRLXXXXXXXXXYYLISTASLAQPVXXP

SEQ ID NO: 4707 - protein, 40 aa, Artificial Sequence
  GFR-binding peptide
  MOD_RES (2)..(4)..(38): Xaa is C or S
  MOD_RES (16)..(17)..(18)..(19)..(20): Xaa is A or G
  MOD_RES (21)..(22)..(23)..(24): Xaa is A or G or is absent
HXGXSRVVMNRHKRLXXXXXXXXXYYLVSTASLKTPAXTP

SEQ ID NO: 4708 - protein, 36 aa, Artificial Sequence
  GFR-binding peptide
  MOD_RES (1)..(35)..(36): Xaa is C or S
  MOD_RES (13)..(14)..(15)..(16)..(17): Xaa is A or G
  MOD_RES (18)..(19)..(20)..(21): Xaa is A or G or is absent
XGEVVMERYKKLXXXXXXXXXFYLMSIANLETPVXX

SEQ ID NO: 4709 - protein, 39 aa, Artificial Sequence
  GFR-binding peptide
  MOD_RES (2)..(4)..(36)..(37): Xaa is C or S
HXGXAKVVMNQYNKLIVNNSSDLYLVSIASLKTPAXXAK

SEQ ID NO: 4710 - protein, 35 aa, Artificial Sequence
  GFR-binding peptide
  MOD_RES (1)..(3)..(34)..(35): Xaa is C or S
XKXSKVVMQYNKLVKPTRGVLYLISIASLDQPVXX

SEQ ID NO: 4711 - protein, 38 aa, Artificial Sequence
  GFR-binding peptide
  MOD_RES (2)..(4)..(35)..(36): Xaa is C or S
SXKXSRVIMRYKKLVKPKRGVFYLISIANLAQPVXXPA

SEQ ID NO: 4712 - protein, 34 aa, Artificial Sequence
  GFR-binding peptide
  MOD_RES (1)..(33)..(34): Xaa is C or S
XAKVVMNRYKKLIVNNSSDFYLVSIANLKTPAXX

SEQ ID NO: 4713 - protein, 35 aa, Artificial Sequence
  GFR-binding peptide
  MOD_RES (2)..(2): Xaa is C or S
  MOD_RES (14)..(15)..(16)..(17)..(18): Xaa is A or G
  MOD_RES (19)..(20)..(21)..(22): Xaa is A or G or is absent
GXAKVVMNRHKRLXXXXXXXXXYYLVSTASLKTPA

SEQ ID NO: 4714 - protein, 36 aa, Artificial Sequence
  GFR-binding peptide
  MOD_RES (2)..(2): Xaa is C or S
  MOD_RES (15)..(16)..(17)..(18)..(19): Xaa is A or G
  MOD_RES (20)..(21)..(22)..(23): Xaa is A or G or is absent
KXALHDELTRYKKLXXXXXXXXXFYLVSIANLQVQT

SEQ ID NO: 4715 - protein, 39 aa, Artificial Sequence
  GFR-binding peptide
  MOD_RES (1)..(38): Xaa is C or S
  MOD_RES (14)..(15)..(16)..(17)..(18): Xaa is A or G
  MOD_RES (19)..(20)..(21)..(22): Xaa is A or G or is absent
XALHDELTQYNKLXXXXXXXXXLYLVSIASLQVQTPRXQ

SEQ ID NO: 4716 - protein, 38 aa, Artificial Sequence
  GFR-binding peptide
  MOD_RES (2)..(37)..(38): Xaa is C or S
  MOD_RES (15)..(16)..(17)..(18)..(19): Xaa is A or G
  MOD_RES (20)..(21)..(22)..(23): Xaa is A or G or is absent
GXEAVSMGERYKKLXXXXXXXXXFYLVSIANLKTPVXX

SEQ ID NO: 4717 - protein, 44 aa, Artificial Sequence
  GFR-binding peptide
  MOD_RES (2)..(4)..(38): Xaa is C or S
  MOD_RES (16)..(17)..(18)..(19)..(20): Xaa is A or G
  MOD_RES (21)..(22)..(23)..(24): Xaa is A or G or is absent
HXGXSRVVMNQYNKLXXXXXXXXXLYLVSIASLKTPAXTPKTVH

SEQ ID NO: 4718 - protein, 38 aa, Artificial Sequence
  GFR-binding peptide
  MOD_RES (37)..(37): Xaa is C or S
  MOD_RES (13)..(14)..(15)..(16)..(17): Xaa is A or G
  MOD_RES (18)..(19)..(20)..(21): Xaa is A or G or is absent
ALHDELTYHYKLXXXXXXXXXKYLVSIPSLQVQTPRXQ

SEQ ID NO: 4719 - protein, 36 aa, Artificial Sequence
  GFR-binding peptide
  MOD_RES (1)..(3)..(35)..(36): Xaa is C or S
XGXGEVVMDRYKKLVVKENEDFYLMSIANLETPVXX

SEQ ID NO: 4720 - protein, 41 aa, Artificial Sequence
  GFR-binding peptide
  MOD_RES (1)..(3)..(37)..(38): Xaa is C or S
  MOD_RES (15)..(16)..(17)..(18)..(19): Xaa is A or G
  MOD_RES (20)..(21)..(22)..(23): Xaa is A or G or is absent
XGXGEVVMERYKKLXXXXXXXXXFYLMSIANLETPVXXAKP

SEQ ID NO: 4721 - protein, 40 aa, Artificial Sequence
  GFR-binding peptide
  MOD_RES (37)..(37): Xaa is C or S
  MOD_RES (13)..(14)..(15)..(16)..(17): Xaa is A or G
  MOD_RES (18)..(19)..(20)..(21): Xaa is A or G or is absent
ALHDELTYHYKLXXXXXXXXXKYLVSIPSLQVQTPRXQVN

SEQ ID NO: 4722 - protein, 38 aa, Artificial Sequence
  GFR-binding peptide
  MOD_RES (2)..(4)..(38): Xaa is C or S
  MOD_RES (16)..(17)..(18)..(19)..(20): Xaa is A or G
  MOD_RES (21)..(22)..(23)..(24): Xaa is A or G or is absent
HXGXSRVVMNRYKKLXXXXXXXXXFYLVSIANLKTPAX

SEQ ID NO: 4723 - protein, 37 aa, Artificial Sequence
  GFR-binding peptide
  MOD_RES (1)..(32)..(33): Xaa is C or S
XSRVIMRYKKLVKPKRGVFYLISIANLAQPVXXPAAS

SEQ ID NO: 4724 - protein, 33 aa, Artificial Sequence
  GFR-binding peptide
  MOD_RES (33)..(33): Xaa is C or S
  MOD_RES (11)..(12)..(13)..(14)..(15): Xaa is A or G
  MOD_RES (16)..(17)..(18)..(19): Xaa is A or G or is absent
KVVMNRYKKLXXXXXXXXXFYLVSIANLKTPAX

SEQ ID NO: 4725 - protein, 34 aa, Artificial Sequence
  GFR-binding peptide
  MOD_RES (33)..(34): Xaa is C or S
  MOD_RES (11)..(12)..(13)..(14)..(15): Xaa is A or G
  MOD_RES (16)..(17)..(18)..(19): Xaa is A or G or is absent
EVVMERHKRLXXXXXXXXXYYLMSTASLETPVXX

SEQ ID NO: 4726 - protein, 37 aa, Artificial Sequence
  GFR-binding peptide
  MOD_RES (35)..(35): Xaa is C or S
HDELTQYNKLFIPKKRVIELYLVSIASLQVQTPRXQV

SEQ ID NO: 4727 - protein, 41 aa, Artificial Sequence
  GFR-binding peptide
  MOD_RES (2)..(4)..(38)..(39): Xaa is C or S
  MOD_RES (16)..(17)..(18)..(19)..(20): Xaa is A or G
  MOD_RES (21)..(22)..(23)..(24): Xaa is A or G or is absent
HXGXSRVVMNQYNKLXXXXXXXXXLYLVSIASLKTPAXXPK

SEQ ID NO: 4728 - protein, 43 aa, Artificial Sequence
  GFR-binding peptide
  MOD_RES (2)..(4)..(37)..(38): Xaa is C or S
  MOD_RES (15)..(16)..(17)..(18)..(19): Xaa is A or G
  MOD_RES (20)..(21)..(22)..(23): Xaa is A or G or is absent
SXKXSKVVMRHKRLXXXXXXXXXYYLISTASLDQPVXXPSASA

SEQ ID NO: 4729 - protein, 37 aa, Artificial Sequence
  GFR-binding peptide
  MOD_RES (35)..(35): Xaa is C or S
HDELTRHKRLFIPKKRVIEYYLVSTASLQVQTPRXQV

SEQ ID NO: 4730 - protein, 39 aa, Artificial Sequence
  GFR-binding peptide
  MOD_RES (1)..(3)..(35)..(36): Xaa is C or S
XGXSRVVMNRHKRLIVNSSDDYYLVSTASLKTPAXXPKP

SEQ ID NO: 4731 - protein, 37 aa, Artificial Sequence
  GFR-binding peptide
  MOD_RES (32)..(33): Xaa is C or S
SRVVMNQYNKLIVNSSDDLYLVSIASLKTPAXXPKPV

SEQ ID NO: 4732 - protein, 33 aa, Artificial Sequence
  GFR-binding peptide
  MOD_RES (1)..(1): Xaa is C or S
  MOD_RES (12)..(13)..(14)..(15)..(16): Xaa is A or G
  MOD_RES (17)..(18)..(19)..(20): Xaa is A or G or is absent
XSKVIMRHKRLXXXXXXXXXYYLISTASLDQSV

SEQ ID NO: 4733 - protein, 38 aa, Artificial Sequence
  GFR-binding peptide
  MOD_RES (2)..(4)..(37)..(38): Xaa is C or S
  MOD_RES (15)..(16)..(17)..(18)..(19): Xaa is A or G
  MOD_RES (20)..(21)..(22)..(23): Xaa is A or G or is absent
SXKXSKVIMRYKKLXXXXXXXXXFYLISIANLDQSVXX

SEQ ID NO: 4734 - protein, 33 aa, Artificial Sequence
  GFR-binding peptide
  MOD_RES (31)..(32): Xaa is C or S
EVVMDYHYKLVVKENEDKYLMSIPSLETPVXXA

SEQ ID NO: 4735 - protein, 32 aa, Artificial Sequence
  GFR-binding peptide
  MOD_RES (31)..(32): Xaa is C or S
EVVMDRYKKLVVKENEDFYLMSIANLETPVXX

SEQ ID NO: 4736 - protein, 35 aa, Artificial Sequence
  GFR-binding peptide
  MOD_RES (1)..(3): Xaa is C or S
XGXEAVSMGERHKRLTPVGMDDYYLVSTASLKTPV

SEQ ID NO: 4737 - protein, 34 aa, Artificial Sequence
  GFR-binding peptide
  MOD_RES (1)..(3): Xaa is C or S
XGXARVVMNRYKKLIVNSSDDFYLVSIANLQTPA

SEQ ID NO: 4738 - protein, 34 aa, Artificial Sequence
  GFR-binding peptide
  MOD_RES (34)..(34): Xaa is C or S
  MOD_RES (12)..(13)..(14)..(15)..(16): Xaa is A or G
  MOD_RES (17)..(18)..(19)..(20): Xaa is A or G or is absent
ARVVMNRYKKLXXXXXXXXXFYLVSIANLQTPAX

SEQ ID NO: 4739 - protein, 41 aa, Artificial Sequence
  GFR-binding peptide
  MOD_RES (2)..(36)..(37): Xaa is C or S
  MOD_RES (14)..(15)..(16)..(17)..(18): Xaa is A or G
  MOD_RES (19)..(20)..(21)..(22): Xaa is A or G or is absent
GXGEVVMEYHYKLXXXXXXXXXKYLMSIPSLETPVXXAKPI

SEQ ID NO: 4740 - protein, 40 aa, Artificial Sequence
  GFR-binding peptide
  MOD_RES (1)..(3)..(40): Xaa is C or S
  MOD_RES (16)..(17)..(18)..(19)..(20): Xaa is A or G
  MOD_RES (21)..(22)..(23)..(24): Xaa is A or G or is absent
XKXALHDELTRHKRLXXXXXXXXXYYLVSTASLQVQTPRX

SEQ ID NO: 4741 - protein, 37 aa, Artificial Sequence
  GFR-binding peptide
  MOD_RES (1)..(1): Xaa is C or S
XALHDELTRYKKLFIPKKRVIEFYLVSIANLQVQTPR

SEQ ID NO: 4742 - protein, 41 aa, Artificial Sequence
  GFR-binding peptide
  MOD_RES (1)..(3)..(36)..(37): Xaa is C or S
  MOD_RES (14)..(15)..(16)..(17)..(18): Xaa is A or G
  MOD_RES (19)..(20)..(21)..(22): Xaa is A or G or is absent
XKXSKVIMRHKRLXXXXXXXXXYYLISTASLDQSVXXPSAS

SEQ ID NO: 4743 - protein, 40 aa, Artificial Sequence
  GFR-binding peptide
  MOD_RES (1)..(3)..(34)..(35): Xaa is C or S
XKXSKVVMYHYKLVKPTRGVKYLISIPSLDQPVXXPSASA

SEQ ID NO: 4744 - protein, 39 aa, Artificial Sequence
  GFR-binding peptide
  MOD_RES (2)..(34)..(35): Xaa is C or S
GXSRVVMNRYKKLIVNSSDDFYLVSIANLKTPAXXPKPV

SEQ ID NO: 4745 - protein, 33 aa, Artificial Sequence
  GFR-binding peptide
  MOD_RES (32)..(33): Xaa is C or S
GEVVMDQYNKLVVKENEDLYLMSIASLETPVXX

SEQ ID NO: 4746 - protein, 41 aa, Artificial Sequence
  GFR-binding peptide
  MOD_RES (2)..(4)..(41): Xaa is C or S
EXKXALHDELTRYKKLFIPKKRVIEFYLVSIANLQVQTPRX

SEQ ID NO: 4747 - protein, 37 aa, Artificial Sequence
  GFR-binding peptide
  MOD_RES (2)..(36)..(37): Xaa is C or S
  MOD_RES (14)..(15)..(16)..(17)..(18): Xaa is A or G
  MOD_RES (19)..(20)..(21)..(22): Xaa is A or G or is absent
GXGEVVMDRHKRLXXXXXXXXXYYLMSTASLETPVXX

SEQ ID NO: 4748 - protein, 33 aa, Artificial Sequence
  GFR-binding peptide
  MOD_RES (12)..(13)..(14)..(15)..(16): Xaa is A or G
  MOD_RES (17)..(18)..(19)..(20): Xaa is A or G or is absent
LHDELTQYNKLXXXXXXXXXLYLVSIASLQVQT

SEQ ID NO: 4749 - protein, 39 aa, Artificial Sequence
  GFR-binding peptide
  MOD_RES (1)..(35)..(36): Xaa is C or S
  MOD_RES (13)..(14)..(15)..(16)..(17): Xaa is A or G
  MOD_RES (18)..(19)..(20)..(21): Xaa is A or G or is absent
XGEVVMDRHKRLXXXXXXXXXYYLMSTASLETPVXXAKP

SEQ ID NO: 4750 - protein, 34 aa, Artificial Sequence
  GFR-binding peptide
  MOD_RES (33)..(34): Xaa is C or S
  MOD_RES (11)..(12)..(13)..(14)..(15): Xaa is A or G
  MOD_RES (16)..(17)..(18)..(19): Xaa is A or G or is absent
EVVMDYHYKLXXXXXXXXXKYLMSIPSLETPVXX

SEQ ID NO: 4751 - protein, 39 aa, Artificial Sequence
  GFR-binding peptide
  MOD_RES (1)..(3)..(37)..(38): Xaa is C or S
  MOD_RES (15)..(16)..(17)..(18)..(19): Xaa is A or G
  MOD_RES (20)..(21)..(22)..(23): Xaa is A or G or is absent
XGXGEVVMDRYKKLXXXXXXXXXFYLMSIANLETPVXXA

SEQ ID NO: 4752 - protein, 37 aa, Artificial Sequence
  GFR-binding peptide
  MOD_RES (31)..(32): Xaa is C or S
SKVVMRYKKLVKPTRGVFYLISIANLDQPVXXPSASA

SEQ ID NO: 4753 - protein, 33 aa, Artificial Sequence
  GFR-binding peptide
  MOD_RES (33)..(33): Xaa is C or S
  MOD_RES (11)..(12)..(13)..(14)..(15): Xaa is A or G
  MOD_RES (16)..(17)..(18)..(19): Xaa is A or G or is absent
RVVMNRHKRLXXXXXXXXXYYLVSTASLQTPAX

SEQ ID NO: 4754 - protein, 35 aa, Artificial Sequence
  GFR-binding peptide
  MOD_RES (1)..(3)..(35): Xaa is C or S
XGXGEVVMEQYNKLVVKDYEDLYLMSIASLETPVX

SEQ ID NO: 4755 - protein, 33 aa, Artificial Sequence
  GFR-binding peptide
  MOD_RES (31)..(32): Xaa is C or S
SKVIMRYKKLIKPTKGIFYLISIANLDQSVXXP

SEQ ID NO: 4756 - protein, 36 aa, Artificial Sequence
  GFR-binding peptide
  MOD_RES (2)..(4): Xaa is C or S
  MOD_RES (15)..(16)..(17)..(18)..(19): Xaa is A or G
  MOD_RES (20)..(21)..(22)..(23): Xaa is A or G or is absent
SXKXSKVIMYHYKLXXXXXXXXXKYLISIPSLDQSV

SEQ ID NO: 4757 - protein, 37 aa, Artificial Sequence
  GFR-binding peptide
  MOD_RES (1)..(3)..(35)..(36): Xaa is C or S
XGXGEVVMERYKKLVVKDYEDFYLMSIANLETPVXXA

SEQ ID NO: 4758 - protein, 34 aa, Artificial Sequence
  GFR-binding peptide
  MOD_RES (1)..(3): Xaa is C or S
XGXSRVVMNRYKKLIVNSSDDFYLVSIANLKTPA

SEQ ID NO: 4759 - protein, 38 aa, Artificial Sequence
  GFR-binding peptide
  MOD_RES (2)..(2): Xaa is C or S
  MOD_RES (15)..(16)..(17)..(18)..(19): Xaa is A or G
  MOD_RES (20)..(21)..(22)..(23): Xaa is A or G or is absent
KXALHDELTRYKKLXXXXXXXXXFYLVSIANLQVQTPR

SEQ ID NO: 4760 - protein, 32 aa, Artificial Sequence
  GFR-binding peptide
  MOD_RES (32)..(32): Xaa is C or S
GEVVMEQYNKLVVKDYEDLYLMSIASLETPVX

SEQ ID NO: 4761 - protein, 34 aa, Artificial Sequence
  GFR-binding peptide
  MOD_RES (31)..(32): Xaa is C or S
EVVMDRYKKLVVKENEDFYLMSIANLETPVXXAK

SEQ ID NO: 4762 - protein, 37 aa, Artificial Sequence
  GFR-binding peptide
  MOD_RES (1)..(3)..(37): Xaa is C or S
  MOD_RES (15)..(16)..(17)..(18)..(19): Xaa is A or G
  MOD_RES (20)..(21)..(22)..(23): Xaa is A or G or is absent
XGXSRVVMNYHYKLXXXXXXXXXKYLVSIPSLKTPAX

SEQ ID NO: 4763 - protein, 38 aa, Artificial Sequence
  GFR-binding peptide
  MOD_RES (1)..(3)..(35)..(36): Xaa is C or S
XGXARVVMNRHKRLIVNSSDDYYLVSTASLQTPAXXPK

SEQ ID NO: 4764 - protein, 37 aa, Artificial Sequence
  GFR-binding peptide
  MOD_RES (34)..(35): Xaa is C or S
  MOD_RES (12)..(13)..(14)..(15)..(16): Xaa is A or G
  MOD_RES (17)..(18)..(19)..(20): Xaa is A or G or is absent
AKVVMNYHYKLXXXXXXXXXKYLVSIPSLKTPAXXAK

SEQ ID NO: 4765 - protein, 39 aa, Artificial Sequence
  GFR-binding peptide
  MOD_RES (35)..(35): Xaa is C or S
HDELTQYNKLFIPKKRVIELYLVSIASLQVQTPRXQVNR

SEQ ID NO: 4766 - protein, 35 aa, Artificial Sequence
  GFR-binding peptide
  MOD_RES (35)..(35): Xaa is C or S
HDELTRHKRLFIPKKRVIEYYLVSTASLQVQTPRX

SEQ ID NO: 4767 - protein, 38 aa, Artificial Sequence
  GFR-binding peptide
  MOD_RES (32)..(33): Xaa is C or S
SRVVMNYHYKLIVNSSDDKYLVSIPSLKTPAXXPKPVY

SEQ ID NO: 4768 - protein, 39 aa, Artificial Sequence
  GFR-binding peptide
  MOD_RES (2)..(36): Xaa is C or S
  MOD_RES (14)..(15)..(16)..(17)..(18): Xaa is A or G
  MOD_RES (19)..(20)..(21)..(22): Xaa is A or G or is absent
GXSRVVMNYHYKLXXXXXXXXXKYLVSIPSLKTPAXTPK

SEQ ID NO: 4769 - protein, 39 aa, Artificial Sequence
  GFR-binding peptide
  MOD_RES (34)..(35): Xaa is C or S
  MOD_RES (12)..(13)..(14)..(15)..(16): Xaa is A or G
  MOD_RES (17)..(18)..(19)..(20): Xaa is A or G or is absent
GEVVMERHKRLXXXXXXXXXYYLMSTASLETPVXXAKPI

SEQ ID NO: 4770 - protein, 33 aa, Artificial Sequence
  GFR-binding peptide
  MOD_RES (1)..(3): Xaa is C or S
XKXSKVIMQYNKLIKPTKGILYLISIASLDQSV

SEQ ID NO: 4771 - protein, 40 aa, Artificial Sequence
  GFR-binding peptide
  MOD_RES (1)..(3)..(37)..(38): Xaa is C or S
  MOD_RES (15)..(16)..(17)..(18)..(19): Xaa is A or G
  MOD_RES (20)..(21)..(22)..(23): Xaa is A or G or is absent
XGXARVVMNQYNKLXXXXXXXXXLYLVSIASLQTPAXXPK

SEQ ID NO: 4772 - protein, 37 aa, Artificial Sequence
  GFR-binding peptide
  MOD_RES (34)..(35): Xaa is C or S
  MOD_RES (12)..(13)..(14)..(15)..(16): Xaa is A or G
  MOD_RES (17)..(18)..(19)..(20): Xaa is A or G or is absent
GEVVMEYHYKLXXXXXXXXXKYLMSIPSLETPVXXAK

SEQ ID NO: 4773 - protein, 39 aa, Artificial Sequence
  GFR-binding peptide
  MOD_RES (1)..(3)..(34)..(35): Xaa is C or S
XKXSRVIMQYNKLVKPKRGVLYLISIASLAQPVXXPAAS

SEQ ID NO: 4774 - protein, 37 aa, Artificial Sequence
  GFR-binding peptide
  MOD_RES (1)..(1): Xaa is C or S
  MOD_RES (14)..(15)..(16)..(17)..(18): Xaa is A or G
  MOD_RES (19)..(20)..(21)..(22): Xaa is A or G or is absent
XALHDELTRHKRLXXXXXXXXXYYLVSTASLQVQTPR

SEQ ID NO: 4775 - protein, 33 aa, Artificial Sequence
  GFR-binding peptide
  MOD_RES (1)..(3): Xaa is C or S
XKXSKVIMYHYKLIKPTKGIKYLISIPSLDQSV

SEQ ID NO: 4776 - protein, 41 aa, Artificial Sequence
  GFR-binding peptide
  MOD_RES (1)..(3)..(35)..(36): Xaa is C or S
XGXSRVVMNRHKRLIVNSSDDYYLVSTASLKTPAXXPKPVY

SEQ ID NO: 4777 - protein, 40 aa, Artificial Sequence
  GFR-binding peptide
  MOD_RES (2)..(4)..(35)..(36): Xaa is C or S
SXKXSRVIMRYKKLVKPKRGVFYLISIANLAQPVXXPAAS

SEQ ID NO: 4778 - protein, 41 aa, Artificial Sequence
  GFR-binding peptide
  MOD_RES (1)..(3)..(36)..(37): Xaa is C or S
  MOD_RES (14)..(15)..(16)..(17)..(18): Xaa is A or G
  MOD_RES (19)..(20)..(21)..(22): Xaa is A or G or is absent
XKXSRVIMRHKRLXXXXXXXXXYYLISTASLAQPVXXPAAS

SEQ ID NO: 4779 - protein, 39 aa, Artificial Sequence
  GFR-binding peptide
  MOD_RES (1)..(3)..(35)..(36): Xaa is C or S
XGXGEVVMDQYNKLVVKENEDLYLMSIASLETPVXXAKP

SEQ ID NO: 4780 - protein, 35 aa, Artificial Sequence
  GFR-binding peptide
  MOD_RES (32)..(32): Xaa is C or S
SRVVMNYHYKLIVNSSDDKYLVSIPSLKTPAXTPK

SEQ ID NO: 4781 - protein, 36 aa, Artificial Sequence
  GFR-binding peptide
  MOD_RES (2)..(4): Xaa is C or S
RXGXEAVSMGERHKRLTPVGMDDYYLVSTASLKTPV

SEQ ID NO: 4782 - protein, 42 aa, Artificial Sequence
  GFR-binding peptide
  MOD_RES (2)..(4)..(41): Xaa is C or S
  MOD_RES (17)..(18)..(19)..(20)..(21): Xaa is A or G
  MOD_RES (22)..(23)..(24)..(25): Xaa is A or G or is absent
EXKXALHDELTRHKRLXXXXXXXXXYYLVSTASLQVQTPRXQ

SEQ ID NO: 4783 - protein, 33 aa, Artificial Sequence
  GFR-binding peptide
  MOD_RES (31)..(32): Xaa is C or S
EVVMDQYNKLVVKENEDLYLMSIASLETPVXXA

SEQ ID NO: 4784 - protein, 41 aa, Artificial Sequence
  GFR-binding peptide
  MOD_RES (2)..(4)..(38)..(39): Xaa is C or S
  MOD_RES (16)..(17)..(18)..(19)..(20): Xaa is A or G
  MOD_RES (21)..(22)..(23)..(24): Xaa is A or G or is absent
RXGXGEVVMDRHKRLXXXXXXXXXYYLMSTASLETPVXXAK

SEQ ID NO: 4785 - protein, 38 aa, Artificial Sequence
  GFR-binding peptide
  MOD_RES (1)..(33)..(34): Xaa is C or S
XARVVMNRHKRLIVNSSDDYYLVSTASLQTPAXXPKPV

SEQ ID NO: 4786 - protein, 37 aa, Artificial Sequence
  GFR-binding peptide
  MOD_RES (1)..(36)..(37): Xaa is C or S
  MOD_RES (14)..(15)..(16)..(17)..(18): Xaa is A or G
  MOD_RES (19)..(20)..(21)..(22): Xaa is A or G or is absent
XEAVSMGERHKRLXXXXXXXXXYYLVSTASLKTPVXX

SEQ ID NO: 4787 - protein, 30 aa, Artificial Sequence
  GFR-binding peptide
SKVVMRHKRLVKPTRGVYYLISTASLDQPV

SEQ ID NO: 4788 - protein, 36 aa, Artificial Sequence
  GFR-binding peptide
  MOD_RES (34)..(34): Xaa is C or S
  MOD_RES (12)..(13)..(14)..(15)..(16): Xaa is A or G
  MOD_RES (17)..(18)..(19)..(20): Xaa is A or G or is absent
SRVVMNYHYKLXXXXXXXXXKYLVSIPSLKTPAXTP

SEQ ID NO: 4789 - protein, 35 aa, Artificial Sequence
  GFR-binding peptide
  MOD_RES (1)..(35): Xaa is C or S
  MOD_RES (13)..(14)..(15)..(16)..(17): Xaa is A or G
  MOD_RES (18)..(19)..(20)..(21): Xaa is A or G or is absent
XGEVVMERYKKLXXXXXXXXXFYLMSIANLETPVX

SEQ ID NO: 4790 - protein, 35 aa, Artificial Sequence
  GFR-binding peptide
  MOD_RES (1)..(34)..(35): Xaa is C or S
  MOD_RES (12)..(13)..(14)..(15)..(16): Xaa is A or G
  MOD_RES (17)..(18)..(19)..(20): Xaa is A or G or is absent
XSRVIMYHYKLXXXXXXXXXKYLISIPSLAQPVXX

SEQ ID NO: 4791 - protein, 36 aa, Artificial Sequence
  GFR-binding peptide
  MOD_RES (31)..(32): Xaa is C or S
SKVIMRHKRLIKPTKGIYYLISTASLDQSVXXPSAS

SEQ ID NO: 4792 - protein, 42 aa, Artificial Sequence
  GFR-binding peptide
  MOD_RES (2)..(4)..(36)..(37): Xaa is C or S
RXGXGEVVMDYHYKLVVKENEDKYLMSIPSLETPVXXAKPIK

SEQ ID NO: 4793 - protein, 39 aa, Artificial Sequence
  GFR-binding peptide
  MOD_RES (36)..(36): Xaa is C or S
  MOD_RES (12)..(13)..(14)..(15)..(16): Xaa is A or G
  MOD_RES (17)..(18)..(19)..(20): Xaa is A or G or is absent
LHDELTYHYKLXXXXXXXXXKYLVSIPSLQVQTPRXQVN

SEQ ID NO: 4794 - protein, 38 aa, Artificial Sequence
  GFR-binding peptide
  MOD_RES (2)..(33)..(34): Xaa is C or S
KXSRVIMRHKRLVKPKRGVYYLISTASLAQPVXXPAAS

SEQ ID NO: 4795 - protein, 38 aa, Artificial Sequence
  GFR-binding peptide
  MOD_RES (2)..(4)..(38): Xaa is C or S
  MOD_RES (16)..(17)..(18)..(19)..(20): Xaa is A or G
  MOD_RES (21)..(22)..(23)..(24): Xaa is A or G or is absent
RXGXGEVVMEQYNKLXXXXXXXXXLYLMSIASLETPVX

SEQ ID NO: 4796 - protein, 38 aa, Artificial Sequence
  GFR-binding peptide
  MOD_RES (2)..(33)..(34): Xaa is C or S
KXSRVIMQYNKLVKPKRGVLYLISIASLAQPVXXPAAS

SEQ ID NO: 4797 - protein, 35 aa, Artificial Sequence
  GFR-binding peptide
  MOD_RES (31)..(31): Xaa is C or S
RVVMNRHKRLIVNSSDDYYLVSTASLKTPAXTPKT

SEQ ID NO: 4798 - protein, 39 aa, Artificial Sequence
  GFR-binding peptide
  MOD_RES (34)..(34): Xaa is C or S
  MOD_RES (12)..(13)..(14)..(15)..(16): Xaa is A or G
  MOD_RES (17)..(18)..(19)..(20): Xaa is A or G or is absent
SRVVMNRYKKLXXXXXXXXXFYLVSIANLKTPAXTPKTV

SEQ ID NO: 4799 - protein, 36 aa, Artificial Sequence
  GFR-binding peptide
  MOD_RES (31)..(32): Xaa is C or S
SRVIMQYNKLVKPKRGVLYLISIASLAQPVXXPAAS

SEQ ID NO: 4800 - protein, 33 aa, Artificial Sequence
  GFR-binding peptide
  MOD_RES (33)..(33): Xaa is C or S
  MOD_RES (11)..(12)..(13)..(14)..(15): Xaa is A or G
  MOD_RES (16)..(17)..(18)..(19): Xaa is A or G or is absent
RVVMNYHYKLXXXXXXXXXKYLVSIPSLQTPAX

SEQ ID NO: 4801 - protein, 40 aa, Artificial Sequence
  GFR-binding peptide
  MOD_RES (2)..(4): Xaa is C or S
  MOD_RES (17)..(18)..(19)..(20)..(21): Xaa is A or G
  MOD_RES (22)..(23)..(24)..(25): Xaa is A or G or is absent
EXKXALHDELTYHYKLXXXXXXXXXKYLVSIPSLQVQTPR

SEQ ID NO: 4802 - protein, 36 aa, Artificial Sequence
  GFR-binding peptide
  MOD_RES (1)..(3)..(35)..(36): Xaa is C or S
XGXAKVVMNRHKRLIVNNSSDYYLVSTASLKTPAXX

SEQ ID NO: 4803 - protein, 33 aa, Artificial Sequence
  GFR-binding peptide
  MOD_RES (1)..(3): Xaa is C or S
XKXSRVIMYHYKLVKPKRGVKYLISIPSLAQPV

SEQ ID NO: 4804 - protein, 37 aa, Artificial Sequence
  GFR-binding peptide
  MOD_RES (1)..(3)..(36)..(37): Xaa is C or S
  MOD_RES (14)..(15)..(16)..(17)..(18): Xaa is A or G
  MOD_RES (19)..(20)..(21)..(22): Xaa is A or G or is absent
XKXSKVVMRHKRLXXXXXXXXXYYLISTASLDQPVXX

SEQ ID NO: 4805 - protein, 34 aa, Artificial Sequence
  GFR-binding peptide
  MOD_RES (31)..(32): Xaa is C or S
RVVMNQYNKLIVNSSDDLYLVSIASLQTPAXXPK

SEQ ID NO: 4806 - protein, 40 aa, Artificial Sequence
  GFR-binding peptide
  MOD_RES (2)..(4)..(39)..(40): Xaa is C or S
  MOD_RES (17)..(18)..(19)..(20)..(21): Xaa is A or G
  MOD_RES (22)..(23)..(24)..(25): Xaa is A or G or is absent
RXGXEAVSMGEYHYKLXXXXXXXXXKYLVSIPSLKTPVXX

SEQ ID NO: 4807 - protein, 39 aa, Artificial Sequence
  GFR-binding peptide
  MOD_RES (1)..(3)..(37)..(38): Xaa is C or S
  MOD_RES (15)..(16)..(17)..(18)..(19): Xaa is A or G
  MOD_RES (20)..(21)..(22)..(23): Xaa is A or G or is absent
XGXSRVVMNYHYKLXXXXXXXXXKYLVSIPSLKTPAXXP

SEQ ID NO: 4808 - protein, 41 aa, Artificial Sequence
  GFR-binding peptide
  MOD_RES (1)..(3)..(36)..(37): Xaa is C or S
  MOD_RES (14)..(15)..(16)..(17)..(18): Xaa is A or G
  MOD_RES (19)..(20)..(21)..(22): Xaa is A or G or is absent
XKXSKVVMYHYKLXXXXXXXXXKYLISIPSLDQPVXXPSAS

SEQ ID NO: 4809 - protein, 35 aa, Artificial Sequence
  GFR-binding peptide
  MOD_RES (35)..(35): Xaa is C or S
HDELTQYNKLFIPKKRVIELYLVSIASLQVQTPRX

SEQ ID NO: 4810 - protein, 41 aa, Artificial Sequence
  GFR-binding peptide
  MOD_RES (2)..(36)..(37): Xaa is C or S
  MOD_RES (14)..(15)..(16)..(17)..(18): Xaa is A or G
  MOD_RES (19)..(20)..(21)..(22): Xaa is A or G or is absent
GXARVVMNYHYKLXXXXXXXXXKYLVSIPSLQTPAXXPKPV

SEQ ID NO: 4811 - protein, 39 aa, Artificial Sequence
  GFR-binding peptide
  MOD_RES (2)..(4)..(35)..(36): Xaa is C or S
SXKXSKVIMYHYKLIKPTKGIKYLISIPSLDQSVXXPSA

SEQ ID NO: 4812 - protein, 33 aa, Artificial Sequence
  GFR-binding peptide
  MOD_RES (1)..(3): Xaa is C or S
XKXSRVIMRHKRLVKPKRGVYYLISTASLAQPV

SEQ ID NO: 4813 - protein, 37 aa, Artificial Sequence
  GFR-binding peptide
  MOD_RES (1)..(3)..(35)..(36): Xaa is C or S
XGXAKVVMNRYKKLIVNNSSDFYLVSIANLKTPAXXA

SEQ ID NO: 4814 - protein, 37 aa, Artificial Sequence
  GFR-binding peptide
  MOD_RES (31)..(32): Xaa is C or S
EVVMDQYNKLVVKENEDLYLMSIASLETPVXXAKPIK

SEQ ID NO: 4815 - protein, 32 aa, Artificial Sequence
  GFR-binding peptide
  MOD_RES (1)..(1): Xaa is C or S
XARVVMNRHKRLIVNSSDDYYLVSTASLQTPA

SEQ ID NO: 4816 - protein, 40 aa, Artificial Sequence
  GFR-binding peptide
  MOD_RES (2)..(37)..(38): Xaa is C or S
  MOD_RES (15)..(16)..(17)..(18)..(19): Xaa is A or G
  MOD_RES (20)..(21)..(22)..(23): Xaa is A or G or is absent
GXEAVSMGERHKRLXXXXXXXXXYYLVSTASLKTPVXXAK

SEQ ID NO: 4817 - protein, 33 aa, Artificial Sequence
  GFR-binding peptide
  MOD_RES (12)..(13)..(14)..(15)..(16): Xaa is A or G
  MOD_RES (17)..(18)..(19)..(20): Xaa is A or G or is absent
GEVVMEYHYKLXXXXXXXXXKYLMSIPSLETPV

SEQ ID NO: 4818 - protein, 36 aa, Artificial Sequence
  GFR-binding peptide
  MOD_RES (33)..(34): Xaa is C or S
  MOD_RES (11)..(12)..(13)..(14)..(15): Xaa is A or G
  MOD_RES (16)..(17)..(18)..(19): Xaa is A or G or is absent
SKVIMQYNKLXXXXXXXXXLYLISIASLDQSVXXPS

SEQ ID NO: 4819 - protein, 37 aa, Artificial Sequence
  GFR-binding peptide
  MOD_RES (33)..(34): Xaa is C or S
  MOD_RES (11)..(12)..(13)..(14)..(15): Xaa is A or G
  MOD_RES (16)..(17)..(18)..(19): Xaa is A or G or is absent
RVVMNQYNKLXXXXXXXXXLYLVSIASLQTPAXXPKP

SEQ ID NO: 4820 - protein, 31 aa, Artificial Sequence
  GFR-binding peptide
  MOD_RES (31)..(31): Xaa is C or S
SKVVMRHKRLVKPTRGVYYLISTASLDQPVX

SEQ ID NO: 4821 - protein, 40 aa, Artificial Sequence
  GFR-binding peptide
  MOD_RES (2)..(4)..(38): Xaa is C or S
  MOD_RES (16)..(17)..(18)..(19)..(20): Xaa is A or G
  MOD_RES (21)..(22)..(23)..(24): Xaa is A or G or is absent
HXGXSRVVMNYHYKLXXXXXXXXXKYLVSIPSLKTPAXTP

SEQ ID NO: 4822 - protein, 37 aa, Artificial Sequence
  GFR-binding peptide
  MOD_RES (1)..(33)..(34): Xaa is C or S
XAKVVMNYHYKLIVNNSSDKYLVSIPSLKTPAXXAKP

SEQ ID NO: 4823 - protein, 36 aa, Artificial Sequence
  GFR-binding peptide
  MOD_RES (33)..(34): Xaa is C or S
  MOD_RES (11)..(12)..(13)..(14)..(15): Xaa is A or G
  MOD_RES (16)..(17)..(18)..(19): Xaa is A or G or is absent
RVVMNRHKRLXXXXXXXXXYYLVSTASLKTPAXXPK

SEQ ID NO: 4824 - protein, 40 aa, Artificial Sequence
  GFR-binding peptide
  MOD_RES (1)..(36)..(37): Xaa is C or S
  MOD_RES (14)..(15)..(16)..(17)..(18): Xaa is A or G
  MOD_RES (19)..(20)..(21)..(22): Xaa is A or G or is absent
XEAVSMGERYKKLXXXXXXXXXFYLVSIANLKTPVXXAKG

SEQ ID NO: 4825 - protein, 37 aa, Artificial Sequence
  GFR-binding peptide
  MOD_RES (32)..(33): Xaa is C or S
GEVVMDRYKKLVVKENEDFYLMSIANLETPVXXAKPI

SEQ ID NO: 4826 - protein, 39 aa, Artificial Sequence
  GFR-binding peptide
  MOD_RES (2)..(35)..(36): Xaa is C or S
GXEAVSMGERYKKLTPVGMDDFYLVSIANLKTPVXXAKG

SEQ ID NO: 4827 - protein, 33 aa, Artificial Sequence
  GFR-binding peptide
  MOD_RES (1)..(32)..(33): Xaa is C or S
XSKVIMRYKKLIKPTKGIFYLISIANLDQSVXX

SEQ ID NO: 4828 - protein, 37 aa, Artificial Sequence
  GFR-binding peptide
  MOD_RES (31)..(32): Xaa is C or S
EVVMDYHYKLVVKENEDKYLMSIPSLETPVXXAKPIK

SEQ ID NO: 4829 - protein, 36 aa, Artificial Sequence
  GFR-binding peptide
  MOD_RES (2)..(34)..(35): Xaa is C or S
GXARVVMNRYKKLIVNSSDDFYLVSIANLQTPAXXP

SEQ ID NO: 4830 - protein, 39 aa, Artificial Sequence
  GFR-binding peptide
  MOD_RES (35)..(36): Xaa is C or S
  MOD_RES (13)..(14)..(15)..(16)..(17): Xaa is A or G
  MOD_RES (18)..(19)..(20)..(21): Xaa is A or G or is absent
EAVSMGERHKRLXXXXXXXXXYYLVSTASLKTPVXXAKG

SEQ ID NO: 4831 - protein, 33 aa, Artificial Sequence
  GFR-binding peptide
  MOD_RES (2)..(33): Xaa is C or S
KXSRVIMQYNKLVKPKRGVLYLISIASLAQPVX

SEQ ID NO: 4832 - protein, 37 aa, Artificial Sequence
  GFR-binding peptide
  MOD_RES (32)..(33): Xaa is C or S
GEVVMEQYNKLVVKDYEDLYLMSIASLETPVXXAKPI

SEQ ID NO: 4833 - protein, 40 aa, Artificial Sequence
  GFR-binding peptide
  MOD_RES (1)..(3)..(40): Xaa is C or S
  MOD_RES (16)..(17)..(18)..(19)..(20): Xaa is A or G
  MOD_RES (21)..(22)..(23)..(24): Xaa is A or G or is absent
XKXALHDELTYHYKLXXXXXXXXXKYLVSIPSLQVQTPRX

SEQ ID NO: 4834 - protein, 39 aa, Artificial Sequence
  GFR-binding peptide
  MOD_RES (2)..(4)..(37)..(38): Xaa is C or S
  MOD_RES (15)..(16)..(17)..(18)..(19): Xaa is A or G
  MOD_RES (20)..(21)..(22)..(23): Xaa is A or G or is absent
SXKXSRVIMRHKRLXXXXXXXXXYYLISTASLAQPVXXP

SEQ ID NO: 4835 - protein, 35 aa, Artificial Sequence
  GFR-binding peptide
  MOD_RES (1)..(3)..(34)..(35): Xaa is C or S
XKXSKVVMYHYKLVKPTRGVKYLISIPSLDQPVXX

SEQ ID NO: 4836 - protein, 41 aa, Artificial Sequence
  GFR-binding peptide
  MOD_RES (2)..(4)..(36)..(37): Xaa is C or S
HXGXAKVVMNQYNKLIVNNSSDLYLVSIASLKTPAXXAKPV

SEQ ID NO: 4837 - protein, 38 aa, Artificial Sequence
  GFR-binding peptide
  MOD_RES (2)..(4)..(37)..(38): Xaa is C or S
  MOD_RES (15)..(16)..(17)..(18)..(19): Xaa is A or G
  MOD_RES (20)..(21)..(22)..(23): Xaa is A or G or is absent
SXKXSKVVMRYKKLXXXXXXXXXFYLISIANLDQPVXX

SEQ ID NO: 4838 - protein, 39 aa, Artificial Sequence
  GFR-binding peptide
  MOD_RES (1)..(33)..(34): Xaa is C or S
XARVVMNQYNKLIVNSSDDLYLVSIASLQTPAXXPKPVT

SEQ ID NO: 4839 - protein, 36 aa, Artificial Sequence
  GFR-binding peptide
  MOD_RES (31)..(32): Xaa is C or S
SKVVMQYNKLVKPTRGVLYLISIASLDQPVXXPSAS

SEQ ID NO: 4840 - protein, 36 aa, Artificial Sequence
  GFR-binding peptide
  MOD_RES (35)..(35): Xaa is C or S
  MOD_RES (11)..(12)..(13)..(14)..(15): Xaa is A or G
  MOD_RES (16)..(17)..(18)..(19): Xaa is A or G or is absent
HDELTYHYKLXXXXXXXXXKYLVSIPSLQVQTPRXQ

SEQ ID NO: 4841 - protein, 37 aa, Artificial Sequence
  GFR-binding peptide
  MOD_RES (31)..(32): Xaa is C or S
SRVIMQYNKLVKPKRGVLYLISIASLAQPVXXPAASA

SEQ ID NO: 4842 - protein, 36 aa, Artificial Sequence
  GFR-binding peptide
  MOD_RES (1)..(32)..(33): Xaa is C or S
XSRVIMRHKRLVKPKRGVYYLISTASLAQPVXXPAA

SEQ ID NO: 4843 - protein, 41 aa, Artificial Sequence
  GFR-binding peptide
  MOD_RES (2)..(4)..(41): Xaa is C or S
  MOD_RES (17)..(18)..(19)..(20)..(21): Xaa is A or G
  MOD_RES (22)..(23)..(24)..(25): Xaa is A or G or is absent
EXKXALHDELTRYKKLXXXXXXXXXFYLVSIANLQVQTPRX

SEQ ID NO: 4844 - protein, 37 aa, Artificial Sequence
  GFR-binding peptide
  MOD_RES (33)..(34): Xaa is C or S
  MOD_RES (11)..(12)..(13)..(14)..(15): Xaa is A or G
  MOD_RES (16)..(17)..(18)..(19): Xaa is A or G or is absent
SRVIMQYNKLXXXXXXXXXLYLISIASLAQPVXXPAA

SEQ ID NO: 4845 - protein, 38 aa, Artificial Sequence
  GFR-binding peptide
  MOD_RES (2)..(4)..(36)..(37): Xaa is C or S
RXGXGEVVMEYHYKLVVKDYEDKYLMSIPSLETPVXXA

SEQ ID NO: 4846 - protein, 43 aa, Artificial Sequence
  GFR-binding peptide
  MOD_RES (2)..(4)..(41): Xaa is C or S
EXKXALHDELTRHKRLFIPKKRVIEYYLVSTASLQVQTPRXQV

SEQ ID NO: 4847 - protein, 36 aa, Artificial Sequence
  GFR-binding peptide
  MOD_RES (33)..(34): Xaa is C or S
  MOD_RES (11)..(12)..(13)..(14)..(15): Xaa is A or G
  MOD_RES (16)..(17)..(18)..(19): Xaa is A or G or is absent
KVVMNYHYKLXXXXXXXXXKYLVSIPSLKTPAXXAK

SEQ ID NO: 4848 - protein, 37 aa, Artificial Sequence
  GFR-binding peptide
  MOD_RES (1)..(35)..(36): Xaa is C or S
  MOD_RES (13)..(14)..(15)..(16)..(17): Xaa is A or G
  MOD_RES (18)..(19)..(20)..(21): Xaa is A or G or is absent
XAKVVMNQYNKLXXXXXXXXXLYLVSIASLKTPAXXA

SEQ ID NO: 4849 - protein, 39 aa, Artificial Sequence
  GFR-binding peptide
  MOD_RES (2)..(4)..(35)..(36): Xaa is C or S
SXKXSKVVMQYNKLVKPTRGVLYLISIASLDQPVXXPSA

SEQ ID NO: 4850 - protein, 41 aa, Artificial Sequence
  GFR-binding peptide
  MOD_RES (2)..(4)..(41): Xaa is C or S
  MOD_RES (17)..(18)..(19)..(20)..(21): Xaa is A or G
  MOD_RES (22)..(23)..(24)..(25): Xaa is A or G or is absent
EXKXALHDELTYHYKLXXXXXXXXXKYLVSIPSLQVQTPRX

SEQ ID NO: 4851 - protein, 44 aa, Artificial Sequence
  GFR-binding peptide
  MOD_RES (2)..(4)..(41): Xaa is C or S
  MOD_RES (17)..(18)..(19)..(20)..(21): Xaa is A or G
  MOD_RES (22)..(23)..(24)..(25): Xaa is A or G or is absent
EXKXALHDELTRYKKLXXXXXXXXXFYLVSIANLQVQTPRXQVN

SEQ ID NO: 4852 - protein, 32 aa, Artificial Sequence
  GFR-binding peptide
  MOD_RES (32)..(32): Xaa is C or S
GEVVMDRYKKLVVKENEDFYLMSIANLETPVX

SEQ ID NO: 4853 - protein, 39 aa, Artificial Sequence
  GFR-binding peptide
  MOD_RES (35)..(36): Xaa is C or S
  MOD_RES (13)..(14)..(15)..(16)..(17): Xaa is A or G
  MOD_RES (18)..(19)..(20)..(21): Xaa is A or G or is absent
EAVSMGEQYNKLXXXXXXXXXLYLVSIASLKTPVXXAKG

SEQ ID NO: 4854 - protein, 37 aa, Artificial Sequence
  GFR-binding peptide
  MOD_RES (1)..(3)..(35)..(36): Xaa is C or S
XGXSRVVMNQYNKLIVNSSDDLYLVSIASLKTPAXXP

SEQ ID NO: 4855 - protein, 38 aa, Artificial Sequence
  GFR-binding peptide
  MOD_RES (1)..(33)..(34): Xaa is C or S
XGEVVMDQYNKLVVKENEDLYLMSIASLETPVXXAKPI

SEQ ID NO: 4856 - protein, 36 aa, Artificial Sequence
  GFR-binding peptide
  MOD_RES (33)..(33): Xaa is C or S
  MOD_RES (11)..(12)..(13)..(14)..(15): Xaa is A or G
  MOD_RES (16)..(17)..(18)..(19): Xaa is A or G or is absent
RVVMNYHYKLXXXXXXXXXKYLVSIPSLKTPAXTPK

SEQ ID NO: 4857 - protein, 38 aa, Artificial Sequence
  GFR-binding peptide
  MOD_RES (2)..(34)..(35): Xaa is C or S
GXAKVVMNQYNKLIVNNSSDLYLVSIASLKTPAXXAKP

SEQ ID NO: 4858 - protein, 37 aa, Artificial Sequence
  GFR-binding peptide
  MOD_RES (33)..(34): Xaa is C or S
  MOD_RES (11)..(12)..(13)..(14)..(15): Xaa is A or G
  MOD_RES (16)..(17)..(18)..(19): Xaa is A or G or is absent
SKVIMQYNKLXXXXXXXXXLYLISIASLDQSVXXPSA

SEQ ID NO: 4859 - protein, 36 aa, Artificial Sequence
  GFR-binding peptide
  MOD_RES (33)..(34): Xaa is C or S
  MOD_RES (11)..(12)..(13)..(14)..(15): Xaa is A or G
  MOD_RES (16)..(17)..(18)..(19): Xaa is A or G or is absent
SRVIMYHYKLXXXXXXXXXKYLISIPSLAQPVXXPA

SEQ ID NO: 4860 - protein, 41 aa, Artificial Sequence
  GFR-binding peptide
  MOD_RES (1)..(35)..(36): Xaa is C or S
  MOD_RES (13)..(14)..(15)..(16)..(17): Xaa is A or G
  MOD_RES (18)..(19)..(20)..(21): Xaa is A or G or is absent
XGEVVMERYKKLXXXXXXXXXFYLMSIANLETPVXXAKPIS

SEQ ID NO: 4861 - protein, 41 aa, Artificial Sequence
  GFR-binding peptide
  MOD_RES (2)..(4)..(38)..(39): Xaa is C or S
  MOD_RES (16)..(17)..(18)..(19)..(20): Xaa is A or G
  MOD_RES (21)..(22)..(23)..(24): Xaa is A or G or is absent
RXGXGEVVMEQYNKLXXXXXXXXXLYLMSIASLETPVXXAK

SEQ ID NO: 4862 - protein, 32 aa, Artificial Sequence
  GFR-binding peptide
  MOD_RES (32)..(32): Xaa is C or S
GEVVMERYKKLVVKDYEDFYLMSIANLETPVX

SEQ ID NO: 4863 - protein, 38 aa, Artificial Sequence
  GFR-binding peptide
  MOD_RES (2)..(36)..(37): Xaa is C or S
  MOD_RES (14)..(15)..(16)..(17)..(18): Xaa is A or G
  MOD_RES (19)..(20)..(21)..(22): Xaa is A or G or is absent
GXGEVVMDRHKRLXXXXXXXXXYYLMSTASLETPVXXA

SEQ ID NO: 4864 - protein, 40 aa, Artificial Sequence
  GFR-binding peptide
  MOD_RES (2)..(35)..(36): Xaa is C or S
  MOD_RES (13)..(14)..(15)..(16)..(17): Xaa is A or G
  MOD_RES (18)..(19)..(20)..(21): Xaa is A or G or is absent
KXSKVIMQYNKLXXXXXXXXXLYLISIASLDQSVXXPSAS

SEQ ID NO: 4865 - protein, 36 aa, Artificial Sequence
  GFR-binding peptide
  MOD_RES (1)..(3)..(34)..(35): Xaa is C or S
XKXSKVIMQYNKLIKPTKGILYLISIASLDQSVXXP

SEQ ID NO: 4866 - protein, 39 aa, Artificial Sequence
  GFR-binding peptide
  MOD_RES (1)..(35)..(36): Xaa is C or S
  MOD_RES (13)..(14)..(15)..(16)..(17): Xaa is A or G
  MOD_RES (18)..(19)..(20)..(21): Xaa is A or G or is absent
XGEVVMEYHYKLXXXXXXXXXKYLMSIPSLETPVXXAKP

SEQ ID NO: 4867 - protein, 37 aa, Artificial Sequence
  GFR-binding peptide
  MOD_RES (2)..(4): Xaa is C or S
  MOD_RES (16)..(17)..(18)..(19)..(20): Xaa is A or G
  MOD_RES (21)..(22)..(23)..(24): Xaa is A or G or is absent
RXGXGEVVMERYKKLXXXXXXXXXFYLMSIANLETPV

SEQ ID NO: 4868 - protein, 36 aa, Artificial Sequence
  GFR-binding peptide
  MOD_RES (1)..(3)..(34)..(35): Xaa is C or S
XKXSRVIMQYNKLVKPKRGVLYLISIASLAQPVXXP

SEQ ID NO: 4869 - protein, 36 aa, Artificial Sequence
  GFR-binding peptide
  MOD_RES (1)..(3)..(36): Xaa is C or S
XGXEAVSMGERYKKLTPVGMDDFYLVSIANLKTPVX

SEQ ID NO: 4870 - protein, 40 aa, Artificial Sequence
  GFR-binding peptide
  MOD_RES (2)..(34)..(35): Xaa is C or S
GXGEVVMERYKKLVVKDYEDFYLMSIANLETPVXXAKPIS

SEQ ID NO: 4871 - protein, 39 aa, Artificial Sequence
  GFR-binding peptide
  MOD_RES (2)..(4)..(36)..(37): Xaa is C or S
HXGXSRVVMNRYKKLIVNSSDDFYLVSIANLKTPAXXPK

SEQ ID NO: 4872 - protein, 37 aa, Artificial Sequence
  GFR-binding peptide
  MOD_RES (2)..(36)..(37): Xaa is C or S
  MOD_RES (14)..(15)..(16)..(17)..(18): Xaa is A or G
  MOD_RES (19)..(20)..(21)..(22): Xaa is A or G or is absent
GXAKVVMNQYNKLXXXXXXXXXLYLVSIASLKTPAXX

SEQ ID NO: 4873 - protein, 34 aa, Artificial Sequence
  GFR-binding peptide
  MOD_RES (31)..(32): Xaa is C or S
RVVMNYHYKLIVNSSDDKYLVSIPSLQTPAXXPK

SEQ ID NO: 4874 - protein, 35 aa, Artificial Sequence
  GFR-binding peptide
  MOD_RES (2)..(33)..(34): Xaa is C or S
KXSKVIMRHKRLIKPTKGIYYLISTASLDQSVXXP

SEQ ID NO: 4875 - protein, 35 aa, Artificial Sequence
  GFR-binding peptide
  MOD_RES (1)..(3): Xaa is C or S
  MOD_RES (14)..(15)..(16)..(17)..(18): Xaa is A or G
  MOD_RES (19)..(20)..(21)..(22): Xaa is A or G or is absent
XKXSRVIMRYKKLXXXXXXXXXFYLISIANLAQPV

SEQ ID NO: 4876 - protein, 41 aa, Artificial Sequence
  GFR-binding peptide
  MOD_RES (1)..(3)..(35)..(36): Xaa is C or S
XGXGEVVMERYKKLVVKDYEDFYLMSIANLETPVXXAKPIS

SEQ ID NO: 4877 - protein, 36 aa, Artificial Sequence
  GFR-binding peptide
  MOD_RES (31)..(32): Xaa is C or S
SKVVMYHYKLVKPTRGVKYLISIPSLDQPVXXPSAS

SEQ ID NO: 4878 - protein, 40 aa, Artificial Sequence
  GFR-binding peptide
  MOD_RES (2)..(4)..(36)..(37): Xaa is C or S
HXGXAKVVMNRYKKLIVNNSSDFYLVSIANLKTPAXXAKP

SEQ ID NO: 4879 - protein, 37 aa, Artificial Sequence
  GFR-binding peptide
  MOD_RES (1)..(32)..(33): Xaa is C or S
XSRVIMQYNKLVKPKRGVLYLISIASLAQPVXXPAAS

SEQ ID NO: 4880 - protein, 37 aa, Artificial Sequence
  GFR-binding peptide
  MOD_RES (2)..(4)..(35)..(36): Xaa is C or S
SXKXSKVIMQYNKLIKPTKGILYLISIASLDQSVXXP

SEQ ID NO: 4881 - protein, 31 aa, Artificial Sequence
  GFR-binding peptide
  MOD_RES (31)..(31): Xaa is C or S
SKVIMQYNKLIKPTKGILYLISIASLDQSVX

SEQ ID NO: 4882 - protein, 44 aa, Artificial Sequence
  GFR-binding peptide
  MOD_RES (2)..(4)..(39)..(40): Xaa is C or S
  MOD_RES (17)..(18)..(19)..(20)..(21): Xaa is A or G
  MOD_RES (22)..(23)..(24)..(25): Xaa is A or G or is absent
RXGXEAVSMGERHKRLXXXXXXXXXYYLVSTASLKTPVXXAKGV

SEQ ID NO: 4883 - protein, 40 aa, Artificial Sequence
  GFR-binding peptide
  MOD_RES (2)..(4)..(39)..(40): Xaa is C or S
  MOD_RES (17)..(18)..(19)..(20)..(21): Xaa is A or G
  MOD_RES (22)..(23)..(24)..(25): Xaa is A or G or is absent
RXGXEAVSMGERHKRLXXXXXXXXXYYLVSTASLKTPVXX

SEQ ID NO: 4884 - protein, 44 aa, Artificial Sequence
  GFR-binding peptide
  MOD_RES (2)..(4)..(41): Xaa is C or S
  MOD_RES (17)..(18)..(19)..(20)..(21): Xaa is A or G
  MOD_RES (22)..(23)..(24)..(25): Xaa is A or G or is absent
EXKXALHDELTYHYKLXXXXXXXXXKYLVSIPSLQVQTPRXQVN

SEQ ID NO: 4885 - protein, 39 aa, Artificial Sequence
  GFR-binding peptide
  MOD_RES (2)..(4)..(36)..(37): Xaa is C or S
RXGXGEVVMERYKKLVVKDYEDFYLMSIANLETPVXXAK

SEQ ID NO: 4886 - protein, 34 aa, Artificial Sequence
  GFR-binding peptide
  MOD_RES (2)..(34): Xaa is C or S
GXSRVVMNQYNKLIVNSSDDLYLVSIASLKTPAX

SEQ ID NO: 4887 - protein, 34 aa, Artificial Sequence
  GFR-binding peptide
  MOD_RES (32)..(33): Xaa is C or S
GEVVMEYHYKLVVKDYEDKYLMSIPSLETPVXXA

SEQ ID NO: 4888 - protein, 35 aa, Artificial Sequence
  GFR-binding peptide
  MOD_RES (1)..(35): Xaa is C or S
  MOD_RES (13)..(14)..(15)..(16)..(17): Xaa is A or G
  MOD_RES (18)..(19)..(20)..(21): Xaa is A or G or is absent
XSRVVMNRYKKLXXXXXXXXXFYLVSIANLKTPAX

SEQ ID NO: 4889 - protein, 37 aa, Artificial Sequence
  GFR-binding peptide
  MOD_RES (1)..(3)..(37): Xaa is C or S
  MOD_RES (15)..(16)..(17)..(18)..(19): Xaa is A or G
  MOD_RES (20)..(21)..(22)..(23): Xaa is A or G or is absent
XGXAKVVMNYHYKLXXXXXXXXXKYLVSIPSLKTPAX

SEQ ID NO: 4890 - protein, 42 aa, Artificial Sequence
  GFR-binding peptide
  MOD_RES (1)..(3)..(36)..(37): Xaa is C or S
  MOD_RES (14)..(15)..(16)..(17)..(18): Xaa is A or G
  MOD_RES (19)..(20)..(21)..(22): Xaa is A or G or is absent
XKXSKVIMQYNKLXXXXXXXXXLYLISIASLDQSVXXPSASA

SEQ ID NO: 4891 - protein, 41 aa, Artificial Sequence
  GFR-binding peptide
  MOD_RES (1)..(3)..(36)..(37): Xaa is C or S
  MOD_RES (14)..(15)..(16)..(17)..(18): Xaa is A or G
  MOD_RES (19)..(20)..(21)..(22): Xaa is A or G or is absent
XKXSKVIMQYNKLXXXXXXXXXLYLISIASLDQSVXXPSAS

SEQ ID NO: 4892 - protein, 37 aa, Artificial Sequence
  GFR-binding peptide
  MOD_RES (31)..(32): Xaa is C or S
SKVIMRHKRLIKPTKGIYYLISTASLDQSVXXPSASA

SEQ ID NO: 4893 - protein, 41 aa, Artificial Sequence
  GFR-binding peptide
  MOD_RES (1)..(3)..(37)..(38): Xaa is C or S
  MOD_RES (15)..(16)..(17)..(18)..(19): Xaa is A or G
  MOD_RES (20)..(21)..(22)..(23): Xaa is A or G or is absent
XGXARVVMNQYNKLXXXXXXXXXLYLVSIASLQTPAXXPKP

SEQ ID NO: 4894 - protein, 31 aa, Artificial Sequence
  GFR-binding peptide
  MOD_RES (31)..(31): Xaa is C or S
SKVIMYHYKLIKPTKGIKYLISIPSLDQSVX

SEQ ID NO: 4895 - protein, 37 aa, Artificial Sequence
  GFR-binding peptide
  MOD_RES (1)..(3)..(34)..(35): Xaa is C or S
XKXSKVIMRYKKLIKPTKGIFYLISIANLDQSVXXPS

SEQ ID NO: 4896 - protein, 34 aa, Artificial Sequence
  GFR-binding peptide
  MOD_RES (1)..(33)..(34): Xaa is C or S
XGEVVMDRHKRLVVKENEDYYLMSTASLETPVXX

SEQ ID NO: 4897 - protein, 39 aa, Artificial Sequence
  GFR-binding peptide
  MOD_RES (2)..(4)..(37)..(38): Xaa is C or S
  MOD_RES (15)..(16)..(17)..(18)..(19): Xaa is A or G
  MOD_RES (20)..(21)..(22)..(23): Xaa is A or G or is absent
SXKXSKVIMRYKKLXXXXXXXXXFYLISIANLDQSVXXP

SEQ ID NO: 4898 - protein, 43 aa, Artificial Sequence
  GFR-binding peptide
  MOD_RES (1)..(3)..(38)..(39): Xaa is C or S
  MOD_RES (16)..(17)..(18)..(19)..(20): Xaa is A or G
  MOD_RES (21)..(22)..(23)..(24): Xaa is A or G or is absent
XGXEAVSMGEQYNKLXXXXXXXXXLYLVSIASLKTPVXXAKGV

SEQ ID NO: 4899 - protein, 35 aa, Artificial Sequence
  GFR-binding peptide
  MOD_RES (2)..(35): Xaa is C or S
  MOD_RES (13)..(14)..(15)..(16)..(17): Xaa is A or G
  MOD_RES (18)..(19)..(20)..(21): Xaa is A or G or is absent
KXSKVVMRYKKLXXXXXXXXXFYLISIANLDQPVX

SEQ ID NO: 4900 - protein, 34 aa, Artificial Sequence
  GFR-binding peptide
  MOD_RES (32)..(33): Xaa is C or S
GEVVMDYHYKLVVKENEDKYLMSIPSLETPVXXA

SEQ ID NO: 4901 - protein, 34 aa, Artificial Sequence
  GFR-binding peptide
  MOD_RES (1)..(3): Xaa is C or S
XGXGEVVMEYHYKLVVKDYEDKYLMSIPSLETPV

SEQ ID NO: 4902 - protein, 37 aa, Artificial Sequence
  GFR-binding peptide
  MOD_RES (2)..(37): Xaa is C or S
  MOD_RES (15)..(16)..(17)..(18)..(19): Xaa is A or G
  MOD_RES (20)..(21)..(22)..(23): Xaa is A or G or is absent
GXEAVSMGEQYNKLXXXXXXXXXLYLVSIASLKTPVX

SEQ ID NO: 4903 - protein, 38 aa, Artificial Sequence
  GFR-binding peptide
  MOD_RES (32)..(32): Xaa is C or S
SRVVMNYHYKLIVNSSDDKYLVSIPSLKTPAXTPKTVH

SEQ ID NO: 4904 - protein, 42 aa, Artificial Sequence
  GFR-binding peptide
  MOD_RES (2)..(36)..(37): Xaa is C or S
  MOD_RES (14)..(15)..(16)..(17)..(18): Xaa is A or G
  MOD_RES (19)..(20)..(21)..(22): Xaa is A or G or is absent
GXARVVMNYHYKLXXXXXXXXXKYLVSIPSLQTPAXXPKPVT

SEQ ID NO: 4905 - protein, 40 aa, Artificial Sequence
  GFR-binding peptide
  MOD_RES (34)..(35): Xaa is C or S
  MOD_RES (12)..(13)..(14)..(15)..(16): Xaa is A or G
  MOD_RES (17)..(18)..(19)..(20): Xaa is A or G or is absent
AKVVMNRHKRLXXXXXXXXXYYLVSTASLKTPAXXAKPVA

SEQ ID NO: 4906 - protein, 42 aa, Artificial Sequence
  GFR-binding peptide
  MOD_RES (1)..(3)..(36)..(37): Xaa is C or S
  MOD_RES (14)..(15)..(16)..(17)..(18): Xaa is A or G
  MOD_RES (19)..(20)..(21)..(22): Xaa is A or G or is absent
XKXSRVIMQYNKLXXXXXXXXXLYLISIASLAQPVXXPAASA

SEQ ID NO: 4907 - protein, 38 aa, Artificial Sequence
  GFR-binding peptide
  MOD_RES (2)..(4)..(38): Xaa is C or S
  MOD_RES (16)..(17)..(18)..(19)..(20): Xaa is A or G
  MOD_RES (21)..(22)..(23)..(24): Xaa is A or G or is absent
RXGXGEVVMDYHYKLXXXXXXXXXKYLMSIPSLETPVX

SEQ ID NO: 4908 - protein, 40 aa, Artificial Sequence
  GFR-binding peptide
  MOD_RES (2)..(36)..(37): Xaa is C or S
  MOD_RES (14)..(15)..(16)..(17)..(18): Xaa is A or G
  MOD_RES (19)..(20)..(21)..(22): Xaa is A or G or is absent
GXARVVMNYHYKLXXXXXXXXXKYLVSIPSLQTPAXXPKP

SEQ ID NO: 4909 - protein, 40 aa, Artificial Sequence
  GFR-binding peptide
  MOD_RES (1)..(3)..(40): Xaa is C or S
  MOD_RES (16)..(17)..(18)..(19)..(20): Xaa is A or G
  MOD_RES (21)..(22)..(23)..(24): Xaa is A or G or is absent
XKXALHDELTQYNKLXXXXXXXXXLYLVSIASLQVQTPRX

SEQ ID NO: 4910 - protein, 36 aa, Artificial Sequence
  GFR-binding peptide
  MOD_RES (1)..(1): Xaa is C or S
XALHDELTRHKRLFIPKKRVIEYYLVSTASLQVQTP

SEQ ID NO: 4911 - protein, 33 aa, Artificial Sequence
  GFR-binding peptide
  MOD_RES (1)..(33): Xaa is C or S
XGEVVMERHKRLVVKDYEDYYLMSTASLETPVX

SEQ ID NO: 4912 - protein, 41 aa, Artificial Sequence
  GFR-binding peptide
  MOD_RES (1)..(3)..(40): Xaa is C or S
  MOD_RES (16)..(17)..(18)..(19)..(20): Xaa is A or G
  MOD_RES (21)..(22)..(23)..(24): Xaa is A or G or is absent
XKXALHDELTYHYKLXXXXXXXXXKYLVSIPSLQVQTPRXQ

SEQ ID NO: 4913 - protein, 34 aa, Artificial Sequence
  GFR-binding peptide
  MOD_RES (1)..(3)..(34): Xaa is C or S
XKXSKVVMQYNKLVKPTRGVLYLISIASLDQPVX

SEQ ID NO: 4914 - protein, 42 aa, Artificial Sequence
  GFR-binding peptide
  MOD_RES (1)..(36)..(37): Xaa is C or S
  MOD_RES (14)..(15)..(16)..(17)..(18): Xaa is A or G
  MOD_RES (19)..(20)..(21)..(22): Xaa is A or G or is absent
XEAVSMGEQYNKLXXXXXXXXXLYLVSIASLKTPVXXAKGVK

SEQ ID NO: 4915 - protein, 39 aa, Artificial Sequence
  GFR-binding peptide
  MOD_RES (2)..(33)..(34): Xaa is C or S
KXSKVVMRYKKLVKPTRGVFYLISIANLDQPVXXPSASA

SEQ ID NO: 4916 - protein, 41 aa, Artificial Sequence
  GFR-binding peptide
  MOD_RES (2)..(4)..(35)..(36): Xaa is C or S
SXKXSRVIMYHYKLVKPKRGVKYLISIPSLAQPVXXPAASA

SEQ ID NO: 4917 - protein, 39 aa, Artificial Sequence
  GFR-binding peptide
  MOD_RES (1)..(3): Xaa is C or S
XKXALHDELTRYKKLFIPKKRVIEFYLVSIANLQVQTPR

SEQ ID NO: 4918 - protein, 38 aa, Artificial Sequence
  GFR-binding peptide
  MOD_RES (2)..(35)..(36): Xaa is C or S
  MOD_RES (13)..(14)..(15)..(16)..(17): Xaa is A or G
  MOD_RES (18)..(19)..(20)..(21): Xaa is A or G or is absent
KXSKVIMRYKKLXXXXXXXXXFYLISIANLDQSVXXPS

SEQ ID NO: 4919 - protein, 36 aa, Artificial Sequence
  GFR-binding peptide
  MOD_RES (36)..(36): Xaa is C or S
  MOD_RES (12)..(13)..(14)..(15)..(16): Xaa is A or G
  MOD_RES (17)..(18)..(19)..(20): Xaa is A or G or is absent
LHDELTYHYKLXXXXXXXXXKYLVSIPSLQVQTPRX

SEQ ID NO: 4920 - protein, 39 aa, Artificial Sequence
  GFR-binding peptide
  MOD_RES (2)..(4)..(38)..(39): Xaa is C or S
  MOD_RES (16)..(17)..(18)..(19)..(20): Xaa is A or G
  MOD_RES (21)..(22)..(23)..(24): Xaa is A or G or is absent
RXGXGEVVMDRYKKLXXXXXXXXXFYLMSIANLETPVXX

SEQ ID NO: 4921 - protein, 38 aa, Artificial Sequence
  GFR-binding peptide
  MOD_RES (1)..(3)..(37): Xaa is C or S
  MOD_RES (15)..(16)..(17)..(18)..(19): Xaa is A or G
  MOD_RES (20)..(21)..(22)..(23): Xaa is A or G or is absent
XGXSRVVMNYHYKLXXXXXXXXXKYLVSIPSLKTPAXT

SEQ ID NO: 4922 - protein, 36 aa, Artificial Sequence
  GFR-binding peptide
  MOD_RES (1)..(33)..(34): Xaa is C or S
XARVVMNRHKRLIVNSSDDYYLVSTASLQTPAXXPK

SEQ ID NO: 4923 - protein, 35 aa, Artificial Sequence
  GFR-binding peptide
  MOD_RES (1)..(35): Xaa is C or S
  MOD_RES (13)..(14)..(15)..(16)..(17): Xaa is A or G
  MOD_RES (18)..(19)..(20)..(21): Xaa is A or G or is absent
XGEVVMDYHYKLXXXXXXXXXKYLMSIPSLETPVX

SEQ ID NO: 4924 - protein, 36 aa, Artificial Sequence
  GFR-binding peptide
  MOD_RES (31)..(32): Xaa is C or S
SRVIMYHYKLVKPKRGVKYLISIPSLAQPVXXPAAS

SEQ ID NO: 4925 - protein, 36 aa, Artificial Sequence
  GFR-binding peptide
  MOD_RES (33)..(34): Xaa is C or S
  MOD_RES (11)..(12)..(13)..(14)..(15): Xaa is A or G
  MOD_RES (16)..(17)..(18)..(19): Xaa is A or G or is absent
SKVVMRHKRLXXXXXXXXXYYLISTASLDQPVXXPS

SEQ ID NO: 4926 - protein, 38 aa, Artificial Sequence
  GFR-binding peptide
  MOD_RES (33)..(34): Xaa is C or S
  MOD_RES (11)..(12)..(13)..(14)..(15): Xaa is A or G
  MOD_RES (16)..(17)..(18)..(19): Xaa is A or G or is absent
EVVMEYHYKLXXXXXXXXXKYLMSIPSLETPVXXAKPI

SEQ ID NO: 4927 - protein, 40 aa, Artificial Sequence
  GFR-binding peptide
  MOD_RES (1)..(35)..(36): Xaa is C or S
  MOD_RES (13)..(14)..(15)..(16)..(17): Xaa is A or G
  MOD_RES (18)..(19)..(20)..(21): Xaa is A or G or is absent
XARVVMNYHYKLXXXXXXXXXKYLVSIPSLQTPAXXPKPV

SEQ ID NO: 4928 - protein, 33 aa, Artificial Sequence
  GFR-binding peptide
  MOD_RES (32)..(33): Xaa is C or S
GEVVMDRHKRLVVKENEDYYLMSTASLETPVXX

SEQ ID NO: 4929 - protein, 35 aa, Artificial Sequence
  GFR-binding peptide
  MOD_RES (12)..(13)..(14)..(15)..(16): Xaa is A or G
  MOD_RES (17)..(18)..(19)..(20): Xaa is A or G or is absent
LHDELTRHKRLXXXXXXXXXYYLVSTASLQVQTPR

SEQ ID NO: 4930 - protein, 45 aa, Artificial Sequence
  GFR-binding peptide
  MOD_RES (2)..(4)..(39)..(40): Xaa is C or S
  MOD_RES (17)..(18)..(19)..(20)..(21): Xaa is A or G
  MOD_RES (22)..(23)..(24)..(25): Xaa is A or G or is absent
RXGXEAVSMGERHKRLXXXXXXXXXYYLVSTASLKTPVXXAKGVK

SEQ ID NO: 4931 - protein, 34 aa, Artificial Sequence
  GFR-binding peptide
  MOD_RES (2)..(33)..(34): Xaa is C or S
KXSKVIMRHKRLIKPTKGIYYLISTASLDQSVXX

SEQ ID NO: 4932 - protein, 37 aa, Artificial Sequence
  GFR-binding peptide
  MOD_RES (2)..(2): Xaa is C or S
KXALHDELTRYKKLFIPKKRVIEFYLVSIANLQVQTP

SEQ ID NO: 4933 - protein, 32 aa, Artificial Sequence
  GFR-binding peptide
  MOD_RES (1)..(1): Xaa is C or S
XGEVVMEQYNKLVVKDYEDLYLMSIASLETPV

SEQ ID NO: 4934 - protein, 38 aa, Artificial Sequence
  GFR-binding peptide
  MOD_RES (1)..(3)..(38): Xaa is C or S
  MOD_RES (16)..(17)..(18)..(19)..(20): Xaa is A or G
  MOD_RES (21)..(22)..(23)..(24): Xaa is A or G or is absent
XGXEAVSMGERYKKLXXXXXXXXXFYLVSIANLKTPVX

SEQ ID NO: 4935 - protein, 36 aa, Artificial Sequence
  GFR-binding peptide
  MOD_RES (1)..(3): Xaa is C or S
  MOD_RES (15)..(16)..(17)..(18)..(19): Xaa is A or G
  MOD_RES (20)..(21)..(22)..(23): Xaa is A or G or is absent
XGXGEVVMDRYKKLXXXXXXXXXFYLMSIANLETPV

SEQ ID NO: 4936 - protein, 38 aa, Artificial Sequence
  GFR-binding peptide
  MOD_RES (1)..(3)..(35)..(36): Xaa is C or S
XGXGEVVMDQYNKLVVKENEDLYLMSIASLETPVXXAK

SEQ ID NO: 4937 - protein, 38 aa, Artificial Sequence
  GFR-binding peptide
  MOD_RES (1)..(3)..(37)..(38): Xaa is C or S
  MOD_RES (15)..(16)..(17)..(18)..(19): Xaa is A or G
  MOD_RES (20)..(21)..(22)..(23): Xaa is A or G or is absent
XGXARVVMNYHYKLXXXXXXXXXKYLVSIPSLQTPAXX

SEQ ID NO: 4938 - protein, 37 aa, Artificial Sequence
  GFR-binding peptide
  MOD_RES (2)..(4)..(37): Xaa is C or S
  MOD_RES (15)..(16)..(17)..(18)..(19): Xaa is A or G
  MOD_RES (20)..(21)..(22)..(23): Xaa is A or G or is absent
SXKXSKVIMRYKKLXXXXXXXXXFYLISIANLDQSVX

SEQ ID NO: 4939 - protein, 36 aa, Artificial Sequence
  GFR-binding peptide
  MOD_RES (1)..(35): Xaa is C or S
  MOD_RES (13)..(14)..(15)..(16)..(17): Xaa is A or G
  MOD_RES (18)..(19)..(20)..(21): Xaa is A or G or is absent
XSRVVMNRHKRLXXXXXXXXXYYLVSTASLKTPAXT

SEQ ID NO: 4940 - protein, 42 aa, Artificial Sequence
  GFR-binding peptide
  MOD_RES (2)..(4)..(39)..(40): Xaa is C or S
  MOD_RES (17)..(18)..(19)..(20)..(21): Xaa is A or G
  MOD_RES (22)..(23)..(24)..(25): Xaa is A or G or is absent
RXGXEAVSMGEQYNKLXXXXXXXXXLYLVSIASLKTPVXXAK

SEQ ID NO: 4941 - protein, 35 aa, Artificial Sequence
  GFR-binding peptide
  MOD_RES (35)..(35): Xaa is C or S
HDELTYHYKLFIPKKRVIEKYLVSIPSLQVQTPRX

SEQ ID NO: 4942 - protein, 40 aa, Artificial Sequence
  GFR-binding peptide
  MOD_RES (2)..(36)..(37): Xaa is C or S
  MOD_RES (14)..(15)..(16)..(17)..(18): Xaa is A or G
  MOD_RES (19)..(20)..(21)..(22): Xaa is A or G or is absent
GXGEVVMEYHYKLXXXXXXXXXKYLMSIPSLETPVXXAKP

SEQ ID NO: 4943 - protein, 37 aa, Artificial Sequence
  GFR-binding peptide
  MOD_RES (32)..(33): Xaa is C or S
GEVVMDQYNKLVVKENEDLYLMSIASLETPVXXAKPI

SEQ ID NO: 4944 - protein, 36 aa, Artificial Sequence
  GFR-binding peptide
  MOD_RES (1)..(33)..(34): Xaa is C or S
XSRVVMNQYNKLIVNSSDDLYLVSIASLKTPAXXPK

SEQ ID NO: 4945 - protein, 35 aa, Artificial Sequence
  GFR-binding peptide
  MOD_RES (1)..(33)..(34): Xaa is C or S
XSRVVMNYHYKLIVNSSDDKYLVSIPSLKTPAXXP

SEQ ID NO: 4946 - protein, 41 aa, Artificial Sequence
  GFR-binding peptide
  MOD_RES (35)..(36): Xaa is C or S
  MOD_RES (13)..(14)..(15)..(16)..(17): Xaa is A or G
  MOD_RES (18)..(19)..(20)..(21): Xaa is A or G or is absent
EAVSMGEYHYKLXXXXXXXXXKYLVSIPSLKTPVXXAKGVK

SEQ ID NO: 4947 - protein, 37 aa, Artificial Sequence
  GFR-binding peptide
  MOD_RES (2)..(4)..(37): Xaa is C or S
  MOD_RES (15)..(16)..(17)..(18)..(19): Xaa is A or G
  MOD_RES (20)..(21)..(22)..(23): Xaa is A or G or is absent
SXKXSRVIMRHKRLXXXXXXXXXYYLISTASLAQPVX

SEQ ID NO: 4948 - protein, 43 aa, Artificial Sequence
  GFR-binding peptide
  MOD_RES (1)..(3)..(40): Xaa is C or S
XKXALHDELTYHYKLFIPKKRVIEKYLVSIPSLQVQTPRXQVN

SEQ ID NO: 4949 - protein, 31 aa, Artificial Sequence
  GFR-binding peptide
ARVVMNRHKRLIVNSSDDYYLVSTASLQTPA

SEQ ID NO: 4950 - protein, 42 aa, Artificial Sequence
  GFR-binding peptide
  MOD_RES (1)..(3)..(37)..(38): Xaa is C or S
  MOD_RES (15)..(16)..(17)..(18)..(19): Xaa is A or G
  MOD_RES (20)..(21)..(22)..(23): Xaa is A or G or is absent
XGXAKVVMNRHKRLXXXXXXXXXYYLVSTASLKTPAXXAKPV

SEQ ID NO: 4951 - protein, 33 aa, Artificial Sequence
  GFR-binding peptide
  MOD_RES (2)..(33): Xaa is C or S
KXSKVIMRHKRLIKPTKGIYYLISTASLDQSVX

SEQ ID NO: 4952 - protein, 38 aa, Artificial Sequence
  GFR-binding peptide
  MOD_RES (1)..(3)..(35): Xaa is C or S
XGXSRVVMNYHYKLIVNSSDDKYLVSIPSLKTPAXTPK

SEQ ID NO: 4953 - protein, 33 aa, Artificial Sequence
  GFR-binding peptide
  MOD_RES (32)..(33): Xaa is C or S
GEVVMERHKRLVVKDYEDYYLMSTASLETPVXX

SEQ ID NO: 4954 - protein, 35 aa, Artificial Sequence
  GFR-binding peptide
  MOD_RES (1)..(33): Xaa is C or S
XSRVVMNQYNKLIVNSSDDLYLVSIASLKTPAXTP

SEQ ID NO: 4955 - protein, 37 aa, Artificial Sequence
  GFR-binding peptide
  MOD_RES (2)..(34)..(35): Xaa is C or S
GXAKVVMNRYKKLIVNNSSDFYLVSIANLKTPAXXAK

SEQ ID NO: 4956 - protein, 36 aa, Artificial Sequence
  GFR-binding peptide
  MOD_RES (2)..(34)..(35): Xaa is C or S
GXSRVVMNYHYKLIVNSSDDKYLVSIPSLKTPAXXP

SEQ ID NO: 4957 - protein, 36 aa, Artificial Sequence
  GFR-binding peptide
  MOD_RES (33)..(34): Xaa is C or S
  MOD_RES (11)..(12)..(13)..(14)..(15): Xaa is A or G
  MOD_RES (16)..(17)..(18)..(19): Xaa is A or G or is absent
EVVMEQYNKLXXXXXXXXXLYLMSIASLETPVXXAK

SEQ ID NO: 4958 - protein, 34 aa, Artificial Sequence
  GFR-binding peptide
  MOD_RES (2)..(4): Xaa is C or S
SXKXSRVIMYHYKLVKPKRGVKYLISIPSLAQPV

SEQ ID NO: 4959 - protein, 35 aa, Artificial Sequence
  GFR-binding peptide
  MOD_RES (1)..(32)..(33): Xaa is C or S
XSKVVMQYNKLVKPTRGVLYLISIASLDQPVXXPS

SEQ ID NO: 4960 - protein, 39 aa, Artificial Sequence
  GFR-binding peptide
  MOD_RES (33)..(34): Xaa is C or S
  MOD_RES (11)..(12)..(13)..(14)..(15): Xaa is A or G
  MOD_RES (16)..(17)..(18)..(19): Xaa is A or G or is absent
RVVMNQYNKLXXXXXXXXXLYLVSIASLQTPAXXPKPVT

SEQ ID NO: 4961 - protein, 36 aa, Artificial Sequence
  GFR-binding peptide
  MOD_RES (33)..(34): Xaa is C or S
  MOD_RES (11)..(12)..(13)..(14)..(15): Xaa is A or G
  MOD_RES (16)..(17)..(18)..(19): Xaa is A or G or is absent
SKVVMYHYKLXXXXXXXXXKYLISIPSLDQPVXXPS

SEQ ID NO: 4962 - protein, 36 aa, Artificial Sequence
  GFR-binding peptide
  MOD_RES (35)..(35): Xaa is C or S
  MOD_RES (11)..(12)..(13)..(14)..(15): Xaa is A or G
  MOD_RES (16)..(17)..(18)..(19): Xaa is A or G or is absent
HDELTRHKRLXXXXXXXXXYYLVSTASLQVQTPRXQ

SEQ ID NO: 4963 - protein, 32 aa, Artificial Sequence
  GFR-binding peptide
  MOD_RES (11)..(12)..(13)..(14)..(15): Xaa is A or G
  MOD_RES (16)..(17)..(18)..(19): Xaa is A or G or is absent
EVVMEYHYKLXXXXXXXXXKYLMSIPSLETPV

SEQ ID NO: 4964 - protein, 38 aa, Artificial Sequence
  GFR-binding peptide
  MOD_RES (34)..(35): Xaa is C or S
  MOD_RES (12)..(13)..(14)..(15)..(16): Xaa is A or G
  MOD_RES (17)..(18)..(19)..(20): Xaa is A or G or is absent
ARVVMNRYKKLXXXXXXXXXFYLVSIANLQTPAXXPKP

SEQ ID NO: 4965 - protein, 38 aa, Artificial Sequence
  GFR-binding peptide
  MOD_RES (1)..(32)..(33): Xaa is C or S
XSKVVMRHKRLVKPTRGVYYLISTASLDQPVXXPSASA

SEQ ID NO: 4966 - protein, 30 aa, Artificial Sequence
  GFR-binding peptide
RVVMNRYKKLIVNSSDDFYLVSIANLKTPA

SEQ ID NO: 4967 - protein, 33 aa, Artificial Sequence
  GFR-binding peptide
  MOD_RES (1)..(32)..(33): Xaa is C or S
XSKVIMQYNKLIKPTKGILYLISIASLDQSVXX

SEQ ID NO: 4968 - protein, 40 aa, Artificial Sequence
  GFR-binding peptide
  MOD_RES (2)..(37)..(38): Xaa is C or S
  MOD_RES (15)..(16)..(17)..(18)..(19): Xaa is A or G
  MOD_RES (20)..(21)..(22)..(23): Xaa is A or G or is absent
GXEAVSMGEQYNKLXXXXXXXXXLYLVSIASLKTPVXXAK

SEQ ID NO: 4969 - protein, 34 aa, Artificial Sequence
  GFR-binding peptide
  MOD_RES (34)..(34): Xaa is C or S
  MOD_RES (12)..(13)..(14)..(15)..(16): Xaa is A or G
  MOD_RES (17)..(18)..(19)..(20): Xaa is A or G or is absent
GEVVMDQYNKLXXXXXXXXXLYLMSIASLETPVX

SEQ ID NO: 4970 - protein, 38 aa, Artificial Sequence
  GFR-binding peptide
  MOD_RES (34)..(35): Xaa is C or S
  MOD_RES (12)..(13)..(14)..(15)..(16): Xaa is A or G
  MOD_RES (17)..(18)..(19)..(20): Xaa is A or G or is absent
GEVVMDQYNKLXXXXXXXXXLYLMSIASLETPVXXAKP

SEQ ID NO: 4971 - protein, 37 aa, Artificial Sequence
  GFR-binding peptide
  MOD_RES (36)..(36): Xaa is C or S
  MOD_RES (12)..(13)..(14)..(15)..(16): Xaa is A or G
  MOD_RES (17)..(18)..(19)..(20): Xaa is A or G or is absent
LHDELTQYNKLXXXXXXXXXLYLVSIASLQVQTPRXQ

SEQ ID NO: 4972 - protein, 36 aa, Artificial Sequence
  GFR-binding peptide
  MOD_RES (2)..(4)..(35)..(36): Xaa is C or S
SXKXSKVVMRHKRLVKPTRGVYYLISTASLDQPVXX

SEQ ID NO: 4973 - protein, 36 aa, Artificial Sequence
  GFR-binding peptide
  MOD_RES (2)..(4)..(36): Xaa is C or S
HXGXSRVVMNYHYKLIVNSSDDKYLVSIPSLKTPAX

SEQ ID NO: 4974 - protein, 35 aa, Artificial Sequence
  GFR-binding peptide
  MOD_RES (2)..(4): Xaa is C or S
RXGXGEVVMEQYNKLVVKDYEDLYLMSIASLETPV

SEQ ID NO: 4975 - protein, 42 aa, Artificial Sequence
  GFR-binding peptide
  MOD_RES (2)..(4)..(41): Xaa is C or S
EXKXALHDELTRHKRLFIPKKRVIEYYLVSTASLQVQTPRXQ

SEQ ID NO: 4976 - protein, 35 aa, Artificial Sequence
  GFR-binding peptide
  MOD_RES (2)..(2): Xaa is C or S
  MOD_RES (14)..(15)..(16)..(17)..(18): Xaa is A or G
  MOD_RES (19)..(20)..(21)..(22): Xaa is A or G or is absent
GXGEVVMEYHYKLXXXXXXXXXKYLMSIPSLETPV

SEQ ID NO: 4977 - protein, 38 aa, Artificial Sequence
  GFR-binding peptide
  MOD_RES (2)..(36)..(37): Xaa is C or S
  MOD_RES (14)..(15)..(16)..(17)..(18): Xaa is A or G
  MOD_RES (19)..(20)..(21)..(22): Xaa is A or G or is absent
GXARVVMNQYNKLXXXXXXXXXLYLVSIASLQTPAXXP

SEQ ID NO: 4978 - protein, 32 aa, Artificial Sequence
  GFR-binding peptide
  MOD_RES (11)..(12)..(13)..(14)..(15): Xaa is A or G
  MOD_RES (16)..(17)..(18)..(19): Xaa is A or G or is absent
SRVIMYHYKLXXXXXXXXXKYLISIPSLAQPV

SEQ ID NO: 4979 - protein, 40 aa, Artificial Sequence
  GFR-binding peptide
  MOD_RES (2)..(4)..(37)..(38): Xaa is C or S
  MOD_RES (15)..(16)..(17)..(18)..(19): Xaa is A or G
  MOD_RES (20)..(21)..(22)..(23): Xaa is A or G or is absent
SXKXSRVIMRHKRLXXXXXXXXXYYLISTASLAQPVXXPA

SEQ ID NO: 4980 - protein, 38 aa, Artificial Sequence
  GFR-binding peptide
  MOD_RES (32)..(33): Xaa is C or S
ARVVMNRYKKLIVNSSDDFYLVSIANLQTPAXXPKPVT

SEQ ID NO: 4981 - protein, 43 aa, Artificial Sequence
  GFR-binding peptide
  MOD_RES (1)..(3)..(37)..(38): Xaa is C or S
  MOD_RES (15)..(16)..(17)..(18)..(19): Xaa is A or G
  MOD_RES (20)..(21)..(22)..(23): Xaa is A or G or is absent
XGXAKVVMNRYKKLXXXXXXXXXFYLVSIANLKTPAXXAKPVA

SEQ ID NO: 4982 - protein, 40 aa, Artificial Sequence
  GFR-binding peptide
  MOD_RES (34)..(34): Xaa is C or S
  MOD_RES (12)..(13)..(14)..(15)..(16): Xaa is A or G
  MOD_RES (17)..(18)..(19)..(20): Xaa is A or G or is absent
SRVVMNYHYKLXXXXXXXXXKYLVSIPSLKTPAXTPKTVH

SEQ ID NO: 4983 - protein, 40 aa, Artificial Sequence
  GFR-binding peptide
  MOD_RES (36)..(36): Xaa is C or S
  MOD_RES (12)..(13)..(14)..(15)..(16): Xaa is A or G
  MOD_RES (17)..(18)..(19)..(20): Xaa is A or G or is absent
LHDELTYHYKLXXXXXXXXXKYLVSIPSLQVQTPRXQVNR

SEQ ID NO: 4984 - protein, 38 aa, Artificial Sequence
  GFR-binding peptide
  MOD_RES (2)..(36)..(37): Xaa is C or S
  MOD_RES (14)..(15)..(16)..(17)..(18): Xaa is A or G
  MOD_RES (19)..(20)..(21)..(22): Xaa is A or G or is absent
GXSRVVMNRYKKLXXXXXXXXXFYLVSIANLKTPAXXP

SEQ ID NO: 4985 - protein, 38 aa, Artificial Sequence
  GFR-binding peptide
  MOD_RES (2)..(4)..(35)..(36): Xaa is C or S
SXKXSKVVMRYKKLVKPTRGVFYLISIANLDQPVXXPS

SEQ ID NO: 4986 - protein, 41 aa, Artificial Sequence
  GFR-binding peptide
  MOD_RES (2)..(39): Xaa is C or S
  MOD_RES (15)..(16)..(17)..(18)..(19): Xaa is A or G
  MOD_RES (20)..(21)..(22)..(23): Xaa is A or G or is absent
KXALHDELTQYNKLXXXXXXXXXLYLVSIASLQVQTPRXQV

SEQ ID NO: 4987 - protein, 39 aa, Artificial Sequence
  GFR-binding peptide
  MOD_RES (2)..(36)..(37): Xaa is C or S
  MOD_RES (14)..(15)..(16)..(17)..(18): Xaa is A or G
  MOD_RES (19)..(20)..(21)..(22): Xaa is A or G or is absent
GXAKVVMNYHYKLXXXXXXXXXKYLVSIPSLKTPAXXAK

SEQ ID NO: 4988 - protein, 36 aa, Artificial Sequence
  GFR-binding peptide
  MOD_RES (35)..(36): Xaa is C or S
  MOD_RES (13)..(14)..(15)..(16)..(17): Xaa is A or G
  MOD_RES (18)..(19)..(20)..(21): Xaa is A or G or is absent
EAVSMGERYKKLXXXXXXXXXFYLVSIANLKTPVXX

SEQ ID NO: 4989 - protein, 38 aa, Artificial Sequence
  GFR-binding peptide
  MOD_RES (33)..(34): Xaa is C or S
  MOD_RES (11)..(12)..(13)..(14)..(15): Xaa is A or G
  MOD_RES (16)..(17)..(18)..(19): Xaa is A or G or is absent
EVVMERHKRLXXXXXXXXXYYLMSTASLETPVXXAKPI

SEQ ID NO: 4990 - protein, 44 aa, Artificial Sequence
  GFR-binding peptide
  MOD_RES (2)..(4)..(38)..(39): Xaa is C or S
  MOD_RES (16)..(17)..(18)..(19)..(20): Xaa is A or G
  MOD_RES (21)..(22)..(23)..(24): Xaa is A or G or is absent
HXGXARVVMNRHKRLXXXXXXXXXYYLVSTASLQTPAXXPKPVT

SEQ ID NO: 4991 - protein, 38 aa, Artificial Sequence
  GFR-binding peptide
  MOD_RES (2)..(33)..(34): Xaa is C or S
KXSKVVMRYKKLVKPTRGVFYLISIANLDQPVXXPSAS

SEQ ID NO: 4992 - protein, 34 aa, Artificial Sequence
  GFR-binding peptide
  MOD_RES (31)..(32): Xaa is C or S
RVVMNRYKKLIVNSSDDFYLVSIANLKTPAXXPK

SEQ ID NO: 4993 - protein, 36 aa, Artificial Sequence
  GFR-binding peptide
  MOD_RES (33)..(34): Xaa is C or S
  MOD_RES (11)..(12)..(13)..(14)..(15): Xaa is A or G
  MOD_RES (16)..(17)..(18)..(19): Xaa is A or G or is absent
KVVMNRHKRLXXXXXXXXXYYLVSTASLKTPAXXAK

SEQ ID NO: 4994 - protein, 42 aa, Artificial Sequence
  GFR-binding peptide
  MOD_RES (1)..(3)..(36)..(37): Xaa is C or S
  MOD_RES (14)..(15)..(16)..(17)..(18): Xaa is A or G
  MOD_RES (19)..(20)..(21)..(22): Xaa is A or G or is absent
XKXSRVIMRHKRLXXXXXXXXXYYLISTASLAQPVXXPAASA

SEQ ID NO: 4995 - protein, 43 aa, Artificial Sequence
  GFR-binding peptide
  MOD_RES (1)..(3)..(37)..(38): Xaa is C or S
  MOD_RES (15)..(16)..(17)..(18)..(19): Xaa is A or G
  MOD_RES (20)..(21)..(22)..(23): Xaa is A or G or is absent
XGXARVVMNYHYKLXXXXXXXXXKYLVSIPSLQTPAXXPKPVT

SEQ ID NO: 4996 - protein, 36 aa, Artificial Sequence
  GFR-binding peptide
  MOD_RES (1)..(3)..(35)..(36): Xaa is C or S
XGXGEVVMERHKRLVVKDYEDYYLMSTASLETPVXX

SEQ ID NO: 4997 - protein, 42 aa, Artificial Sequence
  GFR-binding peptide
  MOD_RES (2)..(39): Xaa is C or S
KXALHDELTQYNKLFIPKKRVIELYLVSIASLQVQTPRXQVN

SEQ ID NO: 4998 - protein, 34 aa, Artificial Sequence
  GFR-binding peptide
ALHDELTYHYKLFIPKKRVIEKYLVSIPSLQVQT

SEQ ID NO: 4999 - protein, 34 aa, Artificial Sequence
  GFR-binding peptide
  MOD_RES (11)..(12)..(13)..(14)..(15): Xaa is A or G
  MOD_RES (16)..(17)..(18)..(19): Xaa is A or G or is absent
HDELTYHYKLXXXXXXXXXKYLVSIPSLQVQTPR

SEQ ID NO: 5000 - protein, 35 aa, Artificial Sequence
  GFR-binding peptide
  MOD_RES (2)..(34)..(35): Xaa is C or S
GXGEVVMDRYKKLVVKENEDFYLMSIANLETPVXX

SEQ ID NO: 5001 - protein, 39 aa, Artificial Sequence
  GFR-binding peptide
  MOD_RES (2)..(4)..(36)..(37): Xaa is C or S
HXGXSRVVMNRHKRLIVNSSDDYYLVSTASLKTPAXXPK

SEQ ID NO: 5002 - protein, 31 aa, Artificial Sequence
  GFR-binding peptide
  MOD_RES (31)..(31): Xaa is C or S
SKVVMYHYKLVKPTRGVKYLISIPSLDQPVX

SEQ ID NO: 5003 - protein, 41 aa, Artificial Sequence
  GFR-binding peptide
  MOD_RES (2)..(35)..(36): Xaa is C or S
GXEAVSMGEYHYKLTPVGMDDKYLVSIPSLKTPVXXAKGVK

SEQ ID NO: 5004 - protein, 39 aa, Artificial Sequence
  GFR-binding peptide
  MOD_RES (1)..(3)..(35)..(36): Xaa is C or S
XGXAKVVMNRYKKLIVNNSSDFYLVSIANLKTPAXXAKP

SEQ ID NO: 5005 - protein, 33 aa, Artificial Sequence
  GFR-binding peptide
  MOD_RES (31)..(32): Xaa is C or S
SRVIMRHKRLVKPKRGVYYLISTASLAQPVXXP

SEQ ID NO: 5006 - protein, 37 aa, Artificial Sequence
  GFR-binding peptide
  MOD_RES (1)..(3)..(34)..(35): Xaa is C or S
XKXSKVVMRYKKLVKPTRGVFYLISIANLDQPVXXPS

SEQ ID NO: 5007 - protein, 39 aa, Artificial Sequence
  GFR-binding peptide
  MOD_RES (1)..(38): Xaa is C or S
XALHDELTYHYKLFIPKKRVIEKYLVSIPSLQVQTPRXQ

SEQ ID NO: 5008 - protein, 37 aa, Artificial Sequence
  GFR-binding peptide
  MOD_RES (1)..(3)..(36)..(37): Xaa is C or S
XGXEAVSMGEQYNKLTPVGMDDLYLVSIASLKTPVXX

SEQ ID NO: 5009 - protein, 37 aa, Artificial Sequence
  GFR-binding peptide
  MOD_RES (1)..(3)..(36)..(37): Xaa is C or S
  MOD_RES (14)..(15)..(16)..(17)..(18): Xaa is A or G
  MOD_RES (19)..(20)..(21)..(22): Xaa is A or G or is absent
XKXSKVVMQYNKLXXXXXXXXXLYLISIASLDQPVXX

SEQ ID NO: 5010 - protein, 35 aa, Artificial Sequence
  GFR-binding peptide
  MOD_RES (1)..(33)..(34): Xaa is C or S
XGEVVMDQYNKLVVKENEDLYLMSIASLETPVXXA

SEQ ID NO: 5011 - protein, 34 aa, Artificial Sequence
  GFR-binding peptide
  MOD_RES (1)..(34): Xaa is C or S
  MOD_RES (12)..(13)..(14)..(15)..(16): Xaa is A or G
  MOD_RES (17)..(18)..(19)..(20): Xaa is A or G or is absent
XSKVVMQYNKLXXXXXXXXXLYLISIASLDQPVX

SEQ ID NO: 5012 - protein, 37 aa, Artificial Sequence
  GFR-binding peptide
  MOD_RES (1)..(32)..(33): Xaa is C or S
XSKVIMYHYKLIKPTKGIKYLISIPSLDQSVXXPSAS

SEQ ID NO: 5013 - protein, 37 aa, Artificial Sequence
  GFR-binding peptide
  MOD_RES (2)..(4)..(37): Xaa is C or S
RXGXEAVSMGEQYNKLTPVGMDDLYLVSIASLKTPVX

SEQ ID NO: 5014 - protein, 37 aa, Artificial Sequence
  GFR-binding peptide
  MOD_RES (31)..(32): Xaa is C or S
SRVIMYHYKLVKPKRGVKYLISIPSLAQPVXXPAASA

SEQ ID NO: 5015 - protein, 39 aa, Artificial Sequence
  GFR-binding peptide
  MOD_RES (1)..(3)..(37)..(38): Xaa is C or S
  MOD_RES (15)..(16)..(17)..(18)..(19): Xaa is A or G
  MOD_RES (20)..(21)..(22)..(23): Xaa is A or G or is absent
XGXSRVVMNRHKRLXXXXXXXXXYYLVSTASLKTPAXXP

SEQ ID NO: 5016 - protein, 39 aa, Artificial Sequence
  GFR-binding peptide
  MOD_RES (1)..(35)..(36): Xaa is C or S
  MOD_RES (13)..(14)..(15)..(16)..(17): Xaa is A or G
  MOD_RES (18)..(19)..(20)..(21): Xaa is A or G or is absent
XAKVVMNRYKKLXXXXXXXXXFYLVSIANLKTPAXXAKP

SEQ ID NO: 5017 - protein, 36 aa, Artificial Sequence
  GFR-binding peptide
  MOD_RES (2)..(34)..(35): Xaa is C or S
GXGEVVMERHKRLVVKDYEDYYLMSTASLETPVXXA

SEQ ID NO: 5018 - protein, 34 aa, Artificial Sequence
  GFR-binding peptide
  MOD_RES (12)..(13)..(14)..(15)..(16): Xaa is A or G
  MOD_RES (17)..(18)..(19)..(20): Xaa is A or G or is absent
LHDELTYHYKLXXXXXXXXXKYLVSIPSLQVQTP

SEQ ID NO: 5019 - protein, 40 aa, Artificial Sequence
  GFR-binding peptide
  MOD_RES (2)..(4): Xaa is C or S
EXKXALHDELTYHYKLFIPKKRVIEKYLVSIPSLQVQTPR

SEQ ID NO: 5020 - protein, 43 aa, Artificial Sequence
  GFR-binding peptide
  MOD_RES (2)..(4)..(38)..(39): Xaa is C or S
  MOD_RES (16)..(17)..(18)..(19)..(20): Xaa is A or G
  MOD_RES (21)..(22)..(23)..(24): Xaa is A or G or is absent
HXGXARVVMNQYNKLXXXXXXXXXLYLVSIASLQTPAXXPKPV

SEQ ID NO: 5021 - protein, 40 aa, Artificial Sequence
  GFR-binding peptide
  MOD_RES (2)..(36)..(37): Xaa is C or S
  MOD_RES (14)..(15)..(16)..(17)..(18): Xaa is A or G
  MOD_RES (19)..(20)..(21)..(22): Xaa is A or G or is absent
GXAKVVMNYHYKLXXXXXXXXXKYLVSIPSLKTPAXXAKP

SEQ ID NO: 5022 - protein, 42 aa, Artificial Sequence
  GFR-binding peptide
  MOD_RES (2)..(4)..(38)..(39): Xaa is C or S
  MOD_RES (16)..(17)..(18)..(19)..(20): Xaa is A or G
  MOD_RES (21)..(22)..(23)..(24): Xaa is A or G or is absent
RXGXGEVVMERHKRLXXXXXXXXXYYLMSTASLETPVXXAKP

SEQ ID NO: 5023 - protein, 39 aa, Artificial Sequence
  GFR-binding peptide
  MOD_RES (36)..(36): Xaa is C or S
  MOD_RES (12)..(13)..(14)..(15)..(16): Xaa is A or G
  MOD_RES (17)..(18)..(19)..(20): Xaa is A or G or is absent
LHDELTRHKRLXXXXXXXXXYYLVSTASLQVQTPRXQVN

SEQ ID NO: 5024 - protein, 34 aa, Artificial Sequence
  GFR-binding peptide
  MOD_RES (1)..(33): Xaa is C or S
XSRVVMNRHKRLIVNSSDDYYLVSTASLKTPAXT

SEQ ID NO: 5025 - protein, 36 aa, Artificial Sequence
  GFR-binding peptide
  MOD_RES (2)..(35)..(36): Xaa is C or S
  MOD_RES (13)..(14)..(15)..(16)..(17): Xaa is A or G
  MOD_RES (18)..(19)..(20)..(21): Xaa is A or G or is absent
KXSRVIMRYKKLXXXXXXXXXFYLISIANLAQPVXX

SEQ ID NO: 5026 - protein, 33 aa, Artificial Sequence
  GFR-binding peptide
  MOD_RES (32)..(32): Xaa is C or S
SRVVMNYHYKLIVNSSDDKYLVSIPSLKTPAXT

SEQ ID NO: 5027 - protein, 33 aa, Artificial Sequence
  GFR-binding peptide
  MOD_RES (31)..(32): Xaa is C or S
RVVMNYHYKLIVNSSDDKYLVSIPSLKTPAXXP

SEQ ID NO: 5028 - protein, 40 aa, Artificial Sequence
  GFR-binding peptide
  MOD_RES (2)..(4)..(37)..(38): Xaa is C or S
RXGXEAVSMGERHKRLTPVGMDDYYLVSTASLKTPVXXAK

SEQ ID NO: 5029 - protein, 32 aa, Artificial Sequence
  GFR-binding peptide
  MOD_RES (32)..(32): Xaa is C or S
SRVVMNQYNKLIVNSSDDLYLVSIASLKTPAX

SEQ ID NO: 5030 - protein, 36 aa, Artificial Sequence
  GFR-binding peptide
  MOD_RES (33)..(34): Xaa is C or S
  MOD_RES (11)..(12)..(13)..(14)..(15): Xaa is A or G
  MOD_RES (16)..(17)..(18)..(19): Xaa is A or G or is absent
RVVMNRYKKLXXXXXXXXXFYLVSIANLKTPAXXPK

SEQ ID NO: 5031 - protein, 36 aa, Artificial Sequence
  GFR-binding peptide
  MOD_RES (1)..(34)..(35): Xaa is C or S
XEAVSMGEYHYKLTPVGMDDKYLVSIPSLKTPVXXA

SEQ ID NO: 5032 - protein, 36 aa, Artificial Sequence
  GFR-binding peptide
  MOD_RES (32)..(32): Xaa is C or S
SRVVMNRHKRLIVNSSDDYYLVSTASLKTPAXTPKT

SEQ ID NO: 5033 - protein, 34 aa, Artificial Sequence
  GFR-binding peptide
  MOD_RES (1)..(34): Xaa is C or S
  MOD_RES (12)..(13)..(14)..(15)..(16): Xaa is A or G
  MOD_RES (17)..(18)..(19)..(20): Xaa is A or G or is absent
XSKVVMRHKRLXXXXXXXXXYYLISTASLDQPVX

SEQ ID NO: 5034 - protein, 32 aa, Artificial Sequence
  GFR-binding peptide
  MOD_RES (32)..(32): Xaa is C or S
GEVVMDQYNKLVVKENEDLYLMSIASLETPVX

SEQ ID NO: 5035 - protein, 41 aa, Artificial Sequence
  GFR-binding peptide
  MOD_RES (2)..(4)..(38)..(39): Xaa is C or S
  MOD_RES (16)..(17)..(18)..(19)..(20): Xaa is A or G
  MOD_RES (21)..(22)..(23)..(24): Xaa is A or G or is absent
HXGXARVVMNRYKKLXXXXXXXXXFYLVSIANLQTPAXXPK

SEQ ID NO: 5036 - protein, 40 aa, Artificial Sequence
  GFR-binding peptide
  MOD_RES (34)..(35): Xaa is C or S
  MOD_RES (12)..(13)..(14)..(15)..(16): Xaa is A or G
  MOD_RES (17)..(18)..(19)..(20): Xaa is A or G or is absent
AKVVMNQYNKLXXXXXXXXXLYLVSIASLKTPAXXAKPVA

SEQ ID NO: 5037 - protein, 37 aa, Artificial Sequence
  GFR-binding peptide
  MOD_RES (31)..(32): Xaa is C or S
SKVIMYHYKLIKPTKGIKYLISIPSLDQSVXXPSASA

SEQ ID NO: 5038 - protein, 35 aa, Artificial Sequence
  GFR-binding peptide
  MOD_RES (1)..(3)..(35): Xaa is C or S
XGXSRVVMNYHYKLIVNSSDDKYLVSIPSLKTPAX

SEQ ID NO: 5039 - protein, 37 aa, Artificial Sequence
  GFR-binding peptide
  MOD_RES (35)..(35): Xaa is C or S
HDELTYHYKLFIPKKRVIEKYLVSIPSLQVQTPRXQV

SEQ ID NO: 5040 - protein, 38 aa, Artificial Sequence
  GFR-binding peptide
  MOD_RES (2)..(4)..(37)..(38): Xaa is C or S
RXGXEAVSMGERYKKLTPVGMDDFYLVSIANLKTPVXX

SEQ ID NO: 5041 - protein, 42 aa, Artificial Sequence
  GFR-binding peptide
  MOD_RES (1)..(3)..(36)..(37): Xaa is C or S
XGXEAVSMGEQYNKLTPVGMDDLYLVSIASLKTPVXXAKGVK

SEQ ID NO: 5042 - protein, 34 aa, Artificial Sequence
  GFR-binding peptide
  MOD_RES (32)..(33): Xaa is C or S
ARVVMNRHKRLIVNSSDDYYLVSTASLQTPAXXP

SEQ ID NO: 5043 - protein, 39 aa, Artificial Sequence
  GFR-binding peptide
  MOD_RES (1)..(3)..(37)..(38): Xaa is C or S
  MOD_RES (15)..(16)..(17)..(18)..(19): Xaa is A or G
  MOD_RES (20)..(21)..(22)..(23): Xaa is A or G or is absent
XGXARVVMNYHYKLXXXXXXXXXKYLVSIPSLQTPAXXP

SEQ ID NO: 5044 - protein, 37 aa, Artificial Sequence
  GFR-binding peptide
  MOD_RES (32)..(33): Xaa is C or S
GEVVMERYKKLVVKDYEDFYLMSIANLETPVXXAKPI

SEQ ID NO: 5045 - protein, 43 aa, Artificial Sequence
  GFR-binding peptide
  MOD_RES (1)..(3)..(40): Xaa is C or S
XKXALHDELTRHKRLFIPKKRVIEYYLVSTASLQVQTPRXQVN

SEQ ID NO: 5046 - protein, 38 aa, Artificial Sequence
  GFR-binding peptide
  MOD_RES (33)..(33): Xaa is C or S
  MOD_RES (11)..(12)..(13)..(14)..(15): Xaa is A or G
  MOD_RES (16)..(17)..(18)..(19): Xaa is A or G or is absent
RVVMNRYKKLXXXXXXXXXFYLVSIANLKTPAXTPKTV

SEQ ID NO: 5047 - protein, 39 aa, Artificial Sequence
  GFR-binding peptide
  MOD_RES (34)..(35): Xaa is C or S
  MOD_RES (12)..(13)..(14)..(15)..(16): Xaa is A or G
  MOD_RES (17)..(18)..(19)..(20): Xaa is A or G or is absent
GEVVMEYHYKLXXXXXXXXXKYLMSIPSLETPVXXAKPI

SEQ ID NO: 5048 - protein, 38 aa, Artificial Sequence
  GFR-binding peptide
  MOD_RES (2)..(4)..(38): Xaa is C or S
  MOD_RES (16)..(17)..(18)..(19)..(20): Xaa is A or G
  MOD_RES (21)..(22)..(23)..(24): Xaa is A or G or is absent
RXGXGEVVMDRHKRLXXXXXXXXXYYLMSTASLETPVX

SEQ ID NO: 5049 - protein, 42 aa, Artificial Sequence
  GFR-binding peptide
  MOD_RES (2)..(4)..(36)..(37): Xaa is C or S
RXGXGEVVMERHKRLVVKDYEDYYLMSTASLETPVXXAKPIS

SEQ ID NO: 5050 - protein, 39 aa, Artificial Sequence
  GFR-binding peptide
  MOD_RES (2)..(39): Xaa is C or S
KXALHDELTQYNKLFIPKKRVIELYLVSIASLQVQTPRX

SEQ ID NO: 5051 - protein, 41 aa, Artificial Sequence
  GFR-binding peptide
  MOD_RES (2)..(4)..(37)..(38): Xaa is C or S
  MOD_RES (15)..(16)..(17)..(18)..(19): Xaa is A or G
  MOD_RES (20)..(21)..(22)..(23): Xaa is A or G or is absent
SXKXSKVVMYHYKLXXXXXXXXXKYLISIPSLDQPVXXPSA

SEQ ID NO: 5052 - protein, 39 aa, Artificial Sequence
  GFR-binding peptide
  MOD_RES (2)..(4)..(38)..(39): Xaa is C or S
  MOD_RES (16)..(17)..(18)..(19)..(20): Xaa is A or G
  MOD_RES (21)..(22)..(23)..(24): Xaa is A or G or is absent
RXGXGEVVMEYHYKLXXXXXXXXXKYLMSIPSLETPVXX

SEQ ID NO: 5053 - protein, 40 aa, Artificial Sequence
  GFR-binding peptide
  MOD_RES (2)..(34)..(35): Xaa is C or S
GXSRVVMNQYNKLIVNSSDDLYLVSIASLKTPAXXPKPVY

SEQ ID NO: 5054 - protein, 38 aa, Artificial Sequence
  GFR-binding peptide
  MOD_RES (33)..(33): Xaa is C or S
  MOD_RES (11)..(12)..(13)..(14)..(15): Xaa is A or G
  MOD_RES (16)..(17)..(18)..(19): Xaa is A or G or is absent
RVVMNRHKRLXXXXXXXXXYYLVSTASLKTPAXTPKTV

SEQ ID NO: 5055 - protein, 42 aa, Artificial Sequence
  GFR-binding peptide
  MOD_RES (2)..(36)..(37): Xaa is C or S
  MOD_RES (14)..(15)..(16)..(17)..(18): Xaa is A or G
  MOD_RES (19)..(20)..(21)..(22): Xaa is A or G or is absent
GXGEVVMEQYNKLXXXXXXXXXLYLMSIASLETPVXXAKPIS

SEQ ID NO: 5056 - protein, 35 aa, Artificial Sequence
  GFR-binding peptide
  MOD_RES (1)..(3)..(35): Xaa is C or S
XGXARVVMNQYNKLIVNSSDDLYLVSIASLQTPAX

SEQ ID NO: 5057 - protein, 39 aa, Artificial Sequence
  GFR-binding peptide
  MOD_RES (34)..(35): Xaa is C or S
  MOD_RES (12)..(13)..(14)..(15)..(16): Xaa is A or G
  MOD_RES (17)..(18)..(19)..(20): Xaa is A or G or is absent
ARVVMNQYNKLXXXXXXXXXLYLVSIASLQTPAXXPKPV

SEQ ID NO: 5058 - protein, 39 aa, Artificial Sequence
  GFR-binding peptide
  MOD_RES (2)..(36)..(37): Xaa is C or S
  MOD_RES (14)..(15)..(16)..(17)..(18): Xaa is A or G
  MOD_RES (19)..(20)..(21)..(22): Xaa is A or G or is absent
GXARVVMNYHYKLXXXXXXXXXKYLVSIPSLQTPAXXPK

SEQ ID NO: 5059 - protein, 41 aa, Artificial Sequence
  GFR-binding peptide
  MOD_RES (1)..(3)..(36)..(37): Xaa is C or S
  MOD_RES (14)..(15)..(16)..(17)..(18): Xaa is A or G
  MOD_RES (19)..(20)..(21)..(22): Xaa is A or G or is absent
XKXSRVIMQYNKLXXXXXXXXXLYLISIASLAQPVXXPAAS

SEQ ID NO: 5060 - protein, 36 aa, Artificial Sequence
  GFR-binding peptide
  MOD_RES (31)..(32): Xaa is C or S
EVVMERYKKLVVKDYEDFYLMSIANLETPVXXAKPI

SEQ ID NO: 5061 - protein, 40 aa, Artificial Sequence
  GFR-binding peptide
  MOD_RES (1)..(34)..(35): Xaa is C or S
XEAVSMGERHKRLTPVGMDDYYLVSTASLKTPVXXAKGVK

SEQ ID NO: 5062 - protein, 33 aa, Artificial Sequence
  GFR-binding peptide
  MOD_RES (12)..(13)..(14)..(15)..(16): Xaa is A or G
  MOD_RES (17)..(18)..(19)..(20): Xaa is A or G or is absent
LHDELTRHKRLXXXXXXXXXYYLVSTASLQVQT

SEQ ID NO: 5063 - protein, 36 aa, Artificial Sequence
  GFR-binding peptide
  MOD_RES (2)..(35)..(36): Xaa is C or S
GXEAVSMGEYHYKLTPVGMDDKYLVSIPSLKTPVXX

SEQ ID NO: 5064 - protein, 41 aa, Artificial Sequence
  GFR-binding peptide
  MOD_RES (2)..(36): Xaa is C or S
  MOD_RES (14)..(15)..(16)..(17)..(18): Xaa is A or G
  MOD_RES (19)..(20)..(21)..(22): Xaa is A or G or is absent
GXSRVVMNRHKRLXXXXXXXXXYYLVSTASLKTPAXTPKTV

SEQ ID NO: 5065 - protein, 37 aa, Artificial Sequence
  GFR-binding peptide
  MOD_RES (2)..(37): Xaa is C or S
  MOD_RES (15)..(16)..(17)..(18)..(19): Xaa is A or G
  MOD_RES (20)..(21)..(22)..(23): Xaa is A or G or is absent
GXEAVSMGERHKRLXXXXXXXXXYYLVSTASLKTPVX

SEQ ID NO: 5066 - protein, 36 aa, Artificial Sequence
  GFR-binding peptide
  MOD_RES (31)..(32): Xaa is C or S
SKVIMYHYKLIKPTKGIKYLISIPSLDQSVXXPSAS

SEQ ID NO: 5067 - protein, 38 aa, Artificial Sequence
  GFR-binding peptide
  MOD_RES (2)..(36)..(37): Xaa is C or S
  MOD_RES (14)..(15)..(16)..(17)..(18): Xaa is A or G
  MOD_RES (19)..(20)..(21)..(22): Xaa is A or G or is absent
GXGEVVMEQYNKLXXXXXXXXXLYLMSIASLETPVXXA

SEQ ID NO: 5068 - protein, 42 aa, Artificial Sequence
  GFR-binding peptide
  MOD_RES (2)..(4)..(36)..(37): Xaa is C or S
HXGXAKVVMNQYNKLIVNNSSDLYLVSIASLKTPAXXAKPVA

SEQ ID NO: 5069 - protein, 36 aa, Artificial Sequence
  GFR-binding peptide
  MOD_RES (1)..(33)..(34): Xaa is C or S
XAKVVMNRYKKLIVNNSSDFYLVSIANLKTPAXXAK

SEQ ID NO: 5070 - protein, 41 aa, Artificial Sequence
  GFR-binding peptide
  MOD_RES (1)..(36)..(37): Xaa is C or S
  MOD_RES (14)..(15)..(16)..(17)..(18): Xaa is A or G
  MOD_RES (19)..(20)..(21)..(22): Xaa is A or G or is absent
XEAVSMGERYKKLXXXXXXXXXFYLVSIANLKTPVXXAKGV

SEQ ID NO: 5071 - protein, 36 aa, Artificial Sequence
  GFR-binding peptide
  MOD_RES (33)..(34): Xaa is C or S
  MOD_RES (11)..(12)..(13)..(14)..(15): Xaa is A or G
  MOD_RES (16)..(17)..(18)..(19): Xaa is A or G or is absent
RVVMNRHKRLXXXXXXXXXYYLVSTASLQTPAXXPK

SEQ ID NO: 5072 - protein, 35 aa, Artificial Sequence
  GFR-binding peptide
  MOD_RES (31)..(31): Xaa is C or S
RVVMNYHYKLIVNSSDDKYLVSIPSLKTPAXTPKT

SEQ ID NO: 5073 - protein, 31 aa, Artificial Sequence
  GFR-binding peptide
  MOD_RES (31)..(31): Xaa is C or S
EVVMDRHKRLVVKENEDYYLMSTASLETPVX

SEQ ID NO: 5074 - protein, 35 aa, Artificial Sequence
  GFR-binding peptide
  MOD_RES (1)..(3)..(34)..(35): Xaa is C or S
XKXSKVIMQYNKLIKPTKGILYLISIASLDQSVXX

SEQ ID NO: 5075 - protein, 37 aa, Artificial Sequence
  GFR-binding peptide
  MOD_RES (2)..(4)..(36)..(37): Xaa is C or S
HXGXARVVMNRHKRLIVNSSDDYYLVSTASLQTPAXX

SEQ ID NO: 5076 - protein, 36 aa, Artificial Sequence
  GFR-binding peptide
  MOD_RES (2)..(34)..(35): Xaa is C or S
GXGEVVMDYHYKLVVKENEDKYLMSIPSLETPVXXA

SEQ ID NO: 5077 - protein, 41 aa, Artificial Sequence
  GFR-binding peptide
  MOD_RES (1)..(35)..(36): Xaa is C or S
  MOD_RES (13)..(14)..(15)..(16)..(17): Xaa is A or G
  MOD_RES (18)..(19)..(20)..(21): Xaa is A or G or is absent
XSRVVMNRHKRLXXXXXXXXXYYLVSTASLKTPAXXPKPVY

SEQ ID NO: 5078 - protein, 42 aa, Artificial Sequence
  GFR-binding peptide
  MOD_RES (2)..(36)..(37): Xaa is C or S
  MOD_RES (14)..(15)..(16)..(17)..(18): Xaa is A or G
  MOD_RES (19)..(20)..(21)..(22): Xaa is A or G or is absent
GXAKVVMNQYNKLXXXXXXXXXLYLVSIASLKTPAXXAKPVA

SEQ ID NO: 5079 - protein, 35 aa, Artificial Sequence
  GFR-binding peptide
  MOD_RES (32)..(33): Xaa is C or S
GEVVMEQYNKLVVKDYEDLYLMSIASLETPVXXAK

SEQ ID NO: 5080 - protein, 38 aa, Artificial Sequence
  GFR-binding peptide
  MOD_RES (1)..(3)..(37)..(38): Xaa is C or S
  MOD_RES (15)..(16)..(17)..(18)..(19): Xaa is A or G
  MOD_RES (20)..(21)..(22)..(23): Xaa is A or G or is absent
XGXAKVVMNQYNKLXXXXXXXXXLYLVSIASLKTPAXX

SEQ ID NO: 5081 - protein, 38 aa, Artificial Sequence
  GFR-binding peptide
  MOD_RES (32)..(33): Xaa is C or S
AKVVMNRYKKLIVNNSSDFYLVSIANLKTPAXXAKPVA

SEQ ID NO: 5082 - protein, 32 aa, Artificial Sequence
  GFR-binding peptide
  MOD_RES (1)..(1): Xaa is C or S
XGEVVMDRHKRLVVKENEDYYLMSTASLETPV

SEQ ID NO: 5083 - protein, 37 aa, Artificial Sequence
  GFR-binding peptide
  MOD_RES (31)..(32): Xaa is C or S
SKVVMYHYKLVKPTRGVKYLISIPSLDQPVXXPSASA

SEQ ID NO: 5084 - protein, 38 aa, Artificial Sequence
  GFR-binding peptide
  MOD_RES (2)..(36): Xaa is C or S
  MOD_RES (14)..(15)..(16)..(17)..(18): Xaa is A or G
  MOD_RES (19)..(20)..(21)..(22): Xaa is A or G or is absent
GXSRVVMNYHYKLXXXXXXXXXKYLVSIPSLKTPAXTP

SEQ ID NO: 5085 - protein, 35 aa, Artificial Sequence
  GFR-binding peptide
  MOD_RES (1)..(3)..(35): Xaa is C or S
XGXAKVVMNYHYKLIVNNSSDKYLVSIPSLKTPAX

SEQ ID NO: 5086 - protein, 36 aa, Artificial Sequence
  GFR-binding peptide
  MOD_RES (34)..(35): Xaa is C or S
  MOD_RES (12)..(13)..(14)..(15)..(16): Xaa is A or G
  MOD_RES (17)..(18)..(19)..(20): Xaa is A or G or is absent
AKVVMNQYNKLXXXXXXXXXLYLVSIASLKTPAXXA

SEQ ID NO: 5087 - protein, 41 aa, Artificial Sequence
  GFR-binding peptide
  MOD_RES (1)..(35)..(36): Xaa is C or S
  MOD_RES (13)..(14)..(15)..(16)..(17): Xaa is A or G
  MOD_RES (18)..(19)..(20)..(21): Xaa is A or G or is absent
XGEVVMDRHKRLXXXXXXXXXYYLMSTASLETPVXXAKPIK

SEQ ID NO: 5088 - protein, 35 aa, Artificial Sequence
  GFR-binding peptide
  MOD_RES (32)..(33): Xaa is C or S
GEVVMDQYNKLVVKENEDLYLMSIASLETPVXXAK

SEQ ID NO: 5089 - protein, 39 aa, Artificial Sequence
  GFR-binding peptide
  MOD_RES (2)..(4)..(36): Xaa is C or S
HXGXSRVVMNRHKRLIVNSSDDYYLVSTASLKTPAXTPK

SEQ ID NO: 5090 - protein, 41 aa, Artificial Sequence
  GFR-binding peptide
  MOD_RES (2)..(36)..(37): Xaa is C or S
  MOD_RES (14)..(15)..(16)..(17)..(18): Xaa is A or G
  MOD_RES (19)..(20)..(21)..(22): Xaa is A or G or is absent
GXGEVVMDYHYKLXXXXXXXXXKYLMSIPSLETPVXXAKPI

SEQ ID NO: 5091 - protein, 38 aa, Artificial Sequence
  GFR-binding peptide
  MOD_RES (2)..(4)..(36)..(37): Xaa is C or S
HXGXARVVMNQYNKLIVNSSDDLYLVSIASLQTPAXXP

SEQ ID NO: 5092 - protein, 37 aa, Artificial Sequence
  GFR-binding peptide
  MOD_RES (36)..(36): Xaa is C or S
LHDELTQYNKLFIPKKRVIELYLVSIASLQVQTPRXQ

SEQ ID NO: 5093 - protein, 38 aa, Artificial Sequence
  GFR-binding peptide
  MOD_RES (36)..(36): Xaa is C or S
LHDELTYHYKLFIPKKRVIEKYLVSIPSLQVQTPRXQV

SEQ ID NO: 5094 - protein, 38 aa, Artificial Sequence
  GFR-binding peptide
  MOD_RES (33)..(34): Xaa is C or S
  MOD_RES (11)..(12)..(13)..(14)..(15): Xaa is A or G
  MOD_RES (16)..(17)..(18)..(19): Xaa is A or G or is absent
RVVMNYHYKLXXXXXXXXXKYLVSIPSLQTPAXXPKPV

SEQ ID NO: 5095 - protein, 41 aa, Artificial Sequence
  GFR-binding peptide
  MOD_RES (2)..(35)..(36): Xaa is C or S
GXEAVSMGERHKRLTPVGMDDYYLVSTASLKTPVXXAKGVK

SEQ ID NO: 5096 - protein, 40 aa, Artificial Sequence
  GFR-binding peptide
  MOD_RES (2)..(35)..(36): Xaa is C or S
  MOD_RES (13)..(14)..(15)..(16)..(17): Xaa is A or G
  MOD_RES (18)..(19)..(20)..(21): Xaa is A or G or is absent
KXSKVVMRHKRLXXXXXXXXXYYLISTASLDQPVXXPSAS

SEQ ID NO: 5097 - protein, 33 aa, Artificial Sequence
  GFR-binding peptide
  MOD_RES (2)..(2): Xaa is C or S
GXGEVVMEQYNKLVVKDYEDLYLMSIASLETPV

SEQ ID NO: 5098 - protein, 36 aa, Artificial Sequence
  GFR-binding peptide
  MOD_RES (1)..(32)..(33): Xaa is C or S
XSKVVMRYKKLVKPTRGVFYLISIANLDQPVXXPSA

SEQ ID NO: 5099 - protein, 31 aa, Artificial Sequence
  GFR-binding peptide
SRVVMNRHKRLIVNSSDDYYLVSTASLKTPA

SEQ ID NO: 5100 - protein, 33 aa, Artificial Sequence
  GFR-binding peptide
  MOD_RES (33)..(33): Xaa is C or S
  MOD_RES (11)..(12)..(13)..(14)..(15): Xaa is A or G
  MOD_RES (16)..(17)..(18)..(19): Xaa is A or G or is absent
RVVMNRHKRLXXXXXXXXXYYLVSTASLKTPAX

SEQ ID NO: 5101 - protein, 37 aa, Artificial Sequence
  GFR-binding peptide
  MOD_RES (2)..(4)..(36)..(37): Xaa is C or S
RXGXGEVVMEYHYKLVVKDYEDKYLMSIPSLETPVXX

SEQ ID NO: 5102 - protein, 38 aa, Artificial Sequence
  GFR-binding peptide
  MOD_RES (1)..(35)..(36): Xaa is C or S
  MOD_RES (13)..(14)..(15)..(16)..(17): Xaa is A or G
  MOD_RES (18)..(19)..(20)..(21): Xaa is A or G or is absent
XGEVVMDRYKKLXXXXXXXXXFYLMSIANLETPVXXAK

SEQ ID NO: 5103 - protein, 38 aa, Artificial Sequence
  GFR-binding peptide
  MOD_RES (33)..(34): Xaa is C or S
  MOD_RES (11)..(12)..(13)..(14)..(15): Xaa is A or G
  MOD_RES (16)..(17)..(18)..(19): Xaa is A or G or is absent
SRVIMRYKKLXXXXXXXXXFYLISIANLAQPVXXPAAS

SEQ ID NO: 5104 - protein, 35 aa, Artificial Sequence
  GFR-binding peptide
  MOD_RES (31)..(31): Xaa is C or S
RVVMNQYNKLIVNSSDDLYLVSIASLKTPAXTPKT

SEQ ID NO: 5105 - protein, 30 aa, Artificial Sequence
  GFR-binding peptide
EVVMERYKKLVVKDYEDFYLMSIANLETPV

SEQ ID NO: 5106 - protein, 39 aa, Artificial Sequence
  GFR-binding peptide
  MOD_RES (2)..(34)..(35): Xaa is C or S
GXGEVVMEQYNKLVVKDYEDLYLMSIASLETPVXXAKPI

SEQ ID NO: 5107 - protein, 35 aa, Artificial Sequence
  GFR-binding peptide
  MOD_RES (1)..(32)..(33): Xaa is C or S
XSRVIMRHKRLVKPKRGVYYLISTASLAQPVXXPA

SEQ ID NO: 5108 - protein, 41 aa, Artificial Sequence
  GFR-binding peptide
  MOD_RES (1)..(35): Xaa is C or S
  MOD_RES (13)..(14)..(15)..(16)..(17): Xaa is A or G
  MOD_RES (18)..(19)..(20)..(21): Xaa is A or G or is absent
XSRVVMNRHKRLXXXXXXXXXYYLVSTASLKTPAXTPKTVH

SEQ ID NO: 5109 - protein, 33 aa, Artificial Sequence
  GFR-binding peptide
  MOD_RES (33)..(33): Xaa is C or S
  MOD_RES (11)..(12)..(13)..(14)..(15): Xaa is A or G
  MOD_RES (16)..(17)..(18)..(19): Xaa is A or G or is absent
KVVMNRHKRLXXXXXXXXXYYLVSTASLKTPAX

SEQ ID NO: 5110 - protein, 34 aa, Artificial Sequence
  GFR-binding peptide
  MOD_RES (11)..(12)..(13)..(14)..(15): Xaa is A or G
  MOD_RES (16)..(17)..(18)..(19): Xaa is A or G or is absent
HDELTQYNKLXXXXXXXXXLYLVSIASLQVQTPR

SEQ ID NO: 5111 - protein, 34 aa, Artificial Sequence
  GFR-binding peptide
  MOD_RES (2)..(34): Xaa is C or S
GXARVVMNYHYKLIVNSSDDKYLVSIPSLQTPAX

SEQ ID NO: 5112 - protein, 31 aa, Artificial Sequence
  GFR-binding peptide
  MOD_RES (1)..(1): Xaa is C or S
XSRVIMRHKRLVKPKRGVYYLISTASLAQPV

SEQ ID NO: 5113 - protein, 35 aa, Artificial Sequence
  GFR-binding peptide
  MOD_RES (1)..(3): Xaa is C or S
XGXEAVSMGERYKKLTPVGMDDFYLVSIANLKTPV

SEQ ID NO: 5114 - protein, 36 aa, Artificial Sequence
  GFR-binding peptide
  MOD_RES (31)..(32): Xaa is C or S
SKVIMQYNKLIKPTKGILYLISIASLDQSVXXPSAS

SEQ ID NO: 5115 - protein, 37 aa, Artificial Sequence
  GFR-binding peptide
  MOD_RES (31)..(31): Xaa is C or S
RVVMNRHKRLIVNSSDDYYLVSTASLKTPAXTPKTVH

SEQ ID NO: 5116 - protein, 35 aa, Artificial Sequence
  GFR-binding peptide
  MOD_RES (32)..(33): Xaa is C or S
ARVVMNRYKKLIVNSSDDFYLVSIANLQTPAXXPK

SEQ ID NO: 5117 - protein, 32 aa, Artificial Sequence
  GFR-binding peptide
  MOD_RES (31)..(32): Xaa is C or S
SKVIMRYKKLIKPTKGIFYLISIANLDQSVXX

SEQ ID NO: 5118 - protein, 36 aa, Artificial Sequence
  GFR-binding peptide
  MOD_RES (1)..(3)..(36): Xaa is C or S
XGXEAVSMGERHKRLTPVGMDDYYLVSTASLKTPVX

SEQ ID NO: 5119 - protein, 33 aa, Artificial Sequence
  GFR-binding peptide
  MOD_RES (1)..(3): Xaa is C or S
XKXSKVVMYHYKLVKPTRGVKYLISIPSLDQPV

SEQ ID NO: 5120 - protein, 41 aa, Artificial Sequence
  GFR-binding peptide
  MOD_RES (2)..(4)..(36)..(37): Xaa is C or S
HXGXSRVVMNYHYKLIVNSSDDKYLVSIPSLKTPAXXPKPV

SEQ ID NO: 5121 - protein, 37 aa, Artificial Sequence
  GFR-binding peptide
  MOD_RES (2)..(2): Xaa is C or S
  MOD_RES (15)..(16)..(17)..(18)..(19): Xaa is A or G
  MOD_RES (20)..(21)..(22)..(23): Xaa is A or G or is absent
KXALHDELTYHYKLXXXXXXXXXKYLVSIPSLQVQTP

SEQ ID NO: 5122 - protein, 36 aa, Artificial Sequence
  GFR-binding peptide
  MOD_RES (33)..(34): Xaa is C or S
  MOD_RES (11)..(12)..(13)..(14)..(15): Xaa is A or G
  MOD_RES (16)..(17)..(18)..(19): Xaa is A or G or is absent
EVVMDRYKKLXXXXXXXXXFYLMSIANLETPVXXAK

SEQ ID NO: 5123 - protein, 39 aa, Artificial Sequence
  GFR-binding peptide
  MOD_RES (2)..(36)..(37): Xaa is C or S
  MOD_RES (14)..(15)..(16)..(17)..(18): Xaa is A or G
  MOD_RES (19)..(20)..(21)..(22): Xaa is A or G or is absent
GXGEVVMERHKRLXXXXXXXXXYYLMSTASLETPVXXAK

SEQ ID NO: 5124 - protein, 34 aa, Artificial Sequence
  GFR-binding peptide
  MOD_RES (33)..(34): Xaa is C or S
  MOD_RES (11)..(12)..(13)..(14)..(15): Xaa is A or G
  MOD_RES (16)..(17)..(18)..(19): Xaa is A or G or is absent
SRVIMRYKKLXXXXXXXXXFYLISIANLAQPVXX

SEQ ID NO: 5125 - protein, 37 aa, Artificial Sequence
  GFR-binding peptide
  MOD_RES (2)..(34)..(35): Xaa is C or S
GXARVVMNRHKRLIVNSSDDYYLVSTASLQTPAXXPK

SEQ ID NO: 5126 - protein, 41 aa, Artificial Sequence
  GFR-binding peptide
  MOD_RES (1)..(35)..(36): Xaa is C or S
  MOD_RES (13)..(14)..(15)..(16)..(17): Xaa is A or G
  MOD_RES (18)..(19)..(20)..(21): Xaa is A or G or is absent
XARVVMNRHKRLXXXXXXXXXYYLVSTASLQTPAXXPKPVT

SEQ ID NO: 5127 - protein, 34 aa, Artificial Sequence
  GFR-binding peptide
  MOD_RES (33)..(34): Xaa is C or S
EAVSMGERHKRLTPVGMDDYYLVSTASLKTPVXX

SEQ ID NO: 5128 - protein, 37 aa, Artificial Sequence
  GFR-binding peptide
  MOD_RES (34)..(35): Xaa is C or S
  MOD_RES (12)..(13)..(14)..(15)..(16): Xaa is A or G
  MOD_RES (17)..(18)..(19)..(20): Xaa is A or G or is absent
SRVVMNYHYKLXXXXXXXXXKYLVSIPSLKTPAXXPK

SEQ ID NO: 5129 - protein, 40 aa, Artificial Sequence
  GFR-binding peptide
  MOD_RES (2)..(4)..(36): Xaa is C or S
HXGXSRVVMNRHKRLIVNSSDDYYLVSTASLKTPAXTPKT

SEQ ID NO: 5130 - protein, 44 aa, Artificial Sequence
  GFR-binding peptide
  MOD_RES (2)..(4)..(38)..(39): Xaa is C or S
  MOD_RES (16)..(17)..(18)..(19)..(20): Xaa is A or G
  MOD_RES (21)..(22)..(23)..(24): Xaa is A or G or is absent
RXGXGEVVMDRYKKLXXXXXXXXXFYLMSIANLETPVXXAKPIK

SEQ ID NO: 5131 - protein, 42 aa, Artificial Sequence
  GFR-binding peptide
  MOD_RES (2)..(4)..(37)..(38): Xaa is C or S
  MOD_RES (15)..(16)..(17)..(18)..(19): Xaa is A or G
  MOD_RES (20)..(21)..(22)..(23): Xaa is A or G or is absent
SXKXSKVIMRYKKLXXXXXXXXXFYLISIANLDQSVXXPSAS

SEQ ID NO: 5132 - protein, 37 aa, Artificial Sequence
  GFR-binding peptide
  MOD_RES (32)..(33): Xaa is C or S
ARVVMNQYNKLIVNSSDDLYLVSIASLQTPAXXPKPV

SEQ ID NO: 5133 - protein, 37 aa, Artificial Sequence
  GFR-binding peptide
  MOD_RES (32)..(33): Xaa is C or S
SRVVMNRYKKLIVNSSDDFYLVSIANLKTPAXXPKPV

SEQ ID NO: 5134 - protein, 40 aa, Artificial Sequence
  GFR-binding peptide
  MOD_RES (34)..(35): Xaa is C or S
  MOD_RES (12)..(13)..(14)..(15)..(16): Xaa is A or G
  MOD_RES (17)..(18)..(19)..(20): Xaa is A or G or is absent
SRVVMNRYKKLXXXXXXXXXFYLVSIANLKTPAXXPKPVY

SEQ ID NO: 5135 - protein, 33 aa, Artificial Sequence
  GFR-binding peptide
  MOD_RES (1)..(1): Xaa is C or S
  MOD_RES (12)..(13)..(14)..(15)..(16): Xaa is A or G
  MOD_RES (17)..(18)..(19)..(20): Xaa is A or G or is absent
XSKVIMYHYKLXXXXXXXXXKYLISIPSLDQSV

SEQ ID NO: 5136 - protein, 43 aa, Artificial Sequence
  GFR-binding peptide
  MOD_RES (1)..(3)..(37)..(38): Xaa is C or S
  MOD_RES (15)..(16)..(17)..(18)..(19): Xaa is A or G
  MOD_RES (20)..(21)..(22)..(23): Xaa is A or G or is absent
XGXGEVVMDQYNKLXXXXXXXXXLYLMSIASLETPVXXAKPIK

SEQ ID NO: 5137 - protein, 32 aa, Artificial Sequence
  GFR-binding peptide
  MOD_RES (11)..(12)..(13)..(14)..(15): Xaa is A or G
  MOD_RES (16)..(17)..(18)..(19): Xaa is A or G or is absent
EVVMEQYNKLXXXXXXXXXLYLMSIASLETPV

SEQ ID NO: 5138 - protein, 37 aa, Artificial Sequence
  GFR-binding peptide
  MOD_RES (2)..(36): Xaa is C or S
  MOD_RES (14)..(15)..(16)..(17)..(18): Xaa is A or G
  MOD_RES (19)..(20)..(21)..(22): Xaa is A or G or is absent
GXSRVVMNRHKRLXXXXXXXXXYYLVSTASLKTPAXT

SEQ ID NO: 5139 - protein, 38 aa, Artificial Sequence
  GFR-binding peptide
  MOD_RES (2)..(34)..(35): Xaa is C or S
GXGEVVMERYKKLVVKDYEDFYLMSIANLETPVXXAKP

SEQ ID NO: 5140 - protein, 33 aa, Artificial Sequence
  GFR-binding peptide
  MOD_RES (12)..(13)..(14)..(15)..(16): Xaa is A or G
  MOD_RES (17)..(18)..(19)..(20): Xaa is A or G or is absent
ARVVMNRYKKLXXXXXXXXXFYLVSIANLQTPA

SEQ ID NO: 5141 - protein, 32 aa, Artificial Sequence
  GFR-binding peptide
  MOD_RES (1)..(1): Xaa is C or S
XAKVVMNRYKKLIVNNSSDFYLVSIANLKTPA

SEQ ID NO: 5142 - protein, 40 aa, Artificial Sequence
  GFR-binding peptide
  MOD_RES (2)..(4)..(38)..(39): Xaa is C or S
  MOD_RES (16)..(17)..(18)..(19)..(20): Xaa is A or G
  MOD_RES (21)..(22)..(23)..(24): Xaa is A or G or is absent
HXGXARVVMNQYNKLXXXXXXXXXLYLVSIASLQTPAXXP

SEQ ID NO: 5143 - protein, 37 aa, Artificial Sequence
  GFR-binding peptide
  MOD_RES (31)..(32): Xaa is C or S
SKVIMQYNKLIKPTKGILYLISIASLDQSVXXPSASA

SEQ ID NO: 5144 - protein, 32 aa, Artificial Sequence
  GFR-binding peptide
  MOD_RES (1)..(32): Xaa is C or S
XSRVIMYHYKLVKPKRGVKYLISIPSLAQPVX

SEQ ID NO: 5145 - protein, 42 aa, Artificial Sequence
  GFR-binding peptide
  MOD_RES (2)..(39): Xaa is C or S
KXALHDELTRHKRLFIPKKRVIEYYLVSTASLQVQTPRXQVN

SEQ ID NO: 5146 - protein, 40 aa, Artificial Sequence
  GFR-binding peptide
  MOD_RES (1)..(3)..(35)..(36): Xaa is C or S
XGXAKVVMNRHKRLIVNNSSDYYLVSTASLKTPAXXAKPV

SEQ ID NO: 5147 - protein, 39 aa, Artificial Sequence
  GFR-binding peptide
  MOD_RES (1)..(33)..(34): Xaa is C or S
XGEVVMDRYKKLVVKENEDFYLMSIANLETPVXXAKPIK

SEQ ID NO: 5148 - protein, 36 aa, Artificial Sequence
  GFR-binding peptide
  MOD_RES (2)..(4)..(35)..(36): Xaa is C or S
SXKXSRVIMRYKKLVKPKRGVFYLISIANLAQPVXX

SEQ ID NO: 5149 - protein, 37 aa, Artificial Sequence
  GFR-binding peptide
  MOD_RES (34)..(35): Xaa is C or S
  MOD_RES (12)..(13)..(14)..(15)..(16): Xaa is A or G
  MOD_RES (17)..(18)..(19)..(20): Xaa is A or G or is absent
ARVVMNQYNKLXXXXXXXXXLYLVSIASLQTPAXXPK

SEQ ID NO: 5150 - protein, 41 aa, Artificial Sequence
  GFR-binding peptide
  MOD_RES (1)..(3)..(37)..(38): Xaa is C or S
  MOD_RES (15)..(16)..(17)..(18)..(19): Xaa is A or G
  MOD_RES (20)..(21)..(22)..(23): Xaa is A or G or is absent
XGXSRVVMNQYNKLXXXXXXXXXLYLVSIASLKTPAXXPKP

SEQ ID NO: 5151 - protein, 41 aa, Artificial Sequence
  GFR-binding peptide
  MOD_RES (2)..(36)..(37): Xaa is C or S
  MOD_RES (14)..(15)..(16)..(17)..(18): Xaa is A or G
  MOD_RES (19)..(20)..(21)..(22): Xaa is A or G or is absent
GXSRVVMNQYNKLXXXXXXXXXLYLVSIASLKTPAXXPKPV

SEQ ID NO: 5152 - protein, 31 aa, Artificial Sequence
  GFR-binding peptide
  MOD_RES (31)..(31): Xaa is C or S
SKVVMQYNKLVKPTRGVLYLISIASLDQPVX

SEQ ID NO: 5153 - protein, 38 aa, Artificial Sequence
  GFR-binding peptide
  MOD_RES (32)..(33): Xaa is C or S
AKVVMNQYNKLIVNNSSDLYLVSIASLKTPAXXAKPVA

SEQ ID NO: 5154 - protein, 36 aa, Artificial Sequence
  GFR-binding peptide
  MOD_RES (2)..(34)..(35): Xaa is C or S
GXGEVVMDRYKKLVVKENEDFYLMSIANLETPVXXA

SEQ ID NO: 5155 - protein, 36 aa, Artificial Sequence
  GFR-binding peptide
  MOD_RES (1)..(33)..(34): Xaa is C or S
XGEVVMERHKRLVVKDYEDYYLMSTASLETPVXXAK

SEQ ID NO: 5156 - protein, 39 aa, Artificial Sequence
  GFR-binding peptide
  MOD_RES (33)..(33): Xaa is C or S
  MOD_RES (11)..(12)..(13)..(14)..(15): Xaa is A or G
  MOD_RES (16)..(17)..(18)..(19): Xaa is A or G or is absent
RVVMNRYKKLXXXXXXXXXFYLVSIANLKTPAXTPKTVH

SEQ ID NO: 5157 - protein, 38 aa, Artificial Sequence
  GFR-binding peptide
  MOD_RES (2)..(4)..(36)..(37): Xaa is C or S
RXGXGEVVMDQYNKLVVKENEDLYLMSIASLETPVXXA

SEQ ID NO: 5158 - protein, 35 aa, Artificial Sequence
  GFR-binding peptide
  MOD_RES (1)..(3)..(35): Xaa is C or S
XGXARVVMNYHYKLIVNSSDDKYLVSIPSLQTPAX

SEQ ID NO: 5159 - protein, 34 aa, Artificial Sequence
  GFR-binding peptide
  MOD_RES (2)..(34): Xaa is C or S
GXSRVVMNRYKKLIVNSSDDFYLVSIANLKTPAX

SEQ ID NO: 5160 - protein, 42 aa, Artificial Sequence
  GFR-binding peptide
  MOD_RES (2)..(36): Xaa is C or S
  MOD_RES (14)..(15)..(16)..(17)..(18): Xaa is A or G
  MOD_RES (19)..(20)..(21)..(22): Xaa is A or G or is absent
GXSRVVMNQYNKLXXXXXXXXXLYLVSIASLKTPAXTPKTVH

SEQ ID NO: 5161 - protein, 35 aa, Artificial Sequence
  GFR-binding peptide
  MOD_RES (2)..(4): Xaa is C or S
HXGXSRVVMNYHYKLIVNSSDDKYLVSIPSLKTPA

SEQ ID NO: 5162 - protein, 41 aa, Artificial Sequence
  GFR-binding peptide
  MOD_RES (2)..(4)..(36): Xaa is C or S
HXGXSRVVMNYHYKLIVNSSDDKYLVSIPSLKTPAXTPKTV

SEQ ID NO: 5163 - protein, 40 aa, Artificial Sequence
  GFR-binding peptide
  MOD_RES (2)..(39): Xaa is C or S
KXALHDELTRYKKLFIPKKRVIEFYLVSIANLQVQTPRXQ

SEQ ID NO: 5164 - protein, 38 aa, Artificial Sequence
  GFR-binding peptide
  MOD_RES (33)..(34): Xaa is C or S
  MOD_RES (11)..(12)..(13)..(14)..(15): Xaa is A or G
  MOD_RES (16)..(17)..(18)..(19): Xaa is A or G or is absent
RVVMNQYNKLXXXXXXXXXLYLVSIASLQTPAXXPKPV

SEQ ID NO: 5165 - protein, 43 aa, Artificial Sequence
  GFR-binding peptide
  MOD_RES (2)..(4)..(38): Xaa is C or S
  MOD_RES (16)..(17)..(18)..(19)..(20): Xaa is A or G
  MOD_RES (21)..(22)..(23)..(24): Xaa is A or G or is absent
HXGXSRVVMNQYNKLXXXXXXXXXLYLVSIASLKTPAXTPKTV

SEQ ID NO: 5166 - protein, 36 aa, Artificial Sequence
  GFR-binding peptide
  MOD_RES (1)..(33)..(34): Xaa is C or S
XGEVVMDRHKRLVVKENEDYYLMSTASLETPVXXAK

SEQ ID NO: 5167 - protein, 41 aa, Artificial Sequence
  GFR-binding peptide
  MOD_RES (2)..(4)..(38)..(39): Xaa is C or S
  MOD_RES (16)..(17)..(18)..(19)..(20): Xaa is A or G
  MOD_RES (21)..(22)..(23)..(24): Xaa is A or G or is absent
RXGXGEVVMDQYNKLXXXXXXXXXLYLMSIASLETPVXXAK

SEQ ID NO: 5168 - protein, 37 aa, Artificial Sequence
  GFR-binding peptide
  MOD_RES (34)..(35): Xaa is C or S
  MOD_RES (12)..(13)..(14)..(15)..(16): Xaa is A or G
  MOD_RES (17)..(18)..(19)..(20): Xaa is A or G or is absent
GEVVMDRYKKLXXXXXXXXXFYLMSIANLETPVXXAK

SEQ ID NO: 5169 - protein, 36 aa, Artificial Sequence
  GFR-binding peptide
  MOD_RES (1)..(35)..(36): Xaa is C or S
  MOD_RES (13)..(14)..(15)..(16)..(17): Xaa is A or G
  MOD_RES (18)..(19)..(20)..(21): Xaa is A or G or is absent
XGEVVMDYHYKLXXXXXXXXXKYLMSIPSLETPVXX

SEQ ID NO: 5170 - protein, 37 aa, Artificial Sequence
  GFR-binding peptide
  MOD_RES (1)..(32)..(33): Xaa is C or S
XSKVIMRHKRLIKPTKGIYYLISTASLDQSVXXPSAS

SEQ ID NO: 5171 - protein, 32 aa, Artificial Sequence
  GFR-binding peptide
  MOD_RES (31)..(32): Xaa is C or S
SRVIMRYKKLVKPKRGVFYLISIANLAQPVXX

SEQ ID NO: 5172 - protein, 42 aa, Artificial Sequence
  GFR-binding peptide
  MOD_RES (1)..(3)..(36)..(37): Xaa is C or S
  MOD_RES (14)..(15)..(16)..(17)..(18): Xaa is A or G
  MOD_RES (19)..(20)..(21)..(22): Xaa is A or G or is absent
XKXSKVIMRHKRLXXXXXXXXXYYLISTASLDQSVXXPSASA

SEQ ID NO: 5173 - protein, 30 aa, Artificial Sequence
  GFR-binding peptide
RVVMNQYNKLIVNSSDDLYLVSIASLQTPA

SEQ ID NO: 5174 - protein, 35 aa, Artificial Sequence
  GFR-binding peptide
  MOD_RES (2)..(34)..(35): Xaa is C or S
GXGEVVMDYHYKLVVKENEDKYLMSIPSLETPVXX

SEQ ID NO: 5175 - protein, 34 aa, Artificial Sequence
  GFR-binding peptide
  MOD_RES (1)..(3)..(34): Xaa is C or S
XKXSKVVMYHYKLVKPTRGVKYLISIPSLDQPVX

SEQ ID NO: 5176 - protein, 38 aa, Artificial Sequence
  GFR-binding peptide
  MOD_RES (1)..(34)..(35): Xaa is C or S
XEAVSMGERHKRLTPVGMDDYYLVSTASLKTPVXXAKG

SEQ ID NO: 5177 - protein, 34 aa, Artificial Sequence
  GFR-binding peptide
  MOD_RES (33)..(34): Xaa is C or S
  MOD_RES (11)..(12)..(13)..(14)..(15): Xaa is A or G
  MOD_RES (16)..(17)..(18)..(19): Xaa is A or G or is absent
EVVMERYKKLXXXXXXXXXFYLMSIANLETPVXX

SEQ ID NO: 5178 - protein, 32 aa, Artificial Sequence
  GFR-binding peptide
  MOD_RES (1)..(1): Xaa is C or S
XGEVVMERHKRLVVKDYEDYYLMSTASLETPV

SEQ ID NO: 5179 - protein, 37 aa, Artificial Sequence
  GFR-binding peptide
  MOD_RES (33)..(34): Xaa is C or S
  MOD_RES (11)..(12)..(13)..(14)..(15): Xaa is A or G
  MOD_RES (16)..(17)..(18)..(19): Xaa is A or G or is absent
SKVVMYHYKLXXXXXXXXXKYLISIPSLDQPVXXPSA

SEQ ID NO: 5180 - protein, 33 aa, Artificial Sequence
  GFR-binding peptide
  MOD_RES (12)..(13)..(14)..(15)..(16): Xaa is A or G
  MOD_RES (17)..(18)..(19)..(20): Xaa is A or G or is absent
GEVVMDRYKKLXXXXXXXXXFYLMSIANLETPV

SEQ ID NO: 5181 - protein, 40 aa, Artificial Sequence
  GFR-binding peptide
  MOD_RES (2)..(4): Xaa is C or S
EXKXALHDELTRYKKLFIPKKRVIEFYLVSIANLQVQTPR

SEQ ID NO: 5182 - protein, 38 aa, Artificial Sequence
  GFR-binding peptide
  MOD_RES (1)..(32)..(33): Xaa is C or S
XSKVVMYHYKLVKPTRGVKYLISIPSLDQPVXXPSASA

SEQ ID NO: 5183 - protein, 35 aa, Artificial Sequence
  GFR-binding peptide
  MOD_RES (1)..(35): Xaa is C or S
  MOD_RES (13)..(14)..(15)..(16)..(17): Xaa is A or G
  MOD_RES (18)..(19)..(20)..(21): Xaa is A or G or is absent
XGEVVMDQYNKLXXXXXXXXXLYLMSIASLETPVX

SEQ ID NO: 5184 - protein, 35 aa, Artificial Sequence
  GFR-binding peptide
  MOD_RES (1)..(34)..(35): Xaa is C or S
XEAVSMGEYHYKLTPVGMDDKYLVSIPSLKTPVXX

SEQ ID NO: 5185 - protein, 36 aa, Artificial Sequence
  GFR-binding peptide
  MOD_RES (2)..(33)..(34): Xaa is C or S
KXSKVVMRYKKLVKPTRGVFYLISIANLDQPVXXPS

SEQ ID NO: 5186 - protein, 38 aa, Artificial Sequence
  GFR-binding peptide
  MOD_RES (1)..(35)..(36): Xaa is C or S
  MOD_RES (13)..(14)..(15)..(16)..(17): Xaa is A or G
  MOD_RES (18)..(19)..(20)..(21): Xaa is A or G or is absent
XARVVMNYHYKLXXXXXXXXXKYLVSIPSLQTPAXXPK

SEQ ID NO: 5187 - protein, 37 aa, Artificial Sequence
  GFR-binding peptide
  MOD_RES (1)..(32)..(33): Xaa is C or S
XSKVVMYHYKLVKPTRGVKYLISIPSLDQPVXXPSAS

SEQ ID NO: 5188 - protein, 32 aa, Artificial Sequence
  GFR-binding peptide
EAVSMGEQYNKLTPVGMDDLYLVSIASLKTPV

SEQ ID NO: 5189 - protein, 44 aa, Artificial Sequence
  GFR-binding peptide
  MOD_RES (2)..(4)..(38)..(39): Xaa is C or S
  MOD_RES (16)..(17)..(18)..(19)..(20): Xaa is A or G
  MOD_RES (21)..(22)..(23)..(24): Xaa is A or G or is absent
HXGXARVVMNYHYKLXXXXXXXXXKYLVSIPSLQTPAXXPKPVT

SEQ ID NO: 5190 - protein, 40 aa, Artificial Sequence
  GFR-binding peptide
  MOD_RES (1)..(3)..(37)..(38): Xaa is C or S
  MOD_RES (15)..(16)..(17)..(18)..(19): Xaa is A or G
  MOD_RES (20)..(21)..(22)..(23): Xaa is A or G or is absent
XGXGEVVMDQYNKLXXXXXXXXXLYLMSIASLETPVXXAK

SEQ ID NO: 5191 - protein, 38 aa, Artificial Sequence
  GFR-binding peptide
  MOD_RES (1)..(38): Xaa is C or S
XALHDELTQYNKLFIPKKRVIELYLVSIASLQVQTPRX

SEQ ID NO: 5192 - protein, 35 aa, Artificial Sequence
  GFR-binding peptide
  MOD_RES (1)..(3)..(35): Xaa is C or S
XGXAKVVMNQYNKLIVNNSSDLYLVSIASLKTPAX

SEQ ID NO: 5193 - protein, 33 aa, Artificial Sequence
  GFR-binding peptide
  MOD_RES (33)..(33): Xaa is C or S
  MOD_RES (11)..(12)..(13)..(14)..(15): Xaa is A or G
  MOD_RES (16)..(17)..(18)..(19): Xaa is A or G or is absent
RVVMNQYNKLXXXXXXXXXLYLVSIASLQTPAX

SEQ ID NO: 5194 - protein, 42 aa, Artificial Sequence
  GFR-binding peptide
  MOD_RES (2)..(4)..(38)..(39): Xaa is C or S
  MOD_RES (16)..(17)..(18)..(19)..(20): Xaa is A or G
  MOD_RES (21)..(22)..(23)..(24): Xaa is A or G or is absent
RXGXGEVVMEYHYKLXXXXXXXXXKYLMSIPSLETPVXXAKP

SEQ ID NO: 5195 - protein, 35 aa, Artificial Sequence
  GFR-binding peptide
  MOD_RES (1)..(32)..(33): Xaa is C or S
XSKVVMRYKKLVKPTRGVFYLISIANLDQPVXXPS

SEQ ID NO: 5196 - protein, 38 aa, Artificial Sequence
  GFR-binding peptide
  MOD_RES (1)..(3)..(35)..(36): Xaa is C or S
XGXSRVVMNRHKRLIVNSSDDYYLVSTASLKTPAXXPK

SEQ ID NO: 5197 - protein, 39 aa, Artificial Sequence
  GFR-binding peptide
  MOD_RES (1)..(3)..(37)..(38): Xaa is C or S
  MOD_RES (15)..(16)..(17)..(18)..(19): Xaa is A or G
  MOD_RES (20)..(21)..(22)..(23): Xaa is A or G or is absent
XGXAKVVMNRYKKLXXXXXXXXXFYLVSIANLKTPAXXA

SEQ ID NO: 5198 - protein, 36 aa, Artificial Sequence
  GFR-binding peptide
  MOD_RES (32)..(33): Xaa is C or S
SRVVMNYHYKLIVNSSDDKYLVSIPSLKTPAXXPKP

SEQ ID NO: 5199 - protein, 41 aa, Artificial Sequence
  GFR-binding peptide
  MOD_RES (1)..(3)..(35): Xaa is C or S
XGXSRVVMNYHYKLIVNSSDDKYLVSIPSLKTPAXTPKTVH

SEQ ID NO: 5200 - protein, 38 aa, Artificial Sequence
  GFR-binding peptide
  MOD_RES (1)..(33)..(34): Xaa is C or S
XGEVVMDYHYKLVVKENEDKYLMSIPSLETPVXXAKPI

SEQ ID NO: 5201 - protein, 36 aa, Artificial Sequence
  GFR-binding peptide
  MOD_RES (33)..(34): Xaa is C or S
EAVSMGERYKKLTPVGMDDFYLVSIANLKTPVXXAK

SEQ ID NO: 5202 - protein, 35 aa, Artificial Sequence
  GFR-binding peptide
  MOD_RES (1)..(35): Xaa is C or S
  MOD_RES (13)..(14)..(15)..(16)..(17): Xaa is A or G
  MOD_RES (18)..(19)..(20)..(21): Xaa is A or G or is absent
XARVVMNQYNKLXXXXXXXXXLYLVSIASLQTPAX

SEQ ID NO: 5203 - protein, 36 aa, Artificial Sequence
  GFR-binding peptide
  MOD_RES (1)..(36): Xaa is C or S
  MOD_RES (14)..(15)..(16)..(17)..(18): Xaa is A or G
  MOD_RES (19)..(20)..(21)..(22): Xaa is A or G or is absent
XEAVSMGERHKRLXXXXXXXXXYYLVSTASLKTPVX

SEQ ID NO: 5204 - protein, 44 aa, Artificial Sequence
  GFR-binding peptide
  MOD_RES (1)..(3)..(40): Xaa is C or S
  MOD_RES (16)..(17)..(18)..(19)..(20): Xaa is A or G
  MOD_RES (21)..(22)..(23)..(24): Xaa is A or G or is absent
XKXALHDELTRYKKLXXXXXXXXXFYLVSIANLQVQTPRXQVNR

SEQ ID NO: 5205 - protein, 37 aa, Artificial Sequence
  GFR-binding peptide
  MOD_RES (2)..(34)..(35): Xaa is C or S
GXGEVVMDRHKRLVVKENEDYYLMSTASLETPVXXAK

SEQ ID NO: 5206 - protein, 39 aa, Artificial Sequence
  GFR-binding peptide
  MOD_RES (33)..(34): Xaa is C or S
  MOD_RES (11)..(12)..(13)..(14)..(15): Xaa is A or G
  MOD_RES (16)..(17)..(18)..(19): Xaa is A or G or is absent
KVVMNQYNKLXXXXXXXXXLYLVSIASLKTPAXXAKPVA

SEQ ID NO: 5207 - protein, 31 aa, Artificial Sequence
  GFR-binding peptide
  MOD_RES (1)..(1): Xaa is C or S
XSKVIMYHYKLIKPTKGIKYLISIPSLDQSV

SEQ ID NO: 5208 - protein, 35 aa, Artificial Sequence
  GFR-binding peptide
  MOD_RES (1)..(34)..(35): Xaa is C or S
  MOD_RES (12)..(13)..(14)..(15)..(16): Xaa is A or G
  MOD_RES (17)..(18)..(19)..(20): Xaa is A or G or is absent
XSRVIMQYNKLXXXXXXXXXLYLISIASLAQPVXX

SEQ ID NO: 5209 - protein, 39 aa, Artificial Sequence
  GFR-binding peptide
  MOD_RES (37)..(37): Xaa is C or S
ALHDELTQYNKLFIPKKRVIELYLVSIASLQVQTPRXQV

SEQ ID NO: 5210 - protein, 39 aa, Artificial Sequence
  GFR-binding peptide
  MOD_RES (37)..(37): Xaa is C or S
ALHDELTRHKRLFIPKKRVIEYYLVSTASLQVQTPRXQV

SEQ ID NO: 5211 - protein, 39 aa, Artificial Sequence
  GFR-binding peptide
  MOD_RES (36)..(36): Xaa is C or S
LHDELTRHKRLFIPKKRVIEYYLVSTASLQVQTPRXQVN

SEQ ID NO: 5212 - protein, 40 aa, Artificial Sequence
  GFR-binding peptide
  MOD_RES (34)..(35): Xaa is C or S
  MOD_RES (12)..(13)..(14)..(15)..(16): Xaa is A or G
  MOD_RES (17)..(18)..(19)..(20): Xaa is A or G or is absent
GEVVMDYHYKLXXXXXXXXXKYLMSIPSLETPVXXAKPIK

SEQ ID NO: 5213 - protein, 34 aa, Artificial Sequence
  GFR-binding peptide
  MOD_RES (1)..(3): Xaa is C or S
XGXGEVVMDQYNKLVVKENEDLYLMSIASLETPV

SEQ ID NO: 5214 - protein, 32 aa, Artificial Sequence
  GFR-binding peptide
  MOD_RES (31)..(32): Xaa is C or S
SRVIMQYNKLVKPKRGVLYLISIASLAQPVXX

SEQ ID NO: 5215 - protein, 35 aa, Artificial Sequence
  GFR-binding peptide
  MOD_RES (34)..(34): Xaa is C or S
  MOD_RES (12)..(13)..(14)..(15)..(16): Xaa is A or G
  MOD_RES (17)..(18)..(19)..(20): Xaa is A or G or is absent
SRVVMNYHYKLXXXXXXXXXKYLVSIPSLKTPAXT

SEQ ID NO: 5216 - protein, 41 aa, Artificial Sequence
  GFR-binding peptide
  MOD_RES (2)..(37)..(38): Xaa is C or S
  MOD_RES (15)..(16)..(17)..(18)..(19): Xaa is A or G
  MOD_RES (20)..(21)..(22)..(23): Xaa is A or G or is absent
GXEAVSMGEQYNKLXXXXXXXXXLYLVSIASLKTPVXXAKG

SEQ ID NO: 5217 - protein, 37 aa, Artificial Sequence
  GFR-binding peptide
  MOD_RES (1)..(3)..(36)..(37): Xaa is C or S
  MOD_RES (14)..(15)..(16)..(17)..(18): Xaa is A or G
  MOD_RES (19)..(20)..(21)..(22): Xaa is A or G or is absent
XKXSKVVMRYKKLXXXXXXXXXFYLISIANLDQPVXX

SEQ ID NO: 5218 - protein, 40 aa, Artificial Sequence
  GFR-binding peptide
  MOD_RES (1)..(3)..(35)..(36): Xaa is C or S
XGXAKVVMNQYNKLIVNNSSDLYLVSIASLKTPAXXAKPV

SEQ ID NO: 5219 - protein, 35 aa, Artificial Sequence
  GFR-binding peptide
  MOD_RES (2)..(34)..(35): Xaa is C or S
GXAKVVMNRYKKLIVNNSSDFYLVSIANLKTPAXX

SEQ ID NO: 5220 - protein, 40 aa, Artificial Sequence
  GFR-binding peptide
  MOD_RES (2)..(4)..(35)..(36): Xaa is C or S
SXKXSRVIMQYNKLVKPKRGVLYLISIASLAQPVXXPAAS

SEQ ID NO: 5221 - protein, 37 aa, Artificial Sequence
  GFR-binding peptide
  MOD_RES (2)..(35)..(36): Xaa is C or S
  MOD_RES (13)..(14)..(15)..(16)..(17): Xaa is A or G
  MOD_RES (18)..(19)..(20)..(21): Xaa is A or G or is absent
KXSKVIMYHYKLXXXXXXXXXKYLISIPSLDQSVXXP

SEQ ID NO: 5222 - protein, 40 aa, Artificial Sequence
  GFR-binding peptide
  MOD_RES (1)..(35)..(36): Xaa is C or S
  MOD_RES (13)..(14)..(15)..(16)..(17): Xaa is A or G
  MOD_RES (18)..(19)..(20)..(21): Xaa is A or G or is absent
XARVVMNRHKRLXXXXXXXXXYYLVSTASLQTPAXXPKPV

SEQ ID NO: 5223 - protein, 37 aa, Artificial Sequence
  GFR-binding peptide
  MOD_RES (31)..(32): Xaa is C or S
SKVIMRYKKLIKPTKGIFYLISIANLDQSVXXPSASA

SEQ ID NO: 5224 - protein, 42 aa, Artificial Sequence
  GFR-binding peptide
  MOD_RES (2)..(37)..(38): Xaa is C or S
  MOD_RES (15)..(16)..(17)..(18)..(19): Xaa is A or G
  MOD_RES (20)..(21)..(22)..(23): Xaa is A or G or is absent
GXEAVSMGERYKKLXXXXXXXXXFYLVSIANLKTPVXXAKGV

SEQ ID NO: 5225 - protein, 34 aa, Artificial Sequence
  GFR-binding peptide
  MOD_RES (33)..(33): Xaa is C or S
  MOD_RES (11)..(12)..(13)..(14)..(15): Xaa is A or G
  MOD_RES (16)..(17)..(18)..(19): Xaa is A or G or is absent
RVVMNRYKKLXXXXXXXXXFYLVSIANLKTPAXT

SEQ ID NO: 5226 - protein, 41 aa, Artificial Sequence
  GFR-binding peptide
  MOD_RES (2)..(4)..(35)..(36): Xaa is C or S
SXKXSRVIMQYNKLVKPKRGVLYLISIASLAQPVXXPAASA

SEQ ID NO: 5227 - protein, 41 aa, Artificial Sequence
  GFR-binding peptide
  MOD_RES (1)..(36)..(37): Xaa is C or S
  MOD_RES (14)..(15)..(16)..(17)..(18): Xaa is A or G
  MOD_RES (19)..(20)..(21)..(22): Xaa is A or G or is absent
XEAVSMGEYHYKLXXXXXXXXXKYLVSIPSLKTPVXXAKGV

SEQ ID NO: 5228 - protein, 38 aa, Artificial Sequence
  GFR-binding peptide
  MOD_RES (2)..(37)..(38): Xaa is C or S
  MOD_RES (15)..(16)..(17)..(18)..(19): Xaa is A or G
  MOD_RES (20)..(21)..(22)..(23): Xaa is A or G or is absent
GXEAVSMGERHKRLXXXXXXXXXYYLVSTASLKTPVXX

SEQ ID NO: 5229 - protein, 35 aa, Artificial Sequence
  GFR-binding peptide
  MOD_RES (33)..(34): Xaa is C or S
  MOD_RES (11)..(12)..(13)..(14)..(15): Xaa is A or G
  MOD_RES (16)..(17)..(18)..(19): Xaa is A or G or is absent
SRVIMQYNKLXXXXXXXXXLYLISIASLAQPVXXP

SEQ ID NO: 5230 - protein, 39 aa, Artificial Sequence
  GFR-binding peptide
  MOD_RES (2)..(4)..(38)..(39): Xaa is C or S
  MOD_RES (16)..(17)..(18)..(19)..(20): Xaa is A or G
  MOD_RES (21)..(22)..(23)..(24): Xaa is A or G or is absent
HXGXARVVMNQYNKLXXXXXXXXXLYLVSIASLQTPAXX

SEQ ID NO: 5231 - protein, 34 aa, Artificial Sequence
  GFR-binding peptide
  MOD_RES (1)..(1): Xaa is C or S
  MOD_RES (13)..(14)..(15)..(16)..(17): Xaa is A or G
  MOD_RES (18)..(19)..(20)..(21): Xaa is A or G or is absent
XARVVMNYHYKLXXXXXXXXXKYLVSIPSLQTPA

SEQ ID NO: 5232 - protein, 35 aa, Artificial Sequence
  GFR-binding peptide
  MOD_RES (33)..(34): Xaa is C or S
EAVSMGEQYNKLTPVGMDDLYLVSIASLKTPVXXA

SEQ ID NO: 5233 - protein, 32 aa, Artificial Sequence
  GFR-binding peptide
  MOD_RES (31)..(32): Xaa is C or S
KVVMNRHKRLIVNNSSDYYLVSTASLKTPAXX

SEQ ID NO: 5234 - protein, 36 aa, Artificial Sequence
  GFR-binding peptide
  MOD_RES (1)..(32)..(33): Xaa is C or S
XSKVVMQYNKLVKPTRGVLYLISIASLDQPVXXPSA

SEQ ID NO: 5235 - protein, 35 aa, Artificial Sequence
  GFR-binding peptide
  MOD_RES (2)..(34)..(35): Xaa is C or S
GXGEVVMERHKRLVVKDYEDYYLMSTASLETPVXX

SEQ ID NO: 5236 - protein, 35 aa, Artificial Sequence
  GFR-binding peptide
  MOD_RES (2)..(4)..(35): Xaa is C or S
SXKXSKVVMYHYKLVKPTRGVKYLISIPSLDQPVX

SEQ ID NO: 5237 - protein, 31 aa, Artificial Sequence
  GFR-binding peptide
  MOD_RES (31)..(31): Xaa is C or S
RVVMNQYNKLIVNSSDDLYLVSIASLQTPAX

SEQ ID NO: 5238 - protein, 40 aa, Artificial Sequence
  GFR-binding peptide
  MOD_RES (2)..(39): Xaa is C or S
  MOD_RES (15)..(16)..(17)..(18)..(19): Xaa is A or G
  MOD_RES (20)..(21)..(22)..(23): Xaa is A or G or is absent
KXALHDELTRHKRLXXXXXXXXXYYLVSTASLQVQTPRXQ

SEQ ID NO: 5239 - protein, 42 aa, Artificial Sequence
  GFR-binding peptide
  MOD_RES (2)..(4)..(37)..(38): Xaa is C or S
  MOD_RES (15)..(16)..(17)..(18)..(19): Xaa is A or G
  MOD_RES (20)..(21)..(22)..(23): Xaa is A or G or is absent
SXKXSRVIMQYNKLXXXXXXXXXLYLISIASLAQPVXXPAAS

SEQ ID NO: 5240 - protein, 34 aa, Artificial Sequence
  GFR-binding peptide
  MOD_RES (1)..(3)..(34): Xaa is C or S
XKXSRVIMYHYKLVKPKRGVKYLISIPSLAQPVX

SEQ ID NO: 5241 - protein, 41 aa, Artificial Sequence
  GFR-binding peptide
  MOD_RES (2)..(35)..(36): Xaa is C or S
  MOD_RES (13)..(14)..(15)..(16)..(17): Xaa is A or G
  MOD_RES (18)..(19)..(20)..(21): Xaa is A or G or is absent
KXSKVIMQYNKLXXXXXXXXXLYLISIASLDQSVXXPSASA

SEQ ID NO: 5242 - protein, 41 aa, Artificial Sequence
  GFR-binding peptide
  MOD_RES (2)..(35)..(36): Xaa is C or S
  MOD_RES (13)..(14)..(15)..(16)..(17): Xaa is A or G
  MOD_RES (18)..(19)..(20)..(21): Xaa is A or G or is absent
KXSKVIMRYKKLXXXXXXXXXFYLISIANLDQSVXXPSASA

SEQ ID NO: 5243 - protein, 38 aa, Artificial Sequence
  GFR-binding peptide
  MOD_RES (33)..(34): Xaa is C or S
  MOD_RES (11)..(12)..(13)..(14)..(15): Xaa is A or G
  MOD_RES (16)..(17)..(18)..(19): Xaa is A or G or is absent
KVVMNYHYKLXXXXXXXXXKYLVSIPSLKTPAXXAKPV

SEQ ID NO: 5244 - protein, 39 aa, Artificial Sequence
  GFR-binding peptide
  MOD_RES (1)..(3)..(37)..(38): Xaa is C or S
  MOD_RES (15)..(16)..(17)..(18)..(19): Xaa is A or G
  MOD_RES (20)..(21)..(22)..(23): Xaa is A or G or is absent
XGXSRVVMNQYNKLXXXXXXXXXLYLVSIASLKTPAXXP

SEQ ID NO: 5245 - protein, 35 aa, Artificial Sequence
  GFR-binding peptide
  MOD_RES (2)..(4): Xaa is C or S
HXGXSRVVMNQYNKLIVNSSDDLYLVSIASLKTPA

SEQ ID NO: 5246 - protein, 36 aa, Artificial Sequence
  GFR-binding peptide
  MOD_RES (2)..(33)..(34): Xaa is C or S
KXSRVIMRHKRLVKPKRGVYYLISTASLAQPVXXPA

SEQ ID NO: 5247 - protein, 40 aa, Artificial Sequence
  GFR-binding peptide
  MOD_RES (2)..(4)..(36): Xaa is C or S
HXGXSRVVMNRYKKLIVNSSDDFYLVSIANLKTPAXTPKT

SEQ ID NO: 5248 - protein, 35 aa, Artificial Sequence
  GFR-binding peptide
  MOD_RES (31)..(32): Xaa is C or S
RVVMNRHKRLIVNSSDDYYLVSTASLKTPAXXPKP

SEQ ID NO: 5249 - protein, 39 aa, Artificial Sequence
  GFR-binding peptide
  MOD_RES (2)..(4)..(37)..(38): Xaa is C or S
RXGXEAVSMGERYKKLTPVGMDDFYLVSIANLKTPVXXA

SEQ ID NO: 5250 - protein, 38 aa, Artificial Sequence
  GFR-binding peptide
  MOD_RES (1)..(3)..(35)..(36): Xaa is C or S
XGXGEVVMDRYKKLVVKENEDFYLMSIANLETPVXXAK

SEQ ID NO: 5251 - protein, 35 aa, Artificial Sequence
  GFR-binding peptide
  MOD_RES (1)..(34)..(35): Xaa is C or S
  MOD_RES (12)..(13)..(14)..(15)..(16): Xaa is A or G
  MOD_RES (17)..(18)..(19)..(20): Xaa is A or G or is absent
XSRVIMRHKRLXXXXXXXXXYYLISTASLAQPVXX

SEQ ID NO: 5252 - protein, 45 aa, Artificial Sequence
  GFR-binding peptide
  MOD_RES (2)..(4)..(39)..(40): Xaa is C or S
  MOD_RES (17)..(18)..(19)..(20)..(21): Xaa is A or G
  MOD_RES (22)..(23)..(24)..(25): Xaa is A or G or is absent
RXGXEAVSMGERYKKLXXXXXXXXXFYLVSIANLKTPVXXAKGVK

SEQ ID NO: 5253 - protein, 37 aa, Artificial Sequence
  GFR-binding peptide
  MOD_RES (1)..(34)..(35): Xaa is C or S
XEAVSMGERYKKLTPVGMDDFYLVSIANLKTPVXXAK

SEQ ID NO: 5254 - protein, 36 aa, Artificial Sequence
  GFR-binding peptide
  MOD_RES (2)..(4)..(36): Xaa is C or S
RXGXGEVVMEYHYKLVVKDYEDKYLMSIPSLETPVX

SEQ ID NO: 5255 - protein, 33 aa, Artificial Sequence
  GFR-binding peptide
  MOD_RES (33)..(33): Xaa is C or S
  MOD_RES (11)..(12)..(13)..(14)..(15): Xaa is A or G
  MOD_RES (16)..(17)..(18)..(19): Xaa is A or G or is absent
EVVMDRYKKLXXXXXXXXXFYLMSIANLETPVX

SEQ ID NO: 5256 - protein, 40 aa, Artificial Sequence
  GFR-binding peptide
  MOD_RES (1)..(3)..(35)..(36): Xaa is C or S
XGXGEVVMERYKKLVVKDYEDFYLMSIANLETPVXXAKPI

SEQ ID NO: 5257 - protein, 39 aa, Artificial Sequence
  GFR-binding peptide
  MOD_RES (2)..(33)..(34): Xaa is C or S
KXSKVIMQYNKLIKPTKGILYLISIASLDQSVXXPSASA

SEQ ID NO: 5258 - protein, 40 aa, Artificial Sequence
  GFR-binding peptide
  MOD_RES (2)..(36)..(37): Xaa is C or S
  MOD_RES (14)..(15)..(16)..(17)..(18): Xaa is A or G
  MOD_RES (19)..(20)..(21)..(22): Xaa is A or G or is absent
GXARVVMNQYNKLXXXXXXXXXLYLVSIASLQTPAXXPKP

SEQ ID NO: 5259 - protein, 43 aa, Artificial Sequence
  GFR-binding peptide
  MOD_RES (1)..(3)..(37)..(38): Xaa is C or S
  MOD_RES (15)..(16)..(17)..(18)..(19): Xaa is A or G
  MOD_RES (20)..(21)..(22)..(23): Xaa is A or G or is absent
XGXAKVVMNRHKRLXXXXXXXXXYYLVSTASLKTPAXXAKPVA

SEQ ID NO: 5260 - protein, 42 aa, Artificial Sequence
  GFR-binding peptide
  MOD_RES (2)..(4)..(38)..(39): Xaa is C or S
  MOD_RES (16)..(17)..(18)..(19)..(20): Xaa is A or G
  MOD_RES (21)..(22)..(23)..(24): Xaa is A or G or is absent
HXGXAKVVMNRHKRLXXXXXXXXXYYLVSTASLKTPAXXAKP

SEQ ID NO: 5261 - protein, 39 aa, Artificial Sequence
  GFR-binding peptide
  MOD_RES (1)..(3)..(37)..(38): Xaa is C or S
  MOD_RES (15)..(16)..(17)..(18)..(19): Xaa is A or G
  MOD_RES (20)..(21)..(22)..(23): Xaa is A or G or is absent
XGXARVVMNRHKRLXXXXXXXXXYYLVSTASLQTPAXXP

SEQ ID NO: 5262 - protein, 36 aa, Artificial Sequence
  GFR-binding peptide
  MOD_RES (35)..(35): Xaa is C or S
HDELTQYNKLFIPKKRVIELYLVSIASLQVQTPRXQ

SEQ ID NO: 5263 - protein, 32 aa, Artificial Sequence
  GFR-binding peptide
  MOD_RES (11)..(12)..(13)..(14)..(15): Xaa is A or G
  MOD_RES (16)..(17)..(18)..(19): Xaa is A or G or is absent
SKVVMYHYKLXXXXXXXXXKYLISIPSLDQPV

SEQ ID NO: 5264 - protein, 32 aa, Artificial Sequence
  GFR-binding peptide
  MOD_RES (2)..(2): Xaa is C or S
KXSKVVMYHYKLVKPTRGVKYLISIPSLDQPV

SEQ ID NO: 5265 - protein, 39 aa, Artificial Sequence
  GFR-binding peptide
  MOD_RES (1)..(3)..(36)..(37): Xaa is C or S
  MOD_RES (14)..(15)..(16)..(17)..(18): Xaa is A or G
  MOD_RES (19)..(20)..(21)..(22): Xaa is A or G or is absent
XKXSRVIMRYKKLXXXXXXXXXFYLISIANLAQPVXXPA

SEQ ID NO: 5266 - protein, 39 aa, Artificial Sequence
  GFR-binding peptide
  MOD_RES (36)..(36): Xaa is C or S
  MOD_RES (12)..(13)..(14)..(15)..(16): Xaa is A or G
  MOD_RES (17)..(18)..(19)..(20): Xaa is A or G or is absent
LHDELTQYNKLXXXXXXXXXLYLVSIASLQVQTPRXQVN

SEQ ID NO: 5267 - protein, 35 aa, Artificial Sequence
  GFR-binding peptide
  MOD_RES (2)..(4)..(35): Xaa is C or S
SXKXSRVIMQYNKLVKPKRGVLYLISIASLAQPVX

SEQ ID NO: 5268 - protein, 40 aa, Artificial Sequence
  GFR-binding peptide
  MOD_RES (34)..(35): Xaa is C or S
  MOD_RES (12)..(13)..(14)..(15)..(16): Xaa is A or G
  MOD_RES (17)..(18)..(19)..(20): Xaa is A or G or is absent
ARVVMNRYKKLXXXXXXXXXFYLVSIANLQTPAXXPKPVT

SEQ ID NO: 5269 - protein, 37 aa, Artificial Sequence
  GFR-binding peptide
  MOD_RES (35)..(36): Xaa is C or S
  MOD_RES (13)..(14)..(15)..(16)..(17): Xaa is A or G
  MOD_RES (18)..(19)..(20)..(21): Xaa is A or G or is absent
EAVSMGERYKKLXXXXXXXXXFYLVSIANLKTPVXXA

SEQ ID NO: 5270 - protein, 38 aa, Artificial Sequence
  GFR-binding peptide
  MOD_RES (32)..(33): Xaa is C or S
GEVVMDRHKRLVVKENEDYYLMSTASLETPVXXAKPIK

SEQ ID NO: 5271 - protein, 36 aa, Artificial Sequence
  GFR-binding peptide
  MOD_RES (1)..(32)..(33): Xaa is C or S
XSKVIMRHKRLIKPTKGIYYLISTASLDQSVXXPSA

SEQ ID NO: 5272 - protein, 37 aa, Artificial Sequence
  GFR-binding peptide
  MOD_RES (1)..(35)..(36): Xaa is C or S
  MOD_RES (13)..(14)..(15)..(16)..(17): Xaa is A or G
  MOD_RES (18)..(19)..(20)..(21): Xaa is A or G or is absent
XGEVVMERHKRLXXXXXXXXXYYLMSTASLETPVXXA

SEQ ID NO: 5273 - protein, 37 aa, Artificial Sequence
  GFR-binding peptide
  MOD_RES (35)..(35): Xaa is C or S
  MOD_RES (11)..(12)..(13)..(14)..(15): Xaa is A or G
  MOD_RES (16)..(17)..(18)..(19): Xaa is A or G or is absent
HDELTYHYKLXXXXXXXXXKYLVSIPSLQVQTPRXQV

SEQ ID NO: 5274 - protein, 39 aa, Artificial Sequence
  GFR-binding peptide
  MOD_RES (2)..(4)..(38)..(39): Xaa is C or S
  MOD_RES (16)..(17)..(18)..(19)..(20): Xaa is A or G
  MOD_RES (21)..(22)..(23)..(24): Xaa is A or G or is absent
HXGXSRVVMNRYKKLXXXXXXXXXFYLVSIANLKTPAXX

SEQ ID NO: 5275 - protein, 33 aa, Artificial Sequence
  GFR-binding peptide
  MOD_RES (32)..(32): Xaa is C or S
SRVVMNRYKKLIVNSSDDFYLVSIANLKTPAXT

SEQ ID NO: 5276 - protein, 38 aa, Artificial Sequence
  GFR-binding peptide
  MOD_RES (32)..(33): Xaa is C or S
SRVVMNRYKKLIVNSSDDFYLVSIANLKTPAXXPKPVY

SEQ ID NO: 5277 - protein, 39 aa, Artificial Sequence
  GFR-binding peptide
  MOD_RES (1)..(3): Xaa is C or S
  MOD_RES (16)..(17)..(18)..(19)..(20): Xaa is A or G
  MOD_RES (21)..(22)..(23)..(24): Xaa is A or G or is absent
XKXALHDELTRHKRLXXXXXXXXXYYLVSTASLQVQTPR

SEQ ID NO: 5278 - protein, 43 aa, Artificial Sequence
  GFR-binding peptide
  MOD_RES (2)..(4)..(41): Xaa is C or S
EXKXALHDELTQYNKLFIPKKRVIELYLVSIASLQVQTPRXQV

SEQ ID NO: 5279 - protein, 40 aa, Artificial Sequence
  GFR-binding peptide
  MOD_RES (2)..(34)..(35): Xaa is C or S
GXGEVVMDRHKRLVVKENEDYYLMSTASLETPVXXAKPIK

SEQ ID NO: 5280 - protein, 38 aa, Artificial Sequence
  GFR-binding peptide
  MOD_RES (1)..(35)..(36): Xaa is C or S
  MOD_RES (13)..(14)..(15)..(16)..(17): Xaa is A or G
  MOD_RES (18)..(19)..(20)..(21): Xaa is A or G or is absent
XAKVVMNYHYKLXXXXXXXXXKYLVSIPSLKTPAXXAK

SEQ ID NO: 5281 - protein, 41 aa, Artificial Sequence
  GFR-binding peptide
  MOD_RES (2)..(4)..(36)..(37): Xaa is C or S
RXGXGEVVMERHKRLVVKDYEDYYLMSTASLETPVXXAKPI

SEQ ID NO: 5282 - protein, 36 aa, Artificial Sequence
  GFR-binding peptide
  MOD_RES (34)..(35): Xaa is C or S
  MOD_RES (12)..(13)..(14)..(15)..(16): Xaa is A or G
  MOD_RES (17)..(18)..(19)..(20): Xaa is A or G or is absent
SRVVMNQYNKLXXXXXXXXXLYLVSIASLKTPAXXP

SEQ ID NO: 5283 - protein, 35 aa, Artificial Sequence
  GFR-binding peptide
  MOD_RES (1)..(33)..(34): Xaa is C or S
XSRVVMNQYNKLIVNSSDDLYLVSIASLKTPAXXP

SEQ ID NO: 5284 - protein, 39 aa, Artificial Sequence
  GFR-binding peptide
  MOD_RES (2)..(34)..(35): Xaa is C or S
GXSRVVMNYHYKLIVNSSDDKYLVSIPSLKTPAXXPKPV

SEQ ID NO: 5285 - protein, 42 aa, Artificial Sequence
  GFR-binding peptide
  MOD_RES (1)..(3)..(40): Xaa is C or S
XKXALHDELTQYNKLFIPKKRVIELYLVSIASLQVQTPRXQV

SEQ ID NO: 5286 - protein, 41 aa, Artificial Sequence
  GFR-binding peptide
  MOD_RES (2)..(39): Xaa is C or S
  MOD_RES (15)..(16)..(17)..(18)..(19): Xaa is A or G
  MOD_RES (20)..(21)..(22)..(23): Xaa is A or G or is absent
KXALHDELTRHKRLXXXXXXXXXYYLVSTASLQVQTPRXQV

SEQ ID NO: 5287 - protein, 40 aa, Artificial Sequence
  GFR-binding peptide
  MOD_RES (2)..(4)..(37)..(38): Xaa is C or S
RXGXEAVSMGEYHYKLTPVGMDDKYLVSIPSLKTPVXXAK

SEQ ID NO: 5288 - protein, 42 aa, Artificial Sequence
  GFR-binding peptide
  MOD_RES (2)..(4)..(36)..(37): Xaa is C or S
HXGXARVVMNQYNKLIVNSSDDLYLVSIASLQTPAXXPKPVT

SEQ ID NO: 5289 - protein, 31 aa, Artificial Sequence
  GFR-binding peptide
  MOD_RES (31)..(31): Xaa is C or S
RVVMNRHKRLIVNSSDDYYLVSTASLKTPAX

SEQ ID NO: 5290 - protein, 35 aa, Artificial Sequence
  GFR-binding peptide
  MOD_RES (1)..(3)..(35): Xaa is C or S
XGXGEVVMDRYKKLVVKENEDFYLMSIANLETPVX

SEQ ID NO: 5291 - protein, 33 aa, Artificial Sequence
  GFR-binding peptide
  MOD_RES (31)..(32): Xaa is C or S
EVVMEYHYKLVVKDYEDKYLMSIPSLETPVXXA

SEQ ID NO: 5292 - protein, 40 aa, Artificial Sequence
  GFR-binding peptide
  MOD_RES (2)..(4)..(37)..(38): Xaa is C or S
  MOD_RES (15)..(16)..(17)..(18)..(19): Xaa is A or G
  MOD_RES (20)..(21)..(22)..(23): Xaa is A or G or is absent
SXKXSRVIMRYKKLXXXXXXXXXFYLISIANLAQPVXXPA

SEQ ID NO: 5293 - protein, 39 aa, Artificial Sequence
  GFR-binding peptide
  MOD_RES (2)..(33)..(34): Xaa is C or S
KXSKVVMQYNKLVKPTRGVLYLISIASLDQPVXXPSASA

SEQ ID NO: 5294 - protein, 36 aa, Artificial Sequence
  GFR-binding peptide
  MOD_RES (1)..(3)..(35): Xaa is C or S
XGXSRVVMNRHKRLIVNSSDDYYLVSTASLKTPAXT

SEQ ID NO: 5295 - protein, 32 aa, Artificial Sequence
  GFR-binding peptide
  MOD_RES (31)..(32): Xaa is C or S
SRVIMYHYKLVKPKRGVKYLISIPSLAQPVXX

SEQ ID NO: 5296 - protein, 35 aa, Artificial Sequence
  GFR-binding peptide
  MOD_RES (34)..(35): Xaa is C or S
  MOD_RES (12)..(13)..(14)..(15)..(16): Xaa is A or G
  MOD_RES (17)..(18)..(19)..(20): Xaa is A or G or is absent
GEVVMEYHYKLXXXXXXXXXKYLMSIPSLETPVXX

SEQ ID NO: 5297 - protein, 34 aa, Artificial Sequence
  GFR-binding peptide
  MOD_RES (1)..(3): Xaa is C or S
XGXARVVMNQYNKLIVNSSDDLYLVSIASLQTPA

SEQ ID NO: 5298 - protein, 37 aa, Artificial Sequence
  GFR-binding peptide
  MOD_RES (32)..(33): Xaa is C or S
ARVVMNYHYKLIVNSSDDKYLVSIPSLQTPAXXPKPV

SEQ ID NO: 5299 - protein, 40 aa, Artificial Sequence
  GFR-binding peptide
  MOD_RES (1)..(3)..(37)..(38): Xaa is C or S
  MOD_RES (15)..(16)..(17)..(18)..(19): Xaa is A or G
  MOD_RES (20)..(21)..(22)..(23): Xaa is A or G or is absent
XGXSRVVMNYHYKLXXXXXXXXXKYLVSIPSLKTPAXXPK

SEQ ID NO: 5300 - protein, 36 aa, Artificial Sequence
  GFR-binding peptide
  MOD_RES (2)..(2): Xaa is C or S
  MOD_RES (15)..(16)..(17)..(18)..(19): Xaa is A or G
  MOD_RES (20)..(21)..(22)..(23): Xaa is A or G or is absent
KXALHDELTRHKRLXXXXXXXXXYYLVSTASLQVQT

SEQ ID NO: 5301 - protein, 35 aa, Artificial Sequence
  GFR-binding peptide
  MOD_RES (2)..(4): Xaa is C or S
RXGXGEVVMDRYKKLVVKENEDFYLMSIANLETPV

SEQ ID NO: 5302 - protein, 39 aa, Artificial Sequence
  GFR-binding peptide
  MOD_RES (2)..(4)..(37)..(38): Xaa is C or S
  MOD_RES (15)..(16)..(17)..(18)..(19): Xaa is A or G
  MOD_RES (20)..(21)..(22)..(23): Xaa is A or G or is absent
SXKXSKVVMYHYKLXXXXXXXXXKYLISIPSLDQPVXXP

SEQ ID NO: 5303 - protein, 38 aa, Artificial Sequence
  GFR-binding peptide
  MOD_RES (2)..(4)..(35)..(36): Xaa is C or S
SXKXSKVIMRHKRLIKPTKGIYYLISTASLDQSVXXPS

SEQ ID NO: 5304 - protein, 36 aa, Artificial Sequence
  GFR-binding peptide
  MOD_RES (31)..(32): Xaa is C or S
SRVIMRYKKLVKPKRGVFYLISIANLAQPVXXPAAS

SEQ ID NO: 5305 - protein, 41 aa, Artificial Sequence
  GFR-binding peptide
  MOD_RES (2)..(4)..(37)..(38): Xaa is C or S
  MOD_RES (15)..(16)..(17)..(18)..(19): Xaa is A or G
  MOD_RES (20)..(21)..(22)..(23): Xaa is A or G or is absent
SXKXSRVIMRYKKLXXXXXXXXXFYLISIANLAQPVXXPAA

SEQ ID NO: 5306 - protein, 38 aa, Artificial Sequence
  GFR-binding peptide
  MOD_RES (2)..(34)..(35): Xaa is C or S
GXARVVMNRHKRLIVNSSDDYYLVSTASLQTPAXXPKP

SEQ ID NO: 5307 - protein, 33 aa, Artificial Sequence
  GFR-binding peptide
  MOD_RES (32)..(33): Xaa is C or S
ARVVMNYHYKLIVNSSDDKYLVSIPSLQTPAXX

SEQ ID NO: 5308 - protein, 31 aa, Artificial Sequence
  GFR-binding peptide
  MOD_RES (31)..(31): Xaa is C or S
RVVMNYHYKLIVNSSDDKYLVSIPSLQTPAX

SEQ ID NO: 5309 - protein, 44 aa, Artificial Sequence
  GFR-binding peptide
  MOD_RES (2)..(4)..(39)..(40): Xaa is C or S
  MOD_RES (17)..(18)..(19)..(20)..(21): Xaa is A or G
  MOD_RES (22)..(23)..(24)..(25): Xaa is A or G or is absent
RXGXEAVSMGERYKKLXXXXXXXXXFYLVSIANLKTPVXXAKGV

SEQ ID NO: 5310 - protein, 39 aa, Artificial Sequence
  GFR-binding peptide
  MOD_RES (2)..(4)..(36)..(37): Xaa is C or S
HXGXAKVVMNRYKKLIVNNSSDFYLVSIANLKTPAXXAK

SEQ ID NO: 5311 - protein, 44 aa, Artificial Sequence
  GFR-binding peptide
  MOD_RES (2)..(4)..(38)..(39): Xaa is C or S
  MOD_RES (16)..(17)..(18)..(19)..(20): Xaa is A or G
  MOD_RES (21)..(22)..(23)..(24): Xaa is A or G or is absent
HXGXAKVVMNYHYKLXXXXXXXXXKYLVSIPSLKTPAXXAKPVA

SEQ ID NO: 5312 - protein, 42 aa, Artificial Sequence
  GFR-binding peptide
  MOD_RES (2)..(36)..(37): Xaa is C or S
  MOD_RES (14)..(15)..(16)..(17)..(18): Xaa is A or G
  MOD_RES (19)..(20)..(21)..(22): Xaa is A or G or is absent
GXSRVVMNQYNKLXXXXXXXXXLYLVSIASLKTPAXXPKPVY

SEQ ID NO: 5313 - protein, 38 aa, Artificial Sequence
  GFR-binding peptide
  MOD_RES (1)..(33)..(34): Xaa is C or S
XGEVVMDRYKKLVVKENEDFYLMSIANLETPVXXAKPI

SEQ ID NO: 5314 - protein, 32 aa, Artificial Sequence
  GFR-binding peptide
  MOD_RES (2)..(2): Xaa is C or S
KXSKVVMRYKKLVKPTRGVFYLISIANLDQPV

SEQ ID NO: 5315 - protein, 42 aa, Artificial Sequence
  GFR-binding peptide
  MOD_RES (2)..(39): Xaa is C or S
  MOD_RES (15)..(16)..(17)..(18)..(19): Xaa is A or G
  MOD_RES (20)..(21)..(22)..(23): Xaa is A or G or is absent
KXALHDELTYHYKLXXXXXXXXXKYLVSIPSLQVQTPRXQVN

SEQ ID NO: 5316 - protein, 38 aa, Artificial Sequence
  GFR-binding peptide
  MOD_RES (2)..(33)..(34): Xaa is C or S
KXSKVIMYHYKLIKPTKGIKYLISIPSLDQSVXXPSAS

SEQ ID NO: 5317 - protein, 42 aa, Artificial Sequence
  GFR-binding peptide
  MOD_RES (2)..(4)..(38)..(39): Xaa is C or S
  MOD_RES (16)..(17)..(18)..(19)..(20): Xaa is A or G
  MOD_RES (21)..(22)..(23)..(24): Xaa is A or G or is absent
RXGXGEVVMDYHYKLXXXXXXXXXKYLMSIPSLETPVXXAKP

SEQ ID NO: 5318 - protein, 40 aa, Artificial Sequence
  GFR-binding peptide
  MOD_RES (1)..(35): Xaa is C or S
  MOD_RES (13)..(14)..(15)..(16)..(17): Xaa is A or G
  MOD_RES (18)..(19)..(20)..(21): Xaa is A or G or is absent
XSRVVMNRHKRLXXXXXXXXXYYLVSTASLKTPAXTPKTV

SEQ ID NO: 5319 - protein, 39 aa, Artificial Sequence
  GFR-binding peptide
  MOD_RES (2)..(4): Xaa is C or S
EXKXALHDELTYHYKLFIPKKRVIEKYLVSIPSLQVQTP

SEQ ID NO: 5320 - protein, 35 aa, Artificial Sequence
  GFR-binding peptide
  MOD_RES (33)..(33): Xaa is C or S
  MOD_RES (11)..(12)..(13)..(14)..(15): Xaa is A or G
  MOD_RES (16)..(17)..(18)..(19): Xaa is A or G or is absent
RVVMNQYNKLXXXXXXXXXLYLVSIASLKTPAXTP

SEQ ID NO: 5321 - protein, 35 aa, Artificial Sequence
  GFR-binding peptide
  MOD_RES (1)..(1): Xaa is C or S
XALHDELTRHKRLFIPKKRVIEYYLVSTASLQVQT

SEQ ID NO: 5322 - protein, 38 aa, Artificial Sequence
  GFR-binding peptide
  MOD_RES (33)..(34): Xaa is C or S
  MOD_RES (11)..(12)..(13)..(14)..(15): Xaa is A or G
  MOD_RES (16)..(17)..(18)..(19): Xaa is A or G or is absent
KVVMNRHKRLXXXXXXXXXYYLVSTASLKTPAXXAKPV

SEQ ID NO: 5323 - protein, 39 aa, Artificial Sequence
  GFR-binding peptide
  MOD_RES (2)..(4)..(39): Xaa is C or S
  MOD_RES (17)..(18)..(19)..(20)..(21): Xaa is A or G
  MOD_RES (22)..(23)..(24)..(25): Xaa is A or G or is absent
RXGXEAVSMGERYKKLXXXXXXXXXFYLVSIANLKTPVX

SEQ ID NO: 5324 - protein, 41 aa, Artificial Sequence
  GFR-binding peptide
  MOD_RES (2)..(36)..(37): Xaa is C or S
  MOD_RES (14)..(15)..(16)..(17)..(18): Xaa is A or G
  MOD_RES (19)..(20)..(21)..(22): Xaa is A or G or is absent
GXGEVVMEQYNKLXXXXXXXXXLYLMSIASLETPVXXAKPI

SEQ ID NO: 5325 - protein, 33 aa, Artificial Sequence
  GFR-binding peptide
  MOD_RES (1)..(33): Xaa is C or S
XAKVVMNYHYKLIVNNSSDKYLVSIPSLKTPAX

SEQ ID NO: 5326 - protein, 30 aa, Artificial Sequence
  GFR-binding peptide
EVVMDRHKRLVVKENEDYYLMSTASLETPV

SEQ ID NO: 5327 - protein, 38 aa, Artificial Sequence
  GFR-binding peptide
  MOD_RES (1)..(3): Xaa is C or S
XKXALHDELTYHYKLFIPKKRVIEKYLVSIPSLQVQTP

SEQ ID NO: 5328 - protein, 35 aa, Artificial Sequence
  GFR-binding peptide
  MOD_RES (2)..(35): Xaa is C or S
  MOD_RES (13)..(14)..(15)..(16)..(17): Xaa is A or G
  MOD_RES (18)..(19)..(20)..(21): Xaa is A or G or is absent
KXSRVIMQYNKLXXXXXXXXXLYLISIASLAQPVX

SEQ ID NO: 5329 - protein, 39 aa, Artificial Sequence
  GFR-binding peptide
  MOD_RES (1)..(35)..(36): Xaa is C or S
  MOD_RES (13)..(14)..(15)..(16)..(17): Xaa is A or G
  MOD_RES (18)..(19)..(20)..(21): Xaa is A or G or is absent
XARVVMNRHKRLXXXXXXXXXYYLVSTASLQTPAXXPKP

SEQ ID NO: 5330 - protein, 33 aa, Artificial Sequence
  GFR-binding peptide
  MOD_RES (1)..(33): Xaa is C or S
XGEVVMERYKKLVVKDYEDFYLMSIANLETPVX

SEQ ID NO: 5331 - protein, 41 aa, Artificial Sequence
  GFR-binding peptide
  MOD_RES (1)..(3)..(37)..(38): Xaa is C or S
  MOD_RES (15)..(16)..(17)..(18)..(19): Xaa is A or G
  MOD_RES (20)..(21)..(22)..(23): Xaa is A or G or is absent
XGXAKVVMNYHYKLXXXXXXXXXKYLVSIPSLKTPAXXAKP

SEQ ID NO: 5332 - protein, 40 aa, Artificial Sequence
  GFR-binding peptide
  MOD_RES (1)..(3)..(34)..(35): Xaa is C or S
XKXSRVIMRHKRLVKPKRGVYYLISTASLAQPVXXPAASA

SEQ ID NO: 5333 - protein, 39 aa, Artificial Sequence
  GFR-binding peptide
  MOD_RES (1)..(33): Xaa is C or S
XSRVVMNRHKRLIVNSSDDYYLVSTASLKTPAXTPKTVH

SEQ ID NO: 5334 - protein, 36 aa, Artificial Sequence
  GFR-binding peptide
  MOD_RES (34)..(35): Xaa is C or S
  MOD_RES (12)..(13)..(14)..(15)..(16): Xaa is A or G
  MOD_RES (17)..(18)..(19)..(20): Xaa is A or G or is absent
ARVVMNRYKKLXXXXXXXXXFYLVSIANLQTPAXXP

SEQ ID NO: 5335 - protein, 39 aa, Artificial Sequence
  GFR-binding peptide
  MOD_RES (2)..(4): Xaa is C or S
EXKXALHDELTQYNKLFIPKKRVIELYLVSIASLQVQTP

SEQ ID NO: 5336 - protein, 31 aa, Artificial Sequence
  GFR-binding peptide
  MOD_RES (31)..(31): Xaa is C or S
SKVVMRYKKLVKPTRGVFYLISIANLDQPVX

SEQ ID NO: 5337 - protein, 40 aa, Artificial Sequence
  GFR-binding peptide
  MOD_RES (2)..(4): Xaa is C or S
EXKXALHDELTRHKRLFIPKKRVIEYYLVSTASLQVQTPR

SEQ ID NO: 5338 - protein, 38 aa, Artificial Sequence
  GFR-binding peptide
  MOD_RES (1)..(3)..(35)..(36): Xaa is C or S
XGXGEVVMERYKKLVVKDYEDFYLMSIANLETPVXXAK

SEQ ID NO: 5339 - protein, 35 aa, Artificial Sequence
  GFR-binding peptide
  MOD_RES (2)..(34)..(35): Xaa is C or S
GXGEVVMDQYNKLVVKENEDLYLMSIASLETPVXX

SEQ ID NO: 5340 - protein, 42 aa, Artificial Sequence
  GFR-binding peptide
  MOD_RES (1)..(3)..(37)..(38): Xaa is C or S
  MOD_RES (15)..(16)..(17)..(18)..(19): Xaa is A or G
  MOD_RES (20)..(21)..(22)..(23): Xaa is A or G or is absent
XGXSRVVMNQYNKLXXXXXXXXXLYLVSIASLKTPAXXPKPV

SEQ ID NO: 5341 - protein, 40 aa, Artificial Sequence
  GFR-binding peptide
  MOD_RES (2)..(39): Xaa is C or S
  MOD_RES (15)..(16)..(17)..(18)..(19): Xaa is A or G
  MOD_RES (20)..(21)..(22)..(23): Xaa is A or G or is absent
KXALHDELTQYNKLXXXXXXXXXLYLVSIASLQVQTPRXQ

SEQ ID NO: 5342 - protein, 39 aa, Artificial Sequence
  GFR-binding peptide
  MOD_RES (2)..(4)..(36): Xaa is C or S
HXGXSRVVMNYHYKLIVNSSDDKYLVSIPSLKTPAXTPK

SEQ ID NO: 5343 - protein, 39 aa, Artificial Sequence
  GFR-binding peptide
  MOD_RES (2)..(4)..(38)..(39): Xaa is C or S
  MOD_RES (16)..(17)..(18)..(19)..(20): Xaa is A or G
  MOD_RES (21)..(22)..(23)..(24): Xaa is A or G or is absent
RXGXGEVVMEQYNKLXXXXXXXXXLYLMSIASLETPVXX

SEQ ID NO: 5344 - protein, 38 aa, Artificial Sequence
  GFR-binding peptide
  MOD_RES (1)..(3)..(35)..(36): Xaa is C or S
XGXAKVVMNRHKRLIVNNSSDYYLVSTASLKTPAXXAK

SEQ ID NO: 5345 - protein, 32 aa, Artificial Sequence
  GFR-binding peptide
  MOD_RES (31)..(32): Xaa is C or S
RVVMNYHYKLIVNSSDDKYLVSIPSLKTPAXX

SEQ ID NO: 5346 - protein, 33 aa, Artificial Sequence
  GFR-binding peptide
  MOD_RES (32)..(33): Xaa is C or S
AKVVMNRYKKLIVNNSSDFYLVSIANLKTPAXX

SEQ ID NO: 5347 - protein, 32 aa, Artificial Sequence
  GFR-binding peptide
  MOD_RES (31)..(32): Xaa is C or S
SKVVMRYKKLVKPTRGVFYLISIANLDQPVXX

SEQ ID NO: 5348 - protein, 39 aa, Artificial Sequence
  GFR-binding peptide
  MOD_RES (1)..(3)..(35)..(36): Xaa is C or S
XGXGEVVMEYHYKLVVKDYEDKYLMSIPSLETPVXXAKP

SEQ ID NO: 5349 - protein, 44 aa, Artificial Sequence
  GFR-binding peptide
  MOD_RES (2)..(4)..(38)..(39): Xaa is C or S
  MOD_RES (16)..(17)..(18)..(19)..(20): Xaa is A or G
  MOD_RES (21)..(22)..(23)..(24): Xaa is A or G or is absent
HXGXARVVMNRYKKLXXXXXXXXXFYLVSIANLQTPAXXPKPVT

SEQ ID NO: 5350 - protein, 34 aa, Artificial Sequence
  GFR-binding peptide
  MOD_RES (1)..(3)..(34): Xaa is C or S
XKXSKVIMQYNKLIKPTKGILYLISIASLDQSVX

SEQ ID NO: 5351 - protein, 33 aa, Artificial Sequence
  GFR-binding peptide
  MOD_RES (31)..(32): Xaa is C or S
SKVIMYHYKLIKPTKGIKYLISIPSLDQSVXXP

SEQ ID NO: 5352 - protein, 39 aa, Artificial Sequence
  GFR-binding peptide
  MOD_RES (33)..(33): Xaa is C or S
  MOD_RES (11)..(12)..(13)..(14)..(15): Xaa is A or G
  MOD_RES (16)..(17)..(18)..(19): Xaa is A or G or is absent
RVVMNQYNKLXXXXXXXXXLYLVSIASLKTPAXTPKTVH

SEQ ID NO: 5353 - protein, 45 aa, Artificial Sequence
  GFR-binding peptide
  MOD_RES (2)..(4)..(39)..(40): Xaa is C or S
  MOD_RES (17)..(18)..(19)..(20)..(21): Xaa is A or G
  MOD_RES (22)..(23)..(24)..(25): Xaa is A or G or is absent
RXGXEAVSMGEQYNKLXXXXXXXXXLYLVSIASLKTPVXXAKGVK

SEQ ID NO: 5354 - protein, 37 aa, Artificial Sequence
  GFR-binding peptide
  MOD_RES (31)..(32): Xaa is C or S
SKVVMQYNKLVKPTRGVLYLISIASLDQPVXXPSASA

SEQ ID NO: 5355 - protein, 40 aa, Artificial Sequence
  GFR-binding peptide
  MOD_RES (1)..(35)..(36): Xaa is C or S
  MOD_RES (13)..(14)..(15)..(16)..(17): Xaa is A or G
  MOD_RES (18)..(19)..(20)..(21): Xaa is A or G or is absent
XGEVVMDRYKKLXXXXXXXXXFYLMSIANLETPVXXAKPI

SEQ ID NO: 5356 - protein, 41 aa, Artificial Sequence
  GFR-binding peptide
  MOD_RES (2)..(4)..(38)..(39): Xaa is C or S
  MOD_RES (16)..(17)..(18)..(19)..(20): Xaa is A or G
  MOD_RES (21)..(22)..(23)..(24): Xaa is A or G or is absent
RXGXGEVVMERHKRLXXXXXXXXXYYLMSTASLETPVXXAK

SEQ ID NO: 5357 - protein, 41 aa, Artificial Sequence
  GFR-binding peptide
  MOD_RES (1)..(3)..(35)..(36): Xaa is C or S
XGXARVVMNRYKKLIVNSSDDFYLVSIANLQTPAXXPKPVT

SEQ ID NO: 5358 - protein, 34 aa, Artificial Sequence
  GFR-binding peptide
  MOD_RES (33)..(34): Xaa is C or S
  MOD_RES (11)..(12)..(13)..(14)..(15): Xaa is A or G
  MOD_RES (16)..(17)..(18)..(19): Xaa is A or G or is absent
SKVIMRHKRLXXXXXXXXXYYLISTASLDQSVXX

SEQ ID NO: 5359 - protein, 36 aa, Artificial Sequence
  GFR-binding peptide
  MOD_RES (33)..(34): Xaa is C or S
  MOD_RES (11)..(12)..(13)..(14)..(15): Xaa is A or G
  MOD_RES (16)..(17)..(18)..(19): Xaa is A or G or is absent
EVVMDYHYKLXXXXXXXXXKYLMSIPSLETPVXXAK

SEQ ID NO: 5360 - protein, 34 aa, Artificial Sequence
  GFR-binding peptide
  MOD_RES (1)..(3): Xaa is C or S
XGXGEVVMEQYNKLVVKDYEDLYLMSIASLETPV

SEQ ID NO: 5361 - protein, 35 aa, Artificial Sequence
  GFR-binding peptide
  MOD_RES (32)..(33): Xaa is C or S
GEVVMDYHYKLVVKENEDKYLMSIPSLETPVXXAK

SEQ ID NO: 5362 - protein, 35 aa, Artificial Sequence
  GFR-binding peptide
  MOD_RES (31)..(32): Xaa is C or S
RVVMNYHYKLIVNSSDDKYLVSIPSLQTPAXXPKP

SEQ ID NO: 5363 - protein, 37 aa, Artificial Sequence
  GFR-binding peptide
  MOD_RES (1)..(3)..(35)..(36): Xaa is C or S
XGXARVVMNRHKRLIVNSSDDYYLVSTASLQTPAXXP

SEQ ID NO: 5364 - protein, 35 aa, Artificial Sequence
  GFR-binding peptide
  MOD_RES (2)..(35): Xaa is C or S
GXEAVSMGEYHYKLTPVGMDDKYLVSIPSLKTPVX

SEQ ID NO: 5365 - protein, 41 aa, Artificial Sequence
  GFR-binding peptide
  MOD_RES (1)..(35)..(36): Xaa is C or S
  MOD_RES (13)..(14)..(15)..(16)..(17): Xaa is A or G
  MOD_RES (18)..(19)..(20)..(21): Xaa is A or G or is absent
XAKVVMNRYKKLXXXXXXXXXFYLVSIANLKTPAXXAKPVA

SEQ ID NO: 5366 - protein, 37 aa, Artificial Sequence
  GFR-binding peptide
  MOD_RES (1)..(35): Xaa is C or S
  MOD_RES (13)..(14)..(15)..(16)..(17): Xaa is A or G
  MOD_RES (18)..(19)..(20)..(21): Xaa is A or G or is absent
XSRVVMNRHKRLXXXXXXXXXYYLVSTASLKTPAXTP

SEQ ID NO: 5367 - protein, 34 aa, Artificial Sequence
  GFR-binding peptide
  MOD_RES (33)..(34): Xaa is C or S
  MOD_RES (11)..(12)..(13)..(14)..(15): Xaa is A or G
  MOD_RES (16)..(17)..(18)..(19): Xaa is A or G or is absent
RVVMNRHKRLXXXXXXXXXYYLVSTASLKTPAXX

SEQ ID NO: 5368 - protein, 33 aa, Artificial Sequence
  GFR-binding peptide
  MOD_RES (31)..(32): Xaa is C or S
SKVIMQYNKLIKPTKGILYLISIASLDQSVXXP

SEQ ID NO: 5369 - protein, 35 aa, Artificial Sequence
  GFR-binding peptide
  MOD_RES (33)..(34): Xaa is C or S
EAVSMGERYKKLTPVGMDDFYLVSIANLKTPVXXA

SEQ ID NO: 5370 - protein, 33 aa, Artificial Sequence
  GFR-binding peptide
  MOD_RES (1)..(33): Xaa is C or S
XAKVVMNRYKKLIVNNSSDFYLVSIANLKTPAX

SEQ ID NO: 5371 - protein, 40 aa, Artificial Sequence
  GFR-binding peptide
  MOD_RES (34)..(35): Xaa is C or S
  MOD_RES (12)..(13)..(14)..(15)..(16): Xaa is A or G
  MOD_RES (17)..(18)..(19)..(20): Xaa is A or G or is absent
AKVVMNRYKKLXXXXXXXXXFYLVSIANLKTPAXXAKPVA

SEQ ID NO: 5372 - protein, 37 aa, Artificial Sequence
  GFR-binding peptide
  MOD_RES (34)..(35): Xaa is C or S
  MOD_RES (12)..(13)..(14)..(15)..(16): Xaa is A or G
  MOD_RES (17)..(18)..(19)..(20): Xaa is A or G or is absent
AKVVMNRHKRLXXXXXXXXXYYLVSTASLKTPAXXAK

SEQ ID NO: 5373 - protein, 34 aa, Artificial Sequence
  GFR-binding peptide
  MOD_RES (33)..(34): Xaa is C or S
  MOD_RES (11)..(12)..(13)..(14)..(15): Xaa is A or G
  MOD_RES (16)..(17)..(18)..(19): Xaa is A or G or is absent
KVVMNRHKRLXXXXXXXXXYYLVSTASLKTPAXX

SEQ ID NO: 5374 - protein, 36 aa, Artificial Sequence
  GFR-binding peptide
  MOD_RES (1)..(3)..(35): Xaa is C or S
XGXSRVVMNQYNKLIVNSSDDLYLVSIASLKTPAXT

SEQ ID NO: 5375 - protein, 36 aa, Artificial Sequence
  GFR-binding peptide
  MOD_RES (1)..(3): Xaa is C or S
  MOD_RES (15)..(16)..(17)..(18)..(19): Xaa is A or G
  MOD_RES (20)..(21)..(22)..(23): Xaa is A or G or is absent
XGXAKVVMNYHYKLXXXXXXXXXKYLVSIPSLKTPA

SEQ ID NO: 5376 - protein, 36 aa, Artificial Sequence
  GFR-binding peptide
  MOD_RES (1)..(3)..(36): Xaa is C or S
  MOD_RES (14)..(15)..(16)..(17)..(18): Xaa is A or G
  MOD_RES (19)..(20)..(21)..(22): Xaa is A or G or is absent
XKXSKVVMRYKKLXXXXXXXXXFYLISIANLDQPVX

SEQ ID NO: 5377 - protein, 37 aa, Artificial Sequence
  GFR-binding peptide
  MOD_RES (1)..(3): Xaa is C or S
  MOD_RES (16)..(17)..(18)..(19)..(20): Xaa is A or G
  MOD_RES (21)..(22)..(23)..(24): Xaa is A or G or is absent
XKXALHDELTRYKKLXXXXXXXXXFYLVSIANLQVQT

SEQ ID NO: 5378 - protein, 36 aa, Artificial Sequence
  GFR-binding peptide
  MOD_RES (2)..(4): Xaa is C or S
  MOD_RES (15)..(16)..(17)..(18)..(19): Xaa is A or G
  MOD_RES (20)..(21)..(22)..(23): Xaa is A or G or is absent
SXKXSKVIMRYKKLXXXXXXXXXFYLISIANLDQSV

SEQ ID NO: 5379 - protein, 39 aa, Artificial Sequence
  GFR-binding peptide
  MOD_RES (1)..(3)..(36)..(37): Xaa is C or S
  MOD_RES (14)..(15)..(16)..(17)..(18): Xaa is A or G
  MOD_RES (19)..(20)..(21)..(22): Xaa is A or G or is absent
XKXSKVVMRYKKLXXXXXXXXXFYLISIANLDQPVXXPS

SEQ ID NO: 5380 - protein, 32 aa, Artificial Sequence
  GFR-binding peptide
EAVSMGEYHYKLTPVGMDDKYLVSIPSLKTPV

SEQ ID NO: 5381 - protein, 39 aa, Artificial Sequence
  GFR-binding peptide
  MOD_RES (1)..(3)..(37): Xaa is C or S
  MOD_RES (15)..(16)..(17)..(18)..(19): Xaa is A or G
  MOD_RES (20)..(21)..(22)..(23): Xaa is A or G or is absent
XGXSRVVMNQYNKLXXXXXXXXXLYLVSIASLKTPAXTP

SEQ ID NO: 5382 - protein, 41 aa, Artificial Sequence
  GFR-binding peptide
  MOD_RES (2)..(4)..(36): Xaa is C or S
HXGXSRVVMNQYNKLIVNSSDDLYLVSIASLKTPAXTPKTV

SEQ ID NO: 5383 - protein, 37 aa, Artificial Sequence
  GFR-binding peptide
  MOD_RES (2)..(34)..(35): Xaa is C or S
GXARVVMNRYKKLIVNSSDDFYLVSIANLQTPAXXPK

SEQ ID NO: 5384 - protein, 39 aa, Artificial Sequence
  GFR-binding peptide
  MOD_RES (2)..(34)..(35): Xaa is C or S
GXSRVVMNQYNKLIVNSSDDLYLVSIASLKTPAXXPKPV

SEQ ID NO: 5385 - protein, 34 aa, Artificial Sequence
  GFR-binding peptide
  MOD_RES (1)..(1): Xaa is C or S
  MOD_RES (13)..(14)..(15)..(16)..(17): Xaa is A or G
  MOD_RES (18)..(19)..(20)..(21): Xaa is A or G or is absent
XGEVVMDYHYKLXXXXXXXXXKYLMSIPSLETPV

SEQ ID NO: 5386 - protein, 32 aa, Artificial Sequence
  GFR-binding peptide
  MOD_RES (11)..(12)..(13)..(14)..(15): Xaa is A or G
  MOD_RES (16)..(17)..(18)..(19): Xaa is A or G or is absent
SKVVMRHKRLXXXXXXXXXYYLISTASLDQPV

SEQ ID NO: 5387 - protein, 37 aa, Artificial Sequence
  GFR-binding peptide
  MOD_RES (2)..(4): Xaa is C or S
  MOD_RES (16)..(17)..(18)..(19)..(20): Xaa is A or G
  MOD_RES (21)..(22)..(23)..(24): Xaa is A or G or is absent
HXGXAKVVMNQYNKLXXXXXXXXXLYLVSIASLKTPA

SEQ ID NO: 5388 - protein, 35 aa, Artificial Sequence
  GFR-binding peptide
  MOD_RES (2)..(35): Xaa is C or S
  MOD_RES (13)..(14)..(15)..(16)..(17): Xaa is A or G
  MOD_RES (18)..(19)..(20)..(21): Xaa is A or G or is absent
KXSKVVMYHYKLXXXXXXXXXKYLISIPSLDQPVX

SEQ ID NO: 5389 - protein, 40 aa, Artificial Sequence
  GFR-binding peptide
  MOD_RES (1)..(3)..(35)..(36): Xaa is C or S
XGXSRVVMNRHKRLIVNSSDDYYLVSTASLKTPAXXPKPV

SEQ ID NO: 5390 - protein, 40 aa, Artificial Sequence
  GFR-binding peptide
  MOD_RES (2)..(4)..(35)..(36): Xaa is C or S
SXKXSKVIMQYNKLIKPTKGILYLISIASLDQSVXXPSAS

SEQ ID NO: 5391 - protein, 38 aa, Artificial Sequence
  GFR-binding peptide
  MOD_RES (2)..(4): Xaa is C or S
  MOD_RES (17)..(18)..(19)..(20)..(21): Xaa is A or G
  MOD_RES (22)..(23)..(24)..(25): Xaa is A or G or is absent
EXKXALHDELTYHYKLXXXXXXXXXKYLVSIPSLQVQT

SEQ ID NO: 5392 - protein, 37 aa, Artificial Sequence
  GFR-binding peptide
  MOD_RES (1)..(35)..(36): Xaa is C or S
  MOD_RES (13)..(14)..(15)..(16)..(17): Xaa is A or G
  MOD_RES (18)..(19)..(20)..(21): Xaa is A or G or is absent
XAKVVMNRHKRLXXXXXXXXXYYLVSTASLKTPAXXA

SEQ ID NO: 5393 - protein, 43 aa, Artificial Sequence
  GFR-binding peptide
  MOD_RES (2)..(4)..(38)..(39): Xaa is C or S
  MOD_RES (16)..(17)..(18)..(19)..(20): Xaa is A or G
  MOD_RES (21)..(22)..(23)..(24): Xaa is A or G or is absent
RXGXGEVVMDRYKKLXXXXXXXXXFYLMSIANLETPVXXAKPI

SEQ ID NO: 5394 - protein, 40 aa, Artificial Sequence
  GFR-binding peptide
  MOD_RES (34)..(35): Xaa is C or S
  MOD_RES (12)..(13)..(14)..(15)..(16): Xaa is A or G
  MOD_RES (17)..(18)..(19)..(20): Xaa is A or G or is absent
ARVVMNQYNKLXXXXXXXXXLYLVSIASLQTPAXXPKPVT

SEQ ID NO: 5395 - protein, 35 aa, Artificial Sequence
  GFR-binding peptide
  MOD_RES (31)..(32): Xaa is C or S
RVVMNQYNKLIVNSSDDLYLVSIASLQTPAXXPKP

SEQ ID NO: 5396 - protein, 42 aa, Artificial Sequence
  GFR-binding peptide
  MOD_RES (2)..(36)..(37): Xaa is C or S
  MOD_RES (14)..(15)..(16)..(17)..(18): Xaa is A or G
  MOD_RES (19)..(20)..(21)..(22): Xaa is A or G or is absent
GXGEVVMERYKKLXXXXXXXXXFYLMSIANLETPVXXAKPIS

SEQ ID NO: 5397 - protein, 43 aa, Artificial Sequence
  GFR-binding peptide
  MOD_RES (1)..(3)..(37): Xaa is C or S
  MOD_RES (15)..(16)..(17)..(18)..(19): Xaa is A or G
  MOD_RES (20)..(21)..(22)..(23): Xaa is A or G or is absent
XGXSRVVMNRHKRLXXXXXXXXXYYLVSTASLKTPAXTPKTVH

SEQ ID NO: 5398 - protein, 36 aa, Artificial Sequence
  GFR-binding peptide
  MOD_RES (31)..(32): Xaa is C or S
SRVIMRHKRLVKPKRGVYYLISTASLAQPVXXPAAS

SEQ ID NO: 5399 - protein, 41 aa, Artificial Sequence
  GFR-binding peptide
  MOD_RES (2)..(37)..(38): Xaa is C or S
  MOD_RES (15)..(16)..(17)..(18)..(19): Xaa is A or G
  MOD_RES (20)..(21)..(22)..(23): Xaa is A or G or is absent
GXEAVSMGERHKRLXXXXXXXXXYYLVSTASLKTPVXXAKG

SEQ ID NO: 5400 - protein, 40 aa, Artificial Sequence
  GFR-binding peptide
  MOD_RES (1)..(35)..(36): Xaa is C or S
  MOD_RES (13)..(14)..(15)..(16)..(17): Xaa is A or G
  MOD_RES (18)..(19)..(20)..(21): Xaa is A or G or is absent
XGEVVMEYHYKLXXXXXXXXXKYLMSIPSLETPVXXAKPI

SEQ ID NO: 5401 - protein, 36 aa, Artificial Sequence
  GFR-binding peptide
  MOD_RES (31)..(32): Xaa is C or S
EVVMDQYNKLVVKENEDLYLMSIASLETPVXXAKPI

SEQ ID NO: 5402 - protein, 32 aa, Artificial Sequence
  GFR-binding peptide
  MOD_RES (11)..(12)..(13)..(14)..(15): Xaa is A or G
  MOD_RES (16)..(17)..(18)..(19): Xaa is A or G or is absent
HDELTQYNKLXXXXXXXXXLYLVSIASLQVQT

SEQ ID NO: 5403 - protein, 40 aa, Artificial Sequence
  GFR-binding peptide
  MOD_RES (1)..(3)..(40): Xaa is C or S
XKXALHDELTYHYKLFIPKKRVIEKYLVSIPSLQVQTPRX

SEQ ID NO: 5404 - protein, 37 aa, Artificial Sequence
  GFR-binding peptide
  MOD_RES (2)..(4)..(35)..(36): Xaa is C or S
SXKXSRVIMYHYKLVKPKRGVKYLISIPSLAQPVXXP

SEQ ID NO: 5405 - protein, 43 aa, Artificial Sequence
  GFR-binding peptide
  MOD_RES (2)..(4)..(38)..(39): Xaa is C or S
  MOD_RES (16)..(17)..(18)..(19)..(20): Xaa is A or G
  MOD_RES (21)..(22)..(23)..(24): Xaa is A or G or is absent
HXGXARVVMNRHKRLXXXXXXXXXYYLVSTASLQTPAXXPKPV

SEQ ID NO: 5406 - protein, 41 aa, Artificial Sequence
  GFR-binding peptide
  MOD_RES (2)..(4)..(38)..(39): Xaa is C or S
  MOD_RES (16)..(17)..(18)..(19)..(20): Xaa is A or G
  MOD_RES (21)..(22)..(23)..(24): Xaa is A or G or is absent
HXGXARVVMNRHKRLXXXXXXXXXYYLVSTASLQTPAXXPK

SEQ ID NO: 5407 - protein, 39 aa, Artificial Sequence
  GFR-binding peptide
  MOD_RES (2)..(4)..(38)..(39): Xaa is C or S
  MOD_RES (16)..(17)..(18)..(19)..(20): Xaa is A or G
  MOD_RES (21)..(22)..(23)..(24): Xaa is A or G or is absent
RXGXGEVVMERHKRLXXXXXXXXXYYLMSTASLETPVXX

SEQ ID NO: 5408 - protein, 41 aa, Artificial Sequence
  GFR-binding peptide
  MOD_RES (2)..(36)..(37): Xaa is C or S
  MOD_RES (14)..(15)..(16)..(17)..(18): Xaa is A or G
  MOD_RES (19)..(20)..(21)..(22): Xaa is A or G or is absent
GXGEVVMERHKRLXXXXXXXXXYYLMSTASLETPVXXAKPI

SEQ ID NO: 5409 - protein, 35 aa, Artificial Sequence
  GFR-binding peptide
  MOD_RES (32)..(33): Xaa is C or S
AKVVMNYHYKLIVNNSSDKYLVSIPSLKTPAXXAK

SEQ ID NO: 5410 - protein, 44 aa, Artificial Sequence
  GFR-binding peptide
  MOD_RES (1)..(3)..(40): Xaa is C or S
XKXALHDELTYHYKLFIPKKRVIEKYLVSIPSLQVQTPRXQVNR

SEQ ID NO: 5411 - protein, 39 aa, Artificial Sequence
  GFR-binding peptide
  MOD_RES (1)..(3)..(36)..(37): Xaa is C or S
  MOD_RES (14)..(15)..(16)..(17)..(18): Xaa is A or G
  MOD_RES (19)..(20)..(21)..(22): Xaa is A or G or is absent
XKXSKVIMRYKKLXXXXXXXXXFYLISIANLDQSVXXPS

SEQ ID NO: 5412 - protein, 38 aa, Artificial Sequence
  GFR-binding peptide
  MOD_RES (2)..(35)..(36): Xaa is C or S
  MOD_RES (13)..(14)..(15)..(16)..(17): Xaa is A or G
  MOD_RES (18)..(19)..(20)..(21): Xaa is A or G or is absent
KXSRVIMRYKKLXXXXXXXXXFYLISIANLAQPVXXPA

SEQ ID NO: 5413 - protein, 35 aa, Artificial Sequence
  GFR-binding peptide
  MOD_RES (1)..(35): Xaa is C or S
  MOD_RES (13)..(14)..(15)..(16)..(17): Xaa is A or G
  MOD_RES (18)..(19)..(20)..(21): Xaa is A or G or is absent
XGEVVMDRYKKLXXXXXXXXXFYLMSIANLETPVX

SEQ ID NO: 5414 - protein, 36 aa, Artificial Sequence
  GFR-binding peptide
  MOD_RES (1)..(33)..(34): Xaa is C or S
XGEVVMDQYNKLVVKENEDLYLMSIASLETPVXXAK

SEQ ID NO: 5415 - protein, 39 aa, Artificial Sequence
  GFR-binding peptide
  MOD_RES (2)..(4)..(35)..(36): Xaa is C or S
SXKXSKVVMYHYKLVKPTRGVKYLISIPSLDQPVXXPSA

SEQ ID NO: 5416 - protein, 38 aa, Artificial Sequence
  GFR-binding peptide
  MOD_RES (2)..(36)..(37): Xaa is C or S
  MOD_RES (14)..(15)..(16)..(17)..(18): Xaa is A or G
  MOD_RES (19)..(20)..(21)..(22): Xaa is A or G or is absent
GXSRVVMNYHYKLXXXXXXXXXKYLVSIPSLKTPAXXP

SEQ ID NO: 5417 - protein, 37 aa, Artificial Sequence
  GFR-binding peptide
  MOD_RES (2)..(4)..(36)..(37): Xaa is C or S
HXGXSRVVMNQYNKLIVNSSDDLYLVSIASLKTPAXX

SEQ ID NO: 5418 - protein, 36 aa, Artificial Sequence
  GFR-binding peptide
  MOD_RES (1)..(3)..(36): Xaa is C or S
  MOD_RES (14)..(15)..(16)..(17)..(18): Xaa is A or G
  MOD_RES (19)..(20)..(21)..(22): Xaa is A or G or is absent
XKXSKVIMYHYKLXXXXXXXXXKYLISIPSLDQSVX

SEQ ID NO: 5419 - protein, 39 aa, Artificial Sequence
  GFR-binding peptide
  MOD_RES (33)..(34): Xaa is C or S
  MOD_RES (11)..(12)..(13)..(14)..(15): Xaa is A or G
  MOD_RES (16)..(17)..(18)..(19): Xaa is A or G or is absent
EVVMERHKRLXXXXXXXXXYYLMSTASLETPVXXAKPIS

SEQ ID NO: 5420 - protein, 41 aa, Artificial Sequence
  GFR-binding peptide
  MOD_RES (1)..(3)..(40): Xaa is C or S
  MOD_RES (16)..(17)..(18)..(19)..(20): Xaa is A or G
  MOD_RES (21)..(22)..(23)..(24): Xaa is A or G or is absent
XKXALHDELTQYNKLXXXXXXXXXLYLVSIASLQVQTPRXQ

SEQ ID NO: 5421 - protein, 36 aa, Artificial Sequence
  GFR-binding peptide
  MOD_RES (2)..(36): Xaa is C or S
  MOD_RES (14)..(15)..(16)..(17)..(18): Xaa is A or G
  MOD_RES (19)..(20)..(21)..(22): Xaa is A or G or is absent
GXARVVMNQYNKLXXXXXXXXXLYLVSIASLQTPAX

SEQ ID NO: 5422 - protein, 31 aa, Artificial Sequence
  GFR-binding peptide
  MOD_RES (31)..(31): Xaa is C or S
KVVMNRYKKLIVNNSSDFYLVSIANLKTPAX

SEQ ID NO: 5423 - protein, 44 aa, Artificial Sequence
  GFR-binding peptide
  MOD_RES (2)..(4)..(39)..(40): Xaa is C or S
  MOD_RES (17)..(18)..(19)..(20)..(21): Xaa is A or G
  MOD_RES (22)..(23)..(24)..(25): Xaa is A or G or is absent
RXGXEAVSMGEQYNKLXXXXXXXXXLYLVSIASLKTPVXXAKGV

SEQ ID NO: 5424 - protein, 38 aa, Artificial Sequence
  GFR-binding peptide
  MOD_RES (2)..(4)..(37)..(38): Xaa is C or S
RXGXEAVSMGERHKRLTPVGMDDYYLVSTASLKTPVXX

SEQ ID NO: 5425 - protein, 41 aa, Artificial Sequence
  GFR-binding peptide
  MOD_RES (1)..(3)..(35)..(36): Xaa is C or S
XGXAKVVMNQYNKLIVNNSSDLYLVSIASLKTPAXXAKPVA

SEQ ID NO: 5426 - protein, 34 aa, Artificial Sequence
  GFR-binding peptide
  MOD_RES (2)..(4): Xaa is C or S
SXKXSKVIMRHKRLIKPTKGIYYLISTASLDQSV

SEQ ID NO: 5427 - protein, 36 aa, Artificial Sequence
  GFR-binding peptide
  MOD_RES (33)..(34): Xaa is C or S
  MOD_RES (11)..(12)..(13)..(14)..(15): Xaa is A or G
  MOD_RES (16)..(17)..(18)..(19): Xaa is A or G or is absent
SRVIMQYNKLXXXXXXXXXLYLISIASLAQPVXXPA

SEQ ID NO: 5428 - protein, 36 aa, Artificial Sequence
  GFR-binding peptide
  MOD_RES (34)..(35): Xaa is C or S
  MOD_RES (12)..(13)..(14)..(15)..(16): Xaa is A or G
  MOD_RES (17)..(18)..(19)..(20): Xaa is A or G or is absent
AKVVMNRHKRLXXXXXXXXXYYLVSTASLKTPAXXA

SEQ ID NO: 5429 - protein, 34 aa, Artificial Sequence
  GFR-binding peptide
  MOD_RES (1)..(32)..(33): Xaa is C or S
XSKVVMRHKRLVKPTRGVYYLISTASLDQPVXXP

SEQ ID NO: 5430 - protein, 39 aa, Artificial Sequence
  GFR-binding peptide
  MOD_RES (1)..(3)..(35)..(36): Xaa is C or S
XGXGEVVMDYHYKLVVKENEDKYLMSIPSLETPVXXAKP

SEQ ID NO: 5431 - protein, 44 aa, Artificial Sequence
  GFR-binding peptide
  MOD_RES (1)..(3)..(38)..(39): Xaa is C or S
  MOD_RES (16)..(17)..(18)..(19)..(20): Xaa is A or G
  MOD_RES (21)..(22)..(23)..(24): Xaa is A or G or is absent
XGXEAVSMGERHKRLXXXXXXXXXYYLVSTASLKTPVXXAKGVK

SEQ ID NO: 5432 - protein, 36 aa, Artificial Sequence
  GFR-binding peptide
  MOD_RES (2)..(2): Xaa is C or S
  MOD_RES (15)..(16)..(17)..(18)..(19): Xaa is A or G
  MOD_RES (20)..(21)..(22)..(23): Xaa is A or G or is absent
GXEAVSMGERHKRLXXXXXXXXXYYLVSTASLKTPV

SEQ ID NO: 5433 - protein, 33 aa, Artificial Sequence
  GFR-binding peptide
  MOD_RES (33)..(33): Xaa is C or S
  MOD_RES (11)..(12)..(13)..(14)..(15): Xaa is A or G
  MOD_RES (16)..(17)..(18)..(19): Xaa is A or G or is absent
KVVMNYHYKLXXXXXXXXXKYLVSIPSLKTPAX

SEQ ID NO: 5434 - protein, 38 aa, Artificial Sequence
  GFR-binding peptide
  MOD_RES (2)..(36)..(37): Xaa is C or S
  MOD_RES (14)..(15)..(16)..(17)..(18): Xaa is A or G
  MOD_RES (19)..(20)..(21)..(22): Xaa is A or G or is absent
GXAKVVMNRHKRLXXXXXXXXXYYLVSTASLKTPAXXA

SEQ ID NO: 5435 - protein, 38 aa, Artificial Sequence
  GFR-binding peptide
  MOD_RES (1)..(33)..(34): Xaa is C or S
XGEVVMEQYNKLVVKDYEDLYLMSIASLETPVXXAKPI

SEQ ID NO: 5436 - protein, 33 aa, Artificial Sequence
  GFR-binding peptide
  MOD_RES (1)..(33): Xaa is C or S
XGEVVMDRHKRLVVKENEDYYLMSTASLETPVX

SEQ ID NO: 5437 - protein, 33 aa, Artificial Sequence
  GFR-binding peptide
  MOD_RES (33)..(33): Xaa is C or S
  MOD_RES (11)..(12)..(13)..(14)..(15): Xaa is A or G
  MOD_RES (16)..(17)..(18)..(19): Xaa is A or G or is absent
RVVMNYHYKLXXXXXXXXXKYLVSIPSLKTPAX

SEQ ID NO: 5438 - protein, 33 aa, Artificial Sequence
  GFR-binding peptide
  MOD_RES (33)..(33): Xaa is C or S
  MOD_RES (11)..(12)..(13)..(14)..(15): Xaa is A or G
  MOD_RES (16)..(17)..(18)..(19): Xaa is A or G or is absent
SKVVMRHKRLXXXXXXXXXYYLISTASLDQPVX

SEQ ID NO: 5439 - protein, 40 aa, Artificial Sequence
  GFR-binding peptide
  MOD_RES (1)..(3)..(37): Xaa is C or S
  MOD_RES (15)..(16)..(17)..(18)..(19): Xaa is A or G
  MOD_RES (20)..(21)..(22)..(23): Xaa is A or G or is absent
XGXSRVVMNRYKKLXXXXXXXXXFYLVSIANLKTPAXTPK

SEQ ID NO: 5440 - protein, 35 aa, Artificial Sequence
  GFR-binding peptide
  MOD_RES (1)..(1): Xaa is C or S
  MOD_RES (14)..(15)..(16)..(17)..(18): Xaa is A or G
  MOD_RES (19)..(20)..(21)..(22): Xaa is A or G or is absent
XALHDELTQYNKLXXXXXXXXXLYLVSIASLQVQT

SEQ ID NO: 5441 - protein, 44 aa, Artificial Sequence
  GFR-binding peptide
  MOD_RES (2)..(4)..(41): Xaa is C or S
EXKXALHDELTYHYKLFIPKKRVIEKYLVSIPSLQVQTPRXQVN

SEQ ID NO: 5442 - protein, 36 aa, Artificial Sequence
  GFR-binding peptide
  MOD_RES (1)..(35)..(36): Xaa is C or S
  MOD_RES (13)..(14)..(15)..(16)..(17): Xaa is A or G
  MOD_RES (18)..(19)..(20)..(21): Xaa is A or G or is absent
XGEVVMDQYNKLXXXXXXXXXLYLMSIASLETPVXX

SEQ ID NO: 5443 - protein, 32 aa, Artificial Sequence
  GFR-binding peptide
  MOD_RES (31)..(32): Xaa is C or S
RVVMNQYNKLIVNSSDDLYLVSIASLKTPAXX

SEQ ID NO: 5444 - protein, 38 aa, Artificial Sequence
  GFR-binding peptide
  MOD_RES (2)..(4)..(38): Xaa is C or S
  MOD_RES (16)..(17)..(18)..(19)..(20): Xaa is A or G
  MOD_RES (21)..(22)..(23)..(24): Xaa is A or G or is absent
RXGXGEVVMDQYNKLXXXXXXXXXLYLMSIASLETPVX

SEQ ID NO: 5445 - protein, 33 aa, Artificial Sequence
  GFR-binding peptide
  MOD_RES (31)..(32): Xaa is C or S
EVVMEQYNKLVVKDYEDLYLMSIASLETPVXXA

SEQ ID NO: 5446 - protein, 40 aa, Artificial Sequence
  GFR-binding peptide
  MOD_RES (1)..(34)..(35): Xaa is C or S
  MOD_RES (12)..(13)..(14)..(15)..(16): Xaa is A or G
  MOD_RES (17)..(18)..(19)..(20): Xaa is A or G or is absent
XSRVIMYHYKLXXXXXXXXXKYLISIPSLAQPVXXPAASA

SEQ ID NO: 5447 - protein, 39 aa, Artificial Sequence
  GFR-binding peptide
  MOD_RES (2)..(39): Xaa is C or S
KXALHDELTYHYKLFIPKKRVIEKYLVSIPSLQVQTPRX

SEQ ID NO: 5448 - protein, 35 aa, Artificial Sequence
  GFR-binding peptide
  MOD_RES (1)..(3): Xaa is C or S
  MOD_RES (14)..(15)..(16)..(17)..(18): Xaa is A or G
  MOD_RES (19)..(20)..(21)..(22): Xaa is A or G or is absent
XKXSKVIMRYKKLXXXXXXXXXFYLISIANLDQSV

SEQ ID NO: 5449 - protein, 34 aa, Artificial Sequence
  GFR-binding peptide
  MOD_RES (2)..(34): Xaa is C or S
GXGEVVMEYHYKLVVKDYEDKYLMSIPSLETPVX

SEQ ID NO: 5450 - protein, 33 aa, Artificial Sequence
  GFR-binding peptide
  MOD_RES (1)..(32)..(33): Xaa is C or S
XSKVVMRHKRLVKPTRGVYYLISTASLDQPVXX

SEQ ID NO: 5451 - protein, 33 aa, Artificial Sequence
  GFR-binding peptide
  MOD_RES (12)..(13)..(14)..(15)..(16): Xaa is A or G
  MOD_RES (17)..(18)..(19)..(20): Xaa is A or G or is absent
GEVVMERYKKLXXXXXXXXXFYLMSIANLETPV

SEQ ID NO: 5452 - protein, 34 aa, Artificial Sequence
  GFR-binding peptide
  MOD_RES (2)..(34): Xaa is C or S
GXAKVVMNQYNKLIVNNSSDLYLVSIASLKTPAX

SEQ ID NO: 5453 - protein, 39 aa, Artificial Sequence
  GFR-binding peptide
  MOD_RES (2)..(4)..(38)..(39): Xaa is C or S
  MOD_RES (16)..(17)..(18)..(19)..(20): Xaa is A or G
  MOD_RES (21)..(22)..(23)..(24): Xaa is A or G or is absent
HXGXARVVMNRHKRLXXXXXXXXXYYLVSTASLQTPAXX

SEQ ID NO: 5454 - protein, 36 aa, Artificial Sequence
  GFR-binding peptide
  MOD_RES (32)..(33): Xaa is C or S
SRVVMNRYKKLIVNSSDDFYLVSIANLKTPAXXPKP

SEQ ID NO: 5455 - protein, 34 aa, Artificial Sequence
  GFR-binding peptide
  MOD_RES (31)..(32): Xaa is C or S
EVVMDQYNKLVVKENEDLYLMSIASLETPVXXAK

SEQ ID NO: 5456 - protein, 41 aa, Artificial Sequence
  GFR-binding peptide
  MOD_RES (1)..(3)..(37)..(38): Xaa is C or S
  MOD_RES (15)..(16)..(17)..(18)..(19): Xaa is A or G
  MOD_RES (20)..(21)..(22)..(23): Xaa is A or G or is absent
XGXGEVVMDQYNKLXXXXXXXXXLYLMSIASLETPVXXAKP

SEQ ID NO: 5457 - protein, 31 aa, Artificial Sequence
  GFR-binding peptide
  MOD_RES (1)..(1): Xaa is C or S
XSKVIMRYKKLIKPTKGIFYLISIANLDQSV

SEQ ID NO: 5458 - protein, 40 aa, Artificial Sequence
  GFR-binding peptide
  MOD_RES (34)..(35): Xaa is C or S
  MOD_RES (12)..(13)..(14)..(15)..(16): Xaa is A or G
  MOD_RES (17)..(18)..(19)..(20): Xaa is A or G or is absent
GEVVMDRHKRLXXXXXXXXXYYLMSTASLETPVXXAKPIK

SEQ ID NO: 5459 - protein, 40 aa, Artificial Sequence
  GFR-binding peptide
  MOD_RES (2)..(35)..(36): Xaa is C or S
  MOD_RES (13)..(14)..(15)..(16)..(17): Xaa is A or G
  MOD_RES (18)..(19)..(20)..(21): Xaa is A or G or is absent
KXSRVIMQYNKLXXXXXXXXXLYLISIASLAQPVXXPAAS

SEQ ID NO: 5460 - protein, 41 aa, Artificial Sequence
  GFR-binding peptide
  MOD_RES (2)..(4)..(37)..(38): Xaa is C or S
RXGXEAVSMGEQYNKLTPVGMDDLYLVSIASLKTPVXXAKG

SEQ ID NO: 5461 - protein, 38 aa, Artificial Sequence
  GFR-binding peptide
  MOD_RES (1)..(3)..(37): Xaa is C or S
  MOD_RES (15)..(16)..(17)..(18)..(19): Xaa is A or G
  MOD_RES (20)..(21)..(22)..(23): Xaa is A or G or is absent
XGXSRVVMNRHKRLXXXXXXXXXYYLVSTASLKTPAXT

SEQ ID NO: 5462 - protein, 37 aa, Artificial Sequence
  GFR-binding peptide
  MOD_RES (1)..(34)..(35): Xaa is C or S
  MOD_RES (12)..(13)..(14)..(15)..(16): Xaa is A or G
  MOD_RES (17)..(18)..(19)..(20): Xaa is A or G or is absent
XSRVIMRHKRLXXXXXXXXXYYLISTASLAQPVXXPA

SEQ ID NO: 5463 - protein, 36 aa, Artificial Sequence
  GFR-binding peptide
  MOD_RES (1)..(3): Xaa is C or S
  MOD_RES (15)..(16)..(17)..(18)..(19): Xaa is A or G
  MOD_RES (20)..(21)..(22)..(23): Xaa is A or G or is absent
XGXGEVVMDQYNKLXXXXXXXXXLYLMSIASLETPV

SEQ ID NO: 5464 - protein, 39 aa, Artificial Sequence
  GFR-binding peptide
  MOD_RES (2)..(4)..(39): Xaa is C or S
  MOD_RES (17)..(18)..(19)..(20)..(21): Xaa is A or G
  MOD_RES (22)..(23)..(24)..(25): Xaa is A or G or is absent
RXGXEAVSMGEQYNKLXXXXXXXXXLYLVSIASLKTPVX

SEQ ID NO: 5465 - protein, 38 aa, Artificial Sequence
  GFR-binding peptide
  MOD_RES (1)..(3)..(38): Xaa is C or S
  MOD_RES (16)..(17)..(18)..(19)..(20): Xaa is A or G
  MOD_RES (21)..(22)..(23)..(24): Xaa is A or G or is absent
XGXEAVSMGERHKRLXXXXXXXXXYYLVSTASLKTPVX

SEQ ID NO: 5466 - protein, 43 aa, Artificial Sequence
  GFR-binding peptide
  MOD_RES (2)..(4)..(37)..(38): Xaa is C or S
  MOD_RES (15)..(16)..(17)..(18)..(19): Xaa is A or G
  MOD_RES (20)..(21)..(22)..(23): Xaa is A or G or is absent
SXKXSKVVMYHYKLXXXXXXXXXKYLISIPSLDQPVXXPSASA

SEQ ID NO: 5467 - protein, 41 aa, Artificial Sequence
  GFR-binding peptide
  MOD_RES (2)..(35)..(36): Xaa is C or S
  MOD_RES (13)..(14)..(15)..(16)..(17): Xaa is A or G
  MOD_RES (18)..(19)..(20)..(21): Xaa is A or G or is absent
KXSRVIMYHYKLXXXXXXXXXKYLISIPSLAQPVXXPAASA

SEQ ID NO: 5468 - protein, 31 aa, Artificial Sequence
  GFR-binding peptide
  MOD_RES (31)..(31): Xaa is C or S
SRVIMYHYKLVKPKRGVKYLISIPSLAQPVX

SEQ ID NO: 5469 - protein, 37 aa, Artificial Sequence
  GFR-binding peptide
  MOD_RES (31)..(32): Xaa is C or S
SKVVMRHKRLVKPTRGVYYLISTASLDQPVXXPSASA

SEQ ID NO: 5470 - protein, 38 aa, Artificial Sequence
  GFR-binding peptide
  MOD_RES (33)..(34): Xaa is C or S
  MOD_RES (11)..(12)..(13)..(14)..(15): Xaa is A or G
  MOD_RES (16)..(17)..(18)..(19): Xaa is A or G or is absent
SRVIMRHKRLXXXXXXXXXYYLISTASLAQPVXXPAAS

SEQ ID NO: 5471 - protein, 39 aa, Artificial Sequence
  GFR-binding peptide
  MOD_RES (1)..(36)..(37): Xaa is C or S
  MOD_RES (14)..(15)..(16)..(17)..(18): Xaa is A or G
  MOD_RES (19)..(20)..(21)..(22): Xaa is A or G or is absent
XEAVSMGERYKKLXXXXXXXXXFYLVSIANLKTPVXXAK

SEQ ID NO: 5472 - protein, 43 aa, Artificial Sequence
  GFR-binding peptide
  MOD_RES (1)..(3)..(37)..(38): Xaa is C or S
  MOD_RES (15)..(16)..(17)..(18)..(19): Xaa is A or G
  MOD_RES (20)..(21)..(22)..(23): Xaa is A or G or is absent
XGXGEVVMDRHKRLXXXXXXXXXYYLMSTASLETPVXXAKPIK

SEQ ID NO: 5473 - protein, 41 aa, Artificial Sequence
  GFR-binding peptide
  MOD_RES (1)..(3)..(40): Xaa is C or S
  MOD_RES (16)..(17)..(18)..(19)..(20): Xaa is A or G
  MOD_RES (21)..(22)..(23)..(24): Xaa is A or G or is absent
XKXALHDELTRHKRLXXXXXXXXXYYLVSTASLQVQTPRXQ

SEQ ID NO: 5474 - protein, 37 aa, Artificial Sequence
  GFR-binding peptide
  MOD_RES (2)..(33)..(34): Xaa is C or S
KXSRVIMQYNKLVKPKRGVLYLISIASLAQPVXXPAA

SEQ ID NO: 5475 - protein, 36 aa, Artificial Sequence
  GFR-binding peptide
  MOD_RES (1)..(33): Xaa is C or S
XSRVVMNRHKRLIVNSSDDYYLVSTASLKTPAXTPK

SEQ ID NO: 5476 - protein, 32 aa, Artificial Sequence
  GFR-binding peptide
  MOD_RES (31)..(32): Xaa is C or S
RVVMNRHKRLIVNSSDDYYLVSTASLKTPAXX

SEQ ID NO: 5477 - protein, 44 aa, Artificial Sequence
  GFR-binding peptide
  MOD_RES (2)..(4)..(38)..(39): Xaa is C or S
  MOD_RES (16)..(17)..(18)..(19)..(20): Xaa is A or G
  MOD_RES (21)..(22)..(23)..(24): Xaa is A or G or is absent
RXGXGEVVMERYKKLXXXXXXXXXFYLMSIANLETPVXXAKPIS

SEQ ID NO: 5478 - protein, 35 aa, Artificial Sequence
  GFR-binding peptide
  MOD_RES (12)..(13)..(14)..(15)..(16): Xaa is A or G
  MOD_RES (17)..(18)..(19)..(20): Xaa is A or G or is absent
LHDELTRYKKLXXXXXXXXXFYLVSIANLQVQTPR

SEQ ID NO: 5479 - protein, 38 aa, Artificial Sequence
  GFR-binding peptide
  MOD_RES (1)..(33)..(34): Xaa is C or S
XSRVVMNQYNKLIVNSSDDLYLVSIASLKTPAXXPKPV

SEQ ID NO: 5480 - protein, 37 aa, Artificial Sequence
  GFR-binding peptide
  MOD_RES (1)..(34)..(35): Xaa is C or S
  MOD_RES (12)..(13)..(14)..(15)..(16): Xaa is A or G
  MOD_RES (17)..(18)..(19)..(20): Xaa is A or G or is absent
XSRVIMQYNKLXXXXXXXXXLYLISIASLAQPVXXPA

SEQ ID NO: 5481 - protein, 38 aa, Artificial Sequence
  GFR-binding peptide
  MOD_RES (2)..(4)..(37)..(38): Xaa is C or S
RXGXEAVSMGEQYNKLTPVGMDDLYLVSIASLKTPVXX

SEQ ID NO: 5482 - protein, 35 aa, Artificial Sequence
  GFR-binding peptide
  MOD_RES (12)..(13)..(14)..(15)..(16): Xaa is A or G
  MOD_RES (17)..(18)..(19)..(20): Xaa is A or G or is absent
LHDELTQYNKLXXXXXXXXXLYLVSIASLQVQTPR

SEQ ID NO: 5483 - protein, 34 aa, Artificial Sequence
  GFR-binding peptide
  MOD_RES (2)..(34): Xaa is C or S
GXAKVVMNYHYKLIVNNSSDKYLVSIPSLKTPAX

SEQ ID NO: 5484 - protein, 39 aa, Artificial Sequence
  GFR-binding peptide
  MOD_RES (2)..(35)..(36): Xaa is C or S
  MOD_RES (13)..(14)..(15)..(16)..(17): Xaa is A or G
  MOD_RES (18)..(19)..(20)..(21): Xaa is A or G or is absent
KXSRVIMRYKKLXXXXXXXXXFYLISIANLAQPVXXPAA

SEQ ID NO: 5485 - protein, 39 aa, Artificial Sequence
  GFR-binding peptide
  MOD_RES (2)..(37)..(38): Xaa is C or S
  MOD_RES (15)..(16)..(17)..(18)..(19): Xaa is A or G
  MOD_RES (20)..(21)..(22)..(23): Xaa is A or G or is absent
GXEAVSMGEQYNKLXXXXXXXXXLYLVSIASLKTPVXXA

SEQ ID NO: 5486 - protein, 36 aa, Artificial Sequence
  GFR-binding peptide
  MOD_RES (2)..(4)..(35)..(36): Xaa is C or S
SXKXSKVIMRHKRLIKPTKGIYYLISTASLDQSVXX

SEQ ID NO: 5487 - protein, 43 aa, Artificial Sequence
  GFR-binding peptide
  MOD_RES (2)..(4)..(38)..(39): Xaa is C or S
  MOD_RES (16)..(17)..(18)..(19)..(20): Xaa is A or G
  MOD_RES (21)..(22)..(23)..(24): Xaa is A or G or is absent
HXGXSRVVMNRYKKLXXXXXXXXXFYLVSIANLKTPAXXPKPV

SEQ ID NO: 5488 - protein, 38 aa, Artificial Sequence
  GFR-binding peptide
  MOD_RES (2)..(34)..(35): Xaa is C or S
GXGEVVMDRHKRLVVKENEDYYLMSTASLETPVXXAKP

SEQ ID NO: 5489 - protein, 36 aa, Artificial Sequence
  GFR-binding peptide
  MOD_RES (31)..(32): Xaa is C or S
EVVMDYHYKLVVKENEDKYLMSIPSLETPVXXAKPI

SEQ ID NO: 5490 - protein, 36 aa, Artificial Sequence
  GFR-binding peptide
  MOD_RES (32)..(33): Xaa is C or S
ARVVMNRHKRLIVNSSDDYYLVSTASLQTPAXXPKP

SEQ ID NO: 5491 - protein, 36 aa, Artificial Sequence
  GFR-binding peptide
  MOD_RES (33)..(34): Xaa is C or S
  MOD_RES (11)..(12)..(13)..(14)..(15): Xaa is A or G
  MOD_RES (16)..(17)..(18)..(19): Xaa is A or G or is absent
EVVMDRHKRLXXXXXXXXXYYLMSTASLETPVXXAK

SEQ ID NO: 5492 - protein, 32 aa, Artificial Sequence
  GFR-binding peptide
  MOD_RES (31)..(32): Xaa is C or S
RVVMNQYNKLIVNSSDDLYLVSIASLQTPAXX

SEQ ID NO: 5493 - protein, 34 aa, Artificial Sequence
  GFR-binding peptide
  MOD_RES (1)..(3): Xaa is C or S
XGXAKVVMNYHYKLIVNNSSDKYLVSIPSLKTPA

SEQ ID NO: 5494 - protein, 40 aa, Artificial Sequence
  GFR-binding peptide
  MOD_RES (2)..(4)..(38): Xaa is C or S
  MOD_RES (16)..(17)..(18)..(19)..(20): Xaa is A or G
  MOD_RES (21)..(22)..(23)..(24): Xaa is A or G or is absent
HXGXSRVVMNQYNKLXXXXXXXXXLYLVSIASLKTPAXTP

SEQ ID NO: 5495 - protein, 42 aa, Artificial Sequence
  GFR-binding peptide
  MOD_RES (2)..(4)..(38)..(39): Xaa is C or S
  MOD_RES (16)..(17)..(18)..(19)..(20): Xaa is A or G
  MOD_RES (21)..(22)..(23)..(24): Xaa is A or G or is absent
HXGXAKVVMNQYNKLXXXXXXXXXLYLVSIASLKTPAXXAKP

SEQ ID NO: 5496 - protein, 34 aa, Artificial Sequence
  GFR-binding peptide
  MOD_RES (31)..(32): Xaa is C or S
SRVIMRHKRLVKPKRGVYYLISTASLAQPVXXPA

SEQ ID NO: 5497 - protein, 38 aa, Artificial Sequence
  GFR-binding peptide
  MOD_RES (2)..(4): Xaa is C or S
EXKXALHDELTYHYKLFIPKKRVIEKYLVSIPSLQVQT

SEQ ID NO: 5498 - protein, 35 aa, Artificial Sequence
  GFR-binding peptide
  MOD_RES (2)..(2): Xaa is C or S
  MOD_RES (14)..(15)..(16)..(17)..(18): Xaa is A or G
  MOD_RES (19)..(20)..(21)..(22): Xaa is A or G or is absent
GXSRVVMNQYNKLXXXXXXXXXLYLVSIASLKTPA

SEQ ID NO: 5499 - protein, 34 aa, Artificial Sequence
  GFR-binding peptide
  MOD_RES (2)..(2): Xaa is C or S
  MOD_RES (13)..(14)..(15)..(16)..(17): Xaa is A or G
  MOD_RES (18)..(19)..(20)..(21): Xaa is A or G or is absent
KXSRVIMQYNKLXXXXXXXXXLYLISIASLAQPV

SEQ ID NO: 5500 - protein, 35 aa, Artificial Sequence
  GFR-binding peptide
LHDELTRHKRLFIPKKRVIEYYLVSTASLQVQTPR

SEQ ID NO: 5501 - protein, 39 aa, Artificial Sequence
  GFR-binding peptide
  MOD_RES (1)..(35)..(36): Xaa is C or S
  MOD_RES (13)..(14)..(15)..(16)..(17): Xaa is A or G
  MOD_RES (18)..(19)..(20)..(21): Xaa is A or G or is absent
XGEVVMERYKKLXXXXXXXXXFYLMSIANLETPVXXAKP

SEQ ID NO: 5502 - protein, 40 aa, Artificial Sequence
  GFR-binding peptide
  MOD_RES (1)..(3)..(38)..(39): Xaa is C or S
  MOD_RES (16)..(17)..(18)..(19)..(20): Xaa is A or G
  MOD_RES (21)..(22)..(23)..(24): Xaa is A or G or is absent
XGXEAVSMGERYKKLXXXXXXXXXFYLVSIANLKTPVXXA

SEQ ID NO: 5503 - protein, 35 aa, Artificial Sequence
  GFR-binding peptide
  MOD_RES (2)..(2): Xaa is C or S
  MOD_RES (14)..(15)..(16)..(17)..(18): Xaa is A or G
  MOD_RES (19)..(20)..(21)..(22): Xaa is A or G or is absent
GXGEVVMDRYKKLXXXXXXXXXFYLMSIANLETPV

SEQ ID NO: 5504 - protein, 37 aa, Artificial Sequence
  GFR-binding peptide
  MOD_RES (1)..(33)..(34): Xaa is C or S
XARVVMNYHYKLIVNSSDDKYLVSIPSLQTPAXXPKP

SEQ ID NO: 5505 - protein, 37 aa, Artificial Sequence
  GFR-binding peptide
  MOD_RES (1)..(1): Xaa is C or S
XALHDELTQYNKLFIPKKRVIELYLVSIASLQVQTPR

SEQ ID NO: 5506 - protein, 43 aa, Artificial Sequence
  GFR-binding peptide
  MOD_RES (1)..(3)..(38)..(39): Xaa is C or S
  MOD_RES (16)..(17)..(18)..(19)..(20): Xaa is A or G
  MOD_RES (21)..(22)..(23)..(24): Xaa is A or G or is absent
XGXEAVSMGERHKRLXXXXXXXXXYYLVSTASLKTPVXXAKGV

SEQ ID NO: 5507 - protein, 40 aa, Artificial Sequence
  GFR-binding peptide
  MOD_RES (1)..(3)..(36)..(37): Xaa is C or S
  MOD_RES (14)..(15)..(16)..(17)..(18): Xaa is A or G
  MOD_RES (19)..(20)..(21)..(22): Xaa is A or G or is absent
XKXSKVVMRYKKLXXXXXXXXXFYLISIANLDQPVXXPSA

SEQ ID NO: 5508 - protein, 36 aa, Artificial Sequence
  GFR-binding peptide
  MOD_RES (2)..(36): Xaa is C or S
  MOD_RES (14)..(15)..(16)..(17)..(18): Xaa is A or G
  MOD_RES (19)..(20)..(21)..(22): Xaa is A or G or is absent
GXGEVVMEQYNKLXXXXXXXXXLYLMSIASLETPVX

SEQ ID NO: 5509 - protein, 41 aa, Artificial Sequence
  GFR-binding peptide
  MOD_RES (1)..(35)..(36): Xaa is C or S
  MOD_RES (13)..(14)..(15)..(16)..(17): Xaa is A or G
  MOD_RES (18)..(19)..(20)..(21): Xaa is A or G or is absent
XAKVVMNYHYKLXXXXXXXXXKYLVSIPSLKTPAXXAKPVA

SEQ ID NO: 5510 - protein, 34 aa, Artificial Sequence
  GFR-binding peptide
  MOD_RES (32)..(33): Xaa is C or S
SRVVMNYHYKLIVNSSDDKYLVSIPSLKTPAXXP

SEQ ID NO: 5511 - protein, 41 aa, Artificial Sequence
  GFR-binding peptide
  MOD_RES (1)..(35)..(36): Xaa is C or S
  MOD_RES (13)..(14)..(15)..(16)..(17): Xaa is A or G
  MOD_RES (18)..(19)..(20)..(21): Xaa is A or G or is absent
XGEVVMDQYNKLXXXXXXXXXLYLMSIASLETPVXXAKPIK

SEQ ID NO: 5512 - protein, 35 aa, Artificial Sequence
  GFR-binding peptide
  MOD_RES (2)..(4): Xaa is C or S
HXGXARVVMNYHYKLIVNSSDDKYLVSIPSLQTPA

SEQ ID NO: 5513 - protein, 38 aa, Artificial Sequence
  GFR-binding peptide
  MOD_RES (33)..(34): Xaa is C or S
  MOD_RES (11)..(12)..(13)..(14)..(15): Xaa is A or G
  MOD_RES (16)..(17)..(18)..(19): Xaa is A or G or is absent
RVVMNRHKRLXXXXXXXXXYYLVSTASLQTPAXXPKPV

SEQ ID NO: 5514 - protein, 40 aa, Artificial Sequence
  GFR-binding peptide
  MOD_RES (2)..(4): Xaa is C or S
  MOD_RES (17)..(18)..(19)..(20)..(21): Xaa is A or G
  MOD_RES (22)..(23)..(24)..(25): Xaa is A or G or is absent
EXKXALHDELTRYKKLXXXXXXXXXFYLVSIANLQVQTPR

SEQ ID NO: 5515 - protein, 34 aa, Artificial Sequence
  GFR-binding peptide
  MOD_RES (32)..(32): Xaa is C or S
SRVVMNRHKRLIVNSSDDYYLVSTASLKTPAXTP

SEQ ID NO: 5516 - protein, 42 aa, Artificial Sequence
  GFR-binding peptide
  MOD_RES (2)..(36)..(37): Xaa is C or S
  MOD_RES (14)..(15)..(16)..(17)..(18): Xaa is A or G
  MOD_RES (19)..(20)..(21)..(22): Xaa is A or G or is absent
GXGEVVMEYHYKLXXXXXXXXXKYLMSIPSLETPVXXAKPIS

SEQ ID NO: 5517 - protein, 32 aa, Artificial Sequence
  GFR-binding peptide
  MOD_RES (31)..(32): Xaa is C or S
KVVMNYHYKLIVNNSSDKYLVSIPSLKTPAXX

SEQ ID NO: 5518 - protein, 35 aa, Artificial Sequence
  GFR-binding peptide
  MOD_RES (32)..(32): Xaa is C or S
SRVVMNRYKKLIVNSSDDFYLVSIANLKTPAXTPK

SEQ ID NO: 5519 - protein, 35 aa, Artificial Sequence
  GFR-binding peptide
  MOD_RES (31)..(32): Xaa is C or S
RVVMNRYKKLIVNSSDDFYLVSIANLKTPAXXPKP

SEQ ID NO: 5520 - protein, 37 aa, Artificial Sequence
  GFR-binding peptide
  MOD_RES (1)..(35)..(36): Xaa is C or S
  MOD_RES (13)..(14)..(15)..(16)..(17): Xaa is A or G
  MOD_RES (18)..(19)..(20)..(21): Xaa is A or G or is absent
XSRVVMNRYKKLXXXXXXXXXFYLVSIANLKTPAXXP

SEQ ID NO: 5521 - protein, 41 aa, Artificial Sequence
  GFR-binding peptide
  MOD_RES (2)..(4)..(36)..(37): Xaa is C or S
RXGXGEVVMDRHKRLVVKENEDYYLMSTASLETPVXXAKPI

SEQ ID NO: 5522 - protein, 39 aa, Artificial Sequence
  GFR-binding peptide
  MOD_RES (1)..(3)..(36)..(37): Xaa is C or S
XGXEAVSMGERYKKLTPVGMDDFYLVSIANLKTPVXXAK

SEQ ID NO: 5523 - protein, 35 aa, Artificial Sequence
  GFR-binding peptide
  MOD_RES (2)..(35): Xaa is C or S
  MOD_RES (13)..(14)..(15)..(16)..(17): Xaa is A or G
  MOD_RES (18)..(19)..(20)..(21): Xaa is A or G or is absent
KXSRVIMRHKRLXXXXXXXXXYYLISTASLAQPVX

SEQ ID NO: 5524 - protein, 34 aa, Artificial Sequence
  GFR-binding peptide
HDELTQYNKLFIPKKRVIELYLVSIASLQVQTPR

SEQ ID NO: 5525 - protein, 38 aa, Artificial Sequence
  GFR-binding peptide
  MOD_RES (2)..(2): Xaa is C or S
  MOD_RES (15)..(16)..(17)..(18)..(19): Xaa is A or G
  MOD_RES (20)..(21)..(22)..(23): Xaa is A or G or is absent
KXALHDELTYHYKLXXXXXXXXXKYLVSIPSLQVQTPR

SEQ ID NO: 5526 - protein, 36 aa, Artificial Sequence
  GFR-binding peptide
  MOD_RES (2)..(2): Xaa is C or S
KXALHDELTRHKRLFIPKKRVIEYYLVSTASLQVQT

SEQ ID NO: 5527 - protein, 32 aa, Artificial Sequence
  GFR-binding peptide
  MOD_RES (32)..(32): Xaa is C or S
SRVVMNRHKRLIVNSSDDYYLVSTASLKTPAX

SEQ ID NO: 5528 - protein, 32 aa, Artificial Sequence
  GFR-binding peptide
  MOD_RES (31)..(32): Xaa is C or S
RVVMNYHYKLIVNSSDDKYLVSIPSLQTPAXX

SEQ ID NO: 5529 - protein, 35 aa, Artificial Sequence
  GFR-binding peptide
  MOD_RES (33)..(34): Xaa is C or S
  MOD_RES (11)..(12)..(13)..(14)..(15): Xaa is A or G
  MOD_RES (16)..(17)..(18)..(19): Xaa is A or G or is absent
SKVIMRHKRLXXXXXXXXXYYLISTASLDQSVXXP

SEQ ID NO: 5530 - protein, 38 aa, Artificial Sequence
  GFR-binding peptide
  MOD_RES (2)..(36)..(37): Xaa is C or S
  MOD_RES (14)..(15)..(16)..(17)..(18): Xaa is A or G
  MOD_RES (19)..(20)..(21)..(22): Xaa is A or G or is absent
GXAKVVMNQYNKLXXXXXXXXXLYLVSIASLKTPAXXA

SEQ ID NO: 5531 - protein, 36 aa, Artificial Sequence
  GFR-binding peptide
  MOD_RES (1)..(35)..(36): Xaa is C or S
  MOD_RES (13)..(14)..(15)..(16)..(17): Xaa is A or G
  MOD_RES (18)..(19)..(20)..(21): Xaa is A or G or is absent
XGEVVMDRHKRLXXXXXXXXXYYLMSTASLETPVXX

SEQ ID NO: 5532 - protein, 38 aa, Artificial Sequence
  GFR-binding peptide
  MOD_RES (33)..(34): Xaa is C or S
  MOD_RES (11)..(12)..(13)..(14)..(15): Xaa is A or G
  MOD_RES (16)..(17)..(18)..(19): Xaa is A or G or is absent
RVVMNRYKKLXXXXXXXXXFYLVSIANLKTPAXXPKPV

SEQ ID NO: 5533 - protein, 32 aa, Artificial Sequence
  GFR-binding peptide
  MOD_RES (1)..(32): Xaa is C or S
XSKVIMYHYKLIKPTKGIKYLISIPSLDQSVX

SEQ ID NO: 5534 - protein, 39 aa, Artificial Sequence
  GFR-binding peptide
  MOD_RES (2)..(36)..(37): Xaa is C or S
  MOD_RES (14)..(15)..(16)..(17)..(18): Xaa is A or G
  MOD_RES (19)..(20)..(21)..(22): Xaa is A or G or is absent
GXGEVVMEQYNKLXXXXXXXXXLYLMSIASLETPVXXAK

SEQ ID NO: 5535 - protein, 39 aa, Artificial Sequence
  GFR-binding peptide
  MOD_RES (34)..(35): Xaa is C or S
  MOD_RES (12)..(13)..(14)..(15)..(16): Xaa is A or G
  MOD_RES (17)..(18)..(19)..(20): Xaa is A or G or is absent
AKVVMNQYNKLXXXXXXXXXLYLVSIASLKTPAXXAKPV

SEQ ID NO: 5536 - protein, 38 aa, Artificial Sequence
  GFR-binding peptide
  MOD_RES (2)..(36)..(37): Xaa is C or S
  MOD_RES (14)..(15)..(16)..(17)..(18): Xaa is A or G
  MOD_RES (19)..(20)..(21)..(22): Xaa is A or G or is absent
GXGEVVMDQYNKLXXXXXXXXXLYLMSIASLETPVXXA

SEQ ID NO: 5537 - protein, 38 aa, Artificial Sequence
  GFR-binding peptide
  MOD_RES (2)..(36)..(37): Xaa is C or S
  MOD_RES (14)..(15)..(16)..(17)..(18): Xaa is A or G
  MOD_RES (19)..(20)..(21)..(22): Xaa is A or G or is absent
GXGEVVMERHKRLXXXXXXXXXYYLMSTASLETPVXXA

SEQ ID NO: 5538 - protein, 39 aa, Artificial Sequence
  GFR-binding peptide
  MOD_RES (1)..(33)..(34): Xaa is C or S
XAKVVMNRHKRLIVNNSSDYYLVSTASLKTPAXXAKPVA

SEQ ID NO: 5539 - protein, 42 aa, Artificial Sequence
  GFR-binding peptide
  MOD_RES (1)..(3)..(37)..(38): Xaa is C or S
  MOD_RES (15)..(16)..(17)..(18)..(19): Xaa is A or G
  MOD_RES (20)..(21)..(22)..(23): Xaa is A or G or is absent
XGXGEVVMERHKRLXXXXXXXXXYYLMSTASLETPVXXAKPI

SEQ ID NO: 5540 - protein, 35 aa, Artificial Sequence
  GFR-binding peptide
  MOD_RES (2)..(2): Xaa is C or S
  MOD_RES (14)..(15)..(16)..(17)..(18): Xaa is A or G
  MOD_RES (19)..(20)..(21)..(22): Xaa is A or G or is absent
GXAKVVMNRYKKLXXXXXXXXXFYLVSIANLKTPA

SEQ ID NO: 5541 - protein, 40 aa, Artificial Sequence
  GFR-binding peptide
  MOD_RES (1)..(35)..(36): Xaa is C or S
  MOD_RES (13)..(14)..(15)..(16)..(17): Xaa is A or G
  MOD_RES (18)..(19)..(20)..(21): Xaa is A or G or is absent
XAKVVMNQYNKLXXXXXXXXXLYLVSIASLKTPAXXAKPV

SEQ ID NO: 5542 - protein, 35 aa, Artificial Sequence
  GFR-binding peptide
  MOD_RES (31)..(32): Xaa is C or S
SKVIMYHYKLIKPTKGIKYLISIPSLDQSVXXPSA

SEQ ID NO: 5543 - protein, 40 aa, Artificial Sequence
  GFR-binding peptide
  MOD_RES (2)..(4): Xaa is C or S
  MOD_RES (17)..(18)..(19)..(20)..(21): Xaa is A or G
  MOD_RES (22)..(23)..(24)..(25): Xaa is A or G or is absent
EXKXALHDELTRHKRLXXXXXXXXXYYLVSTASLQVQTPR

SEQ ID NO: 5544 - protein, 40 aa, Artificial Sequence
  GFR-binding peptide
  MOD_RES (1)..(3)..(37)..(38): Xaa is C or S
  MOD_RES (15)..(16)..(17)..(18)..(19): Xaa is A or G
  MOD_RES (20)..(21)..(22)..(23): Xaa is A or G or is absent
XGXGEVVMERYKKLXXXXXXXXXFYLMSIANLETPVXXAK

SEQ ID NO: 5545 - protein, 35 aa, Artificial Sequence
  GFR-binding peptide
  MOD_RES (33)..(34): Xaa is C or S
  MOD_RES (11)..(12)..(13)..(14)..(15): Xaa is A or G
  MOD_RES (16)..(17)..(18)..(19): Xaa is A or G or is absent
EVVMDYHYKLXXXXXXXXXKYLMSIPSLETPVXXA

SEQ ID NO: 5546 - protein, 31 aa, Artificial Sequence
  GFR-binding peptide
ARVVMNQYNKLIVNSSDDLYLVSIASLQTPA

SEQ ID NO: 5547 - protein, 36 aa, Artificial Sequence
  GFR-binding peptide
  MOD_RES (1)..(3)..(36): Xaa is C or S
  MOD_RES (14)..(15)..(16)..(17)..(18): Xaa is A or G
  MOD_RES (19)..(20)..(21)..(22): Xaa is A or G or is absent
XKXSRVIMQYNKLXXXXXXXXXLYLISIASLAQPVX

SEQ ID NO: 5548 - protein, 33 aa, Artificial Sequence
  GFR-binding peptide
  MOD_RES (1)..(33): Xaa is C or S
XARVVMNRHKRLIVNSSDDYYLVSTASLQTPAX

SEQ ID NO: 5549 - protein, 39 aa, Artificial Sequence
  GFR-binding peptide
  MOD_RES (33)..(34): Xaa is C or S
  MOD_RES (11)..(12)..(13)..(14)..(15): Xaa is A or G
  MOD_RES (16)..(17)..(18)..(19): Xaa is A or G or is absent
RVVMNYHYKLXXXXXXXXXKYLVSIPSLKTPAXXPKPVY

SEQ ID NO: 5550 - protein, 43 aa, Artificial Sequence
  GFR-binding peptide
  MOD_RES (2)..(4)..(41): Xaa is C or S
  MOD_RES (17)..(18)..(19)..(20)..(21): Xaa is A or G
  MOD_RES (22)..(23)..(24)..(25): Xaa is A or G or is absent
EXKXALHDELTRYKKLXXXXXXXXXFYLVSIANLQVQTPRXQV

SEQ ID NO: 5551 - protein, 34 aa, Artificial Sequence
  GFR-binding peptide
  MOD_RES (2)..(4): Xaa is C or S
SXKXSKVVMRYKKLVKPTRGVFYLISIANLDQPV

SEQ ID NO: 5552 - protein, 41 aa, Artificial Sequence
  GFR-binding peptide
  MOD_RES (2)..(4)..(38): Xaa is C or S
  MOD_RES (16)..(17)..(18)..(19)..(20): Xaa is A or G
  MOD_RES (21)..(22)..(23)..(24): Xaa is A or G or is absent
HXGXSRVVMNYHYKLXXXXXXXXXKYLVSIPSLKTPAXTPK

SEQ ID NO: 5553 - protein, 37 aa, Artificial Sequence
  GFR-binding peptide
  MOD_RES (1)..(3): Xaa is C or S
XKXALHDELTYHYKLFIPKKRVIEKYLVSIPSLQVQT

SEQ ID NO: 5554 - protein, 37 aa, Artificial Sequence
  GFR-binding peptide
  MOD_RES (1)..(3)..(35)..(36): Xaa is C or S
XGXSRVVMNYHYKLIVNSSDDKYLVSIPSLKTPAXXP

SEQ ID NO: 5555 - protein, 37 aa, Artificial Sequence
  GFR-binding peptide
  MOD_RES (1)..(33)..(34): Xaa is C or S
XSRVVMNRHKRLIVNSSDDYYLVSTASLKTPAXXPKP

SEQ ID NO: 5556 - protein, 32 aa, Artificial Sequence
  GFR-binding peptide
  MOD_RES (31)..(32): Xaa is C or S
SKVVMRHKRLVKPTRGVYYLISTASLDQPVXX

SEQ ID NO: 5557 - protein, 35 aa, Artificial Sequence
  GFR-binding peptide
  MOD_RES (1)..(35): Xaa is C or S
  MOD_RES (13)..(14)..(15)..(16)..(17): Xaa is A or G
  MOD_RES (18)..(19)..(20)..(21): Xaa is A or G or is absent
XGEVVMEYHYKLXXXXXXXXXKYLMSIPSLETPVX

SEQ ID NO: 5558 - protein, 37 aa, Artificial Sequence
  GFR-binding peptide
  MOD_RES (1)..(3): Xaa is C or S
  MOD_RES (16)..(17)..(18)..(19)..(20): Xaa is A or G
  MOD_RES (21)..(22)..(23)..(24): Xaa is A or G or is absent
XGXEAVSMGEYHYKLXXXXXXXXXKYLVSIPSLKTPV

SEQ ID NO: 5559 - protein, 42 aa, Artificial Sequence
  GFR-binding peptide
  MOD_RES (2)..(4)..(39)..(40): Xaa is C or S
  MOD_RES (17)..(18)..(19)..(20)..(21): Xaa is A or G
  MOD_RES (22)..(23)..(24)..(25): Xaa is A or G or is absent
RXGXEAVSMGERYKKLXXXXXXXXXFYLVSIANLKTPVXXAK

SEQ ID NO: 5560 - protein, 42 aa, Artificial Sequence
  GFR-binding peptide
  MOD_RES (1)..(3)..(37)..(38): Xaa is C or S
  MOD_RES (15)..(16)..(17)..(18)..(19): Xaa is A or G
  MOD_RES (20)..(21)..(22)..(23): Xaa is A or G or is absent
XGXARVVMNRHKRLXXXXXXXXXYYLVSTASLQTPAXXPKPV

SEQ ID NO: 5561 - protein, 40 aa, Artificial Sequence
  GFR-binding peptide
  MOD_RES (1)..(3)..(35)..(36): Xaa is C or S
XGXARVVMNYHYKLIVNSSDDKYLVSIPSLQTPAXXPKPV

SEQ ID NO: 5562 - protein, 36 aa, Artificial Sequence
  GFR-binding peptide
  MOD_RES (31)..(32): Xaa is C or S
EVVMEQYNKLVVKDYEDLYLMSIASLETPVXXAKPI

SEQ ID NO: 5563 - protein, 36 aa, Artificial Sequence
  GFR-binding peptide
  MOD_RES (2)..(36): Xaa is C or S
  MOD_RES (14)..(15)..(16)..(17)..(18): Xaa is A or G
  MOD_RES (19)..(20)..(21)..(22): Xaa is A or G or is absent
GXARVVMNRYKKLXXXXXXXXXFYLVSIANLQTPAX

SEQ ID NO: 5564 - protein, 40 aa, Artificial Sequence
  GFR-binding peptide
  MOD_RES (1)..(38): Xaa is C or S
XALHDELTYHYKLFIPKKRVIEKYLVSIPSLQVQTPRXQV

SEQ ID NO: 5565 - protein, 38 aa, Artificial Sequence
  GFR-binding peptide
  MOD_RES (2)..(37)..(38): Xaa is C or S
  MOD_RES (15)..(16)..(17)..(18)..(19): Xaa is A or G
  MOD_RES (20)..(21)..(22)..(23): Xaa is A or G or is absent
GXEAVSMGEQYNKLXXXXXXXXXLYLVSIASLKTPVXX

SEQ ID NO: 5566 - protein, 38 aa, Artificial Sequence
  GFR-binding peptide
  MOD_RES (1)..(36)..(37): Xaa is C or S
  MOD_RES (14)..(15)..(16)..(17)..(18): Xaa is A or G
  MOD_RES (19)..(20)..(21)..(22): Xaa is A or G or is absent
XEAVSMGEYHYKLXXXXXXXXXKYLVSIPSLKTPVXXA

SEQ ID NO: 5567 - protein, 38 aa, Artificial Sequence
  GFR-binding peptide
  MOD_RES (34)..(35): Xaa is C or S
  MOD_RES (12)..(13)..(14)..(15)..(16): Xaa is A or G
  MOD_RES (17)..(18)..(19)..(20): Xaa is A or G or is absent
GEVVMDRHKRLXXXXXXXXXYYLMSTASLETPVXXAKP

SEQ ID NO: 5568 - protein, 36 aa, Artificial Sequence
  GFR-binding peptide
  MOD_RES (34)..(35): Xaa is C or S
  MOD_RES (12)..(13)..(14)..(15)..(16): Xaa is A or G
  MOD_RES (17)..(18)..(19)..(20): Xaa is A or G or is absent
GEVVMDQYNKLXXXXXXXXXLYLMSIASLETPVXXA

SEQ ID NO: 5569 - protein, 39 aa, Artificial Sequence
  GFR-binding peptide
  MOD_RES (1)..(3)..(37)..(38): Xaa is C or S
  MOD_RES (15)..(16)..(17)..(18)..(19): Xaa is A or G
  MOD_RES (20)..(21)..(22)..(23): Xaa is A or G or is absent
XGXGEVVMEYHYKLXXXXXXXXXKYLMSIPSLETPVXXA

SEQ ID NO: 5570 - protein, 38 aa, Artificial Sequence
  GFR-binding peptide
  MOD_RES (33)..(33): Xaa is C or S
  MOD_RES (11)..(12)..(13)..(14)..(15): Xaa is A or G
  MOD_RES (16)..(17)..(18)..(19): Xaa is A or G or is absent
RVVMNQYNKLXXXXXXXXXLYLVSIASLKTPAXTPKTV

SEQ ID NO: 5571 - protein, 33 aa, Artificial Sequence
  GFR-binding peptide
  MOD_RES (12)..(13)..(14)..(15)..(16): Xaa is A or G
  MOD_RES (17)..(18)..(19)..(20): Xaa is A or G or is absent
AKVVMNRYKKLXXXXXXXXXFYLVSIANLKTPA

SEQ ID NO: 5572 - protein, 35 aa, Artificial Sequence
  GFR-binding peptide
  MOD_RES (2)..(33)..(34): Xaa is C or S
KXSKVVMQYNKLVKPTRGVLYLISIASLDQPVXXP

SEQ ID NO: 5573 - protein, 36 aa, Artificial Sequence
  GFR-binding peptide
  MOD_RES (34)..(35): Xaa is C or S
  MOD_RES (12)..(13)..(14)..(15)..(16): Xaa is A or G
  MOD_RES (17)..(18)..(19)..(20): Xaa is A or G or is absent
GEVVMDRYKKLXXXXXXXXXFYLMSIANLETPVXXA

SEQ ID NO: 5574 - protein, 36 aa, Artificial Sequence
  GFR-binding peptide
  MOD_RES (35)..(36): Xaa is C or S
  MOD_RES (13)..(14)..(15)..(16)..(17): Xaa is A or G
  MOD_RES (18)..(19)..(20)..(21): Xaa is A or G or is absent
EAVSMGEYHYKLXXXXXXXXXKYLVSIPSLKTPVXX

SEQ ID NO: 5575 - protein, 42 aa, Artificial Sequence
  GFR-binding peptide
  MOD_RES (1)..(3)..(37)..(38): Xaa is C or S
  MOD_RES (15)..(16)..(17)..(18)..(19): Xaa is A or G
  MOD_RES (20)..(21)..(22)..(23): Xaa is A or G or is absent
XGXGEVVMERYKKLXXXXXXXXXFYLMSIANLETPVXXAKPI

SEQ ID NO: 5576 - protein, 34 aa, Artificial Sequence
  GFR-binding peptide
  MOD_RES (11)..(12)..(13)..(14)..(15): Xaa is A or G
  MOD_RES (16)..(17)..(18)..(19): Xaa is A or G or is absent
HDELTRHKRLXXXXXXXXXYYLVSTASLQVQTPR

SEQ ID NO: 5577 - protein, 34 aa, Artificial Sequence
  GFR-binding peptide
  MOD_RES (33)..(34): Xaa is C or S
  MOD_RES (11)..(12)..(13)..(14)..(15): Xaa is A or G
  MOD_RES (16)..(17)..(18)..(19): Xaa is A or G or is absent
SRVIMYHYKLXXXXXXXXXKYLISIPSLAQPVXX

SEQ ID NO: 5578 - protein, 38 aa, Artificial Sequence
  GFR-binding peptide
  MOD_RES (1)..(3)..(37)..(38): Xaa is C or S
  MOD_RES (15)..(16)..(17)..(18)..(19): Xaa is A or G
  MOD_RES (20)..(21)..(22)..(23): Xaa is A or G or is absent
XGXGEVVMDRYKKLXXXXXXXXXFYLMSIANLETPVXX

SEQ ID NO: 5579 - protein, 34 aa, Artificial Sequence
  GFR-binding peptide
  MOD_RES (1)..(32)..(33): Xaa is C or S
XSKVIMYHYKLIKPTKGIKYLISIPSLDQSVXXP

SEQ ID NO: 5580 - protein, 40 aa, Artificial Sequence
  GFR-binding peptide
  MOD_RES (2)..(35)..(36): Xaa is C or S
  MOD_RES (13)..(14)..(15)..(16)..(17): Xaa is A or G
  MOD_RES (18)..(19)..(20)..(21): Xaa is A or G or is absent
KXSRVIMYHYKLXXXXXXXXXKYLISIPSLAQPVXXPAAS

SEQ ID NO: 5581 - protein, 39 aa, Artificial Sequence
  GFR-binding peptide
  MOD_RES (2)..(4)..(38)..(39): Xaa is C or S
  MOD_RES (16)..(17)..(18)..(19)..(20): Xaa is A or G
  MOD_RES (21)..(22)..(23)..(24): Xaa is A or G or is absent
RXGXGEVVMDYHYKLXXXXXXXXXKYLMSIPSLETPVXX

SEQ ID NO: 5582 - protein, 31 aa, Artificial Sequence
  GFR-binding peptide
GEVVMEQYNKLVVKDYEDLYLMSIASLETPV

SEQ ID NO: 5583 - protein, 32 aa, Artificial Sequence
  GFR-binding peptide
  MOD_RES (31)..(32): Xaa is C or S
KVVMNQYNKLIVNNSSDLYLVSIASLKTPAXX

SEQ ID NO: 5584 - protein, 35 aa, Artificial Sequence
  GFR-binding peptide
  MOD_RES (33)..(34): Xaa is C or S
  MOD_RES (11)..(12)..(13)..(14)..(15): Xaa is A or G
  MOD_RES (16)..(17)..(18)..(19): Xaa is A or G or is absent
RVVMNQYNKLXXXXXXXXXLYLVSIASLKTPAXXP

SEQ ID NO: 5585 - protein, 39 aa, Artificial Sequence
  GFR-binding peptide
  MOD_RES (1)..(3): Xaa is C or S
  MOD_RES (16)..(17)..(18)..(19)..(20): Xaa is A or G
  MOD_RES (21)..(22)..(23)..(24): Xaa is A or G or is absent
XKXALHDELTQYNKLXXXXXXXXXLYLVSIASLQVQTPR

SEQ ID NO: 5586 - protein, 37 aa, Artificial Sequence
  GFR-binding peptide
  MOD_RES (2)..(35)..(36): Xaa is C or S
  MOD_RES (13)..(14)..(15)..(16)..(17): Xaa is A or G
  MOD_RES (18)..(19)..(20)..(21): Xaa is A or G or is absent
KXSKVIMRYKKLXXXXXXXXXFYLISIANLDQSVXXP

SEQ ID NO: 5587 - protein, 37 aa, Artificial Sequence
  GFR-binding peptide
  MOD_RES (33)..(34): Xaa is C or S
EAVSMGEQYNKLTPVGMDDLYLVSIASLKTPVXXAKG

SEQ ID NO: 5588 - protein, 33 aa, Artificial Sequence
  GFR-binding peptide
  MOD_RES (12)..(13)..(14)..(15)..(16): Xaa is A or G
  MOD_RES (17)..(18)..(19)..(20): Xaa is A or G or is absent
AKVVMNQYNKLXXXXXXXXXLYLVSIASLKTPA

SEQ ID NO: 5589 - protein, 37 aa, Artificial Sequence
  GFR-binding peptide
  MOD_RES (1)..(3)..(36)..(37): Xaa is C or S
  MOD_RES (14)..(15)..(16)..(17)..(18): Xaa is A or G
  MOD_RES (19)..(20)..(21)..(22): Xaa is A or G or is absent
XKXSKVIMRYKKLXXXXXXXXXFYLISIANLDQSVXX

SEQ ID NO: 5590 - protein, 33 aa, Artificial Sequence
  GFR-binding peptide
  MOD_RES (1)..(33): Xaa is C or S
XGEVVMEYHYKLVVKDYEDKYLMSIPSLETPVX

SEQ ID NO: 5591 - protein, 41 aa, Artificial Sequence
  GFR-binding peptide
  MOD_RES (1)..(3)..(36)..(37): Xaa is C or S
  MOD_RES (14)..(15)..(16)..(17)..(18): Xaa is A or G
  MOD_RES (19)..(20)..(21)..(22): Xaa is A or G or is absent
XKXSKVIMYHYKLXXXXXXXXXKYLISIPSLDQSVXXPSAS

SEQ ID NO: 5592 - protein, 36 aa, Artificial Sequence
  GFR-binding peptide
  MOD_RES (1)..(3)..(36): Xaa is C or S
  MOD_RES (14)..(15)..(16)..(17)..(18): Xaa is A or G
  MOD_RES (19)..(20)..(21)..(22): Xaa is A or G or is absent
XKXSRVIMRHKRLXXXXXXXXXYYLISTASLAQPVX

SEQ ID NO: 5593 - protein, 39 aa, Artificial Sequence
  GFR-binding peptide
  MOD_RES (1)..(3)..(37)..(38): Xaa is C or S
  MOD_RES (15)..(16)..(17)..(18)..(19): Xaa is A or G
  MOD_RES (20)..(21)..(22)..(23): Xaa is A or G or is absent
XGXARVVMNRYKKLXXXXXXXXXFYLVSIANLQTPAXXP

SEQ ID NO: 5594 - protein, 45 aa, Artificial Sequence
  GFR-binding peptide
  MOD_RES (2)..(4)..(41): Xaa is C or S
  MOD_RES (17)..(18)..(19)..(20)..(21): Xaa is A or G
  MOD_RES (22)..(23)..(24)..(25): Xaa is A or G or is absent
EXKXALHDELTRHKRLXXXXXXXXXYYLVSTASLQVQTPRXQVNR

SEQ ID NO: 5595 - protein, 34 aa, Artificial Sequence
  GFR-binding peptide
  MOD_RES (1)..(33)..(34): Xaa is C or S
XGEVVMEQYNKLVVKDYEDLYLMSIASLETPVXX

SEQ ID NO: 5596 - protein, 37 aa, Artificial Sequence
  GFR-binding peptide
  MOD_RES (1)..(34)..(35): Xaa is C or S
  MOD_RES (12)..(13)..(14)..(15)..(16): Xaa is A or G
  MOD_RES (17)..(18)..(19)..(20): Xaa is A or G or is absent
XSKVVMRYKKLXXXXXXXXXFYLISIANLDQPVXXPS

SEQ ID NO: 5597 - protein, 41 aa, Artificial Sequence
  GFR-binding peptide
  MOD_RES (1)..(3)..(38)..(39): Xaa is C or S
  MOD_RES (16)..(17)..(18)..(19)..(20): Xaa is A or G
  MOD_RES (21)..(22)..(23)..(24): Xaa is A or G or is absent
XGXEAVSMGERYKKLXXXXXXXXXFYLVSIANLKTPVXXAK

SEQ ID NO: 5598 - protein, 40 aa, Artificial Sequence
  GFR-binding peptide
  MOD_RES (2)..(4)..(36)..(37): Xaa is C or S
HXGXARVVMNRHKRLIVNSSDDYYLVSTASLQTPAXXPKP

SEQ ID NO: 5599 - protein, 33 aa, Artificial Sequence
  GFR-binding peptide
  MOD_RES (33)..(33): Xaa is C or S
  MOD_RES (11)..(12)..(13)..(14)..(15): Xaa is A or G
  MOD_RES (16)..(17)..(18)..(19): Xaa is A or G or is absent
SKVVMYHYKLXXXXXXXXXKYLISIPSLDQPVX

SEQ ID NO: 5600 - protein, 39 aa, Artificial Sequence
  GFR-binding peptide
  MOD_RES (2)..(4)..(36)..(37): Xaa is C or S
HXGXARVVMNYHYKLIVNSSDDKYLVSIPSLQTPAXXPK

SEQ ID NO: 5601 - protein, 34 aa, Artificial Sequence
  GFR-binding peptide
  MOD_RES (1)..(33)..(34): Xaa is C or S
XARVVMNRHKRLIVNSSDDYYLVSTASLQTPAXX

SEQ ID NO: 5602 - protein, 43 aa, Artificial Sequence
  GFR-binding peptide
  MOD_RES (1)..(3)..(37)..(38): Xaa is C or S
  MOD_RES (15)..(16)..(17)..(18)..(19): Xaa is A or G
  MOD_RES (20)..(21)..(22)..(23): Xaa is A or G or is absent
XGXSRVVMNYHYKLXXXXXXXXXKYLVSIPSLKTPAXXPKPVY

SEQ ID NO: 5603 - protein, 38 aa, Artificial Sequence
  GFR-binding peptide
  MOD_RES (2)..(2): Xaa is C or S
KXALHDELTYHYKLFIPKKRVIEKYLVSIPSLQVQTPR

SEQ ID NO: 5604 - protein, 39 aa, Artificial Sequence
  GFR-binding peptide
  MOD_RES (33)..(34): Xaa is C or S
  MOD_RES (11)..(12)..(13)..(14)..(15): Xaa is A or G
  MOD_RES (16)..(17)..(18)..(19): Xaa is A or G or is absent
SKVIMQYNKLXXXXXXXXXLYLISIASLDQSVXXPSASA

SEQ ID NO: 5605 - protein, 36 aa, Artificial Sequence
  GFR-binding peptide
  MOD_RES (1)..(3)..(36): Xaa is C or S
  MOD_RES (14)..(15)..(16)..(17)..(18): Xaa is A or G
  MOD_RES (19)..(20)..(21)..(22): Xaa is A or G or is absent
XKXSRVIMRYKKLXXXXXXXXXFYLISIANLAQPVX

SEQ ID NO: 5606 - protein, 36 aa, Artificial Sequence
  GFR-binding peptide
  MOD_RES (34)..(35): Xaa is C or S
  MOD_RES (12)..(13)..(14)..(15)..(16): Xaa is A or G
  MOD_RES (17)..(18)..(19)..(20): Xaa is A or G or is absent
SRVVMNRYKKLXXXXXXXXXFYLVSIANLKTPAXXP

SEQ ID NO: 5607 - protein, 38 aa, Artificial Sequence
  GFR-binding peptide
  MOD_RES (2)..(33)..(34): Xaa is C or S
KXSKVIMRYKKLIKPTKGIFYLISIANLDQSVXXPSAS

SEQ ID NO: 5608 - protein, 37 aa, Artificial Sequence
  GFR-binding peptide
  MOD_RES (2)..(4): Xaa is C or S
  MOD_RES (16)..(17)..(18)..(19)..(20): Xaa is A or G
  MOD_RES (21)..(22)..(23)..(24): Xaa is A or G or is absent
HXGXAKVVMNRHKRLXXXXXXXXXYYLVSTASLKTPA

SEQ ID NO: 5609 - protein, 36 aa, Artificial Sequence
  GFR-binding peptide
  MOD_RES (2)..(4)..(36): Xaa is C or S
RXGXGEVVMERYKKLVVKDYEDFYLMSIANLETPVX

SEQ ID NO: 5610 - protein, 37 aa, Artificial Sequence
  GFR-binding peptide
  MOD_RES (2)..(33)..(34): Xaa is C or S
KXSRVIMRYKKLVKPKRGVFYLISIANLAQPVXXPAA

SEQ ID NO: 5611 - protein, 36 aa, Artificial Sequence
  GFR-binding peptide
  MOD_RES (31)..(31): Xaa is C or S
RVVMNRHKRLIVNSSDDYYLVSTASLKTPAXTPKTV

SEQ ID NO: 5612 - protein, 41 aa, Artificial Sequence
  GFR-binding peptide
  MOD_RES (1)..(35)..(36): Xaa is C or S
  MOD_RES (13)..(14)..(15)..(16)..(17): Xaa is A or G
  MOD_RES (18)..(19)..(20)..(21): Xaa is A or G or is absent
XGEVVMDYHYKLXXXXXXXXXKYLMSIPSLETPVXXAKPIK

SEQ ID NO: 5613 - protein, 34 aa, Artificial Sequence
  GFR-binding peptide
  MOD_RES (31)..(32): Xaa is C or S
SRVIMRYKKLVKPKRGVFYLISIANLAQPVXXPA

SEQ ID NO: 5614 - protein, 37 aa, Artificial Sequence
  GFR-binding peptide
  MOD_RES (31)..(32): Xaa is C or S
RVVMNRYKKLIVNSSDDFYLVSIANLQTPAXXPKPVT

SEQ ID NO: 5615 - protein, 34 aa, Artificial Sequence
  GFR-binding peptide
  MOD_RES (1)..(1): Xaa is C or S
  MOD_RES (13)..(14)..(15)..(16)..(17): Xaa is A or G
  MOD_RES (18)..(19)..(20)..(21): Xaa is A or G or is absent
XARVVMNQYNKLXXXXXXXXXLYLVSIASLQTPA

SEQ ID NO: 5616 - protein, 41 aa, Artificial Sequence
  GFR-binding peptide
  MOD_RES (1)..(35)..(36): Xaa is C or S
  MOD_RES (13)..(14)..(15)..(16)..(17): Xaa is A or G
  MOD_RES (18)..(19)..(20)..(21): Xaa is A or G or is absent
XAKVVMNQYNKLXXXXXXXXXLYLVSIASLKTPAXXAKPVA

SEQ ID NO: 5617 - protein, 40 aa, Artificial Sequence
  GFR-binding peptide
  MOD_RES (2)..(4)..(36)..(37): Xaa is C or S
HXGXARVVMNQYNKLIVNSSDDLYLVSIASLQTPAXXPKP

SEQ ID NO: 5618 - protein, 37 aa, Artificial Sequence
  GFR-binding peptide
  MOD_RES (33)..(34): Xaa is C or S
  MOD_RES (11)..(12)..(13)..(14)..(15): Xaa is A or G
  MOD_RES (16)..(17)..(18)..(19): Xaa is A or G or is absent
SKVIMRYKKLXXXXXXXXXFYLISIANLDQSVXXPSA

SEQ ID NO: 5619 - protein, 32 aa, Artificial Sequence
  GFR-binding peptide
  MOD_RES (1)..(32): Xaa is C or S
XSKVVMRHKRLVKPTRGVYYLISTASLDQPVX

SEQ ID NO: 5620 - protein, 42 aa, Artificial Sequence
  GFR-binding peptide
  MOD_RES (1)..(3)..(40): Xaa is C or S
  MOD_RES (16)..(17)..(18)..(19)..(20): Xaa is A or G
  MOD_RES (21)..(22)..(23)..(24): Xaa is A or G or is absent
XKXALHDELTRHKRLXXXXXXXXXYYLVSTASLQVQTPRXQV

SEQ ID NO: 5621 - protein, 41 aa, Artificial Sequence
  GFR-binding peptide
  MOD_RES (2)..(35)..(36): Xaa is C or S
  MOD_RES (13)..(14)..(15)..(16)..(17): Xaa is A or G
  MOD_RES (18)..(19)..(20)..(21): Xaa is A or G or is absent
KXSKVIMYHYKLXXXXXXXXXKYLISIPSLDQSVXXPSASA

SEQ ID NO: 5622 - protein, 41 aa, Artificial Sequence
  GFR-binding peptide
  MOD_RES (1)..(3)..(36)..(37): Xaa is C or S
  MOD_RES (14)..(15)..(16)..(17)..(18): Xaa is A or G
  MOD_RES (19)..(20)..(21)..(22): Xaa is A or G or is absent
XKXSRVIMYHYKLXXXXXXXXXKYLISIPSLAQPVXXPAAS

SEQ ID NO: 5623 - protein, 39 aa, Artificial Sequence
  GFR-binding peptide
  MOD_RES (2)..(39): Xaa is C or S
  MOD_RES (15)..(16)..(17)..(18)..(19): Xaa is A or G
  MOD_RES (20)..(21)..(22)..(23): Xaa is A or G or is absent
KXALHDELTYHYKLXXXXXXXXXKYLVSIPSLQVQTPRX

SEQ ID NO: 5624 - protein, 40 aa, Artificial Sequence
  GFR-binding peptide
  MOD_RES (1)..(3)..(37)..(38): Xaa is C or S
  MOD_RES (15)..(16)..(17)..(18)..(19): Xaa is A or G
  MOD_RES (20)..(21)..(22)..(23): Xaa is A or G or is absent
XGXGEVVMDRHKRLXXXXXXXXXYYLMSTASLETPVXXAK

SEQ ID NO: 5625 - protein, 38 aa, Artificial Sequence
  GFR-binding peptide
  MOD_RES (2)..(36)..(37): Xaa is C or S
  MOD_RES (14)..(15)..(16)..(17)..(18): Xaa is A or G
  MOD_RES (19)..(20)..(21)..(22): Xaa is A or G or is absent
GXARVVMNRHKRLXXXXXXXXXYYLVSTASLQTPAXXP

SEQ ID NO: 5626 - protein, 36 aa, Artificial Sequence
  GFR-binding peptide
  MOD_RES (34)..(35): Xaa is C or S
  MOD_RES (12)..(13)..(14)..(15)..(16): Xaa is A or G
  MOD_RES (17)..(18)..(19)..(20): Xaa is A or G or is absent
ARVVMNQYNKLXXXXXXXXXLYLVSIASLQTPAXXP

SEQ ID NO: 5627 - protein, 40 aa, Artificial Sequence
  GFR-binding peptide
  MOD_RES (2)..(4)..(38)..(39): Xaa is C or S
  MOD_RES (16)..(17)..(18)..(19)..(20): Xaa is A or G
  MOD_RES (21)..(22)..(23)..(24): Xaa is A or G or is absent
HXGXARVVMNYHYKLXXXXXXXXXKYLVSIPSLQTPAXXP

SEQ ID NO: 5628 - protein, 31 aa, Artificial Sequence
  GFR-binding peptide
  MOD_RES (1)..(1): Xaa is C or S
XSKVVMRHKRLVKPTRGVYYLISTASLDQPV

SEQ ID NO: 5629 - protein, 41 aa, Artificial Sequence
  GFR-binding peptide
  MOD_RES (2)..(4)..(35)..(36): Xaa is C or S
SXKXSKVIMRYKKLIKPTKGIFYLISIANLDQSVXXPSASA

SEQ ID NO: 5630 - protein, 35 aa, Artificial Sequence
  GFR-binding peptide
  MOD_RES (33)..(34): Xaa is C or S
  MOD_RES (11)..(12)..(13)..(14)..(15): Xaa is A or G
  MOD_RES (16)..(17)..(18)..(19): Xaa is A or G or is absent
RVVMNYHYKLXXXXXXXXXKYLVSIPSLKTPAXXP

SEQ ID NO: 5631 - protein, 35 aa, Artificial Sequence
  GFR-binding peptide
  MOD_RES (1)..(1): Xaa is C or S
  MOD_RES (14)..(15)..(16)..(17)..(18): Xaa is A or G
  MOD_RES (19)..(20)..(21)..(22): Xaa is A or G or is absent
XALHDELTYHYKLXXXXXXXXXKYLVSIPSLQVQT

SEQ ID NO: 5632 - protein, 39 aa, Artificial Sequence
  GFR-binding peptide
  MOD_RES (2)..(4)..(35)..(36): Xaa is C or S
SXKXSRVIMRYKKLVKPKRGVFYLISIANLAQPVXXPAA

SEQ ID NO: 5633 - protein, 37 aa, Artificial Sequence
  GFR-binding peptide
  MOD_RES (2)..(36)..(37): Xaa is C or S
  MOD_RES (14)..(15)..(16)..(17)..(18): Xaa is A or G
  MOD_RES (19)..(20)..(21)..(22): Xaa is A or G or is absent
GXSRVVMNRYKKLXXXXXXXXXFYLVSIANLKTPAXX

SEQ ID NO: 5634 - protein, 42 aa, Artificial Sequence
  GFR-binding peptide
  MOD_RES (2)..(36)..(37): Xaa is C or S
  MOD_RES (14)..(15)..(16)..(17)..(18): Xaa is A or G
  MOD_RES (19)..(20)..(21)..(22): Xaa is A or G or is absent
GXSRVVMNRYKKLXXXXXXXXXFYLVSIANLKTPAXXPKPVY

SEQ ID NO: 5635 - protein, 36 aa, Artificial Sequence
  GFR-binding peptide
  MOD_RES (1)..(3)..(35)..(36): Xaa is C or S
XGXAKVVMNQYNKLIVNNSSDLYLVSIASLKTPAXX

SEQ ID NO: 5636 - protein, 34 aa, Artificial Sequence
  GFR-binding peptide
  MOD_RES (1)..(1): Xaa is C or S
  MOD_RES (13)..(14)..(15)..(16)..(17): Xaa is A or G
  MOD_RES (18)..(19)..(20)..(21): Xaa is A or G or is absent
XAKVVMNYHYKLXXXXXXXXXKYLVSIPSLKTPA

SEQ ID NO: 5637 - protein, 33 aa, Artificial Sequence
  GFR-binding peptide
  MOD_RES (2)..(2): Xaa is C or S
GXARVVMNQYNKLIVNSSDDLYLVSIASLQTPA

SEQ ID NO: 5638 - protein, 37 aa, Artificial Sequence
  GFR-binding peptide
  MOD_RES (33)..(34): Xaa is C or S
  MOD_RES (11)..(12)..(13)..(14)..(15): Xaa is A or G
  MOD_RES (16)..(17)..(18)..(19): Xaa is A or G or is absent
EVVMERYKKLXXXXXXXXXFYLMSIANLETPVXXAKP

SEQ ID NO: 5639 - protein, 40 aa, Artificial Sequence
  GFR-binding peptide
  MOD_RES (1)..(36)..(37): Xaa is C or S
  MOD_RES (14)..(15)..(16)..(17)..(18): Xaa is A or G
  MOD_RES (19)..(20)..(21)..(22): Xaa is A or G or is absent
XEAVSMGEQYNKLXXXXXXXXXLYLVSIASLKTPVXXAKG

SEQ ID NO: 5640 - protein, 40 aa, Artificial Sequence
  GFR-binding peptide
  MOD_RES (1)..(3)..(35)..(36): Xaa is C or S
XGXGEVVMDRYKKLVVKENEDFYLMSIANLETPVXXAKPI

SEQ ID NO: 5641 - protein, 39 aa, Artificial Sequence
  GFR-binding peptide
  MOD_RES (1)..(34)..(35): Xaa is C or S
XEAVSMGERHKRLTPVGMDDYYLVSTASLKTPVXXAKGV

SEQ ID NO: 5642 - protein, 34 aa, Artificial Sequence
  GFR-binding peptide
  MOD_RES (31)..(32): Xaa is C or S
EVVMDYHYKLVVKENEDKYLMSIPSLETPVXXAK

SEQ ID NO: 5643 - protein, 39 aa, Artificial Sequence
  GFR-binding peptide
  MOD_RES (2)..(34)..(35): Xaa is C or S
GXGEVVMERHKRLVVKDYEDYYLMSTASLETPVXXAKPI

SEQ ID NO: 5644 - protein, 42 aa, Artificial Sequence
  GFR-binding peptide
  MOD_RES (2)..(4)..(38)..(39): Xaa is C or S
  MOD_RES (16)..(17)..(18)..(19)..(20): Xaa is A or G
  MOD_RES (21)..(22)..(23)..(24): Xaa is A or G or is absent
RXGXGEVVMEQYNKLXXXXXXXXXLYLMSIASLETPVXXAKP

SEQ ID NO: 5645 - protein, 39 aa, Artificial Sequence
  GFR-binding peptide
  MOD_RES (33)..(34): Xaa is C or S
  MOD_RES (11)..(12)..(13)..(14)..(15): Xaa is A or G
  MOD_RES (16)..(17)..(18)..(19): Xaa is A or G or is absent
SKVVMRYKKLXXXXXXXXXFYLISIANLDQPVXXPSASA

SEQ ID NO: 5646 - protein, 34 aa, Artificial Sequence
  GFR-binding peptide
  MOD_RES (33)..(34): Xaa is C or S
  MOD_RES (11)..(12)..(13)..(14)..(15): Xaa is A or G
  MOD_RES (16)..(17)..(18)..(19): Xaa is A or G or is absent
SKVIMYHYKLXXXXXXXXXKYLISIPSLDQSVXX

SEQ ID NO: 5647 - protein, 44 aa, Artificial Sequence
  GFR-binding peptide
  MOD_RES (2)..(4)..(38)..(39): Xaa is C or S
  MOD_RES (16)..(17)..(18)..(19)..(20): Xaa is A or G
  MOD_RES (21)..(22)..(23)..(24): Xaa is A or G or is absent
HXGXSRVVMNRYKKLXXXXXXXXXFYLVSIANLKTPAXXPKPVY

SEQ ID NO: 5648 - protein, 39 aa, Artificial Sequence
  GFR-binding peptide
  MOD_RES (36)..(36): Xaa is C or S
  MOD_RES (12)..(13)..(14)..(15)..(16): Xaa is A or G
  MOD_RES (17)..(18)..(19)..(20): Xaa is A or G or is absent
LHDELTRYKKLXXXXXXXXXFYLVSIANLQVQTPRXQVN

SEQ ID NO: 5649 - protein, 36 aa, Artificial Sequence
  GFR-binding peptide
  MOD_RES (2)..(2): Xaa is C or S
  MOD_RES (15)..(16)..(17)..(18)..(19): Xaa is A or G
  MOD_RES (20)..(21)..(22)..(23): Xaa is A or G or is absent
GXEAVSMGEQYNKLXXXXXXXXXLYLVSIASLKTPV

SEQ ID NO: 5650 - protein, 38 aa, Artificial Sequence
  GFR-binding peptide
  MOD_RES (2)..(4): Xaa is C or S
  MOD_RES (17)..(18)..(19)..(20)..(21): Xaa is A or G
  MOD_RES (22)..(23)..(24)..(25): Xaa is A or G or is absent
EXKXALHDELTQYNKLXXXXXXXXXLYLVSIASLQVQT

SEQ ID NO: 5651 - protein, 39 aa, Artificial Sequence
  GFR-binding peptide
  MOD_RES (1)..(3)..(38)..(39): Xaa is C or S
  MOD_RES (16)..(17)..(18)..(19)..(20): Xaa is A or G
  MOD_RES (21)..(22)..(23)..(24): Xaa is A or G or is absent
XGXEAVSMGERYKKLXXXXXXXXXFYLVSIANLKTPVXX

SEQ ID NO: 5652 - protein, 41 aa, Artificial Sequence
  GFR-binding peptide
  MOD_RES (1)..(3)..(37)..(38): Xaa is C or S
  MOD_RES (15)..(16)..(17)..(18)..(19): Xaa is A or G
  MOD_RES (20)..(21)..(22)..(23): Xaa is A or G or is absent
XGXSRVVMNRYKKLXXXXXXXXXFYLVSIANLKTPAXXPKP

SEQ ID NO: 5653 - protein, 36 aa, Artificial Sequence
  GFR-binding peptide
  MOD_RES (31)..(32): Xaa is C or S
EVVMEYHYKLVVKDYEDKYLMSIPSLETPVXXAKPI

SEQ ID NO: 5654 - protein, 39 aa, Artificial Sequence
  GFR-binding peptide
  MOD_RES (2)..(37)..(38): Xaa is C or S
  MOD_RES (15)..(16)..(17)..(18)..(19): Xaa is A or G
  MOD_RES (20)..(21)..(22)..(23): Xaa is A or G or is absent
GXEAVSMGERHKRLXXXXXXXXXYYLVSTASLKTPVXXA

SEQ ID NO: 5655 - protein, 42 aa, Artificial Sequence
  GFR-binding peptide
  MOD_RES (1)..(3)..(36)..(37): Xaa is C or S
  MOD_RES (14)..(15)..(16)..(17)..(18): Xaa is A or G
  MOD_RES (19)..(20)..(21)..(22): Xaa is A or G or is absent
XKXSKVVMRYKKLXXXXXXXXXFYLISIANLDQPVXXPSASA

SEQ ID NO: 5656 - protein, 43 aa, Artificial Sequence
  GFR-binding peptide
  MOD_RES (2)..(4)..(37)..(38): Xaa is C or S
  MOD_RES (15)..(16)..(17)..(18)..(19): Xaa is A or G
  MOD_RES (20)..(21)..(22)..(23): Xaa is A or G or is absent
SXKXSKVVMRYKKLXXXXXXXXXFYLISIANLDQPVXXPSASA

SEQ ID NO: 5657 - protein, 33 aa, Artificial Sequence
  GFR-binding peptide
  MOD_RES (1)..(3): Xaa is C or S
XKXSKVVMRYKKLVKPTRGVFYLISIANLDQPV

SEQ ID NO: 5658 - protein, 40 aa, Artificial Sequence
  GFR-binding peptide
  MOD_RES (1)..(35): Xaa is C or S
  MOD_RES (13)..(14)..(15)..(16)..(17): Xaa is A or G
  MOD_RES (18)..(19)..(20)..(21): Xaa is A or G or is absent
XSRVVMNQYNKLXXXXXXXXXLYLVSIASLKTPAXTPKTV

SEQ ID NO: 5659 - protein, 40 aa, Artificial Sequence
  GFR-binding peptide
  MOD_RES (2)..(4)..(36)..(37): Xaa is C or S
RXGXGEVVMEQYNKLVVKDYEDLYLMSIASLETPVXXAKP

SEQ ID NO: 5660 - protein, 41 aa, Artificial Sequence
  GFR-binding peptide
  MOD_RES (2)..(4)..(36)..(37): Xaa is C or S
HXGXARVVMNYHYKLIVNSSDDKYLVSIPSLQTPAXXPKPV

SEQ ID NO: 5661 - protein, 35 aa, Artificial Sequence
  GFR-binding peptide
  MOD_RES (2)..(2): Xaa is C or S
  MOD_RES (14)..(15)..(16)..(17)..(18): Xaa is A or G
  MOD_RES (19)..(20)..(21)..(22): Xaa is A or G or is absent
GXGEVVMDRHKRLXXXXXXXXXYYLMSTASLETPV

SEQ ID NO: 5662 - protein, 39 aa, Artificial Sequence
  GFR-binding peptide
  MOD_RES (1)..(36)..(37): Xaa is C or S
  MOD_RES (14)..(15)..(16)..(17)..(18): Xaa is A or G
  MOD_RES (19)..(20)..(21)..(22): Xaa is A or G or is absent
XEAVSMGERHKRLXXXXXXXXXYYLVSTASLKTPVXXAK

SEQ ID NO: 5663 - protein, 39 aa, Artificial Sequence
  GFR-binding peptide
  MOD_RES (1)..(3)..(35): Xaa is C or S
XGXSRVVMNQYNKLIVNSSDDLYLVSIASLKTPAXTPKT

SEQ ID NO: 5664 - protein, 41 aa, Artificial Sequence
  GFR-binding peptide
  MOD_RES (2)..(4)..(38)..(39): Xaa is C or S
  MOD_RES (16)..(17)..(18)..(19)..(20): Xaa is A or G
  MOD_RES (21)..(22)..(23)..(24): Xaa is A or G or is absent
RXGXGEVVMDYHYKLXXXXXXXXXKYLMSIPSLETPVXXAK

SEQ ID NO: 5665 - protein, 35 aa, Artificial Sequence
  GFR-binding peptide
  MOD_RES (1)..(35): Xaa is C or S
  MOD_RES (13)..(14)..(15)..(16)..(17): Xaa is A or G
  MOD_RES (18)..(19)..(20)..(21): Xaa is A or G or is absent
XAKVVMNYHYKLXXXXXXXXXKYLVSIPSLKTPAX

SEQ ID NO: 5666 - protein, 38 aa, Artificial Sequence
  GFR-binding peptide
  MOD_RES (1)..(3)..(37): Xaa is C or S
  MOD_RES (15)..(16)..(17)..(18)..(19): Xaa is A or G
  MOD_RES (20)..(21)..(22)..(23): Xaa is A or G or is absent
XGXSRVVMNRYKKLXXXXXXXXXFYLVSIANLKTPAXT

SEQ ID NO: 5667 - protein, 33 aa, Artificial Sequence
  GFR-binding peptide
  MOD_RES (2)..(2): Xaa is C or S
GXSRVVMNQYNKLIVNSSDDLYLVSIASLKTPA

SEQ ID NO: 5668 - protein, 39 aa, Artificial Sequence
  GFR-binding peptide
  MOD_RES (2)..(4)..(37)..(38): Xaa is C or S
  MOD_RES (15)..(16)..(17)..(18)..(19): Xaa is A or G
  MOD_RES (20)..(21)..(22)..(23): Xaa is A or G or is absent
SXKXSRVIMYHYKLXXXXXXXXXKYLISIPSLAQPVXXP

SEQ ID NO: 5669 - protein, 36 aa, Artificial Sequence
  GFR-binding peptide
  MOD_RES (1)..(3)..(35)..(36): Xaa is C or S
XGXARVVMNRHKRLIVNSSDDYYLVSTASLQTPAXX

SEQ ID NO: 5670 - protein, 36 aa, Artificial Sequence
  GFR-binding peptide
  MOD_RES (33)..(34): Xaa is C or S
  MOD_RES (11)..(12)..(13)..(14)..(15): Xaa is A or G
  MOD_RES (16)..(17)..(18)..(19): Xaa is A or G or is absent
SKVVMRYKKLXXXXXXXXXFYLISIANLDQPVXXPS

SEQ ID NO: 5671 - protein, 37 aa, Artificial Sequence
  GFR-binding peptide
  MOD_RES (1)..(34)..(35): Xaa is C or S
  MOD_RES (12)..(13)..(14)..(15)..(16): Xaa is A or G
  MOD_RES (17)..(18)..(19)..(20): Xaa is A or G or is absent
XSKVIMRYKKLXXXXXXXXXFYLISIANLDQSVXXPS

SEQ ID NO: 5672 - protein, 31 aa, Artificial Sequence
  GFR-binding peptide
  MOD_RES (31)..(31): Xaa is C or S
RVVMNRYKKLIVNSSDDFYLVSIANLKTPAX

SEQ ID NO: 5673 - protein, 38 aa, Artificial Sequence
  GFR-binding peptide
  MOD_RES (1)..(33)..(34): Xaa is C or S
XGEVVMDRHKRLVVKENEDYYLMSTASLETPVXXAKPI

SEQ ID NO: 5674 - protein, 40 aa, Artificial Sequence
  GFR-binding peptide
  MOD_RES (37)..(37): Xaa is C or S
ALHDELTYHYKLFIPKKRVIEKYLVSIPSLQVQTPRXQVN

SEQ ID NO: 5675 - protein, 37 aa, Artificial Sequence
  GFR-binding peptide
  MOD_RES (1)..(3)..(35): Xaa is C or S
XGXSRVVMNRHKRLIVNSSDDYYLVSTASLKTPAXTP

SEQ ID NO: 5676 - protein, 42 aa, Artificial Sequence
  GFR-binding peptide
  MOD_RES (1)..(3)..(37): Xaa is C or S
  MOD_RES (15)..(16)..(17)..(18)..(19): Xaa is A or G
  MOD_RES (20)..(21)..(22)..(23): Xaa is A or G or is absent
XGXSRVVMNRHKRLXXXXXXXXXYYLVSTASLKTPAXTPKTV

SEQ ID NO: 5677 - protein, 33 aa, Artificial Sequence
  GFR-binding peptide
  MOD_RES (2)..(33): Xaa is C or S
KXSKVIMQYNKLIKPTKGILYLISIASLDQSVX

SEQ ID NO: 5678 - protein, 40 aa, Artificial Sequence
  GFR-binding peptide
  MOD_RES (1)..(35)..(36): Xaa is C or S
  MOD_RES (13)..(14)..(15)..(16)..(17): Xaa is A or G
  MOD_RES (18)..(19)..(20)..(21): Xaa is A or G or is absent
XARVVMNQYNKLXXXXXXXXXLYLVSIASLQTPAXXPKPV

SEQ ID NO: 5679 - protein, 35 aa, Artificial Sequence
  GFR-binding peptide
  MOD_RES (1)..(3)..(35): Xaa is C or S
XGXGEVVMERYKKLVVKDYEDFYLMSIANLETPVX

SEQ ID NO: 5680 - protein, 39 aa, Artificial Sequence
  GFR-binding peptide
  MOD_RES (34)..(35): Xaa is C or S
  MOD_RES (12)..(13)..(14)..(15)..(16): Xaa is A or G
  MOD_RES (17)..(18)..(19)..(20): Xaa is A or G or is absent
AKVVMNRYKKLXXXXXXXXXFYLVSIANLKTPAXXAKPV

SEQ ID NO: 5681 - protein, 40 aa, Artificial Sequence
  GFR-binding peptide
  MOD_RES (2)..(36)..(37): Xaa is C or S
  MOD_RES (14)..(15)..(16)..(17)..(18): Xaa is A or G
  MOD_RES (19)..(20)..(21)..(22): Xaa is A or G or is absent
GXSRVVMNYHYKLXXXXXXXXXKYLVSIPSLKTPAXXPKP

SEQ ID NO: 5682 - protein, 37 aa, Artificial Sequence
  GFR-binding peptide
  MOD_RES (1)..(3)..(36)..(37): Xaa is C or S
  MOD_RES (14)..(15)..(16)..(17)..(18): Xaa is A or G
  MOD_RES (19)..(20)..(21)..(22): Xaa is A or G or is absent
XKXSRVIMRYKKLXXXXXXXXXFYLISIANLAQPVXX

SEQ ID NO: 5683 - protein, 37 aa, Artificial Sequence
  GFR-binding peptide
  MOD_RES (2)..(34)..(35): Xaa is C or S
GXGEVVMDRYKKLVVKENEDFYLMSIANLETPVXXAK

SEQ ID NO: 5684 - protein, 37 aa, Artificial Sequence
  GFR-binding peptide
  MOD_RES (1)..(35)..(36): Xaa is C or S
  MOD_RES (13)..(14)..(15)..(16)..(17): Xaa is A or G
  MOD_RES (18)..(19)..(20)..(21): Xaa is A or G or is absent
XSRVVMNRHKRLXXXXXXXXXYYLVSTASLKTPAXXP

SEQ ID NO: 5685 - protein, 36 aa, Artificial Sequence
  GFR-binding peptide
  MOD_RES (1)..(3): Xaa is C or S
  MOD_RES (15)..(16)..(17)..(18)..(19): Xaa is A or G
  MOD_RES (20)..(21)..(22)..(23): Xaa is A or G or is absent
XGXARVVMNRYKKLXXXXXXXXXFYLVSIANLQTPA

SEQ ID NO: 5686 - protein, 31 aa, Artificial Sequence
  GFR-binding peptide
AKVVMNRHKRLIVNNSSDYYLVSTASLKTPA

SEQ ID NO: 5687 - protein, 33 aa, Artificial Sequence
  GFR-binding peptide
  MOD_RES (12)..(13)..(14)..(15)..(16): Xaa is A or G
  MOD_RES (17)..(18)..(19)..(20): Xaa is A or G or is absent
SRVVMNQYNKLXXXXXXXXXLYLVSIASLKTPA

SEQ ID NO: 5688 - protein, 35 aa, Artificial Sequence
  GFR-binding peptide
  MOD_RES (1)..(32)..(33): Xaa is C or S
XSRVIMRYKKLVKPKRGVFYLISIANLAQPVXXPA

SEQ ID NO: 5689 - protein, 43 aa, Artificial Sequence
  GFR-binding peptide
  MOD_RES (2)..(4)..(39)..(40): Xaa is C or S
  MOD_RES (17)..(18)..(19)..(20)..(21): Xaa is A or G
  MOD_RES (22)..(23)..(24)..(25): Xaa is A or G or is absent
RXGXEAVSMGERHKRLXXXXXXXXXYYLVSTASLKTPVXXAKG

SEQ ID NO: 5690 - protein, 43 aa, Artificial Sequence
  GFR-binding peptide
  MOD_RES (1)..(3)..(37)..(38): Xaa is C or S
  MOD_RES (15)..(16)..(17)..(18)..(19): Xaa is A or G
  MOD_RES (20)..(21)..(22)..(23): Xaa is A or G or is absent
XGXSRVVMNQYNKLXXXXXXXXXLYLVSIASLKTPAXXPKPVY

SEQ ID NO: 5691 - protein, 35 aa, Artificial Sequence
  GFR-binding peptide
  MOD_RES (2)..(33)..(34): Xaa is C or S
KXSKVVMRYKKLVKPTRGVFYLISIANLDQPVXXP

SEQ ID NO: 5692 - protein, 36 aa, Artificial Sequence
  GFR-binding peptide
  MOD_RES (1)..(33)..(34): Xaa is C or S
XAKVVMNQYNKLIVNNSSDLYLVSIASLKTPAXXAK

SEQ ID NO: 5693 - protein, 36 aa, Artificial Sequence
  GFR-binding peptide
  MOD_RES (34)..(35): Xaa is C or S
  MOD_RES (12)..(13)..(14)..(15)..(16): Xaa is A or G
  MOD_RES (17)..(18)..(19)..(20): Xaa is A or G or is absent
GEVVMEQYNKLXXXXXXXXXLYLMSIASLETPVXXA

SEQ ID NO: 5694 - protein, 35 aa, Artificial Sequence
  GFR-binding peptide
  MOD_RES (31)..(32): Xaa is C or S
KVVMNRHKRLIVNNSSDYYLVSTASLKTPAXXAKP

SEQ ID NO: 5695 - protein, 33 aa, Artificial Sequence
  GFR-binding peptide
  MOD_RES (12)..(13)..(14)..(15)..(16): Xaa is A or G
  MOD_RES (17)..(18)..(19)..(20): Xaa is A or G or is absent
LHDELTRYKKLXXXXXXXXXFYLVSIANLQVQT

SEQ ID NO: 5696 - protein, 30 aa, Artificial Sequence
  GFR-binding peptide
EVVMDQYNKLVVKENEDLYLMSIASLETPV

SEQ ID NO: 5697 - protein, 34 aa, Artificial Sequence
  GFR-binding peptide
HDELTYHYKLFIPKKRVIEKYLVSIPSLQVQTPR

SEQ ID NO: 5698 - protein, 38 aa, Artificial Sequence
  GFR-binding peptide
  MOD_RES (1)..(3)..(37)..(38): Xaa is C or S
  MOD_RES (15)..(16)..(17)..(18)..(19): Xaa is A or G
  MOD_RES (20)..(21)..(22)..(23): Xaa is A or G or is absent
XGXAKVVMNYHYKLXXXXXXXXXKYLVSIPSLKTPAXX

SEQ ID NO: 5699 - protein, 33 aa, Artificial Sequence
  GFR-binding peptide
  MOD_RES (12)..(13)..(14)..(15)..(16): Xaa is A or G
  MOD_RES (17)..(18)..(19)..(20): Xaa is A or G or is absent
SRVVMNRYKKLXXXXXXXXXFYLVSIANLKTPA

SEQ ID NO: 5700 - protein, 41 aa, Artificial Sequence
  GFR-binding peptide
  MOD_RES (2)..(4)..(35)..(36): Xaa is C or S
SXKXSKVVMRHKRLVKPTRGVYYLISTASLDQPVXXPSASA

SEQ ID NO: 5701 - protein, 31 aa, Artificial Sequence
  GFR-binding peptide
GEVVMERYKKLVVKDYEDFYLMSIANLETPV

SEQ ID NO: 5702 - protein, 39 aa, Artificial Sequence
  GFR-binding peptide
  MOD_RES (2)..(36)..(37): Xaa is C or S
  MOD_RES (14)..(15)..(16)..(17)..(18): Xaa is A or G
  MOD_RES (19)..(20)..(21)..(22): Xaa is A or G or is absent
GXSRVVMNYHYKLXXXXXXXXXKYLVSIPSLKTPAXXPK

SEQ ID NO: 5703 - protein, 39 aa, Artificial Sequence
  GFR-binding peptide
  MOD_RES (2)..(4)..(38)..(39): Xaa is C or S
  MOD_RES (16)..(17)..(18)..(19)..(20): Xaa is A or G
  MOD_RES (21)..(22)..(23)..(24): Xaa is A or G or is absent
HXGXAKVVMNQYNKLXXXXXXXXXLYLVSIASLKTPAXX

SEQ ID NO: 5704 - protein, 34 aa, Artificial Sequence
  GFR-binding peptide
  MOD_RES (12)..(13)..(14)..(15)..(16): Xaa is A or G
  MOD_RES (17)..(18)..(19)..(20): Xaa is A or G or is absent
LHDELTQYNKLXXXXXXXXXLYLVSIASLQVQTP

SEQ ID NO: 5705 - protein, 37 aa, Artificial Sequence
  GFR-binding peptide
  MOD_RES (2)..(4): Xaa is C or S
  MOD_RES (16)..(17)..(18)..(19)..(20): Xaa is A or G
  MOD_RES (21)..(22)..(23)..(24): Xaa is A or G or is absent
HXGXARVVMNQYNKLXXXXXXXXXLYLVSIASLQTPA

SEQ ID NO: 5706 - protein, 41 aa, Artificial Sequence
  GFR-binding peptide
  MOD_RES (2)..(4)..(37)..(38): Xaa is C or S
  MOD_RES (15)..(16)..(17)..(18)..(19): Xaa is A or G
  MOD_RES (20)..(21)..(22)..(23): Xaa is A or G or is absent
SXKXSRVIMYHYKLXXXXXXXXXKYLISIPSLAQPVXXPAA

SEQ ID NO: 5707 - protein, 38 aa, Artificial Sequence
  GFR-binding peptide
  MOD_RES (2)..(4)..(35)..(36): Xaa is C or S
SXKXSRVIMYHYKLVKPKRGVKYLISIPSLAQPVXXPA

SEQ ID NO: 5708 - protein, 35 aa, Artificial Sequence
  GFR-binding peptide
  MOD_RES (2)..(4): Xaa is C or S
RXGXGEVVMDQYNKLVVKENEDLYLMSIASLETPV

SEQ ID NO: 5709 - protein, 35 aa, Artificial Sequence
  GFR-binding peptide
  MOD_RES (1)..(35): Xaa is C or S
  MOD_RES (13)..(14)..(15)..(16)..(17): Xaa is A or G
  MOD_RES (18)..(19)..(20)..(21): Xaa is A or G or is absent
XGEVVMEQYNKLXXXXXXXXXLYLMSIASLETPVX

SEQ ID NO: 5710 - protein, 38 aa, Artificial Sequence
  GFR-binding peptide
  MOD_RES (2)..(34)..(35): Xaa is C or S
GXAKVVMNRHKRLIVNNSSDYYLVSTASLKTPAXXAKP

SEQ ID NO: 5711 - protein, 37 aa, Artificial Sequence
  GFR-binding peptide
  MOD_RES (32)..(33): Xaa is C or S
SRVVMNRHKRLIVNSSDDYYLVSTASLKTPAXXPKPV

SEQ ID NO: 5712 - protein, 39 aa, Artificial Sequence
  GFR-binding peptide
  MOD_RES (2)..(34)..(35): Xaa is C or S
GXGEVVMDRYKKLVVKENEDFYLMSIANLETPVXXAKPI

SEQ ID NO: 5713 - protein, 36 aa, Artificial Sequence
  GFR-binding peptide
  MOD_RES (2)..(4): Xaa is C or S
  MOD_RES (15)..(16)..(17)..(18)..(19): Xaa is A or G
  MOD_RES (20)..(21)..(22)..(23): Xaa is A or G or is absent
SXKXSRVIMYHYKLXXXXXXXXXKYLISIPSLAQPV

SEQ ID NO: 5714 - protein, 36 aa, Artificial Sequence
  GFR-binding peptide
  MOD_RES (33)..(34): Xaa is C or S
  MOD_RES (11)..(12)..(13)..(14)..(15): Xaa is A or G
  MOD_RES (16)..(17)..(18)..(19): Xaa is A or G or is absent
RVVMNQYNKLXXXXXXXXXLYLVSIASLKTPAXXPK

SEQ ID NO: 5715 - protein, 37 aa, Artificial Sequence
  GFR-binding peptide
  MOD_RES (1)..(33)..(34): Xaa is C or S
XSRVVMNYHYKLIVNSSDDKYLVSIPSLKTPAXXPKP

SEQ ID NO: 5716 - protein, 36 aa, Artificial Sequence
  GFR-binding peptide
  MOD_RES (1)..(3)..(35)..(36): Xaa is C or S
XGXGEVVMDYHYKLVVKENEDKYLMSIPSLETPVXX

SEQ ID NO: 5717 - protein, 41 aa, Artificial Sequence
  GFR-binding peptide
  MOD_RES (2)..(4)..(39)..(40): Xaa is C or S
  MOD_RES (17)..(18)..(19)..(20)..(21): Xaa is A or G
  MOD_RES (22)..(23)..(24)..(25): Xaa is A or G or is absent
RXGXEAVSMGEYHYKLXXXXXXXXXKYLVSIPSLKTPVXXA

SEQ ID NO: 5718 - protein, 33 aa, Artificial Sequence
  GFR-binding peptide
  MOD_RES (33)..(33): Xaa is C or S
EAVSMGERHKRLTPVGMDDYYLVSTASLKTPVX

SEQ ID NO: 5719 - protein, 35 aa, Artificial Sequence
  GFR-binding peptide
  MOD_RES (31)..(32): Xaa is C or S
SKVVMRYKKLVKPTRGVFYLISIANLDQPVXXPSA

SEQ ID NO: 5720 - protein, 36 aa, Artificial Sequence
  GFR-binding peptide
  MOD_RES (2)..(4)..(36): Xaa is C or S
HXGXARVVMNRHKRLIVNSSDDYYLVSTASLQTPAX

SEQ ID NO: 5721 - protein, 38 aa, Artificial Sequence
  GFR-binding peptide
  MOD_RES (1)..(35)..(36): Xaa is C or S
  MOD_RES (13)..(14)..(15)..(16)..(17): Xaa is A or G
  MOD_RES (18)..(19)..(20)..(21): Xaa is A or G or is absent
XGEVVMERYKKLXXXXXXXXXFYLMSIANLETPVXXAK

SEQ ID NO: 5722 - protein, 38 aa, Artificial Sequence
  GFR-binding peptide
  MOD_RES (35)..(35): Xaa is C or S
HDELTQYNKLFIPKKRVIELYLVSIASLQVQTPRXQVN

SEQ ID NO: 5723 - protein, 37 aa, Artificial Sequence
  GFR-binding peptide
  MOD_RES (2)..(4): Xaa is C or S
  MOD_RES (16)..(17)..(18)..(19)..(20): Xaa is A or G
  MOD_RES (21)..(22)..(23)..(24): Xaa is A or G or is absent
RXGXGEVVMERHKRLXXXXXXXXXYYLMSTASLETPV

SEQ ID NO: 5724 - protein, 38 aa, Artificial Sequence
  GFR-binding peptide
  MOD_RES (2)..(33)..(34): Xaa is C or S
KXSKVIMQYNKLIKPTKGILYLISIASLDQSVXXPSAS

SEQ ID NO: 5725 - protein, 39 aa, Artificial Sequence
  GFR-binding peptide
  MOD_RES (35)..(35): Xaa is C or S
  MOD_RES (11)..(12)..(13)..(14)..(15): Xaa is A or G
  MOD_RES (16)..(17)..(18)..(19): Xaa is A or G or is absent
HDELTRYKKLXXXXXXXXXFYLVSIANLQVQTPRXQVNR

SEQ ID NO: 5726 - protein, 40 aa, Artificial Sequence
  GFR-binding peptide
  MOD_RES (2)..(4)..(38)..(39): Xaa is C or S
  MOD_RES (16)..(17)..(18)..(19)..(20): Xaa is A or G
  MOD_RES (21)..(22)..(23)..(24): Xaa is A or G or is absent
RXGXGEVVMEQYNKLXXXXXXXXXLYLMSIASLETPVXXA

SEQ ID NO: 5727 - protein, 31 aa, Artificial Sequence
  GFR-binding peptide
  MOD_RES (31)..(31): Xaa is C or S
EVVMDYHYKLVVKENEDKYLMSIPSLETPVX

SEQ ID NO: 5728 - protein, 35 aa, Artificial Sequence
  GFR-binding peptide
  MOD_RES (34)..(35): Xaa is C or S
  MOD_RES (12)..(13)..(14)..(15)..(16): Xaa is A or G
  MOD_RES (17)..(18)..(19)..(20): Xaa is A or G or is absent
ARVVMNYHYKLXXXXXXXXXKYLVSIPSLQTPAXX

SEQ ID NO: 5729 - protein, 34 aa, Artificial Sequence
  GFR-binding peptide
  MOD_RES (1)..(33)..(34): Xaa is C or S
XGEVVMEYHYKLVVKDYEDKYLMSIPSLETPVXX

SEQ ID NO: 5730 - protein, 39 aa, Artificial Sequence
  GFR-binding peptide
  MOD_RES (33)..(34): Xaa is C or S
  MOD_RES (11)..(12)..(13)..(14)..(15): Xaa is A or G
  MOD_RES (16)..(17)..(18)..(19): Xaa is A or G or is absent
SRVIMYHYKLXXXXXXXXXKYLISIPSLAQPVXXPAASA

SEQ ID NO: 5731 - protein, 41 aa, Artificial Sequence
  GFR-binding peptide
  MOD_RES (1)..(3)..(35)..(36): Xaa is C or S
XGXAKVVMNRYKKLIVNNSSDFYLVSIANLKTPAXXAKPVA

SEQ ID NO: 5732 - protein, 37 aa, Artificial Sequence
  GFR-binding peptide
  MOD_RES (1)..(34)..(35): Xaa is C or S
  MOD_RES (12)..(13)..(14)..(15)..(16): Xaa is A or G
  MOD_RES (17)..(18)..(19)..(20): Xaa is A or G or is absent
XSKVIMRHKRLXXXXXXXXXYYLISTASLDQSVXXPS

SEQ ID NO: 5733 - protein, 39 aa, Artificial Sequence
  GFR-binding peptide
  MOD_RES (2)..(4)..(35)..(36): Xaa is C or S
SXKXSKVIMRYKKLIKPTKGIFYLISIANLDQSVXXPSA

SEQ ID NO: 5734 - protein, 38 aa, Artificial Sequence
  GFR-binding peptide
  MOD_RES (2)..(4)..(36)..(37): Xaa is C or S
HXGXARVVMNRYKKLIVNSSDDFYLVSIANLQTPAXXP

SEQ ID NO: 5735 - protein, 42 aa, Artificial Sequence
  GFR-binding peptide
  MOD_RES (2)..(4)..(38)..(39): Xaa is C or S
  MOD_RES (16)..(17)..(18)..(19)..(20): Xaa is A or G
  MOD_RES (21)..(22)..(23)..(24): Xaa is A or G or is absent
HXGXARVVMNYHYKLXXXXXXXXXKYLVSIPSLQTPAXXPKP

SEQ ID NO: 5736 - protein, 33 aa, Artificial Sequence
  GFR-binding peptide
  MOD_RES (2)..(2): Xaa is C or S
GXSRVVMNYHYKLIVNSSDDKYLVSIPSLKTPA

SEQ ID NO: 5737 - protein, 42 aa, Artificial Sequence
  GFR-binding peptide
  MOD_RES (1)..(3)..(36)..(37): Xaa is C or S
XGXEAVSMGEYHYKLTPVGMDDKYLVSIPSLKTPVXXAKGVK

SEQ ID NO: 5738 - protein, 37 aa, Artificial Sequence
  GFR-binding peptide
  MOD_RES (32)..(33): Xaa is C or S
AKVVMNQYNKLIVNNSSDLYLVSIASLKTPAXXAKPV

SEQ ID NO: 5739 - protein, 37 aa, Artificial Sequence
  GFR-binding peptide
  MOD_RES (2)..(4)..(37): Xaa is C or S
  MOD_RES (15)..(16)..(17)..(18)..(19): Xaa is A or G
  MOD_RES (20)..(21)..(22)..(23): Xaa is A or G or is absent
SXKXSRVIMQYNKLXXXXXXXXXLYLISIASLAQPVX

SEQ ID NO: 5740 - protein, 36 aa, Artificial Sequence
  GFR-binding peptide
  MOD_RES (33)..(33): Xaa is C or S
  MOD_RES (11)..(12)..(13)..(14)..(15): Xaa is A or G
  MOD_RES (16)..(17)..(18)..(19): Xaa is A or G or is absent
RVVMNRHKRLXXXXXXXXXYYLVSTASLKTPAXTPK

SEQ ID NO: 5741 - protein, 36 aa, Artificial Sequence
  GFR-binding peptide
  MOD_RES (31)..(32): Xaa is C or S
EVVMDRHKRLVVKENEDYYLMSTASLETPVXXAKPI

SEQ ID NO: 5742 - protein, 35 aa, Artificial Sequence
  GFR-binding peptide
  MOD_RES (2)..(4): Xaa is C or S
HXGXARVVMNRYKKLIVNSSDDFYLVSIANLQTPA

SEQ ID NO: 5743 - protein, 37 aa, Artificial Sequence
  GFR-binding peptide
  MOD_RES (1)..(34)..(35): Xaa is C or S
  MOD_RES (12)..(13)..(14)..(15)..(16): Xaa is A or G
  MOD_RES (17)..(18)..(19)..(20): Xaa is A or G or is absent
XSKVIMQYNKLXXXXXXXXXLYLISIASLDQSVXXPS

SEQ ID NO: 5744 - protein, 35 aa, Artificial Sequence
  GFR-binding peptide
  MOD_RES (33)..(34): Xaa is C or S
  MOD_RES (11)..(12)..(13)..(14)..(15): Xaa is A or G
  MOD_RES (16)..(17)..(18)..(19): Xaa is A or G or is absent
RVVMNRHKRLXXXXXXXXXYYLVSTASLKTPAXXP

SEQ ID NO: 5745 - protein, 42 aa, Artificial Sequence
  GFR-binding peptide
  MOD_RES (2)..(4)..(37)..(38): Xaa is C or S
  MOD_RES (15)..(16)..(17)..(18)..(19): Xaa is A or G
  MOD_RES (20)..(21)..(22)..(23): Xaa is A or G or is absent
SXKXSKVIMQYNKLXXXXXXXXXLYLISIASLDQSVXXPSAS

SEQ ID NO: 5746 - protein, 32 aa, Artificial Sequence
  GFR-binding peptide
  MOD_RES (11)..(12)..(13)..(14)..(15): Xaa is A or G
  MOD_RES (16)..(17)..(18)..(19): Xaa is A or G or is absent
SKVIMRYKKLXXXXXXXXXFYLISIANLDQSV

SEQ ID NO: 5747 - protein, 43 aa, Artificial Sequence
  GFR-binding peptide
  MOD_RES (2)..(37)..(38): Xaa is C or S
  MOD_RES (15)..(16)..(17)..(18)..(19): Xaa is A or G
  MOD_RES (20)..(21)..(22)..(23): Xaa is A or G or is absent
GXEAVSMGERHKRLXXXXXXXXXYYLVSTASLKTPVXXAKGVK

SEQ ID NO: 5748 - protein, 35 aa, Artificial Sequence
  GFR-binding peptide
  MOD_RES (31)..(32): Xaa is C or S
RVVMNRHKRLIVNSSDDYYLVSTASLQTPAXXPKP

SEQ ID NO: 5749 - protein, 37 aa, Artificial Sequence
  GFR-binding peptide
  MOD_RES (1)..(3)..(35)..(36): Xaa is C or S
XGXGEVVMEYHYKLVVKDYEDKYLMSIPSLETPVXXA

SEQ ID NO: 5750 - protein, 39 aa, Artificial Sequence
  GFR-binding peptide
  MOD_RES (1)..(35)..(36): Xaa is C or S
  MOD_RES (13)..(14)..(15)..(16)..(17): Xaa is A or G
  MOD_RES (18)..(19)..(20)..(21): Xaa is A or G or is absent
XARVVMNRYKKLXXXXXXXXXFYLVSIANLQTPAXXPKP

SEQ ID NO: 5751 - protein, 40 aa, Artificial Sequence
  GFR-binding peptide
  MOD_RES (1)..(3)..(37)..(38): Xaa is C or S
  MOD_RES (15)..(16)..(17)..(18)..(19): Xaa is A or G
  MOD_RES (20)..(21)..(22)..(23): Xaa is A or G or is absent
XGXGEVVMERHKRLXXXXXXXXXYYLMSTASLETPVXXAK

SEQ ID NO: 5752 - protein, 38 aa, Artificial Sequence
  GFR-binding peptide
  MOD_RES (2)..(35)..(36): Xaa is C or S
  MOD_RES (13)..(14)..(15)..(16)..(17): Xaa is A or G
  MOD_RES (18)..(19)..(20)..(21): Xaa is A or G or is absent
KXSKVVMRHKRLXXXXXXXXXYYLISTASLDQPVXXPS

SEQ ID NO: 5753 - protein, 38 aa, Artificial Sequence
  GFR-binding peptide
  MOD_RES (2)..(4)..(37)..(38): Xaa is C or S
  MOD_RES (15)..(16)..(17)..(18)..(19): Xaa is A or G
  MOD_RES (20)..(21)..(22)..(23): Xaa is A or G or is absent
SXKXSRVIMRYKKLXXXXXXXXXFYLISIANLAQPVXX

SEQ ID NO: 5754 - protein, 34 aa, Artificial Sequence
  GFR-binding peptide
  MOD_RES (31)..(32): Xaa is C or S
SRVIMYHYKLVKPKRGVKYLISIPSLAQPVXXPA

SEQ ID NO: 5755 - protein, 34 aa, Artificial Sequence
  GFR-binding peptide
  MOD_RES (34)..(34): Xaa is C or S
  MOD_RES (12)..(13)..(14)..(15)..(16): Xaa is A or G
  MOD_RES (17)..(18)..(19)..(20): Xaa is A or G or is absent
GEVVMEYHYKLXXXXXXXXXKYLMSIPSLETPVX

SEQ ID NO: 5756 - protein, 35 aa, Artificial Sequence
  GFR-binding peptide
  MOD_RES (2)..(4): Xaa is C or S
HXGXAKVVMNRHKRLIVNNSSDYYLVSTASLKTPA

SEQ ID NO: 5757 - protein, 34 aa, Artificial Sequence
  GFR-binding peptide
LHDELTRHKRLFIPKKRVIEYYLVSTASLQVQTP

SEQ ID NO: 5758 - protein, 37 aa, Artificial Sequence
  GFR-binding peptide
  MOD_RES (1)..(3): Xaa is C or S
  MOD_RES (16)..(17)..(18)..(19)..(20): Xaa is A or G
  MOD_RES (21)..(22)..(23)..(24): Xaa is A or G or is absent
XGXEAVSMGERYKKLXXXXXXXXXFYLVSIANLKTPV

SEQ ID NO: 5759 - protein, 38 aa, Artificial Sequence
  GFR-binding peptide
  MOD_RES (1)..(35)..(36): Xaa is C or S
  MOD_RES (13)..(14)..(15)..(16)..(17): Xaa is A or G
  MOD_RES (18)..(19)..(20)..(21): Xaa is A or G or is absent
XAKVVMNRYKKLXXXXXXXXXFYLVSIANLKTPAXXAK

SEQ ID NO: 5760 - protein, 33 aa, Artificial Sequence
  GFR-binding peptide
  MOD_RES (31)..(31): Xaa is C or S
RVVMNRYKKLIVNSSDDFYLVSIANLKTPAXTP

SEQ ID NO: 5761 - protein, 42 aa, Artificial Sequence
  GFR-binding peptide
  MOD_RES (1)..(3)..(37)..(38): Xaa is C or S
  MOD_RES (15)..(16)..(17)..(18)..(19): Xaa is A or G
  MOD_RES (20)..(21)..(22)..(23): Xaa is A or G or is absent
XGXSRVVMNYHYKLXXXXXXXXXKYLVSIPSLKTPAXXPKPV

SEQ ID NO: 5762 - protein, 38 aa, Artificial Sequence
  GFR-binding peptide
  MOD_RES (33)..(34): Xaa is C or S
  MOD_RES (11)..(12)..(13)..(14)..(15): Xaa is A or G
  MOD_RES (16)..(17)..(18)..(19): Xaa is A or G or is absent
SKVIMQYNKLXXXXXXXXXLYLISIASLDQSVXXPSAS

SEQ ID NO: 5763 - protein, 34 aa, Artificial Sequence
  GFR-binding peptide
  MOD_RES (33)..(34): Xaa is C or S
  MOD_RES (11)..(12)..(13)..(14)..(15): Xaa is A or G
  MOD_RES (16)..(17)..(18)..(19): Xaa is A or G or is absent
SRVIMQYNKLXXXXXXXXXLYLISIASLAQPVXX

SEQ ID NO: 5764 - protein, 38 aa, Artificial Sequence
  GFR-binding peptide
  MOD_RES (1)..(34)..(35): Xaa is C or S
  MOD_RES (12)..(13)..(14)..(15)..(16): Xaa is A or G
  MOD_RES (17)..(18)..(19)..(20): Xaa is A or G or is absent
XSRVIMRHKRLXXXXXXXXXYYLISTASLAQPVXXPAA

SEQ ID NO: 5765 - protein, 39 aa, Artificial Sequence
  GFR-binding peptide
  MOD_RES (1)..(35)..(36): Xaa is C or S
  MOD_RES (13)..(14)..(15)..(16)..(17): Xaa is A or G
  MOD_RES (18)..(19)..(20)..(21): Xaa is A or G or is absent
XARVVMNQYNKLXXXXXXXXXLYLVSIASLQTPAXXPKP

SEQ ID NO: 5766 - protein, 38 aa, Artificial Sequence
  GFR-binding peptide
  MOD_RES (1)..(34)..(35): Xaa is C or S
  MOD_RES (12)..(13)..(14)..(15)..(16): Xaa is A or G
  MOD_RES (17)..(18)..(19)..(20): Xaa is A or G or is absent
XSRVIMQYNKLXXXXXXXXXLYLISIASLAQPVXXPAA

SEQ ID NO: 5767 - protein, 40 aa, Artificial Sequence
  GFR-binding peptide
  MOD_RES (34)..(34): Xaa is C or S
  MOD_RES (12)..(13)..(14)..(15)..(16): Xaa is A or G
  MOD_RES (17)..(18)..(19)..(20): Xaa is A or G or is absent
SRVVMNRHKRLXXXXXXXXXYYLVSTASLKTPAXTPKTVH

SEQ ID NO: 5768 - protein, 36 aa, Artificial Sequence
  GFR-binding peptide
  MOD_RES (1)..(32)..(33): Xaa is C or S
XSKVVMYHYKLVKPTRGVKYLISIPSLDQPVXXPSA

SEQ ID NO: 5769 - protein, 34 aa, Artificial Sequence
  GFR-binding peptide
  MOD_RES (1)..(33)..(34): Xaa is C or S
XGEVVMERYKKLVVKDYEDFYLMSIANLETPVXX

SEQ ID NO: 5770 - protein, 35 aa, Artificial Sequence
  GFR-binding peptide
  MOD_RES (1)..(1): Xaa is C or S
  MOD_RES (14)..(15)..(16)..(17)..(18): Xaa is A or G
  MOD_RES (19)..(20)..(21)..(22): Xaa is A or G or is absent
XEAVSMGEQYNKLXXXXXXXXXLYLVSIASLKTPV

SEQ ID NO: 5771 - protein, 37 aa, Artificial Sequence
  GFR-binding peptide
  MOD_RES (2)..(33)..(34): Xaa is C or S
KXSKVVMRYKKLVKPTRGVFYLISIANLDQPVXXPSA

SEQ ID NO: 5772 - protein, 37 aa, Artificial Sequence
  GFR-binding peptide
  MOD_RES (33)..(33): Xaa is C or S
  MOD_RES (11)..(12)..(13)..(14)..(15): Xaa is A or G
  MOD_RES (16)..(17)..(18)..(19): Xaa is A or G or is absent
RVVMNRYKKLXXXXXXXXXFYLVSIANLKTPAXTPKT

SEQ ID NO: 5773 - protein, 38 aa, Artificial Sequence
  GFR-binding peptide
  MOD_RES (1)..(35)..(36): Xaa is C or S
  MOD_RES (13)..(14)..(15)..(16)..(17): Xaa is A or G
  MOD_RES (18)..(19)..(20)..(21): Xaa is A or G or is absent
XAKVVMNQYNKLXXXXXXXXXLYLVSIASLKTPAXXAK

SEQ ID NO: 5774 - protein, 36 aa, Artificial Sequence
  GFR-binding peptide
  MOD_RES (2)..(35)..(36): Xaa is C or S
GXEAVSMGERYKKLTPVGMDDFYLVSIANLKTPVXX

SEQ ID NO: 5775 - protein, 34 aa, Artificial Sequence
  GFR-binding peptide
  MOD_RES (2)..(2): Xaa is C or S
  MOD_RES (13)..(14)..(15)..(16)..(17): Xaa is A or G
  MOD_RES (18)..(19)..(20)..(21): Xaa is A or G or is absent
KXSRVIMRHKRLXXXXXXXXXYYLISTASLAQPV

SEQ ID NO: 5776 - protein, 39 aa, Artificial Sequence
  GFR-binding peptide
  MOD_RES (2)..(4)..(37)..(38): Xaa is C or S
RXGXEAVSMGEYHYKLTPVGMDDKYLVSIPSLKTPVXXA

SEQ ID NO: 5777 - protein, 41 aa, Artificial Sequence
  GFR-binding peptide
  MOD_RES (2)..(4)..(37)..(38): Xaa is C or S
RXGXEAVSMGERHKRLTPVGMDDYYLVSTASLKTPVXXAKG

SEQ ID NO: 5778 - protein, 43 aa, Artificial Sequence
  GFR-binding peptide
  MOD_RES (2)..(37)..(38): Xaa is C or S
  MOD_RES (15)..(16)..(17)..(18)..(19): Xaa is A or G
  MOD_RES (20)..(21)..(22)..(23): Xaa is A or G or is absent
GXEAVSMGEQYNKLXXXXXXXXXLYLVSIASLKTPVXXAKGVK

SEQ ID NO: 5779 - protein, 42 aa, Artificial Sequence
  GFR-binding peptide
  MOD_RES (2)..(4)..(41): Xaa is C or S
EXKXALHDELTQYNKLFIPKKRVIELYLVSIASLQVQTPRXQ

SEQ ID NO: 5780 - protein, 35 aa, Artificial Sequence
  GFR-binding peptide
  MOD_RES (2)..(33)..(34): Xaa is C or S
KXSKVVMYHYKLVKPTRGVKYLISIPSLDQPVXXP

SEQ ID NO: 5781 - protein, 32 aa, Artificial Sequence
  GFR-binding peptide
  MOD_RES (31)..(31): Xaa is C or S
RVVMNRYKKLIVNSSDDFYLVSIANLKTPAXT

SEQ ID NO: 5782 - protein, 36 aa, Artificial Sequence
  GFR-binding peptide
  MOD_RES (2)..(36): Xaa is C or S
  MOD_RES (14)..(15)..(16)..(17)..(18): Xaa is A or G
  MOD_RES (19)..(20)..(21)..(22): Xaa is A or G or is absent
GXGEVVMEYHYKLXXXXXXXXXKYLMSIPSLETPVX

SEQ ID NO: 5783 - protein, 32 aa, Artificial Sequence
  GFR-binding peptide
  MOD_RES (1)..(32): Xaa is C or S
XSKVIMRYKKLIKPTKGIFYLISIANLDQSVX

SEQ ID NO: 5784 - protein, 38 aa, Artificial Sequence
  GFR-binding peptide
  MOD_RES (32)..(33): Xaa is C or S
GEVVMEQYNKLVVKDYEDLYLMSIASLETPVXXAKPIS

SEQ ID NO: 5785 - protein, 42 aa, Artificial Sequence
  GFR-binding peptide
  MOD_RES (2)..(36): Xaa is C or S
  MOD_RES (14)..(15)..(16)..(17)..(18): Xaa is A or G
  MOD_RES (19)..(20)..(21)..(22): Xaa is A or G or is absent
GXSRVVMNRYKKLXXXXXXXXXFYLVSIANLKTPAXTPKTVH

SEQ ID NO: 5786 - protein, 36 aa, Artificial Sequence
  GFR-binding peptide
  MOD_RES (2)..(34)..(35): Xaa is C or S
GXGEVVMDRHKRLVVKENEDYYLMSTASLETPVXXA

SEQ ID NO: 5787 - protein, 40 aa, Artificial Sequence
  GFR-binding peptide
  MOD_RES (1)..(3)..(35): Xaa is C or S
XGXSRVVMNQYNKLIVNSSDDLYLVSIASLKTPAXTPKTV

SEQ ID NO: 5788 - protein, 36 aa, Artificial Sequence
  GFR-binding peptide
  MOD_RES (34)..(35): Xaa is C or S
  MOD_RES (12)..(13)..(14)..(15)..(16): Xaa is A or G
  MOD_RES (17)..(18)..(19)..(20): Xaa is A or G or is absent
GEVVMERYKKLXXXXXXXXXFYLMSIANLETPVXXA

SEQ ID NO: 5789 - protein, 33 aa, Artificial Sequence
  GFR-binding peptide
  MOD_RES (1)..(1): Xaa is C or S
  MOD_RES (12)..(13)..(14)..(15)..(16): Xaa is A or G
  MOD_RES (17)..(18)..(19)..(20): Xaa is A or G or is absent
XSKVVMRHKRLXXXXXXXXXYYLISTASLDQPV

SEQ ID NO: 5790 - protein, 37 aa, Artificial Sequence
  GFR-binding peptide
  MOD_RES (33)..(34): Xaa is C or S
EAVSMGERHKRLTPVGMDDYYLVSTASLKTPVXXAKG

SEQ ID NO: 5791 - protein, 39 aa, Artificial Sequence
  GFR-binding peptide
  MOD_RES (2)..(4)..(36)..(37): Xaa is C or S
RXGXGEVVMDRHKRLVVKENEDYYLMSTASLETPVXXAK

SEQ ID NO: 5792 - protein, 40 aa, Artificial Sequence
  GFR-binding peptide
  MOD_RES (2)..(4): Xaa is C or S
EXKXALHDELTQYNKLFIPKKRVIELYLVSIASLQVQTPR

SEQ ID NO: 5793 - protein, 39 aa, Artificial Sequence
  GFR-binding peptide
  MOD_RES (1)..(33)..(34): Xaa is C or S
XSRVVMNRHKRLIVNSSDDYYLVSTASLKTPAXXPKPVY

SEQ ID NO: 5794 - protein, 39 aa, Artificial Sequence
  GFR-binding peptide
  MOD_RES (33)..(34): Xaa is C or S
EAVSMGEYHYKLTPVGMDDKYLVSIPSLKTPVXXAKGVK

SEQ ID NO: 5795 - protein, 38 aa, Artificial Sequence
  GFR-binding peptide
  MOD_RES (2)..(4): Xaa is C or S
EXKXALHDELTRHKRLFIPKKRVIEYYLVSTASLQVQT

SEQ ID NO: 5796 - protein, 34 aa, Artificial Sequence
  GFR-binding peptide
  MOD_RES (33)..(34): Xaa is C or S
  MOD_RES (11)..(12)..(13)..(14)..(15): Xaa is A or G
  MOD_RES (16)..(17)..(18)..(19): Xaa is A or G or is absent
EVVMEYHYKLXXXXXXXXXKYLMSIPSLETPVXX

SEQ ID NO: 5797 - protein, 39 aa, Artificial Sequence
  GFR-binding peptide
  MOD_RES (1)..(3)..(37)..(38): Xaa is C or S
  MOD_RES (15)..(16)..(17)..(18)..(19): Xaa is A or G
  MOD_RES (20)..(21)..(22)..(23): Xaa is A or G or is absent
XGXGEVVMDRHKRLXXXXXXXXXYYLMSTASLETPVXXA

SEQ ID NO: 5798 - protein, 42 aa, Artificial Sequence
  GFR-binding peptide
  MOD_RES (2)..(4)..(36)..(37): Xaa is C or S
RXGXGEVVMEQYNKLVVKDYEDLYLMSIASLETPVXXAKPIS

SEQ ID NO: 5799 - protein, 32 aa, Artificial Sequence
  GFR-binding peptide
  MOD_RES (1)..(32): Xaa is C or S
XSKVVMQYNKLVKPTRGVLYLISIASLDQPVX

SEQ ID NO: 5800 - protein, 37 aa, Artificial Sequence
  GFR-binding peptide
  MOD_RES (32)..(33): Xaa is C or S
GEVVMDRHKRLVVKENEDYYLMSTASLETPVXXAKPI

SEQ ID NO: 5801 - protein, 38 aa, Artificial Sequence
  GFR-binding peptide
  MOD_RES (2)..(4)..(38): Xaa is C or S
  MOD_RES (16)..(17)..(18)..(19)..(20): Xaa is A or G
  MOD_RES (21)..(22)..(23)..(24): Xaa is A or G or is absent
HXGXSRVVMNQYNKLXXXXXXXXXLYLVSIASLKTPAX

SEQ ID NO: 5802 - protein, 39 aa, Artificial Sequence
  GFR-binding peptide
  MOD_RES (1)..(3)..(36)..(37): Xaa is C or S
XGXEAVSMGEQYNKLTPVGMDDLYLVSIASLKTPVXXAK

SEQ ID NO: 5803 - protein, 38 aa, Artificial Sequence
  GFR-binding peptide
  MOD_RES (2)..(4)..(37)..(38): Xaa is C or S
  MOD_RES (15)..(16)..(17)..(18)..(19): Xaa is A or G
  MOD_RES (20)..(21)..(22)..(23): Xaa is A or G or is absent
SXKXSKVVMQYNKLXXXXXXXXXLYLISIASLDQPVXX

SEQ ID NO: 5804 - protein, 36 aa, Artificial Sequence
  GFR-binding peptide
  MOD_RES (1)..(35)..(36): Xaa is C or S
  MOD_RES (13)..(14)..(15)..(16)..(17): Xaa is A or G
  MOD_RES (18)..(19)..(20)..(21): Xaa is A or G or is absent
XSRVVMNQYNKLXXXXXXXXXLYLVSIASLKTPAXX

SEQ ID NO: 5805 - protein, 34 aa, Artificial Sequence
  GFR-binding peptide
HDELTRHKRLFIPKKRVIEYYLVSTASLQVQTPR

SEQ ID NO: 5806 - protein, 34 aa, Artificial Sequence
  GFR-binding peptide
  MOD_RES (1)..(3): Xaa is C or S
XGXGEVVMERHKRLVVKDYEDYYLMSTASLETPV

SEQ ID NO: 5807 - protein, 40 aa, Artificial Sequence
  GFR-binding peptide
  MOD_RES (1)..(3)..(37)..(38): Xaa is C or S
  MOD_RES (15)..(16)..(17)..(18)..(19): Xaa is A or G
  MOD_RES (20)..(21)..(22)..(23): Xaa is A or G or is absent
XGXARVVMNRHKRLXXXXXXXXXYYLVSTASLQTPAXXPK

SEQ ID NO: 5808 - protein, 38 aa, Artificial Sequence
  GFR-binding peptide
  MOD_RES (1)..(3)..(36)..(37): Xaa is C or S
  MOD_RES (14)..(15)..(16)..(17)..(18): Xaa is A or G
  MOD_RES (19)..(20)..(21)..(22): Xaa is A or G or is absent
XKXSRVIMYHYKLXXXXXXXXXKYLISIPSLAQPVXXP

SEQ ID NO: 5809 - protein, 37 aa, Artificial Sequence
  GFR-binding peptide
  MOD_RES (34)..(34): Xaa is C or S
  MOD_RES (12)..(13)..(14)..(15)..(16): Xaa is A or G
  MOD_RES (17)..(18)..(19)..(20): Xaa is A or G or is absent
SRVVMNYHYKLXXXXXXXXXKYLVSIPSLKTPAXTPK

SEQ ID NO: 5810 - protein, 31 aa, Artificial Sequence
  GFR-binding peptide
  MOD_RES (1)..(1): Xaa is C or S
XSKVIMQYNKLIKPTKGILYLISIASLDQSV

SEQ ID NO: 5811 - protein, 36 aa, Artificial Sequence
  GFR-binding peptide
  MOD_RES (2)..(34)..(35): Xaa is C or S
GXAKVVMNQYNKLIVNNSSDLYLVSIASLKTPAXXA

SEQ ID NO: 5812 - protein, 39 aa, Artificial Sequence
  GFR-binding peptide
  MOD_RES (1)..(33)..(34): Xaa is C or S
XGEVVMDRHKRLVVKENEDYYLMSTASLETPVXXAKPIK

SEQ ID NO: 5813 - protein, 34 aa, Artificial Sequence
  GFR-binding peptide
  MOD_RES (2)..(4): Xaa is C or S
SXKXSKVIMQYNKLIKPTKGILYLISIASLDQSV

SEQ ID NO: 5814 - protein, 30 aa, Artificial Sequence
  GFR-binding peptide
SRVIMRYKKLVKPKRGVFYLISIANLAQPV

SEQ ID NO: 5815 - protein, 41 aa, Artificial Sequence
  GFR-binding peptide
  MOD_RES (2)..(4)..(38)..(39): Xaa is C or S
  MOD_RES (16)..(17)..(18)..(19)..(20): Xaa is A or G
  MOD_RES (21)..(22)..(23)..(24): Xaa is A or G or is absent
HXGXSRVVMNRYKKLXXXXXXXXXFYLVSIANLKTPAXXPK

SEQ ID NO: 5816 - protein, 38 aa, Artificial Sequence
  GFR-binding peptide
  MOD_RES (2)..(33)..(34): Xaa is C or S
KXSKVVMQYNKLVKPTRGVLYLISIASLDQPVXXPSAS

SEQ ID NO: 5817 - protein, 38 aa, Artificial Sequence
  GFR-binding peptide
  MOD_RES (32)..(33): Xaa is C or S
ARVVMNYHYKLIVNSSDDKYLVSIPSLQTPAXXPKPVT

SEQ ID NO: 5818 - protein, 38 aa, Artificial Sequence
  GFR-binding peptide
  MOD_RES (1)..(3)..(34)..(35): Xaa is C or S
XKXSKVIMQYNKLIKPTKGILYLISIASLDQSVXXPSA

SEQ ID NO: 5819 - protein, 31 aa, Artificial Sequence
  GFR-binding peptide
SRVVMNYHYKLIVNSSDDKYLVSIPSLKTPA

SEQ ID NO: 5820 - protein, 39 aa, Artificial Sequence
  GFR-binding peptide
  MOD_RES (2)..(36)..(37): Xaa is C or S
  MOD_RES (14)..(15)..(16)..(17)..(18): Xaa is A or G
  MOD_RES (19)..(20)..(21)..(22): Xaa is A or G or is absent
GXSRVVMNRYKKLXXXXXXXXXFYLVSIANLKTPAXXPK

SEQ ID NO: 5821 - protein, 41 aa, Artificial Sequence
  GFR-binding peptide
  MOD_RES (1)..(36)..(37): Xaa is C or S
  MOD_RES (14)..(15)..(16)..(17)..(18): Xaa is A or G
  MOD_RES (19)..(20)..(21)..(22): Xaa is A or G or is absent
XEAVSMGEQYNKLXXXXXXXXXLYLVSIASLKTPVXXAKGV

SEQ ID NO: 5822 - protein, 35 aa, Artificial Sequence
  GFR-binding peptide
  MOD_RES (1)..(32)..(33): Xaa is C or S
XSRVIMQYNKLVKPKRGVLYLISIASLAQPVXXPA

SEQ ID NO: 5823 - protein, 39 aa, Artificial Sequence
  GFR-binding peptide
  MOD_RES (34)..(35): Xaa is C or S
  MOD_RES (12)..(13)..(14)..(15)..(16): Xaa is A or G
  MOD_RES (17)..(18)..(19)..(20): Xaa is A or G or is absent
SRVVMNQYNKLXXXXXXXXXLYLVSIASLKTPAXXPKPV

SEQ ID NO: 5824 - protein, 37 aa, Artificial Sequence
  GFR-binding peptide
  MOD_RES (1)..(1): Xaa is C or S
  MOD_RES (14)..(15)..(16)..(17)..(18): Xaa is A or G
  MOD_RES (19)..(20)..(21)..(22): Xaa is A or G or is absent
XALHDELTRYKKLXXXXXXXXXFYLVSIANLQVQTPR

SEQ ID NO: 5825 - protein, 40 aa, Artificial Sequence
  GFR-binding peptide
  MOD_RES (2)..(4)..(36)..(37): Xaa is C or S
RXGXGEVVMDYHYKLVVKENEDKYLMSIPSLETPVXXAKP

SEQ ID NO: 5826 - protein, 34 aa, Artificial Sequence
  GFR-binding peptide
  MOD_RES (32)..(33): Xaa is C or S
ARVVMNRYKKLIVNSSDDFYLVSIANLQTPAXXP

SEQ ID NO: 5827 - protein, 38 aa, Artificial Sequence
  GFR-binding peptide
  MOD_RES (33)..(34): Xaa is C or S
  MOD_RES (11)..(12)..(13)..(14)..(15): Xaa is A or G
  MOD_RES (16)..(17)..(18)..(19): Xaa is A or G or is absent
EVVMDYHYKLXXXXXXXXXKYLMSIPSLETPVXXAKPI

SEQ ID NO: 5828 - protein, 40 aa, Artificial Sequence
  GFR-binding peptide
  MOD_RES (1)..(35): Xaa is C or S
  MOD_RES (13)..(14)..(15)..(16)..(17): Xaa is A or G
  MOD_RES (18)..(19)..(20)..(21): Xaa is A or G or is absent
XSRVVMNYHYKLXXXXXXXXXKYLVSIPSLKTPAXTPKTV

SEQ ID NO: 5829 - protein, 36 aa, Artificial Sequence
  GFR-binding peptide
  MOD_RES (2)..(2): Xaa is C or S
KXALHDELTQYNKLFIPKKRVIELYLVSIASLQVQT

SEQ ID NO: 5830 - protein, 38 aa, Artificial Sequence
  GFR-binding peptide
  MOD_RES (2)..(4)..(36)..(37): Xaa is C or S
HXGXARVVMNYHYKLIVNSSDDKYLVSIPSLQTPAXXP

SEQ ID NO: 5831 - protein, 36 aa, Artificial Sequence
  GFR-binding peptide
  MOD_RES (2)..(2): Xaa is C or S
  MOD_RES (15)..(16)..(17)..(18)..(19): Xaa is A or G
  MOD_RES (20)..(21)..(22)..(23): Xaa is A or G or is absent
GXEAVSMGERYKKLXXXXXXXXXFYLVSIANLKTPV

SEQ ID NO: 5832 - protein, 34 aa, Artificial Sequence
  GFR-binding peptide
  MOD_RES (2)..(34): Xaa is C or S
GXSRVVMNRHKRLIVNSSDDYYLVSTASLKTPAX

SEQ ID NO: 5833 - protein, 36 aa, Artificial Sequence
  GFR-binding peptide
  MOD_RES (33)..(34): Xaa is C or S
  MOD_RES (11)..(12)..(13)..(14)..(15): Xaa is A or G
  MOD_RES (16)..(17)..(18)..(19): Xaa is A or G or is absent
RVVMNYHYKLXXXXXXXXXKYLVSIPSLKTPAXXPK

SEQ ID NO: 5834 - protein, 33 aa, Artificial Sequence
  GFR-binding peptide
  MOD_RES (2)..(2): Xaa is C or S
GXGEVVMDQYNKLVVKENEDLYLMSIASLETPV

SEQ ID NO: 5835 - protein, 36 aa, Artificial Sequence
  GFR-binding peptide
  MOD_RES (31)..(31): Xaa is C or S
RVVMNRYKKLIVNSSDDFYLVSIANLKTPAXTPKTV

SEQ ID NO: 5836 - protein, 37 aa, Artificial Sequence
  GFR-binding peptide
  MOD_RES (2)..(35)..(36): Xaa is C or S
  MOD_RES (13)..(14)..(15)..(16)..(17): Xaa is A or G
  MOD_RES (18)..(19)..(20)..(21): Xaa is A or G or is absent
KXSKVIMQYNKLXXXXXXXXXLYLISIASLDQSVXXP

SEQ ID NO: 5837 - protein, 39 aa, Artificial Sequence
  GFR-binding peptide
  MOD_RES (1)..(33): Xaa is C or S
XSRVVMNYHYKLIVNSSDDKYLVSIPSLKTPAXTPKTVH

SEQ ID NO: 5838 - protein, 39 aa, Artificial Sequence
  GFR-binding peptide
  MOD_RES (2)..(4)..(36)..(37): Xaa is C or S
RXGXGEVVMEYHYKLVVKDYEDKYLMSIPSLETPVXXAK

SEQ ID NO: 5839 - protein, 34 aa, Artificial Sequence
  GFR-binding peptide
  MOD_RES (31)..(32): Xaa is C or S
SRVIMQYNKLVKPKRGVLYLISIASLAQPVXXPA

SEQ ID NO: 5840 - protein, 41 aa, Artificial Sequence
  GFR-binding peptide
  MOD_RES (1)..(3)..(36)..(37): Xaa is C or S
  MOD_RES (14)..(15)..(16)..(17)..(18): Xaa is A or G
  MOD_RES (19)..(20)..(21)..(22): Xaa is A or G or is absent
XKXSKVVMQYNKLXXXXXXXXXLYLISIASLDQPVXXPSAS

SEQ ID NO: 5841 - protein, 36 aa, Artificial Sequence
  GFR-binding peptide
  MOD_RES (2)..(33)..(34): Xaa is C or S
KXSRVIMRYKKLVKPKRGVFYLISIANLAQPVXXPA

SEQ ID NO: 5842 - protein, 37 aa, Artificial Sequence
  GFR-binding peptide
  MOD_RES (2)..(4)..(36)..(37): Xaa is C or S
HXGXSRVVMNRHKRLIVNSSDDYYLVSTASLKTPAXX

SEQ ID NO: 5843 - protein, 34 aa, Artificial Sequence
  GFR-binding peptide
  MOD_RES (32)..(33): Xaa is C or S
AKVVMNRHKRLIVNNSSDYYLVSTASLKTPAXXA

SEQ ID NO: 5844 - protein, 36 aa, Artificial Sequence
  GFR-binding peptide
  MOD_RES (1)..(3)..(35)..(36): Xaa is C or S
XGXSRVVMNYHYKLIVNSSDDKYLVSIPSLKTPAXX

SEQ ID NO: 5845 - protein, 40 aa, Artificial Sequence
  GFR-binding peptide
  MOD_RES (1)..(36)..(37): Xaa is C or S
  MOD_RES (14)..(15)..(16)..(17)..(18): Xaa is A or G
  MOD_RES (19)..(20)..(21)..(22): Xaa is A or G or is absent
XEAVSMGEYHYKLXXXXXXXXXKYLVSIPSLKTPVXXAKG

SEQ ID NO: 5846 - protein, 39 aa, Artificial Sequence
  GFR-binding peptide
  MOD_RES (2)..(4)..(38): Xaa is C or S
  MOD_RES (16)..(17)..(18)..(19)..(20): Xaa is A or G
  MOD_RES (21)..(22)..(23)..(24): Xaa is A or G or is absent
HXGXSRVVMNRYKKLXXXXXXXXXFYLVSIANLKTPAXT

SEQ ID NO: 5847 - protein, 39 aa, Artificial Sequence
  GFR-binding peptide
  MOD_RES (33)..(34): Xaa is C or S
  MOD_RES (11)..(12)..(13)..(14)..(15): Xaa is A or G
  MOD_RES (16)..(17)..(18)..(19): Xaa is A or G or is absent
SRVIMQYNKLXXXXXXXXXLYLISIASLAQPVXXPAASA

SEQ ID NO: 5848 - protein, 35 aa, Artificial Sequence
  GFR-binding peptide
  MOD_RES (2)..(33)..(34): Xaa is C or S
KXSKVIMRYKKLIKPTKGIFYLISIANLDQSVXXP

SEQ ID NO: 5849 - protein, 39 aa, Artificial Sequence
  GFR-binding peptide
  MOD_RES (2)..(34)..(35): Xaa is C or S
GXAKVVMNRYKKLIVNNSSDFYLVSIANLKTPAXXAKPV

SEQ ID NO: 5850 - protein, 36 aa, Artificial Sequence
  GFR-binding peptide
  MOD_RES (36)..(36): Xaa is C or S
  MOD_RES (12)..(13)..(14)..(15)..(16): Xaa is A or G
  MOD_RES (17)..(18)..(19)..(20): Xaa is A or G or is absent
LHDELTRYKKLXXXXXXXXXFYLVSIANLQVQTPRX

SEQ ID NO: 5851 - protein, 34 aa, Artificial Sequence
  GFR-binding peptide
  MOD_RES (34)..(34): Xaa is C or S
  MOD_RES (12)..(13)..(14)..(15)..(16): Xaa is A or G
  MOD_RES (17)..(18)..(19)..(20): Xaa is A or G or is absent
GEVVMDYHYKLXXXXXXXXXKYLMSIPSLETPVX

SEQ ID NO: 5852 - protein, 38 aa, Artificial Sequence
  GFR-binding peptide
  MOD_RES (33)..(34): Xaa is C or S
  MOD_RES (11)..(12)..(13)..(14)..(15): Xaa is A or G
  MOD_RES (16)..(17)..(18)..(19): Xaa is A or G or is absent
SKVIMYHYKLXXXXXXXXXKYLISIPSLDQSVXXPSAS

SEQ ID NO: 5853 - protein, 37 aa, Artificial Sequence
  GFR-binding peptide
  MOD_RES (32)..(33): Xaa is C or S
AKVVMNRYKKLIVNNSSDFYLVSIANLKTPAXXAKPV

SEQ ID NO: 5854 - protein, 38 aa, Artificial Sequence
  GFR-binding peptide
  MOD_RES (33)..(34): Xaa is C or S
  MOD_RES (11)..(12)..(13)..(14)..(15): Xaa is A or G
  MOD_RES (16)..(17)..(18)..(19): Xaa is A or G or is absent
SRVIMYHYKLXXXXXXXXXKYLISIPSLAQPVXXPAAS

SEQ ID NO: 5855 - protein, 36 aa, Artificial Sequence
  GFR-binding peptide
  MOD_RES (2)..(4): Xaa is C or S
  MOD_RES (15)..(16)..(17)..(18)..(19): Xaa is A or G
  MOD_RES (20)..(21)..(22)..(23): Xaa is A or G or is absent
SXKXSKVIMRHKRLXXXXXXXXXYYLISTASLDQSV

SEQ ID NO: 5856 - protein, 39 aa, Artificial Sequence
  GFR-binding peptide
  MOD_RES (2)..(33)..(34): Xaa is C or S
KXSKVIMYHYKLIKPTKGIKYLISIPSLDQSVXXPSASA

SEQ ID NO: 5857 - protein, 33 aa, Artificial Sequence
  GFR-binding peptide
  MOD_RES (33)..(33): Xaa is C or S
EAVSMGEYHYKLTPVGMDDKYLVSIPSLKTPVX

SEQ ID NO: 5858 - protein, 32 aa, Artificial Sequence
  GFR-binding peptide
HDELTQYNKLFIPKKRVIELYLVSIASLQVQT

SEQ ID NO: 5859 - protein, 35 aa, Artificial Sequence
  GFR-binding peptide
  MOD_RES (2)..(34)..(35): Xaa is C or S
GXARVVMNYHYKLIVNSSDDKYLVSIPSLQTPAXX

SEQ ID NO: 5860 - protein, 41 aa, Artificial Sequence
  GFR-binding peptide
  MOD_RES (2)..(4)..(38)..(39): Xaa is C or S
  MOD_RES (16)..(17)..(18)..(19)..(20): Xaa is A or G
  MOD_RES (21)..(22)..(23)..(24): Xaa is A or G or is absent
RXGXGEVVMDRYKKLXXXXXXXXXFYLMSIANLETPVXXAK

SEQ ID NO: 5861 - protein, 37 aa, Artificial Sequence
  GFR-binding peptide
  MOD_RES (31)..(32): Xaa is C or S
KVVMNRYKKLIVNNSSDFYLVSIANLKTPAXXAKPVA

SEQ ID NO: 5862 - protein, 41 aa, Artificial Sequence
  GFR-binding peptide
  MOD_RES (1)..(3)..(37)..(38): Xaa is C or S
  MOD_RES (15)..(16)..(17)..(18)..(19): Xaa is A or G
  MOD_RES (20)..(21)..(22)..(23): Xaa is A or G or is absent
XGXGEVVMERHKRLXXXXXXXXXYYLMSTASLETPVXXAKP

SEQ ID NO: 5863 - protein, 36 aa, Artificial Sequence
  GFR-binding peptide
  MOD_RES (32)..(32): Xaa is C or S
SRVVMNQYNKLIVNSSDDLYLVSIASLKTPAXTPKT

SEQ ID NO: 5864 - protein, 37 aa, Artificial Sequence
  GFR-binding peptide
  MOD_RES (2)..(4)..(35)..(36): Xaa is C or S
SXKXSKVIMRHKRLIKPTKGIYYLISTASLDQSVXXP

SEQ ID NO: 5865 - protein, 34 aa, Artificial Sequence
  GFR-binding peptide
  MOD_RES (32)..(33): Xaa is C or S
ARVVMNQYNKLIVNSSDDLYLVSIASLQTPAXXP

SEQ ID NO: 5866 - protein, 36 aa, Artificial Sequence
  GFR-binding peptide
  MOD_RES (2)..(35)..(36): Xaa is C or S
  MOD_RES (13)..(14)..(15)..(16)..(17): Xaa is A or G
  MOD_RES (18)..(19)..(20)..(21): Xaa is A or G or is absent
KXSKVIMYHYKLXXXXXXXXXKYLISIPSLDQSVXX

SEQ ID NO: 5867 - protein, 31 aa, Artificial Sequence
  GFR-binding peptide
ARVVMNRYKKLIVNSSDDFYLVSIANLQTPA

SEQ ID NO: 5868 - protein, 40 aa, Artificial Sequence
  GFR-binding peptide
  MOD_RES (2)..(4)..(38)..(39): Xaa is C or S
  MOD_RES (16)..(17)..(18)..(19)..(20): Xaa is A or G
  MOD_RES (21)..(22)..(23)..(24): Xaa is A or G or is absent
RXGXGEVVMERYKKLXXXXXXXXXFYLMSIANLETPVXXA

SEQ ID NO: 5869 - protein, 40 aa, Artificial Sequence
  GFR-binding peptide
  MOD_RES (1)..(3)..(37)..(38): Xaa is C or S
  MOD_RES (15)..(16)..(17)..(18)..(19): Xaa is A or G
  MOD_RES (20)..(21)..(22)..(23): Xaa is A or G or is absent
XGXSRVVMNQYNKLXXXXXXXXXLYLVSIASLKTPAXXPK

SEQ ID NO: 5870 - protein, 40 aa, Artificial Sequence
  GFR-binding peptide
  MOD_RES (2)..(34)..(35): Xaa is C or S
GXAKVVMNYHYKLIVNNSSDKYLVSIPSLKTPAXXAKPVA

SEQ ID NO: 5871 - protein, 37 aa, Artificial Sequence
  GFR-binding peptide
  MOD_RES (1)..(33)..(34): Xaa is C or S
XARVVMNRYKKLIVNSSDDFYLVSIANLQTPAXXPKP

SEQ ID NO: 5872 - protein, 39 aa, Artificial Sequence
  GFR-binding peptide
  MOD_RES (1)..(33): Xaa is C or S
XSRVVMNRYKKLIVNSSDDFYLVSIANLKTPAXTPKTVH

SEQ ID NO: 5873 - protein, 32 aa, Artificial Sequence
  GFR-binding peptide
  MOD_RES (31)..(32): Xaa is C or S
KVVMNRYKKLIVNNSSDFYLVSIANLKTPAXX

SEQ ID NO: 5874 - protein, 34 aa, Artificial Sequence
  GFR-binding peptide
  MOD_RES (33)..(34): Xaa is C or S
  MOD_RES (11)..(12)..(13)..(14)..(15): Xaa is A or G
  MOD_RES (16)..(17)..(18)..(19): Xaa is A or G or is absent
EVVMEQYNKLXXXXXXXXXLYLMSIASLETPVXX

SEQ ID NO: 5875 - protein, 45 aa, Artificial Sequence
  GFR-binding peptide
  MOD_RES (2)..(4)..(41): Xaa is C or S
  MOD_RES (17)..(18)..(19)..(20)..(21): Xaa is A or G
  MOD_RES (22)..(23)..(24)..(25): Xaa is A or G or is absent
EXKXALHDELTYHYKLXXXXXXXXXKYLVSIPSLQVQTPRXQVNR

SEQ ID NO: 5876 - protein, 38 aa, Artificial Sequence
  GFR-binding peptide
  MOD_RES (1)..(33)..(34): Xaa is C or S
XAKVVMNRHKRLIVNNSSDYYLVSTASLKTPAXXAKPV

SEQ ID NO: 5877 - protein, 39 aa, Artificial Sequence
  GFR-binding peptide
  MOD_RES (1)..(3)..(38)..(39): Xaa is C or S
  MOD_RES (16)..(17)..(18)..(19)..(20): Xaa is A or G
  MOD_RES (21)..(22)..(23)..(24): Xaa is A or G or is absent
XGXEAVSMGEYHYKLXXXXXXXXXKYLVSIPSLKTPVXX

SEQ ID NO: 5878 - protein, 34 aa, Artificial Sequence
  GFR-binding peptide
  MOD_RES (1)..(1): Xaa is C or S
  MOD_RES (13)..(14)..(15)..(16)..(17): Xaa is A or G
  MOD_RES (18)..(19)..(20)..(21): Xaa is A or G or is absent
XGEVVMDRYKKLXXXXXXXXXFYLMSIANLETPV

SEQ ID NO: 5879 - protein, 37 aa, Artificial Sequence
  GFR-binding peptide
  MOD_RES (36)..(36): Xaa is C or S
LHDELTYHYKLFIPKKRVIEKYLVSIPSLQVQTPRXQ

SEQ ID NO: 5880 - protein, 36 aa, Artificial Sequence
  GFR-binding peptide
  MOD_RES (33)..(34): Xaa is C or S
  MOD_RES (11)..(12)..(13)..(14)..(15): Xaa is A or G
  MOD_RES (16)..(17)..(18)..(19): Xaa is A or G or is absent
EVVMDQYNKLXXXXXXXXXLYLMSIASLETPVXXAK

SEQ ID NO: 5881 - protein, 39 aa, Artificial Sequence
  GFR-binding peptide
  MOD_RES (1)..(34)..(35): Xaa is C or S
  MOD_RES (12)..(13)..(14)..(15)..(16): Xaa is A or G
  MOD_RES (17)..(18)..(19)..(20): Xaa is A or G or is absent
XSKVIMRHKRLXXXXXXXXXYYLISTASLDQSVXXPSAS

SEQ ID NO: 5882 - protein, 43 aa, Artificial Sequence
  GFR-binding peptide
  MOD_RES (2)..(4)..(37)..(38): Xaa is C or S
  MOD_RES (15)..(16)..(17)..(18)..(19): Xaa is A or G
  MOD_RES (20)..(21)..(22)..(23): Xaa is A or G or is absent
SXKXSRVIMRYKKLXXXXXXXXXFYLISIANLAQPVXXPAASA

SEQ ID NO: 5883 - protein, 41 aa, Artificial Sequence
  GFR-binding peptide
  MOD_RES (2)..(4)..(35)..(36): Xaa is C or S
SXKXSRVIMRYKKLVKPKRGVFYLISIANLAQPVXXPAASA

SEQ ID NO: 5884 - protein, 35 aa, Artificial Sequence
  GFR-binding peptide
  MOD_RES (31)..(32): Xaa is C or S
SKVIMQYNKLIKPTKGILYLISIASLDQSVXXPSA

SEQ ID NO: 5885 - protein, 35 aa, Artificial Sequence
  GFR-binding peptide
  MOD_RES (2)..(34)..(35): Xaa is C or S
GXGEVVMERYKKLVVKDYEDFYLMSIANLETPVXX

SEQ ID NO: 5886 - protein, 36 aa, Artificial Sequence
  GFR-binding peptide
  MOD_RES (2)..(4)..(36): Xaa is C or S
HXGXAKVVMNRYKKLIVNNSSDFYLVSIANLKTPAX

SEQ ID NO: 5887 - protein, 42 aa, Artificial Sequence
  GFR-binding peptide
  MOD_RES (2)..(36): Xaa is C or S
  MOD_RES (14)..(15)..(16)..(17)..(18): Xaa is A or G
  MOD_RES (19)..(20)..(21)..(22): Xaa is A or G or is absent
GXSRVVMNYHYKLXXXXXXXXXKYLVSIPSLKTPAXTPKTVH

SEQ ID NO: 5888 - protein, 39 aa, Artificial Sequence
  GFR-binding peptide
  MOD_RES (1)..(34)..(35): Xaa is C or S
  MOD_RES (12)..(13)..(14)..(15)..(16): Xaa is A or G
  MOD_RES (17)..(18)..(19)..(20): Xaa is A or G or is absent
XSKVIMQYNKLXXXXXXXXXLYLISIASLDQSVXXPSAS

SEQ ID NO: 5889 - protein, 38 aa, Artificial Sequence
  GFR-binding peptide
  MOD_RES (1)..(3): Xaa is C or S
  MOD_RES (16)..(17)..(18)..(19)..(20): Xaa is A or G
  MOD_RES (21)..(22)..(23)..(24): Xaa is A or G or is absent
XKXALHDELTYHYKLXXXXXXXXXKYLVSIPSLQVQTP

SEQ ID NO: 5890 - protein, 38 aa, Artificial Sequence
  GFR-binding peptide
  MOD_RES (1)..(3)..(35)..(36): Xaa is C or S
XGXAKVVMNQYNKLIVNNSSDLYLVSIASLKTPAXXAK

SEQ ID NO: 5891 - protein, 35 aa, Artificial Sequence
  GFR-binding peptide
  MOD_RES (1)..(35): Xaa is C or S
  MOD_RES (13)..(14)..(15)..(16)..(17): Xaa is A or G
  MOD_RES (18)..(19)..(20)..(21): Xaa is A or G or is absent
XAKVVMNQYNKLXXXXXXXXXLYLVSIASLKTPAX

SEQ ID NO: 5892 - protein, 37 aa, Artificial Sequence
  GFR-binding peptide
  MOD_RES (2)..(33)..(34): Xaa is C or S
KXSKVIMRHKRLIKPTKGIYYLISTASLDQSVXXPSA

SEQ ID NO: 5893 - protein, 33 aa, Artificial Sequence
  GFR-binding peptide
  MOD_RES (1)..(32)..(33): Xaa is C or S
XSKVIMRHKRLIKPTKGIYYLISTASLDQSVXX

SEQ ID NO: 5894 - protein, 33 aa, Artificial Sequence
  GFR-binding peptide
  MOD_RES (1)..(1): Xaa is C or S
  MOD_RES (12)..(13)..(14)..(15)..(16): Xaa is A or G
  MOD_RES (17)..(18)..(19)..(20): Xaa is A or G or is absent
XSRVIMQYNKLXXXXXXXXXLYLISIASLAQPV

SEQ ID NO: 5895 - protein, 44 aa, Artificial Sequence
  GFR-binding peptide
  MOD_RES (2)..(4)..(38)..(39): Xaa is C or S
  MOD_RES (16)..(17)..(18)..(19)..(20): Xaa is A or G
  MOD_RES (21)..(22)..(23)..(24): Xaa is A or G or is absent
RXGXGEVVMDYHYKLXXXXXXXXXKYLMSIPSLETPVXXAKPIK

SEQ ID NO: 5896 - protein, 38 aa, Artificial Sequence
  GFR-binding peptide
  MOD_RES (2)..(4)..(38): Xaa is C or S
  MOD_RES (16)..(17)..(18)..(19)..(20): Xaa is A or G
  MOD_RES (21)..(22)..(23)..(24): Xaa is A or G or is absent
HXGXSRVVMNRHKRLXXXXXXXXXYYLVSTASLKTPAX

SEQ ID NO: 5897 - protein, 34 aa, Artificial Sequence
  GFR-binding peptide
  MOD_RES (2)..(2): Xaa is C or S
  MOD_RES (13)..(14)..(15)..(16)..(17): Xaa is A or G
  MOD_RES (18)..(19)..(20)..(21): Xaa is A or G or is absent
KXSKVVMYHYKLXXXXXXXXXKYLISIPSLDQPV

SEQ ID NO: 5898 - protein, 31 aa, Artificial Sequence
  GFR-binding peptide
GEVVMDYHYKLVVKENEDKYLMSIPSLETPV

SEQ ID NO: 5899 - protein, 36 aa, Artificial Sequence
  GFR-binding peptide
  MOD_RES (1)..(3): Xaa is C or S
  MOD_RES (15)..(16)..(17)..(18)..(19): Xaa is A or G
  MOD_RES (20)..(21)..(22)..(23): Xaa is A or G or is absent
XGXGEVVMEQYNKLXXXXXXXXXLYLMSIASLETPV

SEQ ID NO: 5900 - protein, 40 aa, Artificial Sequence
  GFR-binding peptide
  MOD_RES (2)..(37)..(38): Xaa is C or S
  MOD_RES (15)..(16)..(17)..(18)..(19): Xaa is A or G
  MOD_RES (20)..(21)..(22)..(23): Xaa is A or G or is absent
GXEAVSMGEYHYKLXXXXXXXXXKYLVSIPSLKTPVXXAK

SEQ ID NO: 5901 - protein, 42 aa, Artificial Sequence
  GFR-binding peptide
  MOD_RES (2)..(4)..(38)..(39): Xaa is C or S
  MOD_RES (16)..(17)..(18)..(19)..(20): Xaa is A or G
  MOD_RES (21)..(22)..(23)..(24): Xaa is A or G or is absent
HXGXARVVMNRYKKLXXXXXXXXXFYLVSIANLQTPAXXPKP

SEQ ID NO: 5902 - protein, 32 aa, Artificial Sequence
  GFR-binding peptide
  MOD_RES (2)..(2): Xaa is C or S
KXSKVVMQYNKLVKPTRGVLYLISIASLDQPV

SEQ ID NO: 5903 - protein, 39 aa, Artificial Sequence
  GFR-binding peptide
  MOD_RES (2)..(4)..(37)..(38): Xaa is C or S
  MOD_RES (15)..(16)..(17)..(18)..(19): Xaa is A or G
  MOD_RES (20)..(21)..(22)..(23): Xaa is A or G or is absent
SXKXSKVIMRHKRLXXXXXXXXXYYLISTASLDQSVXXP

SEQ ID NO: 5904 - protein, 39 aa, Artificial Sequence
  GFR-binding peptide
  MOD_RES (2)..(4)..(37)..(38): Xaa is C or S
  MOD_RES (15)..(16)..(17)..(18)..(19): Xaa is A or G
  MOD_RES (20)..(21)..(22)..(23): Xaa is A or G or is absent
SXKXSRVIMRYKKLXXXXXXXXXFYLISIANLAQPVXXP

SEQ ID NO: 5905 - protein, 38 aa, Artificial Sequence
  GFR-binding peptide
  MOD_RES (1)..(35)..(36): Xaa is C or S
  MOD_RES (13)..(14)..(15)..(16)..(17): Xaa is A or G
  MOD_RES (18)..(19)..(20)..(21): Xaa is A or G or is absent
XGEVVMEQYNKLXXXXXXXXXLYLMSIASLETPVXXAK

SEQ ID NO: 5906 - protein, 33 aa, Artificial Sequence
  GFR-binding peptide
  MOD_RES (1)..(1): Xaa is C or S
  MOD_RES (12)..(13)..(14)..(15)..(16): Xaa is A or G
  MOD_RES (17)..(18)..(19)..(20): Xaa is A or G or is absent
XSRVIMRHKRLXXXXXXXXXYYLISTASLAQPV

SEQ ID NO: 5907 - protein, 39 aa, Artificial Sequence
  GFR-binding peptide
  MOD_RES (2)..(4)..(36)..(37): Xaa is C or S
HXGXARVVMNRYKKLIVNSSDDFYLVSIANLQTPAXXPK

SEQ ID NO: 5908 - protein, 36 aa, Artificial Sequence
  GFR-binding peptide
  MOD_RES (2)..(33)..(34): Xaa is C or S
KXSRVIMYHYKLVKPKRGVKYLISIPSLAQPVXXPA

SEQ ID NO: 5909 - protein, 38 aa, Artificial Sequence
  GFR-binding peptide
  MOD_RES (2)..(36): Xaa is C or S
  MOD_RES (14)..(15)..(16)..(17)..(18): Xaa is A or G
  MOD_RES (19)..(20)..(21)..(22): Xaa is A or G or is absent
GXSRVVMNQYNKLXXXXXXXXXLYLVSIASLKTPAXTP

SEQ ID NO: 5910 - protein, 42 aa, Artificial Sequence
  GFR-binding peptide
  MOD_RES (2)..(4)..(41): Xaa is C or S
EXKXALHDELTRYKKLFIPKKRVIEFYLVSIANLQVQTPRXQ

SEQ ID NO: 5911 - protein, 39 aa, Artificial Sequence
  GFR-binding peptide
  MOD_RES (2)..(4)..(35)..(36): Xaa is C or S
SXKXSKVVMRHKRLVKPTRGVYYLISTASLDQPVXXPSA

SEQ ID NO: 5912 - protein, 40 aa, Artificial Sequence
  GFR-binding peptide
  MOD_RES (2)..(4)..(38)..(39): Xaa is C or S
  MOD_RES (16)..(17)..(18)..(19)..(20): Xaa is A or G
  MOD_RES (21)..(22)..(23)..(24): Xaa is A or G or is absent
HXGXARVVMNRYKKLXXXXXXXXXFYLVSIANLQTPAXXP

SEQ ID NO: 5913 - protein, 36 aa, Artificial Sequence
  GFR-binding peptide
  MOD_RES (34)..(35): Xaa is C or S
  MOD_RES (12)..(13)..(14)..(15)..(16): Xaa is A or G
  MOD_RES (17)..(18)..(19)..(20): Xaa is A or G or is absent
ARVVMNYHYKLXXXXXXXXXKYLVSIPSLQTPAXXP

SEQ ID NO: 5914 - protein, 30 aa, Artificial Sequence
  GFR-binding peptide
EVVMDYHYKLVVKENEDKYLMSIPSLETPV

SEQ ID NO: 5915 - protein, 39 aa, Artificial Sequence
  GFR-binding peptide
  MOD_RES (2)..(4): Xaa is C or S
  MOD_RES (17)..(18)..(19)..(20)..(21): Xaa is A or G
  MOD_RES (22)..(23)..(24)..(25): Xaa is A or G or is absent
EXKXALHDELTQYNKLXXXXXXXXXLYLVSIASLQVQTP

SEQ ID NO: 5916 - protein, 38 aa, Artificial Sequence
  GFR-binding peptide
  MOD_RES (32)..(33): Xaa is C or S
GEVVMERYKKLVVKDYEDFYLMSIANLETPVXXAKPIS

SEQ ID NO: 5917 - protein, 39 aa, Artificial Sequence
  GFR-binding peptide
  MOD_RES (34)..(35): Xaa is C or S
  MOD_RES (12)..(13)..(14)..(15)..(16): Xaa is A or G
  MOD_RES (17)..(18)..(19)..(20): Xaa is A or G or is absent
SRVVMNRYKKLXXXXXXXXXFYLVSIANLKTPAXXPKPV

SEQ ID NO: 5918 - protein, 40 aa, Artificial Sequence
  GFR-binding peptide
  MOD_RES (2)..(4)..(35)..(36): Xaa is C or S
SXKXSKVIMRYKKLIKPTKGIFYLISIANLDQSVXXPSAS

SEQ ID NO: 5919 - protein, 37 aa, Artificial Sequence
  GFR-binding peptide
  MOD_RES (2)..(34): Xaa is C or S
GXSRVVMNQYNKLIVNSSDDLYLVSIASLKTPAXTPK

SEQ ID NO: 5920 - protein, 41 aa, Artificial Sequence
  GFR-binding peptide
  MOD_RES (2)..(39): Xaa is C or S
KXALHDELTYHYKLFIPKKRVIEKYLVSIPSLQVQTPRXQV

SEQ ID NO: 5921 - protein, 40 aa, Artificial Sequence
  GFR-binding peptide
  MOD_RES (2)..(36)..(37): Xaa is C or S
  MOD_RES (14)..(15)..(16)..(17)..(18): Xaa is A or G
  MOD_RES (19)..(20)..(21)..(22): Xaa is A or G or is absent
GXSRVVMNRYKKLXXXXXXXXXFYLVSIANLKTPAXXPKP

SEQ ID NO: 5922 - protein, 36 aa, Artificial Sequence
  GFR-binding peptide
  MOD_RES (1)..(3)..(36): Xaa is C or S
  MOD_RES (14)..(15)..(16)..(17)..(18): Xaa is A or G
  MOD_RES (19)..(20)..(21)..(22): Xaa is A or G or is absent
XKXSKVVMRHKRLXXXXXXXXXYYLISTASLDQPVX

SEQ ID NO: 5923 - protein, 39 aa, Artificial Sequence
  GFR-binding peptide
  MOD_RES (1)..(38): Xaa is C or S
XALHDELTQYNKLFIPKKRVIELYLVSIASLQVQTPRXQ

SEQ ID NO: 5924 - protein, 33 aa, Artificial Sequence
  GFR-binding peptide
  MOD_RES (31)..(31): Xaa is C or S
RVVMNRHKRLIVNSSDDYYLVSTASLKTPAXTP

SEQ ID NO: 5925 - protein, 34 aa, Artificial Sequence
  GFR-binding peptide
  MOD_RES (2)..(34): Xaa is C or S
GXGEVVMDYHYKLVVKENEDKYLMSIPSLETPVX

SEQ ID NO: 5926 - protein, 39 aa, Artificial Sequence
  GFR-binding peptide
  MOD_RES (2)..(33)..(34): Xaa is C or S
KXSKVIMRYKKLIKPTKGIFYLISIANLDQSVXXPSASA

SEQ ID NO: 5927 - protein, 38 aa, Artificial Sequence
  GFR-binding peptide
  MOD_RES (2)..(4): Xaa is C or S
  MOD_RES (17)..(18)..(19)..(20)..(21): Xaa is A or G
  MOD_RES (22)..(23)..(24)..(25): Xaa is A or G or is absent
EXKXALHDELTRHKRLXXXXXXXXXYYLVSTASLQVQT

SEQ ID NO: 5928 - protein, 37 aa, Artificial Sequence
  GFR-binding peptide
  MOD_RES (1)..(3)..(36)..(37): Xaa is C or S
XGXEAVSMGERYKKLTPVGMDDFYLVSIANLKTPVXX

SEQ ID NO: 5929 - protein, 41 aa, Artificial Sequence
  GFR-binding peptide
  MOD_RES (2)..(4)..(37)..(38): Xaa is C or S
  MOD_RES (15)..(16)..(17)..(18)..(19): Xaa is A or G
  MOD_RES (20)..(21)..(22)..(23): Xaa is A or G or is absent
SXKXSKVVMQYNKLXXXXXXXXXLYLISIASLDQPVXXPSA

SEQ ID NO: 5930 - protein, 34 aa, Artificial Sequence
  GFR-binding peptide
  MOD_RES (1)..(1): Xaa is C or S
  MOD_RES (13)..(14)..(15)..(16)..(17): Xaa is A or G
  MOD_RES (18)..(19)..(20)..(21): Xaa is A or G or is absent
XGEVVMERHKRLXXXXXXXXXYYLMSTASLETPV

SEQ ID NO: 5931 - protein, 37 aa, Artificial Sequence
  GFR-binding peptide
  MOD_RES (2)..(37): Xaa is C or S
  MOD_RES (15)..(16)..(17)..(18)..(19): Xaa is A or G
  MOD_RES (20)..(21)..(22)..(23): Xaa is A or G or is absent
GXEAVSMGEYHYKLXXXXXXXXXKYLVSIPSLKTPVX

SEQ ID NO: 5932 - protein, 41 aa, Artificial Sequence
  GFR-binding peptide
  MOD_RES (2)..(4)..(36)..(37): Xaa is C or S
HXGXARVVMNRYKKLIVNSSDDFYLVSIANLQTPAXXPKPV

SEQ ID NO: 5933 - protein, 39 aa, Artificial Sequence
  GFR-binding peptide
  MOD_RES (37)..(37): Xaa is C or S
  MOD_RES (13)..(14)..(15)..(16)..(17): Xaa is A or G
  MOD_RES (18)..(19)..(20)..(21): Xaa is A or G or is absent
ALHDELTRHKRLXXXXXXXXXYYLVSTASLQVQTPRXQV

SEQ ID NO: 5934 - protein, 40 aa, Artificial Sequence
  GFR-binding peptide
  MOD_RES (1)..(34)..(35): Xaa is C or S
XEAVSMGERYKKLTPVGMDDFYLVSIANLKTPVXXAKGVK

SEQ ID NO: 5935 - protein, 40 aa, Artificial Sequence
  GFR-binding peptide
  MOD_RES (1)..(38): Xaa is C or S
XALHDELTRYKKLFIPKKRVIEFYLVSIANLQVQTPRXQV

SEQ ID NO: 5936 - protein, 37 aa, Artificial Sequence
  GFR-binding peptide
  MOD_RES (1)..(36)..(37): Xaa is C or S
  MOD_RES (14)..(15)..(16)..(17)..(18): Xaa is A or G
  MOD_RES (19)..(20)..(21)..(22): Xaa is A or G or is absent
XEAVSMGERYKKLXXXXXXXXXFYLVSIANLKTPVXX

SEQ ID NO: 5937 - protein, 32 aa, Artificial Sequence
  GFR-binding peptide
  MOD_RES (32)..(32): Xaa is C or S
AKVVMNRYKKLIVNNSSDFYLVSIANLKTPAX

SEQ ID NO: 5938 - protein, 39 aa, Artificial Sequence
  GFR-binding peptide
  MOD_RES (33)..(34): Xaa is C or S
  MOD_RES (11)..(12)..(13)..(14)..(15): Xaa is A or G
  MOD_RES (16)..(17)..(18)..(19): Xaa is A or G or is absent
EVVMEYHYKLXXXXXXXXXKYLMSIPSLETPVXXAKPIS

SEQ ID NO: 5939 - protein, 38 aa, Artificial Sequence
  GFR-binding peptide
  MOD_RES (37)..(37): Xaa is C or S
ALHDELTYHYKLFIPKKRVIEKYLVSIPSLQVQTPRXQ

SEQ ID NO: 5940 - protein, 34 aa, Artificial Sequence
  GFR-binding peptide
  MOD_RES (1)..(3)..(34): Xaa is C or S
XKXSRVIMRYKKLVKPKRGVFYLISIANLAQPVX

SEQ ID NO: 5941 - protein, 33 aa, Artificial Sequence
  GFR-binding peptide
  MOD_RES (12)..(13)..(14)..(15)..(16): Xaa is A or G
  MOD_RES (17)..(18)..(19)..(20): Xaa is A or G or is absent
GEVVMEQYNKLXXXXXXXXXLYLMSIASLETPV

SEQ ID NO: 5942 - protein, 40 aa, Artificial Sequence
  GFR-binding peptide
  MOD_RES (36)..(36): Xaa is C or S
LHDELTRYKKLFIPKKRVIEFYLVSIANLQVQTPRXQVNR

SEQ ID NO: 5943 - protein, 40 aa, Artificial Sequence
  GFR-binding peptide
  MOD_RES (2)..(35)..(36): Xaa is C or S
  MOD_RES (13)..(14)..(15)..(16)..(17): Xaa is A or G
  MOD_RES (18)..(19)..(20)..(21): Xaa is A or G or is absent
KXSRVIMRYKKLXXXXXXXXXFYLISIANLAQPVXXPAAS

SEQ ID NO: 5944 - protein, 32 aa, Artificial Sequence
  GFR-binding peptide
  MOD_RES (31)..(31): Xaa is C or S
RVVMNRHKRLIVNSSDDYYLVSTASLKTPAXT

SEQ ID NO: 5945 - protein, 37 aa, Artificial Sequence
  GFR-binding peptide
  MOD_RES (2)..(34)..(35): Xaa is C or S
GXAKVVMNRHKRLIVNNSSDYYLVSTASLKTPAXXAK

SEQ ID NO: 5946 - protein, 36 aa, Artificial Sequence
  GFR-binding peptide
  MOD_RES (2)..(4)..(36): Xaa is C or S
HXGXAKVVMNYHYKLIVNNSSDKYLVSIPSLKTPAX

SEQ ID NO: 5947 - protein, 32 aa, Artificial Sequence
  GFR-binding peptide
  MOD_RES (1)..(1): Xaa is C or S
XAKVVMNRHKRLIVNNSSDYYLVSTASLKTPA

SEQ ID NO: 5948 - protein, 35 aa, Artificial Sequence
  GFR-binding peptide
  MOD_RES (2)..(34): Xaa is C or S
GXSRVVMNRYKKLIVNSSDDFYLVSIANLKTPAXT

SEQ ID NO: 5949 - protein, 41 aa, Artificial Sequence
  GFR-binding peptide
  MOD_RES (1)..(3)..(38)..(39): Xaa is C or S
  MOD_RES (16)..(17)..(18)..(19)..(20): Xaa is A or G
  MOD_RES (21)..(22)..(23)..(24): Xaa is A or G or is absent
XGXEAVSMGEQYNKLXXXXXXXXXLYLVSIASLKTPVXXAK

SEQ ID NO: 5950 - protein, 37 aa, Artificial Sequence
  GFR-binding peptide
  MOD_RES (2)..(34)..(35): Xaa is C or S
GXGEVVMERHKRLVVKDYEDYYLMSTASLETPVXXAK

SEQ ID NO: 5951 - protein, 36 aa, Artificial Sequence
  GFR-binding peptide
  MOD_RES (1)..(32)..(33): Xaa is C or S
XSKVVMRHKRLVKPTRGVYYLISTASLDQPVXXPSA

SEQ ID NO: 5952 - protein, 37 aa, Artificial Sequence
  GFR-binding peptide
  MOD_RES (1)..(35)..(36): Xaa is C or S
  MOD_RES (13)..(14)..(15)..(16)..(17): Xaa is A or G
  MOD_RES (18)..(19)..(20)..(21): Xaa is A or G or is absent
XGEVVMDYHYKLXXXXXXXXXKYLMSIPSLETPVXXA

SEQ ID NO: 5953 - protein, 36 aa, Artificial Sequence
  GFR-binding peptide
  MOD_RES (2)..(36): Xaa is C or S
  MOD_RES (14)..(15)..(16)..(17)..(18): Xaa is A or G
  MOD_RES (19)..(20)..(21)..(22): Xaa is A or G or is absent
GXGEVVMDYHYKLXXXXXXXXXKYLMSIPSLETPVX

SEQ ID NO: 5954 - protein, 33 aa, Artificial Sequence
  GFR-binding peptide
  MOD_RES (12)..(13)..(14)..(15)..(16): Xaa is A or G
  MOD_RES (17)..(18)..(19)..(20): Xaa is A or G or is absent
GEVVMDYHYKLXXXXXXXXXKYLMSIPSLETPV

SEQ ID NO: 5955 - protein, 37 aa, Artificial Sequence
  GFR-binding peptide
  MOD_RES (33)..(34): Xaa is C or S
EAVSMGEYHYKLTPVGMDDKYLVSIPSLKTPVXXAKG

SEQ ID NO: 5956 - protein, 36 aa, Artificial Sequence
  GFR-binding peptide
  MOD_RES (2)..(4): Xaa is C or S
  MOD_RES (15)..(16)..(17)..(18)..(19): Xaa is A or G
  MOD_RES (20)..(21)..(22)..(23): Xaa is A or G or is absent
SXKXSKVVMQYNKLXXXXXXXXXLYLISIASLDQPV

SEQ ID NO: 5957 - protein, 33 aa, Artificial Sequence
  GFR-binding peptide
  MOD_RES (33)..(33): Xaa is C or S
  MOD_RES (11)..(12)..(13)..(14)..(15): Xaa is A or G
  MOD_RES (16)..(17)..(18)..(19): Xaa is A or G or is absent
SKVIMRYKKLXXXXXXXXXFYLISIANLDQSVX

SEQ ID NO: 5958 - protein, 42 aa, Artificial Sequence
  GFR-binding peptide
  MOD_RES (2)..(4)..(37)..(38): Xaa is C or S
RXGXEAVSMGERHKRLTPVGMDDYYLVSTASLKTPVXXAKGV

SEQ ID NO: 5959 - protein, 40 aa, Artificial Sequence
  GFR-binding peptide
  MOD_RES (2)..(39): Xaa is C or S
KXALHDELTQYNKLFIPKKRVIELYLVSIASLQVQTPRXQ

SEQ ID NO: 5960 - protein, 38 aa, Artificial Sequence
  GFR-binding peptide
  MOD_RES (36)..(36): Xaa is C or S
LHDELTRYKKLFIPKKRVIEFYLVSIANLQVQTPRXQV

SEQ ID NO: 5961 - protein, 36 aa, Artificial Sequence
  GFR-binding peptide
  MOD_RES (32)..(32): Xaa is C or S
SRVVMNRYKKLIVNSSDDFYLVSIANLKTPAXTPKT

SEQ ID NO: 5962 - protein, 41 aa, Artificial Sequence
  GFR-binding peptide
  MOD_RES (2)..(4)..(38)..(39): Xaa is C or S
  MOD_RES (16)..(17)..(18)..(19)..(20): Xaa is A or G
  MOD_RES (21)..(22)..(23)..(24): Xaa is A or G or is absent
HXGXARVVMNQYNKLXXXXXXXXXLYLVSIASLQTPAXXPK

SEQ ID NO: 5963 - protein, 38 aa, Artificial Sequence
  GFR-binding peptide
  MOD_RES (1)..(3)..(35): Xaa is C or S
XGXSRVVMNRYKKLIVNSSDDFYLVSIANLKTPAXTPK

SEQ ID NO: 5964 - protein, 38 aa, Artificial Sequence
  GFR-binding peptide
  MOD_RES (2)..(34)..(35): Xaa is C or S
GXGEVVMDRYKKLVVKENEDFYLMSIANLETPVXXAKP

SEQ ID NO: 5965 - protein, 38 aa, Artificial Sequence
  GFR-binding peptide
  MOD_RES (1)..(34)..(35): Xaa is C or S
  MOD_RES (12)..(13)..(14)..(15)..(16): Xaa is A or G
  MOD_RES (17)..(18)..(19)..(20): Xaa is A or G or is absent
XSKVVMYHYKLXXXXXXXXXKYLISIPSLDQPVXXPSA

SEQ ID NO: 5966 - protein, 34 aa, Artificial Sequence
  GFR-binding peptide
  MOD_RES (31)..(32): Xaa is C or S
KVVMNRYKKLIVNNSSDFYLVSIANLKTPAXXAK

SEQ ID NO: 5967 - protein, 41 aa, Artificial Sequence
  GFR-binding peptide
  MOD_RES (1)..(35)..(36): Xaa is C or S
  MOD_RES (13)..(14)..(15)..(16)..(17): Xaa is A or G
  MOD_RES (18)..(19)..(20)..(21): Xaa is A or G or is absent
XGEVVMDRYKKLXXXXXXXXXFYLMSIANLETPVXXAKPIK

SEQ ID NO: 5968 - protein, 37 aa, Artificial Sequence
  GFR-binding peptide
  MOD_RES (33)..(34): Xaa is C or S
  MOD_RES (11)..(12)..(13)..(14)..(15): Xaa is A or G
  MOD_RES (16)..(17)..(18)..(19): Xaa is A or G or is absent
RVVMNRYKKLXXXXXXXXXFYLVSIANLQTPAXXPKP

SEQ ID NO: 5969 - protein, 34 aa, Artificial Sequence
  GFR-binding peptide
  MOD_RES (2)..(34): Xaa is C or S
GXGEVVMEQYNKLVVKDYEDLYLMSIASLETPVX

SEQ ID NO: 5970 - protein, 40 aa, Artificial Sequence
  GFR-binding peptide
  MOD_RES (1)..(34)..(35): Xaa is C or S
  MOD_RES (12)..(13)..(14)..(15)..(16): Xaa is A or G
  MOD_RES (17)..(18)..(19)..(20): Xaa is A or G or is absent
XSKVVMRHKRLXXXXXXXXXYYLISTASLDQPVXXPSASA

SEQ ID NO: 5971 - protein, 38 aa, Artificial Sequence
  GFR-binding peptide
  MOD_RES (32)..(33): Xaa is C or S
AKVVMNYHYKLIVNNSSDKYLVSIPSLKTPAXXAKPVA

SEQ ID NO: 5972 - protein, 32 aa, Artificial Sequence
  GFR-binding peptide
  MOD_RES (2)..(2): Xaa is C or S
KXSKVIMYHYKLIKPTKGIKYLISIPSLDQSV

SEQ ID NO: 5973 - protein, 39 aa, Artificial Sequence
  GFR-binding peptide
  MOD_RES (1)..(34)..(35): Xaa is C or S
XEAVSMGERYKKLTPVGMDDFYLVSIANLKTPVXXAKGV

SEQ ID NO: 5974 - protein, 35 aa, Artificial Sequence
  GFR-binding peptide
  MOD_RES (2)..(34)..(35): Xaa is C or S
GXSRVVMNQYNKLIVNSSDDLYLVSIASLKTPAXX

SEQ ID NO: 5975 - protein, 34 aa, Artificial Sequence
  GFR-binding peptide
  MOD_RES (1)..(3): Xaa is C or S
XGXGEVVMDRHKRLVVKENEDYYLMSTASLETPV

SEQ ID NO: 5976 - protein, 30 aa, Artificial Sequence
  GFR-binding peptide
SRVIMYHYKLVKPKRGVKYLISIPSLAQPV

SEQ ID NO: 5977 - protein, 39 aa, Artificial Sequence
  GFR-binding peptide
  MOD_RES (2)..(4)..(38)..(39): Xaa is C or S
  MOD_RES (16)..(17)..(18)..(19)..(20): Xaa is A or G
  MOD_RES (21)..(22)..(23)..(24): Xaa is A or G or is absent
HXGXAKVVMNRHKRLXXXXXXXXXYYLVSTASLKTPAXX

SEQ ID NO: 5978 - protein, 37 aa, Artificial Sequence
  GFR-binding peptide
  MOD_RES (1)..(3)..(35)..(36): Xaa is C or S
XGXGEVVMDYHYKLVVKENEDKYLMSIPSLETPVXXA

SEQ ID NO: 5979 - protein, 36 aa, Artificial Sequence
  GFR-binding peptide
  MOD_RES (1)..(3)..(36): Xaa is C or S
  MOD_RES (14)..(15)..(16)..(17)..(18): Xaa is A or G
  MOD_RES (19)..(20)..(21)..(22): Xaa is A or G or is absent
XKXSKVVMQYNKLXXXXXXXXXLYLISIASLDQPVX

SEQ ID NO: 5980 - protein, 36 aa, Artificial Sequence
  GFR-binding peptide
  MOD_RES (2)..(36): Xaa is C or S
  MOD_RES (14)..(15)..(16)..(17)..(18): Xaa is A or G
  MOD_RES (19)..(20)..(21)..(22): Xaa is A or G or is absent
GXARVVMNYHYKLXXXXXXXXXKYLVSIPSLQTPAX

SEQ ID NO: 5981 - protein, 40 aa, Artificial Sequence
  GFR-binding peptide
  MOD_RES (1)..(35)..(36): Xaa is C or S
  MOD_RES (13)..(14)..(15)..(16)..(17): Xaa is A or G
  MOD_RES (18)..(19)..(20)..(21): Xaa is A or G or is absent
XAKVVMNRYKKLXXXXXXXXXFYLVSIANLKTPAXXAKPV

SEQ ID NO: 5982 - protein, 40 aa, Artificial Sequence
  GFR-binding peptide
  MOD_RES (1)..(35): Xaa is C or S
  MOD_RES (13)..(14)..(15)..(16)..(17): Xaa is A or G
  MOD_RES (18)..(19)..(20)..(21): Xaa is A or G or is absent
XSRVVMNRYKKLXXXXXXXXXFYLVSIANLKTPAXTPKTV

SEQ ID NO: 5983 - protein, 32 aa, Artificial Sequence
  GFR-binding peptide
  MOD_RES (11)..(12)..(13)..(14)..(15): Xaa is A or G
  MOD_RES (16)..(17)..(18)..(19): Xaa is A or G or is absent
SRVIMRYKKLXXXXXXXXXFYLISIANLAQPV

SEQ ID NO: 5984 - protein, 36 aa, Artificial Sequence
  GFR-binding peptide
  MOD_RES (31)..(31): Xaa is C or S
RVVMNQYNKLIVNSSDDLYLVSIASLKTPAXTPKTV

SEQ ID NO: 5985 - protein, 39 aa, Artificial Sequence
  GFR-binding peptide
  MOD_RES (37)..(37): Xaa is C or S
  MOD_RES (13)..(14)..(15)..(16)..(17): Xaa is A or G
  MOD_RES (18)..(19)..(20)..(21): Xaa is A or G or is absent
ALHDELTQYNKLXXXXXXXXXLYLVSIASLQVQTPRXQV

SEQ ID NO: 5986 - protein, 42 aa, Artificial Sequence
  GFR-binding peptide
  MOD_RES (1)..(3)..(36)..(37): Xaa is C or S
  MOD_RES (14)..(15)..(16)..(17)..(18): Xaa is A or G
  MOD_RES (19)..(20)..(21)..(22): Xaa is A or G or is absent
XKXSKVIMRYKKLXXXXXXXXXFYLISIANLDQSVXXPSASA

SEQ ID NO: 5987 - protein, 31 aa, Artificial Sequence
  GFR-binding peptide
  MOD_RES (31)..(31): Xaa is C or S
KVVMNRHKRLIVNNSSDYYLVSTASLKTPAX

SEQ ID NO: 5988 - protein, 35 aa, Artificial Sequence
  GFR-binding peptide
  MOD_RES (1)..(35): Xaa is C or S
  MOD_RES (13)..(14)..(15)..(16)..(17): Xaa is A or G
  MOD_RES (18)..(19)..(20)..(21): Xaa is A or G or is absent
XAKVVMNRHKRLXXXXXXXXXYYLVSTASLKTPAX

SEQ ID NO: 5989 - protein, 40 aa, Artificial Sequence
  GFR-binding peptide
  MOD_RES (1)..(34)..(35): Xaa is C or S
  MOD_RES (12)..(13)..(14)..(15)..(16): Xaa is A or G
  MOD_RES (17)..(18)..(19)..(20): Xaa is A or G or is absent
XSKVVMQYNKLXXXXXXXXXLYLISIASLDQPVXXPSASA

SEQ ID NO: 5990 - protein, 40 aa, Artificial Sequence
  GFR-binding peptide
  MOD_RES (36)..(36): Xaa is C or S
LHDELTQYNKLFIPKKRVIELYLVSIASLQVQTPRXQVNR

SEQ ID NO: 5991 - protein, 37 aa, Artificial Sequence
  GFR-binding peptide
  MOD_RES (1)..(33)..(34): Xaa is C or S
XGEVVMDYHYKLVVKENEDKYLMSIPSLETPVXXAKP

SEQ ID NO: 5992 - protein, 35 aa, Artificial Sequence
  GFR-binding peptide
  MOD_RES (31)..(32): Xaa is C or S
RVVMNRYKKLIVNSSDDFYLVSIANLQTPAXXPKP

SEQ ID NO: 5993 - protein, 33 aa, Artificial Sequence
  GFR-binding peptide
  MOD_RES (32)..(33): Xaa is C or S
GEVVMEYHYKLVVKDYEDKYLMSIPSLETPVXX

SEQ ID NO: 5994 - protein, 39 aa, Artificial Sequence
  GFR-binding peptide
  MOD_RES (1)..(3)..(35)..(36): Xaa is C or S
XGXSRVVMNYHYKLIVNSSDDKYLVSIPSLKTPAXXPKP

SEQ ID NO: 5995 - protein, 40 aa, Artificial Sequence
  GFR-binding peptide
  MOD_RES (2)..(36): Xaa is C or S
  MOD_RES (14)..(15)..(16)..(17)..(18): Xaa is A or G
  MOD_RES (19)..(20)..(21)..(22): Xaa is A or G or is absent
GXSRVVMNRHKRLXXXXXXXXXYYLVSTASLKTPAXTPKT

SEQ ID NO: 5996 - protein, 35 aa, Artificial Sequence
  GFR-binding peptide
  MOD_RES (33)..(34): Xaa is C or S
  MOD_RES (11)..(12)..(13)..(14)..(15): Xaa is A or G
  MOD_RES (16)..(17)..(18)..(19): Xaa is A or G or is absent
SKVIMYHYKLXXXXXXXXXKYLISIPSLDQSVXXP

SEQ ID NO: 5997 - protein, 36 aa, Artificial Sequence
  GFR-binding peptide
  MOD_RES (1)..(33)..(34): Xaa is C or S
XGEVVMDYHYKLVVKENEDKYLMSIPSLETPVXXAK

SEQ ID NO: 5998 - protein, 35 aa, Artificial Sequence
  GFR-binding peptide
  MOD_RES (2)..(4): Xaa is C or S
RXGXGEVVMERHKRLVVKDYEDYYLMSTASLETPV

SEQ ID NO: 5999 - protein, 36 aa, Artificial Sequence
  GFR-binding peptide
  MOD_RES (2)..(2): Xaa is C or S
  MOD_RES (15)..(16)..(17)..(18)..(19): Xaa is A or G
  MOD_RES (20)..(21)..(22)..(23): Xaa is A or G or is absent
KXALHDELTQYNKLXXXXXXXXXLYLVSIASLQVQT

SEQ ID NO: 6000 - protein, 41 aa, Artificial Sequence
  GFR-binding peptide
  MOD_RES (2)..(36)..(37): Xaa is C or S
  MOD_RES (14)..(15)..(16)..(17)..(18): Xaa is A or G
  MOD_RES (19)..(20)..(21)..(22): Xaa is A or G or is absent
GXSRVVMNYHYKLXXXXXXXXXKYLVSIPSLKTPAXXPKPV

SEQ ID NO: 6001 - protein, 35 aa, Artificial Sequence
  GFR-binding peptide
  MOD_RES (31)..(32): Xaa is C or S
SKVIMRHKRLIKPTKGIYYLISTASLDQSVXXPSA

SEQ ID NO: 6002 - protein, 39 aa, Artificial Sequence
  GFR-binding peptide
  MOD_RES (2)..(34): Xaa is C or S
GXSRVVMNRYKKLIVNSSDDFYLVSIANLKTPAXTPKTV

SEQ ID NO: 6003 - protein, 43 aa, Artificial Sequence
  GFR-binding peptide
  MOD_RES (2)..(4)..(37)..(38): Xaa is C or S
RXGXEAVSMGEQYNKLTPVGMDDLYLVSIASLKTPVXXAKGVK

SEQ ID NO: 6004 - protein, 39 aa, Artificial Sequence
  GFR-binding peptide
  MOD_RES (1)..(34)..(35): Xaa is C or S
  MOD_RES (12)..(13)..(14)..(15)..(16): Xaa is A or G
  MOD_RES (17)..(18)..(19)..(20): Xaa is A or G or is absent
XSKVVMYHYKLXXXXXXXXXKYLISIPSLDQPVXXPSAS

SEQ ID NO: 6005 - protein, 42 aa, Artificial Sequence
  GFR-binding peptide
  MOD_RES (2)..(36)..(37): Xaa is C or S
  MOD_RES (14)..(15)..(16)..(17)..(18): Xaa is A or G
  MOD_RES (19)..(20)..(21)..(22): Xaa is A or G or is absent
GXARVVMNRYKKLXXXXXXXXXFYLVSIANLQTPAXXPKPVT

SEQ ID NO: 6006 - protein, 36 aa, Artificial Sequence
  GFR-binding peptide
  MOD_RES (32)..(33): Xaa is C or S
GEVVMERHKRLVVKDYEDYYLMSTASLETPVXXAKP

SEQ ID NO: 6007 - protein, 38 aa, Artificial Sequence
  GFR-binding peptide
  MOD_RES (2)..(4)..(37)..(38): Xaa is C or S
  MOD_RES (15)..(16)..(17)..(18)..(19): Xaa is A or G
  MOD_RES (20)..(21)..(22)..(23): Xaa is A or G or is absent
SXKXSKVIMRHKRLXXXXXXXXXYYLISTASLDQSVXX

SEQ ID NO: 6008 - protein, 35 aa, Artificial Sequence
  GFR-binding peptide
  MOD_RES (1)..(3)..(35): Xaa is C or S
XGXSRVVMNRYKKLIVNSSDDFYLVSIANLKTPAX

SEQ ID NO: 6009 - protein, 35 aa, Artificial Sequence
  GFR-binding peptide
  MOD_RES (1)..(35): Xaa is C or S
  MOD_RES (13)..(14)..(15)..(16)..(17): Xaa is A or G
  MOD_RES (18)..(19)..(20)..(21): Xaa is A or G or is absent
XARVVMNRHKRLXXXXXXXXXYYLVSTASLQTPAX

SEQ ID NO: 6010 - protein, 36 aa, Artificial Sequence
  GFR-binding peptide
  MOD_RES (2)..(34)..(35): Xaa is C or S
GXSRVVMNRHKRLIVNSSDDYYLVSTASLKTPAXXP

SEQ ID NO: 6011 - protein, 42 aa, Artificial Sequence
  GFR-binding peptide
  MOD_RES (2)..(36)..(37): Xaa is C or S
  MOD_RES (14)..(15)..(16)..(17)..(18): Xaa is A or G
  MOD_RES (19)..(20)..(21)..(22): Xaa is A or G or is absent
GXGEVVMDRHKRLXXXXXXXXXYYLMSTASLETPVXXAKPIK

SEQ ID NO: 6012 - protein, 37 aa, Artificial Sequence
  GFR-binding peptide
  MOD_RES (34)..(35): Xaa is C or S
  MOD_RES (12)..(13)..(14)..(15)..(16): Xaa is A or G
  MOD_RES (17)..(18)..(19)..(20): Xaa is A or G or is absent
GEVVMERHKRLXXXXXXXXXYYLMSTASLETPVXXAK

SEQ ID NO: 6013 - protein, 35 aa, Artificial Sequence
  GFR-binding peptide
  MOD_RES (34)..(35): Xaa is C or S
  MOD_RES (12)..(13)..(14)..(15)..(16): Xaa is A or G
  MOD_RES (17)..(18)..(19)..(20): Xaa is A or G or is absent
AKVVMNRYKKLXXXXXXXXXFYLVSIANLKTPAXX

SEQ ID NO: 6014 - protein, 40 aa, Artificial Sequence
  GFR-binding peptide
  MOD_RES (1)..(3)..(36)..(37): Xaa is C or S
  MOD_RES (14)..(15)..(16)..(17)..(18): Xaa is A or G
  MOD_RES (19)..(20)..(21)..(22): Xaa is A or G or is absent
XKXSKVIMRYKKLXXXXXXXXXFYLISIANLDQSVXXPSA

SEQ ID NO: 6015 - protein, 39 aa, Artificial Sequence
  GFR-binding peptide
  MOD_RES (2)..(4): Xaa is C or S
EXKXALHDELTRHKRLFIPKKRVIEYYLVSTASLQVQTP

SEQ ID NO: 6016 - protein, 37 aa, Artificial Sequence
  GFR-binding peptide
  MOD_RES (1)..(35)..(36): Xaa is C or S
  MOD_RES (13)..(14)..(15)..(16)..(17): Xaa is A or G
  MOD_RES (18)..(19)..(20)..(21): Xaa is A or G or is absent
XSRVVMNQYNKLXXXXXXXXXLYLVSIASLKTPAXXP

SEQ ID NO: 6017 - protein, 36 aa, Artificial Sequence
  GFR-binding peptide
  MOD_RES (2)..(4)..(35)..(36): Xaa is C or S
SXKXSRVIMYHYKLVKPKRGVKYLISIPSLAQPVXX

SEQ ID NO: 6018 - protein, 39 aa, Artificial Sequence
  GFR-binding peptide
  MOD_RES (1)..(35)..(36): Xaa is C or S
  MOD_RES (13)..(14)..(15)..(16)..(17): Xaa is A or G
  MOD_RES (18)..(19)..(20)..(21): Xaa is A or G or is absent
XARVVMNYHYKLXXXXXXXXXKYLVSIPSLQTPAXXPKP

SEQ ID NO: 6019 - protein, 33 aa, Artificial Sequence
  GFR-binding peptide
  MOD_RES (31)..(32): Xaa is C or S
EVVMERHKRLVVKDYEDYYLMSTASLETPVXXA

SEQ ID NO: 6020 - protein, 41 aa, Artificial Sequence
  GFR-binding peptide
  MOD_RES (1)..(35)..(36): Xaa is C or S
  MOD_RES (13)..(14)..(15)..(16)..(17): Xaa is A or G
  MOD_RES (18)..(19)..(20)..(21): Xaa is A or G or is absent
XGEVVMERHKRLXXXXXXXXXYYLMSTASLETPVXXAKPIS

SEQ ID NO: 6021 - protein, 35 aa, Artificial Sequence
  GFR-binding peptide
  MOD_RES (1)..(34)..(35): Xaa is C or S
  MOD_RES (12)..(13)..(14)..(15)..(16): Xaa is A or G
  MOD_RES (17)..(18)..(19)..(20): Xaa is A or G or is absent
XSKVVMRHKRLXXXXXXXXXYYLISTASLDQPVXX

SEQ ID NO: 6022 - protein, 42 aa, Artificial Sequence
  GFR-binding peptide
  MOD_RES (1)..(38): Xaa is C or S
XALHDELTQYNKLFIPKKRVIELYLVSIASLQVQTPRXQVNR

SEQ ID NO: 6023 - protein, 34 aa, Artificial Sequence
  GFR-binding peptide
  MOD_RES (1)..(33)..(34): Xaa is C or S
XAKVVMNRHKRLIVNNSSDYYLVSTASLKTPAXX

SEQ ID NO: 6024 - protein, 42 aa, Artificial Sequence
  GFR-binding peptide
  MOD_RES (2)..(4)..(37)..(38): Xaa is C or S
  MOD_RES (15)..(16)..(17)..(18)..(19): Xaa is A or G
  MOD_RES (20)..(21)..(22)..(23): Xaa is A or G or is absent
SXKXSKVVMRHKRLXXXXXXXXXYYLISTASLDQPVXXPSAS

SEQ ID NO: 6025 - protein, 36 aa, Artificial Sequence
  GFR-binding peptide
  MOD_RES (32)..(33): Xaa is C or S
AKVVMNYHYKLIVNNSSDKYLVSIPSLKTPAXXAKP

SEQ ID NO: 6026 - protein, 39 aa, Artificial Sequence
  GFR-binding peptide
  MOD_RES (1)..(3)..(37): Xaa is C or S
  MOD_RES (15)..(16)..(17)..(18)..(19): Xaa is A or G
  MOD_RES (20)..(21)..(22)..(23): Xaa is A or G or is absent
XGXSRVVMNYHYKLXXXXXXXXXKYLVSIPSLKTPAXTP

SEQ ID NO: 6027 - protein, 33 aa, Artificial Sequence
  GFR-binding peptide
  MOD_RES (2)..(2): Xaa is C or S
GXARVVMNYHYKLIVNSSDDKYLVSIPSLQTPA

SEQ ID NO: 6028 - protein, 32 aa, Artificial Sequence
  GFR-binding peptide
  MOD_RES (1)..(32): Xaa is C or S
XSKVIMQYNKLIKPTKGILYLISIASLDQSVX

SEQ ID NO: 6029 - protein, 40 aa, Artificial Sequence
  GFR-binding peptide
  MOD_RES (2)..(34)..(35): Xaa is C or S
GXGEVVMERHKRLVVKDYEDYYLMSTASLETPVXXAKPIS

SEQ ID NO: 6030 - protein, 40 aa, Artificial Sequence
  GFR-binding peptide
  MOD_RES (2)..(34): Xaa is C or S
GXSRVVMNRHKRLIVNSSDDYYLVSTASLKTPAXTPKTVH

SEQ ID NO: 6031 - protein, 34 aa, Artificial Sequence
  GFR-binding peptide
  MOD_RES (34)..(34): Xaa is C or S
  MOD_RES (12)..(13)..(14)..(15)..(16): Xaa is A or G
  MOD_RES (17)..(18)..(19)..(20): Xaa is A or G or is absent
SRVVMNQYNKLXXXXXXXXXLYLVSIASLKTPAX

SEQ ID NO: 6032 - protein, 43 aa, Artificial Sequence
  GFR-binding peptide
  MOD_RES (1)..(3)..(37)..(38): Xaa is C or S
  MOD_RES (15)..(16)..(17)..(18)..(19): Xaa is A or G
  MOD_RES (20)..(21)..(22)..(23): Xaa is A or G or is absent
XGXGEVVMERHKRLXXXXXXXXXYYLMSTASLETPVXXAKPIS

SEQ ID NO: 6033 - protein, 40 aa, Artificial Sequence
  GFR-binding peptide
  MOD_RES (2)..(36)..(37): Xaa is C or S
  MOD_RES (14)..(15)..(16)..(17)..(18): Xaa is A or G
  MOD_RES (19)..(20)..(21)..(22): Xaa is A or G or is absent
GXAKVVMNQYNKLXXXXXXXXXLYLVSIASLKTPAXXAKP

SEQ ID NO: 6034 - protein, 36 aa, Artificial Sequence
  GFR-binding peptide
  MOD_RES (32)..(33): Xaa is C or S
SRVVMNQYNKLIVNSSDDLYLVSIASLKTPAXXPKP

SEQ ID NO: 6035 - protein, 34 aa, Artificial Sequence
  GFR-binding peptide
  MOD_RES (32)..(33): Xaa is C or S
GEVVMEQYNKLVVKDYEDLYLMSIASLETPVXXA

SEQ ID NO: 6036 - protein, 42 aa, Artificial Sequence
  GFR-binding peptide
  MOD_RES (1)..(3)..(38)..(39): Xaa is C or S
  MOD_RES (16)..(17)..(18)..(19)..(20): Xaa is A or G
  MOD_RES (21)..(22)..(23)..(24): Xaa is A or G or is absent
XGXEAVSMGEYHYKLXXXXXXXXXKYLVSIPSLKTPVXXAKG

SEQ ID NO: 6037 - protein, 34 aa, Artificial Sequence
  GFR-binding peptide
  MOD_RES (34)..(34): Xaa is C or S
  MOD_RES (12)..(13)..(14)..(15)..(16): Xaa is A or G
  MOD_RES (17)..(18)..(19)..(20): Xaa is A or G or is absent
AKVVMNRYKKLXXXXXXXXXFYLVSIANLKTPAX

SEQ ID NO: 6038 - protein, 41 aa, Artificial Sequence
  GFR-binding peptide
  MOD_RES (1)..(35): Xaa is C or S
  MOD_RES (13)..(14)..(15)..(16)..(17): Xaa is A or G
  MOD_RES (18)..(19)..(20)..(21): Xaa is A or G or is absent
XSRVVMNRYKKLXXXXXXXXXFYLVSIANLKTPAXTPKTVH

SEQ ID NO: 6039 - protein, 37 aa, Artificial Sequence
  GFR-binding peptide
  MOD_RES (2)..(4): Xaa is C or S
  MOD_RES (16)..(17)..(18)..(19)..(20): Xaa is A or G
  MOD_RES (21)..(22)..(23)..(24): Xaa is A or G or is absent
RXGXGEVVMDYHYKLXXXXXXXXXKYLMSIPSLETPV

SEQ ID NO: 6040 - protein, 39 aa, Artificial Sequence
  GFR-binding peptide
  MOD_RES (1)..(3)..(37)..(38): Xaa is C or S
  MOD_RES (15)..(16)..(17)..(18)..(19): Xaa is A or G
  MOD_RES (20)..(21)..(22)..(23): Xaa is A or G or is absent
XGXGEVVMERYKKLXXXXXXXXXFYLMSIANLETPVXXA

SEQ ID NO: 6041 - protein, 41 aa, Artificial Sequence
  GFR-binding peptide
  MOD_RES (2)..(4)..(36)..(37): Xaa is C or S
HXGXAKVVMNYHYKLIVNNSSDKYLVSIPSLKTPAXXAKPV

SEQ ID NO: 6042 - protein, 34 aa, Artificial Sequence
  GFR-binding peptide
  MOD_RES (1)..(1): Xaa is C or S
  MOD_RES (13)..(14)..(15)..(16)..(17): Xaa is A or G
  MOD_RES (18)..(19)..(20)..(21): Xaa is A or G or is absent
XARVVMNRHKRLXXXXXXXXXYYLVSTASLQTPA

SEQ ID NO: 6043 - protein, 41 aa, Artificial Sequence
  GFR-binding peptide
  MOD_RES (2)..(4)..(36)..(37): Xaa is C or S
HXGXSRVVMNQYNKLIVNSSDDLYLVSIASLKTPAXXPKPV

SEQ ID NO: 6044 - protein, 32 aa, Artificial Sequence
  GFR-binding peptide
  MOD_RES (2)..(2): Xaa is C or S
KXSKVIMRYKKLIKPTKGIFYLISIANLDQSV

SEQ ID NO: 6045 - protein, 37 aa, Artificial Sequence
  GFR-binding peptide
  MOD_RES (2)..(4)..(37): Xaa is C or S
  MOD_RES (15)..(16)..(17)..(18)..(19): Xaa is A or G
  MOD_RES (20)..(21)..(22)..(23): Xaa is A or G or is absent
SXKXSKVVMRHKRLXXXXXXXXXYYLISTASLDQPVX

SEQ ID NO: 6046 - protein, 42 aa, Artificial Sequence
  GFR-binding peptide
  MOD_RES (1)..(3)..(36)..(37): Xaa is C or S
  MOD_RES (14)..(15)..(16)..(17)..(18): Xaa is A or G
  MOD_RES (19)..(20)..(21)..(22): Xaa is A or G or is absent
XKXSRVIMRYKKLXXXXXXXXXFYLISIANLAQPVXXPAASA

SEQ ID NO: 6047 - protein, 38 aa, Artificial Sequence
  GFR-binding peptide
  MOD_RES (36)..(36): Xaa is C or S
LHDELTQYNKLFIPKKRVIELYLVSIASLQVQTPRXQV

SEQ ID NO: 6048 - protein, 41 aa, Artificial Sequence
  GFR-binding peptide
  MOD_RES (1)..(3)..(37)..(38): Xaa is C or S
  MOD_RES (15)..(16)..(17)..(18)..(19): Xaa is A or G
  MOD_RES (20)..(21)..(22)..(23): Xaa is A or G or is absent
XGXAKVVMNQYNKLXXXXXXXXXLYLVSIASLKTPAXXAKP

SEQ ID NO: 6049 - protein, 41 aa, Artificial Sequence
  GFR-binding peptide
  MOD_RES (1)..(35)..(36): Xaa is C or S
  MOD_RES (13)..(14)..(15)..(16)..(17): Xaa is A or G
  MOD_RES (18)..(19)..(20)..(21): Xaa is A or G or is absent
XARVVMNRYKKLXXXXXXXXXFYLVSIANLQTPAXXPKPVT

SEQ ID NO: 6050 - protein, 37 aa, Artificial Sequence
  GFR-binding peptide
  MOD_RES (2)..(4)..(36)..(37): Xaa is C or S
HXGXARVVMNQYNKLIVNSSDDLYLVSIASLQTPAXX

SEQ ID NO: 6051 - protein, 39 aa, Artificial Sequence
  GFR-binding peptide
  MOD_RES (35)..(35): Xaa is C or S
HDELTRYKKLFIPKKRVIEFYLVSIANLQVQTPRXQVNR

SEQ ID NO: 6052 - protein, 38 aa, Artificial Sequence
  GFR-binding peptide
  MOD_RES (33)..(34): Xaa is C or S
  MOD_RES (11)..(12)..(13)..(14)..(15): Xaa is A or G
  MOD_RES (16)..(17)..(18)..(19): Xaa is A or G or is absent
EVVMDRHKRLXXXXXXXXXYYLMSTASLETPVXXAKPI

SEQ ID NO: 6053 - protein, 44 aa, Artificial Sequence
  GFR-binding peptide
  MOD_RES (1)..(3)..(38)..(39): Xaa is C or S
  MOD_RES (16)..(17)..(18)..(19)..(20): Xaa is A or G
  MOD_RES (21)..(22)..(23)..(24): Xaa is A or G or is absent
XGXEAVSMGEQYNKLXXXXXXXXXLYLVSIASLKTPVXXAKGVK

SEQ ID NO: 6054 - protein, 35 aa, Artificial Sequence
  GFR-binding peptide
  MOD_RES (31)..(32): Xaa is C or S
KVVMNYHYKLIVNNSSDKYLVSIPSLKTPAXXAKP

SEQ ID NO: 6055 - protein, 36 aa, Artificial Sequence
  GFR-binding peptide
  MOD_RES (1)..(33)..(34): Xaa is C or S
XGEVVMDRYKKLVVKENEDFYLMSIANLETPVXXAK

SEQ ID NO: 6056 - protein, 43 aa, Artificial Sequence
  GFR-binding peptide
  MOD_RES (2)..(4)..(38)..(39): Xaa is C or S
  MOD_RES (16)..(17)..(18)..(19)..(20): Xaa is A or G
  MOD_RES (21)..(22)..(23)..(24): Xaa is A or G or is absent
HXGXAKVVMNYHYKLXXXXXXXXXKYLVSIPSLKTPAXXAKPV

SEQ ID NO: 6057 - protein, 42 aa, Artificial Sequence
  GFR-binding peptide
  MOD_RES (2)..(39): Xaa is C or S
KXALHDELTYHYKLFIPKKRVIEKYLVSIPSLQVQTPRXQVN

SEQ ID NO: 6058 - protein, 37 aa, Artificial Sequence
  GFR-binding peptide
  MOD_RES (1)..(35)..(36): Xaa is C or S
  MOD_RES (13)..(14)..(15)..(16)..(17): Xaa is A or G
  MOD_RES (18)..(19)..(20)..(21): Xaa is A or G or is absent
XSRVVMNYHYKLXXXXXXXXXKYLVSIPSLKTPAXXP

SEQ ID NO: 6059 - protein, 39 aa, Artificial Sequence
  GFR-binding peptide
  MOD_RES (1)..(3)..(35)..(36): Xaa is C or S
XGXAKVVMNQYNKLIVNNSSDLYLVSIASLKTPAXXAKP

SEQ ID NO: 6060 - protein, 35 aa, Artificial Sequence
  GFR-binding peptide
  MOD_RES (2)..(33)..(34): Xaa is C or S
KXSKVIMYHYKLIKPTKGIKYLISIPSLDQSVXXP

SEQ ID NO: 6061 - protein, 43 aa, Artificial Sequence
  GFR-binding peptide
  MOD_RES (1)..(3)..(37)..(38): Xaa is C or S
  MOD_RES (15)..(16)..(17)..(18)..(19): Xaa is A or G
  MOD_RES (20)..(21)..(22)..(23): Xaa is A or G or is absent
XGXARVVMNQYNKLXXXXXXXXXLYLVSIASLQTPAXXPKPVT

SEQ ID NO: 6062 - protein, 37 aa, Artificial Sequence
  GFR-binding peptide
  MOD_RES (2)..(35)..(36): Xaa is C or S
GXEAVSMGEYHYKLTPVGMDDKYLVSIPSLKTPVXXA

SEQ ID NO: 6063 - protein, 43 aa, Artificial Sequence
  GFR-binding peptide
  MOD_RES (2)..(4)..(38)..(39): Xaa is C or S
  MOD_RES (16)..(17)..(18)..(19)..(20): Xaa is A or G
  MOD_RES (21)..(22)..(23)..(24): Xaa is A or G or is absent
HXGXSRVVMNQYNKLXXXXXXXXXLYLVSIASLKTPAXXPKPV

SEQ ID NO: 6064 - protein, 35 aa, Artificial Sequence
  GFR-binding peptide
  MOD_RES (31)..(32): Xaa is C or S
KVVMNQYNKLIVNNSSDLYLVSIASLKTPAXXAKP

SEQ ID NO: 6065 - protein, 40 aa, Artificial Sequence
  GFR-binding peptide
  MOD_RES (1)..(38): Xaa is C or S
  MOD_RES (14)..(15)..(16)..(17)..(18): Xaa is A or G
  MOD_RES (19)..(20)..(21)..(22): Xaa is A or G or is absent
XALHDELTRHKRLXXXXXXXXXYYLVSTASLQVQTPRXQV

SEQ ID NO: 6066 - protein, 38 aa, Artificial Sequence
  GFR-binding peptide
  MOD_RES (1)..(3)..(35)..(36): Xaa is C or S
XGXARVVMNYHYKLIVNSSDDKYLVSIPSLQTPAXXPK

SEQ ID NO: 6067 - protein, 40 aa, Artificial Sequence
  GFR-binding peptide
  MOD_RES (2)..(34)..(35): Xaa is C or S
GXARVVMNRHKRLIVNSSDDYYLVSTASLQTPAXXPKPVT

SEQ ID NO: 6068 - protein, 37 aa, Artificial Sequence
  GFR-binding peptide
  MOD_RES (2)..(4): Xaa is C or S
  MOD_RES (16)..(17)..(18)..(19)..(20): Xaa is A or G
  MOD_RES (21)..(22)..(23)..(24): Xaa is A or G or is absent
HXGXSRVVMNRYKKLXXXXXXXXXFYLVSIANLKTPA

SEQ ID NO: 6069 - protein, 33 aa, Artificial Sequence
  GFR-binding peptide
  MOD_RES (1)..(32)..(33): Xaa is C or S
XSKVIMYHYKLIKPTKGIKYLISIPSLDQSVXX

SEQ ID NO: 6070 - protein, 31 aa, Artificial Sequence
  GFR-binding peptide
  MOD_RES (31)..(31): Xaa is C or S
RVVMNRHKRLIVNSSDDYYLVSTASLQTPAX

SEQ ID NO: 6071 - protein, 39 aa, Artificial Sequence
  GFR-binding peptide
  MOD_RES (2)..(4)..(37)..(38): Xaa is C or S
  MOD_RES (15)..(16)..(17)..(18)..(19): Xaa is A or G
  MOD_RES (20)..(21)..(22)..(23): Xaa is A or G or is absent
SXKXSKVVMQYNKLXXXXXXXXXLYLISIASLDQPVXXP

SEQ ID NO: 6072 - protein, 36 aa, Artificial Sequence
  GFR-binding peptide
  MOD_RES (34)..(34): Xaa is C or S
  MOD_RES (12)..(13)..(14)..(15)..(16): Xaa is A or G
  MOD_RES (17)..(18)..(19)..(20): Xaa is A or G or is absent
SRVVMNRYKKLXXXXXXXXXFYLVSIANLKTPAXTP

SEQ ID NO: 6073 - protein, 36 aa, Artificial Sequence
  GFR-binding peptide
  MOD_RES (2)..(36): Xaa is C or S
  MOD_RES (14)..(15)..(16)..(17)..(18): Xaa is A or G
  MOD_RES (19)..(20)..(21)..(22): Xaa is A or G or is absent
GXAKVVMNYHYKLXXXXXXXXXKYLVSIPSLKTPAX

SEQ ID NO: 6074 - protein, 35 aa, Artificial Sequence
  GFR-binding peptide
  MOD_RES (33)..(34): Xaa is C or S
  MOD_RES (11)..(12)..(13)..(14)..(15): Xaa is A or G
  MOD_RES (16)..(17)..(18)..(19): Xaa is A or G or is absent
SKVIMQYNKLXXXXXXXXXLYLISIASLDQSVXXP

SEQ ID NO: 6075 - protein, 36 aa, Artificial Sequence
  GFR-binding peptide
  MOD_RES (34)..(34): Xaa is C or S
  MOD_RES (12)..(13)..(14)..(15)..(16): Xaa is A or G
  MOD_RES (17)..(18)..(19)..(20): Xaa is A or G or is absent
SRVVMNQYNKLXXXXXXXXXLYLVSIASLKTPAXTP

SEQ ID NO: 6076 - protein, 39 aa, Artificial Sequence
  GFR-binding peptide
  MOD_RES (33)..(34): Xaa is C or S
  MOD_RES (11)..(12)..(13)..(14)..(15): Xaa is A or G
  MOD_RES (16)..(17)..(18)..(19): Xaa is A or G or is absent
SKVIMRHKRLXXXXXXXXXYYLISTASLDQSVXXPSASA

SEQ ID NO: 6077 - protein, 36 aa, Artificial Sequence
  GFR-binding peptide
  MOD_RES (1)..(3)..(35)..(36): Xaa is C or S
XGXGEVVMEYHYKLVVKDYEDKYLMSIPSLETPVXX

SEQ ID NO: 6078 - protein, 36 aa, Artificial Sequence
  GFR-binding peptide
  MOD_RES (31)..(32): Xaa is C or S
EVVMDRYKKLVVKENEDFYLMSIANLETPVXXAKPI

SEQ ID NO: 6079 - protein, 38 aa, Artificial Sequence
  GFR-binding peptide
  MOD_RES (2)..(34)..(35): Xaa is C or S
GXARVVMNRYKKLIVNSSDDFYLVSIANLQTPAXXPKP

SEQ ID NO: 6080 - protein, 34 aa, Artificial Sequence
  GFR-binding peptide
  MOD_RES (2)..(33)..(34): Xaa is C or S
KXSKVVMQYNKLVKPTRGVLYLISIASLDQPVXX

SEQ ID NO: 6081 - protein, 38 aa, Artificial Sequence
  GFR-binding peptide
  MOD_RES (1)..(35)..(36): Xaa is C or S
  MOD_RES (13)..(14)..(15)..(16)..(17): Xaa is A or G
  MOD_RES (18)..(19)..(20)..(21): Xaa is A or G or is absent
XGEVVMEYHYKLXXXXXXXXXKYLMSIPSLETPVXXAK

SEQ ID NO: 6082 - protein, 40 aa, Artificial Sequence
  GFR-binding peptide
  MOD_RES (2)..(4)..(36): Xaa is C or S
HXGXSRVVMNQYNKLIVNSSDDLYLVSIASLKTPAXTPKT

SEQ ID NO: 6083 - protein, 42 aa, Artificial Sequence
  GFR-binding peptide
  MOD_RES (1)..(3)..(40): Xaa is C or S
XKXALHDELTRHKRLFIPKKRVIEYYLVSTASLQVQTPRXQV

SEQ ID NO: 6084 - protein, 37 aa, Artificial Sequence
  GFR-binding peptide
  MOD_RES (31)..(32): Xaa is C or S
KVVMNQYNKLIVNNSSDLYLVSIASLKTPAXXAKPVA

SEQ ID NO: 6085 - protein, 41 aa, Artificial Sequence
  GFR-binding peptide
  MOD_RES (2)..(35)..(36): Xaa is C or S
  MOD_RES (13)..(14)..(15)..(16)..(17): Xaa is A or G
  MOD_RES (18)..(19)..(20)..(21): Xaa is A or G or is absent
KXSRVIMRYKKLXXXXXXXXXFYLISIANLAQPVXXPAASA

SEQ ID NO: 6086 - protein, 37 aa, Artificial Sequence
  GFR-binding peptide
  MOD_RES (33)..(34): Xaa is C or S
  MOD_RES (11)..(12)..(13)..(14)..(15): Xaa is A or G
  MOD_RES (16)..(17)..(18)..(19): Xaa is A or G or is absent
SRVIMRYKKLXXXXXXXXXFYLISIANLAQPVXXPAA

SEQ ID NO: 6087 - protein, 35 aa, Artificial Sequence
  GFR-binding peptide
  MOD_RES (1)..(34)..(35): Xaa is C or S
  MOD_RES (12)..(13)..(14)..(15)..(16): Xaa is A or G
  MOD_RES (17)..(18)..(19)..(20): Xaa is A or G or is absent
XSKVVMQYNKLXXXXXXXXXLYLISIASLDQPVXX

SEQ ID NO: 6088 - protein, 42 aa, Artificial Sequence
  GFR-binding peptide
  MOD_RES (1)..(3)..(36)..(37): Xaa is C or S
XGXEAVSMGERYKKLTPVGMDDFYLVSIANLKTPVXXAKGVK

SEQ ID NO: 6089 - protein, 40 aa, Artificial Sequence
  GFR-binding peptide
  MOD_RES (1)..(3)..(40): Xaa is C or S
  MOD_RES (16)..(17)..(18)..(19)..(20): Xaa is A or G
  MOD_RES (21)..(22)..(23)..(24): Xaa is A or G or is absent
XKXALHDELTRYKKLXXXXXXXXXFYLVSIANLQVQTPRX

SEQ ID NO: 6090 - protein, 40 aa, Artificial Sequence
  GFR-binding peptide
  MOD_RES (2)..(39): Xaa is C or S
KXALHDELTRHKRLFIPKKRVIEYYLVSTASLQVQTPRXQ

SEQ ID NO: 6091 - protein, 30 aa, Artificial Sequence
  GFR-binding peptide
EVVMDRYKKLVVKENEDFYLMSIANLETPV

SEQ ID NO: 6092 - protein, 40 aa, Artificial Sequence
  GFR-binding peptide
  MOD_RES (34)..(35): Xaa is C or S
  MOD_RES (12)..(13)..(14)..(15)..(16): Xaa is A or G
  MOD_RES (17)..(18)..(19)..(20): Xaa is A or G or is absent
SRVVMNYHYKLXXXXXXXXXKYLVSIPSLKTPAXXPKPVY

SEQ ID NO: 6093 - protein, 31 aa, Artificial Sequence
  GFR-binding peptide
  MOD_RES (31)..(31): Xaa is C or S
RVVMNRYKKLIVNSSDDFYLVSIANLQTPAX

SEQ ID NO: 6094 - protein, 42 aa, Artificial Sequence
  GFR-binding peptide
  MOD_RES (2)..(4)..(37)..(38): Xaa is C or S
RXGXEAVSMGEQYNKLTPVGMDDLYLVSIASLKTPVXXAKGV

SEQ ID NO: 6095 - protein, 34 aa, Artificial Sequence
  GFR-binding peptide
  MOD_RES (13)..(14)..(15)..(16)..(17): Xaa is A or G
  MOD_RES (18)..(19)..(20)..(21): Xaa is A or G or is absent
EAVSMGEYHYKLXXXXXXXXXKYLVSIPSLKTPV

SEQ ID NO: 6096 - protein, 44 aa, Artificial Sequence
  GFR-binding peptide
  MOD_RES (2)..(4)..(38)..(39): Xaa is C or S
  MOD_RES (16)..(17)..(18)..(19)..(20): Xaa is A or G
  MOD_RES (21)..(22)..(23)..(24): Xaa is A or G or is absent
HXGXAKVVMNRYKKLXXXXXXXXXFYLVSIANLKTPAXXAKPVA

SEQ ID NO: 6097 - protein, 35 aa, Artificial Sequence
  GFR-binding peptide
  MOD_RES (33)..(34): Xaa is C or S
  MOD_RES (11)..(12)..(13)..(14)..(15): Xaa is A or G
  MOD_RES (16)..(17)..(18)..(19): Xaa is A or G or is absent
SRVIMYHYKLXXXXXXXXXKYLISIPSLAQPVXXP

SEQ ID NO: 6098 - protein, 39 aa, Artificial Sequence
  GFR-binding peptide
  MOD_RES (34)..(35): Xaa is C or S
  MOD_RES (12)..(13)..(14)..(15)..(16): Xaa is A or G
  MOD_RES (17)..(18)..(19)..(20): Xaa is A or G or is absent
ARVVMNYHYKLXXXXXXXXXKYLVSIPSLQTPAXXPKPV

SEQ ID NO: 6099 - protein, 37 aa, Artificial Sequence
  GFR-binding peptide
  MOD_RES (33)..(34): Xaa is C or S
  MOD_RES (11)..(12)..(13)..(14)..(15): Xaa is A or G
  MOD_RES (16)..(17)..(18)..(19): Xaa is A or G or is absent
KVVMNRYKKLXXXXXXXXXFYLVSIANLKTPAXXAKP

SEQ ID NO: 6100 - protein, 42 aa, Artificial Sequence
  GFR-binding peptide
  MOD_RES (2)..(4)..(36)..(37): Xaa is C or S
HXGXAKVVMNRHKRLIVNNSSDYYLVSTASLKTPAXXAKPVA

SEQ ID NO: 6101 - protein, 37 aa, Artificial Sequence
  GFR-binding peptide
  MOD_RES (35)..(36): Xaa is C or S
  MOD_RES (13)..(14)..(15)..(16)..(17): Xaa is A or G
  MOD_RES (18)..(19)..(20)..(21): Xaa is A or G or is absent
EAVSMGERHKRLXXXXXXXXXYYLVSTASLKTPVXXA

SEQ ID NO: 6102 - protein, 38 aa, Artificial Sequence
  GFR-binding peptide
  MOD_RES (1)..(36)..(37): Xaa is C or S
  MOD_RES (14)..(15)..(16)..(17)..(18): Xaa is A or G
  MOD_RES (19)..(20)..(21)..(22): Xaa is A or G or is absent
XEAVSMGERYKKLXXXXXXXXXFYLVSIANLKTPVXXA

SEQ ID NO: 6103 - protein, 40 aa, Artificial Sequence
  GFR-binding peptide
  MOD_RES (1)..(3)..(36)..(37): Xaa is C or S
XGXEAVSMGEYHYKLTPVGMDDKYLVSIPSLKTPVXXAKG

SEQ ID NO: 6104 - protein, 37 aa, Artificial Sequence
  GFR-binding peptide
  MOD_RES (2)..(34): Xaa is C or S
GXSRVVMNYHYKLIVNSSDDKYLVSIPSLKTPAXTPK

SEQ ID NO: 6105 - protein, 33 aa, Artificial Sequence
  GFR-binding peptide
  MOD_RES (1)..(3): Xaa is C or S
XKXSRVIMRYKKLVKPKRGVFYLISIANLAQPV

SEQ ID NO: 6106 - protein, 39 aa, Artificial Sequence
  GFR-binding peptide
  MOD_RES (34)..(35): Xaa is C or S
  MOD_RES (12)..(13)..(14)..(15)..(16): Xaa is A or G
  MOD_RES (17)..(18)..(19)..(20): Xaa is A or G or is absent
GEVVMDRHKRLXXXXXXXXXYYLMSTASLETPVXXAKPI

SEQ ID NO: 6107 - protein, 39 aa, Artificial Sequence
  GFR-binding peptide
  MOD_RES (33)..(34): Xaa is C or S
  MOD_RES (11)..(12)..(13)..(14)..(15): Xaa is A or G
  MOD_RES (16)..(17)..(18)..(19): Xaa is A or G or is absent
EVVMDRYKKLXXXXXXXXXFYLMSIANLETPVXXAKPIK

SEQ ID NO: 6108 - protein, 35 aa, Artificial Sequence
  GFR-binding peptide
  MOD_RES (1)..(3)..(35): Xaa is C or S
XGXARVVMNRYKKLIVNSSDDFYLVSIANLQTPAX

SEQ ID NO: 6109 - protein, 40 aa, Artificial Sequence
  GFR-binding peptide
  MOD_RES (2)..(35)..(36): Xaa is C or S
  MOD_RES (13)..(14)..(15)..(16)..(17): Xaa is A or G
  MOD_RES (18)..(19)..(20)..(21): Xaa is A or G or is absent
KXSKVIMRYKKLXXXXXXXXXFYLISIANLDQSVXXPSAS

SEQ ID NO: 6110 - protein, 37 aa, Artificial Sequence
  GFR-binding peptide
  MOD_RES (2)..(35)..(36): Xaa is C or S
GXEAVSMGERHKRLTPVGMDDYYLVSTASLKTPVXXA

SEQ ID NO: 6111 - protein, 40 aa, Artificial Sequence
  GFR-binding peptide
  MOD_RES (2)..(4): Xaa is C or S
  MOD_RES (17)..(18)..(19)..(20)..(21): Xaa is A or G
  MOD_RES (22)..(23)..(24)..(25): Xaa is A or G or is absent
EXKXALHDELTQYNKLXXXXXXXXXLYLVSIASLQVQTPR

SEQ ID NO: 6112 - protein, 35 aa, Artificial Sequence
  GFR-binding peptide
  MOD_RES (1)..(35): Xaa is C or S
  MOD_RES (13)..(14)..(15)..(16)..(17): Xaa is A or G
  MOD_RES (18)..(19)..(20)..(21): Xaa is A or G or is absent
XGEVVMERHKRLXXXXXXXXXYYLMSTASLETPVX

SEQ ID NO: 6113 - protein, 35 aa, Artificial Sequence
  GFR-binding peptide
  MOD_RES (31)..(32): Xaa is C or S
SKVVMQYNKLVKPTRGVLYLISIASLDQPVXXPSA

SEQ ID NO: 6114 - protein, 35 aa, Artificial Sequence
  GFR-binding peptide
  MOD_RES (33)..(34): Xaa is C or S
  MOD_RES (11)..(12)..(13)..(14)..(15): Xaa is A or G
  MOD_RES (16)..(17)..(18)..(19): Xaa is A or G or is absent
EVVMDRHKRLXXXXXXXXXYYLMSTASLETPVXXA

SEQ ID NO: 6115 - protein, 42 aa, Artificial Sequence
  GFR-binding peptide
  MOD_RES (2)..(36)..(37): Xaa is C or S
  MOD_RES (14)..(15)..(16)..(17)..(18): Xaa is A or G
  MOD_RES (19)..(20)..(21)..(22): Xaa is A or G or is absent
GXSRVVMNYHYKLXXXXXXXXXKYLVSIPSLKTPAXXPKPVY

SEQ ID NO: 6116 - protein, 37 aa, Artificial Sequence
  GFR-binding peptide
  MOD_RES (35)..(36): Xaa is C or S
  MOD_RES (13)..(14)..(15)..(16)..(17): Xaa is A or G
  MOD_RES (18)..(19)..(20)..(21): Xaa is A or G or is absent
EAVSMGEQYNKLXXXXXXXXXLYLVSIASLKTPVXXA

SEQ ID NO: 6117 - protein, 35 aa, Artificial Sequence
  GFR-binding peptide
  MOD_RES (1)..(3)..(35): Xaa is C or S
XGXAKVVMNRHKRLIVNNSSDYYLVSTASLKTPAX

SEQ ID NO: 6118 - protein, 40 aa, Artificial Sequence
  GFR-binding peptide
  MOD_RES (2)..(4)..(38)..(39): Xaa is C or S
  MOD_RES (16)..(17)..(18)..(19)..(20): Xaa is A or G
  MOD_RES (21)..(22)..(23)..(24): Xaa is A or G or is absent
HXGXAKVVMNRHKRLXXXXXXXXXYYLVSTASLKTPAXXA

SEQ ID NO: 6119 - protein, 33 aa, Artificial Sequence
  GFR-binding peptide
  MOD_RES (1)..(33): Xaa is C or S
XAKVVMNRHKRLIVNNSSDYYLVSTASLKTPAX

SEQ ID NO: 6120 - protein, 34 aa, Artificial Sequence
  GFR-binding peptide
  MOD_RES (32)..(33): Xaa is C or S
GEVVMERYKKLVVKDYEDFYLMSIANLETPVXXA

SEQ ID NO: 6121 - protein, 34 aa, Artificial Sequence
  GFR-binding peptide
  MOD_RES (33)..(34): Xaa is C or S
  MOD_RES (11)..(12)..(13)..(14)..(15): Xaa is A or G
  MOD_RES (16)..(17)..(18)..(19): Xaa is A or G or is absent
KVVMNYHYKLXXXXXXXXXKYLVSIPSLKTPAXX

SEQ ID NO: 6122 - protein, 35 aa, Artificial Sequence
  GFR-binding peptide
  MOD_RES (2)..(35): Xaa is C or S
  MOD_RES (13)..(14)..(15)..(16)..(17): Xaa is A or G
  MOD_RES (18)..(19)..(20)..(21): Xaa is A or G or is absent
KXSKVVMQYNKLXXXXXXXXXLYLISIASLDQPVX

SEQ ID NO: 6123 - protein, 37 aa, Artificial Sequence
  GFR-binding peptide
  MOD_RES (1)..(33)..(34): Xaa is C or S
XGEVVMDRYKKLVVKENEDFYLMSIANLETPVXXAKP

SEQ ID NO: 6124 - protein, 37 aa, Artificial Sequence
  GFR-binding peptide
  MOD_RES (2)..(36)..(37): Xaa is C or S
  MOD_RES (14)..(15)..(16)..(17)..(18): Xaa is A or G
  MOD_RES (19)..(20)..(21)..(22): Xaa is A or G or is absent
GXSRVVMNYHYKLXXXXXXXXXKYLVSIPSLKTPAXX

SEQ ID NO: 6125 - protein, 38 aa, Artificial Sequence
  GFR-binding peptide
  MOD_RES (1)..(3)..(35)..(36): Xaa is C or S
XGXSRVVMNYHYKLIVNSSDDKYLVSIPSLKTPAXXPK

SEQ ID NO: 6126 - protein, 38 aa, Artificial Sequence
  GFR-binding peptide
  MOD_RES (32)..(32): Xaa is C or S
SRVVMNRYKKLIVNSSDDFYLVSIANLKTPAXTPKTVH

SEQ ID NO: 6127 - protein, 34 aa, Artificial Sequence
  GFR-binding peptide
  MOD_RES (33)..(34): Xaa is C or S
  MOD_RES (11)..(12)..(13)..(14)..(15): Xaa is A or G
  MOD_RES (16)..(17)..(18)..(19): Xaa is A or G or is absent
EVVMDRYKKLXXXXXXXXXFYLMSIANLETPVXX

SEQ ID NO: 6128 - protein, 38 aa, Artificial Sequence
  GFR-binding peptide
  MOD_RES (2)..(34): Xaa is C or S
GXSRVVMNYHYKLIVNSSDDKYLVSIPSLKTPAXTPKT

SEQ ID NO: 6129 - protein, 39 aa, Artificial Sequence
  GFR-binding peptide
  MOD_RES (1)..(3): Xaa is C or S
XKXALHDELTQYNKLFIPKKRVIELYLVSIASLQVQTPR

SEQ ID NO: 6130 - protein, 44 aa, Artificial Sequence
  GFR-binding peptide
  MOD_RES (2)..(4)..(38): Xaa is C or S
  MOD_RES (16)..(17)..(18)..(19)..(20): Xaa is A or G
  MOD_RES (21)..(22)..(23)..(24): Xaa is A or G or is absent
HXGXSRVVMNYHYKLXXXXXXXXXKYLVSIPSLKTPAXTPKTVH

SEQ ID NO: 6131 - protein, 37 aa, Artificial Sequence
  GFR-binding peptide
  MOD_RES (2)..(4): Xaa is C or S
  MOD_RES (16)..(17)..(18)..(19)..(20): Xaa is A or G
  MOD_RES (21)..(22)..(23)..(24): Xaa is A or G or is absent
HXGXARVVMNRHKRLXXXXXXXXXYYLVSTASLQTPA

SEQ ID NO: 6132 - protein, 30 aa, Artificial Sequence
  GFR-binding peptide
SRVIMQYNKLVKPKRGVLYLISIASLAQPV

SEQ ID NO: 6133 - protein, 39 aa, Artificial Sequence
  GFR-binding peptide
  MOD_RES (33)..(34): Xaa is C or S
  MOD_RES (11)..(12)..(13)..(14)..(15): Xaa is A or G
  MOD_RES (16)..(17)..(18)..(19): Xaa is A or G or is absent
RVVMNRHKRLXXXXXXXXXYYLVSTASLKTPAXXPKPVY

SEQ ID NO: 6134 - protein, 40 aa, Artificial Sequence
  GFR-binding peptide
  MOD_RES (2)..(34)..(35): Xaa is C or S
GXGEVVMDRYKKLVVKENEDFYLMSIANLETPVXXAKPIK

SEQ ID NO: 6135 - protein, 33 aa, Artificial Sequence
  GFR-binding peptide
  MOD_RES (12)..(13)..(14)..(15)..(16): Xaa is A or G
  MOD_RES (17)..(18)..(19)..(20): Xaa is A or G or is absent
ARVVMNYHYKLXXXXXXXXXKYLVSIPSLQTPA

SEQ ID NO: 6136 - protein, 37 aa, Artificial Sequence
  GFR-binding peptide
  MOD_RES (1)..(3)..(34)..(35): Xaa is C or S
XKXSKVIMQYNKLIKPTKGILYLISIASLDQSVXXPS

SEQ ID NO: 6137 - protein, 44 aa, Artificial Sequence
  GFR-binding peptide
  MOD_RES (2)..(4)..(41): Xaa is C or S
  MOD_RES (17)..(18)..(19)..(20)..(21): Xaa is A or G
  MOD_RES (22)..(23)..(24)..(25): Xaa is A or G or is absent
EXKXALHDELTRHKRLXXXXXXXXXYYLVSTASLQVQTPRXQVN

SEQ ID NO: 6138 - protein, 40 aa, Artificial Sequence
  GFR-binding peptide
  MOD_RES (1)..(35)..(36): Xaa is C or S
  MOD_RES (13)..(14)..(15)..(16)..(17): Xaa is A or G
  MOD_RES (18)..(19)..(20)..(21): Xaa is A or G or is absent
XGEVVMEQYNKLXXXXXXXXXLYLMSIASLETPVXXAKPI

SEQ ID NO: 6139 - protein, 38 aa, Artificial Sequence
  GFR-binding peptide
  MOD_RES (35)..(35): Xaa is C or S
HDELTRHKRLFIPKKRVIEYYLVSTASLQVQTPRXQVN

SEQ ID NO: 6140 - protein, 43 aa, Artificial Sequence
  GFR-binding peptide
  MOD_RES (2)..(4)..(41): Xaa is C or S
EXKXALHDELTRYKKLFIPKKRVIEFYLVSIANLQVQTPRXQV

SEQ ID NO: 6141 - protein, 37 aa, Artificial Sequence
  GFR-binding peptide
  MOD_RES (1)..(33)..(34): Xaa is C or S
XAKVVMNQYNKLIVNNSSDLYLVSIASLKTPAXXAKP

SEQ ID NO: 6142 - protein, 32 aa, Artificial Sequence
  GFR-binding peptide
  MOD_RES (31)..(32): Xaa is C or S
RVVMNRHKRLIVNSSDDYYLVSTASLQTPAXX

SEQ ID NO: 6143 - protein, 35 aa, Artificial Sequence
  GFR-binding peptide
  MOD_RES (13)..(14)..(15)..(16)..(17): Xaa is A or G
  MOD_RES (18)..(19)..(20)..(21): Xaa is A or G or is absent
ALHDELTRYKKLXXXXXXXXXFYLVSIANLQVQTP

SEQ ID NO: 6144 - protein, 40 aa, Artificial Sequence
  GFR-binding peptide
  MOD_RES (1)..(3)..(36)..(37): Xaa is C or S
  MOD_RES (14)..(15)..(16)..(17)..(18): Xaa is A or G
  MOD_RES (19)..(20)..(21)..(22): Xaa is A or G or is absent
XKXSRVIMRYKKLXXXXXXXXXFYLISIANLAQPVXXPAA

SEQ ID NO: 6145 - protein, 38 aa, Artificial Sequence
  GFR-binding peptide
  MOD_RES (2)..(4)..(36)..(37): Xaa is C or S
RXGXGEVVMDRHKRLVVKENEDYYLMSTASLETPVXXA

SEQ ID NO: 6146 - protein, 37 aa, Artificial Sequence
  GFR-binding peptide
  MOD_RES (2)..(33)..(34): Xaa is C or S
KXSKVVMYHYKLVKPTRGVKYLISIPSLDQPVXXPSA

SEQ ID NO: 6147 - protein, 38 aa, Artificial Sequence
  GFR-binding peptide
  MOD_RES (33)..(34): Xaa is C or S
  MOD_RES (11)..(12)..(13)..(14)..(15): Xaa is A or G
  MOD_RES (16)..(17)..(18)..(19): Xaa is A or G or is absent
SKVIMRHKRLXXXXXXXXXYYLISTASLDQSVXXPSAS

SEQ ID NO: 6148 - protein, 37 aa, Artificial Sequence
  GFR-binding peptide
  MOD_RES (2)..(4): Xaa is C or S
  MOD_RES (16)..(17)..(18)..(19)..(20): Xaa is A or G
  MOD_RES (21)..(22)..(23)..(24): Xaa is A or G or is absent
RXGXGEVVMEQYNKLXXXXXXXXXLYLMSIASLETPV

SEQ ID NO: 6149 - protein, 34 aa, Artificial Sequence
  GFR-binding peptide
  MOD_RES (34)..(34): Xaa is C or S
  MOD_RES (12)..(13)..(14)..(15)..(16): Xaa is A or G
  MOD_RES (17)..(18)..(19)..(20): Xaa is A or G or is absent
SRVVMNRYKKLXXXXXXXXXFYLVSIANLKTPAX

SEQ ID NO: 6150 - protein, 34 aa, Artificial Sequence
  GFR-binding peptide
  MOD_RES (33)..(34): Xaa is C or S
  MOD_RES (11)..(12)..(13)..(14)..(15): Xaa is A or G
  MOD_RES (16)..(17)..(18)..(19): Xaa is A or G or is absent
RVVMNYHYKLXXXXXXXXXKYLVSIPSLKTPAXX

SEQ ID NO: 6151 - protein, 40 aa, Artificial Sequence
  GFR-binding peptide
  MOD_RES (2)..(36)..(37): Xaa is C or S
  MOD_RES (14)..(15)..(16)..(17)..(18): Xaa is A or G
  MOD_RES (19)..(20)..(21)..(22): Xaa is A or G or is absent
GXGEVVMDQYNKLXXXXXXXXXLYLMSIASLETPVXXAKP

SEQ ID NO: 6152 - protein, 37 aa, Artificial Sequence
  GFR-binding peptide
  MOD_RES (1)..(34)..(35): Xaa is C or S
  MOD_RES (12)..(13)..(14)..(15)..(16): Xaa is A or G
  MOD_RES (17)..(18)..(19)..(20): Xaa is A or G or is absent
XSKVVMYHYKLXXXXXXXXXKYLISIPSLDQPVXXPS

SEQ ID NO: 6153 - protein, 38 aa, Artificial Sequence
  GFR-binding peptide
  MOD_RES (1)..(33): Xaa is C or S
XSRVVMNRHKRLIVNSSDDYYLVSTASLKTPAXTPKTV

SEQ ID NO: 6154 - protein, 36 aa, Artificial Sequence
  GFR-binding peptide
  MOD_RES (1)..(3): Xaa is C or S
  MOD_RES (15)..(16)..(17)..(18)..(19): Xaa is A or G
  MOD_RES (20)..(21)..(22)..(23): Xaa is A or G or is absent
XGXGEVVMDYHYKLXXXXXXXXXKYLMSIPSLETPV

SEQ ID NO: 6155 - protein, 40 aa, Artificial Sequence
  GFR-binding peptide
  MOD_RES (2)..(34)..(35): Xaa is C or S
GXAKVVMNQYNKLIVNNSSDLYLVSIASLKTPAXXAKPVA

SEQ ID NO: 6156 - protein, 36 aa, Artificial Sequence
  GFR-binding peptide
  MOD_RES (1)..(3)..(36): Xaa is C or S
XGXEAVSMGEQYNKLTPVGMDDLYLVSIASLKTPVX

SEQ ID NO: 6157 - protein, 35 aa, Artificial Sequence
  GFR-binding peptide
  MOD_RES (2)..(34)..(35): Xaa is C or S
GXARVVMNQYNKLIVNSSDDLYLVSIASLQTPAXX

SEQ ID NO: 6158 - protein, 39 aa, Artificial Sequence
  GFR-binding peptide
  MOD_RES (2)..(4)..(36)..(37): Xaa is C or S
HXGXSRVVMNQYNKLIVNSSDDLYLVSIASLKTPAXXPK

SEQ ID NO: 6159 - protein, 38 aa, Artificial Sequence
  GFR-binding peptide
  MOD_RES (2)..(4)..(38): Xaa is C or S
  MOD_RES (16)..(17)..(18)..(19)..(20): Xaa is A or G
  MOD_RES (21)..(22)..(23)..(24): Xaa is A or G or is absent
RXGXGEVVMDRYKKLXXXXXXXXXFYLMSIANLETPVX

SEQ ID NO: 6160 - protein, 37 aa, Artificial Sequence
  GFR-binding peptide
  MOD_RES (2)..(4)..(37): Xaa is C or S
  MOD_RES (15)..(16)..(17)..(18)..(19): Xaa is A or G
  MOD_RES (20)..(21)..(22)..(23): Xaa is A or G or is absent
SXKXSKVIMYHYKLXXXXXXXXXKYLISIPSLDQSVX

SEQ ID NO: 6161 - protein, 32 aa, Artificial Sequence
  GFR-binding peptide
  MOD_RES (32)..(32): Xaa is C or S
AKVVMNQYNKLIVNNSSDLYLVSIASLKTPAX

SEQ ID NO: 6162 - protein, 34 aa, Artificial Sequence
  GFR-binding peptide
  MOD_RES (1)..(1): Xaa is C or S
  MOD_RES (13)..(14)..(15)..(16)..(17): Xaa is A or G
  MOD_RES (18)..(19)..(20)..(21): Xaa is A or G or is absent
XAKVVMNRHKRLXXXXXXXXXYYLVSTASLKTPA

SEQ ID NO: 6163 - protein, 36 aa, Artificial Sequence
  GFR-binding peptide
  MOD_RES (31)..(31): Xaa is C or S
RVVMNYHYKLIVNSSDDKYLVSIPSLKTPAXTPKTV

SEQ ID NO: 6164 - protein, 40 aa, Artificial Sequence
  GFR-binding peptide
  MOD_RES (2)..(4)..(36)..(37): Xaa is C or S
HXGXSRVVMNRHKRLIVNSSDDYYLVSTASLKTPAXXPKP

SEQ ID NO: 6165 - protein, 39 aa, Artificial Sequence
  GFR-binding peptide
  MOD_RES (1)..(3)..(37)..(38): Xaa is C or S
  MOD_RES (15)..(16)..(17)..(18)..(19): Xaa is A or G
  MOD_RES (20)..(21)..(22)..(23): Xaa is A or G or is absent
XGXAKVVMNRHKRLXXXXXXXXXYYLVSTASLKTPAXXA

SEQ ID NO: 6166 - protein, 41 aa, Artificial Sequence
  GFR-binding peptide
  MOD_RES (1)..(3)..(36)..(37): Xaa is C or S
  MOD_RES (14)..(15)..(16)..(17)..(18): Xaa is A or G
  MOD_RES (19)..(20)..(21)..(22): Xaa is A or G or is absent
XKXSKVVMRHKRLXXXXXXXXXYYLISTASLDQPVXXPSAS

SEQ ID NO: 6167 - protein, 38 aa, Artificial Sequence
  GFR-binding peptide
  MOD_RES (2)..(34)..(35): Xaa is C or S
GXSRVVMNRYKKLIVNSSDDFYLVSIANLKTPAXXPKP

SEQ ID NO: 6168 - protein, 37 aa, Artificial Sequence
  GFR-binding peptide
  MOD_RES (1)..(3)..(34)..(35): Xaa is C or S
XKXSKVVMQYNKLVKPTRGVLYLISIASLDQPVXXPS

SEQ ID NO: 6169 - protein, 41 aa, Artificial Sequence
  GFR-binding peptide
  MOD_RES (1)..(3)..(40): Xaa is C or S
XKXALHDELTRYKKLFIPKKRVIEFYLVSIANLQVQTPRXQ

SEQ ID NO: 6170 - protein, 38 aa, Artificial Sequence
  GFR-binding peptide
  MOD_RES (1)..(3)..(38): Xaa is C or S
  MOD_RES (16)..(17)..(18)..(19)..(20): Xaa is A or G
  MOD_RES (21)..(22)..(23)..(24): Xaa is A or G or is absent
XGXEAVSMGEQYNKLXXXXXXXXXLYLVSIASLKTPVX

SEQ ID NO: 6171 - protein, 35 aa, Artificial Sequence
  GFR-binding peptide
  MOD_RES (34)..(35): Xaa is C or S
  MOD_RES (12)..(13)..(14)..(15)..(16): Xaa is A or G
  MOD_RES (17)..(18)..(19)..(20): Xaa is A or G or is absent
SRVVMNRYKKLXXXXXXXXXFYLVSIANLKTPAXX

SEQ ID NO: 6172 - protein, 36 aa, Artificial Sequence
  GFR-binding peptide
  MOD_RES (2)..(34)..(35): Xaa is C or S
GXAKVVMNYHYKLIVNNSSDKYLVSIPSLKTPAXXA

SEQ ID NO: 6173 - protein, 39 aa, Artificial Sequence
  GFR-binding peptide
  MOD_RES (2)..(36)..(37): Xaa is C or S
  MOD_RES (14)..(15)..(16)..(17)..(18): Xaa is A or G
  MOD_RES (19)..(20)..(21)..(22): Xaa is A or G or is absent
GXAKVVMNQYNKLXXXXXXXXXLYLVSIASLKTPAXXAK

SEQ ID NO: 6174 - protein, 35 aa, Artificial Sequence
  GFR-binding peptide
  MOD_RES (2)..(4)..(35): Xaa is C or S
SXKXSKVIMRYKKLIKPTKGIFYLISIANLDQSVX

SEQ ID NO: 6175 - protein, 36 aa, Artificial Sequence
  GFR-binding peptide
  MOD_RES (1)..(34)..(35): Xaa is C or S
  MOD_RES (12)..(13)..(14)..(15)..(16): Xaa is A or G
  MOD_RES (17)..(18)..(19)..(20): Xaa is A or G or is absent
XSKVIMYHYKLXXXXXXXXXKYLISIPSLDQSVXXP

SEQ ID NO: 6176 - protein, 36 aa, Artificial Sequence
  GFR-binding peptide
  MOD_RES (1)..(35)..(36): Xaa is C or S
  MOD_RES (13)..(14)..(15)..(16)..(17): Xaa is A or G
  MOD_RES (18)..(19)..(20)..(21): Xaa is A or G or is absent
XSRVVMNYHYKLXXXXXXXXXKYLVSIPSLKTPAXX

SEQ ID NO: 6177 - protein, 39 aa, Artificial Sequence
  GFR-binding peptide
  MOD_RES (2)..(4)..(36)..(37): Xaa is C or S
HXGXAKVVMNYHYKLIVNNSSDKYLVSIPSLKTPAXXAK

SEQ ID NO: 6178 - protein, 34 aa, Artificial Sequence
  GFR-binding peptide
  MOD_RES (12)..(13)..(14)..(15)..(16): Xaa is A or G
  MOD_RES (17)..(18)..(19)..(20): Xaa is A or G or is absent
LHDELTRYKKLXXXXXXXXXFYLVSIANLQVQTP

SEQ ID NO: 6179 - protein, 33 aa, Artificial Sequence
  GFR-binding peptide
  MOD_RES (31)..(32): Xaa is C or S
EVVMERYKKLVVKDYEDFYLMSIANLETPVXXA

SEQ ID NO: 6180 - protein, 33 aa, Artificial Sequence
  GFR-binding peptide
  MOD_RES (2)..(33): Xaa is C or S
KXSKVVMQYNKLVKPTRGVLYLISIASLDQPVX

SEQ ID NO: 6181 - protein, 38 aa, Artificial Sequence
  GFR-binding peptide
  MOD_RES (6)..(7): Xaa is C or S
KIPKAXXVPTELNAISMLYFDENEKVVLKKYRDMVVEG

SEQ ID NO: 6182 - protein, 43 aa, Artificial Sequence
  GFR-binding peptide
  MOD_RES (5)..(6)..(40)..(42): Xaa is C or S
  MOD_RES (20)..(21)..(22)..(23)..(24): Xaa is A or G
  MOD_RES (25)..(26)..(27)..(28): Xaa is A or G or is absent
IPKAXXVPTELSAISMLYLXXXXXXXXXLKNYQEMVVEGXGXR

SEQ ID NO: 6183 - protein, 35 aa, Artificial Sequence
  GFR-binding peptide
  MOD_RES (32)..(34): Xaa is C or S
APTQLSAISVLYLDDSSNVILKNYQNMVVRAXGXH

SEQ ID NO: 6184 - protein, 34 aa, Artificial Sequence
  GFR-binding peptide
  MOD_RES (14)..(15)..(16)..(17)..(18): Xaa is A or G
  MOD_RES (19)..(20)..(21)..(22): Xaa is A or G or is absent
VPTKLNAISVLYFXXXXXXXXXLKKYREGMSVAE

SEQ ID NO: 6185 - protein, 38 aa, Artificial Sequence
  GFR-binding peptide
  MOD_RES (1)..(38): Xaa is C or S
  MOD_RES (17)..(18)..(19)..(20)..(21): Xaa is A or G
  MOD_RES (22)..(23)..(24)..(25): Xaa is A or G or is absent
XRPTQVQLSATSVLYYXXXXXXXXXLRKHRTLEDHLAX

SEQ ID NO: 6186 - protein, 42 aa, Artificial Sequence
  GFR-binding peptide
  MOD_RES (4)..(5)..(40)..(42): Xaa is C or S
  MOD_RES (19)..(20)..(21)..(22)..(23): Xaa is A or G
  MOD_RES (24)..(25)..(26)..(27): Xaa is A or G or is absent
GKAXXVPTKLNAISVLYFXXXXXXXXXLKKYREGMSVAEXGX

SEQ ID NO: 6187 - protein, 40 aa, Artificial Sequence
  GFR-binding peptide
  MOD_RES (4)..(5)..(38)..(40): Xaa is C or S
  MOD_RES (19)..(20)..(21)..(22)..(23): Xaa is A or G
  MOD_RES (24)..(25)..(26)..(27): Xaa is A or G or is absent
AAPXXVPQALSAISILYLXXXXXXXXXLKNYQMIVRSXKX

SEQ ID NO: 6188 - protein, 38 aa, Artificial Sequence
  GFR-binding peptide
  MOD_RES (7)..(7): Xaa is C or S
HVTKPTXAPTKLSATSVLYYDDSSNVILRKHRNMVVRS

SEQ ID NO: 6189 - protein, 33 aa, Artificial Sequence
  GFR-binding peptide
  MOD_RES (32)..(32): Xaa is C or S
VPTELNAISMLYFDENEKVVLKKYRDMVVEGXG

SEQ ID NO: 6190 - protein, 38 aa, Artificial Sequence
  GFR-binding peptide
  MOD_RES (2)..(3)..(36)..(38): Xaa is C or S
  MOD_RES (17)..(18)..(19)..(20)..(21): Xaa is A or G
  MOD_RES (22)..(23)..(24)..(25): Xaa is A or G or is absent
PXXVSQDLSPISILYKXXXXXXXXXLKYHYMIVKSXKX

SEQ ID NO: 6191 - protein, 38 aa, Artificial Sequence
  GFR-binding peptide
  MOD_RES (1)..(2)..(36)..(38): Xaa is C or S
  MOD_RES (16)..(17)..(18)..(19)..(20): Xaa is A or G
  MOD_RES (21)..(22)..(23)..(24): Xaa is A or G or is absent
XXAPTKLSAISVLYLXXXXXXXXXLKNYQNMVVRSXGX

SEQ ID NO: 6192 - protein, 36 aa, Artificial Sequence
  GFR-binding peptide
  MOD_RES (3)..(4)..(36): Xaa is C or S
KPXXAPTKLSPISVLYKDDSSNVILKYHYNMVVRSX

SEQ ID NO: 6193 - protein, 32 aa, Artificial Sequence
  GFR-binding peptide
  MOD_RES (1)..(32): Xaa is C or S
XVPQDLSPISILYKVGRTPKVLKYHYMVVKSX

SEQ ID NO: 6194 - protein, 37 aa, Artificial Sequence
  GFR-binding peptide
  MOD_RES (4)..(5): Xaa is C or S
  MOD_RES (19)..(20)..(21)..(22)..(23): Xaa is A or G
  MOD_RES (24)..(25)..(26)..(27): Xaa is A or G or is absent
PKPXXAPTKLSATSVLYYXXXXXXXXXLRKHRNMVVR

SEQ ID NO: 6195 - protein, 38 aa, Artificial Sequence
  GFR-binding peptide
  MOD_RES (4)..(5)..(36)..(38): Xaa is C or S
AAPXXVPQALSAISILYLVGRKPKVLKNYQMIVRSXKX

SEQ ID NO: 6196 - protein, 35 aa, Artificial Sequence
  GFR-binding peptide
  MOD_RES (1)..(35): Xaa is C or S
  MOD_RES (15)..(16)..(17)..(18)..(19): Xaa is A or G
  MOD_RES (20)..(21)..(22)..(23): Xaa is A or G or is absent
XAPTKLSATSVLYYXXXXXXXXXLRKHRNMVVRSX

SEQ ID NO: 6197 - protein, 39 aa, Artificial Sequence
  GFR-binding peptide
  MOD_RES (5)..(6)..(39): Xaa is C or S
  MOD_RES (20)..(21)..(22)..(23)..(24): Xaa is A or G
  MOD_RES (25)..(26)..(27)..(28): Xaa is A or G or is absent
SAAPXXVPQALSATSILYYXXXXXXXXXLRKHRMIVRSX

SEQ ID NO: 6198 - protein, 38 aa, Artificial Sequence
  GFR-binding peptide
  MOD_RES (6)..(7): Xaa is C or S
YVPKPXXAPTKLSATSVLYYDDSSNVILRKHRNMVVRS

SEQ ID NO: 6199 - protein, 35 aa, Artificial Sequence
  GFR-binding peptide
  MOD_RES (4)..(5): Xaa is C or S
ASPXXVSQDLNAISILYFIGKTPKILKKYRMIVKS

SEQ ID NO: 6200 - protein, 42 aa, Artificial Sequence
  GFR-binding peptide
  MOD_RES (5)..(6)..(40)..(42): Xaa is C or S
  MOD_RES (20)..(21)..(22)..(23)..(24): Xaa is A or G
  MOD_RES (25)..(26)..(27)..(28): Xaa is A or G or is absent
IPKAXXVPTELSPISMLYKXXXXXXXXXLKYHYEMVVEGXGX

SEQ ID NO: 6201 - protein, 39 aa, Artificial Sequence
  GFR-binding peptide
  MOD_RES (3)..(4)..(38): Xaa is C or S
  MOD_RES (18)..(19)..(20)..(21)..(22): Xaa is A or G
  MOD_RES (23)..(24)..(25)..(26): Xaa is A or G or is absent
KPXXAPTQLSATSVLYYXXXXXXXXXLRKHRNMVVRAXG

SEQ ID NO: 6202 - protein, 35 aa, Artificial Sequence
  GFR-binding peptide
  MOD_RES (15)..(16)..(17)..(18)..(19): Xaa is A or G
  MOD_RES (20)..(21)..(22)..(23): Xaa is A or G or is absent
PTQVQLSATSVLYYXXXXXXXXXLRKHRTLEDHLA

SEQ ID NO: 6203 - protein, 38 aa, Artificial Sequence
  GFR-binding peptide
  MOD_RES (1)..(2)..(35)..(37): Xaa is C or S
  MOD_RES (16)..(17)..(18)..(19)..(20): Xaa is A or G
  MOD_RES (21)..(22)..(23)..(24): Xaa is A or G or is absent
XXVPQDLSPISILYKXXXXXXXXXLKYHYMVVKSXKXS

SEQ ID NO: 6204 - protein, 39 aa, Artificial Sequence
  GFR-binding peptide
  MOD_RES (1)..(2)..(37)..(39): Xaa is C or S
  MOD_RES (16)..(17)..(18)..(19)..(20): Xaa is A or G
  MOD_RES (21)..(22)..(23)..(24): Xaa is A or G or is absent
XXVPTKLSAISVLYLXXXXXXXXXLKNYQEGMSVAEXGX

SEQ ID NO: 6205 - protein, 33 aa, Artificial Sequence
  GFR-binding peptide
  MOD_RES (14)..(15)..(16)..(17)..(18): Xaa is A or G
  MOD_RES (19)..(20)..(21)..(22): Xaa is A or G or is absent
VPTELSATSMLYYXXXXXXXXXLRKHRDMVVEG

SEQ ID NO: 6206 - protein, 32 aa, Artificial Sequence
  GFR-binding peptide
  MOD_RES (14)..(15)..(16)..(17)..(18): Xaa is A or G
  MOD_RES (19)..(20)..(21)..(22): Xaa is A or G or is absent
VPTELSAISMLYLXXXXXXXXXLKNYQDMVVE

SEQ ID NO: 6207 - protein, 38 aa, Artificial Sequence
  GFR-binding peptide
  MOD_RES (3)..(4)..(38): Xaa is C or S
  MOD_RES (18)..(19)..(20)..(21)..(22): Xaa is A or G
  MOD_RES (23)..(24)..(25)..(26): Xaa is A or G or is absent
KPXXAPTKLNAISVLYFXXXXXXXXXLKKYRNMVVRSX

SEQ ID NO: 6208 - protein, 39 aa, Artificial Sequence
  GFR-binding peptide
  MOD_RES (4)..(5)..(37)..(39): Xaa is C or S
PKAXXVPTELNAISMLYFDENEKVVLKKYRDMVVEGXGX

SEQ ID NO: 6209 - protein, 35 aa, Artificial Sequence
  GFR-binding peptide
  MOD_RES (3)..(4)..(35): Xaa is C or S
SPXXVSQDLSAISILYLIGKTPKILKNYQMIVKSX

SEQ ID NO: 6210 - protein, 32 aa, Artificial Sequence
  GFR-binding peptide
  MOD_RES (1)..(2): Xaa is C or S
XXVSQDLSPISILYKIGKTPKILKYHYMIVKS

SEQ ID NO: 6211 - protein, 40 aa, Artificial Sequence
  GFR-binding peptide
  MOD_RES (4)..(5)..(38)..(40): Xaa is C or S
  MOD_RES (19)..(20)..(21)..(22)..(23): Xaa is A or G
  MOD_RES (24)..(25)..(26)..(27): Xaa is A or G or is absent
ASPXXVSQDLSAISILYLXXXXXXXXXLKNYQMIVKSXKX

SEQ ID NO: 6212 - protein, 41 aa, Artificial Sequence
  GFR-binding peptide
  MOD_RES (6)..(7)..(41): Xaa is C or S
  MOD_RES (21)..(22)..(23)..(24)..(25): Xaa is A or G
  MOD_RES (26)..(27)..(28)..(29): Xaa is A or G or is absent
SIPKAXXVPTELSPISMLYKXXXXXXXXXLKYHYEMVVEGX

SEQ ID NO: 6213 - protein, 34 aa, Artificial Sequence
  GFR-binding peptide
  MOD_RES (33)..(33): Xaa is C or S
  MOD_RES (14)..(15)..(16)..(17)..(18): Xaa is A or G
  MOD_RES (19)..(20)..(21)..(22): Xaa is A or G or is absent
VPQDLSAISILYLXXXXXXXXXLKNYQMVVKSXK

SEQ ID NO: 6214 - protein, 34 aa, Artificial Sequence
  GFR-binding peptide
  MOD_RES (2)..(3): Xaa is C or S
AXXVPTELSATSMLYYDENEKVVLRKHRDMVVEG

SEQ ID NO: 6215 - protein, 32 aa, Artificial Sequence
  GFR-binding peptide
  MOD_RES (14)..(15)..(16)..(17)..(18): Xaa is A or G
  MOD_RES (19)..(20)..(21)..(22): Xaa is A or G or is absent
TQVQLSATSVLYYXXXXXXXXXLRKHRTLEDH

SEQ ID NO: 6216 - protein, 30 aa, Artificial Sequence
  GFR-binding peptide
VPTELSPISMLYKDEYDKVVLKYHYEMVVE

SEQ ID NO: 6217 - protein, 43 aa, Artificial Sequence
  GFR-binding peptide
  MOD_RES (5)..(6)..(40)..(42): Xaa is C or S
  MOD_RES (20)..(21)..(22)..(23)..(24): Xaa is A or G
  MOD_RES (25)..(26)..(27)..(28): Xaa is A or G or is absent
IPKAXXVPTELSPISMLYKXXXXXXXXXLKYHYDMVVEGXGXR

SEQ ID NO: 6218 - protein, 37 aa, Artificial Sequence
  GFR-binding peptide
  MOD_RES (6)..(7): Xaa is C or S
TVPKPXXAPTQLSAISVLYLDDSSNVILKNYQNMVVR

SEQ ID NO: 6219 - protein, 44 aa, Artificial Sequence
  GFR-binding peptide
  MOD_RES (6)..(7)..(41)..(43): Xaa is C or S
  MOD_RES (21)..(22)..(23)..(24)..(25): Xaa is A or G
  MOD_RES (26)..(27)..(28)..(29): Xaa is A or G or is absent
KIPKAXXVPTELSAISMLYLXXXXXXXXXLKNYQDMVVEGXGXR

SEQ ID NO: 6220 - protein, 32 aa, Artificial Sequence
  GFR-binding peptide
  MOD_RES (1)..(1): Xaa is C or S
XVPTELSPISMLYKDEYDKVVLKYHYEMVVEG

SEQ ID NO: 6221 - protein, 35 aa, Artificial Sequence
  GFR-binding peptide
  MOD_RES (2)..(3)..(35): Xaa is C or S
AXXVPTELSATSMLYYDEYDKVVLRKHREMVVEGX

SEQ ID NO: 6222 - protein, 35 aa, Artificial Sequence
  GFR-binding peptide
  MOD_RES (1)..(34): Xaa is C or S
XVPTKLSATSVLYYDDMGVPTLRKHREGMSVAEXG

SEQ ID NO: 6223 - protein, 36 aa, Artificial Sequence
  GFR-binding peptide
  MOD_RES (2)..(2): Xaa is C or S
QXRPTQVQLSATSVLYYEIVRKKPIFLRKHRTLEDH

SEQ ID NO: 6224 - protein, 38 aa, Artificial Sequence
  GFR-binding peptide
  MOD_RES (7)..(7): Xaa is C or S
HVTKPTXAPTKLSAISVLYLDDSSNVILKNYQNMVVRS

SEQ ID NO: 6225 - protein, 32 aa, Artificial Sequence
  GFR-binding peptide
  MOD_RES (32)..(32): Xaa is C or S
VPTELSPISMLYKDEYDKVVLKYHYEMVVEGX

SEQ ID NO: 6226 - protein, 40 aa, Artificial Sequence
  GFR-binding peptide
  MOD_RES (5)..(6)..(39): Xaa is C or S
VGKAXXVPTKLSAISVLYLDDMGVPTLKNYQEGMSVAEXG

SEQ ID NO: 6227 - protein, 38 aa, Artificial Sequence
  GFR-binding peptide
  MOD_RES (3)..(3): Xaa is C or S
  MOD_RES (19)..(20)..(21)..(22)..(23): Xaa is A or G
  MOD_RES (24)..(25)..(26)..(27): Xaa is A or G or is absent
VQXRPTQVQLSAISVLYLXXXXXXXXXLKNYQTLEDHL

SEQ ID NO: 6228 - protein, 39 aa, Artificial Sequence
  GFR-binding peptide
  MOD_RES (1)..(38): Xaa is C or S
  MOD_RES (17)..(18)..(19)..(20)..(21): Xaa is A or G
  MOD_RES (22)..(23)..(24)..(25): Xaa is A or G or is absent
XRPTQVQLSATSVLYYXXXXXXXXXLRKHRTLEDHLAXK

SEQ ID NO: 6229 - protein, 39 aa, Artificial Sequence
  GFR-binding peptide
  MOD_RES (1)..(2)..(36)..(38): Xaa is C or S
  MOD_RES (16)..(17)..(18)..(19)..(20): Xaa is A or G
  MOD_RES (21)..(22)..(23)..(24): Xaa is A or G or is absent
XXAPTKLSATSVLYYXXXXXXXXXLRKHRNMVVRSXGXH

SEQ ID NO: 6230 - protein, 37 aa, Artificial Sequence
  GFR-binding peptide
  MOD_RES (34)..(36): Xaa is C or S
  MOD_RES (14)..(15)..(16)..(17)..(18): Xaa is A or G
  MOD_RES (19)..(20)..(21)..(22): Xaa is A or G or is absent
APTKLNAISVLYFXXXXXXXXXLKKYRNMVVKAXGXH

SEQ ID NO: 6231 - protein, 36 aa, Artificial Sequence
  GFR-binding peptide
  MOD_RES (16)..(17)..(18)..(19)..(20): Xaa is A or G
  MOD_RES (21)..(22)..(23)..(24): Xaa is A or G or is absent
RPTQVQLNAISVLYFXXXXXXXXXLKKYRTLEDHLA

SEQ ID NO: 6232 - protein, 38 aa, Artificial Sequence
  GFR-binding peptide
  MOD_RES (4)..(5)..(37): Xaa is C or S
PKAXXVPTELSATSMLYYDEYDKVVLRKHREMVVEGXG

SEQ ID NO: 6233 - protein, 34 aa, Artificial Sequence
  GFR-binding peptide
  MOD_RES (1)..(34): Xaa is C or S
  MOD_RES (15)..(16)..(17)..(18)..(19): Xaa is A or G
  MOD_RES (20)..(21)..(22)..(23): Xaa is A or G or is absent
XVSQDLSPISILYKXXXXXXXXXLKYHYMIVKSX

SEQ ID NO: 6234 - protein, 42 aa, Artificial Sequence
  GFR-binding peptide
  MOD_RES (5)..(6)..(39)..(41): Xaa is C or S
  MOD_RES (20)..(21)..(22)..(23)..(24): Xaa is A or G
  MOD_RES (25)..(26)..(27)..(28): Xaa is A or G or is absent
SASPXXVSQDLSPISILYKXXXXXXXXXLKYHYMIVKSXKXS

SEQ ID NO: 6235 - protein, 36 aa, Artificial Sequence
  GFR-binding peptide
  MOD_RES (1)..(2)..(36): Xaa is C or S
  MOD_RES (16)..(17)..(18)..(19)..(20): Xaa is A or G
  MOD_RES (21)..(22)..(23)..(24): Xaa is A or G or is absent
XXAPTKLSATSVLYYXXXXXXXXXLRKHRNMVVRSX

SEQ ID NO: 6236 - protein, 33 aa, Artificial Sequence
  GFR-binding peptide
  MOD_RES (33)..(33): Xaa is C or S
  MOD_RES (14)..(15)..(16)..(17)..(18): Xaa is A or G
  MOD_RES (19)..(20)..(21)..(22): Xaa is A or G or is absent
VPQDLSPISILYKXXXXXXXXXLKYHYMVVKSX

SEQ ID NO: 6237 - protein, 37 aa, Artificial Sequence
  GFR-binding peptide
  MOD_RES (35)..(37): Xaa is C or S
  MOD_RES (14)..(15)..(16)..(17)..(18): Xaa is A or G
  MOD_RES (19)..(20)..(21)..(22): Xaa is A or G or is absent
TQVQLSATSVLYYXXXXXXXXXLRKHRTLEDHLAXKX

SEQ ID NO: 6238 - protein, 35 aa, Artificial Sequence
  GFR-binding peptide
  MOD_RES (1)..(32)..(34): Xaa is C or S
XVSQDLSAISILYLIGKTPKILKNYQMIVKSXKXS

SEQ ID NO: 6239 - protein, 40 aa, Artificial Sequence
  GFR-binding peptide
  MOD_RES (4)..(5)..(38)..(40): Xaa is C or S
GKAXXVPTKLNAISVLYFDDMGVPTLKKYREGMSVAEXGX

SEQ ID NO: 6240 - protein, 36 aa, Artificial Sequence
  GFR-binding peptide
  MOD_RES (34)..(36): Xaa is C or S
  MOD_RES (14)..(15)..(16)..(17)..(18): Xaa is A or G
  MOD_RES (19)..(20)..(21)..(22): Xaa is A or G or is absent
APTKLSPISVLYKXXXXXXXXXLKYHYNMVVRSXGX

SEQ ID NO: 6241 - protein, 39 aa, Artificial Sequence
  GFR-binding peptide
  MOD_RES (4)..(5)..(38): Xaa is C or S
  MOD_RES (19)..(20)..(21)..(22)..(23): Xaa is A or G
  MOD_RES (24)..(25)..(26)..(27): Xaa is A or G or is absent
ASPXXVSQDLSAISILYLXXXXXXXXXLKNYQMIVKSXK

SEQ ID NO: 6242 - protein, 37 aa, Artificial Sequence
  GFR-binding peptide
  MOD_RES (2)..(3)..(35)..(37): Xaa is C or S
AXXAPTKLSAISVLYLDSSNNVILKNYQNMVVKAXGX

SEQ ID NO: 6243 - protein, 39 aa, Artificial Sequence
  GFR-binding peptide
  MOD_RES (3)..(4)..(38): Xaa is C or S
  MOD_RES (18)..(19)..(20)..(21)..(22): Xaa is A or G
  MOD_RES (23)..(24)..(25)..(26): Xaa is A or G or is absent
KAXXVPTELSAISMLYLXXXXXXXXXLKNYQDMVVEGXG

SEQ ID NO: 6244 - protein, 38 aa, Artificial Sequence
  GFR-binding peptide
  MOD_RES (1)..(38): Xaa is C or S
XRPTQVQLSATSVLYYEIVRKKPIFLRKHRTLEDHLAX

SEQ ID NO: 6245 - protein, 37 aa, Artificial Sequence
  GFR-binding peptide
  MOD_RES (4)..(5)..(37): Xaa is C or S
PKPXXAPTQLSAISVLYLDDSSNVILKNYQNMVVRAX

SEQ ID NO: 6246 - protein, 39 aa, Artificial Sequence
  GFR-binding peptide
  MOD_RES (6)..(7): Xaa is C or S
  MOD_RES (21)..(22)..(23)..(24)..(25): Xaa is A or G
  MOD_RES (26)..(27)..(28)..(29): Xaa is A or G or is absent
ASASPXXVPQDLSPISILYKXXXXXXXXXLKYHYMVVKS

SEQ ID NO: 6247 - protein, 30 aa, Artificial Sequence
  GFR-binding peptide
VPQALSATSILYYVGRKPKVLRKHRMIVRS

SEQ ID NO: 6248 - protein, 41 aa, Artificial Sequence
  GFR-binding peptide
  MOD_RES (5)..(39)..(41): Xaa is C or S
  MOD_RES (19)..(20)..(21)..(22)..(23): Xaa is A or G
  MOD_RES (24)..(25)..(26)..(27): Xaa is A or G or is absent
TKPTXAPTKLSAISVLYLXXXXXXXXXLKNYQNMVVRSXGX

SEQ ID NO: 6249 - protein, 34 aa, Artificial Sequence
  GFR-binding peptide
  MOD_RES (3)..(4): Xaa is C or S
SPXXVSQDLSAISILYLIGKTPKILKNYQMIVKS

SEQ ID NO: 6250 - protein, 43 aa, Artificial Sequence
  GFR-binding peptide
  MOD_RES (4)..(41)..(43): Xaa is C or S
  MOD_RES (20)..(21)..(22)..(23)..(24): Xaa is A or G
  MOD_RES (25)..(26)..(27)..(28): Xaa is A or G or is absent
NVQXRPTQVQLSATSVLYYXXXXXXXXXLRKHRTLEDHLAXKX

SEQ ID NO: 6251 - protein, 39 aa, Artificial Sequence
  GFR-binding peptide
  MOD_RES (6)..(7): Xaa is C or S
  MOD_RES (21)..(22)..(23)..(24)..(25): Xaa is A or G
  MOD_RES (26)..(27)..(28)..(29): Xaa is A or G or is absent
AVPKAXXAPTKLSATSVLYYXXXXXXXXXLRKHRNMVVK

SEQ ID NO: 6252 - protein, 35 aa, Artificial Sequence
  GFR-binding peptide
  MOD_RES (34)..(34): Xaa is C or S
  MOD_RES (14)..(15)..(16)..(17)..(18): Xaa is A or G
  MOD_RES (19)..(20)..(21)..(22): Xaa is A or G or is absent
VPTELSATSMLYYXXXXXXXXXLRKHREMVVEGXG

SEQ ID NO: 6253 - protein, 43 aa, Artificial Sequence
  GFR-binding peptide
  MOD_RES (5)..(6)..(40)..(42): Xaa is C or S
  MOD_RES (20)..(21)..(22)..(23)..(24): Xaa is A or G
  MOD_RES (25)..(26)..(27)..(28): Xaa is A or G or is absent
VPKPXXAPTKLSPISVLYKXXXXXXXXXLKYHYNMVVRSXGXH

SEQ ID NO: 6254 - protein, 38 aa, Artificial Sequence
  GFR-binding peptide
  MOD_RES (4)..(5): Xaa is C or S
  MOD_RES (19)..(20)..(21)..(22)..(23): Xaa is A or G
  MOD_RES (24)..(25)..(26)..(27): Xaa is A or G or is absent
PKPXXAPTKLSAISVLYLXXXXXXXXXLKNYQNMVVRS

SEQ ID NO: 6255 - protein, 33 aa, Artificial Sequence
  GFR-binding peptide
  MOD_RES (1)..(32): Xaa is C or S
XVSQDLSPISILYKIGKTPKILKYHYMIVKSXK

SEQ ID NO: 6256 - protein, 42 aa, Artificial Sequence
  GFR-binding peptide
  MOD_RES (5)..(6)..(40)..(42): Xaa is C or S
  MOD_RES (20)..(21)..(22)..(23)..(24): Xaa is A or G
  MOD_RES (25)..(26)..(27)..(28): Xaa is A or G or is absent
VPKAXXAPTKLSAISVLYLXXXXXXXXXLKNYQNMVVKAXGX

SEQ ID NO: 6257 - protein, 36 aa, Artificial Sequence
  GFR-binding peptide
  MOD_RES (1)..(1): Xaa is C or S
XRPTQVQLSPISVLYKEIVRKKPIFLKYHYTLEDHL

SEQ ID NO: 6258 - protein, 43 aa, Artificial Sequence
  GFR-binding peptide
  MOD_RES (5)..(6)..(40)..(42): Xaa is C or S
  MOD_RES (20)..(21)..(22)..(23)..(24): Xaa is A or G
  MOD_RES (25)..(26)..(27)..(28): Xaa is A or G or is absent
IPKAXXVPTELSATSMLYYXXXXXXXXXLRKHRDMVVEGXGXR

SEQ ID NO: 6259 - protein, 34 aa, Artificial Sequence
  GFR-binding peptide
  MOD_RES (1)..(34): Xaa is C or S
  MOD_RES (15)..(16)..(17)..(18)..(19): Xaa is A or G
  MOD_RES (20)..(21)..(22)..(23): Xaa is A or G or is absent
XVPQDLNAISILYFXXXXXXXXXLKKYRMVVKSX

SEQ ID NO: 6260 - protein, 43 aa, Artificial Sequence
  GFR-binding peptide
  MOD_RES (5)..(6)..(40)..(42): Xaa is C or S
  MOD_RES (20)..(21)..(22)..(23)..(24): Xaa is A or G
  MOD_RES (25)..(26)..(27)..(28): Xaa is A or G or is absent
VPKPXXAPTQLNAISVLYFXXXXXXXXXLKKYRNMVVRAXGXH

SEQ ID NO: 6261 - protein, 33 aa, Artificial Sequence
  GFR-binding peptide
  MOD_RES (1)..(1): Xaa is C or S
  MOD_RES (15)..(16)..(17)..(18)..(19): Xaa is A or G
  MOD_RES (20)..(21)..(22)..(23): Xaa is A or G or is absent
XVPQALNAISILYFXXXXXXXXXLKKYRMIVRS

SEQ ID NO: 6262 - protein, 38 aa, Artificial Sequence
  GFR-binding peptide
  MOD_RES (4)..(5)..(38): Xaa is C or S
  MOD_RES (19)..(20)..(21)..(22)..(23): Xaa is A or G
  MOD_RES (24)..(25)..(26)..(27): Xaa is A or G or is absent
ASPXXVPQDLNAISILYFXXXXXXXXXLKKYRMVVKSX

SEQ ID NO: 6263 - protein, 37 aa, Artificial Sequence
  GFR-binding peptide
  MOD_RES (1)..(35)..(37): Xaa is C or S
  MOD_RES (15)..(16)..(17)..(18)..(19): Xaa is A or G
  MOD_RES (20)..(21)..(22)..(23): Xaa is A or G or is absent
XVPTELNAISMLYFXXXXXXXXXLKKYREMVVEGXGX

SEQ ID NO: 6264 - protein, 39 aa, Artificial Sequence
  GFR-binding peptide
  MOD_RES (3)..(4)..(38): Xaa is C or S
  MOD_RES (18)..(19)..(20)..(21)..(22): Xaa is A or G
  MOD_RES (23)..(24)..(25)..(26): Xaa is A or G or is absent
KAXXAPTKLSATSVLYYXXXXXXXXXLRKHRNMVVKAXG

SEQ ID NO: 6265 - protein, 34 aa, Artificial Sequence
  GFR-binding peptide
  MOD_RES (1)..(2)..(34): Xaa is C or S
XXAPTKLSAISVLYLDDSSNVILKNYQNMVVRSX

SEQ ID NO: 6266 - protein, 39 aa, Artificial Sequence
  GFR-binding peptide
  MOD_RES (6)..(7): Xaa is C or S
  MOD_RES (21)..(22)..(23)..(24)..(25): Xaa is A or G
  MOD_RES (26)..(27)..(28)..(29): Xaa is A or G or is absent
ASAAPXXVPQALNAISILYFXXXXXXXXXLKKYRMIVRS

SEQ ID NO: 6267 - protein, 41 aa, Artificial Sequence
  GFR-binding peptide
  MOD_RES (4)..(5)..(38)..(40): Xaa is C or S
  MOD_RES (19)..(20)..(21)..(22)..(23): Xaa is A or G
  MOD_RES (24)..(25)..(26)..(27): Xaa is A or G or is absent
AAPXXVPQALSAISILYLXXXXXXXXXLKNYQMIVRSXKXS

SEQ ID NO: 6268 - protein, 42 aa, Artificial Sequence
  GFR-binding peptide
  MOD_RES (3)..(40)..(42): Xaa is C or S
VQXRPTQVQLNAISVLYFEIVRKKPIFLKKYRTLEDHLAXKX

SEQ ID NO: 6269 - protein, 33 aa, Artificial Sequence
  GFR-binding peptide
PTQVQLSATSVLYYEIVRKKPIFLRKHRTLEDH

SEQ ID NO: 6270 - protein, 35 aa, Artificial Sequence
  GFR-binding peptide
  MOD_RES (1)..(2): Xaa is C or S
  MOD_RES (16)..(17)..(18)..(19)..(20): Xaa is A or G
  MOD_RES (21)..(22)..(23)..(24): Xaa is A or G or is absent
XXAPTKLSAISVLYLXXXXXXXXXLKNYQNMVVRS

SEQ ID NO: 6271 - protein, 33 aa, Artificial Sequence
  GFR-binding peptide
  MOD_RES (32)..(32): Xaa is C or S
APTQLSATSVLYYDDSSNVILRKHRNMVVRAXG

SEQ ID NO: 6272 - protein, 37 aa, Artificial Sequence
  GFR-binding peptide
  MOD_RES (5)..(6): Xaa is C or S
IPKAXXVPTELSPISMLYKDEYDKVVLKYHYEMVVEG

SEQ ID NO: 6273 - protein, 35 aa, Artificial Sequence
  GFR-binding peptide
  MOD_RES (15)..(16)..(17)..(18)..(19): Xaa is A or G
  MOD_RES (20)..(21)..(22)..(23): Xaa is A or G or is absent
PTQVQLSAISVLYLXXXXXXXXXLKNYQTLEDHLA

SEQ ID NO: 6274 - protein, 39 aa, Artificial Sequence
  GFR-binding peptide
  MOD_RES (36)..(38): Xaa is C or S
  MOD_RES (15)..(16)..(17)..(18)..(19): Xaa is A or G
  MOD_RES (20)..(21)..(22)..(23): Xaa is A or G or is absent
PTQVQLSATSVLYYXXXXXXXXXLRKHRTLEDHLAXKXE

SEQ ID NO: 6275 - protein, 34 aa, Artificial Sequence
  GFR-binding peptide
RPTQVQLNAISVLYFEIVRKKPIFLKKYRTLEDH

SEQ ID NO: 6276 - protein, 38 aa, Artificial Sequence
  GFR-binding peptide
  MOD_RES (5)..(6)..(38): Xaa is C or S
VPKAXXAPTKLSPISVLYKDSSNNVILKYHYNMVVKAX

SEQ ID NO: 6277 - protein, 37 aa, Artificial Sequence
  GFR-binding peptide
  MOD_RES (35)..(37): Xaa is C or S
  MOD_RES (14)..(15)..(16)..(17)..(18): Xaa is A or G
  MOD_RES (19)..(20)..(21)..(22): Xaa is A or G or is absent
TQVQLSPISVLYKXXXXXXXXXLKYHYTLEDHLAXKX

SEQ ID NO: 6278 - protein, 39 aa, Artificial Sequence
  GFR-binding peptide
  MOD_RES (5)..(6)..(38): Xaa is C or S
VPKPXXAPTKLSATSVLYYDDSSNVILRKHRNMVVRSXG

SEQ ID NO: 6279 - protein, 37 aa, Artificial Sequence
  GFR-binding peptide
  MOD_RES (1)..(34)..(36): Xaa is C or S
XVPTKLSATSVLYYDDMGVPTLRKHREGMSVAEXGXR

SEQ ID NO: 6280 - protein, 42 aa, Artificial Sequence
  GFR-binding peptide
  MOD_RES (4)..(5)..(39)..(41): Xaa is C or S
  MOD_RES (19)..(20)..(21)..(22)..(23): Xaa is A or G
  MOD_RES (24)..(25)..(26)..(27): Xaa is A or G or is absent
PKPXXAPTKLSAISVLYLXXXXXXXXXLKNYQNMVVRSXGXH

SEQ ID NO: 6281 - protein, 38 aa, Artificial Sequence
  GFR-binding peptide
  MOD_RES (1)..(2)..(36)..(38): Xaa is C or S
  MOD_RES (16)..(17)..(18)..(19)..(20): Xaa is A or G
  MOD_RES (21)..(22)..(23)..(24): Xaa is A or G or is absent
XXVPTELSPISMLYKXXXXXXXXXLKYHYDMVVEGXGX

SEQ ID NO: 6282 - protein, 39 aa, Artificial Sequence
  GFR-binding peptide
  MOD_RES (3)..(4)..(38): Xaa is C or S
  MOD_RES (18)..(19)..(20)..(21)..(22): Xaa is A or G
  MOD_RES (23)..(24)..(25)..(26): Xaa is A or G or is absent
KAXXAPTKLNAISVLYFXXXXXXXXXLKKYRNMVVKAXG

SEQ ID NO: 6283 - protein, 38 aa, Artificial Sequence
  GFR-binding peptide
  MOD_RES (1)..(2)..(36)..(38): Xaa is C or S
  MOD_RES (16)..(17)..(18)..(19)..(20): Xaa is A or G
  MOD_RES (21)..(22)..(23)..(24): Xaa is A or G or is absent
XXVPTELSAISMLYLXXXXXXXXXLKNYQEMVVEGXGX

SEQ ID NO: 6284 - protein, 42 aa, Artificial Sequence
  GFR-binding peptide
  MOD_RES (6)..(7)..(41): Xaa is C or S
  MOD_RES (21)..(22)..(23)..(24)..(25): Xaa is A or G
  MOD_RES (26)..(27)..(28)..(29): Xaa is A or G or is absent
KIPKAXXVPTELSPISMLYKXXXXXXXXXLKYHYDMVVEGXG

SEQ ID NO: 6285 - protein, 37 aa, Artificial Sequence
  GFR-binding peptide
  MOD_RES (6)..(7): Xaa is C or S
TVPKPXXAPTQLSPISVLYKDDSSNVILKYHYNMVVR

SEQ ID NO: 6286 - protein, 36 aa, Artificial Sequence
  GFR-binding peptide
  MOD_RES (2)..(3)..(34)..(36): Xaa is C or S
PXXVPQDLSPISILYKVGRTPKVLKYHYMVVKSXKX

SEQ ID NO: 6287 - protein, 34 aa, Artificial Sequence
  GFR-binding peptide
  MOD_RES (1)..(2): Xaa is C or S
  MOD_RES (16)..(17)..(18)..(19)..(20): Xaa is A or G
  MOD_RES (21)..(22)..(23)..(24): Xaa is A or G or is absent
XXVSQDLSAISILYLXXXXXXXXXLKNYQMIVKS

SEQ ID NO: 6288 - protein, 44 aa, Artificial Sequence
  GFR-binding peptide
  MOD_RES (6)..(7)..(42)..(44): Xaa is C or S
  MOD_RES (21)..(22)..(23)..(24)..(25): Xaa is A or G
  MOD_RES (26)..(27)..(28)..(29): Xaa is A or G or is absent
KVGKAXXVPTKLNAISVLYFXXXXXXXXXLKKYREGMSVAEXGX

SEQ ID NO: 6289 - protein, 39 aa, Artificial Sequence
  GFR-binding peptide
  MOD_RES (2)..(3)..(37)..(39): Xaa is C or S
  MOD_RES (17)..(18)..(19)..(20)..(21): Xaa is A or G
  MOD_RES (22)..(23)..(24)..(25): Xaa is A or G or is absent
PXXAPTKLNAISVLYFXXXXXXXXXLKKYRNMVVRSXGX

SEQ ID NO: 6290 - protein, 35 aa, Artificial Sequence
  GFR-binding peptide
  MOD_RES (3)..(4)..(35): Xaa is C or S
SPXXVSQDLNAISILYFIGKTPKILKKYRMIVKSX

SEQ ID NO: 6291 - protein, 40 aa, Artificial Sequence
  GFR-binding peptide
  MOD_RES (2)..(3)..(38)..(40): Xaa is C or S
  MOD_RES (17)..(18)..(19)..(20)..(21): Xaa is A or G
  MOD_RES (22)..(23)..(24)..(25): Xaa is A or G or is absent
AXXVPTKLSPISVLYKXXXXXXXXXLKYHYEGMSVAEXGX

SEQ ID NO: 6292 - protein, 40 aa, Artificial Sequence
  GFR-binding peptide
  MOD_RES (5)..(5): Xaa is C or S
RNVQXRPTQVQLSPISVLYKEIVRKKPIFLKYHYTLEDHL

SEQ ID NO: 6293 - protein, 35 aa, Artificial Sequence
  GFR-binding peptide
  MOD_RES (1)..(33)..(35): Xaa is C or S
XVPTELSPISMLYKDENEKVVLKYHYDMVVEGXGX

SEQ ID NO: 6294 - protein, 41 aa, Artificial Sequence
  GFR-binding peptide
  MOD_RES (5)..(6)..(40): Xaa is C or S
  MOD_RES (20)..(21)..(22)..(23)..(24): Xaa is A or G
  MOD_RES (25)..(26)..(27)..(28): Xaa is A or G or is absent
IPKAXXVPTELNAISMLYFXXXXXXXXXLKKYRDMVVEGXG

SEQ ID NO: 6295 - protein, 39 aa, Artificial Sequence
  GFR-binding peptide
  MOD_RES (2)..(3)..(37)..(39): Xaa is C or S
  MOD_RES (17)..(18)..(19)..(20)..(21): Xaa is A or G
  MOD_RES (22)..(23)..(24)..(25): Xaa is A or G or is absent
AXXVPTELSATSMLYYXXXXXXXXXLRKHREMVVEGXGX

SEQ ID NO: 6296 - protein, 38 aa, Artificial Sequence
  GFR-binding peptide
  MOD_RES (2)..(2): Xaa is C or S
QXRPTQVQLNAISVLYFEIVRKKPIFLKKYRTLEDHLA

SEQ ID NO: 6297 - protein, 35 aa, Artificial Sequence
  GFR-binding peptide
  MOD_RES (2)..(3): Xaa is C or S
  MOD_RES (17)..(18)..(19)..(20)..(21): Xaa is A or G
  MOD_RES (22)..(23)..(24)..(25): Xaa is A or G or is absent
PXXVPQALSATSILYYXXXXXXXXXLRKHRMIVRS

SEQ ID NO: 6298 - protein, 36 aa, Artificial Sequence
  GFR-binding peptide
  MOD_RES (2)..(3)..(36): Xaa is C or S
  MOD_RES (17)..(18)..(19)..(20)..(21): Xaa is A or G
  MOD_RES (22)..(23)..(24)..(25): Xaa is A or G or is absent
PXXVSQDLNAISILYFXXXXXXXXXLKKYRMIVKSX

SEQ ID NO: 6299 - protein, 37 aa, Artificial Sequence
  GFR-binding peptide
  MOD_RES (1)..(35)..(37): Xaa is C or S
  MOD_RES (15)..(16)..(17)..(18)..(19): Xaa is A or G
  MOD_RES (20)..(21)..(22)..(23): Xaa is A or G or is absent
XAPTKLNAISVLYFXXXXXXXXXLKKYRNMVVRSXGX

SEQ ID NO: 6300 - protein, 34 aa, Artificial Sequence
  GFR-binding peptide
  MOD_RES (2)..(3)..(34): Xaa is C or S
PXXVSQDLSATSILYYIGKTPKILRKHRMIVKSX

SEQ ID NO: 6301 - protein, 41 aa, Artificial Sequence
  GFR-binding peptide
  MOD_RES (6)..(7)..(39)..(41): Xaa is C or S
TVPKPXXAPTQLSPISVLYKDDSSNVILKYHYNMVVRAXGX

SEQ ID NO: 6302 - protein, 38 aa, Artificial Sequence
  GFR-binding peptide
  MOD_RES (2)..(3)..(35)..(37): Xaa is C or S
AXXAPTKLNAISVLYFDSSNNVILKKYRNMVVKAXGXH

SEQ ID NO: 6303 - protein, 34 aa, Artificial Sequence
  GFR-binding peptide
  MOD_RES (1)..(2): Xaa is C or S
  MOD_RES (16)..(17)..(18)..(19)..(20): Xaa is A or G
  MOD_RES (21)..(22)..(23)..(24): Xaa is A or G or is absent
XXAPTKLSAISVLYLXXXXXXXXXLKNYQNMVVK

SEQ ID NO: 6304 - protein, 36 aa, Artificial Sequence
  GFR-binding peptide
  MOD_RES (2)..(3)..(35): Xaa is C or S
PXXAPTQLSATSVLYYDDSSNVILRKHRNMVVRAXG

SEQ ID NO: 6305 - protein, 40 aa, Artificial Sequence
  GFR-binding peptide
  MOD_RES (4)..(5)..(37)..(39): Xaa is C or S
PKPXXAPTQLSPISVLYKDDSSNVILKYHYNMVVRAXGXH

SEQ ID NO: 6306 - protein, 39 aa, Artificial Sequence
  GFR-binding peptide
  MOD_RES (1)..(2)..(36)..(38): Xaa is C or S
  MOD_RES (16)..(17)..(18)..(19)..(20): Xaa is A or G
  MOD_RES (21)..(22)..(23)..(24): Xaa is A or G or is absent
XXAPTQLNAISVLYFXXXXXXXXXLKKYRNMVVRAXGXH

SEQ ID NO: 6307 - protein, 38 aa, Artificial Sequence
  GFR-binding peptide
  MOD_RES (5)..(6): Xaa is C or S
  MOD_RES (20)..(21)..(22)..(23)..(24): Xaa is A or G
  MOD_RES (25)..(26)..(27)..(28): Xaa is A or G or is absent
SASPXXVSQDLNAISILYFXXXXXXXXXLKKYRMIVKS

SEQ ID NO: 6308 - protein, 34 aa, Artificial Sequence
  GFR-binding peptide
  MOD_RES (1)..(2): Xaa is C or S
  MOD_RES (16)..(17)..(18)..(19)..(20): Xaa is A or G
  MOD_RES (21)..(22)..(23)..(24): Xaa is A or G or is absent
XXAPTKLSAISVLYLXXXXXXXXXLKNYQNMVVR

SEQ ID NO: 6309 - protein, 32 aa, Artificial Sequence
  GFR-binding peptide
  MOD_RES (2)..(2): Xaa is C or S
TXAPTKLSAISVLYLDDSSNVILKNYQNMVVR

SEQ ID NO: 6310 - protein, 34 aa, Artificial Sequence
  GFR-binding peptide
  MOD_RES (3)..(4): Xaa is C or S
SPXXVSQDLSPISILYKIGKTPKILKYHYMIVKS

SEQ ID NO: 6311 - protein, 38 aa, Artificial Sequence
  GFR-binding peptide
  MOD_RES (2)..(3)..(35)..(37): Xaa is C or S
AXXVPTELSPISMLYKDENEKVVLKYHYDMVVEGXGXR

SEQ ID NO: 6312 - protein, 36 aa, Artificial Sequence
  GFR-binding peptide
  MOD_RES (1)..(2)..(35): Xaa is C or S
  MOD_RES (16)..(17)..(18)..(19)..(20): Xaa is A or G
  MOD_RES (21)..(22)..(23)..(24): Xaa is A or G or is absent
XXVSQDLSATSILYYXXXXXXXXXLRKHRMIVKSXK

SEQ ID NO: 6313 - protein, 41 aa, Artificial Sequence
  GFR-binding peptide
  MOD_RES (5)..(5): Xaa is C or S
RNVQXRPTQVQLSATSVLYYEIVRKKPIFLRKHRTLEDHLA

SEQ ID NO: 6314 - protein, 39 aa, Artificial Sequence
  GFR-binding peptide
  MOD_RES (4)..(5)..(37)..(39): Xaa is C or S
PKPXXAPTQLSPISVLYKDDSSNVILKYHYNMVVRAXGX

SEQ ID NO: 6315 - protein, 36 aa, Artificial Sequence
  GFR-binding peptide
  MOD_RES (2)..(2): Xaa is C or S
QXRPTQVQLSPISVLYKEIVRKKPIFLKYHYTLEDH

SEQ ID NO: 6316 - protein, 38 aa, Artificial Sequence
  GFR-binding peptide
  MOD_RES (5)..(6)..(38): Xaa is C or S
VPKPXXAPTQLSPISVLYKDDSSNVILKYHYNMVVRAX

SEQ ID NO: 6317 - protein, 36 aa, Artificial Sequence
  GFR-binding peptide
  MOD_RES (4)..(5)..(36): Xaa is C or S
ASPXXVSQDLNAISILYFIGKTPKILKKYRMIVKSX

SEQ ID NO: 6318 - protein, 37 aa, Artificial Sequence
  GFR-binding peptide
  MOD_RES (3)..(4)..(35)..(37): Xaa is C or S
SPXXVPQDLSATSILYYVGRTPKVLRKHRMVVKSXKX

SEQ ID NO: 6319 - protein, 40 aa, Artificial Sequence
  GFR-binding peptide
  MOD_RES (4)..(5)..(37)..(39): Xaa is C or S
PKAXXVPTELSPISMLYKDEYDKVVLKYHYEMVVEGXGXR

SEQ ID NO: 6320 - protein, 44 aa, Artificial Sequence
  GFR-binding peptide
  MOD_RES (5)..(42)..(44): Xaa is C or S
  MOD_RES (21)..(22)..(23)..(24)..(25): Xaa is A or G
  MOD_RES (26)..(27)..(28)..(29): Xaa is A or G or is absent
RNVQXRPTQVQLSAISVLYLXXXXXXXXXLKNYQTLEDHLAXKX

SEQ ID NO: 6321 - protein, 41 aa, Artificial Sequence
  GFR-binding peptide
  MOD_RES (4)..(41): Xaa is C or S
NVQXRPTQVQLNAISVLYFEIVRKKPIFLKKYRTLEDHLAX

SEQ ID NO: 6322 - protein, 37 aa, Artificial Sequence
  GFR-binding peptide
  MOD_RES (2)..(3)..(37): Xaa is C or S
  MOD_RES (17)..(18)..(19)..(20)..(21): Xaa is A or G
  MOD_RES (22)..(23)..(24)..(25): Xaa is A or G or is absent
AXXVPTELSAISMLYLXXXXXXXXXLKNYQDMVVEGX

SEQ ID NO: 6323 - protein, 35 aa, Artificial Sequence
  GFR-binding peptide
  MOD_RES (1)..(34): Xaa is C or S
  MOD_RES (15)..(16)..(17)..(18)..(19): Xaa is A or G
  MOD_RES (20)..(21)..(22)..(23): Xaa is A or G or is absent
XVSQDLSAISILYLXXXXXXXXXLKNYQMIVKSXK

SEQ ID NO: 6324 - protein, 35 aa, Artificial Sequence
  GFR-binding peptide
  MOD_RES (1)..(34): Xaa is C or S
  MOD_RES (15)..(16)..(17)..(18)..(19): Xaa is A or G
  MOD_RES (20)..(21)..(22)..(23): Xaa is A or G or is absent
XVPQDLSATSILYYXXXXXXXXXLRKHRMVVKSXK

SEQ ID NO: 6325 - protein, 35 aa, Artificial Sequence
  GFR-binding peptide
  MOD_RES (34)..(34): Xaa is C or S
  MOD_RES (14)..(15)..(16)..(17)..(18): Xaa is A or G
  MOD_RES (19)..(20)..(21)..(22): Xaa is A or G or is absent
VPTELNAISMLYFXXXXXXXXXLKKYREMVVEGXG

SEQ ID NO: 6326 - protein, 36 aa, Artificial Sequence
  GFR-binding peptide
  MOD_RES (3)..(4)..(36): Xaa is C or S
KAXXVPTELSPISMLYKDEYDKVVLKYHYEMVVEGX

SEQ ID NO: 6327 - protein, 32 aa, Artificial Sequence
  GFR-binding peptide
  MOD_RES (1)..(1): Xaa is C or S
XAPTKLSPISVLYKDSSNNVILKYHYNMVVKA

SEQ ID NO: 6328 - protein, 37 aa, Artificial Sequence
  GFR-binding peptide
  MOD_RES (1)..(2)..(34)..(36): Xaa is C or S
XXVPTELSATSMLYYDEYDKVVLRKHREMVVEGXGXR

SEQ ID NO: 6329 - protein, 41 aa, Artificial Sequence
  GFR-binding peptide
  MOD_RES (5)..(5): Xaa is C or S
RNVQXRPTQVQLSAISVLYLEIVRKKPIFLKNYQTLEDHLA

SEQ ID NO: 6330 - protein, 40 aa, Artificial Sequence
  GFR-binding peptide
  MOD_RES (6)..(7): Xaa is C or S
  MOD_RES (21)..(22)..(23)..(24)..(25): Xaa is A or G
  MOD_RES (26)..(27)..(28)..(29): Xaa is A or G or is absent
SIPKAXXVPTELSATSMLYYXXXXXXXXXLRKHREMVVEG

SEQ ID NO: 6331 - protein, 35 aa, Artificial Sequence
  GFR-binding peptide
  MOD_RES (2)..(3)..(35): Xaa is C or S
PXXAPTQLSATSVLYYDDSSNVILRKHRNMVVRAX

SEQ ID NO: 6332 - protein, 37 aa, Artificial Sequence
  GFR-binding peptide
  MOD_RES (1)..(2)..(36): Xaa is C or S
  MOD_RES (16)..(17)..(18)..(19)..(20): Xaa is A or G
  MOD_RES (21)..(22)..(23)..(24): Xaa is A or G or is absent
XXVPTELSPISMLYKXXXXXXXXXLKYHYEMVVEGXG

SEQ ID NO: 6333 - protein, 36 aa, Artificial Sequence
  GFR-binding peptide
  MOD_RES (36)..(36): Xaa is C or S
  MOD_RES (15)..(16)..(17)..(18)..(19): Xaa is A or G
  MOD_RES (20)..(21)..(22)..(23): Xaa is A or G or is absent
PTQVQLSPISVLYKXXXXXXXXXLKYHYTLEDHLAX

SEQ ID NO: 6334 - protein, 42 aa, Artificial Sequence
  GFR-binding peptide
  MOD_RES (5)..(6)..(40)..(42): Xaa is C or S
  MOD_RES (20)..(21)..(22)..(23)..(24): Xaa is A or G
  MOD_RES (25)..(26)..(27)..(28): Xaa is A or G or is absent
VPKPXXAPTKLNAISVLYFXXXXXXXXXLKKYRNMVVRSXGX

SEQ ID NO: 6335 - protein, 42 aa, Artificial Sequence
  GFR-binding peptide
  MOD_RES (4)..(41): Xaa is C or S
  MOD_RES (20)..(21)..(22)..(23)..(24): Xaa is A or G
  MOD_RES (25)..(26)..(27)..(28): Xaa is A or G or is absent
NVQXRPTQVQLSAISVLYLXXXXXXXXXLKNYQTLEDHLAXK

SEQ ID NO: 6336 - protein, 41 aa, Artificial Sequence
  GFR-binding peptide
  MOD_RES (5)..(6)..(40): Xaa is C or S
  MOD_RES (20)..(21)..(22)..(23)..(24): Xaa is A or G
  MOD_RES (25)..(26)..(27)..(28): Xaa is A or G or is absent
IPKAXXVPTELSATSMLYYXXXXXXXXXLRKHRDMVVEGXG

SEQ ID NO: 6337 - protein, 34 aa, Artificial Sequence
  GFR-binding peptide
  MOD_RES (1)..(32)..(34): Xaa is C or S
XVPQALSAISILYLVGRKPKVLKNYQMIVRSXKX

SEQ ID NO: 6338 - protein, 33 aa, Artificial Sequence
  GFR-binding peptide
  MOD_RES (2)..(3): Xaa is C or S
AXXVPTELNAISMLYFDENEKVVLKKYRDMVVE

SEQ ID NO: 6339 - protein, 36 aa, Artificial Sequence
  GFR-binding peptide
  MOD_RES (3)..(4): Xaa is C or S
KAXXVPTKLSATSVLYYDDMGVPTLRKHREGMSVAE

SEQ ID NO: 6340 - protein, 32 aa, Artificial Sequence
  GFR-binding peptide
  MOD_RES (14)..(15)..(16)..(17)..(18): Xaa is A or G
  MOD_RES (19)..(20)..(21)..(22): Xaa is A or G or is absent
TQVQLSPISVLYKXXXXXXXXXLKYHYTLEDH

SEQ ID NO: 6341 - protein, 35 aa, Artificial Sequence
  GFR-binding peptide
  MOD_RES (4)..(5): Xaa is C or S
PKAXXVPTELSATSMLYYDEYDKVVLRKHREMVVE

SEQ ID NO: 6342 - protein, 43 aa, Artificial Sequence
  GFR-binding peptide
  MOD_RES (6)..(7)..(40)..(42): Xaa is C or S
  MOD_RES (21)..(22)..(23)..(24)..(25): Xaa is A or G
  MOD_RES (26)..(27)..(28)..(29): Xaa is A or G or is absent
ASAAPXXVPQALSATSILYYXXXXXXXXXLRKHRMIVRSXKXS

SEQ ID NO: 6343 - protein, 37 aa, Artificial Sequence
  GFR-binding peptide
  MOD_RES (36)..(36): Xaa is C or S
PTQVQLSATSVLYYEIVRKKPIFLRKHRTLEDHLAXK

SEQ ID NO: 6344 - protein, 37 aa, Artificial Sequence
  GFR-binding peptide
  MOD_RES (2)..(36): Xaa is C or S
  MOD_RES (16)..(17)..(18)..(19)..(20): Xaa is A or G
  MOD_RES (21)..(22)..(23)..(24): Xaa is A or G or is absent
TXAPTKLSPISVLYKXXXXXXXXXLKYHYNMVVRSXG

SEQ ID NO: 6345 - protein, 39 aa, Artificial Sequence
  GFR-binding peptide
  MOD_RES (4)..(5)..(38): Xaa is C or S
  MOD_RES (19)..(20)..(21)..(22)..(23): Xaa is A or G
  MOD_RES (24)..(25)..(26)..(27): Xaa is A or G or is absent
ASPXXVPQDLSATSILYYXXXXXXXXXLRKHRMVVKSXK

SEQ ID NO: 6346 - protein, 41 aa, Artificial Sequence
  GFR-binding peptide
  MOD_RES (2)..(39)..(41): Xaa is C or S
QXRPTQVQLSPISVLYKEIVRKKPIFLKYHYTLEDHLAXKX

SEQ ID NO: 6347 - protein, 31 aa, Artificial Sequence
  GFR-binding peptide
  MOD_RES (1)..(1): Xaa is C or S
XVPTELNAISMLYFDENEKVVLKKYRDMVVE

SEQ ID NO: 6348 - protein, 33 aa, Artificial Sequence
  GFR-binding peptide
  MOD_RES (2)..(2): Xaa is C or S
TXAPTKLSATSVLYYDDSSNVILRKHRNMVVRS

SEQ ID NO: 6349 - protein, 41 aa, Artificial Sequence
  GFR-binding peptide
  MOD_RES (4)..(5)..(39)..(41): Xaa is C or S
  MOD_RES (19)..(20)..(21)..(22)..(23): Xaa is A or G
  MOD_RES (24)..(25)..(26)..(27): Xaa is A or G or is absent
PKPXXAPTQLSATSVLYYXXXXXXXXXLRKHRNMVVRAXGX

SEQ ID NO: 6350 - protein, 35 aa, Artificial Sequence
  GFR-binding peptide
  MOD_RES (34)..(34): Xaa is C or S
  MOD_RES (14)..(15)..(16)..(17)..(18): Xaa is A or G
  MOD_RES (19)..(20)..(21)..(22): Xaa is A or G or is absent
APTQLSPISVLYKXXXXXXXXXLKYHYNMVVRAXG

SEQ ID NO: 6351 - protein, 38 aa, Artificial Sequence
  GFR-binding peptide
  MOD_RES (5)..(6): Xaa is C or S
  MOD_RES (20)..(21)..(22)..(23)..(24): Xaa is A or G
  MOD_RES (25)..(26)..(27)..(28): Xaa is A or G or is absent
IPKAXXVPTELSAISMLYLXXXXXXXXXLKNYQDMVVE

SEQ ID NO: 6352 - protein, 40 aa, Artificial Sequence
  GFR-binding peptide
  MOD_RES (4)..(5)..(37)..(39): Xaa is C or S
PKAXXVPTELNAISMLYFDENEKVVLKKYRDMVVEGXGXR

SEQ ID NO: 6353 - protein, 34 aa, Artificial Sequence
  GFR-binding peptide
  MOD_RES (32)..(34): Xaa is C or S
APTKLSATSVLYYDDSSNVILRKHRNMVVRSXGX

SEQ ID NO: 6354 - protein, 32 aa, Artificial Sequence
  GFR-binding peptide
  MOD_RES (1)..(2): Xaa is C or S
XXVSQDLSAISILYLIGKTPKILKNYQMIVKS

SEQ ID NO: 6355 - protein, 33 aa, Artificial Sequence
  GFR-binding peptide
  MOD_RES (1)..(1): Xaa is C or S
  MOD_RES (15)..(16)..(17)..(18)..(19): Xaa is A or G
  MOD_RES (20)..(21)..(22)..(23): Xaa is A or G or is absent
XVPTELNAISMLYFXXXXXXXXXLKKYREMVVE

SEQ ID NO: 6356 - protein, 39 aa, Artificial Sequence
  GFR-binding peptide
  MOD_RES (6)..(7): Xaa is C or S
  MOD_RES (21)..(22)..(23)..(24)..(25): Xaa is A or G
  MOD_RES (26)..(27)..(28)..(29): Xaa is A or G or is absent
AVPKAXXAPTKLSPISVLYKXXXXXXXXXLKYHYNMVVK

SEQ ID NO: 6357 - protein, 42 aa, Artificial Sequence
  GFR-binding peptide
  MOD_RES (5)..(42): Xaa is C or S
RNVQXRPTQVQLSPISVLYKEIVRKKPIFLKYHYTLEDHLAX

SEQ ID NO: 6358 - protein, 35 aa, Artificial Sequence
  GFR-binding peptide
  MOD_RES (1)..(1): Xaa is C or S
  MOD_RES (15)..(16)..(17)..(18)..(19): Xaa is A or G
  MOD_RES (20)..(21)..(22)..(23): Xaa is A or G or is absent
XVPTKLSATSVLYYXXXXXXXXXLRKHREGMSVAE

SEQ ID NO: 6359 - protein, 38 aa, Artificial Sequence
  GFR-binding peptide
  MOD_RES (6)..(7)..(38): Xaa is C or S
ASAAPXXVPQALSAISILYLVGRKPKVLKNYQMIVRSX

SEQ ID NO: 6360 - protein, 36 aa, Artificial Sequence
  GFR-binding peptide
  MOD_RES (1)..(35): Xaa is C or S
  MOD_RES (15)..(16)..(17)..(18)..(19): Xaa is A or G
  MOD_RES (20)..(21)..(22)..(23): Xaa is A or G or is absent
XAPTKLSATSVLYYXXXXXXXXXLRKHRNMVVRSXG

SEQ ID NO: 6361 - protein, 33 aa, Artificial Sequence
  GFR-binding peptide
  MOD_RES (1)..(1): Xaa is C or S
  MOD_RES (15)..(16)..(17)..(18)..(19): Xaa is A or G
  MOD_RES (20)..(21)..(22)..(23): Xaa is A or G or is absent
XVPQDLSAISILYLXXXXXXXXXLKNYQMVVKS

SEQ ID NO: 6362 - protein, 35 aa, Artificial Sequence
  GFR-binding peptide
  MOD_RES (1)..(1): Xaa is C or S
  MOD_RES (15)..(16)..(17)..(18)..(19): Xaa is A or G
  MOD_RES (20)..(21)..(22)..(23): Xaa is A or G or is absent
XVPTKLSAISVLYLXXXXXXXXXLKNYQEGMSVAE

SEQ ID NO: 6363 - protein, 32 aa, Artificial Sequence
  GFR-binding peptide
  MOD_RES (1)..(32): Xaa is C or S
XVPQALSAISILYLVGRKPKVLKNYQMIVRSX

SEQ ID NO: 6364 - protein, 41 aa, Artificial Sequence
  GFR-binding peptide
  MOD_RES (3)..(40): Xaa is C or S
  MOD_RES (19)..(20)..(21)..(22)..(23): Xaa is A or G
  MOD_RES (24)..(25)..(26)..(27): Xaa is A or G or is absent
VQXRPTQVQLSPISVLYKXXXXXXXXXLKYHYTLEDHLAXK

SEQ ID NO: 6365 - protein, 39 aa, Artificial Sequence
  GFR-binding peptide
  MOD_RES (6)..(7): Xaa is C or S
  MOD_RES (21)..(22)..(23)..(24)..(25): Xaa is A or G
  MOD_RES (26)..(27)..(28)..(29): Xaa is A or G or is absent
TVPKPXXAPTQLSPISVLYKXXXXXXXXXLKYHYNMVVR

SEQ ID NO: 6366 - protein, 40 aa, Artificial Sequence
  GFR-binding peptide
  MOD_RES (2)..(3)..(38)..(40): Xaa is C or S
  MOD_RES (17)..(18)..(19)..(20)..(21): Xaa is A or G
  MOD_RES (22)..(23)..(24)..(25): Xaa is A or G or is absent
AXXVPTKLSATSVLYYXXXXXXXXXLRKHREGMSVAEXGX

SEQ ID NO: 6367 - protein, 32 aa, Artificial Sequence
  GFR-binding peptide
  MOD_RES (14)..(15)..(16)..(17)..(18): Xaa is A or G
  MOD_RES (19)..(20)..(21)..(22): Xaa is A or G or is absent
APTQLNAISVLYFXXXXXXXXXLKKYRNMVVR

SEQ ID NO: 6368 - protein, 35 aa, Artificial Sequence
  GFR-binding peptide
  MOD_RES (1)..(2): Xaa is C or S
  MOD_RES (16)..(17)..(18)..(19)..(20): Xaa is A or G
  MOD_RES (21)..(22)..(23)..(24): Xaa is A or G or is absent
XXAPTKLSAISVLYLXXXXXXXXXLKNYQNMVVKA

SEQ ID NO: 6369 - protein, 37 aa, Artificial Sequence
  GFR-binding peptide
  MOD_RES (5)..(6): Xaa is C or S
VPKPXXAPTKLSPISVLYKDDSSNVILKYHYNMVVRS

SEQ ID NO: 6370 - protein, 43 aa, Artificial Sequence
  GFR-binding peptide
  MOD_RES (4)..(5)..(40)..(42): Xaa is C or S
  MOD_RES (19)..(20)..(21)..(22)..(23): Xaa is A or G
  MOD_RES (24)..(25)..(26)..(27): Xaa is A or G or is absent
GKAXXVPTKLNAISVLYFXXXXXXXXXLKKYREGMSVAEXGXR

SEQ ID NO: 6371 - protein, 31 aa, Artificial Sequence
  GFR-binding peptide
  MOD_RES (31)..(31): Xaa is C or S
VPQDLSAISILYLVGRTPKVLKNYQMVVKSX

SEQ ID NO: 6372 - protein, 40 aa, Artificial Sequence
  GFR-binding peptide
  MOD_RES (6)..(7)..(38)..(40): Xaa is C or S
ASAAPXXVPQALSPISILYKVGRKPKVLKYHYMIVRSXKX

SEQ ID NO: 6373 - protein, 39 aa, Artificial Sequence
  GFR-binding peptide
  MOD_RES (3)..(4)..(38): Xaa is C or S
  MOD_RES (18)..(19)..(20)..(21)..(22): Xaa is A or G
  MOD_RES (23)..(24)..(25)..(26): Xaa is A or G or is absent
KPXXAPTQLNAISVLYFXXXXXXXXXLKKYRNMVVRAXG

SEQ ID NO: 6374 - protein, 38 aa, Artificial Sequence
  GFR-binding peptide
  MOD_RES (35)..(37): Xaa is C or S
  MOD_RES (14)..(15)..(16)..(17)..(18): Xaa is A or G
  MOD_RES (19)..(20)..(21)..(22): Xaa is A or G or is absent
VPTKLNAISVLYFXXXXXXXXXLKKYREGMSVAEXGXR

SEQ ID NO: 6375 - protein, 35 aa, Artificial Sequence
  GFR-binding peptide
  MOD_RES (4)..(5): Xaa is C or S
PKAXXVPTELSPISMLYKDEYDKVVLKYHYEMVVE

SEQ ID NO: 6376 - protein, 36 aa, Artificial Sequence
  GFR-binding peptide
  MOD_RES (3)..(4): Xaa is C or S
  MOD_RES (18)..(19)..(20)..(21)..(22): Xaa is A or G
  MOD_RES (23)..(24)..(25)..(26): Xaa is A or G or is absent
KAXXVPTELSPISMLYKXXXXXXXXXLKYHYEMVVE

SEQ ID NO: 6377 - protein, 37 aa, Artificial Sequence
  GFR-binding peptide
  MOD_RES (2)..(3)..(35)..(37): Xaa is C or S
PXXAPTQLSPISVLYKDDSSNVILKYHYNMVVRAXGX

SEQ ID NO: 6378 - protein, 35 aa, Artificial Sequence
  GFR-binding peptide
  MOD_RES (35)..(35): Xaa is C or S
  MOD_RES (14)..(15)..(16)..(17)..(18): Xaa is A or G
  MOD_RES (19)..(20)..(21)..(22): Xaa is A or G or is absent
VPTKLNAISVLYFXXXXXXXXXLKKYREGMSVAEX

SEQ ID NO: 6379 - protein, 40 aa, Artificial Sequence
  GFR-binding peptide
  MOD_RES (3)..(4)..(37)..(39): Xaa is C or S
  MOD_RES (18)..(19)..(20)..(21)..(22): Xaa is A or G
  MOD_RES (23)..(24)..(25)..(26): Xaa is A or G or is absent
APXXVPQALSAISILYLXXXXXXXXXLKNYQMIVRSXKXS

SEQ ID NO: 6380 - protein, 38 aa, Artificial Sequence
  GFR-binding peptide
  MOD_RES (6)..(7): Xaa is C or S
YVPKPXXAPTKLSAISVLYLDDSSNVILKNYQNMVVRS

SEQ ID NO: 6381 - protein, 39 aa, Artificial Sequence
  GFR-binding peptide
  MOD_RES (4)..(5)..(36)..(38): Xaa is C or S
ASPXXVPQDLNAISILYFVGRTPKVLKKYRMVVKSXKXS

SEQ ID NO: 6382 - protein, 37 aa, Artificial Sequence
  GFR-binding peptide
  MOD_RES (4)..(4): Xaa is C or S
  MOD_RES (18)..(19)..(20)..(21)..(22): Xaa is A or G
  MOD_RES (23)..(24)..(25)..(26): Xaa is A or G or is absent
KPTXAPTKLNAISVLYFXXXXXXXXXLKKYRNMVVRS

SEQ ID NO: 6383 - protein, 39 aa, Artificial Sequence
  GFR-binding peptide
  MOD_RES (5)..(6): Xaa is C or S
  MOD_RES (20)..(21)..(22)..(23)..(24): Xaa is A or G
  MOD_RES (25)..(26)..(27)..(28): Xaa is A or G or is absent
IPKAXXVPTELNAISMLYFXXXXXXXXXLKKYREMVVEG

SEQ ID NO: 6384 - protein, 35 aa, Artificial Sequence
  GFR-binding peptide
  MOD_RES (33)..(35): Xaa is C or S
  MOD_RES (14)..(15)..(16)..(17)..(18): Xaa is A or G
  MOD_RES (19)..(20)..(21)..(22): Xaa is A or G or is absent
VSQDLSAISILYLXXXXXXXXXLKNYQMIVKSXKX

SEQ ID NO: 6385 - protein, 40 aa, Artificial Sequence
  GFR-binding peptide
  MOD_RES (5)..(6)..(37)..(39): Xaa is C or S
SASPXXVPQDLSPISILYKVGRTPKVLKYHYMVVKSXKXS

SEQ ID NO: 6386 - protein, 43 aa, Artificial Sequence
  GFR-binding peptide
  MOD_RES (5)..(6)..(40)..(42): Xaa is C or S
  MOD_RES (20)..(21)..(22)..(23)..(24): Xaa is A or G
  MOD_RES (25)..(26)..(27)..(28): Xaa is A or G or is absent
IPKAXXVPTELSATSMLYYXXXXXXXXXLRKHREMVVEGXGXR

SEQ ID NO: 6387 - protein, 40 aa, Artificial Sequence
  GFR-binding peptide
  MOD_RES (7)..(39): Xaa is C or S
HVTKPTXAPTKLSAISVLYLDDSSNVILKNYQNMVVRSXG

SEQ ID NO: 6388 - protein, 33 aa, Artificial Sequence
  GFR-binding peptide
TQVQLSAISVLYLEIVRKKPIFLKNYQTLEDHL

SEQ ID NO: 6389 - protein, 34 aa, Artificial Sequence
  GFR-binding peptide
  MOD_RES (2)..(3)..(34): Xaa is C or S
PXXVPQALSATSILYYVGRKPKVLRKHRMIVRSX

SEQ ID NO: 6390 - protein, 38 aa, Artificial Sequence
  GFR-binding peptide
  MOD_RES (4)..(5): Xaa is C or S
  MOD_RES (19)..(20)..(21)..(22)..(23): Xaa is A or G
  MOD_RES (24)..(25)..(26)..(27): Xaa is A or G or is absent
PKAXXVPTELSPISMLYKXXXXXXXXXLKYHYEMVVEG

SEQ ID NO: 6391 - protein, 38 aa, Artificial Sequence
  GFR-binding peptide
  MOD_RES (4)..(5)..(37): Xaa is C or S
PKAXXVPTELSPISMLYKDENEKVVLKYHYDMVVEGXG

SEQ ID NO: 6392 - protein, 34 aa, Artificial Sequence
  GFR-binding peptide
  MOD_RES (32)..(34): Xaa is C or S
APTKLSAISVLYLDDSSNVILKNYQNMVVRSXGX

SEQ ID NO: 6393 - protein, 33 aa, Artificial Sequence
  GFR-binding peptide
PTQVQLSPISVLYKEIVRKKPIFLKYHYTLEDH

SEQ ID NO: 6394 - protein, 38 aa, Artificial Sequence
  GFR-binding peptide
  MOD_RES (3)..(4)..(35)..(37): Xaa is C or S
SPXXVPQDLSAISILYLVGRTPKVLKNYQMVVKSXKXS

SEQ ID NO: 6395 - protein, 37 aa, Artificial Sequence
  GFR-binding peptide
  MOD_RES (4)..(5): Xaa is C or S
  MOD_RES (19)..(20)..(21)..(22)..(23): Xaa is A or G
  MOD_RES (24)..(25)..(26)..(27): Xaa is A or G or is absent
PKAXXVPTELSATSMLYYXXXXXXXXXLRKHRDMVVE

SEQ ID NO: 6396 - protein, 34 aa, Artificial Sequence
  GFR-binding peptide
  MOD_RES (31)..(33): Xaa is C or S
VSQDLSPISILYKIGKTPKILKYHYMIVKSXKXS

SEQ ID NO: 6397 - protein, 34 aa, Artificial Sequence
  GFR-binding peptide
  MOD_RES (1)..(1): Xaa is C or S
  MOD_RES (15)..(16)..(17)..(18)..(19): Xaa is A or G
  MOD_RES (20)..(21)..(22)..(23): Xaa is A or G or is absent
XAPTQLSATSVLYYXXXXXXXXXLRKHRNMVVRA

SEQ ID NO: 6398 - protein, 38 aa, Artificial Sequence
  GFR-binding peptide
  MOD_RES (1)..(35)..(37): Xaa is C or S
  MOD_RES (15)..(16)..(17)..(18)..(19): Xaa is A or G
  MOD_RES (20)..(21)..(22)..(23): Xaa is A or G or is absent
XAPTQLSPISVLYKXXXXXXXXXLKYHYNMVVRAXGXH

SEQ ID NO: 6399 - protein, 38 aa, Artificial Sequence
  GFR-binding peptide
  MOD_RES (3)..(4)..(37): Xaa is C or S
  MOD_RES (18)..(19)..(20)..(21)..(22): Xaa is A or G
  MOD_RES (23)..(24)..(25)..(26): Xaa is A or G or is absent
SPXXVSQDLSPISILYKXXXXXXXXXLKYHYMIVKSXK

SEQ ID NO: 6400 - protein, 32 aa, Artificial Sequence
  GFR-binding peptide
  MOD_RES (2)..(2): Xaa is C or S
TXAPTKLSPISVLYKDDSSNVILKYHYNMVVR

SEQ ID NO: 6401 - protein, 43 aa, Artificial Sequence
  GFR-binding peptide
  MOD_RES (5)..(42): Xaa is C or S
  MOD_RES (21)..(22)..(23)..(24)..(25): Xaa is A or G
  MOD_RES (26)..(27)..(28)..(29): Xaa is A or G or is absent
RNVQXRPTQVQLSPISVLYKXXXXXXXXXLKYHYTLEDHLAXK

SEQ ID NO: 6402 - protein, 35 aa, Artificial Sequence
  GFR-binding peptide
  MOD_RES (3)..(3): Xaa is C or S
  MOD_RES (17)..(18)..(19)..(20)..(21): Xaa is A or G
  MOD_RES (22)..(23)..(24)..(25): Xaa is A or G or is absent
PTXAPTKLSPISVLYKXXXXXXXXXLKYHYNMVVR

SEQ ID NO: 6403 - protein, 39 aa, Artificial Sequence
  GFR-binding peptide
  MOD_RES (37)..(39): Xaa is C or S
  MOD_RES (16)..(17)..(18)..(19)..(20): Xaa is A or G
  MOD_RES (21)..(22)..(23)..(24): Xaa is A or G or is absent
RPTQVQLNAISVLYFXXXXXXXXXLKKYRTLEDHLAXKX

SEQ ID NO: 6404 - protein, 36 aa, Artificial Sequence
  GFR-binding peptide
  MOD_RES (1)..(35): Xaa is C or S
  MOD_RES (15)..(16)..(17)..(18)..(19): Xaa is A or G
  MOD_RES (20)..(21)..(22)..(23): Xaa is A or G or is absent
XAPTKLSAISVLYLXXXXXXXXXLKNYQNMVVKAXG

SEQ ID NO: 6405 - protein, 38 aa, Artificial Sequence
  GFR-binding peptide
  MOD_RES (3)..(4)..(37): Xaa is C or S
KAXXVPTKLSAISVLYLDDMGVPTLKNYQEGMSVAEXG

SEQ ID NO: 6406 - protein, 39 aa, Artificial Sequence
  GFR-binding peptide
  MOD_RES (6)..(7)..(39): Xaa is C or S
TVPKPXXAPTQLSPISVLYKDDSSNVILKYHYNMVVRAX

SEQ ID NO: 6407 - protein, 38 aa, Artificial Sequence
  GFR-binding peptide
  MOD_RES (3)..(4)..(36)..(38): Xaa is C or S
KAXXVPTELSPISMLYKDEYDKVVLKYHYEMVVEGXGX

SEQ ID NO: 6408 - protein, 39 aa, Artificial Sequence
  GFR-binding peptide
  MOD_RES (4)..(5): Xaa is C or S
  MOD_RES (19)..(20)..(21)..(22)..(23): Xaa is A or G
  MOD_RES (24)..(25)..(26)..(27): Xaa is A or G or is absent
GKAXXVPTKLNAISVLYFXXXXXXXXXLKKYREGMSVAE

SEQ ID NO: 6409 - protein, 33 aa, Artificial Sequence
  GFR-binding peptide
  MOD_RES (2)..(2): Xaa is C or S
TXAPTKLSAISVLYLDDSSNVILKNYQNMVVRS

SEQ ID NO: 6410 - protein, 42 aa, Artificial Sequence
  GFR-binding peptide
  MOD_RES (6)..(40)..(42): Xaa is C or S
  MOD_RES (20)..(21)..(22)..(23)..(24): Xaa is A or G
  MOD_RES (25)..(26)..(27)..(28): Xaa is A or G or is absent
VTKPTXAPTKLSPISVLYKXXXXXXXXXLKYHYNMVVRSXGX

SEQ ID NO: 6411 - protein, 37 aa, Artificial Sequence
  GFR-binding peptide
  MOD_RES (4)..(5): Xaa is C or S
  MOD_RES (19)..(20)..(21)..(22)..(23): Xaa is A or G
  MOD_RES (24)..(25)..(26)..(27): Xaa is A or G or is absent
PKAXXVPTELSAISMLYLXXXXXXXXXLKNYQEMVVE

SEQ ID NO: 6412 - protein, 38 aa, Artificial Sequence
  GFR-binding peptide
  MOD_RES (4)..(5): Xaa is C or S
  MOD_RES (19)..(20)..(21)..(22)..(23): Xaa is A or G
  MOD_RES (24)..(25)..(26)..(27): Xaa is A or G or is absent
PKAXXVPTELSATSMLYYXXXXXXXXXLRKHREMVVEG

SEQ ID NO: 6413 - protein, 32 aa, Artificial Sequence
  GFR-binding peptide
  MOD_RES (31)..(31): Xaa is C or S
VPQALSATSILYYVGRKPKVLRKHRMIVRSXK

SEQ ID NO: 6414 - protein, 34 aa, Artificial Sequence
  GFR-binding peptide
  MOD_RES (1)..(1): Xaa is C or S
  MOD_RES (15)..(16)..(17)..(18)..(19): Xaa is A or G
  MOD_RES (20)..(21)..(22)..(23): Xaa is A or G or is absent
XAPTQLSPISVLYKXXXXXXXXXLKYHYNMVVRA

SEQ ID NO: 6415 - protein, 34 aa, Artificial Sequence
  GFR-binding peptide
  MOD_RES (1)..(1): Xaa is C or S
  MOD_RES (15)..(16)..(17)..(18)..(19): Xaa is A or G
  MOD_RES (20)..(21)..(22)..(23): Xaa is A or G or is absent
XAPTKLSAISVLYLXXXXXXXXXLKNYQNMVVKA

SEQ ID NO: 6416 - protein, 36 aa, Artificial Sequence
  GFR-binding peptide
  MOD_RES (1)..(35): Xaa is C or S
  MOD_RES (15)..(16)..(17)..(18)..(19): Xaa is A or G
  MOD_RES (20)..(21)..(22)..(23): Xaa is A or G or is absent
XVPTELSATSMLYYXXXXXXXXXLRKHRDMVVEGXG

SEQ ID NO: 6417 - protein, 44 aa, Artificial Sequence
  GFR-binding peptide
  MOD_RES (5)..(42)..(44): Xaa is C or S
  MOD_RES (21)..(22)..(23)..(24)..(25): Xaa is A or G
  MOD_RES (26)..(27)..(28)..(29): Xaa is A or G or is absent
RNVQXRPTQVQLSPISVLYKXXXXXXXXXLKYHYTLEDHLAXKX

SEQ ID NO: 6418 - protein, 39 aa, Artificial Sequence
  GFR-binding peptide
  MOD_RES (5)..(6)..(37)..(39): Xaa is C or S
SASPXXVSQDLSAISILYLIGKTPKILKNYQMIVKSXKX

SEQ ID NO: 6419 - protein, 37 aa, Artificial Sequence
  GFR-binding peptide
  MOD_RES (2)..(36): Xaa is C or S
  MOD_RES (16)..(17)..(18)..(19)..(20): Xaa is A or G
  MOD_RES (21)..(22)..(23)..(24): Xaa is A or G or is absent
TXAPTKLSAISVLYLXXXXXXXXXLKNYQNMVVRSXG

SEQ ID NO: 6420 - protein, 33 aa, Artificial Sequence
  GFR-binding peptide
PTQVQLNAISVLYFEIVRKKPIFLKKYRTLEDH

SEQ ID NO: 6421 - protein, 35 aa, Artificial Sequence
  GFR-binding peptide
  MOD_RES (2)..(34): Xaa is C or S
TXAPTKLSATSVLYYDDSSNVILRKHRNMVVRSXG

SEQ ID NO: 6422 - protein, 36 aa, Artificial Sequence
  GFR-binding peptide
  MOD_RES (3)..(4)..(36): Xaa is C or S
KPXXAPTQLSPISVLYKDDSSNVILKYHYNMVVRAX

SEQ ID NO: 6423 - protein, 39 aa, Artificial Sequence
  GFR-binding peptide
  MOD_RES (2)..(39): Xaa is C or S
  MOD_RES (18)..(19)..(20)..(21)..(22): Xaa is A or G
  MOD_RES (23)..(24)..(25)..(26): Xaa is A or G or is absent
QXRPTQVQLNAISVLYFXXXXXXXXXLKKYRTLEDHLAX

SEQ ID NO: 6424 - protein, 39 aa, Artificial Sequence
  GFR-binding peptide
  MOD_RES (2)..(36)..(38): Xaa is C or S
  MOD_RES (16)..(17)..(18)..(19)..(20): Xaa is A or G
  MOD_RES (21)..(22)..(23)..(24): Xaa is A or G or is absent
TXAPTKLSAISVLYLXXXXXXXXXLKNYQNMVVRSXGXH

SEQ ID NO: 6425 - protein, 36 aa, Artificial Sequence
  GFR-binding peptide
  MOD_RES (2)..(3): Xaa is C or S
  MOD_RES (17)..(18)..(19)..(20)..(21): Xaa is A or G
  MOD_RES (22)..(23)..(24)..(25): Xaa is A or G or is absent
PXXAPTKLSPISVLYKXXXXXXXXXLKYHYNMVVRS

SEQ ID NO: 6426 - protein, 34 aa, Artificial Sequence
  GFR-binding peptide
  MOD_RES (2)..(3): Xaa is C or S
AXXVPTELSATSMLYYDEYDKVVLRKHREMVVEG

SEQ ID NO: 6427 - protein, 38 aa, Artificial Sequence
  GFR-binding peptide
  MOD_RES (37)..(37): Xaa is C or S
  MOD_RES (16)..(17)..(18)..(19)..(20): Xaa is A or G
  MOD_RES (21)..(22)..(23)..(24): Xaa is A or G or is absent
RPTQVQLSAISVLYLXXXXXXXXXLKNYQTLEDHLAXK

SEQ ID NO: 6428 - protein, 38 aa, Artificial Sequence
  GFR-binding peptide
  MOD_RES (4)..(5)..(38): Xaa is C or S
  MOD_RES (19)..(20)..(21)..(22)..(23): Xaa is A or G
  MOD_RES (24)..(25)..(26)..(27): Xaa is A or G or is absent
ASPXXVSQDLSAISILYLXXXXXXXXXLKNYQMIVKSX

SEQ ID NO: 6429 - protein, 39 aa, Artificial Sequence
  GFR-binding peptide
  MOD_RES (5)..(5): Xaa is C or S
RNVQXRPTQVQLSPISVLYKEIVRKKPIFLKYHYTLEDH

SEQ ID NO: 6430 - protein, 33 aa, Artificial Sequence
  GFR-binding peptide
  MOD_RES (32)..(32): Xaa is C or S
APTKLNAISVLYFDSSNNVILKKYRNMVVKAXG

SEQ ID NO: 6431 - protein, 36 aa, Artificial Sequence
  GFR-binding peptide
  MOD_RES (1)..(2)..(34)..(36): Xaa is C or S
XXAPTKLNAISVLYFDSSNNVILKKYRNMVVKAXGX

SEQ ID NO: 6432 - protein, 37 aa, Artificial Sequence
  GFR-binding peptide
  MOD_RES (4)..(5)..(36): Xaa is C or S
ASPXXVSQDLNAISILYFIGKTPKILKKYRMIVKSXK

SEQ ID NO: 6433 - protein, 43 aa, Artificial Sequence
  GFR-binding peptide
  MOD_RES (6)..(7)..(41)..(43): Xaa is C or S
  MOD_RES (21)..(22)..(23)..(24)..(25): Xaa is A or G
  MOD_RES (26)..(27)..(28)..(29): Xaa is A or G or is absent
AVPKAXXAPTKLSAISVLYLXXXXXXXXXLKNYQNMVVKAXGX

SEQ ID NO: 6434 - protein, 40 aa, Artificial Sequence
  GFR-binding peptide
  MOD_RES (6)..(7): Xaa is C or S
  MOD_RES (21)..(22)..(23)..(24)..(25): Xaa is A or G
  MOD_RES (26)..(27)..(28)..(29): Xaa is A or G or is absent
SIPKAXXVPTELSAISMLYLXXXXXXXXXLKNYQEMVVEG

SEQ ID NO: 6435 - protein, 41 aa, Artificial Sequence
  GFR-binding peptide
  MOD_RES (4)..(5)..(39)..(41): Xaa is C or S
  MOD_RES (19)..(20)..(21)..(22)..(23): Xaa is A or G
  MOD_RES (24)..(25)..(26)..(27): Xaa is A or G or is absent
PKAXXAPTKLNAISVLYFXXXXXXXXXLKKYRNMVVKAXGX

SEQ ID NO: 6436 - protein, 41 aa, Artificial Sequence
  GFR-binding peptide
  MOD_RES (5)..(6)..(38)..(40): Xaa is C or S
IPKAXXVPTELNAISMLYFDENEKVVLKKYRDMVVEGXGXR

SEQ ID NO: 6437 - protein, 41 aa, Artificial Sequence
  GFR-binding peptide
  MOD_RES (3)..(4)..(38)..(40): Xaa is C or S
  MOD_RES (18)..(19)..(20)..(21)..(22): Xaa is A or G
  MOD_RES (23)..(24)..(25)..(26): Xaa is A or G or is absent
KAXXAPTKLSAISVLYLXXXXXXXXXLKNYQNMVVKAXGXH

SEQ ID NO: 6438 - protein, 38 aa, Artificial Sequence
  GFR-binding peptide
  MOD_RES (3)..(4)..(38): Xaa is C or S
  MOD_RES (18)..(19)..(20)..(21)..(22): Xaa is A or G
  MOD_RES (23)..(24)..(25)..(26): Xaa is A or G or is absent
KAXXAPTKLSATSVLYYXXXXXXXXXLRKHRNMVVKAX

SEQ ID NO: 6439 - protein, 35 aa, Artificial Sequence
  GFR-binding peptide
  MOD_RES (1)..(2)..(34): Xaa is C or S
XXVPTELSATSMLYYDENEKVVLRKHRDMVVEGXG

SEQ ID NO: 6440 - protein, 35 aa, Artificial Sequence
  GFR-binding peptide
  MOD_RES (3)..(4): Xaa is C or S
KPXXAPTQLSATSVLYYDDSSNVILRKHRNMVVRA

SEQ ID NO: 6441 - protein, 38 aa, Artificial Sequence
  GFR-binding peptide
  MOD_RES (3)..(4)..(37): Xaa is C or S
  MOD_RES (18)..(19)..(20)..(21)..(22): Xaa is A or G
  MOD_RES (23)..(24)..(25)..(26): Xaa is A or G or is absent
SPXXVPQDLSAISILYLXXXXXXXXXLKNYQMVVKSXK

SEQ ID NO: 6442 - protein, 34 aa, Artificial Sequence
  GFR-binding peptide
  MOD_RES (2)..(34): Xaa is C or S
TXAPTKLSAISVLYLDDSSNVILKNYQNMVVRSX

SEQ ID NO: 6443 - protein, 41 aa, Artificial Sequence
  GFR-binding peptide
  MOD_RES (3)..(4)..(38)..(40): Xaa is C or S
  MOD_RES (18)..(19)..(20)..(21)..(22): Xaa is A or G
  MOD_RES (23)..(24)..(25)..(26): Xaa is A or G or is absent
KAXXVPTELNAISMLYFXXXXXXXXXLKKYREMVVEGXGXR

SEQ ID NO: 6444 - protein, 35 aa, Artificial Sequence
  GFR-binding peptide
  MOD_RES (1)..(2)..(34): Xaa is C or S
XXAPTKLSPISVLYKDDSSNVILKYHYNMVVRSXG

SEQ ID NO: 6445 - protein, 36 aa, Artificial Sequence
  GFR-binding peptide
  MOD_RES (4)..(5): Xaa is C or S
PKAXXVPTELNAISMLYFDEYDKVVLKKYREMVVEG

SEQ ID NO: 6446 - protein, 33 aa, Artificial Sequence
  GFR-binding peptide
  MOD_RES (2)..(3): Xaa is C or S
PXXAPTQLSPISVLYKDDSSNVILKYHYNMVVR

SEQ ID NO: 6447 - protein, 35 aa, Artificial Sequence
  GFR-binding peptide
  MOD_RES (33)..(35): Xaa is C or S
  MOD_RES (14)..(15)..(16)..(17)..(18): Xaa is A or G
  MOD_RES (19)..(20)..(21)..(22): Xaa is A or G or is absent
VPQALSPISILYKXXXXXXXXXLKYHYMIVRSXKX

SEQ ID NO: 6448 - protein, 37 aa, Artificial Sequence
  GFR-binding peptide
  MOD_RES (34)..(36): Xaa is C or S
  MOD_RES (14)..(15)..(16)..(17)..(18): Xaa is A or G
  MOD_RES (19)..(20)..(21)..(22): Xaa is A or G or is absent
APTKLSAISVLYLXXXXXXXXXLKNYQNMVVRSXGXH

SEQ ID NO: 6449 - protein, 34 aa, Artificial Sequence
  GFR-binding peptide
  MOD_RES (31)..(33): Xaa is C or S
VPQALNAISILYFVGRKPKVLKKYRMIVRSXKXS

SEQ ID NO: 6450 - protein, 38 aa, Artificial Sequence
  GFR-binding peptide
  MOD_RES (5)..(6): Xaa is C or S
VGKAXXVPTKLSAISVLYLDDMGVPTLKNYQEGMSVAE

SEQ ID NO: 6451 - protein, 36 aa, Artificial Sequence
  GFR-binding peptide
  MOD_RES (1)..(34)..(36): Xaa is C or S
  MOD_RES (15)..(16)..(17)..(18)..(19): Xaa is A or G
  MOD_RES (20)..(21)..(22)..(23): Xaa is A or G or is absent
XVSQDLSATSILYYXXXXXXXXXLRKHRMIVKSXKX

SEQ ID NO: 6452 - protein, 38 aa, Artificial Sequence
  GFR-binding peptide
  MOD_RES (3)..(4)..(36)..(38): Xaa is C or S
KAXXAPTKLSPISVLYKDSSNNVILKYHYNMVVKAXGX

SEQ ID NO: 6453 - protein, 36 aa, Artificial Sequence
  GFR-binding peptide
  MOD_RES (1)..(33)..(35): Xaa is C or S
XVPTELSATSMLYYDEYDKVVLRKHREMVVEGXGXR

SEQ ID NO: 6454 - protein, 40 aa, Artificial Sequence
  GFR-binding peptide
  MOD_RES (5)..(6)..(38)..(40): Xaa is C or S
IPKAXXVPTELSPISMLYKDENEKVVLKYHYDMVVEGXGX

SEQ ID NO: 6455 - protein, 36 aa, Artificial Sequence
  GFR-binding peptide
  MOD_RES (1)..(34)..(36): Xaa is C or S
  MOD_RES (15)..(16)..(17)..(18)..(19): Xaa is A or G
  MOD_RES (20)..(21)..(22)..(23): Xaa is A or G or is absent
XVPQALSPISILYKXXXXXXXXXLKYHYMIVRSXKX

SEQ ID NO: 6456 - protein, 34 aa, Artificial Sequence
  GFR-binding peptide
  MOD_RES (2)..(3): Xaa is C or S
PXXAPTQLSPISVLYKDDSSNVILKYHYNMVVRA

SEQ ID NO: 6457 - protein, 39 aa, Artificial Sequence
  GFR-binding peptide
  MOD_RES (4)..(5)..(38): Xaa is C or S
GKAXXVPTKLSATSVLYYDDMGVPTLRKHREGMSVAEXG

SEQ ID NO: 6458 - protein, 35 aa, Artificial Sequence
  GFR-binding peptide
  MOD_RES (2)..(3)..(35): Xaa is C or S
AXXVPTELNAISMLYFDEYDKVVLKKYREMVVEGX

SEQ ID NO: 6459 - protein, 34 aa, Artificial Sequence
  GFR-binding peptide
  MOD_RES (33)..(33): Xaa is C or S
  MOD_RES (14)..(15)..(16)..(17)..(18): Xaa is A or G
  MOD_RES (19)..(20)..(21)..(22): Xaa is A or G or is absent
VPQDLSATSILYYXXXXXXXXXLRKHRMVVKSXK

SEQ ID NO: 6460 - protein, 39 aa, Artificial Sequence
  GFR-binding peptide
  MOD_RES (6)..(7): Xaa is C or S
  MOD_RES (21)..(22)..(23)..(24)..(25): Xaa is A or G
  MOD_RES (26)..(27)..(28)..(29): Xaa is A or G or is absent
TVPKPXXAPTQLSATSVLYYXXXXXXXXXLRKHRNMVVR

SEQ ID NO: 6461 - protein, 39 aa, Artificial Sequence
  GFR-binding peptide
  MOD_RES (5)..(6)..(37)..(39): Xaa is C or S
SASPXXVPQDLSAISILYLVGRTPKVLKNYQMVVKSXKX

SEQ ID NO: 6462 - protein, 35 aa, Artificial Sequence
  GFR-binding peptide
  MOD_RES (33)..(35): Xaa is C or S
  MOD_RES (14)..(15)..(16)..(17)..(18): Xaa is A or G
  MOD_RES (19)..(20)..(21)..(22): Xaa is A or G or is absent
VSQDLSATSILYYXXXXXXXXXLRKHRMIVKSXKX

SEQ ID NO: 6463 - protein, 42 aa, Artificial Sequence
  GFR-binding peptide
  MOD_RES (6)..(7)..(41): Xaa is C or S
  MOD_RES (21)..(22)..(23)..(24)..(25): Xaa is A or G
  MOD_RES (26)..(27)..(28)..(29): Xaa is A or G or is absent
AVPKAXXAPTKLSATSVLYYXXXXXXXXXLRKHRNMVVKAXG

SEQ ID NO: 6464 - protein, 39 aa, Artificial Sequence
  GFR-binding peptide
  MOD_RES (4)..(5)..(39): Xaa is C or S
  MOD_RES (19)..(20)..(21)..(22)..(23): Xaa is A or G
  MOD_RES (24)..(25)..(26)..(27): Xaa is A or G or is absent
PKAXXAPTKLSPISVLYKXXXXXXXXXLKYHYNMVVKAX

SEQ ID NO: 6465 - protein, 36 aa, Artificial Sequence
  GFR-binding peptide
  MOD_RES (33)..(35): Xaa is C or S
  MOD_RES (14)..(15)..(16)..(17)..(18): Xaa is A or G
  MOD_RES (19)..(20)..(21)..(22): Xaa is A or G or is absent
VPQALSATSILYYXXXXXXXXXLRKHRMIVRSXKXS

SEQ ID NO: 6466 - protein, 42 aa, Artificial Sequence
  GFR-binding peptide
  MOD_RES (4)..(5)..(39)..(41): Xaa is C or S
  MOD_RES (19)..(20)..(21)..(22)..(23): Xaa is A or G
  MOD_RES (24)..(25)..(26)..(27): Xaa is A or G or is absent
PKPXXAPTKLSPISVLYKXXXXXXXXXLKYHYNMVVRSXGXH

SEQ ID NO: 6467 - protein, 38 aa, Artificial Sequence
  GFR-binding peptide
  MOD_RES (2)..(3)..(36)..(38): Xaa is C or S
  MOD_RES (17)..(18)..(19)..(20)..(21): Xaa is A or G
  MOD_RES (22)..(23)..(24)..(25): Xaa is A or G or is absent
PXXVPQALNAISILYFXXXXXXXXXLKKYRMIVRSXKX

SEQ ID NO: 6468 - protein, 34 aa, Artificial Sequence
  GFR-binding peptide
PTQVQLNAISVLYFEIVRKKPIFLKKYRTLEDHL

SEQ ID NO: 6469 - protein, 42 aa, Artificial Sequence
  GFR-binding peptide
  MOD_RES (5)..(6)..(40)..(42): Xaa is C or S
  MOD_RES (20)..(21)..(22)..(23)..(24): Xaa is A or G
  MOD_RES (25)..(26)..(27)..(28): Xaa is A or G or is absent
IPKAXXVPTELSPISMLYKXXXXXXXXXLKYHYDMVVEGXGX

SEQ ID NO: 6470 - protein, 36 aa, Artificial Sequence
  GFR-binding peptide
  MOD_RES (34)..(36): Xaa is C or S
  MOD_RES (14)..(15)..(16)..(17)..(18): Xaa is A or G
  MOD_RES (19)..(20)..(21)..(22): Xaa is A or G or is absent
APTKLNAISVLYFXXXXXXXXXLKKYRNMVVKAXGX

SEQ ID NO: 6471 - protein, 37 aa, Artificial Sequence
  GFR-binding peptide
  MOD_RES (3)..(3): Xaa is C or S
  MOD_RES (19)..(20)..(21)..(22)..(23): Xaa is A or G
  MOD_RES (24)..(25)..(26)..(27): Xaa is A or G or is absent
VQXRPTQVQLSAISVLYLXXXXXXXXXLKNYQTLEDH

SEQ ID NO: 6472 - protein, 37 aa, Artificial Sequence
  GFR-binding peptide
  MOD_RES (35)..(37): Xaa is C or S
  MOD_RES (14)..(15)..(16)..(17)..(18): Xaa is A or G
  MOD_RES (19)..(20)..(21)..(22): Xaa is A or G or is absent
TQVQLSAISVLYLXXXXXXXXXLKNYQTLEDHLAXKX

SEQ ID NO: 6473 - protein, 36 aa, Artificial Sequence
  GFR-binding peptide
  MOD_RES (4)..(5)..(36): Xaa is C or S
ASPXXVSQDLSAISILYLIGKTPKILKNYQMIVKSX

SEQ ID NO: 6474 - protein, 38 aa, Artificial Sequence
  GFR-binding peptide
  MOD_RES (4)..(5)..(38): Xaa is C or S
  MOD_RES (19)..(20)..(21)..(22)..(23): Xaa is A or G
  MOD_RES (24)..(25)..(26)..(27): Xaa is A or G or is absent
ASPXXVSQDLSATSILYYXXXXXXXXXLRKHRMIVKSX

SEQ ID NO: 6475 - protein, 38 aa, Artificial Sequence
  GFR-binding peptide
  MOD_RES (3)..(4)..(35)..(37): Xaa is C or S
SPXXVSQDLSPISILYKIGKTPKILKYHYMIVKSXKXS

SEQ ID NO: 6476 - protein, 43 aa, Artificial Sequence
  GFR-binding peptide
  MOD_RES (5)..(42): Xaa is C or S
RNVQXRPTQVQLNAISVLYFEIVRKKPIFLKKYRTLEDHLAXK

SEQ ID NO: 6477 - protein, 37 aa, Artificial Sequence
  GFR-binding peptide
  MOD_RES (1)..(2)..(35)..(37): Xaa is C or S
  MOD_RES (16)..(17)..(18)..(19)..(20): Xaa is A or G
  MOD_RES (21)..(22)..(23)..(24): Xaa is A or G or is absent
XXVSQDLSAISILYLXXXXXXXXXLKNYQMIVKSXKX

SEQ ID NO: 6478 - protein, 33 aa, Artificial Sequence
  GFR-binding peptide
  MOD_RES (2)..(3): Xaa is C or S
PXXAPTQLSAISVLYLDDSSNVILKNYQNMVVR

SEQ ID NO: 6479 - protein, 43 aa, Artificial Sequence
  GFR-binding peptide
  MOD_RES (4)..(5)..(40)..(42): Xaa is C or S
  MOD_RES (19)..(20)..(21)..(22)..(23): Xaa is A or G
  MOD_RES (24)..(25)..(26)..(27): Xaa is A or G or is absent
GKAXXVPTKLSPISVLYKXXXXXXXXXLKYHYEGMSVAEXGXR

SEQ ID NO: 6480 - protein, 42 aa, Artificial Sequence
  GFR-binding peptide
  MOD_RES (7)..(39)..(41): Xaa is C or S
HVTKPTXAPTKLSAISVLYLDDSSNVILKNYQNMVVRSXGXH

SEQ ID NO: 6481 - protein, 41 aa, Artificial Sequence
  GFR-binding peptide
  MOD_RES (6)..(40): Xaa is C or S
  MOD_RES (20)..(21)..(22)..(23)..(24): Xaa is A or G
  MOD_RES (25)..(26)..(27)..(28): Xaa is A or G or is absent
VTKPTXAPTKLSAISVLYLXXXXXXXXXLKNYQNMVVRSXG

SEQ ID NO: 6482 - protein, 36 aa, Artificial Sequence
  GFR-binding peptide
  MOD_RES (1)..(1): Xaa is C or S
XRPTQVQLSATSVLYYEIVRKKPIFLRKHRTLEDHL

SEQ ID NO: 6483 - protein, 39 aa, Artificial Sequence
  GFR-binding peptide
  MOD_RES (2)..(39): Xaa is C or S
QXRPTQVQLNAISVLYFEIVRKKPIFLKKYRTLEDHLAX

SEQ ID NO: 6484 - protein, 36 aa, Artificial Sequence
  GFR-binding peptide
  MOD_RES (2)..(36): Xaa is C or S
  MOD_RES (16)..(17)..(18)..(19)..(20): Xaa is A or G
  MOD_RES (21)..(22)..(23)..(24): Xaa is A or G or is absent
TXAPTKLNAISVLYFXXXXXXXXXLKKYRNMVVRSX

SEQ ID NO: 6485 - protein, 41 aa, Artificial Sequence
  GFR-binding peptide
  MOD_RES (5)..(6)..(40): Xaa is C or S
  MOD_RES (20)..(21)..(22)..(23)..(24): Xaa is A or G
  MOD_RES (25)..(26)..(27)..(28): Xaa is A or G or is absent
VPKPXXAPTKLNAISVLYFXXXXXXXXXLKKYRNMVVRSXG

SEQ ID NO: 6486 - protein, 34 aa, Artificial Sequence
  GFR-binding peptide
  MOD_RES (31)..(33): Xaa is C or S
VPQDLSATSILYYVGRTPKVLRKHRMVVKSXKXS

SEQ ID NO: 6487 - protein, 34 aa, Artificial Sequence
  GFR-binding peptide
  MOD_RES (1)..(2)..(34): Xaa is C or S
XXAPTQLSAISVLYLDDSSNVILKNYQNMVVRAX

SEQ ID NO: 6488 - protein, 36 aa, Artificial Sequence
  GFR-binding peptide
  MOD_RES (4)..(5): Xaa is C or S
PKPXXAPTKLSATSVLYYDDSSNVILRKHRNMVVRS

SEQ ID NO: 6489 - protein, 36 aa, Artificial Sequence
  GFR-binding peptide
  MOD_RES (2)..(3)..(36): Xaa is C or S
  MOD_RES (17)..(18)..(19)..(20)..(21): Xaa is A or G
  MOD_RES (22)..(23)..(24)..(25): Xaa is A or G or is absent
PXXVPQDLSATSILYYXXXXXXXXXLRKHRMVVKSX

SEQ ID NO: 6490 - protein, 44 aa, Artificial Sequence
  GFR-binding peptide
  MOD_RES (6)..(7)..(41)..(43): Xaa is C or S
  MOD_RES (21)..(22)..(23)..(24)..(25): Xaa is A or G
  MOD_RES (26)..(27)..(28)..(29): Xaa is A or G or is absent
SIPKAXXVPTELSAISMLYLXXXXXXXXXLKNYQEMVVEGXGXR

SEQ ID NO: 6491 - protein, 32 aa, Artificial Sequence
  GFR-binding peptide
  MOD_RES (14)..(15)..(16)..(17)..(18): Xaa is A or G
  MOD_RES (19)..(20)..(21)..(22): Xaa is A or G or is absent
APTKLNAISVLYFXXXXXXXXXLKKYRNMVVR

SEQ ID NO: 6492 - protein, 39 aa, Artificial Sequence
  GFR-binding peptide
  MOD_RES (3)..(37)..(39): Xaa is C or S
  MOD_RES (17)..(18)..(19)..(20)..(21): Xaa is A or G
  MOD_RES (22)..(23)..(24)..(25): Xaa is A or G or is absent
PTXAPTKLNAISVLYFXXXXXXXXXLKKYRNMVVRSXGX

SEQ ID NO: 6493 - protein, 43 aa, Artificial Sequence
  GFR-binding peptide
  MOD_RES (6)..(7)..(41)..(43): Xaa is C or S
  MOD_RES (21)..(22)..(23)..(24)..(25): Xaa is A or G
  MOD_RES (26)..(27)..(28)..(29): Xaa is A or G or is absent
AVPKAXXAPTKLSPISVLYKXXXXXXXXXLKYHYNMVVKAXGX

SEQ ID NO: 6494 - protein, 35 aa, Artificial Sequence
  GFR-binding peptide
  MOD_RES (1)..(32)..(34): Xaa is C or S
XVPQDLSATSILYYVGRTPKVLRKHRMVVKSXKXS

SEQ ID NO: 6495 - protein, 36 aa, Artificial Sequence
  GFR-binding peptide
  MOD_RES (3)..(35): Xaa is C or S
PTXAPTKLSPISVLYKDDSSNVILKYHYNMVVRSXG

SEQ ID NO: 6496 - protein, 32 aa, Artificial Sequence
  GFR-binding peptide
  MOD_RES (14)..(15)..(16)..(17)..(18): Xaa is A or G
  MOD_RES (19)..(20)..(21)..(22): Xaa is A or G or is absent
APTKLNAISVLYFXXXXXXXXXLKKYRNMVVK

SEQ ID NO: 6497 - protein, 39 aa, Artificial Sequence
  GFR-binding peptide
  MOD_RES (1)..(2)..(37)..(39): Xaa is C or S
  MOD_RES (16)..(17)..(18)..(19)..(20): Xaa is A or G
  MOD_RES (21)..(22)..(23)..(24): Xaa is A or G or is absent
XXVPTKLSATSVLYYXXXXXXXXXLRKHREGMSVAEXGX

SEQ ID NO: 6498 - protein, 33 aa, Artificial Sequence
  GFR-binding peptide
  MOD_RES (33)..(33): Xaa is C or S
  MOD_RES (14)..(15)..(16)..(17)..(18): Xaa is A or G
  MOD_RES (19)..(20)..(21)..(22): Xaa is A or G or is absent
VSQDLNAISILYFXXXXXXXXXLKKYRMIVKSX

SEQ ID NO: 6499 - protein, 43 aa, Artificial Sequence
  GFR-binding peptide
  MOD_RES (5)..(6)..(40)..(42): Xaa is C or S
  MOD_RES (20)..(21)..(22)..(23)..(24): Xaa is A or G
  MOD_RES (25)..(26)..(27)..(28): Xaa is A or G or is absent
VPKPXXAPTKLSATSVLYYXXXXXXXXXLRKHRNMVVRSXGXH

SEQ ID NO: 6500 - protein, 35 aa, Artificial Sequence
  GFR-binding peptide
  MOD_RES (2)..(3): Xaa is C or S
  MOD_RES (17)..(18)..(19)..(20)..(21): Xaa is A or G
  MOD_RES (22)..(23)..(24)..(25): Xaa is A or G or is absent
PXXVPQALNAISILYFXXXXXXXXXLKKYRMIVRS

SEQ ID NO: 6501 - protein, 38 aa, Artificial Sequence
  GFR-binding peptide
  MOD_RES (37)..(37): Xaa is C or S
RPTQVQLNAISVLYFEIVRKKPIFLKKYRTLEDHLAXK

SEQ ID NO: 6502 - protein, 38 aa, Artificial Sequence
  GFR-binding peptide
  MOD_RES (4)..(4): Xaa is C or S
NVQXRPTQVQLSPISVLYKEIVRKKPIFLKYHYTLEDH

SEQ ID NO: 6503 - protein, 37 aa, Artificial Sequence
  GFR-binding peptide
  MOD_RES (37)..(37): Xaa is C or S
RPTQVQLSPISVLYKEIVRKKPIFLKYHYTLEDHLAX

SEQ ID NO: 6504 - protein, 40 aa, Artificial Sequence
  GFR-binding peptide
  MOD_RES (5)..(6)..(37)..(39): Xaa is C or S
SASPXXVPQDLSAISILYLVGRTPKVLKNYQMVVKSXKXS

SEQ ID NO: 6505 - protein, 39 aa, Artificial Sequence
  GFR-binding peptide
  MOD_RES (4)..(5)..(37)..(39): Xaa is C or S
PKAXXVPTELSATSMLYYDEYDKVVLRKHREMVVEGXGX

SEQ ID NO: 6506 - protein, 36 aa, Artificial Sequence
  GFR-binding peptide
  MOD_RES (2)..(3)..(36): Xaa is C or S
  MOD_RES (17)..(18)..(19)..(20)..(21): Xaa is A or G
  MOD_RES (22)..(23)..(24)..(25): Xaa is A or G or is absent
PXXVPQDLSAISILYLXXXXXXXXXLKNYQMVVKSX

SEQ ID NO: 6507 - protein, 41 aa, Artificial Sequence
  GFR-binding peptide
  MOD_RES (6)..(7)..(39)..(41): Xaa is C or S
TVPKPXXAPTQLSAISVLYLDDSSNVILKNYQNMVVRAXGX

SEQ ID NO: 6508 - protein, 33 aa, Artificial Sequence
  GFR-binding peptide
  MOD_RES (1)..(33): Xaa is C or S
XAPTQLSAISVLYLDDSSNVILKNYQNMVVRAX

SEQ ID NO: 6509 - protein, 42 aa, Artificial Sequence
  GFR-binding peptide
  MOD_RES (5)..(6)..(39)..(41): Xaa is C or S
  MOD_RES (20)..(21)..(22)..(23)..(24): Xaa is A or G
  MOD_RES (25)..(26)..(27)..(28): Xaa is A or G or is absent
SAAPXXVPQALSATSILYYXXXXXXXXXLRKHRMIVRSXKXS

SEQ ID NO: 6510 - protein, 33 aa, Artificial Sequence
  GFR-binding peptide
  MOD_RES (2)..(3): Xaa is C or S
PXXVPQDLSATSILYYVGRTPKVLRKHRMVVKS

SEQ ID NO: 6511 - protein, 35 aa, Artificial Sequence
  GFR-binding peptide
  MOD_RES (1)..(2): Xaa is C or S
  MOD_RES (16)..(17)..(18)..(19)..(20): Xaa is A or G
  MOD_RES (21)..(22)..(23)..(24): Xaa is A or G or is absent
XXVPTELSPISMLYKXXXXXXXXXLKYHYDMVVEG

SEQ ID NO: 6512 - protein, 41 aa, Artificial Sequence
  GFR-binding peptide
  MOD_RES (6)..(7)..(38)..(40): Xaa is C or S
ASASPXXVSQDLSPISILYKIGKTPKILKYHYMIVKSXKXS

SEQ ID NO: 6513 - protein, 31 aa, Artificial Sequence
  GFR-binding peptide
  MOD_RES (1)..(1): Xaa is C or S
XVPTELNAISMLYFDEYDKVVLKKYREMVVE

SEQ ID NO: 6514 - protein, 37 aa, Artificial Sequence
  GFR-binding peptide
  MOD_RES (6)..(6): Xaa is C or S
VTKPTXAPTKLSAISVLYLDDSSNVILKNYQNMVVRS

SEQ ID NO: 6515 - protein, 35 aa, Artificial Sequence
  GFR-binding peptide
  MOD_RES (2)..(2): Xaa is C or S
  MOD_RES (16)..(17)..(18)..(19)..(20): Xaa is A or G
  MOD_RES (21)..(22)..(23)..(24): Xaa is A or G or is absent
TXAPTKLSAISVLYLXXXXXXXXXLKNYQNMVVRS

SEQ ID NO: 6516 - protein, 36 aa, Artificial Sequence
  GFR-binding peptide
  MOD_RES (3)..(4): Xaa is C or S
  MOD_RES (18)..(19)..(20)..(21)..(22): Xaa is A or G
  MOD_RES (23)..(24)..(25)..(26): Xaa is A or G or is absent
KAXXVPTELSATSMLYYXXXXXXXXXLRKHREMVVE

SEQ ID NO: 6517 - protein, 35 aa, Artificial Sequence
  GFR-binding peptide
PTQVQLSAISVLYLEIVRKKPIFLKNYQTLEDHLA

SEQ ID NO: 6518 - protein, 41 aa, Artificial Sequence
  GFR-binding peptide
  MOD_RES (6)..(7)..(40): Xaa is C or S
  MOD_RES (21)..(22)..(23)..(24)..(25): Xaa is A or G
  MOD_RES (26)..(27)..(28)..(29): Xaa is A or G or is absent
ASAAPXXVPQALSAISILYLXXXXXXXXXLKNYQMIVRSXK

SEQ ID NO: 6519 - protein, 37 aa, Artificial Sequence
  GFR-binding peptide
  MOD_RES (36)..(36): Xaa is C or S
PTQVQLSAISVLYLEIVRKKPIFLKNYQTLEDHLAXK

SEQ ID NO: 6520 - protein, 39 aa, Artificial Sequence
  GFR-binding peptide
  MOD_RES (2)..(3)..(38): Xaa is C or S
  MOD_RES (17)..(18)..(19)..(20)..(21): Xaa is A or G
  MOD_RES (22)..(23)..(24)..(25): Xaa is A or G or is absent
AXXVPTKLSPISVLYKXXXXXXXXXLKYHYEGMSVAEXG

SEQ ID NO: 6521 - protein, 39 aa, Artificial Sequence
  GFR-binding peptide
  MOD_RES (2)..(3)..(36)..(38): Xaa is C or S
  MOD_RES (17)..(18)..(19)..(20)..(21): Xaa is A or G
  MOD_RES (22)..(23)..(24)..(25): Xaa is A or G or is absent
PXXVPQDLNAISILYFXXXXXXXXXLKKYRMVVKSXKXS

SEQ ID NO: 6522 - protein, 37 aa, Artificial Sequence
  GFR-binding peptide
  MOD_RES (4)..(5)..(37): Xaa is C or S
PKPXXAPTKLSAISVLYLDDSSNVILKNYQNMVVRSX

SEQ ID NO: 6523 - protein, 38 aa, Artificial Sequence
  GFR-binding peptide
  MOD_RES (5)..(5): Xaa is C or S
  MOD_RES (19)..(20)..(21)..(22)..(23): Xaa is A or G
  MOD_RES (24)..(25)..(26)..(27): Xaa is A or G or is absent
TKPTXAPTKLSAISVLYLXXXXXXXXXLKNYQNMVVRS

SEQ ID NO: 6524 - protein, 39 aa, Artificial Sequence
  GFR-binding peptide
  MOD_RES (4)..(38): Xaa is C or S
  MOD_RES (18)..(19)..(20)..(21)..(22): Xaa is A or G
  MOD_RES (23)..(24)..(25)..(26): Xaa is A or G or is absent
KPTXAPTKLSATSVLYYXXXXXXXXXLRKHRNMVVRSXG

SEQ ID NO: 6525 - protein, 37 aa, Artificial Sequence
  GFR-binding peptide
  MOD_RES (5)..(6): Xaa is C or S
IPKAXXVPTELSPISMLYKDENEKVVLKYHYDMVVEG

SEQ ID NO: 6526 - protein, 37 aa, Artificial Sequence
  GFR-binding peptide
  MOD_RES (6)..(7): Xaa is C or S
KIPKAXXVPTELNAISMLYFDENEKVVLKKYRDMVVE

SEQ ID NO: 6527 - protein, 43 aa, Artificial Sequence
  GFR-binding peptide
  MOD_RES (6)..(7)..(40)..(42): Xaa is C or S
  MOD_RES (21)..(22)..(23)..(24)..(25): Xaa is A or G
  MOD_RES (26)..(27)..(28)..(29): Xaa is A or G or is absent
ASASPXXVSQDLSPISILYKXXXXXXXXXLKYHYMIVKSXKXS

SEQ ID NO: 6528 - protein, 35 aa, Artificial Sequence
  GFR-binding peptide
PTQVQLSATSVLYYEIVRKKPIFLRKHRTLEDHLA

SEQ ID NO: 6529 - protein, 37 aa, Artificial Sequence
  GFR-binding peptide
  MOD_RES (5)..(37): Xaa is C or S
TKPTXAPTKLSAISVLYLDDSSNVILKNYQNMVVRSX

SEQ ID NO: 6530 - protein, 32 aa, Artificial Sequence
  GFR-binding peptide
  MOD_RES (32)..(32): Xaa is C or S
APTKLSAISVLYLDDSSNVILKNYQNMVVRSX

SEQ ID NO: 6531 - protein, 42 aa, Artificial Sequence
  GFR-binding peptide
  MOD_RES (5)..(42): Xaa is C or S
  MOD_RES (21)..(22)..(23)..(24)..(25): Xaa is A or G
  MOD_RES (26)..(27)..(28)..(29): Xaa is A or G or is absent
RNVQXRPTQVQLSAISVLYLXXXXXXXXXLKNYQTLEDHLAX

SEQ ID NO: 6532 - protein, 39 aa, Artificial Sequence
  GFR-binding peptide
  MOD_RES (5)..(6)..(38): Xaa is C or S
VPKPXXAPTQLSPISVLYKDDSSNVILKYHYNMVVRAXG

SEQ ID NO: 6533 - protein, 39 aa, Artificial Sequence
  GFR-binding peptide
  MOD_RES (1)..(2)..(36)..(38): Xaa is C or S
  MOD_RES (16)..(17)..(18)..(19)..(20): Xaa is A or G
  MOD_RES (21)..(22)..(23)..(24): Xaa is A or G or is absent
XXAPTKLSPISVLYKXXXXXXXXXLKYHYNMVVRSXGXH

SEQ ID NO: 6534 - protein, 37 aa, Artificial Sequence
  GFR-binding peptide
  MOD_RES (1)..(2)..(37): Xaa is C or S
  MOD_RES (16)..(17)..(18)..(19)..(20): Xaa is A or G
  MOD_RES (21)..(22)..(23)..(24): Xaa is A or G or is absent
XXVPTKLSPISVLYKXXXXXXXXXLKYHYEGMSVAEX

SEQ ID NO: 6535 - protein, 39 aa, Artificial Sequence
  GFR-binding peptide
  MOD_RES (4)..(5)..(36)..(38): Xaa is C or S
AAPXXVPQALSAISILYLVGRKPKVLKNYQMIVRSXKXS

SEQ ID NO: 6536 - protein, 39 aa, Artificial Sequence
  GFR-binding peptide
  MOD_RES (6)..(6): Xaa is C or S
  MOD_RES (20)..(21)..(22)..(23)..(24): Xaa is A or G
  MOD_RES (25)..(26)..(27)..(28): Xaa is A or G or is absent
VTKPTXAPTKLSPISVLYKXXXXXXXXXLKYHYNMVVRS

SEQ ID NO: 6537 - protein, 39 aa, Artificial Sequence
  GFR-binding peptide
  MOD_RES (4)..(5)..(38): Xaa is C or S
  MOD_RES (19)..(20)..(21)..(22)..(23): Xaa is A or G
  MOD_RES (24)..(25)..(26)..(27): Xaa is A or G or is absent
ASPXXVSQDLSATSILYYXXXXXXXXXLRKHRMIVKSXK

SEQ ID NO: 6538 - protein, 42 aa, Artificial Sequence
  GFR-binding peptide
  MOD_RES (5)..(42): Xaa is C or S
  MOD_RES (21)..(22)..(23)..(24)..(25): Xaa is A or G
  MOD_RES (26)..(27)..(28)..(29): Xaa is A or G or is absent
RNVQXRPTQVQLSPISVLYKXXXXXXXXXLKYHYTLEDHLAX

SEQ ID NO: 6539 - protein, 37 aa, Artificial Sequence
  GFR-binding peptide
  MOD_RES (1)..(2)..(35)..(37): Xaa is C or S
  MOD_RES (16)..(17)..(18)..(19)..(20): Xaa is A or G
  MOD_RES (21)..(22)..(23)..(24): Xaa is A or G or is absent
XXVSQDLSATSILYYXXXXXXXXXLRKHRMIVKSXKX

SEQ ID NO: 6540 - protein, 36 aa, Artificial Sequence
  GFR-binding peptide
  MOD_RES (34)..(36): Xaa is C or S
  MOD_RES (14)..(15)..(16)..(17)..(18): Xaa is A or G
  MOD_RES (19)..(20)..(21)..(22): Xaa is A or G or is absent
APTKLSAISVLYLXXXXXXXXXLKNYQNMVVRSXGX

SEQ ID NO: 6541 - protein, 38 aa, Artificial Sequence
  GFR-binding peptide
  MOD_RES (1)..(2)..(36)..(38): Xaa is C or S
  MOD_RES (16)..(17)..(18)..(19)..(20): Xaa is A or G
  MOD_RES (21)..(22)..(23)..(24): Xaa is A or G or is absent
XXAPTQLNAISVLYFXXXXXXXXXLKKYRNMVVRAXGX

SEQ ID NO: 6542 - protein, 35 aa, Artificial Sequence
  GFR-binding peptide
  MOD_RES (1)..(32)..(34): Xaa is C or S
XVPQALNAISILYFVGRKPKVLKKYRMIVRSXKXS

SEQ ID NO: 6543 - protein, 37 aa, Artificial Sequence
  GFR-binding peptide
  MOD_RES (4)..(5)..(36): Xaa is C or S
ASPXXVSQDLSAISILYLIGKTPKILKNYQMIVKSXK

SEQ ID NO: 6544 - protein, 35 aa, Artificial Sequence
  GFR-binding peptide
  MOD_RES (1)..(2)..(33)..(35): Xaa is C or S
XXVPQALSAISILYLVGRKPKVLKNYQMIVRSXKX

SEQ ID NO: 6545 - protein, 38 aa, Artificial Sequence
  GFR-binding peptide
  MOD_RES (1)..(2)..(36)..(38): Xaa is C or S
  MOD_RES (16)..(17)..(18)..(19)..(20): Xaa is A or G
  MOD_RES (21)..(22)..(23)..(24): Xaa is A or G or is absent
XXAPTKLNAISVLYFXXXXXXXXXLKKYRNMVVKAXGX

SEQ ID NO: 6546 - protein, 37 aa, Artificial Sequence
  GFR-binding peptide
  MOD_RES (4)..(5): Xaa is C or S
  MOD_RES (19)..(20)..(21)..(22)..(23): Xaa is A or G
  MOD_RES (24)..(25)..(26)..(27): Xaa is A or G or is absent
PKAXXVPTELNAISMLYFXXXXXXXXXLKKYRDMVVE

SEQ ID NO: 6547 - protein, 36 aa, Artificial Sequence
  GFR-binding peptide
  MOD_RES (1)..(35): Xaa is C or S
  MOD_RES (15)..(16)..(17)..(18)..(19): Xaa is A or G
  MOD_RES (20)..(21)..(22)..(23): Xaa is A or G or is absent
XVPTELNAISMLYFXXXXXXXXXLKKYRDMVVEGXG

SEQ ID NO: 6548 - protein, 38 aa, Artificial Sequence
  GFR-binding peptide
  MOD_RES (1)..(38): Xaa is C or S
XRPTQVQLNAISVLYFEIVRKKPIFLKKYRTLEDHLAX

SEQ ID NO: 6549 - protein, 38 aa, Artificial Sequence
  GFR-binding peptide
  MOD_RES (3)..(4)..(38): Xaa is C or S
  MOD_RES (18)..(19)..(20)..(21)..(22): Xaa is A or G
  MOD_RES (23)..(24)..(25)..(26): Xaa is A or G or is absent
KPXXAPTQLSATSVLYYXXXXXXXXXLRKHRNMVVRAX

SEQ ID NO: 6550 - protein, 33 aa, Artificial Sequence
  GFR-binding peptide
  MOD_RES (33)..(33): Xaa is C or S
  MOD_RES (14)..(15)..(16)..(17)..(18): Xaa is A or G
  MOD_RES (19)..(20)..(21)..(22): Xaa is A or G or is absent
VPQDLSAISILYLXXXXXXXXXLKNYQMVVKSX

SEQ ID NO: 6551 - protein, 34 aa, Artificial Sequence
  GFR-binding peptide
  MOD_RES (4)..(4): Xaa is C or S
KPTXAPTKLSAISVLYLDDSSNVILKNYQNMVVR

SEQ ID NO: 6552 - protein, 40 aa, Artificial Sequence
  GFR-binding peptide
  MOD_RES (2)..(3)..(37)..(39): Xaa is C or S
  MOD_RES (17)..(18)..(19)..(20)..(21): Xaa is A or G
  MOD_RES (22)..(23)..(24)..(25): Xaa is A or G or is absent
AXXVPTELSATSMLYYXXXXXXXXXLRKHRDMVVEGXGXR

SEQ ID NO: 6553 - protein, 31 aa, Artificial Sequence
  GFR-binding peptide
  MOD_RES (1)..(1): Xaa is C or S
XAPTKLSPISVLYKDSSNNVILKYHYNMVVK

SEQ ID NO: 6554 - protein, 38 aa, Artificial Sequence
  GFR-binding peptide
  MOD_RES (3)..(4): Xaa is C or S
  MOD_RES (18)..(19)..(20)..(21)..(22): Xaa is A or G
  MOD_RES (23)..(24)..(25)..(26): Xaa is A or G or is absent
KAXXVPTKLSPISVLYKXXXXXXXXXLKYHYEGMSVAE

SEQ ID NO: 6555 - protein, 38 aa, Artificial Sequence
  GFR-binding peptide
  MOD_RES (2)..(3)..(37): Xaa is C or S
  MOD_RES (17)..(18)..(19)..(20)..(21): Xaa is A or G
  MOD_RES (22)..(23)..(24)..(25): Xaa is A or G or is absent
AXXVPTELSPISMLYKXXXXXXXXXLKYHYDMVVEGXG

SEQ ID NO: 6556 - protein, 38 aa, Artificial Sequence
  GFR-binding peptide
  MOD_RES (1)..(35)..(37): Xaa is C or S
  MOD_RES (15)..(16)..(17)..(18)..(19): Xaa is A or G
  MOD_RES (20)..(21)..(22)..(23): Xaa is A or G or is absent
XAPTKLNAISVLYFXXXXXXXXXLKKYRNMVVKAXGXH

SEQ ID NO: 6557 - protein, 37 aa, Artificial Sequence
  GFR-binding peptide
  MOD_RES (6)..(7): Xaa is C or S
TVPKPXXAPTQLSATSVLYYDDSSNVILRKHRNMVVR

SEQ ID NO: 6558 - protein, 36 aa, Artificial Sequence
  GFR-binding peptide
  MOD_RES (1)..(34)..(36): Xaa is C or S
  MOD_RES (15)..(16)..(17)..(18)..(19): Xaa is A or G
  MOD_RES (20)..(21)..(22)..(23): Xaa is A or G or is absent
XVSQDLSAISILYLXXXXXXXXXLKNYQMIVKSXKX

SEQ ID NO: 6559 - protein, 38 aa, Artificial Sequence
  GFR-binding peptide
  MOD_RES (4)..(5): Xaa is C or S
  MOD_RES (19)..(20)..(21)..(22)..(23): Xaa is A or G
  MOD_RES (24)..(25)..(26)..(27): Xaa is A or G or is absent
PKPXXAPTQLSATSVLYYXXXXXXXXXLRKHRNMVVRA

SEQ ID NO: 6560 - protein, 35 aa, Artificial Sequence
  GFR-binding peptide
  MOD_RES (35)..(35): Xaa is C or S
  MOD_RES (14)..(15)..(16)..(17)..(18): Xaa is A or G
  MOD_RES (19)..(20)..(21)..(22): Xaa is A or G or is absent
VPTKLSATSVLYYXXXXXXXXXLRKHREGMSVAEX

SEQ ID NO: 6561 - protein, 35 aa, Artificial Sequence
  GFR-binding peptide
  MOD_RES (2)..(3)..(35): Xaa is C or S
AXXVPTELSATSMLYYDENEKVVLRKHRDMVVEGX

SEQ ID NO: 6562 - protein, 35 aa, Artificial Sequence
  GFR-binding peptide
  MOD_RES (4)..(4): Xaa is C or S
KPTXAPTKLSAISVLYLDDSSNVILKNYQNMVVRS

SEQ ID NO: 6563 - protein, 42 aa, Artificial Sequence
  GFR-binding peptide
  MOD_RES (7)..(41): Xaa is C or S
  MOD_RES (21)..(22)..(23)..(24)..(25): Xaa is A or G
  MOD_RES (26)..(27)..(28)..(29): Xaa is A or G or is absent
HVTKPTXAPTKLSATSVLYYXXXXXXXXXLRKHRNMVVRSXG

SEQ ID NO: 6564 - protein, 36 aa, Artificial Sequence
  GFR-binding peptide
  MOD_RES (2)..(34)..(36): Xaa is C or S
TXAPTKLSPISVLYKDDSSNVILKYHYNMVVRSXGX

SEQ ID NO: 6565 - protein, 36 aa, Artificial Sequence
  GFR-binding peptide
  MOD_RES (36)..(36): Xaa is C or S
PTQVQLSPISVLYKEIVRKKPIFLKYHYTLEDHLAX

SEQ ID NO: 6566 - protein, 38 aa, Artificial Sequence
  GFR-binding peptide
  MOD_RES (4)..(5): Xaa is C or S
  MOD_RES (19)..(20)..(21)..(22)..(23): Xaa is A or G
  MOD_RES (24)..(25)..(26)..(27): Xaa is A or G or is absent
PKAXXAPTKLSPISVLYKXXXXXXXXXLKYHYNMVVKA

SEQ ID NO: 6567 - protein, 38 aa, Artificial Sequence
  GFR-binding peptide
  MOD_RES (5)..(6)..(38): Xaa is C or S
VPKPXXAPTKLSPISVLYKDDSSNVILKYHYNMVVRSX

SEQ ID NO: 6568 - protein, 38 aa, Artificial Sequence
  GFR-binding peptide
  MOD_RES (1)..(2)..(35)..(37): Xaa is C or S
  MOD_RES (16)..(17)..(18)..(19)..(20): Xaa is A or G
  MOD_RES (21)..(22)..(23)..(24): Xaa is A or G or is absent
XXVPQALSPISILYKXXXXXXXXXLKYHYMIVRSXKXS

SEQ ID NO: 6569 - protein, 36 aa, Artificial Sequence
  GFR-binding peptide
  MOD_RES (33)..(35): Xaa is C or S
  MOD_RES (14)..(15)..(16)..(17)..(18): Xaa is A or G
  MOD_RES (19)..(20)..(21)..(22): Xaa is A or G or is absent
VPQDLSATSILYYXXXXXXXXXLRKHRMVVKSXKXS

SEQ ID NO: 6570 - protein, 34 aa, Artificial Sequence
  GFR-binding peptide
  MOD_RES (1)..(1): Xaa is C or S
  MOD_RES (15)..(16)..(17)..(18)..(19): Xaa is A or G
  MOD_RES (20)..(21)..(22)..(23): Xaa is A or G or is absent
XAPTKLSATSVLYYXXXXXXXXXLRKHRNMVVKA

SEQ ID NO: 6571 - protein, 32 aa, Artificial Sequence
  GFR-binding peptide
  MOD_RES (1)..(2): Xaa is C or S
XXVPTELSPISMLYKDENEKVVLKYHYDMVVE

SEQ ID NO: 6572 - protein, 36 aa, Artificial Sequence
  GFR-binding peptide
  MOD_RES (4)..(5): Xaa is C or S
PKAXXAPTKLNAISVLYFDSSNNVILKKYRNMVVKA

SEQ ID NO: 6573 - protein, 43 aa, Artificial Sequence
  GFR-binding peptide
  MOD_RES (5)..(6)..(41)..(43): Xaa is C or S
  MOD_RES (20)..(21)..(22)..(23)..(24): Xaa is A or G
  MOD_RES (25)..(26)..(27)..(28): Xaa is A or G or is absent
VGKAXXVPTKLNAISVLYFXXXXXXXXXLKKYREGMSVAEXGX

SEQ ID NO: 6574 - protein, 41 aa, Artificial Sequence
  GFR-binding peptide
  MOD_RES (6)..(7)..(41): Xaa is C or S
  MOD_RES (21)..(22)..(23)..(24)..(25): Xaa is A or G
  MOD_RES (26)..(27)..(28)..(29): Xaa is A or G or is absent
SIPKAXXVPTELSAISMLYLXXXXXXXXXLKNYQEMVVEGX

SEQ ID NO: 6575 - protein, 34 aa, Artificial Sequence
  GFR-binding peptide
  MOD_RES (31)..(33): Xaa is C or S
VPQDLSAISILYLVGRTPKVLKNYQMVVKSXKXS

SEQ ID NO: 6576 - protein, 36 aa, Artificial Sequence
  GFR-binding peptide
  MOD_RES (1)..(2)..(35): Xaa is C or S
  MOD_RES (16)..(17)..(18)..(19)..(20): Xaa is A or G
  MOD_RES (21)..(22)..(23)..(24): Xaa is A or G or is absent
XXVPQDLSATSILYYXXXXXXXXXLRKHRMVVKSXK

SEQ ID NO: 6577 - protein, 35 aa, Artificial Sequence
  GFR-binding peptide
  MOD_RES (2)..(3): Xaa is C or S
  MOD_RES (17)..(18)..(19)..(20)..(21): Xaa is A or G
  MOD_RES (22)..(23)..(24)..(25): Xaa is A or G or is absent
AXXVPTELSPISMLYKXXXXXXXXXLKYHYEMVVE

SEQ ID NO: 6578 - protein, 39 aa, Artificial Sequence
  GFR-binding peptide
  MOD_RES (2)..(39): Xaa is C or S
  MOD_RES (18)..(19)..(20)..(21)..(22): Xaa is A or G
  MOD_RES (23)..(24)..(25)..(26): Xaa is A or G or is absent
QXRPTQVQLSATSVLYYXXXXXXXXXLRKHRTLEDHLAX

SEQ ID NO: 6579 - protein, 34 aa, Artificial Sequence
  GFR-binding peptide
  MOD_RES (1)..(2)..(33): Xaa is C or S
XXVSQDLSPISILYKIGKTPKILKYHYMIVKSXK

SEQ ID NO: 6580 - protein, 30 aa, Artificial Sequence
  GFR-binding peptide
VPQDLNAISILYFVGRTPKVLKKYRMVVKS

SEQ ID NO: 6581 - protein, 35 aa, Artificial Sequence
  GFR-binding peptide
  MOD_RES (3)..(3): Xaa is C or S
  MOD_RES (17)..(18)..(19)..(20)..(21): Xaa is A or G
  MOD_RES (22)..(23)..(24)..(25): Xaa is A or G or is absent
PTXAPTKLSATSVLYYXXXXXXXXXLRKHRNMVVR

SEQ ID NO: 6582 - protein, 37 aa, Artificial Sequence
  GFR-binding peptide
  MOD_RES (3)..(4): Xaa is C or S
  MOD_RES (18)..(19)..(20)..(21)..(22): Xaa is A or G
  MOD_RES (23)..(24)..(25)..(26): Xaa is A or G or is absent
KAXXVPTELSATSMLYYXXXXXXXXXLRKHRDMVVEG

SEQ ID NO: 6583 - protein, 37 aa, Artificial Sequence
  GFR-binding peptide
  MOD_RES (4)..(5): Xaa is C or S
  MOD_RES (19)..(20)..(21)..(22)..(23): Xaa is A or G
  MOD_RES (24)..(25)..(26)..(27): Xaa is A or G or is absent
PKPXXAPTQLSATSVLYYXXXXXXXXXLRKHRNMVVR

SEQ ID NO: 6584 - protein, 37 aa, Artificial Sequence
  GFR-binding peptide
  MOD_RES (1)..(2)..(35)..(37): Xaa is C or S
  MOD_RES (16)..(17)..(18)..(19)..(20): Xaa is A or G
  MOD_RES (21)..(22)..(23)..(24): Xaa is A or G or is absent
XXVPQALSPISILYKXXXXXXXXXLKYHYMIVRSXKX

SEQ ID NO: 6585 - protein, 34 aa, Artificial Sequence
  GFR-binding peptide
  MOD_RES (34)..(34): Xaa is C or S
  MOD_RES (14)..(15)..(16)..(17)..(18): Xaa is A or G
  MOD_RES (19)..(20)..(21)..(22): Xaa is A or G or is absent
VPTELSAISMLYLXXXXXXXXXLKNYQEMVVEGX

SEQ ID NO: 6586 - protein, 33 aa, Artificial Sequence
  GFR-binding peptide
  MOD_RES (1)..(1): Xaa is C or S
  MOD_RES (15)..(16)..(17)..(18)..(19): Xaa is A or G
  MOD_RES (20)..(21)..(22)..(23): Xaa is A or G or is absent
XVPQALSATSILYYXXXXXXXXXLRKHRMIVRS

SEQ ID NO: 6587 - protein, 32 aa, Artificial Sequence
  GFR-binding peptide
  MOD_RES (14)..(15)..(16)..(17)..(18): Xaa is A or G
  MOD_RES (19)..(20)..(21)..(22): Xaa is A or G or is absent
TQVQLNAISVLYFXXXXXXXXXLKKYRTLEDH

SEQ ID NO: 6588 - protein, 32 aa, Artificial Sequence
  GFR-binding peptide
  MOD_RES (14)..(15)..(16)..(17)..(18): Xaa is A or G
  MOD_RES (19)..(20)..(21)..(22): Xaa is A or G or is absent
APTQLSATSVLYYXXXXXXXXXLRKHRNMVVR

SEQ ID NO: 6589 - protein, 34 aa, Artificial Sequence
  GFR-binding peptide
  MOD_RES (1)..(1): Xaa is C or S
  MOD_RES (15)..(16)..(17)..(18)..(19): Xaa is A or G
  MOD_RES (20)..(21)..(22)..(23): Xaa is A or G or is absent
XVPTELSAISMLYLXXXXXXXXXLKNYQEMVVEG

SEQ ID NO: 6590 - protein, 34 aa, Artificial Sequence
  GFR-binding peptide
  MOD_RES (1)..(34): Xaa is C or S
XVPTKLSAISVLYLDDMGVPTLKNYQEGMSVAEX

SEQ ID NO: 6591 - protein, 37 aa, Artificial Sequence
  GFR-binding peptide
  MOD_RES (4)..(5): Xaa is C or S
  MOD_RES (19)..(20)..(21)..(22)..(23): Xaa is A or G
  MOD_RES (24)..(25)..(26)..(27): Xaa is A or G or is absent
PKAXXAPTKLSPISVLYKXXXXXXXXXLKYHYNMVVK

SEQ ID NO: 6592 - protein, 34 aa, Artificial Sequence
  GFR-binding peptide
  MOD_RES (4)..(4): Xaa is C or S
KPTXAPTKLSPISVLYKDDSSNVILKYHYNMVVR

SEQ ID NO: 6593 - protein, 39 aa, Artificial Sequence
  GFR-binding peptide
  MOD_RES (2)..(3)..(37)..(39): Xaa is C or S
  MOD_RES (17)..(18)..(19)..(20)..(21): Xaa is A or G
  MOD_RES (22)..(23)..(24)..(25): Xaa is A or G or is absent
AXXAPTKLSAISVLYLXXXXXXXXXLKNYQNMVVKAXGX

SEQ ID NO: 6594 - protein, 35 aa, Artificial Sequence
  GFR-binding peptide
  MOD_RES (1)..(2): Xaa is C or S
  MOD_RES (16)..(17)..(18)..(19)..(20): Xaa is A or G
  MOD_RES (21)..(22)..(23)..(24): Xaa is A or G or is absent
XXVPTELSAISMLYLXXXXXXXXXLKNYQEMVVEG

SEQ ID NO: 6595 - protein, 40 aa, Artificial Sequence
  GFR-binding peptide
  MOD_RES (2)..(3)..(37)..(39): Xaa is C or S
  MOD_RES (17)..(18)..(19)..(20)..(21): Xaa is A or G
  MOD_RES (22)..(23)..(24)..(25): Xaa is A or G or is absent
PXXAPTKLSATSVLYYXXXXXXXXXLRKHRNMVVRSXGXH

SEQ ID NO: 6596 - protein, 35 aa, Artificial Sequence
  GFR-binding peptide
  MOD_RES (1)..(34): Xaa is C or S
  MOD_RES (15)..(16)..(17)..(18)..(19): Xaa is A or G
  MOD_RES (20)..(21)..(22)..(23): Xaa is A or G or is absent
XVSQDLSATSILYYXXXXXXXXXLRKHRMIVKSXK

SEQ ID NO: 6597 - protein, 37 aa, Artificial Sequence
  GFR-binding peptide
  MOD_RES (2)..(3)..(37): Xaa is C or S
  MOD_RES (17)..(18)..(19)..(20)..(21): Xaa is A or G
  MOD_RES (22)..(23)..(24)..(25): Xaa is A or G or is absent
AXXVPTELSATSMLYYXXXXXXXXXLRKHRDMVVEGX

SEQ ID NO: 6598 - protein, 44 aa, Artificial Sequence
  GFR-binding peptide
  MOD_RES (5)..(42)..(44): Xaa is C or S
RNVQXRPTQVQLNAISVLYFEIVRKKPIFLKKYRTLEDHLAXKX

SEQ ID NO: 6599 - protein, 39 aa, Artificial Sequence
  GFR-binding peptide
  MOD_RES (2)..(3)..(36)..(38): Xaa is C or S
  MOD_RES (17)..(18)..(19)..(20)..(21): Xaa is A or G
  MOD_RES (22)..(23)..(24)..(25): Xaa is A or G or is absent
PXXVSQDLSPISILYKXXXXXXXXXLKYHYMIVKSXKXS

SEQ ID NO: 6600 - protein, 42 aa, Artificial Sequence
  GFR-binding peptide
  MOD_RES (4)..(5)..(39)..(41): Xaa is C or S
  MOD_RES (19)..(20)..(21)..(22)..(23): Xaa is A or G
  MOD_RES (24)..(25)..(26)..(27): Xaa is A or G or is absent
PKPXXAPTKLSATSVLYYXXXXXXXXXLRKHRNMVVRSXGXH

SEQ ID NO: 6601 - protein, 39 aa, Artificial Sequence
  GFR-binding peptide
  MOD_RES (5)..(37)..(39): Xaa is C or S
TKPTXAPTKLSATSVLYYDDSSNVILRKHRNMVVRSXGX

SEQ ID NO: 6602 - protein, 36 aa, Artificial Sequence
  GFR-binding peptide
  MOD_RES (1)..(2)..(35): Xaa is C or S
  MOD_RES (16)..(17)..(18)..(19)..(20): Xaa is A or G
  MOD_RES (21)..(22)..(23)..(24): Xaa is A or G or is absent
XXVSQDLSAISILYLXXXXXXXXXLKNYQMIVKSXK

SEQ ID NO: 6603 - protein, 41 aa, Artificial Sequence
  GFR-binding peptide
  MOD_RES (4)..(41): Xaa is C or S
NVQXRPTQVQLSATSVLYYEIVRKKPIFLRKHRTLEDHLAX

SEQ ID NO: 6604 - protein, 34 aa, Artificial Sequence
  GFR-binding peptide
  MOD_RES (1)..(1): Xaa is C or S
  MOD_RES (15)..(16)..(17)..(18)..(19): Xaa is A or G
  MOD_RES (20)..(21)..(22)..(23): Xaa is A or G or is absent
XAPTKLSATSVLYYXXXXXXXXXLRKHRNMVVRS

SEQ ID NO: 6605 - protein, 36 aa, Artificial Sequence
  GFR-binding peptide
  MOD_RES (1)..(2)..(34)..(36): Xaa is C or S
XXAPTQLSPISVLYKDDSSNVILKYHYNMVVRAXGX

SEQ ID NO: 6606 - protein, 38 aa, Artificial Sequence
  GFR-binding peptide
  MOD_RES (37)..(37): Xaa is C or S
  MOD_RES (16)..(17)..(18)..(19)..(20): Xaa is A or G
  MOD_RES (21)..(22)..(23)..(24): Xaa is A or G or is absent
RPTQVQLSATSVLYYXXXXXXXXXLRKHRTLEDHLAXK

SEQ ID NO: 6607 - protein, 37 aa, Artificial Sequence
  GFR-binding peptide
  MOD_RES (4)..(5): Xaa is C or S
  MOD_RES (19)..(20)..(21)..(22)..(23): Xaa is A or G
  MOD_RES (24)..(25)..(26)..(27): Xaa is A or G or is absent
PKPXXAPTKLNAISVLYFXXXXXXXXXLKKYRNMVVR

SEQ ID NO: 6608 - protein, 36 aa, Artificial Sequence
  GFR-binding peptide
  MOD_RES (2)..(3)..(35): Xaa is C or S
PXXAPTKLSAISVLYLDDSSNVILKNYQNMVVRSXG

SEQ ID NO: 6609 - protein, 39 aa, Artificial Sequence
  GFR-binding peptide
  MOD_RES (4)..(5)..(36)..(38): Xaa is C or S
AAPXXVPQALSATSILYYVGRKPKVLRKHRMIVRSXKXS

SEQ ID NO: 6610 - protein, 30 aa, Artificial Sequence
  GFR-binding peptide
APTKLSAISVLYLDDSSNVILKNYQNMVVR

SEQ ID NO: 6611 - protein, 33 aa, Artificial Sequence
  GFR-binding peptide
  MOD_RES (1)..(2): Xaa is C or S
XXAPTQLSAISVLYLDDSSNVILKNYQNMVVRA

SEQ ID NO: 6612 - protein, 38 aa, Artificial Sequence
  GFR-binding peptide
  MOD_RES (5)..(6)..(38): Xaa is C or S
IPKAXXVPTELSATSMLYYDEYDKVVLRKHREMVVEGX

SEQ ID NO: 6613 - protein, 31 aa, Artificial Sequence
  GFR-binding peptide
  MOD_RES (1)..(1): Xaa is C or S
XAPTKLSAISVLYLDSSNNVILKNYQNMVVK

SEQ ID NO: 6614 - protein, 41 aa, Artificial Sequence
  GFR-binding peptide
  MOD_RES (5)..(6)..(39)..(41): Xaa is C or S
VGKAXXVPTKLSATSVLYYDDMGVPTLRKHREGMSVAEXGX

SEQ ID NO: 6615 - protein, 35 aa, Artificial Sequence
  GFR-binding peptide
  MOD_RES (2)..(3)..(35): Xaa is C or S
AXXAPTKLNAISVLYFDSSNNVILKKYRNMVVKAX

SEQ ID NO: 6616 - protein, 31 aa, Artificial Sequence
  GFR-binding peptide
  MOD_RES (31)..(31): Xaa is C or S
VPQDLNAISILYFVGRTPKVLKKYRMVVKSX

SEQ ID NO: 6617 - protein, 39 aa, Artificial Sequence
  GFR-binding peptide
  MOD_RES (5)..(6)..(39): Xaa is C or S
  MOD_RES (20)..(21)..(22)..(23)..(24): Xaa is A or G
  MOD_RES (25)..(26)..(27)..(28): Xaa is A or G or is absent
SAAPXXVPQALSAISILYLXXXXXXXXXLKNYQMIVRSX

SEQ ID NO: 6618 - protein, 36 aa, Artificial Sequence
  GFR-binding peptide
  MOD_RES (2)..(3)..(34)..(36): Xaa is C or S
PXXVPQALSATSILYYVGRKPKVLRKHRMIVRSXKX

SEQ ID NO: 6619 - protein, 33 aa, Artificial Sequence
  GFR-binding peptide
  MOD_RES (1)..(1): Xaa is C or S
  MOD_RES (15)..(16)..(17)..(18)..(19): Xaa is A or G
  MOD_RES (20)..(21)..(22)..(23): Xaa is A or G or is absent
XVPTELSATSMLYYXXXXXXXXXLRKHREMVVE

SEQ ID NO: 6620 - protein, 39 aa, Artificial Sequence
  GFR-binding peptide
  MOD_RES (6)..(7): Xaa is C or S
KVGKAXXVPTKLSATSVLYYDDMGVPTLRKHREGMSVAE

SEQ ID NO: 6621 - protein, 41 aa, Artificial Sequence
  GFR-binding peptide
  MOD_RES (4)..(5)..(38)..(40): Xaa is C or S
  MOD_RES (19)..(20)..(21)..(22)..(23): Xaa is A or G
  MOD_RES (24)..(25)..(26)..(27): Xaa is A or G or is absent
ASPXXVSQDLNAISILYFXXXXXXXXXLKKYRMIVKSXKXS

SEQ ID NO: 6622 - protein, 39 aa, Artificial Sequence
  GFR-binding peptide
  MOD_RES (4)..(5)..(36)..(38): Xaa is C or S
AAPXXVPQALSPISILYKVGRKPKVLKYHYMIVRSXKXS

SEQ ID NO: 6623 - protein, 39 aa, Artificial Sequence
  GFR-binding peptide
  MOD_RES (6)..(7): Xaa is C or S
  MOD_RES (21)..(22)..(23)..(24)..(25): Xaa is A or G
  MOD_RES (26)..(27)..(28)..(29): Xaa is A or G or is absent
YVPKPXXAPTKLSAISVLYLXXXXXXXXXLKNYQNMVVR

SEQ ID NO: 6624 - protein, 36 aa, Artificial Sequence
  GFR-binding peptide
  MOD_RES (33)..(35): Xaa is C or S
VPTKLSAISVLYLDDMGVPTLKNYQEGMSVAEXGXR

SEQ ID NO: 6625 - protein, 37 aa, Artificial Sequence
  GFR-binding peptide
  MOD_RES (2)..(3)..(36): Xaa is C or S
AXXVPTKLNAISVLYFDDMGVPTLKKYREGMSVAEXG

SEQ ID NO: 6626 - protein, 40 aa, Artificial Sequence
  GFR-binding peptide
  MOD_RES (3)..(4)..(38)..(40): Xaa is C or S
  MOD_RES (18)..(19)..(20)..(21)..(22): Xaa is A or G
  MOD_RES (23)..(24)..(25)..(26): Xaa is A or G or is absent
KAXXAPTKLSPISVLYKXXXXXXXXXLKYHYNMVVKAXGX

SEQ ID NO: 6627 - protein, 43 aa, Artificial Sequence
  GFR-binding peptide
  MOD_RES (4)..(41)..(43): Xaa is C or S
  MOD_RES (20)..(21)..(22)..(23)..(24): Xaa is A or G
  MOD_RES (25)..(26)..(27)..(28): Xaa is A or G or is absent
NVQXRPTQVQLSPISVLYKXXXXXXXXXLKYHYTLEDHLAXKX

SEQ ID NO: 6628 - protein, 37 aa, Artificial Sequence
  GFR-binding peptide
  MOD_RES (2)..(3)..(37): Xaa is C or S
  MOD_RES (17)..(18)..(19)..(20)..(21): Xaa is A or G
  MOD_RES (22)..(23)..(24)..(25): Xaa is A or G or is absent
AXXVPTELSPISMLYKXXXXXXXXXLKYHYEMVVEGX

SEQ ID NO: 6629 - protein, 36 aa, Artificial Sequence
  GFR-binding peptide
  MOD_RES (35)..(35): Xaa is C or S
  MOD_RES (14)..(15)..(16)..(17)..(18): Xaa is A or G
  MOD_RES (19)..(20)..(21)..(22): Xaa is A or G or is absent
TQVQLSPISVLYKXXXXXXXXXLKYHYTLEDHLAXK

SEQ ID NO: 6630 - protein, 40 aa, Artificial Sequence
  GFR-binding peptide
  MOD_RES (4)..(38)..(40): Xaa is C or S
  MOD_RES (18)..(19)..(20)..(21)..(22): Xaa is A or G
  MOD_RES (23)..(24)..(25)..(26): Xaa is A or G or is absent
KPTXAPTKLSPISVLYKXXXXXXXXXLKYHYNMVVRSXGX

SEQ ID NO: 6631 - protein, 37 aa, Artificial Sequence
  GFR-binding peptide
  MOD_RES (36)..(36): Xaa is C or S
  MOD_RES (15)..(16)..(17)..(18)..(19): Xaa is A or G
  MOD_RES (20)..(21)..(22)..(23): Xaa is A or G or is absent
PTQVQLNAISVLYFXXXXXXXXXLKKYRTLEDHLAXK

SEQ ID NO: 6632 - protein, 37 aa, Artificial Sequence
  GFR-binding peptide
  MOD_RES (2)..(3)..(37): Xaa is C or S
  MOD_RES (17)..(18)..(19)..(20)..(21): Xaa is A or G
  MOD_RES (22)..(23)..(24)..(25): Xaa is A or G or is absent
PXXAPTQLNAISVLYFXXXXXXXXXLKKYRNMVVRAX

SEQ ID NO: 6633 - protein, 37 aa, Artificial Sequence
  GFR-binding peptide
  MOD_RES (34)..(36): Xaa is C or S
  MOD_RES (14)..(15)..(16)..(17)..(18): Xaa is A or G
  MOD_RES (19)..(20)..(21)..(22): Xaa is A or G or is absent
APTKLSATSVLYYXXXXXXXXXLRKHRNMVVRSXGXH

SEQ ID NO: 6634 - protein, 41 aa, Artificial Sequence
  GFR-binding peptide
  MOD_RES (6)..(7)..(39)..(41): Xaa is C or S
AVPKAXXAPTKLSPISVLYKDSSNNVILKYHYNMVVKAXGX

SEQ ID NO: 6635 - protein, 40 aa, Artificial Sequence
  GFR-binding peptide
  MOD_RES (6)..(7)..(40): Xaa is C or S
  MOD_RES (21)..(22)..(23)..(24)..(25): Xaa is A or G
  MOD_RES (26)..(27)..(28)..(29): Xaa is A or G or is absent
ASASPXXVPQDLNAISILYFXXXXXXXXXLKKYRMVVKSX

SEQ ID NO: 6636 - protein, 36 aa, Artificial Sequence
  GFR-binding peptide
  MOD_RES (36)..(36): Xaa is C or S
PTQVQLSAISVLYLEIVRKKPIFLKNYQTLEDHLAX

SEQ ID NO: 6637 - protein, 32 aa, Artificial Sequence
  GFR-binding peptide
  MOD_RES (14)..(15)..(16)..(17)..(18): Xaa is A or G
  MOD_RES (19)..(20)..(21)..(22): Xaa is A or G or is absent
APTKLSAISVLYLXXXXXXXXXLKNYQNMVVR

SEQ ID NO: 6638 - protein, 37 aa, Artificial Sequence
  GFR-binding peptide
  MOD_RES (4)..(5)..(37): Xaa is C or S
PKAXXVPTELSATSMLYYDENEKVVLRKHRDMVVEGX

SEQ ID NO: 6639 - protein, 44 aa, Artificial Sequence
  GFR-binding peptide
  MOD_RES (6)..(7)..(41)..(43): Xaa is C or S
  MOD_RES (21)..(22)..(23)..(24)..(25): Xaa is A or G
  MOD_RES (26)..(27)..(28)..(29): Xaa is A or G or is absent
SIPKAXXVPTELSPISMLYKXXXXXXXXXLKYHYEMVVEGXGXR

SEQ ID NO: 6640 - protein, 33 aa, Artificial Sequence
  GFR-binding peptide
  MOD_RES (31)..(33): Xaa is C or S
VSQDLSATSILYYIGKTPKILRKHRMIVKSXKX

SEQ ID NO: 6641 - protein, 40 aa, Artificial Sequence
  GFR-binding peptide
  MOD_RES (5)..(6)..(37)..(39): Xaa is C or S
SASPXXVPQDLSATSILYYVGRTPKVLRKHRMVVKSXKXS

SEQ ID NO: 6642 - protein, 35 aa, Artificial Sequence
  GFR-binding peptide
  MOD_RES (1)..(34): Xaa is C or S
  MOD_RES (15)..(16)..(17)..(18)..(19): Xaa is A or G
  MOD_RES (20)..(21)..(22)..(23): Xaa is A or G or is absent
XVPQALSPISILYKXXXXXXXXXLKYHYMIVRSXK

SEQ ID NO: 6643 - protein, 44 aa, Artificial Sequence
  GFR-binding peptide
  MOD_RES (4)..(41)..(43): Xaa is C or S
  MOD_RES (20)..(21)..(22)..(23)..(24): Xaa is A or G
  MOD_RES (25)..(26)..(27)..(28): Xaa is A or G or is absent
NVQXRPTQVQLSAISVLYLXXXXXXXXXLKNYQTLEDHLAXKXE

SEQ ID NO: 6644 - protein, 41 aa, Artificial Sequence
  GFR-binding peptide
  MOD_RES (6)..(7)..(41): Xaa is C or S
  MOD_RES (21)..(22)..(23)..(24)..(25): Xaa is A or G
  MOD_RES (26)..(27)..(28)..(29): Xaa is A or G or is absent
AVPKAXXAPTKLSATSVLYYXXXXXXXXXLRKHRNMVVKAX

SEQ ID NO: 6645 - protein, 37 aa, Artificial Sequence
  GFR-binding peptide
  MOD_RES (3)..(4)..(37): Xaa is C or S
  MOD_RES (18)..(19)..(20)..(21)..(22): Xaa is A or G
  MOD_RES (23)..(24)..(25)..(26): Xaa is A or G or is absent
APXXVPQALNAISILYFXXXXXXXXXLKKYRMIVRSX

SEQ ID NO: 6646 - protein, 34 aa, Artificial Sequence
  GFR-binding peptide
  MOD_RES (1)..(2)..(33): Xaa is C or S
XXVPQDLSPISILYKVGRTPKVLKYHYMVVKSXK

SEQ ID NO: 6647 - protein, 39 aa, Artificial Sequence
  GFR-binding peptide
  MOD_RES (2)..(39): Xaa is C or S
QXRPTQVQLSATSVLYYEIVRKKPIFLRKHRTLEDHLAX

SEQ ID NO: 6648 - protein, 42 aa, Artificial Sequence
  GFR-binding peptide
  MOD_RES (5)..(6)..(41): Xaa is C or S
  MOD_RES (20)..(21)..(22)..(23)..(24): Xaa is A or G
  MOD_RES (25)..(26)..(27)..(28): Xaa is A or G or is absent
VGKAXXVPTKLSATSVLYYXXXXXXXXXLRKHREGMSVAEXG

SEQ ID NO: 6649 - protein, 41 aa, Artificial Sequence
  GFR-binding peptide
  MOD_RES (4)..(5)..(39)..(41): Xaa is C or S
  MOD_RES (19)..(20)..(21)..(22)..(23): Xaa is A or G
  MOD_RES (24)..(25)..(26)..(27): Xaa is A or G or is absent
PKAXXVPTELSAISMLYLXXXXXXXXXLKNYQEMVVEGXGX

SEQ ID NO: 6650 - protein, 33 aa, Artificial Sequence
  GFR-binding peptide
  MOD_RES (1)..(2): Xaa is C or S
XXAPTKLSATSVLYYDDSSNVILRKHRNMVVRS

SEQ ID NO: 6651 - protein, 41 aa, Artificial Sequence
  GFR-binding peptide
  MOD_RES (5)..(5): Xaa is C or S
RNVQXRPTQVQLSPISVLYKEIVRKKPIFLKYHYTLEDHLA

SEQ ID NO: 6652 - protein, 35 aa, Artificial Sequence
  GFR-binding peptide
  MOD_RES (2)..(3): Xaa is C or S
  MOD_RES (17)..(18)..(19)..(20)..(21): Xaa is A or G
  MOD_RES (22)..(23)..(24)..(25): Xaa is A or G or is absent
PXXVPQDLNAISILYFXXXXXXXXXLKKYRMVVKS

SEQ ID NO: 6653 - protein, 35 aa, Artificial Sequence
  GFR-binding peptide
  MOD_RES (1)..(32)..(34): Xaa is C or S
XVSQDLSPISILYKIGKTPKILKYHYMIVKSXKXS

SEQ ID NO: 6654 - protein, 37 aa, Artificial Sequence
  GFR-binding peptide
  MOD_RES (3)..(4)..(35)..(37): Xaa is C or S
APXXVPQALSAISILYLVGRKPKVLKNYQMIVRSXKX

SEQ ID NO: 6655 - protein, 36 aa, Artificial Sequence
  GFR-binding peptide
  MOD_RES (4)..(5): Xaa is C or S
PKAXXVPTELNAISMLYFDENEKVVLKKYRDMVVEG

SEQ ID NO: 6656 - protein, 39 aa, Artificial Sequence
  GFR-binding peptide
  MOD_RES (3)..(3): Xaa is C or S
  MOD_RES (19)..(20)..(21)..(22)..(23): Xaa is A or G
  MOD_RES (24)..(25)..(26)..(27): Xaa is A or G or is absent
VQXRPTQVQLNAISVLYFXXXXXXXXXLKKYRTLEDHLA

SEQ ID NO: 6657 - protein, 32 aa, Artificial Sequence
  GFR-binding peptide
  MOD_RES (1)..(2): Xaa is C or S
XXVPQDLSAISILYLVGRTPKVLKNYQMVVKS

SEQ ID NO: 6658 - protein, 43 aa, Artificial Sequence
  GFR-binding peptide
  MOD_RES (5)..(6)..(40)..(42): Xaa is C or S
  MOD_RES (20)..(21)..(22)..(23)..(24): Xaa is A or G
  MOD_RES (25)..(26)..(27)..(28): Xaa is A or G or is absent
VPKAXXAPTKLNAISVLYFXXXXXXXXXLKKYRNMVVKAXGXH

SEQ ID NO: 6659 - protein, 34 aa, Artificial Sequence
  GFR-binding peptide
  MOD_RES (3)..(4): Xaa is C or S
KPXXAPTKLSATSVLYYDDSSNVILRKHRNMVVR

SEQ ID NO: 6660 - protein, 33 aa, Artificial Sequence
  GFR-binding peptide
  MOD_RES (1)..(33): Xaa is C or S
XAPTKLSATSVLYYDDSSNVILRKHRNMVVRSX

SEQ ID NO: 6661 - protein, 39 aa, Artificial Sequence
  GFR-binding peptide
  MOD_RES (6)..(7)..(39): Xaa is C or S
AVPKAXXAPTKLSPISVLYKDSSNNVILKYHYNMVVKAX

SEQ ID NO: 6662 - protein, 42 aa, Artificial Sequence
  GFR-binding peptide
  MOD_RES (5)..(6)..(40)..(42): Xaa is C or S
  MOD_RES (20)..(21)..(22)..(23)..(24): Xaa is A or G
  MOD_RES (25)..(26)..(27)..(28): Xaa is A or G or is absent
VPKAXXAPTKLSPISVLYKXXXXXXXXXLKYHYNMVVKAXGX

SEQ ID NO: 6663 - protein, 40 aa, Artificial Sequence
  GFR-binding peptide
  MOD_RES (3)..(4)..(37)..(39): Xaa is C or S
  MOD_RES (18)..(19)..(20)..(21)..(22): Xaa is A or G
  MOD_RES (23)..(24)..(25)..(26): Xaa is A or G or is absent
APXXVPQALSPISILYKXXXXXXXXXLKYHYMIVRSXKXS

SEQ ID NO: 6664 - protein, 37 aa, Artificial Sequence
  GFR-binding peptide
  MOD_RES (4)..(5): Xaa is C or S
GKAXXVPTKLNAISVLYFDDMGVPTLKKYREGMSVAE

SEQ ID NO: 6665 - protein, 34 aa, Artificial Sequence
  GFR-binding peptide
  MOD_RES (1)..(2)..(34): Xaa is C or S
XXAPTKLSPISVLYKDSSNNVILKYHYNMVVKAX

SEQ ID NO: 6666 - protein, 36 aa, Artificial Sequence
  GFR-binding peptide
  MOD_RES (3)..(4)..(35): Xaa is C or S
SPXXVSQDLSPISILYKIGKTPKILKYHYMIVKSXK

SEQ ID NO: 6667 - protein, 41 aa, Artificial Sequence
  GFR-binding peptide
  MOD_RES (5)..(39)..(41): Xaa is C or S
  MOD_RES (19)..(20)..(21)..(22)..(23): Xaa is A or G
  MOD_RES (24)..(25)..(26)..(27): Xaa is A or G or is absent
TKPTXAPTKLSPISVLYKXXXXXXXXXLKYHYNMVVRSXGX

SEQ ID NO: 6668 - protein, 36 aa, Artificial Sequence
  GFR-binding peptide
  MOD_RES (4)..(36): Xaa is C or S
KPTXAPTKLSPISVLYKDDSSNVILKYHYNMVVRSX

SEQ ID NO: 6669 - protein, 40 aa, Artificial Sequence
  GFR-binding peptide
  MOD_RES (5)..(6)..(40): Xaa is C or S
  MOD_RES (20)..(21)..(22)..(23)..(24): Xaa is A or G
  MOD_RES (25)..(26)..(27)..(28): Xaa is A or G or is absent
IPKAXXVPTELNAISMLYFXXXXXXXXXLKKYREMVVEGX

SEQ ID NO: 6670 - protein, 35 aa, Artificial Sequence
  GFR-binding peptide
  MOD_RES (3)..(4): Xaa is C or S
KAXXVPTELNAISMLYFDENEKVVLKKYRDMVVEG

SEQ ID NO: 6671 - protein, 36 aa, Artificial Sequence
  GFR-binding peptide
  MOD_RES (1)..(35): Xaa is C or S
  MOD_RES (15)..(16)..(17)..(18)..(19): Xaa is A or G
  MOD_RES (20)..(21)..(22)..(23): Xaa is A or G or is absent
XVPTELNAISMLYFXXXXXXXXXLKKYREMVVEGXG

SEQ ID NO: 6672 - protein, 33 aa, Artificial Sequence
  GFR-binding peptide
  MOD_RES (33)..(33): Xaa is C or S
  MOD_RES (14)..(15)..(16)..(17)..(18): Xaa is A or G
  MOD_RES (19)..(20)..(21)..(22): Xaa is A or G or is absent
VPQALNAISILYFXXXXXXXXXLKKYRMIVRSX

SEQ ID NO: 6673 - protein, 34 aa, Artificial Sequence
  GFR-binding peptide
  MOD_RES (1)..(2): Xaa is C or S
  MOD_RES (16)..(17)..(18)..(19)..(20): Xaa is A or G
  MOD_RES (21)..(22)..(23)..(24): Xaa is A or G or is absent
XXAPTQLSATSVLYYXXXXXXXXXLRKHRNMVVR

SEQ ID NO: 6674 - protein, 34 aa, Artificial Sequence
  GFR-binding peptide
  MOD_RES (1)..(1): Xaa is C or S
  MOD_RES (15)..(16)..(17)..(18)..(19): Xaa is A or G
  MOD_RES (20)..(21)..(22)..(23): Xaa is A or G or is absent
XAPTQLSAISVLYLXXXXXXXXXLKNYQNMVVRA

SEQ ID NO: 6675 - protein, 39 aa, Artificial Sequence
  GFR-binding peptide
  MOD_RES (2)..(36)..(38): Xaa is C or S
  MOD_RES (16)..(17)..(18)..(19)..(20): Xaa is A or G
  MOD_RES (21)..(22)..(23)..(24): Xaa is A or G or is absent
TXAPTKLSATSVLYYXXXXXXXXXLRKHRNMVVRSXGXH

SEQ ID NO: 6676 - protein, 34 aa, Artificial Sequence
  GFR-binding peptide
  MOD_RES (1)..(32)..(34): Xaa is C or S
XVPQDLSATSILYYVGRTPKVLRKHRMVVKSXKX

SEQ ID NO: 6677 - protein, 38 aa, Artificial Sequence
  GFR-binding peptide
  MOD_RES (2)..(3)..(37): Xaa is C or S
  MOD_RES (17)..(18)..(19)..(20)..(21): Xaa is A or G
  MOD_RES (22)..(23)..(24)..(25): Xaa is A or G or is absent
PXXAPTKLSAISVLYLXXXXXXXXXLKNYQNMVVRSXG

SEQ ID NO: 6678 - protein, 36 aa, Artificial Sequence
  GFR-binding peptide
  MOD_RES (1)..(33)..(35): Xaa is C or S
XAPTKLSATSVLYYDDSSNVILRKHRNMVVRSXGXH

SEQ ID NO: 6679 - protein, 33 aa, Artificial Sequence
  GFR-binding peptide
  MOD_RES (1)..(2): Xaa is C or S
XXVPTELNAISMLYFDENEKVVLKKYRDMVVEG

SEQ ID NO: 6680 - protein, 41 aa, Artificial Sequence
  GFR-binding peptide
  MOD_RES (3)..(4)..(38)..(40): Xaa is C or S
  MOD_RES (18)..(19)..(20)..(21)..(22): Xaa is A or G
  MOD_RES (23)..(24)..(25)..(26): Xaa is A or G or is absent
KAXXAPTKLSATSVLYYXXXXXXXXXLRKHRNMVVKAXGXH

SEQ ID NO: 6681 - protein, 32 aa, Artificial Sequence
  GFR-binding peptide
  MOD_RES (14)..(15)..(16)..(17)..(18): Xaa is A or G
  MOD_RES (19)..(20)..(21)..(22): Xaa is A or G or is absent
APTKLSATSVLYYXXXXXXXXXLRKHRNMVVR

SEQ ID NO: 6682 - protein, 36 aa, Artificial Sequence
  GFR-binding peptide
  MOD_RES (2)..(3)..(34)..(36): Xaa is C or S
PXXVSQDLSPISILYKIGKTPKILKYHYMIVKSXKX

SEQ ID NO: 6683 - protein, 39 aa, Artificial Sequence
  GFR-binding peptide
  MOD_RES (6)..(7): Xaa is C or S
  MOD_RES (21)..(22)..(23)..(24)..(25): Xaa is A or G
  MOD_RES (26)..(27)..(28)..(29): Xaa is A or G or is absent
KIPKAXXVPTELSPISMLYKXXXXXXXXXLKYHYDMVVE

SEQ ID NO: 6684 - protein, 33 aa, Artificial Sequence
  GFR-binding peptide
  MOD_RES (2)..(3): Xaa is C or S
PXXVPQDLSPISILYKVGRTPKVLKYHYMVVKS

SEQ ID NO: 6685 - protein, 40 aa, Artificial Sequence
  GFR-binding peptide
  MOD_RES (5)..(6)..(40): Xaa is C or S
  MOD_RES (20)..(21)..(22)..(23)..(24): Xaa is A or G
  MOD_RES (25)..(26)..(27)..(28): Xaa is A or G or is absent
IPKAXXVPTELSPISMLYKXXXXXXXXXLKYHYDMVVEGX

SEQ ID NO: 6686 - protein, 32 aa, Artificial Sequence
  GFR-binding peptide
  MOD_RES (14)..(15)..(16)..(17)..(18): Xaa is A or G
  MOD_RES (19)..(20)..(21)..(22): Xaa is A or G or is absent
APTKLSATSVLYYXXXXXXXXXLRKHRNMVVK

SEQ ID NO: 6687 - protein, 32 aa, Artificial Sequence
  GFR-binding peptide
  MOD_RES (1)..(32): Xaa is C or S
XVSQDLSATSILYYIGKTPKILRKHRMIVKSX

SEQ ID NO: 6688 - protein, 32 aa, Artificial Sequence
  GFR-binding peptide
  MOD_RES (1)..(2): Xaa is C or S
XXVPQDLSPISILYKVGRTPKVLKYHYMVVKS

SEQ ID NO: 6689 - protein, 39 aa, Artificial Sequence
  GFR-binding peptide
  MOD_RES (2)..(3)..(36)..(38): Xaa is C or S
  MOD_RES (17)..(18)..(19)..(20)..(21): Xaa is A or G
  MOD_RES (22)..(23)..(24)..(25): Xaa is A or G or is absent
PXXVPQALSAISILYLXXXXXXXXXLKNYQMIVRSXKXS

SEQ ID NO: 6690 - protein, 40 aa, Artificial Sequence
  GFR-binding peptide
  MOD_RES (3)..(4)..(38)..(40): Xaa is C or S
  MOD_RES (18)..(19)..(20)..(21)..(22): Xaa is A or G
  MOD_RES (23)..(24)..(25)..(26): Xaa is A or G or is absent
KAXXAPTKLSAISVLYLXXXXXXXXXLKNYQNMVVKAXGX

SEQ ID NO: 6691 - protein, 39 aa, Artificial Sequence
  GFR-binding peptide
  MOD_RES (5)..(6)..(37)..(39): Xaa is C or S
SAAPXXVPQALSATSILYYVGRKPKVLRKHRMIVRSXKX

SEQ ID NO: 6692 - protein, 38 aa, Artificial Sequence
  GFR-binding peptide
  MOD_RES (3)..(4)..(38): Xaa is C or S
  MOD_RES (18)..(19)..(20)..(21)..(22): Xaa is A or G
  MOD_RES (23)..(24)..(25)..(26): Xaa is A or G or is absent
KAXXVPTELSPISMLYKXXXXXXXXXLKYHYDMVVEGX

SEQ ID NO: 6693 - protein, 37 aa, Artificial Sequence
  GFR-binding peptide
  MOD_RES (1)..(2)..(37): Xaa is C or S
  MOD_RES (16)..(17)..(18)..(19)..(20): Xaa is A or G
  MOD_RES (21)..(22)..(23)..(24): Xaa is A or G or is absent
XXVPTKLSAISVLYLXXXXXXXXXLKNYQEGMSVAEX

SEQ ID NO: 6694 - protein, 39 aa, Artificial Sequence
  GFR-binding peptide
  MOD_RES (3)..(4)..(36)..(38): Xaa is C or S
KPXXAPTKLSPISVLYKDDSSNVILKYHYNMVVRSXGXH

SEQ ID NO: 6695 - protein, 33 aa, Artificial Sequence
  GFR-binding peptide
TQVQLSATSVLYYEIVRKKPIFLRKHRTLEDHL

SEQ ID NO: 6696 - protein, 42 aa, Artificial Sequence
  GFR-binding peptide
  MOD_RES (5)..(6)..(40)..(42): Xaa is C or S
  MOD_RES (20)..(21)..(22)..(23)..(24): Xaa is A or G
  MOD_RES (25)..(26)..(27)..(28): Xaa is A or G or is absent
IPKAXXVPTELSATSMLYYXXXXXXXXXLRKHRDMVVEGXGX

SEQ ID NO: 6697 - protein, 36 aa, Artificial Sequence
  GFR-binding peptide
  MOD_RES (3)..(4): Xaa is C or S
  MOD_RES (18)..(19)..(20)..(21)..(22): Xaa is A or G
  MOD_RES (23)..(24)..(25)..(26): Xaa is A or G or is absent
SPXXVSQDLSATSILYYXXXXXXXXXLRKHRMIVKS

SEQ ID NO: 6698 - protein, 39 aa, Artificial Sequence
  GFR-binding peptide
  MOD_RES (1)..(36)..(38): Xaa is C or S
  MOD_RES (15)..(16)..(17)..(18)..(19): Xaa is A or G
  MOD_RES (20)..(21)..(22)..(23): Xaa is A or G or is absent
XVPTKLSATSVLYYXXXXXXXXXLRKHREGMSVAEXGXR

SEQ ID NO: 6699 - protein, 39 aa, Artificial Sequence
  GFR-binding peptide
  MOD_RES (5)..(6)..(37)..(39): Xaa is C or S
SAAPXXVPQALSPISILYKVGRKPKVLKYHYMIVRSXKX

SEQ ID NO: 6700 - protein, 35 aa, Artificial Sequence
  GFR-binding peptide
  MOD_RES (1)..(2): Xaa is C or S
  MOD_RES (16)..(17)..(18)..(19)..(20): Xaa is A or G
  MOD_RES (21)..(22)..(23)..(24): Xaa is A or G or is absent
XXVPTELSATSMLYYXXXXXXXXXLRKHRDMVVEG

SEQ ID NO: 6701 - protein, 34 aa, Artificial Sequence
  GFR-binding peptide
  MOD_RES (1)..(2): Xaa is C or S
  MOD_RES (16)..(17)..(18)..(19)..(20): Xaa is A or G
  MOD_RES (21)..(22)..(23)..(24): Xaa is A or G or is absent
XXVPQDLSPISILYKXXXXXXXXXLKYHYMVVKS

SEQ ID NO: 6702 - protein, 34 aa, Artificial Sequence
  GFR-binding peptide
  MOD_RES (1)..(1): Xaa is C or S
  MOD_RES (15)..(16)..(17)..(18)..(19): Xaa is A or G
  MOD_RES (20)..(21)..(22)..(23): Xaa is A or G or is absent
XAPTKLSPISVLYKXXXXXXXXXLKYHYNMVVKA

SEQ ID NO: 6703 - protein, 38 aa, Artificial Sequence
  GFR-binding peptide
  MOD_RES (3)..(35)..(37): Xaa is C or S
PTXAPTKLSPISVLYKDDSSNVILKYHYNMVVRSXGXH

SEQ ID NO: 6704 - protein, 37 aa, Artificial Sequence
  GFR-binding peptide
  MOD_RES (5)..(6)..(37): Xaa is C or S
SASPXXVPQDLSATSILYYVGRTPKVLRKHRMVVKSX

SEQ ID NO: 6705 - protein, 40 aa, Artificial Sequence
  GFR-binding peptide
  MOD_RES (5)..(39): Xaa is C or S
  MOD_RES (19)..(20)..(21)..(22)..(23): Xaa is A or G
  MOD_RES (24)..(25)..(26)..(27): Xaa is A or G or is absent
TKPTXAPTKLNAISVLYFXXXXXXXXXLKKYRNMVVRSXG

SEQ ID NO: 6706 - protein, 33 aa, Artificial Sequence
  GFR-binding peptide
  MOD_RES (31)..(33): Xaa is C or S
VPQALSAISILYLVGRKPKVLKNYQMIVRSXKX

SEQ ID NO: 6707 - protein, 34 aa, Artificial Sequence
  GFR-binding peptide
  MOD_RES (34)..(34): Xaa is C or S
  MOD_RES (14)..(15)..(16)..(17)..(18): Xaa is A or G
  MOD_RES (19)..(20)..(21)..(22): Xaa is A or G or is absent
VPTELSPISMLYKXXXXXXXXXLKYHYEMVVEGX

SEQ ID NO: 6708 - protein, 40 aa, Artificial Sequence
  GFR-binding peptide
  MOD_RES (3)..(4)..(38)..(40): Xaa is C or S
  MOD_RES (18)..(19)..(20)..(21)..(22): Xaa is A or G
  MOD_RES (23)..(24)..(25)..(26): Xaa is A or G or is absent
KPXXAPTQLNAISVLYFXXXXXXXXXLKKYRNMVVRAXGX

SEQ ID NO: 6709 - protein, 39 aa, Artificial Sequence
  GFR-binding peptide
  MOD_RES (4)..(5)..(39): Xaa is C or S
  MOD_RES (19)..(20)..(21)..(22)..(23): Xaa is A or G
  MOD_RES (24)..(25)..(26)..(27): Xaa is A or G or is absent
PKPXXAPTKLSATSVLYYXXXXXXXXXLRKHRNMVVRSX

SEQ ID NO: 6710 - protein, 38 aa, Artificial Sequence
  GFR-binding peptide
  MOD_RES (6)..(7): Xaa is C or S
SIPKAXXVPTELSATSMLYYDEYDKVVLRKHREMVVEG

SEQ ID NO: 6711 - protein, 43 aa, Artificial Sequence
  GFR-binding peptide
  MOD_RES (6)..(7)..(41)..(43): Xaa is C or S
  MOD_RES (21)..(22)..(23)..(24)..(25): Xaa is A or G
  MOD_RES (26)..(27)..(28)..(29): Xaa is A or G or is absent
SIPKAXXVPTELNAISMLYFXXXXXXXXXLKKYREMVVEGXGX

SEQ ID NO: 6712 - protein, 37 aa, Artificial Sequence
  GFR-binding peptide
  MOD_RES (35)..(37): Xaa is C or S
TQVQLNAISVLYFEIVRKKPIFLKKYRTLEDHLAXKX

SEQ ID NO: 6713 - protein, 38 aa, Artificial Sequence
  GFR-binding peptide
  MOD_RES (2)..(3)..(35)..(37): Xaa is C or S
AXXVPTELNAISMLYFDEYDKVVLKKYREMVVEGXGXR

SEQ ID NO: 6714 - protein, 35 aa, Artificial Sequence
  GFR-binding peptide
  MOD_RES (1)..(33)..(35): Xaa is C or S
XVPTELSATSMLYYDENEKVVLRKHRDMVVEGXGX

SEQ ID NO: 6715 - protein, 40 aa, Artificial Sequence
  GFR-binding peptide
  MOD_RES (5)..(6)..(39): Xaa is C or S
  MOD_RES (20)..(21)..(22)..(23)..(24): Xaa is A or G
  MOD_RES (25)..(26)..(27)..(28): Xaa is A or G or is absent
SAAPXXVPQALSATSILYYXXXXXXXXXLRKHRMIVRSXK

SEQ ID NO: 6716 - protein, 36 aa, Artificial Sequence
  GFR-binding peptide
  MOD_RES (36)..(36): Xaa is C or S
  MOD_RES (15)..(16)..(17)..(18)..(19): Xaa is A or G
  MOD_RES (20)..(21)..(22)..(23): Xaa is A or G or is absent
PTQVQLSAISVLYLXXXXXXXXXLKNYQTLEDHLAX

SEQ ID NO: 6717 - protein, 35 aa, Artificial Sequence
  GFR-binding peptide
  MOD_RES (15)..(16)..(17)..(18)..(19): Xaa is A or G
  MOD_RES (20)..(21)..(22)..(23): Xaa is A or G or is absent
PTQVQLSPISVLYKXXXXXXXXXLKYHYTLEDHLA

SEQ ID NO: 6718 - protein, 40 aa, Artificial Sequence
  GFR-binding peptide
  MOD_RES (3)..(4)..(38)..(40): Xaa is C or S
  MOD_RES (18)..(19)..(20)..(21)..(22): Xaa is A or G
  MOD_RES (23)..(24)..(25)..(26): Xaa is A or G or is absent
KPXXAPTKLNAISVLYFXXXXXXXXXLKKYRNMVVRSXGX

SEQ ID NO: 6719 - protein, 35 aa, Artificial Sequence
  GFR-binding peptide
  MOD_RES (1)..(32)..(34): Xaa is C or S
XVPQDLSAISILYLVGRTPKVLKNYQMVVKSXKXS

SEQ ID NO: 6720 - protein, 44 aa, Artificial Sequence
  GFR-binding peptide
  MOD_RES (7)..(41)..(43): Xaa is C or S
  MOD_RES (21)..(22)..(23)..(24)..(25): Xaa is A or G
  MOD_RES (26)..(27)..(28)..(29): Xaa is A or G or is absent
HVTKPTXAPTKLNAISVLYFXXXXXXXXXLKKYRNMVVRSXGXH

SEQ ID NO: 6721 - protein, 36 aa, Artificial Sequence
  GFR-binding peptide
  MOD_RES (1)..(2)..(35): Xaa is C or S
  MOD_RES (16)..(17)..(18)..(19)..(20): Xaa is A or G
  MOD_RES (21)..(22)..(23)..(24): Xaa is A or G or is absent
XXVPQALSPISILYKXXXXXXXXXLKYHYMIVRSXK

SEQ ID NO: 6722 - protein, 37 aa, Artificial Sequence
  GFR-binding peptide
  MOD_RES (35)..(37): Xaa is C or S
  MOD_RES (14)..(15)..(16)..(17)..(18): Xaa is A or G
  MOD_RES (19)..(20)..(21)..(22): Xaa is A or G or is absent
VPTKLSAISVLYLXXXXXXXXXLKNYQEGMSVAEXGX

SEQ ID NO: 6723 - protein, 42 aa, Artificial Sequence
  GFR-binding peptide
  MOD_RES (6)..(7)..(42): Xaa is C or S
  MOD_RES (21)..(22)..(23)..(24)..(25): Xaa is A or G
  MOD_RES (26)..(27)..(28)..(29): Xaa is A or G or is absent
KVGKAXXVPTKLSATSVLYYXXXXXXXXXLRKHREGMSVAEX

SEQ ID NO: 6724 - protein, 39 aa, Artificial Sequence
  GFR-binding peptide
  MOD_RES (6)..(7): Xaa is C or S
  MOD_RES (21)..(22)..(23)..(24)..(25): Xaa is A or G
  MOD_RES (26)..(27)..(28)..(29): Xaa is A or G or is absent
ASAAPXXVPQALSATSILYYXXXXXXXXXLRKHRMIVRS

SEQ ID NO: 6725 - protein, 38 aa, Artificial Sequence
  GFR-binding peptide
  MOD_RES (2)..(3)..(38): Xaa is C or S
  MOD_RES (17)..(18)..(19)..(20)..(21): Xaa is A or G
  MOD_RES (22)..(23)..(24)..(25): Xaa is A or G or is absent
AXXVPTKLSATSVLYYXXXXXXXXXLRKHREGMSVAEX

SEQ ID NO: 6726 - protein, 39 aa, Artificial Sequence
  GFR-binding peptide
  MOD_RES (5)..(6)..(39): Xaa is C or S
  MOD_RES (20)..(21)..(22)..(23)..(24): Xaa is A or G
  MOD_RES (25)..(26)..(27)..(28): Xaa is A or G or is absent
SASPXXVSQDLNAISILYFXXXXXXXXXLKKYRMIVKSX

SEQ ID NO: 6727 - protein, 35 aa, Artificial Sequence
  GFR-binding peptide
  MOD_RES (1)..(2)..(35): Xaa is C or S
  MOD_RES (16)..(17)..(18)..(19)..(20): Xaa is A or G
  MOD_RES (21)..(22)..(23)..(24): Xaa is A or G or is absent
XXVPQDLNAISILYFXXXXXXXXXLKKYRMVVKSX

SEQ ID NO: 6728 - protein, 33 aa, Artificial Sequence
  GFR-binding peptide
  MOD_RES (1)..(1): Xaa is C or S
  MOD_RES (15)..(16)..(17)..(18)..(19): Xaa is A or G
  MOD_RES (20)..(21)..(22)..(23): Xaa is A or G or is absent
XVPTELSPISMLYKXXXXXXXXXLKYHYEMVVE

SEQ ID NO: 6729 - protein, 39 aa, Artificial Sequence
  GFR-binding peptide
  MOD_RES (36)..(38): Xaa is C or S
  MOD_RES (15)..(16)..(17)..(18)..(19): Xaa is A or G
  MOD_RES (20)..(21)..(22)..(23): Xaa is A or G or is absent
PTQVQLNAISVLYFXXXXXXXXXLKKYRTLEDHLAXKXE

SEQ ID NO: 6730 - protein, 39 aa, Artificial Sequence
  GFR-binding peptide
  MOD_RES (5)..(6)..(39): Xaa is C or S
  MOD_RES (20)..(21)..(22)..(23)..(24): Xaa is A or G
  MOD_RES (25)..(26)..(27)..(28): Xaa is A or G or is absent
SASPXXVPQDLSATSILYYXXXXXXXXXLRKHRMVVKSX

SEQ ID NO: 6731 - protein, 34 aa, Artificial Sequence
  GFR-binding peptide
  MOD_RES (2)..(3)..(34): Xaa is C or S
PXXVPQDLSPISILYKVGRTPKVLKYHYMVVKSX

SEQ ID NO: 6732 - protein, 34 aa, Artificial Sequence
  GFR-binding peptide
  MOD_RES (2)..(3): Xaa is C or S
AXXAPTKLNAISVLYFDSSNNVILKKYRNMVVKA

SEQ ID NO: 6733 - protein, 33 aa, Artificial Sequence
  GFR-binding peptide
  MOD_RES (1)..(2): Xaa is C or S
XXAPTKLSAISVLYLDDSSNVILKNYQNMVVRS

SEQ ID NO: 6734 - protein, 33 aa, Artificial Sequence
  GFR-binding peptide
  MOD_RES (32)..(32): Xaa is C or S
APTKLSATSVLYYDDSSNVILRKHRNMVVRSXG

SEQ ID NO: 6735 - protein, 37 aa, Artificial Sequence
  GFR-binding peptide
  MOD_RES (1)..(2)..(36): Xaa is C or S
  MOD_RES (16)..(17)..(18)..(19)..(20): Xaa is A or G
  MOD_RES (21)..(22)..(23)..(24): Xaa is A or G or is absent
XXVPTELSAISMLYLXXXXXXXXXLKNYQDMVVEGXG

SEQ ID NO: 6736 - protein, 33 aa, Artificial Sequence
  GFR-binding peptide
  MOD_RES (1)..(33): Xaa is C or S
XAPTKLSAISVLYLDDSSNVILKNYQNMVVRSX

SEQ ID NO: 6737 - protein, 31 aa, Artificial Sequence
  GFR-binding peptide
VPTELSATSMLYYDEYDKVVLRKHREMVVEG

SEQ ID NO: 6738 - protein, 37 aa, Artificial Sequence
  GFR-binding peptide
  MOD_RES (4)..(5)..(36): Xaa is C or S
AAPXXVPQALSPISILYKVGRKPKVLKYHYMIVRSXK

SEQ ID NO: 6739 - protein, 40 aa, Artificial Sequence
  GFR-binding peptide
  MOD_RES (2)..(3)..(37)..(39): Xaa is C or S
  MOD_RES (17)..(18)..(19)..(20)..(21): Xaa is A or G
  MOD_RES (22)..(23)..(24)..(25): Xaa is A or G or is absent
PXXAPTKLNAISVLYFXXXXXXXXXLKKYRNMVVRSXGXH

SEQ ID NO: 6740 - protein, 43 aa, Artificial Sequence
  GFR-binding peptide
  MOD_RES (6)..(7)..(40)..(42): Xaa is C or S
  MOD_RES (21)..(22)..(23)..(24)..(25): Xaa is A or G
  MOD_RES (26)..(27)..(28)..(29): Xaa is A or G or is absent
ASASPXXVSQDLSATSILYYXXXXXXXXXLRKHRMIVKSXKXS

SEQ ID NO: 6741 - protein, 41 aa, Artificial Sequence
  GFR-binding peptide
  MOD_RES (5)..(5): Xaa is C or S
  MOD_RES (21)..(22)..(23)..(24)..(25): Xaa is A or G
  MOD_RES (26)..(27)..(28)..(29): Xaa is A or G or is absent
RNVQXRPTQVQLSAISVLYLXXXXXXXXXLKNYQTLEDHLA

SEQ ID NO: 6742 - protein, 40 aa, Artificial Sequence
  GFR-binding peptide
  MOD_RES (2)..(3)..(37)..(39): Xaa is C or S
  MOD_RES (17)..(18)..(19)..(20)..(21): Xaa is A or G
  MOD_RES (22)..(23)..(24)..(25): Xaa is A or G or is absent
AXXVPTELSPISMLYKXXXXXXXXXLKYHYDMVVEGXGXR

SEQ ID NO: 6743 - protein, 34 aa, Artificial Sequence
  GFR-binding peptide
  MOD_RES (32)..(34): Xaa is C or S
VPTELSPISMLYKDENEKVVLKYHYDMVVEGXGX

SEQ ID NO: 6744 - protein, 41 aa, Artificial Sequence
  GFR-binding peptide
  MOD_RES (3)..(4)..(38)..(40): Xaa is C or S
  MOD_RES (18)..(19)..(20)..(21)..(22): Xaa is A or G
  MOD_RES (23)..(24)..(25)..(26): Xaa is A or G or is absent
KAXXAPTKLSPISVLYKXXXXXXXXXLKYHYNMVVKAXGXH

SEQ ID NO: 6745 - protein, 32 aa, Artificial Sequence
  GFR-binding peptide
  MOD_RES (14)..(15)..(16)..(17)..(18): Xaa is A or G
  MOD_RES (19)..(20)..(21)..(22): Xaa is A or G or is absent
APTKLSAISVLYLXXXXXXXXXLKNYQNMVVK

SEQ ID NO: 6746 - protein, 39 aa, Artificial Sequence
  GFR-binding peptide
  MOD_RES (5)..(6)..(39): Xaa is C or S
  MOD_RES (20)..(21)..(22)..(23)..(24): Xaa is A or G
  MOD_RES (25)..(26)..(27)..(28): Xaa is A or G or is absent
SASPXXVPQDLSAISILYLXXXXXXXXXLKNYQMVVKSX

SEQ ID NO: 6747 - protein, 39 aa, Artificial Sequence
  GFR-binding peptide
  MOD_RES (4)..(5)..(38): Xaa is C or S
  MOD_RES (19)..(20)..(21)..(22)..(23): Xaa is A or G
  MOD_RES (24)..(25)..(26)..(27): Xaa is A or G or is absent
ASPXXVPQDLSPISILYKXXXXXXXXXLKYHYMVVKSXK

SEQ ID NO: 6748 - protein, 37 aa, Artificial Sequence
  GFR-binding peptide
  MOD_RES (2)..(3)..(36): Xaa is C or S
  MOD_RES (17)..(18)..(19)..(20)..(21): Xaa is A or G
  MOD_RES (22)..(23)..(24)..(25): Xaa is A or G or is absent
PXXVPQALNAISILYFXXXXXXXXXLKKYRMIVRSXK

SEQ ID NO: 6749 - protein, 39 aa, Artificial Sequence
  GFR-binding peptide
  MOD_RES (3)..(4)..(39): Xaa is C or S
  MOD_RES (18)..(19)..(20)..(21)..(22): Xaa is A or G
  MOD_RES (23)..(24)..(25)..(26): Xaa is A or G or is absent
KAXXVPTKLSPISVLYKXXXXXXXXXLKYHYEGMSVAEX

SEQ ID NO: 6750 - protein, 37 aa, Artificial Sequence
  GFR-binding peptide
  MOD_RES (2)..(3)..(34)..(36): Xaa is C or S
PXXVPQDLNAISILYFVGRTPKVLKKYRMVVKSXKXS

SEQ ID NO: 6751 - protein, 36 aa, Artificial Sequence
  GFR-binding peptide
  MOD_RES (1)..(2)..(36): Xaa is C or S
  MOD_RES (16)..(17)..(18)..(19)..(20): Xaa is A or G
  MOD_RES (21)..(22)..(23)..(24): Xaa is A or G or is absent
XXAPTKLNAISVLYFXXXXXXXXXLKKYRNMVVKAX

SEQ ID NO: 6752 - protein, 34 aa, Artificial Sequence
  GFR-binding peptide
  MOD_RES (34)..(34): Xaa is C or S
  MOD_RES (14)..(15)..(16)..(17)..(18): Xaa is A or G
  MOD_RES (19)..(20)..(21)..(22): Xaa is A or G or is absent
VPTELSATSMLYYXXXXXXXXXLRKHRDMVVEGX

SEQ ID NO: 6753 - protein, 42 aa, Artificial Sequence
  GFR-binding peptide
  MOD_RES (6)..(7)..(41): Xaa is C or S
  MOD_RES (21)..(22)..(23)..(24)..(25): Xaa is A or G
  MOD_RES (26)..(27)..(28)..(29): Xaa is A or G or is absent
KIPKAXXVPTELSAISMLYLXXXXXXXXXLKNYQDMVVEGXG

SEQ ID NO: 6754 - protein, 35 aa, Artificial Sequence
  GFR-binding peptide
  MOD_RES (1)..(35): Xaa is C or S
  MOD_RES (15)..(16)..(17)..(18)..(19): Xaa is A or G
  MOD_RES (20)..(21)..(22)..(23): Xaa is A or G or is absent
XAPTQLSPISVLYKXXXXXXXXXLKYHYNMVVRAX

SEQ ID NO: 6755 - protein, 41 aa, Artificial Sequence
  GFR-binding peptide
  MOD_RES (5)..(5): Xaa is C or S
  MOD_RES (21)..(22)..(23)..(24)..(25): Xaa is A or G
  MOD_RES (26)..(27)..(28)..(29): Xaa is A or G or is absent
RNVQXRPTQVQLSATSVLYYXXXXXXXXXLRKHRTLEDHLA

SEQ ID NO: 6756 - protein, 34 aa, Artificial Sequence
  GFR-binding peptide
  MOD_RES (1)..(2): Xaa is C or S
  MOD_RES (16)..(17)..(18)..(19)..(20): Xaa is A or G
  MOD_RES (21)..(22)..(23)..(24): Xaa is A or G or is absent
XXVPTELSAISMLYLXXXXXXXXXLKNYQDMVVE

SEQ ID NO: 6757 - protein, 32 aa, Artificial Sequence
  GFR-binding peptide
  MOD_RES (1)..(1): Xaa is C or S
XAPTQLSAISVLYLDDSSNVILKNYQNMVVRA

SEQ ID NO: 6758 - protein, 44 aa, Artificial Sequence
  GFR-binding peptide
  MOD_RES (6)..(7)..(41)..(43): Xaa is C or S
  MOD_RES (21)..(22)..(23)..(24)..(25): Xaa is A or G
  MOD_RES (26)..(27)..(28)..(29): Xaa is A or G or is absent
SIPKAXXVPTELSATSMLYYXXXXXXXXXLRKHREMVVEGXGXR

SEQ ID NO: 6759 - protein, 31 aa, Artificial Sequence
  GFR-binding peptide
  MOD_RES (1)..(1): Xaa is C or S
XAPTKLSPISVLYKDDSSNVILKYHYNMVVR

SEQ ID NO: 6760 - protein, 38 aa, Artificial Sequence
  GFR-binding peptide
  MOD_RES (2)..(3)..(35)..(37): Xaa is C or S
PXXAPTKLSPISVLYKDDSSNVILKYHYNMVVRSXGXH

SEQ ID NO: 6761 - protein, 38 aa, Artificial Sequence
  GFR-binding peptide
  MOD_RES (1)..(2)..(35)..(37): Xaa is C or S
  MOD_RES (16)..(17)..(18)..(19)..(20): Xaa is A or G
  MOD_RES (21)..(22)..(23)..(24): Xaa is A or G or is absent
XXVPQALSATSILYYXXXXXXXXXLRKHRMIVRSXKXS

SEQ ID NO: 6762 - protein, 36 aa, Artificial Sequence
  GFR-binding peptide
  MOD_RES (33)..(35): Xaa is C or S
  MOD_RES (14)..(15)..(16)..(17)..(18): Xaa is A or G
  MOD_RES (19)..(20)..(21)..(22): Xaa is A or G or is absent
VPQDLSPISILYKXXXXXXXXXLKYHYMVVKSXKXS

SEQ ID NO: 6763 - protein, 35 aa, Artificial Sequence
  GFR-binding peptide
  MOD_RES (4)..(5): Xaa is C or S
PKPXXAPTKLSAISVLYLDDSSNVILKNYQNMVVR

SEQ ID NO: 6764 - protein, 39 aa, Artificial Sequence
  GFR-binding peptide
  MOD_RES (6)..(7): Xaa is C or S
  MOD_RES (21)..(22)..(23)..(24)..(25): Xaa is A or G
  MOD_RES (26)..(27)..(28)..(29): Xaa is A or G or is absent
KIPKAXXVPTELSAISMLYLXXXXXXXXXLKNYQDMVVE

SEQ ID NO: 6765 - protein, 42 aa, Artificial Sequence
  GFR-binding peptide
  MOD_RES (5)..(6)..(39)..(41): Xaa is C or S
  MOD_RES (20)..(21)..(22)..(23)..(24): Xaa is A or G
  MOD_RES (25)..(26)..(27)..(28): Xaa is A or G or is absent
SASPXXVPQDLNAISILYFXXXXXXXXXLKKYRMVVKSXKXS

SEQ ID NO: 6766 - protein, 38 aa, Artificial Sequence
  GFR-binding peptide
  MOD_RES (1)..(2)..(36)..(38): Xaa is C or S
  MOD_RES (16)..(17)..(18)..(19)..(20): Xaa is A or G
  MOD_RES (21)..(22)..(23)..(24): Xaa is A or G or is absent
XXVPTELSAISMLYLXXXXXXXXXLKNYQDMVVEGXGX

SEQ ID NO: 6767 - protein, 38 aa, Artificial Sequence
  GFR-binding peptide
  MOD_RES (2)..(2): Xaa is C or S
  MOD_RES (18)..(19)..(20)..(21)..(22): Xaa is A or G
  MOD_RES (23)..(24)..(25)..(26): Xaa is A or G or is absent
QXRPTQVQLNAISVLYFXXXXXXXXXLKKYRTLEDHLA

SEQ ID NO: 6768 - protein, 40 aa, Artificial Sequence
  GFR-binding peptide
  MOD_RES (4)..(5)..(38)..(40): Xaa is C or S
GKAXXVPTKLSAISVLYLDDMGVPTLKNYQEGMSVAEXGX

SEQ ID NO: 6769 - protein, 33 aa, Artificial Sequence
  GFR-binding peptide
  MOD_RES (1)..(1): Xaa is C or S
XVPTKLNAISVLYFDDMGVPTLKKYREGMSVAE

SEQ ID NO: 6770 - protein, 35 aa, Artificial Sequence
  GFR-binding peptide
  MOD_RES (2)..(3): Xaa is C or S
  MOD_RES (17)..(18)..(19)..(20)..(21): Xaa is A or G
  MOD_RES (22)..(23)..(24)..(25): Xaa is A or G or is absent
AXXVPTELNAISMLYFXXXXXXXXXLKKYREMVVE

SEQ ID NO: 6771 - protein, 40 aa, Artificial Sequence
  GFR-binding peptide
  MOD_RES (5)..(6)..(40): Xaa is C or S
  MOD_RES (20)..(21)..(22)..(23)..(24): Xaa is A or G
  MOD_RES (25)..(26)..(27)..(28): Xaa is A or G or is absent
VPKPXXAPTKLNAISVLYFXXXXXXXXXLKKYRNMVVRSX

SEQ ID NO: 6772 - protein, 41 aa, Artificial Sequence
  GFR-binding peptide
  MOD_RES (6)..(7)..(40): Xaa is C or S
KVGKAXXVPTKLSAISVLYLDDMGVPTLKNYQEGMSVAEXG

SEQ ID NO: 6773 - protein, 39 aa, Artificial Sequence
  GFR-binding peptide
  MOD_RES (1)..(2)..(36)..(38): Xaa is C or S
  MOD_RES (16)..(17)..(18)..(19)..(20): Xaa is A or G
  MOD_RES (21)..(22)..(23)..(24): Xaa is A or G or is absent
XXAPTKLNAISVLYFXXXXXXXXXLKKYRNMVVKAXGXH

SEQ ID NO: 6774 - protein, 41 aa, Artificial Sequence
  GFR-binding peptide
  MOD_RES (2)..(3)..(38)..(40): Xaa is C or S
  MOD_RES (17)..(18)..(19)..(20)..(21): Xaa is A or G
  MOD_RES (22)..(23)..(24)..(25): Xaa is A or G or is absent
AXXVPTKLSAISVLYLXXXXXXXXXLKNYQEGMSVAEXGXR

SEQ ID NO: 6775 - protein, 40 aa, Artificial Sequence
  GFR-binding peptide
  MOD_RES (3)..(4)..(37)..(39): Xaa is C or S
  MOD_RES (18)..(19)..(20)..(21)..(22): Xaa is A or G
  MOD_RES (23)..(24)..(25)..(26): Xaa is A or G or is absent
SPXXVSQDLNAISILYFXXXXXXXXXLKKYRMIVKSXKXS

SEQ ID NO: 6776 - protein, 37 aa, Artificial Sequence
  GFR-binding peptide
  MOD_RES (35)..(37): Xaa is C or S
  MOD_RES (14)..(15)..(16)..(17)..(18): Xaa is A or G
  MOD_RES (19)..(20)..(21)..(22): Xaa is A or G or is absent
VPTKLSATSVLYYXXXXXXXXXLRKHREGMSVAEXGX

SEQ ID NO: 6777 - protein, 39 aa, Artificial Sequence
  GFR-binding peptide
  MOD_RES (3)..(4)..(38): Xaa is C or S
  MOD_RES (18)..(19)..(20)..(21)..(22): Xaa is A or G
  MOD_RES (23)..(24)..(25)..(26): Xaa is A or G or is absent
KAXXVPTELSPISMLYKXXXXXXXXXLKYHYEMVVEGXG

SEQ ID NO: 6778 - protein, 42 aa, Artificial Sequence
  GFR-binding peptide
  MOD_RES (5)..(6)..(41): Xaa is C or S
  MOD_RES (20)..(21)..(22)..(23)..(24): Xaa is A or G
  MOD_RES (25)..(26)..(27)..(28): Xaa is A or G or is absent
VGKAXXVPTKLSAISVLYLXXXXXXXXXLKNYQEGMSVAEXG

SEQ ID NO: 6779 - protein, 40 aa, Artificial Sequence
  GFR-binding peptide
  MOD_RES (5)..(6)..(37)..(39): Xaa is C or S
SASPXXVSQDLSPISILYKIGKTPKILKYHYMIVKSXKXS

SEQ ID NO: 6780 - protein, 40 aa, Artificial Sequence
  GFR-binding peptide
  MOD_RES (6)..(7)..(38)..(40): Xaa is C or S
ASASPXXVPQDLSAISILYLVGRTPKVLKNYQMVVKSXKX

SEQ ID NO: 6781 - protein, 40 aa, Artificial Sequence
  GFR-binding peptide
  MOD_RES (2)..(3)..(38)..(40): Xaa is C or S
  MOD_RES (17)..(18)..(19)..(20)..(21): Xaa is A or G
  MOD_RES (22)..(23)..(24)..(25): Xaa is A or G or is absent
AXXVPTKLSAISVLYLXXXXXXXXXLKNYQEGMSVAEXGX

SEQ ID NO: 6782 - protein, 37 aa, Artificial Sequence
  GFR-binding peptide
  MOD_RES (34)..(36): Xaa is C or S
  MOD_RES (14)..(15)..(16)..(17)..(18): Xaa is A or G
  MOD_RES (19)..(20)..(21)..(22): Xaa is A or G or is absent
APTQLNAISVLYFXXXXXXXXXLKKYRNMVVRAXGXH

SEQ ID NO: 6783 - protein, 35 aa, Artificial Sequence
  GFR-binding peptide
  MOD_RES (1)..(2)..(35): Xaa is C or S
XXVPTKLSAISVLYLDDMGVPTLKNYQEGMSVAEX

SEQ ID NO: 6784 - protein, 36 aa, Artificial Sequence
  GFR-binding peptide
  MOD_RES (35)..(35): Xaa is C or S
TQVQLNAISVLYFEIVRKKPIFLKKYRTLEDHLAXK

SEQ ID NO: 6785 - protein, 38 aa, Artificial Sequence
  GFR-binding peptide
  MOD_RES (4)..(5)..(37): Xaa is C or S
PKPXXAPTKLSATSVLYYDDSSNVILRKHRNMVVRSXG

SEQ ID NO: 6786 - protein, 37 aa, Artificial Sequence
  GFR-binding peptide
  MOD_RES (1)..(34)..(36): Xaa is C or S
  MOD_RES (15)..(16)..(17)..(18)..(19): Xaa is A or G
  MOD_RES (20)..(21)..(22)..(23): Xaa is A or G or is absent
XVSQDLSAISILYLXXXXXXXXXLKNYQMIVKSXKXS

SEQ ID NO: 6787 - protein, 36 aa, Artificial Sequence
  GFR-binding peptide
  MOD_RES (2)..(3): Xaa is C or S
  MOD_RES (17)..(18)..(19)..(20)..(21): Xaa is A or G
  MOD_RES (22)..(23)..(24)..(25): Xaa is A or G or is absent
AXXAPTKLNAISVLYFXXXXXXXXXLKKYRNMVVKA

SEQ ID NO: 6788 - protein, 41 aa, Artificial Sequence
  GFR-binding peptide
  MOD_RES (6)..(7)..(39)..(41): Xaa is C or S
SIPKAXXVPTELSATSMLYYDEYDKVVLRKHREMVVEGXGX

SEQ ID NO: 6789 - protein, 37 aa, Artificial Sequence
  GFR-binding peptide
  MOD_RES (4)..(5)..(37): Xaa is C or S
PKAXXAPTKLNAISVLYFDSSNNVILKKYRNMVVKAX

SEQ ID NO: 6790 - protein, 35 aa, Artificial Sequence
  GFR-binding peptide
  MOD_RES (1)..(2)..(33)..(35): Xaa is C or S
XXVPQDLSATSILYYVGRTPKVLRKHRMVVKSXKX

SEQ ID NO: 6791 - protein, 38 aa, Artificial Sequence
  GFR-binding peptide
  MOD_RES (4)..(5)..(37): Xaa is C or S
PKAXXAPTKLSPISVLYKDSSNNVILKYHYNMVVKAXG

SEQ ID NO: 6792 - protein, 38 aa, Artificial Sequence
  GFR-binding peptide
  MOD_RES (4)..(5): Xaa is C or S
  MOD_RES (19)..(20)..(21)..(22)..(23): Xaa is A or G
  MOD_RES (24)..(25)..(26)..(27): Xaa is A or G or is absent
PKPXXAPTKLSPISVLYKXXXXXXXXXLKYHYNMVVRS

SEQ ID NO: 6793 - protein, 40 aa, Artificial Sequence
  GFR-binding peptide
  MOD_RES (2)..(3)..(37)..(39): Xaa is C or S
  MOD_RES (17)..(18)..(19)..(20)..(21): Xaa is A or G
  MOD_RES (22)..(23)..(24)..(25): Xaa is A or G or is absent
PXXAPTKLSPISVLYKXXXXXXXXXLKYHYNMVVRSXGXH

SEQ ID NO: 6794 - protein, 35 aa, Artificial Sequence
  GFR-binding peptide
  MOD_RES (3)..(4): Xaa is C or S
KPXXAPTKLSAISVLYLDDSSNVILKNYQNMVVRS

SEQ ID NO: 6795 - protein, 38 aa, Artificial Sequence
  GFR-binding peptide
  MOD_RES (4)..(5): Xaa is C or S
  MOD_RES (19)..(20)..(21)..(22)..(23): Xaa is A or G
  MOD_RES (24)..(25)..(26)..(27): Xaa is A or G or is absent
PKPXXAPTKLSATSVLYYXXXXXXXXXLRKHRNMVVRS

SEQ ID NO: 6796 - protein, 38 aa, Artificial Sequence
  GFR-binding peptide
  MOD_RES (35)..(37): Xaa is C or S
  MOD_RES (14)..(15)..(16)..(17)..(18): Xaa is A or G
  MOD_RES (19)..(20)..(21)..(22): Xaa is A or G or is absent
VPTKLSPISVLYKXXXXXXXXXLKYHYEGMSVAEXGXR

SEQ ID NO: 6797 - protein, 34 aa, Artificial Sequence
  GFR-binding peptide
  MOD_RES (34)..(34): Xaa is C or S
  MOD_RES (14)..(15)..(16)..(17)..(18): Xaa is A or G
  MOD_RES (19)..(20)..(21)..(22): Xaa is A or G or is absent
APTQLNAISVLYFXXXXXXXXXLKKYRNMVVRAX

SEQ ID NO: 6798 - protein, 34 aa, Artificial Sequence
  GFR-binding peptide
  MOD_RES (31)..(33): Xaa is C or S
VPQDLSPISILYKVGRTPKVLKYHYMVVKSXKXS

SEQ ID NO: 6799 - protein, 38 aa, Artificial Sequence
  GFR-binding peptide
  MOD_RES (3)..(4)..(35)..(37): Xaa is C or S
SPXXVPQDLSATSILYYVGRTPKVLRKHRMVVKSXKXS

SEQ ID NO: 6800 - protein, 39 aa, Artificial Sequence
  GFR-binding peptide
  MOD_RES (4)..(38): Xaa is C or S
  MOD_RES (18)..(19)..(20)..(21)..(22): Xaa is A or G
  MOD_RES (23)..(24)..(25)..(26): Xaa is A or G or is absent
KPTXAPTKLNAISVLYFXXXXXXXXXLKKYRNMVVRSXG

SEQ ID NO: 6801 - protein, 38 aa, Artificial Sequence
  GFR-binding peptide
  MOD_RES (4)..(5)..(38): Xaa is C or S
  MOD_RES (19)..(20)..(21)..(22)..(23): Xaa is A or G
  MOD_RES (24)..(25)..(26)..(27): Xaa is A or G or is absent
AAPXXVPQALNAISILYFXXXXXXXXXLKKYRMIVRSX

SEQ ID NO: 6802 - protein, 32 aa, Artificial Sequence
  GFR-binding peptide
  MOD_RES (14)..(15)..(16)..(17)..(18): Xaa is A or G
  MOD_RES (19)..(20)..(21)..(22): Xaa is A or G or is absent
APTKLSPISVLYKXXXXXXXXXLKYHYNMVVK

SEQ ID NO: 6803 - protein, 41 aa, Artificial Sequence
  GFR-binding peptide
  MOD_RES (7)..(39)..(41): Xaa is C or S
HVTKPTXAPTKLSATSVLYYDDSSNVILRKHRNMVVRSXGX

SEQ ID NO: 6804 - protein, 40 aa, Artificial Sequence
  GFR-binding peptide
  MOD_RES (6)..(7)..(40): Xaa is C or S
  MOD_RES (21)..(22)..(23)..(24)..(25): Xaa is A or G
  MOD_RES (26)..(27)..(28)..(29): Xaa is A or G or is absent
ASASPXXVSQDLSPISILYKXXXXXXXXXLKYHYMIVKSX

SEQ ID NO: 6805 - protein, 31 aa, Artificial Sequence
  GFR-binding peptide
  MOD_RES (1)..(1): Xaa is C or S
XVPQALSAISILYLVGRKPKVLKNYQMIVRS

SEQ ID NO: 6806 - protein, 41 aa, Artificial Sequence
  GFR-binding peptide
  MOD_RES (6)..(7)..(39)..(41): Xaa is C or S
TVPKPXXAPTQLSATSVLYYDDSSNVILRKHRNMVVRAXGX

SEQ ID NO: 6807 - protein, 39 aa, Artificial Sequence
  GFR-binding peptide
  MOD_RES (6)..(38): Xaa is C or S
VTKPTXAPTKLSATSVLYYDDSSNVILRKHRNMVVRSXG

SEQ ID NO: 6808 - protein, 31 aa, Artificial Sequence
  GFR-binding peptide
  MOD_RES (1)..(1): Xaa is C or S
XAPTKLSAISVLYLDDSSNVILKNYQNMVVR

SEQ ID NO: 6809 - protein, 41 aa, Artificial Sequence
  GFR-binding peptide
  MOD_RES (6)..(38)..(40): Xaa is C or S
VTKPTXAPTKLSATSVLYYDDSSNVILRKHRNMVVRSXGXH

SEQ ID NO: 6810 - protein, 35 aa, Artificial Sequence
  GFR-binding peptide
  MOD_RES (4)..(5): Xaa is C or S
PKPXXAPTKLSPISVLYKDDSSNVILKYHYNMVVR

SEQ ID NO: 6811 - protein, 39 aa, Artificial Sequence
  GFR-binding peptide
  MOD_RES (3)..(4)..(37)..(39): Xaa is C or S
  MOD_RES (18)..(19)..(20)..(21)..(22): Xaa is A or G
  MOD_RES (23)..(24)..(25)..(26): Xaa is A or G or is absent
APXXVPQALSATSILYYXXXXXXXXXLRKHRMIVRSXKX

SEQ ID NO: 6812 - protein, 37 aa, Artificial Sequence
  GFR-binding peptide
  MOD_RES (3)..(37): Xaa is C or S
  MOD_RES (17)..(18)..(19)..(20)..(21): Xaa is A or G
  MOD_RES (22)..(23)..(24)..(25): Xaa is A or G or is absent
PTXAPTKLSPISVLYKXXXXXXXXXLKYHYNMVVRSX

SEQ ID NO: 6813 - protein, 35 aa, Artificial Sequence
  GFR-binding peptide
  MOD_RES (32)..(34): Xaa is C or S
APTKLSATSVLYYDDSSNVILRKHRNMVVRSXGXH

SEQ ID NO: 6814 - protein, 36 aa, Artificial Sequence
  GFR-binding peptide
  MOD_RES (34)..(36): Xaa is C or S
  MOD_RES (14)..(15)..(16)..(17)..(18): Xaa is A or G
  MOD_RES (19)..(20)..(21)..(22): Xaa is A or G or is absent
VPTELSATSMLYYXXXXXXXXXLRKHREMVVEGXGX

SEQ ID NO: 6815 - protein, 34 aa, Artificial Sequence
  GFR-binding peptide
  MOD_RES (2)..(3): Xaa is C or S
AXXAPTKLSAISVLYLDSSNNVILKNYQNMVVKA

SEQ ID NO: 6816 - protein, 36 aa, Artificial Sequence
  GFR-binding peptide
  MOD_RES (3)..(4): Xaa is C or S
  MOD_RES (18)..(19)..(20)..(21)..(22): Xaa is A or G
  MOD_RES (23)..(24)..(25)..(26): Xaa is A or G or is absent
SPXXVPQDLSAISILYLXXXXXXXXXLKNYQMVVKS

SEQ ID NO: 6817 - protein, 41 aa, Artificial Sequence
  GFR-binding peptide
  MOD_RES (5)..(6)..(38)..(40): Xaa is C or S
VPKPXXAPTQLSAISVLYLDDSSNVILKNYQNMVVRAXGXH

SEQ ID NO: 6818 - protein, 32 aa, Artificial Sequence
  GFR-binding peptide
  MOD_RES (14)..(15)..(16)..(17)..(18): Xaa is A or G
  MOD_RES (19)..(20)..(21)..(22): Xaa is A or G or is absent
APTKLSPISVLYKXXXXXXXXXLKYHYNMVVR

SEQ ID NO: 6819 - protein, 37 aa, Artificial Sequence
  GFR-binding peptide
  MOD_RES (1)..(2)..(36): Xaa is C or S
  MOD_RES (16)..(17)..(18)..(19)..(20): Xaa is A or G
  MOD_RES (21)..(22)..(23)..(24): Xaa is A or G or is absent
XXAPTQLSATSVLYYXXXXXXXXXLRKHRNMVVRAXG

SEQ ID NO: 6820 - protein, 37 aa, Artificial Sequence
  GFR-binding peptide
  MOD_RES (3)..(4)..(37): Xaa is C or S
KAXXVPTKLSATSVLYYDDMGVPTLRKHREGMSVAEX

SEQ ID NO: 6821 - protein, 37 aa, Artificial Sequence
  GFR-binding peptide
  MOD_RES (3)..(3): Xaa is C or S
  MOD_RES (19)..(20)..(21)..(22)..(23): Xaa is A or G
  MOD_RES (24)..(25)..(26)..(27): Xaa is A or G or is absent
VQXRPTQVQLNAISVLYFXXXXXXXXXLKKYRTLEDH

SEQ ID NO: 6822 - protein, 32 aa, Artificial Sequence
  GFR-binding peptide
  MOD_RES (1)..(2): Xaa is C or S
XXVPTELSPISMLYKDEYDKVVLKYHYEMVVE

SEQ ID NO: 6823 - protein, 40 aa, Artificial Sequence
  GFR-binding peptide
  MOD_RES (6)..(7)..(39): Xaa is C or S
TVPKPXXAPTQLSPISVLYKDDSSNVILKYHYNMVVRAXG

SEQ ID NO: 6824 - protein, 33 aa, Artificial Sequence
  GFR-binding peptide
  MOD_RES (1)..(1): Xaa is C or S
  MOD_RES (15)..(16)..(17)..(18)..(19): Xaa is A or G
  MOD_RES (20)..(21)..(22)..(23): Xaa is A or G or is absent
XVPQALSPISILYKXXXXXXXXXLKYHYMIVRS

SEQ ID NO: 6825 - protein, 38 aa, Artificial Sequence
  GFR-binding peptide
  MOD_RES (1)..(2)..(35)..(37): Xaa is C or S
  MOD_RES (16)..(17)..(18)..(19)..(20): Xaa is A or G
  MOD_RES (21)..(22)..(23)..(24): Xaa is A or G or is absent
XXVPQALSAISILYLXXXXXXXXXLKNYQMIVRSXKXS

SEQ ID NO: 6826 - protein, 36 aa, Artificial Sequence
  GFR-binding peptide
  MOD_RES (3)..(4): Xaa is C or S
  MOD_RES (18)..(19)..(20)..(21)..(22): Xaa is A or G
  MOD_RES (23)..(24)..(25)..(26): Xaa is A or G or is absent
SPXXVSQDLSPISILYKXXXXXXXXXLKYHYMIVKS

SEQ ID NO: 6827 - protein, 38 aa, Artificial Sequence
  GFR-binding peptide
  MOD_RES (3)..(3): Xaa is C or S
  MOD_RES (19)..(20)..(21)..(22)..(23): Xaa is A or G
  MOD_RES (24)..(25)..(26)..(27): Xaa is A or G or is absent
VQXRPTQVQLSATSVLYYXXXXXXXXXLRKHRTLEDHL

SEQ ID NO: 6828 - protein, 40 aa, Artificial Sequence
  GFR-binding peptide
  MOD_RES (6)..(7): Xaa is C or S
  MOD_RES (21)..(22)..(23)..(24)..(25): Xaa is A or G
  MOD_RES (26)..(27)..(28)..(29): Xaa is A or G or is absent
SIPKAXXVPTELSPISMLYKXXXXXXXXXLKYHYEMVVEG

SEQ ID NO: 6829 - protein, 38 aa, Artificial Sequence
  GFR-binding peptide
  MOD_RES (3)..(3): Xaa is C or S
  MOD_RES (19)..(20)..(21)..(22)..(23): Xaa is A or G
  MOD_RES (24)..(25)..(26)..(27): Xaa is A or G or is absent
VQXRPTQVQLSPISVLYKXXXXXXXXXLKYHYTLEDHL

SEQ ID NO: 6830 - protein, 39 aa, Artificial Sequence
  GFR-binding peptide
  MOD_RES (3)..(4)..(37)..(39): Xaa is C or S
  MOD_RES (18)..(19)..(20)..(21)..(22): Xaa is A or G
  MOD_RES (23)..(24)..(25)..(26): Xaa is A or G or is absent
SPXXVSQDLSATSILYYXXXXXXXXXLRKHRMIVKSXKX

SEQ ID NO: 6831 - protein, 40 aa, Artificial Sequence
  GFR-binding peptide
  MOD_RES (6)..(7)..(38)..(40): Xaa is C or S
ASAAPXXVPQALNAISILYFVGRKPKVLKKYRMIVRSXKX

SEQ ID NO: 6832 - protein, 39 aa, Artificial Sequence
  GFR-binding peptide
  MOD_RES (6)..(6): Xaa is C or S
  MOD_RES (20)..(21)..(22)..(23)..(24): Xaa is A or G
  MOD_RES (25)..(26)..(27)..(28): Xaa is A or G or is absent
VTKPTXAPTKLSAISVLYLXXXXXXXXXLKNYQNMVVRS

SEQ ID NO: 6833 - protein, 36 aa, Artificial Sequence
  GFR-binding peptide
  MOD_RES (4)..(5)..(36): Xaa is C or S
AAPXXVPQALSPISILYKVGRKPKVLKYHYMIVRSX

SEQ ID NO: 6834 - protein, 40 aa, Artificial Sequence
  GFR-binding peptide
  MOD_RES (5)..(6)..(40): Xaa is C or S
  MOD_RES (20)..(21)..(22)..(23)..(24): Xaa is A or G
  MOD_RES (25)..(26)..(27)..(28): Xaa is A or G or is absent
VPKPXXAPTQLNAISVLYFXXXXXXXXXLKKYRNMVVRAX

SEQ ID NO: 6835 - protein, 37 aa, Artificial Sequence
  GFR-binding peptide
  MOD_RES (34)..(36): Xaa is C or S
  MOD_RES (14)..(15)..(16)..(17)..(18): Xaa is A or G
  MOD_RES (19)..(20)..(21)..(22): Xaa is A or G or is absent
APTKLSPISVLYKXXXXXXXXXLKYHYNMVVRSXGXH

SEQ ID NO: 6836 - protein, 40 aa, Artificial Sequence
  GFR-binding peptide
  MOD_RES (3)..(4)..(38)..(40): Xaa is C or S
  MOD_RES (18)..(19)..(20)..(21)..(22): Xaa is A or G
  MOD_RES (23)..(24)..(25)..(26): Xaa is A or G or is absent
KAXXAPTKLSATSVLYYXXXXXXXXXLRKHRNMVVKAXGX

SEQ ID NO: 6837 - protein, 37 aa, Artificial Sequence
  GFR-binding peptide
  MOD_RES (1)..(2)..(36): Xaa is C or S
  MOD_RES (16)..(17)..(18)..(19)..(20): Xaa is A or G
  MOD_RES (21)..(22)..(23)..(24): Xaa is A or G or is absent
XXAPTKLSATSVLYYXXXXXXXXXLRKHRNMVVKAXG

SEQ ID NO: 6838 - protein, 41 aa, Artificial Sequence
  GFR-binding peptide
  MOD_RES (2)..(39)..(41): Xaa is C or S
QXRPTQVQLSAISVLYLEIVRKKPIFLKNYQTLEDHLAXKX

SEQ ID NO: 6839 - protein, 32 aa, Artificial Sequence
  GFR-binding peptide
  MOD_RES (1)..(1): Xaa is C or S
XAPTQLSATSVLYYDDSSNVILRKHRNMVVRA

SEQ ID NO: 6840 - protein, 33 aa, Artificial Sequence
  GFR-binding peptide
  MOD_RES (1)..(2)..(33): Xaa is C or S
XXVPQDLNAISILYFVGRTPKVLKKYRMVVKSX

SEQ ID NO: 6841 - protein, 38 aa, Artificial Sequence
  GFR-binding peptide
  MOD_RES (5)..(6): Xaa is C or S
  MOD_RES (20)..(21)..(22)..(23)..(24): Xaa is A or G
  MOD_RES (25)..(26)..(27)..(28): Xaa is A or G or is absent
VPKPXXAPTKLSPISVLYKXXXXXXXXXLKYHYNMVVR

SEQ ID NO: 6842 - protein, 37 aa, Artificial Sequence
  GFR-binding peptide
  MOD_RES (2)..(2): Xaa is C or S
QXRPTQVQLSATSVLYYEIVRKKPIFLRKHRTLEDHL

SEQ ID NO: 6843 - protein, 30 aa, Artificial Sequence
  GFR-binding peptide
APTKLSAISVLYLDSSNNVILKNYQNMVVK

SEQ ID NO: 6844 - protein, 38 aa, Artificial Sequence
  GFR-binding peptide
  MOD_RES (1)..(35)..(37): Xaa is C or S
  MOD_RES (15)..(16)..(17)..(18)..(19): Xaa is A or G
  MOD_RES (20)..(21)..(22)..(23): Xaa is A or G or is absent
XAPTQLSAISVLYLXXXXXXXXXLKNYQNMVVRAXGXH

SEQ ID NO: 6845 - protein, 38 aa, Artificial Sequence
  GFR-binding peptide
  MOD_RES (3)..(4)..(38): Xaa is C or S
  MOD_RES (18)..(19)..(20)..(21)..(22): Xaa is A or G
  MOD_RES (23)..(24)..(25)..(26): Xaa is A or G or is absent
KPXXAPTQLSAISVLYLXXXXXXXXXLKNYQNMVVRAX

SEQ ID NO: 6846 - protein, 37 aa, Artificial Sequence
  GFR-binding peptide
  MOD_RES (2)..(3)..(34)..(36): Xaa is C or S
PXXVPQALSATSILYYVGRKPKVLRKHRMIVRSXKXS

SEQ ID NO: 6847 - protein, 37 aa, Artificial Sequence
  GFR-binding peptide
  MOD_RES (3)..(4)..(36): Xaa is C or S
KAXXVPTELSPISMLYKDEYDKVVLKYHYEMVVEGXG

SEQ ID NO: 6848 - protein, 39 aa, Artificial Sequence
  GFR-binding peptide
  MOD_RES (5)..(6)..(38): Xaa is C or S
IPKAXXVPTELSPISMLYKDEYDKVVLKYHYEMVVEGXG

SEQ ID NO: 6849 - protein, 35 aa, Artificial Sequence
  GFR-binding peptide
  MOD_RES (1)..(2)..(35): Xaa is C or S
  MOD_RES (16)..(17)..(18)..(19)..(20): Xaa is A or G
  MOD_RES (21)..(22)..(23)..(24): Xaa is A or G or is absent
XXVPQALNAISILYFXXXXXXXXXLKKYRMIVRSX

SEQ ID NO: 6850 - protein, 36 aa, Artificial Sequence
  GFR-binding peptide
  MOD_RES (4)..(4): Xaa is C or S
  MOD_RES (18)..(19)..(20)..(21)..(22): Xaa is A or G
  MOD_RES (23)..(24)..(25)..(26): Xaa is A or G or is absent
KPTXAPTKLSAISVLYLXXXXXXXXXLKNYQNMVVR

SEQ ID NO: 6851 - protein, 36 aa, Artificial Sequence
  GFR-binding peptide
  MOD_RES (1)..(33)..(35): Xaa is C or S
XVPTELSPISMLYKDENEKVVLKYHYDMVVEGXGXR

SEQ ID NO: 6852 - protein, 39 aa, Artificial Sequence
  GFR-binding peptide
  MOD_RES (4)..(5)..(37)..(39): Xaa is C or S
PKPXXAPTQLSATSVLYYDDSSNVILRKHRNMVVRAXGX

SEQ ID NO: 6853 - protein, 37 aa, Artificial Sequence
  GFR-binding peptide
  MOD_RES (2)..(3)..(37): Xaa is C or S
  MOD_RES (17)..(18)..(19)..(20)..(21): Xaa is A or G
  MOD_RES (22)..(23)..(24)..(25): Xaa is A or G or is absent
AXXVPTELSAISMLYLXXXXXXXXXLKNYQEMVVEGX

SEQ ID NO: 6854 - protein, 41 aa, Artificial Sequence
  GFR-binding peptide
  MOD_RES (4)..(5)..(39)..(41): Xaa is C or S
  MOD_RES (19)..(20)..(21)..(22)..(23): Xaa is A or G
  MOD_RES (24)..(25)..(26)..(27): Xaa is A or G or is absent
PKAXXVPTELSATSMLYYXXXXXXXXXLRKHRDMVVEGXGX

SEQ ID NO: 6855 - protein, 34 aa, Artificial Sequence
  GFR-binding peptide
  MOD_RES (33)..(33): Xaa is C or S
VPTKLSATSVLYYDDMGVPTLRKHREGMSVAEXG

SEQ ID NO: 6856 - protein, 39 aa, Artificial Sequence
  GFR-binding peptide
  MOD_RES (3)..(4)..(38): Xaa is C or S
  MOD_RES (18)..(19)..(20)..(21)..(22): Xaa is A or G
  MOD_RES (23)..(24)..(25)..(26): Xaa is A or G or is absent
KAXXVPTELSPISMLYKXXXXXXXXXLKYHYDMVVEGXG

SEQ ID NO: 6857 - protein, 33 aa, Artificial Sequence
  GFR-binding peptide
  MOD_RES (32)..(32): Xaa is C or S
VPTELNAISMLYFDEYDKVVLKKYREMVVEGXG

SEQ ID NO: 6858 - protein, 37 aa, Artificial Sequence
  GFR-binding peptide
  MOD_RES (1)..(35)..(37): Xaa is C or S
  MOD_RES (15)..(16)..(17)..(18)..(19): Xaa is A or G
  MOD_RES (20)..(21)..(22)..(23): Xaa is A or G or is absent
XVPTELSAISMLYLXXXXXXXXXLKNYQDMVVEGXGX

SEQ ID NO: 6859 - protein, 36 aa, Artificial Sequence
  GFR-binding peptide
RPTQVQLNAISVLYFEIVRKKPIFLKKYRTLEDHLA

SEQ ID NO: 6860 - protein, 35 aa, Artificial Sequence
  GFR-binding peptide
  MOD_RES (3)..(4)..(35): Xaa is C or S
APXXVPQALSPISILYKVGRKPKVLKYHYMIVRSX

SEQ ID NO: 6861 - protein, 34 aa, Artificial Sequence
  GFR-binding peptide
  MOD_RES (2)..(3): Xaa is C or S
PXXAPTKLSATSVLYYDDSSNVILRKHRNMVVRS

SEQ ID NO: 6862 - protein, 38 aa, Artificial Sequence
  GFR-binding peptide
  MOD_RES (4)..(5): Xaa is C or S
  MOD_RES (19)..(20)..(21)..(22)..(23): Xaa is A or G
  MOD_RES (24)..(25)..(26)..(27): Xaa is A or G or is absent
PKPXXAPTQLSAISVLYLXXXXXXXXXLKNYQNMVVRA

SEQ ID NO: 6863 - protein, 37 aa, Artificial Sequence
  GFR-binding peptide
  MOD_RES (4)..(5): Xaa is C or S
  MOD_RES (19)..(20)..(21)..(22)..(23): Xaa is A or G
  MOD_RES (24)..(25)..(26)..(27): Xaa is A or G or is absent
PKPXXAPTQLSPISVLYKXXXXXXXXXLKYHYNMVVR

SEQ ID NO: 6864 - protein, 43 aa, Artificial Sequence
  GFR-binding peptide
  MOD_RES (6)..(7)..(40)..(42): Xaa is C or S
  MOD_RES (21)..(22)..(23)..(24)..(25): Xaa is A or G
  MOD_RES (26)..(27)..(28)..(29): Xaa is A or G or is absent
ASASPXXVSQDLSAISILYLXXXXXXXXXLKNYQMIVKSXKXS

SEQ ID NO: 6865 - protein, 35 aa, Artificial Sequence
  GFR-binding peptide
  MOD_RES (1)..(2)..(35): Xaa is C or S
  MOD_RES (16)..(17)..(18)..(19)..(20): Xaa is A or G
  MOD_RES (21)..(22)..(23)..(24): Xaa is A or G or is absent
XXVSQDLSATSILYYXXXXXXXXXLRKHRMIVKSX

SEQ ID NO: 6866 - protein, 38 aa, Artificial Sequence
  GFR-binding peptide
  MOD_RES (5)..(37): Xaa is C or S
TKPTXAPTKLSATSVLYYDDSSNVILRKHRNMVVRSXG

SEQ ID NO: 6867 - protein, 33 aa, Artificial Sequence
  GFR-binding peptide
  MOD_RES (2)..(3): Xaa is C or S
PXXVSQDLSATSILYYIGKTPKILRKHRMIVKS

SEQ ID NO: 6868 - protein, 37 aa, Artificial Sequence
  GFR-binding peptide
  MOD_RES (6)..(6): Xaa is C or S
VTKPTXAPTKLSATSVLYYDDSSNVILRKHRNMVVRS

SEQ ID NO: 6869 - protein, 40 aa, Artificial Sequence
  GFR-binding peptide
  MOD_RES (3)..(4)..(37)..(39): Xaa is C or S
  MOD_RES (18)..(19)..(20)..(21)..(22): Xaa is A or G
  MOD_RES (23)..(24)..(25)..(26): Xaa is A or G or is absent
SPXXVPQDLNAISILYFXXXXXXXXXLKKYRMVVKSXKXS

SEQ ID NO: 6870 - protein, 35 aa, Artificial Sequence
  GFR-binding peptide
  MOD_RES (1)..(33)..(35): Xaa is C or S
XAPTKLSAISVLYLDDSSNVILKNYQNMVVRSXGX

SEQ ID NO: 6871 - protein, 35 aa, Artificial Sequence
  GFR-binding peptide
  MOD_RES (1)..(2): Xaa is C or S
  MOD_RES (16)..(17)..(18)..(19)..(20): Xaa is A or G
  MOD_RES (21)..(22)..(23)..(24): Xaa is A or G or is absent
XXAPTQLSATSVLYYXXXXXXXXXLRKHRNMVVRA

SEQ ID NO: 6872 - protein, 35 aa, Artificial Sequence
  GFR-binding peptide
  MOD_RES (3)..(4): Xaa is C or S
KPXXAPTQLSAISVLYLDDSSNVILKNYQNMVVRA

SEQ ID NO: 6873 - protein, 38 aa, Artificial Sequence
  GFR-binding peptide
  MOD_RES (3)..(4): Xaa is C or S
  MOD_RES (18)..(19)..(20)..(21)..(22): Xaa is A or G
  MOD_RES (23)..(24)..(25)..(26): Xaa is A or G or is absent
KAXXVPTKLSAISVLYLXXXXXXXXXLKNYQEGMSVAE

SEQ ID NO: 6874 - protein, 39 aa, Artificial Sequence
  GFR-binding peptide
  MOD_RES (4)..(4): Xaa is C or S
NVQXRPTQVQLSPISVLYKEIVRKKPIFLKYHYTLEDHL

SEQ ID NO: 6875 - protein, 35 aa, Artificial Sequence
  GFR-binding peptide
  MOD_RES (1)..(2)..(35): Xaa is C or S
  MOD_RES (16)..(17)..(18)..(19)..(20): Xaa is A or G
  MOD_RES (21)..(22)..(23)..(24): Xaa is A or G or is absent
XXVSQDLSAISILYLXXXXXXXXXLKNYQMIVKSX

SEQ ID NO: 6876 - protein, 40 aa, Artificial Sequence
  GFR-binding peptide
  MOD_RES (5)..(6)..(37)..(39): Xaa is C or S
SAAPXXVPQALSATSILYYVGRKPKVLRKHRMIVRSXKXS

SEQ ID NO: 6877 - protein, 35 aa, Artificial Sequence
  GFR-binding peptide
  MOD_RES (2)..(3)..(34): Xaa is C or S
PXXVSQDLSAISILYLIGKTPKILKNYQMIVKSXK

SEQ ID NO: 6878 - protein, 38 aa, Artificial Sequence
  GFR-binding peptide
  MOD_RES (3)..(4): Xaa is C or S
  MOD_RES (18)..(19)..(20)..(21)..(22): Xaa is A or G
  MOD_RES (23)..(24)..(25)..(26): Xaa is A or G or is absent
KAXXVPTKLSATSVLYYXXXXXXXXXLRKHREGMSVAE

SEQ ID NO: 6879 - protein, 35 aa, Artificial Sequence
  GFR-binding peptide
  MOD_RES (3)..(3): Xaa is C or S
  MOD_RES (17)..(18)..(19)..(20)..(21): Xaa is A or G
  MOD_RES (22)..(23)..(24)..(25): Xaa is A or G or is absent
PTXAPTKLNAISVLYFXXXXXXXXXLKKYRNMVVR

SEQ ID NO: 6880 - protein, 41 aa, Artificial Sequence
  GFR-binding peptide
  MOD_RES (5)..(6)..(38)..(40): Xaa is C or S
IPKAXXVPTELSPISMLYKDEYDKVVLKYHYEMVVEGXGXR

SEQ ID NO: 6881 - protein, 42 aa, Artificial Sequence
  GFR-binding peptide
  MOD_RES (6)..(7)..(39)..(41): Xaa is C or S
KIPKAXXVPTELSATSMLYYDENEKVVLRKHRDMVVEGXGXR

SEQ ID NO: 6882 - protein, 36 aa, Artificial Sequence
  GFR-binding peptide
  MOD_RES (2)..(3)..(36): Xaa is C or S
  MOD_RES (17)..(18)..(19)..(20)..(21): Xaa is A or G
  MOD_RES (22)..(23)..(24)..(25): Xaa is A or G or is absent
PXXVPQDLSPISILYKXXXXXXXXXLKYHYMVVKSX

SEQ ID NO: 6883 - protein, 39 aa, Artificial Sequence
  GFR-binding peptide
  MOD_RES (4)..(5)..(38): Xaa is C or S
  MOD_RES (19)..(20)..(21)..(22)..(23): Xaa is A or G
  MOD_RES (24)..(25)..(26)..(27): Xaa is A or G or is absent
ASPXXVPQDLSAISILYLXXXXXXXXXLKNYQMVVKSXK

SEQ ID NO: 6884 - protein, 40 aa, Artificial Sequence
  GFR-binding peptide
  MOD_RES (2)..(39): Xaa is C or S
QXRPTQVQLSPISVLYKEIVRKKPIFLKYHYTLEDHLAXK

SEQ ID NO: 6885 - protein, 38 aa, Artificial Sequence
  GFR-binding peptide
  MOD_RES (4)..(36)..(38): Xaa is C or S
KPTXAPTKLSAISVLYLDDSSNVILKNYQNMVVRSXGX

SEQ ID NO: 6886 - protein, 35 aa, Artificial Sequence
  GFR-binding peptide
  MOD_RES (3)..(4): Xaa is C or S
KAXXVPTELNAISMLYFDEYDKVVLKKYREMVVEG

SEQ ID NO: 6887 - protein, 37 aa, Artificial Sequence
  GFR-binding peptide
  MOD_RES (36)..(36): Xaa is C or S
PTQVQLSPISVLYKEIVRKKPIFLKYHYTLEDHLAXK

SEQ ID NO: 6888 - protein, 37 aa, Artificial Sequence
  GFR-binding peptide
  MOD_RES (4)..(5)..(36): Xaa is C or S
ASPXXVPQDLSATSILYYVGRTPKVLRKHRMVVKSXK

SEQ ID NO: 6889 - protein, 37 aa, Artificial Sequence
  GFR-binding peptide
  MOD_RES (37)..(37): Xaa is C or S
  MOD_RES (16)..(17)..(18)..(19)..(20): Xaa is A or G
  MOD_RES (21)..(22)..(23)..(24): Xaa is A or G or is absent
RPTQVQLSPISVLYKXXXXXXXXXLKYHYTLEDHLAX

SEQ ID NO: 6890 - protein, 37 aa, Artificial Sequence
  GFR-binding peptide
  MOD_RES (4)..(5)..(36): Xaa is C or S
ASPXXVPQDLSAISILYLVGRTPKVLKNYQMVVKSXK

SEQ ID NO: 6891 - protein, 35 aa, Artificial Sequence
  GFR-binding peptide
  MOD_RES (1)..(1): Xaa is C or S
  MOD_RES (15)..(16)..(17)..(18)..(19): Xaa is A or G
  MOD_RES (20)..(21)..(22)..(23): Xaa is A or G or is absent
XVPTKLSPISVLYKXXXXXXXXXLKYHYEGMSVAE

SEQ ID NO: 6892 - protein, 35 aa, Artificial Sequence
  GFR-binding peptide
  MOD_RES (1)..(2): Xaa is C or S
  MOD_RES (16)..(17)..(18)..(19)..(20): Xaa is A or G
  MOD_RES (21)..(22)..(23)..(24): Xaa is A or G or is absent
XXAPTKLSPISVLYKXXXXXXXXXLKYHYNMVVRS

SEQ ID NO: 6893 - protein, 41 aa, Artificial Sequence
  GFR-binding peptide
  MOD_RES (6)..(7)..(38)..(40): Xaa is C or S
ASASPXXVPQDLSAISILYLVGRTPKVLKNYQMVVKSXKXS

SEQ ID NO: 6894 - protein, 41 aa, Artificial Sequence
  GFR-binding peptide
  MOD_RES (5)..(5): Xaa is C or S
  MOD_RES (21)..(22)..(23)..(24)..(25): Xaa is A or G
  MOD_RES (26)..(27)..(28)..(29): Xaa is A or G or is absent
RNVQXRPTQVQLSPISVLYKXXXXXXXXXLKYHYTLEDHLA

SEQ ID NO: 6895 - protein, 44 aa, Artificial Sequence
  GFR-binding peptide
  MOD_RES (6)..(7)..(41)..(43): Xaa is C or S
  MOD_RES (21)..(22)..(23)..(24)..(25): Xaa is A or G
  MOD_RES (26)..(27)..(28)..(29): Xaa is A or G or is absent
AVPKAXXAPTKLSAISVLYLXXXXXXXXXLKNYQNMVVKAXGXH

SEQ ID NO: 6896 - protein, 39 aa, Artificial Sequence
  GFR-binding peptide
  MOD_RES (4)..(5)..(39): Xaa is C or S
  MOD_RES (19)..(20)..(21)..(22)..(23): Xaa is A or G
  MOD_RES (24)..(25)..(26)..(27): Xaa is A or G or is absent
PKPXXAPTKLSAISVLYLXXXXXXXXXLKNYQNMVVRSX

SEQ ID NO: 6897 - protein, 43 aa, Artificial Sequence
  GFR-binding peptide
  MOD_RES (5)..(6)..(40)..(42): Xaa is C or S
  MOD_RES (20)..(21)..(22)..(23)..(24): Xaa is A or G
  MOD_RES (25)..(26)..(27)..(28): Xaa is A or G or is absent
IPKAXXVPTELSAISMLYLXXXXXXXXXLKNYQDMVVEGXGXR

SEQ ID NO: 6898 - protein, 38 aa, Artificial Sequence
  GFR-binding peptide
  MOD_RES (2)..(3)..(36)..(38): Xaa is C or S
  MOD_RES (17)..(18)..(19)..(20)..(21): Xaa is A or G
  MOD_RES (22)..(23)..(24)..(25): Xaa is A or G or is absent
PXXVPQDLNAISILYFXXXXXXXXXLKKYRMVVKSXKX

SEQ ID NO: 6899 - protein, 33 aa, Artificial Sequence
  GFR-binding peptide
  MOD_RES (1)..(2): Xaa is C or S
XXAPTKLSPISVLYKDSSNNVILKYHYNMVVKA

SEQ ID NO: 6900 - protein, 38 aa, Artificial Sequence
  GFR-binding peptide
  MOD_RES (1)..(2)..(36)..(38): Xaa is C or S
  MOD_RES (16)..(17)..(18)..(19)..(20): Xaa is A or G
  MOD_RES (21)..(22)..(23)..(24): Xaa is A or G or is absent
XXVPTELSPISMLYKXXXXXXXXXLKYHYEMVVEGXGX

SEQ ID NO: 6901 - protein, 37 aa, Artificial Sequence
  GFR-binding peptide
  MOD_RES (3)..(4): Xaa is C or S
  MOD_RES (18)..(19)..(20)..(21)..(22): Xaa is A or G
  MOD_RES (23)..(24)..(25)..(26): Xaa is A or G or is absent
KPXXAPTQLNAISVLYFXXXXXXXXXLKKYRNMVVRA

SEQ ID NO: 6902 - protein, 40 aa, Artificial Sequence
  GFR-binding peptide
  MOD_RES (2)..(3)..(37)..(39): Xaa is C or S
  MOD_RES (17)..(18)..(19)..(20)..(21): Xaa is A or G
  MOD_RES (22)..(23)..(24)..(25): Xaa is A or G or is absent
AXXAPTKLNAISVLYFXXXXXXXXXLKKYRNMVVKAXGXH

SEQ ID NO: 6903 - protein, 40 aa, Artificial Sequence
  GFR-binding peptide
  MOD_RES (4)..(38)..(40): Xaa is C or S
  MOD_RES (18)..(19)..(20)..(21)..(22): Xaa is A or G
  MOD_RES (23)..(24)..(25)..(26): Xaa is A or G or is absent
KPTXAPTKLSAISVLYLXXXXXXXXXLKNYQNMVVRSXGX

SEQ ID NO: 6904 - protein, 36 aa, Artificial Sequence
  GFR-binding peptide
  MOD_RES (3)..(35): Xaa is C or S
PTXAPTKLSATSVLYYDDSSNVILRKHRNMVVRSXG

SEQ ID NO: 6905 - protein, 32 aa, Artificial Sequence
  GFR-binding peptide
  MOD_RES (14)..(15)..(16)..(17)..(18): Xaa is A or G
  MOD_RES (19)..(20)..(21)..(22): Xaa is A or G or is absent
VPTELNAISMLYFXXXXXXXXXLKKYRDMVVE

SEQ ID NO: 6906 - protein, 37 aa, Artificial Sequence
  GFR-binding peptide
  MOD_RES (4)..(5): Xaa is C or S
  MOD_RES (19)..(20)..(21)..(22)..(23): Xaa is A or G
  MOD_RES (24)..(25)..(26)..(27): Xaa is A or G or is absent
ASPXXVSQDLSPISILYKXXXXXXXXXLKYHYMIVKS

SEQ ID NO: 6907 - protein, 41 aa, Artificial Sequence
  GFR-binding peptide
  MOD_RES (4)..(41): Xaa is C or S
  MOD_RES (20)..(21)..(22)..(23)..(24): Xaa is A or G
  MOD_RES (25)..(26)..(27)..(28): Xaa is A or G or is absent
NVQXRPTQVQLSATSVLYYXXXXXXXXXLRKHRTLEDHLAX

SEQ ID NO: 6908 - protein, 40 aa, Artificial Sequence
  GFR-binding peptide
  MOD_RES (6)..(7)..(39): Xaa is C or S
YVPKPXXAPTKLSPISVLYKDDSSNVILKYHYNMVVRSXG

SEQ ID NO: 6909 - protein, 39 aa, Artificial Sequence
  GFR-binding peptide
  MOD_RES (6)..(7)..(38): Xaa is C or S
ASASPXXVPQDLSPISILYKVGRTPKVLKYHYMVVKSXK

SEQ ID NO: 6910 - protein, 42 aa, Artificial Sequence
  GFR-binding peptide
  MOD_RES (2)..(39)..(41): Xaa is C or S
  MOD_RES (18)..(19)..(20)..(21)..(22): Xaa is A or G
  MOD_RES (23)..(24)..(25)..(26): Xaa is A or G or is absent
QXRPTQVQLSAISVLYLXXXXXXXXXLKNYQTLEDHLAXKXE

SEQ ID NO: 6911 - protein, 45 aa, Artificial Sequence
  GFR-binding peptide
  MOD_RES (5)..(42)..(44): Xaa is C or S
  MOD_RES (21)..(22)..(23)..(24)..(25): Xaa is A or G
  MOD_RES (26)..(27)..(28)..(29): Xaa is A or G or is absent
RNVQXRPTQVQLSAISVLYLXXXXXXXXXLKNYQTLEDHLAXKXE

SEQ ID NO: 6912 - protein, 36 aa, Artificial Sequence
  GFR-binding peptide
  MOD_RES (34)..(36): Xaa is C or S
  MOD_RES (14)..(15)..(16)..(17)..(18): Xaa is A or G
  MOD_RES (19)..(20)..(21)..(22): Xaa is A or G or is absent
APTKLSATSVLYYXXXXXXXXXLRKHRNMVVRSXGX

SEQ ID NO: 6913 - protein, 38 aa, Artificial Sequence
  GFR-binding peptide
  MOD_RES (5)..(5): Xaa is C or S
  MOD_RES (19)..(20)..(21)..(22)..(23): Xaa is A or G
  MOD_RES (24)..(25)..(26)..(27): Xaa is A or G or is absent
TKPTXAPTKLSATSVLYYXXXXXXXXXLRKHRNMVVRS

SEQ ID NO: 6914 - protein, 39 aa, Artificial Sequence
  GFR-binding peptide
  MOD_RES (6)..(7)..(39): Xaa is C or S
YVPKPXXAPTKLSPISVLYKDDSSNVILKYHYNMVVRSX

SEQ ID NO: 6915 - protein, 35 aa, Artificial Sequence
  GFR-binding peptide
  MOD_RES (34)..(34): Xaa is C or S
  MOD_RES (14)..(15)..(16)..(17)..(18): Xaa is A or G
  MOD_RES (19)..(20)..(21)..(22): Xaa is A or G or is absent
APTKLSPISVLYKXXXXXXXXXLKYHYNMVVKAXG

SEQ ID NO: 6916 - protein, 31 aa, Artificial Sequence
  GFR-binding peptide
  MOD_RES (1)..(1): Xaa is C or S
XVSQDLNAISILYFIGKTPKILKKYRMIVKS

SEQ ID NO: 6917 - protein, 41 aa, Artificial Sequence
  GFR-binding peptide
  MOD_RES (4)..(5)..(40): Xaa is C or S
  MOD_RES (19)..(20)..(21)..(22)..(23): Xaa is A or G
  MOD_RES (24)..(25)..(26)..(27): Xaa is A or G or is absent
GKAXXVPTKLNAISVLYFXXXXXXXXXLKKYREGMSVAEXG

SEQ ID NO: 6918 - protein, 40 aa, Artificial Sequence
  GFR-binding peptide
  MOD_RES (4)..(5)..(38)..(40): Xaa is C or S
  MOD_RES (19)..(20)..(21)..(22)..(23): Xaa is A or G
  MOD_RES (24)..(25)..(26)..(27): Xaa is A or G or is absent
ASPXXVSQDLSATSILYYXXXXXXXXXLRKHRMIVKSXKX

SEQ ID NO: 6919 - protein, 32 aa, Artificial Sequence
  GFR-binding peptide
  MOD_RES (1)..(2): Xaa is C or S
XXVSQDLSATSILYYIGKTPKILRKHRMIVKS

SEQ ID NO: 6920 - protein, 34 aa, Artificial Sequence
  GFR-binding peptide
  MOD_RES (1)..(2): Xaa is C or S
  MOD_RES (16)..(17)..(18)..(19)..(20): Xaa is A or G
  MOD_RES (21)..(22)..(23)..(24): Xaa is A or G or is absent
XXVSQDLNAISILYFXXXXXXXXXLKKYRMIVKS

SEQ ID NO: 6921 - protein, 41 aa, Artificial Sequence
  GFR-binding peptide
  MOD_RES (5)..(6)..(40): Xaa is C or S
  MOD_RES (20)..(21)..(22)..(23)..(24): Xaa is A or G
  MOD_RES (25)..(26)..(27)..(28): Xaa is A or G or is absent
VPKPXXAPTQLSATSVLYYXXXXXXXXXLRKHRNMVVRAXG

SEQ ID NO: 6922 - protein, 38 aa, Artificial Sequence
  GFR-binding peptide
  MOD_RES (35)..(37): Xaa is C or S
  MOD_RES (14)..(15)..(16)..(17)..(18): Xaa is A or G
  MOD_RES (19)..(20)..(21)..(22): Xaa is A or G or is absent
TQVQLNAISVLYFXXXXXXXXXLKKYRTLEDHLAXKXE

SEQ ID NO: 6923 - protein, 41 aa, Artificial Sequence
  GFR-binding peptide
  MOD_RES (2)..(39)..(41): Xaa is C or S
QXRPTQVQLSATSVLYYEIVRKKPIFLRKHRTLEDHLAXKX

SEQ ID NO: 6924 - protein, 35 aa, Artificial Sequence
  GFR-binding peptide
  MOD_RES (2)..(3)..(35): Xaa is C or S
PXXAPTQLSAISVLYLDDSSNVILKNYQNMVVRAX

SEQ ID NO: 6925 - protein, 40 aa, Artificial Sequence
  GFR-binding peptide
  MOD_RES (2)..(3)..(37)..(39): Xaa is C or S
  MOD_RES (17)..(18)..(19)..(20)..(21): Xaa is A or G
  MOD_RES (22)..(23)..(24)..(25): Xaa is A or G or is absent
AXXVPTELSATSMLYYXXXXXXXXXLRKHREMVVEGXGXR

SEQ ID NO: 6926 - protein, 35 aa, Artificial Sequence
  GFR-binding peptide
  MOD_RES (35)..(35): Xaa is C or S
  MOD_RES (14)..(15)..(16)..(17)..(18): Xaa is A or G
  MOD_RES (19)..(20)..(21)..(22): Xaa is A or G or is absent
TQVQLNAISVLYFXXXXXXXXXLKKYRTLEDHLAX

SEQ ID NO: 6927 - protein, 35 aa, Artificial Sequence
  GFR-binding peptide
  MOD_RES (4)..(5): Xaa is C or S
PKAXXVPTELSPISMLYKDENEKVVLKYHYDMVVE

SEQ ID NO: 6928 - protein, 34 aa, Artificial Sequence
  GFR-binding peptide
  MOD_RES (32)..(34): Xaa is C or S
APTQLSATSVLYYDDSSNVILRKHRNMVVRAXGX

SEQ ID NO: 6929 - protein, 34 aa, Artificial Sequence
  GFR-binding peptide
  MOD_RES (2)..(3)..(34): Xaa is C or S
PXXVPQALNAISILYFVGRKPKVLKKYRMIVRSX

SEQ ID NO: 6930 - protein, 38 aa, Artificial Sequence
  GFR-binding peptide
  MOD_RES (6)..(7)..(38): Xaa is C or S
ASAAPXXVPQALNAISILYFVGRKPKVLKKYRMIVRSX

SEQ ID NO: 6931 - protein, 38 aa, Artificial Sequence
  GFR-binding peptide
  MOD_RES (4)..(4): Xaa is C or S
  MOD_RES (20)..(21)..(22)..(23)..(24): Xaa is A or G
  MOD_RES (25)..(26)..(27)..(28): Xaa is A or G or is absent
NVQXRPTQVQLSAISVLYLXXXXXXXXXLKNYQTLEDH

SEQ ID NO: 6932 - protein, 38 aa, Artificial Sequence
  GFR-binding peptide
  MOD_RES (1)..(35)..(37): Xaa is C or S
  MOD_RES (15)..(16)..(17)..(18)..(19): Xaa is A or G
  MOD_RES (20)..(21)..(22)..(23): Xaa is A or G or is absent
XAPTQLSATSVLYYXXXXXXXXXLRKHRNMVVRAXGXH

SEQ ID NO: 6933 - protein, 40 aa, Artificial Sequence
  GFR-binding peptide
  MOD_RES (4)..(5)..(38)..(40): Xaa is C or S
  MOD_RES (19)..(20)..(21)..(22)..(23): Xaa is A or G
  MOD_RES (24)..(25)..(26)..(27): Xaa is A or G or is absent
AAPXXVPQALSATSILYYXXXXXXXXXLRKHRMIVRSXKX

SEQ ID NO: 6934 - protein, 33 aa, Artificial Sequence
  GFR-binding peptide
  MOD_RES (14)..(15)..(16)..(17)..(18): Xaa is A or G
  MOD_RES (19)..(20)..(21)..(22): Xaa is A or G or is absent
APTQLSAISVLYLXXXXXXXXXLKNYQNMVVRA

SEQ ID NO: 6935 - protein, 39 aa, Artificial Sequence
  GFR-binding peptide
  MOD_RES (1)..(2)..(36)..(38): Xaa is C or S
  MOD_RES (16)..(17)..(18)..(19)..(20): Xaa is A or G
  MOD_RES (21)..(22)..(23)..(24): Xaa is A or G or is absent
XXAPTKLSAISVLYLXXXXXXXXXLKNYQNMVVRSXGXH

SEQ ID NO: 6936 - protein, 38 aa, Artificial Sequence
  GFR-binding peptide
  MOD_RES (1)..(38): Xaa is C or S
  MOD_RES (17)..(18)..(19)..(20)..(21): Xaa is A or G
  MOD_RES (22)..(23)..(24)..(25): Xaa is A or G or is absent
XRPTQVQLNAISVLYFXXXXXXXXXLKKYRTLEDHLAX

SEQ ID NO: 6937 - protein, 40 aa, Artificial Sequence
  GFR-binding peptide
  MOD_RES (4)..(5)..(39): Xaa is C or S
  MOD_RES (19)..(20)..(21)..(22)..(23): Xaa is A or G
  MOD_RES (24)..(25)..(26)..(27): Xaa is A or G or is absent
PKAXXVPTELSPISMLYKXXXXXXXXXLKYHYDMVVEGXG

SEQ ID NO: 6938 - protein, 32 aa, Artificial Sequence
  GFR-binding peptide
  MOD_RES (14)..(15)..(16)..(17)..(18): Xaa is A or G
  MOD_RES (19)..(20)..(21)..(22): Xaa is A or G or is absent
APTQLSPISVLYKXXXXXXXXXLKYHYNMVVR

SEQ ID NO: 6939 - protein, 39 aa, Artificial Sequence
  GFR-binding peptide
  MOD_RES (4)..(5)..(38): Xaa is C or S
  MOD_RES (19)..(20)..(21)..(22)..(23): Xaa is A or G
  MOD_RES (24)..(25)..(26)..(27): Xaa is A or G or is absent
AAPXXVPQALSPISILYKXXXXXXXXXLKYHYMIVRSXK

SEQ ID NO: 6940 - protein, 41 aa, Artificial Sequence
  GFR-binding peptide
  MOD_RES (3)..(40): Xaa is C or S
VQXRPTQVQLSATSVLYYEIVRKKPIFLRKHRTLEDHLAXK

SEQ ID NO: 6941 - protein, 37 aa, Artificial Sequence
  GFR-binding peptide
  MOD_RES (2)..(3)..(35)..(37): Xaa is C or S
AXXVPTELNAISMLYFDENEKVVLKKYRDMVVEGXGX

SEQ ID NO: 6942 - protein, 40 aa, Artificial Sequence
  GFR-binding peptide
  MOD_RES (6)..(7): Xaa is C or S
  MOD_RES (21)..(22)..(23)..(24)..(25): Xaa is A or G
  MOD_RES (26)..(27)..(28)..(29): Xaa is A or G or is absent
YVPKPXXAPTKLSAISVLYLXXXXXXXXXLKNYQNMVVRS

SEQ ID NO: 6943 - protein, 40 aa, Artificial Sequence
  GFR-binding peptide
  MOD_RES (3)..(40): Xaa is C or S
  MOD_RES (19)..(20)..(21)..(22)..(23): Xaa is A or G
  MOD_RES (24)..(25)..(26)..(27): Xaa is A or G or is absent
VQXRPTQVQLNAISVLYFXXXXXXXXXLKKYRTLEDHLAX

SEQ ID NO: 6944 - protein, 37 aa, Artificial Sequence
  GFR-binding peptide
  MOD_RES (4)..(5): Xaa is C or S
  MOD_RES (19)..(20)..(21)..(22)..(23): Xaa is A or G
  MOD_RES (24)..(25)..(26)..(27): Xaa is A or G or is absent
ASPXXVSQDLSATSILYYXXXXXXXXXLRKHRMIVKS

SEQ ID NO: 6945 - protein, 36 aa, Artificial Sequence
  GFR-binding peptide
  MOD_RES (1)..(2)..(34)..(36): Xaa is C or S
XXVPTELSATSMLYYDENEKVVLRKHRDMVVEGXGX

SEQ ID NO: 6946 - protein, 40 aa, Artificial Sequence
  GFR-binding peptide
  MOD_RES (6)..(7)..(38)..(40): Xaa is C or S
ASASPXXVSQDLSAISILYLIGKTPKILKNYQMIVKSXKX

SEQ ID NO: 6947 - protein, 37 aa, Artificial Sequence
  GFR-binding peptide
  MOD_RES (3)..(4): Xaa is C or S
  MOD_RES (18)..(19)..(20)..(21)..(22): Xaa is A or G
  MOD_RES (23)..(24)..(25)..(26): Xaa is A or G or is absent
KAXXVPTELSAISMLYLXXXXXXXXXLKNYQDMVVEG

SEQ ID NO: 6948 - protein, 40 aa, Artificial Sequence
  GFR-binding peptide
  MOD_RES (6)..(7)..(40): Xaa is C or S
  MOD_RES (21)..(22)..(23)..(24)..(25): Xaa is A or G
  MOD_RES (26)..(27)..(28)..(29): Xaa is A or G or is absent
ASASPXXVSQDLSATSILYYXXXXXXXXXLRKHRMIVKSX

SEQ ID NO: 6949 - protein, 36 aa, Artificial Sequence
  GFR-binding peptide
  MOD_RES (4)..(5): Xaa is C or S
PKPXXAPTQLSPISVLYKDDSSNVILKYHYNMVVRA

SEQ ID NO: 6950 - protein, 35 aa, Artificial Sequence
  GFR-binding peptide
  MOD_RES (33)..(35): Xaa is C or S
  MOD_RES (14)..(15)..(16)..(17)..(18): Xaa is A or G
  MOD_RES (19)..(20)..(21)..(22): Xaa is A or G or is absent
VPQDLSPISILYKXXXXXXXXXLKYHYMVVKSXKX

SEQ ID NO: 6951 - protein, 38 aa, Artificial Sequence
  GFR-binding peptide
  MOD_RES (3)..(37): Xaa is C or S
  MOD_RES (17)..(18)..(19)..(20)..(21): Xaa is A or G
  MOD_RES (22)..(23)..(24)..(25): Xaa is A or G or is absent
PTXAPTKLSATSVLYYXXXXXXXXXLRKHRNMVVRSXG

SEQ ID NO: 6952 - protein, 35 aa, Artificial Sequence
  GFR-binding peptide
  MOD_RES (2)..(3): Xaa is C or S
AXXVPTKLSATSVLYYDDMGVPTLRKHREGMSVAE

SEQ ID NO: 6953 - protein, 41 aa, Artificial Sequence
  GFR-binding peptide
  MOD_RES (5)..(6)..(40): Xaa is C or S
  MOD_RES (20)..(21)..(22)..(23)..(24): Xaa is A or G
  MOD_RES (25)..(26)..(27)..(28): Xaa is A or G or is absent
VPKAXXAPTKLSATSVLYYXXXXXXXXXLRKHRNMVVKAXG

SEQ ID NO: 6954 - protein, 40 aa, Artificial Sequence
  GFR-binding peptide
  MOD_RES (4)..(5)..(39): Xaa is C or S
  MOD_RES (19)..(20)..(21)..(22)..(23): Xaa is A or G
  MOD_RES (24)..(25)..(26)..(27): Xaa is A or G or is absent
PKPXXAPTKLSAISVLYLXXXXXXXXXLKNYQNMVVRSXG

SEQ ID NO: 6955 - protein, 37 aa, Artificial Sequence
  GFR-binding peptide
  MOD_RES (4)..(5): Xaa is C or S
  MOD_RES (19)..(20)..(21)..(22)..(23): Xaa is A or G
  MOD_RES (24)..(25)..(26)..(27): Xaa is A or G or is absent
ASPXXVPQDLSAISILYLXXXXXXXXXLKNYQMVVKS

SEQ ID NO: 6956 - protein, 34 aa, Artificial Sequence
  GFR-binding peptide
  MOD_RES (3)..(4): Xaa is C or S
KPXXAPTKLSPISVLYKDDSSNVILKYHYNMVVR

SEQ ID NO: 6957 - protein, 37 aa, Artificial Sequence
  GFR-binding peptide
  MOD_RES (4)..(5): Xaa is C or S
  MOD_RES (19)..(20)..(21)..(22)..(23): Xaa is A or G
  MOD_RES (24)..(25)..(26)..(27): Xaa is A or G or is absent
PKPXXAPTKLSPISVLYKXXXXXXXXXLKYHYNMVVR

SEQ ID NO: 6958 - protein, 39 aa, Artificial Sequence
  GFR-binding peptide
  MOD_RES (4)..(5)..(38): Xaa is C or S
  MOD_RES (19)..(20)..(21)..(22)..(23): Xaa is A or G
  MOD_RES (24)..(25)..(26)..(27): Xaa is A or G or is absent
AAPXXVPQALSAISILYLXXXXXXXXXLKNYQMIVRSXK

SEQ ID NO: 6959 - protein, 34 aa, Artificial Sequence
  GFR-binding peptide
  MOD_RES (3)..(3): Xaa is C or S
PTXAPTKLSPISVLYKDDSSNVILKYHYNMVVRS

SEQ ID NO: 6960 - protein, 33 aa, Artificial Sequence
  GFR-binding peptide
  MOD_RES (32)..(32): Xaa is C or S
APTKLSAISVLYLDSSNNVILKNYQNMVVKAXG

SEQ ID NO: 6961 - protein, 37 aa, Artificial Sequence
  GFR-binding peptide
  MOD_RES (1)..(34)..(36): Xaa is C or S
  MOD_RES (15)..(16)..(17)..(18)..(19): Xaa is A or G
  MOD_RES (20)..(21)..(22)..(23): Xaa is A or G or is absent
XVPQDLNAISILYFXXXXXXXXXLKKYRMVVKSXKXS

SEQ ID NO: 6962 - protein, 40 aa, Artificial Sequence
  GFR-binding peptide
  MOD_RES (6)..(7)..(40): Xaa is C or S
  MOD_RES (21)..(22)..(23)..(24)..(25): Xaa is A or G
  MOD_RES (26)..(27)..(28)..(29): Xaa is A or G or is absent
ASASPXXVSQDLSAISILYLXXXXXXXXXLKNYQMIVKSX

SEQ ID NO: 6963 - protein, 38 aa, Artificial Sequence
  GFR-binding peptide
  MOD_RES (4)..(5)..(38): Xaa is C or S
  MOD_RES (19)..(20)..(21)..(22)..(23): Xaa is A or G
  MOD_RES (24)..(25)..(26)..(27): Xaa is A or G or is absent
ASPXXVSQDLSPISILYKXXXXXXXXXLKYHYMIVKSX

SEQ ID NO: 6964 - protein, 41 aa, Artificial Sequence
  GFR-binding peptide
  MOD_RES (6)..(40): Xaa is C or S
  MOD_RES (20)..(21)..(22)..(23)..(24): Xaa is A or G
  MOD_RES (25)..(26)..(27)..(28): Xaa is A or G or is absent
VTKPTXAPTKLSPISVLYKXXXXXXXXXLKYHYNMVVRSXG

SEQ ID NO: 6965 - protein, 37 aa, Artificial Sequence
  GFR-binding peptide
  MOD_RES (1)..(2)..(36): Xaa is C or S
  MOD_RES (16)..(17)..(18)..(19)..(20): Xaa is A or G
  MOD_RES (21)..(22)..(23)..(24): Xaa is A or G or is absent
XXAPTKLSAISVLYLXXXXXXXXXLKNYQNMVVRSXG

SEQ ID NO: 6966 - protein, 35 aa, Artificial Sequence
  GFR-binding peptide
  MOD_RES (2)..(3): Xaa is C or S
  MOD_RES (17)..(18)..(19)..(20)..(21): Xaa is A or G
  MOD_RES (22)..(23)..(24)..(25): Xaa is A or G or is absent
AXXVPTELSATSMLYYXXXXXXXXXLRKHREMVVE

SEQ ID NO: 6967 - protein, 40 aa, Artificial Sequence
  GFR-binding peptide
  MOD_RES (4)..(5)..(38)..(40): Xaa is C or S
  MOD_RES (19)..(20)..(21)..(22)..(23): Xaa is A or G
  MOD_RES (24)..(25)..(26)..(27): Xaa is A or G or is absent
ASPXXVPQDLSPISILYKXXXXXXXXXLKYHYMVVKSXKX

SEQ ID NO: 6968 - protein, 37 aa, Artificial Sequence
  GFR-binding peptide
  MOD_RES (3)..(4)..(36): Xaa is C or S
KAXXAPTKLSPISVLYKDSSNNVILKYHYNMVVKAXG

SEQ ID NO: 6969 - protein, 38 aa, Artificial Sequence
  GFR-binding peptide
  MOD_RES (4)..(38): Xaa is C or S
  MOD_RES (18)..(19)..(20)..(21)..(22): Xaa is A or G
  MOD_RES (23)..(24)..(25)..(26): Xaa is A or G or is absent
KPTXAPTKLNAISVLYFXXXXXXXXXLKKYRNMVVRSX

SEQ ID NO: 6970 - protein, 35 aa, Artificial Sequence
  GFR-binding peptide
  MOD_RES (1)..(2): Xaa is C or S
  MOD_RES (16)..(17)..(18)..(19)..(20): Xaa is A or G
  MOD_RES (21)..(22)..(23)..(24): Xaa is A or G or is absent
XXAPTQLSAISVLYLXXXXXXXXXLKNYQNMVVRA

SEQ ID NO: 6971 - protein, 39 aa, Artificial Sequence
  GFR-binding peptide
  MOD_RES (1)..(38): Xaa is C or S
  MOD_RES (17)..(18)..(19)..(20)..(21): Xaa is A or G
  MOD_RES (22)..(23)..(24)..(25): Xaa is A or G or is absent
XRPTQVQLSAISVLYLXXXXXXXXXLKNYQTLEDHLAXK

SEQ ID NO: 6972 - protein, 32 aa, Artificial Sequence
  GFR-binding peptide
  MOD_RES (1)..(2): Xaa is C or S
XXVPTELSATSMLYYDENEKVVLRKHRDMVVE

SEQ ID NO: 6973 - protein, 36 aa, Artificial Sequence
  GFR-binding peptide
  MOD_RES (34)..(36): Xaa is C or S
  MOD_RES (14)..(15)..(16)..(17)..(18): Xaa is A or G
  MOD_RES (19)..(20)..(21)..(22): Xaa is A or G or is absent
APTKLSAISVLYLXXXXXXXXXLKNYQNMVVKAXGX

SEQ ID NO: 6974 - protein, 37 aa, Artificial Sequence
  GFR-binding peptide
  MOD_RES (2)..(3)..(35)..(37): Xaa is C or S
PXXAPTQLSAISVLYLDDSSNVILKNYQNMVVRAXGX

SEQ ID NO: 6975 - protein, 38 aa, Artificial Sequence
  GFR-binding peptide
  MOD_RES (4)..(5): Xaa is C or S
  MOD_RES (19)..(20)..(21)..(22)..(23): Xaa is A or G
  MOD_RES (24)..(25)..(26)..(27): Xaa is A or G or is absent
PKAXXVPTELNAISMLYFXXXXXXXXXLKKYRDMVVEG

SEQ ID NO: 6976 - protein, 32 aa, Artificial Sequence
  GFR-binding peptide
  MOD_RES (14)..(15)..(16)..(17)..(18): Xaa is A or G
  MOD_RES (19)..(20)..(21)..(22): Xaa is A or G or is absent
VSQDLSAISILYLXXXXXXXXXLKNYQMIVKS

SEQ ID NO: 6977 - protein, 38 aa, Artificial Sequence
  GFR-binding peptide
  MOD_RES (5)..(6)..(37): Xaa is C or S
SASPXXVPQDLSPISILYKVGRTPKVLKYHYMVVKSXK

SEQ ID NO: 6978 - protein, 37 aa, Artificial Sequence
  GFR-binding peptide
  MOD_RES (2)..(2): Xaa is C or S
  MOD_RES (18)..(19)..(20)..(21)..(22): Xaa is A or G
  MOD_RES (23)..(24)..(25)..(26): Xaa is A or G or is absent
QXRPTQVQLNAISVLYFXXXXXXXXXLKKYRTLEDHL

SEQ ID NO: 6979 - protein, 41 aa, Artificial Sequence
  GFR-binding peptide
  MOD_RES (3)..(40): Xaa is C or S
VQXRPTQVQLSAISVLYLEIVRKKPIFLKNYQTLEDHLAXK

SEQ ID NO: 6980 - protein, 35 aa, Artificial Sequence
  GFR-binding peptide
  MOD_RES (1)..(1): Xaa is C or S
  MOD_RES (17)..(18)..(19)..(20)..(21): Xaa is A or G
  MOD_RES (22)..(23)..(24)..(25): Xaa is A or G or is absent
XRPTQVQLNAISVLYFXXXXXXXXXLKKYRTLEDH

SEQ ID NO: 6981 - protein, 33 aa, Artificial Sequence
  GFR-binding peptide
  MOD_RES (1)..(1): Xaa is C or S
  MOD_RES (15)..(16)..(17)..(18)..(19): Xaa is A or G
  MOD_RES (20)..(21)..(22)..(23): Xaa is A or G or is absent
XVPQALSAISILYLXXXXXXXXXLKNYQMIVRS

SEQ ID NO: 6982 - protein, 32 aa, Artificial Sequence
  GFR-binding peptide
  MOD_RES (1)..(32): Xaa is C or S
XVPQALSATSILYYVGRKPKVLRKHRMIVRSX

SEQ ID NO: 6983 - protein, 32 aa, Artificial Sequence
  GFR-binding peptide
  MOD_RES (1)..(2): Xaa is C or S
XXVPQALSATSILYYVGRKPKVLRKHRMIVRS

SEQ ID NO: 6984 - protein, 34 aa, Artificial Sequence
  GFR-binding peptide
  MOD_RES (3)..(4): Xaa is C or S
KPXXAPTKLSAISVLYLDDSSNVILKNYQNMVVR

SEQ ID NO: 6985 - protein, 33 aa, Artificial Sequence
  GFR-binding peptide
  MOD_RES (31)..(33): Xaa is C or S
VPQDLSATSILYYVGRTPKVLRKHRMVVKSXKX

SEQ ID NO: 6986 - protein, 31 aa, Artificial Sequence
  GFR-binding peptide
  MOD_RES (1)..(1): Xaa is C or S
XVPQALNAISILYFVGRKPKVLKKYRMIVRS

SEQ ID NO: 6987 - protein, 36 aa, Artificial Sequence
  GFR-binding peptide
  MOD_RES (1)..(2)..(33)..(35): Xaa is C or S
XXVPQALSATSILYYVGRKPKVLRKHRMIVRSXKXS

SEQ ID NO: 6988 - protein, 38 aa, Artificial Sequence
  GFR-binding peptide
  MOD_RES (1)..(35)..(37): Xaa is C or S
  MOD_RES (15)..(16)..(17)..(18)..(19): Xaa is A or G
  MOD_RES (20)..(21)..(22)..(23): Xaa is A or G or is absent
XAPTKLSPISVLYKXXXXXXXXXLKYHYNMVVKAXGXH

SEQ ID NO: 6989 - protein, 38 aa, Artificial Sequence
  GFR-binding peptide
  MOD_RES (4)..(5)..(37): Xaa is C or S
PKAXXVPTELSPISMLYKDEYDKVVLKYHYEMVVEGXG

SEQ ID NO: 6990 - protein, 38 aa, Artificial Sequence
  GFR-binding peptide
  MOD_RES (1)..(2)..(36)..(38): Xaa is C or S
  MOD_RES (16)..(17)..(18)..(19)..(20): Xaa is A or G
  MOD_RES (21)..(22)..(23)..(24): Xaa is A or G or is absent
XXAPTKLSPISVLYKXXXXXXXXXLKYHYNMVVRSXGX

SEQ ID NO: 6991 - protein, 34 aa, Artificial Sequence
  GFR-binding peptide
  MOD_RES (3)..(4): Xaa is C or S
KAXXVPTELSATSMLYYDENEKVVLRKHRDMVVE

SEQ ID NO: 6992 - protein, 38 aa, Artificial Sequence
  GFR-binding peptide
  MOD_RES (6)..(7)..(38): Xaa is C or S
ASASPXXVSQDLSPISILYKIGKTPKILKYHYMIVKSX

SEQ ID NO: 6993 - protein, 38 aa, Artificial Sequence
  GFR-binding peptide
  MOD_RES (6)..(7): Xaa is C or S
TVPKPXXAPTQLSAISVLYLDDSSNVILKNYQNMVVRA

SEQ ID NO: 6994 - protein, 38 aa, Artificial Sequence
  GFR-binding peptide
  MOD_RES (3)..(4)..(37): Xaa is C or S
  MOD_RES (18)..(19)..(20)..(21)..(22): Xaa is A or G
  MOD_RES (23)..(24)..(25)..(26): Xaa is A or G or is absent
SPXXVPQDLSPISILYKXXXXXXXXXLKYHYMVVKSXK

SEQ ID NO: 6995 - protein, 38 aa, Artificial Sequence
  GFR-binding peptide
  MOD_RES (35)..(37): Xaa is C or S
TQVQLSAISVLYLEIVRKKPIFLKNYQTLEDHLAXKXE

SEQ ID NO: 6996 - protein, 36 aa, Artificial Sequence
  GFR-binding peptide
  MOD_RES (34)..(36): Xaa is C or S
  MOD_RES (14)..(15)..(16)..(17)..(18): Xaa is A or G
  MOD_RES (19)..(20)..(21)..(22): Xaa is A or G or is absent
APTQLSPISVLYKXXXXXXXXXLKYHYNMVVRAXGX

SEQ ID NO: 6997 - protein, 44 aa, Artificial Sequence
  GFR-binding peptide
  MOD_RES (4)..(41)..(43): Xaa is C or S
NVQXRPTQVQLSAISVLYLEIVRKKPIFLKNYQTLEDHLAXKXE

SEQ ID NO: 6998 - protein, 33 aa, Artificial Sequence
  GFR-binding peptide
  MOD_RES (14)..(15)..(16)..(17)..(18): Xaa is A or G
  MOD_RES (19)..(20)..(21)..(22): Xaa is A or G or is absent
VPTELSAISMLYLXXXXXXXXXLKNYQDMVVEG

SEQ ID NO: 6999 - protein, 37 aa, Artificial Sequence
  GFR-binding peptide
  MOD_RES (4)..(5): Xaa is C or S
  MOD_RES (19)..(20)..(21)..(22)..(23): Xaa is A or G
  MOD_RES (24)..(25)..(26)..(27): Xaa is A or G or is absent
PKAXXVPTELSPISMLYKXXXXXXXXXLKYHYDMVVE

SEQ ID NO: 7000 - protein, 38 aa, Artificial Sequence
  GFR-binding peptide
  MOD_RES (2)..(3)..(35)..(37): Xaa is C or S
AXXVPTELSATSMLYYDEYDKVVLRKHREMVVEGXGXR

SEQ ID NO: 7001 - protein, 34 aa, Artificial Sequence
  GFR-binding peptide
  MOD_RES (1)..(32)..(34): Xaa is C or S
XVSQDLSATSILYYIGKTPKILRKHRMIVKSXKX

SEQ ID NO: 7002 - protein, 40 aa, Artificial Sequence
  GFR-binding peptide
  MOD_RES (4)..(5)..(39): Xaa is C or S
  MOD_RES (19)..(20)..(21)..(22)..(23): Xaa is A or G
  MOD_RES (24)..(25)..(26)..(27): Xaa is A or G or is absent
PKAXXVPTELSATSMLYYXXXXXXXXXLRKHREMVVEGXG

SEQ ID NO: 7003 - protein, 37 aa, Artificial Sequence
  GFR-binding peptide
  MOD_RES (3)..(4)..(36): Xaa is C or S
KPXXAPTKLSATSVLYYDDSSNVILRKHRNMVVRSXG

SEQ ID NO: 7004 - protein, 38 aa, Artificial Sequence
  GFR-binding peptide
  MOD_RES (5)..(6): Xaa is C or S
  MOD_RES (20)..(21)..(22)..(23)..(24): Xaa is A or G
  MOD_RES (25)..(26)..(27)..(28): Xaa is A or G or is absent
VPKPXXAPTKLSATSVLYYXXXXXXXXXLRKHRNMVVR

SEQ ID NO: 7005 - protein, 37 aa, Artificial Sequence
  GFR-binding peptide
  MOD_RES (2)..(34)..(36): Xaa is C or S
TXAPTKLSPISVLYKDDSSNVILKYHYNMVVRSXGXH

SEQ ID NO: 7006 - protein, 35 aa, Artificial Sequence
  GFR-binding peptide
  MOD_RES (33)..(35): Xaa is C or S
  MOD_RES (14)..(15)..(16)..(17)..(18): Xaa is A or G
  MOD_RES (19)..(20)..(21)..(22): Xaa is A or G or is absent
VPQDLNAISILYFXXXXXXXXXLKKYRMVVKSXKX

SEQ ID NO: 7007 - protein, 36 aa, Artificial Sequence
  GFR-binding peptide
  MOD_RES (1)..(2)..(33)..(35): Xaa is C or S
XXVPQDLNAISILYFVGRTPKVLKKYRMVVKSXKXS

SEQ ID NO: 7008 - protein, 40 aa, Artificial Sequence
  GFR-binding peptide
  MOD_RES (3)..(4)..(37)..(39): Xaa is C or S
KAXXVPTKLNAISVLYFDDMGVPTLKKYREGMSVAEXGXR

SEQ ID NO: 7009 - protein, 33 aa, Artificial Sequence
  GFR-binding peptide
  MOD_RES (1)..(32): Xaa is C or S
XVPQDLSPISILYKVGRTPKVLKYHYMVVKSXK

SEQ ID NO: 7010 - protein, 34 aa, Artificial Sequence
  GFR-binding peptide
  MOD_RES (2)..(3)..(34): Xaa is C or S
PXXVPQALSAISILYLVGRKPKVLKNYQMIVRSX

SEQ ID NO: 7011 - protein, 33 aa, Artificial Sequence
  GFR-binding peptide
  MOD_RES (1)..(1): Xaa is C or S
  MOD_RES (15)..(16)..(17)..(18)..(19): Xaa is A or G
  MOD_RES (20)..(21)..(22)..(23): Xaa is A or G or is absent
XVPTELSAISMLYLXXXXXXXXXLKNYQEMVVE

SEQ ID NO: 7012 - protein, 38 aa, Artificial Sequence
  GFR-binding peptide
  MOD_RES (3)..(4)..(35)..(37): Xaa is C or S
APXXVPQALSATSILYYVGRKPKVLRKHRMIVRSXKXS

SEQ ID NO: 7013 - protein, 34 aa, Artificial Sequence
  GFR-binding peptide
  MOD_RES (1)..(33): Xaa is C or S
XVPTELSATSMLYYDENEKVVLRKHRDMVVEGXG

SEQ ID NO: 7014 - protein, 34 aa, Artificial Sequence
  GFR-binding peptide
  MOD_RES (1)..(34): Xaa is C or S
  MOD_RES (15)..(16)..(17)..(18)..(19): Xaa is A or G
  MOD_RES (20)..(21)..(22)..(23): Xaa is A or G or is absent
XVPQALSATSILYYXXXXXXXXXLRKHRMIVRSX

SEQ ID NO: 7015 - protein, 39 aa, Artificial Sequence
  GFR-binding peptide
  MOD_RES (3)..(4)..(37)..(39): Xaa is C or S
  MOD_RES (18)..(19)..(20)..(21)..(22): Xaa is A or G
  MOD_RES (23)..(24)..(25)..(26): Xaa is A or G or is absent
SPXXVSQDLSAISILYLXXXXXXXXXLKNYQMIVKSXKX

SEQ ID NO: 7016 - protein, 34 aa, Artificial Sequence
  GFR-binding peptide
  MOD_RES (1)..(33): Xaa is C or S
XAPTKLSPISVLYKDDSSNVILKYHYNMVVRSXG

SEQ ID NO: 7017 - protein, 37 aa, Artificial Sequence
  GFR-binding peptide
  MOD_RES (1)..(2)..(34)..(36): Xaa is C or S
XXAPTKLNAISVLYFDSSNNVILKKYRNMVVKAXGXH

SEQ ID NO: 7018 - protein, 36 aa, Artificial Sequence
  GFR-binding peptide
  MOD_RES (2)..(3)..(36): Xaa is C or S
AXXVPTKLNAISVLYFDDMGVPTLKKYREGMSVAEX

SEQ ID NO: 7019 - protein, 42 aa, Artificial Sequence
  GFR-binding peptide
  MOD_RES (3)..(40)..(42): Xaa is C or S
  MOD_RES (19)..(20)..(21)..(22)..(23): Xaa is A or G
  MOD_RES (24)..(25)..(26)..(27): Xaa is A or G or is absent
VQXRPTQVQLSAISVLYLXXXXXXXXXLKNYQTLEDHLAXKX

SEQ ID NO: 7020 - protein, 34 aa, Artificial Sequence
  GFR-binding peptide
  MOD_RES (34)..(34): Xaa is C or S
  MOD_RES (14)..(15)..(16)..(17)..(18): Xaa is A or G
  MOD_RES (19)..(20)..(21)..(22): Xaa is A or G or is absent
APTKLNAISVLYFXXXXXXXXXLKKYRNMVVKAX

SEQ ID NO: 7021 - protein, 41 aa, Artificial Sequence
  GFR-binding peptide
  MOD_RES (4)..(38)..(40): Xaa is C or S
  MOD_RES (18)..(19)..(20)..(21)..(22): Xaa is A or G
  MOD_RES (23)..(24)..(25)..(26): Xaa is A or G or is absent
KPTXAPTKLSAISVLYLXXXXXXXXXLKNYQNMVVRSXGXH

SEQ ID NO: 7022 - protein, 36 aa, Artificial Sequence
  GFR-binding peptide
  MOD_RES (34)..(36): Xaa is C or S
  MOD_RES (14)..(15)..(16)..(17)..(18): Xaa is A or G
  MOD_RES (19)..(20)..(21)..(22): Xaa is A or G or is absent
VPTELSPISMLYKXXXXXXXXXLKYHYEMVVEGXGX

SEQ ID NO: 7023 - protein, 36 aa, Artificial Sequence
  GFR-binding peptide
  MOD_RES (1)..(35): Xaa is C or S
  MOD_RES (15)..(16)..(17)..(18)..(19): Xaa is A or G
  MOD_RES (20)..(21)..(22)..(23): Xaa is A or G or is absent
XAPTKLNAISVLYFXXXXXXXXXLKKYRNMVVRSXG

SEQ ID NO: 7024 - protein, 36 aa, Artificial Sequence
  GFR-binding peptide
  MOD_RES (2)..(3): Xaa is C or S
  MOD_RES (17)..(18)..(19)..(20)..(21): Xaa is A or G
  MOD_RES (22)..(23)..(24)..(25): Xaa is A or G or is absent
AXXVPTELSPISMLYKXXXXXXXXXLKYHYEMVVEG

SEQ ID NO: 7025 - protein, 36 aa, Artificial Sequence
  GFR-binding peptide
  MOD_RES (1)..(2)..(34)..(36): Xaa is C or S
XXVPTELNAISMLYFDEYDKVVLKKYREMVVEGXGX

SEQ ID NO: 7026 - protein, 42 aa, Artificial Sequence
  GFR-binding peptide
  MOD_RES (4)..(5)..(39)..(41): Xaa is C or S
  MOD_RES (19)..(20)..(21)..(22)..(23): Xaa is A or G
  MOD_RES (24)..(25)..(26)..(27): Xaa is A or G or is absent
PKAXXAPTKLNAISVLYFXXXXXXXXXLKKYRNMVVKAXGXH

SEQ ID NO: 7027 - protein, 39 aa, Artificial Sequence
  GFR-binding peptide
  MOD_RES (6)..(6): Xaa is C or S
  MOD_RES (20)..(21)..(22)..(23)..(24): Xaa is A or G
  MOD_RES (25)..(26)..(27)..(28): Xaa is A or G or is absent
VTKPTXAPTKLSATSVLYYXXXXXXXXXLRKHRNMVVRS

SEQ ID NO: 7028 - protein, 34 aa, Artificial Sequence
  GFR-binding peptide
  MOD_RES (1)..(34): Xaa is C or S
  MOD_RES (15)..(16)..(17)..(18)..(19): Xaa is A or G
  MOD_RES (20)..(21)..(22)..(23): Xaa is A or G or is absent
XVPQALSAISILYLXXXXXXXXXLKNYQMIVRSX

SEQ ID NO: 7029 - protein, 35 aa, Artificial Sequence
  GFR-binding peptide
PTQVQLSPISVLYKEIVRKKPIFLKYHYTLEDHLA

SEQ ID NO: 7030 - protein, 38 aa, Artificial Sequence
  GFR-binding peptide
  MOD_RES (4)..(5): Xaa is C or S
  MOD_RES (19)..(20)..(21)..(22)..(23): Xaa is A or G
  MOD_RES (24)..(25)..(26)..(27): Xaa is A or G or is absent
PKAXXAPTKLSATSVLYYXXXXXXXXXLRKHRNMVVKA

SEQ ID NO: 7031 - protein, 41 aa, Artificial Sequence
  GFR-binding peptide
  MOD_RES (5)..(6)..(39)..(41): Xaa is C or S
  MOD_RES (20)..(21)..(22)..(23)..(24): Xaa is A or G
  MOD_RES (25)..(26)..(27)..(28): Xaa is A or G or is absent
SASPXXVPQDLNAISILYFXXXXXXXXXLKKYRMVVKSXKX

SEQ ID NO: 7032 - protein, 38 aa, Artificial Sequence
  GFR-binding peptide
  MOD_RES (36)..(38): Xaa is C or S
  MOD_RES (15)..(16)..(17)..(18)..(19): Xaa is A or G
  MOD_RES (20)..(21)..(22)..(23): Xaa is A or G or is absent
PTQVQLNAISVLYFXXXXXXXXXLKKYRTLEDHLAXKX

SEQ ID NO: 7033 - protein, 39 aa, Artificial Sequence
  GFR-binding peptide
  MOD_RES (36)..(38): Xaa is C or S
  MOD_RES (15)..(16)..(17)..(18)..(19): Xaa is A or G
  MOD_RES (20)..(21)..(22)..(23): Xaa is A or G or is absent
PTQVQLSPISVLYKXXXXXXXXXLKYHYTLEDHLAXKXE

SEQ ID NO: 7034 - protein, 37 aa, Artificial Sequence
  GFR-binding peptide
  MOD_RES (2)..(3)..(35)..(37): Xaa is C or S
AXXVPTELSATSMLYYDEYDKVVLRKHREMVVEGXGX

SEQ ID NO: 7035 - protein, 38 aa, Artificial Sequence
  GFR-binding peptide
  MOD_RES (1)..(2)..(37): Xaa is C or S
  MOD_RES (16)..(17)..(18)..(19)..(20): Xaa is A or G
  MOD_RES (21)..(22)..(23)..(24): Xaa is A or G or is absent
XXVPTKLSPISVLYKXXXXXXXXXLKYHYEGMSVAEXG

SEQ ID NO: 7036 - protein, 34 aa, Artificial Sequence
  GFR-binding peptide
  MOD_RES (33)..(33): Xaa is C or S
  MOD_RES (14)..(15)..(16)..(17)..(18): Xaa is A or G
  MOD_RES (19)..(20)..(21)..(22): Xaa is A or G or is absent
VPQALSPISILYKXXXXXXXXXLKYHYMIVRSXK

SEQ ID NO: 7037 - protein, 42 aa, Artificial Sequence
  GFR-binding peptide
  MOD_RES (6)..(40)..(42): Xaa is C or S
  MOD_RES (20)..(21)..(22)..(23)..(24): Xaa is A or G
  MOD_RES (25)..(26)..(27)..(28): Xaa is A or G or is absent
VTKPTXAPTKLSAISVLYLXXXXXXXXXLKNYQNMVVRSXGX

SEQ ID NO: 7038 - protein, 36 aa, Artificial Sequence
  GFR-binding peptide
  MOD_RES (3)..(4)..(35): Xaa is C or S
SPXXVPQDLSPISILYKVGRTPKVLKYHYMVVKSXK

SEQ ID NO: 7039 - protein, 38 aa, Artificial Sequence
  GFR-binding peptide
  MOD_RES (5)..(6): Xaa is C or S
VGKAXXVPTKLNAISVLYFDDMGVPTLKKYREGMSVAE

SEQ ID NO: 7040 - protein, 33 aa, Artificial Sequence
  GFR-binding peptide
TQVQLSPISVLYKEIVRKKPIFLKYHYTLEDHL

SEQ ID NO: 7041 - protein, 40 aa, Artificial Sequence
  GFR-binding peptide
  MOD_RES (4)..(5)..(37)..(39): Xaa is C or S
PKAXXAPTKLSPISVLYKDSSNNVILKYHYNMVVKAXGXH

SEQ ID NO: 7042 - protein, 33 aa, Artificial Sequence
  GFR-binding peptide
  MOD_RES (1)..(32): Xaa is C or S
XVPQALSATSILYYVGRKPKVLRKHRMIVRSXK

SEQ ID NO: 7043 - protein, 39 aa, Artificial Sequence
  GFR-binding peptide
  MOD_RES (5)..(6): Xaa is C or S
  MOD_RES (20)..(21)..(22)..(23)..(24): Xaa is A or G
  MOD_RES (25)..(26)..(27)..(28): Xaa is A or G or is absent
VPKPXXAPTQLNAISVLYFXXXXXXXXXLKKYRNMVVRA

SEQ ID NO: 7044 - protein, 34 aa, Artificial Sequence
  GFR-binding peptide
  MOD_RES (1)..(2): Xaa is C or S
  MOD_RES (16)..(17)..(18)..(19)..(20): Xaa is A or G
  MOD_RES (21)..(22)..(23)..(24): Xaa is A or G or is absent
XXAPTQLNAISVLYFXXXXXXXXXLKKYRNMVVR

SEQ ID NO: 7045 - protein, 40 aa, Artificial Sequence
  GFR-binding peptide
  MOD_RES (4)..(5)..(37)..(39): Xaa is C or S
PKPXXAPTKLSAISVLYLDDSSNVILKNYQNMVVRSXGXH

SEQ ID NO: 7046 - protein, 37 aa, Artificial Sequence
  GFR-binding peptide
  MOD_RES (3)..(37): Xaa is C or S
  MOD_RES (17)..(18)..(19)..(20)..(21): Xaa is A or G
  MOD_RES (22)..(23)..(24)..(25): Xaa is A or G or is absent
PTXAPTKLSAISVLYLXXXXXXXXXLKNYQNMVVRSX

SEQ ID NO: 7047 - protein, 40 aa, Artificial Sequence
  GFR-binding peptide
  MOD_RES (2)..(39): Xaa is C or S
  MOD_RES (18)..(19)..(20)..(21)..(22): Xaa is A or G
  MOD_RES (23)..(24)..(25)..(26): Xaa is A or G or is absent
QXRPTQVQLNAISVLYFXXXXXXXXXLKKYRTLEDHLAXK

SEQ ID NO: 7048 - protein, 43 aa, Artificial Sequence
  GFR-binding peptide
  MOD_RES (6)..(7)..(42): Xaa is C or S
  MOD_RES (21)..(22)..(23)..(24)..(25): Xaa is A or G
  MOD_RES (26)..(27)..(28)..(29): Xaa is A or G or is absent
KVGKAXXVPTKLSPISVLYKXXXXXXXXXLKYHYEGMSVAEXG

SEQ ID NO: 7049 - protein, 43 aa, Artificial Sequence
  GFR-binding peptide
  MOD_RES (6)..(7)..(40)..(42): Xaa is C or S
  MOD_RES (21)..(22)..(23)..(24)..(25): Xaa is A or G
  MOD_RES (26)..(27)..(28)..(29): Xaa is A or G or is absent
ASAAPXXVPQALSPISILYKXXXXXXXXXLKYHYMIVRSXKXS

SEQ ID NO: 7050 - protein, 34 aa, Artificial Sequence
  GFR-binding peptide
  MOD_RES (1)..(1): Xaa is C or S
  MOD_RES (15)..(16)..(17)..(18)..(19): Xaa is A or G
  MOD_RES (20)..(21)..(22)..(23): Xaa is A or G or is absent
XAPTKLSPISVLYKXXXXXXXXXLKYHYNMVVRS

SEQ ID NO: 7051 - protein, 41 aa, Artificial Sequence
  GFR-binding peptide
  MOD_RES (6)..(7)..(40): Xaa is C or S
  MOD_RES (21)..(22)..(23)..(24)..(25): Xaa is A or G
  MOD_RES (26)..(27)..(28)..(29): Xaa is A or G or is absent
ASASPXXVSQDLSATSILYYXXXXXXXXXLRKHRMIVKSXK

SEQ ID NO: 7052 - protein, 35 aa, Artificial Sequence
  GFR-binding peptide
  MOD_RES (1)..(2)..(35): Xaa is C or S
XXVPTKLNAISVLYFDDMGVPTLKKYREGMSVAEX

SEQ ID NO: 7053 - protein, 40 aa, Artificial Sequence
  GFR-binding peptide
  MOD_RES (5)..(6)..(38)..(40): Xaa is C or S
VPKAXXAPTKLNAISVLYFDSSNNVILKKYRNMVVKAXGX

SEQ ID NO: 7054 - protein, 39 aa, Artificial Sequence
  GFR-binding peptide
  MOD_RES (5)..(5): Xaa is C or S
  MOD_RES (21)..(22)..(23)..(24)..(25): Xaa is A or G
  MOD_RES (26)..(27)..(28)..(29): Xaa is A or G or is absent
RNVQXRPTQVQLSAISVLYLXXXXXXXXXLKNYQTLEDH

SEQ ID NO: 7055 - protein, 37 aa, Artificial Sequence
  GFR-binding peptide
  MOD_RES (1)..(2)..(36): Xaa is C or S
  MOD_RES (16)..(17)..(18)..(19)..(20): Xaa is A or G
  MOD_RES (21)..(22)..(23)..(24): Xaa is A or G or is absent
XXVPTELSAISMLYLXXXXXXXXXLKNYQEMVVEGXG

SEQ ID NO: 7056 - protein, 35 aa, Artificial Sequence
  GFR-binding peptide
RPTQVQLSPISVLYKEIVRKKPIFLKYHYTLEDHL

SEQ ID NO: 7057 - protein, 39 aa, Artificial Sequence
  GFR-binding peptide
  MOD_RES (4)..(5)..(38): Xaa is C or S
  MOD_RES (19)..(20)..(21)..(22)..(23): Xaa is A or G
  MOD_RES (24)..(25)..(26)..(27): Xaa is A or G or is absent
ASPXXVSQDLSPISILYKXXXXXXXXXLKYHYMIVKSXK

SEQ ID NO: 7058 - protein, 35 aa, Artificial Sequence
  GFR-binding peptide
  MOD_RES (34)..(34): Xaa is C or S
  MOD_RES (14)..(15)..(16)..(17)..(18): Xaa is A or G
  MOD_RES (19)..(20)..(21)..(22): Xaa is A or G or is absent
APTKLSATSVLYYXXXXXXXXXLRKHRNMVVRSXG

SEQ ID NO: 7059 - protein, 41 aa, Artificial Sequence
  GFR-binding peptide
  MOD_RES (6)..(7)..(38)..(40): Xaa is C or S
ASASPXXVPQDLSPISILYKVGRTPKVLKYHYMVVKSXKXS

SEQ ID NO: 7060 - protein, 36 aa, Artificial Sequence
  GFR-binding peptide
  MOD_RES (1)..(2)..(35): Xaa is C or S
XXVPTKLSATSVLYYDDMGVPTLRKHREGMSVAEXG

SEQ ID NO: 7061 - protein, 43 aa, Artificial Sequence
  GFR-binding peptide
  MOD_RES (6)..(7)..(40)..(42): Xaa is C or S
  MOD_RES (21)..(22)..(23)..(24)..(25): Xaa is A or G
  MOD_RES (26)..(27)..(28)..(29): Xaa is A or G or is absent
ASASPXXVPQDLSAISILYLXXXXXXXXXLKNYQMVVKSXKXS

SEQ ID NO: 7062 - protein, 36 aa, Artificial Sequence
  GFR-binding peptide
  MOD_RES (5)..(6): Xaa is C or S
IPKAXXVPTELSATSMLYYDEYDKVVLRKHREMVVE

SEQ ID NO: 7063 - protein, 42 aa, Artificial Sequence
  GFR-binding peptide
  MOD_RES (6)..(7)..(39)..(41): Xaa is C or S
KIPKAXXVPTELNAISMLYFDENEKVVLKKYRDMVVEGXGXR

SEQ ID NO: 7064 - protein, 39 aa, Artificial Sequence
  GFR-binding peptide
  MOD_RES (6)..(7)..(39): Xaa is C or S
KIPKAXXVPTELSPISMLYKDENEKVVLKYHYDMVVEGX

SEQ ID NO: 7065 - protein, 34 aa, Artificial Sequence
  GFR-binding peptide
  MOD_RES (1)..(2): Xaa is C or S
  MOD_RES (16)..(17)..(18)..(19)..(20): Xaa is A or G
  MOD_RES (21)..(22)..(23)..(24): Xaa is A or G or is absent
XXVPQDLSATSILYYXXXXXXXXXLRKHRMVVKS

SEQ ID NO: 7066 - protein, 34 aa, Artificial Sequence
  GFR-binding peptide
  MOD_RES (34)..(34): Xaa is C or S
  MOD_RES (14)..(15)..(16)..(17)..(18): Xaa is A or G
  MOD_RES (19)..(20)..(21)..(22): Xaa is A or G or is absent
VPTELSAISMLYLXXXXXXXXXLKNYQDMVVEGX

SEQ ID NO: 7067 - protein, 39 aa, Artificial Sequence
  GFR-binding peptide
  MOD_RES (3)..(4)..(37)..(39): Xaa is C or S
  MOD_RES (18)..(19)..(20)..(21)..(22): Xaa is A or G
  MOD_RES (23)..(24)..(25)..(26): Xaa is A or G or is absent
SPXXVPQDLSPISILYKXXXXXXXXXLKYHYMVVKSXKX

SEQ ID NO: 7068 - protein, 39 aa, Artificial Sequence
  GFR-binding peptide
  MOD_RES (2)..(36)..(38): Xaa is C or S
  MOD_RES (16)..(17)..(18)..(19)..(20): Xaa is A or G
  MOD_RES (21)..(22)..(23)..(24): Xaa is A or G or is absent
TXAPTKLSPISVLYKXXXXXXXXXLKYHYNMVVRSXGXH

SEQ ID NO: 7069 - protein, 33 aa, Artificial Sequence
  GFR-binding peptide
  MOD_RES (1)..(2): Xaa is C or S
XXAPTQLSATSVLYYDDSSNVILRKHRNMVVRA

SEQ ID NO: 7070 - protein, 42 aa, Artificial Sequence
  GFR-binding peptide
  MOD_RES (4)..(5)..(39)..(41): Xaa is C or S
  MOD_RES (19)..(20)..(21)..(22)..(23): Xaa is A or G
  MOD_RES (24)..(25)..(26)..(27): Xaa is A or G or is absent
PKPXXAPTQLSAISVLYLXXXXXXXXXLKNYQNMVVRAXGXH

SEQ ID NO: 7071 - protein, 42 aa, Artificial Sequence
  GFR-binding peptide
  MOD_RES (4)..(41): Xaa is C or S
  MOD_RES (20)..(21)..(22)..(23)..(24): Xaa is A or G
  MOD_RES (25)..(26)..(27)..(28): Xaa is A or G or is absent
NVQXRPTQVQLSATSVLYYXXXXXXXXXLRKHRTLEDHLAXK

SEQ ID NO: 7072 - protein, 35 aa, Artificial Sequence
  GFR-binding peptide
  MOD_RES (1)..(2): Xaa is C or S
  MOD_RES (16)..(17)..(18)..(19)..(20): Xaa is A or G
  MOD_RES (21)..(22)..(23)..(24): Xaa is A or G or is absent
XXAPTKLSPISVLYKXXXXXXXXXLKYHYNMVVKA

SEQ ID NO: 7073 - protein, 33 aa, Artificial Sequence
  GFR-binding peptide
  MOD_RES (1)..(2)..(33): Xaa is C or S
XXVPQDLSAISILYLVGRTPKVLKNYQMVVKSX

SEQ ID NO: 7074 - protein, 31 aa, Artificial Sequence
  GFR-binding peptide
  MOD_RES (31)..(31): Xaa is C or S
VPQALSPISILYKVGRKPKVLKYHYMIVRSX

SEQ ID NO: 7075 - protein, 38 aa, Artificial Sequence
  GFR-binding peptide
  MOD_RES (6)..(7)..(38): Xaa is C or S
ASASPXXVSQDLSATSILYYIGKTPKILRKHRMIVKSX

SEQ ID NO: 7076 - protein, 33 aa, Artificial Sequence
  GFR-binding peptide
  MOD_RES (1)..(1): Xaa is C or S
XVPTKLSAISVLYLDDMGVPTLKNYQEGMSVAE

SEQ ID NO: 7077 - protein, 36 aa, Artificial Sequence
  GFR-binding peptide
  MOD_RES (2)..(3)..(34)..(36): Xaa is C or S
PXXVSQDLSATSILYYIGKTPKILRKHRMIVKSXKX

SEQ ID NO: 7078 - protein, 41 aa, Artificial Sequence
  GFR-binding peptide
  MOD_RES (6)..(7)..(40): Xaa is C or S
  MOD_RES (21)..(22)..(23)..(24)..(25): Xaa is A or G
  MOD_RES (26)..(27)..(28)..(29): Xaa is A or G or is absent
ASAAPXXVPQALSATSILYYXXXXXXXXXLRKHRMIVRSXK

SEQ ID NO: 7079 - protein, 40 aa, Artificial Sequence
  GFR-binding peptide
  MOD_RES (2)..(3)..(37)..(39): Xaa is C or S
  MOD_RES (17)..(18)..(19)..(20)..(21): Xaa is A or G
  MOD_RES (22)..(23)..(24)..(25): Xaa is A or G or is absent
AXXVPTELSPISMLYKXXXXXXXXXLKYHYEMVVEGXGXR

SEQ ID NO: 7080 - protein, 33 aa, Artificial Sequence
  GFR-binding peptide
  MOD_RES (2)..(3): Xaa is C or S
PXXVPQDLSAISILYLVGRTPKVLKNYQMVVKS

SEQ ID NO: 7081 - protein, 34 aa, Artificial Sequence
  GFR-binding peptide
  MOD_RES (1)..(2)..(33): Xaa is C or S
XXVPQALSATSILYYVGRKPKVLRKHRMIVRSXK

SEQ ID NO: 7082 - protein, 33 aa, Artificial Sequence
  GFR-binding peptide
  MOD_RES (2)..(3): Xaa is C or S
PXXVPQALNAISILYFVGRKPKVLKKYRMIVRS

SEQ ID NO: 7083 - protein, 36 aa, Artificial Sequence
  GFR-binding peptide
  MOD_RES (2)..(3): Xaa is C or S
  MOD_RES (17)..(18)..(19)..(20)..(21): Xaa is A or G
  MOD_RES (22)..(23)..(24)..(25): Xaa is A or G or is absent
PXXAPTKLSATSVLYYXXXXXXXXXLRKHRNMVVRS

SEQ ID NO: 7084 - protein, 43 aa, Artificial Sequence
  GFR-binding peptide
  MOD_RES (3)..(40)..(42): Xaa is C or S
  MOD_RES (19)..(20)..(21)..(22)..(23): Xaa is A or G
  MOD_RES (24)..(25)..(26)..(27): Xaa is A or G or is absent
VQXRPTQVQLSAISVLYLXXXXXXXXXLKNYQTLEDHLAXKXE

SEQ ID NO: 7085 - protein, 32 aa, Artificial Sequence
  GFR-binding peptide
  MOD_RES (32)..(32): Xaa is C or S
APTKLSPISVLYKDSSNNVILKYHYNMVVKAX

SEQ ID NO: 7086 - protein, 41 aa, Artificial Sequence
  GFR-binding peptide
  MOD_RES (4)..(5)..(39)..(41): Xaa is C or S
  MOD_RES (19)..(20)..(21)..(22)..(23): Xaa is A or G
  MOD_RES (24)..(25)..(26)..(27): Xaa is A or G or is absent
PKAXXVPTELSPISMLYKXXXXXXXXXLKYHYDMVVEGXGX

SEQ ID NO: 7087 - protein, 32 aa, Artificial Sequence
  GFR-binding peptide
  MOD_RES (31)..(31): Xaa is C or S
VPQALSAISILYLVGRKPKVLKNYQMIVRSXK

SEQ ID NO: 7088 - protein, 35 aa, Artificial Sequence
  GFR-binding peptide
  MOD_RES (1)..(35): Xaa is C or S
  MOD_RES (15)..(16)..(17)..(18)..(19): Xaa is A or G
  MOD_RES (20)..(21)..(22)..(23): Xaa is A or G or is absent
XAPTKLNAISVLYFXXXXXXXXXLKKYRNMVVKAX

SEQ ID NO: 7089 - protein, 37 aa, Artificial Sequence
  GFR-binding peptide
  MOD_RES (1)..(34)..(36): Xaa is C or S
  MOD_RES (15)..(16)..(17)..(18)..(19): Xaa is A or G
  MOD_RES (20)..(21)..(22)..(23): Xaa is A or G or is absent
XVPQALSPISILYKXXXXXXXXXLKYHYMIVRSXKXS

SEQ ID NO: 7090 - protein, 39 aa, Artificial Sequence
  GFR-binding peptide
  MOD_RES (3)..(4)..(37)..(39): Xaa is C or S
  MOD_RES (18)..(19)..(20)..(21)..(22): Xaa is A or G
  MOD_RES (23)..(24)..(25)..(26): Xaa is A or G or is absent
APXXVPQALSAISILYLXXXXXXXXXLKNYQMIVRSXKX

SEQ ID NO: 7091 - protein, 36 aa, Artificial Sequence
  GFR-binding peptide
  MOD_RES (1)..(33)..(35): Xaa is C or S
XAPTQLSAISVLYLDDSSNVILKNYQNMVVRAXGXH

SEQ ID NO: 7092 - protein, 32 aa, Artificial Sequence
  GFR-binding peptide
  MOD_RES (31)..(31): Xaa is C or S
VSQDLSATSILYYIGKTPKILRKHRMIVKSXK

SEQ ID NO: 7093 - protein, 36 aa, Artificial Sequence
  GFR-binding peptide
  MOD_RES (3)..(4)..(36): Xaa is C or S
KAXXAPTKLSPISVLYKDSSNNVILKYHYNMVVKAX

SEQ ID NO: 7094 - protein, 32 aa, Artificial Sequence
  GFR-binding peptide
  MOD_RES (14)..(15)..(16)..(17)..(18): Xaa is A or G
  MOD_RES (19)..(20)..(21)..(22): Xaa is A or G or is absent
APTQLSAISVLYLXXXXXXXXXLKNYQNMVVR

SEQ ID NO: 7095 - protein, 37 aa, Artificial Sequence
  GFR-binding peptide
  MOD_RES (1)..(35)..(37): Xaa is C or S
  MOD_RES (15)..(16)..(17)..(18)..(19): Xaa is A or G
  MOD_RES (20)..(21)..(22)..(23): Xaa is A or G or is absent
XAPTKLSATSVLYYXXXXXXXXXLRKHRNMVVKAXGX

SEQ ID NO: 7096 - protein, 37 aa, Artificial Sequence
  GFR-binding peptide
  MOD_RES (3)..(3): Xaa is C or S
  MOD_RES (19)..(20)..(21)..(22)..(23): Xaa is A or G
  MOD_RES (24)..(25)..(26)..(27): Xaa is A or G or is absent
VQXRPTQVQLSATSVLYYXXXXXXXXXLRKHRTLEDH

SEQ ID NO: 7097 - protein, 40 aa, Artificial Sequence
  GFR-binding peptide
  MOD_RES (5)..(6)..(40): Xaa is C or S
  MOD_RES (20)..(21)..(22)..(23)..(24): Xaa is A or G
  MOD_RES (25)..(26)..(27)..(28): Xaa is A or G or is absent
VPKAXXAPTKLSATSVLYYXXXXXXXXXLRKHRNMVVKAX

SEQ ID NO: 7098 - protein, 30 aa, Artificial Sequence
  GFR-binding peptide
VPTELSATSMLYYDEYDKVVLRKHREMVVE

SEQ ID NO: 7099 - protein, 42 aa, Artificial Sequence
  GFR-binding peptide
  MOD_RES (6)..(7)..(39)..(41): Xaa is C or S
YVPKPXXAPTKLSAISVLYLDDSSNVILKNYQNMVVRSXGXH

SEQ ID NO: 7100 - protein, 35 aa, Artificial Sequence
  GFR-binding peptide
  MOD_RES (32)..(34): Xaa is C or S
VPTELSPISMLYKDENEKVVLKYHYDMVVEGXGXR

SEQ ID NO: 7101 - protein, 42 aa, Artificial Sequence
  GFR-binding peptide
  MOD_RES (5)..(6)..(40)..(42): Xaa is C or S
  MOD_RES (20)..(21)..(22)..(23)..(24): Xaa is A or G
  MOD_RES (25)..(26)..(27)..(28): Xaa is A or G or is absent
IPKAXXVPTELSAISMLYLXXXXXXXXXLKNYQDMVVEGXGX

SEQ ID NO: 7102 - protein, 42 aa, Artificial Sequence
  GFR-binding peptide
  MOD_RES (6)..(7)..(39)..(41): Xaa is C or S
SIPKAXXVPTELNAISMLYFDEYDKVVLKKYREMVVEGXGXR

SEQ ID NO: 7103 - protein, 37 aa, Artificial Sequence
  GFR-binding peptide
  MOD_RES (5)..(5): Xaa is C or S
  MOD_RES (19)..(20)..(21)..(22)..(23): Xaa is A or G
  MOD_RES (24)..(25)..(26)..(27): Xaa is A or G or is absent
TKPTXAPTKLSPISVLYKXXXXXXXXXLKYHYNMVVR

SEQ ID NO: 7104 - protein, 38 aa, Artificial Sequence
  GFR-binding peptide
  MOD_RES (1)..(2)..(36)..(38): Xaa is C or S
  MOD_RES (16)..(17)..(18)..(19)..(20): Xaa is A or G
  MOD_RES (21)..(22)..(23)..(24): Xaa is A or G or is absent
XXAPTKLNAISVLYFXXXXXXXXXLKKYRNMVVRSXGX

SEQ ID NO: 7105 - protein, 33 aa, Artificial Sequence
  GFR-binding peptide
  MOD_RES (14)..(15)..(16)..(17)..(18): Xaa is A or G
  MOD_RES (19)..(20)..(21)..(22): Xaa is A or G or is absent
APTKLSATSVLYYXXXXXXXXXLRKHRNMVVKA

SEQ ID NO: 7106 - protein, 35 aa, Artificial Sequence
  GFR-binding peptide
  MOD_RES (2)..(3): Xaa is C or S
  MOD_RES (17)..(18)..(19)..(20)..(21): Xaa is A or G
  MOD_RES (22)..(23)..(24)..(25): Xaa is A or G or is absent
PXXAPTQLSAISVLYLXXXXXXXXXLKNYQNMVVR

SEQ ID NO: 7107 - protein, 39 aa, Artificial Sequence
  GFR-binding peptide
  MOD_RES (6)..(7)..(39): Xaa is C or S
SIPKAXXVPTELSPISMLYKDEYDKVVLKYHYEMVVEGX

SEQ ID NO: 7108 - protein, 41 aa, Artificial Sequence
  GFR-binding peptide
  MOD_RES (6)..(7)..(40): Xaa is C or S
KVGKAXXVPTKLNAISVLYFDDMGVPTLKKYREGMSVAEXG

SEQ ID NO: 7109 - protein, 40 aa, Artificial Sequence
  GFR-binding peptide
  MOD_RES (4)..(5)..(39): Xaa is C or S
  MOD_RES (19)..(20)..(21)..(22)..(23): Xaa is A or G
  MOD_RES (24)..(25)..(26)..(27): Xaa is A or G or is absent
PKPXXAPTQLSATSVLYYXXXXXXXXXLRKHRNMVVRAXG

SEQ ID NO: 7110 - protein, 33 aa, Artificial Sequence
  GFR-binding peptide
  MOD_RES (1)..(32): Xaa is C or S
XVPQALNAISILYFVGRKPKVLKKYRMIVRSXK

SEQ ID NO: 7111 - protein, 41 aa, Artificial Sequence
  GFR-binding peptide
  MOD_RES (6)..(7)..(40): Xaa is C or S
  MOD_RES (21)..(22)..(23)..(24)..(25): Xaa is A or G
  MOD_RES (26)..(27)..(28)..(29): Xaa is A or G or is absent
ASASPXXVPQDLSATSILYYXXXXXXXXXLRKHRMVVKSXK

SEQ ID NO: 7112 - protein, 35 aa, Artificial Sequence
  GFR-binding peptide
  MOD_RES (1)..(35): Xaa is C or S
  MOD_RES (15)..(16)..(17)..(18)..(19): Xaa is A or G
  MOD_RES (20)..(21)..(22)..(23): Xaa is A or G or is absent
XAPTQLNAISVLYFXXXXXXXXXLKKYRNMVVRAX

SEQ ID NO: 7113 - protein, 34 aa, Artificial Sequence
  GFR-binding peptide
  MOD_RES (3)..(4): Xaa is C or S
SPXXVPQDLSATSILYYVGRTPKVLRKHRMVVKS

SEQ ID NO: 7114 - protein, 37 aa, Artificial Sequence
  GFR-binding peptide
  MOD_RES (1)..(2)..(35)..(37): Xaa is C or S
  MOD_RES (16)..(17)..(18)..(19)..(20): Xaa is A or G
  MOD_RES (21)..(22)..(23)..(24): Xaa is A or G or is absent
XXVPQALSATSILYYXXXXXXXXXLRKHRMIVRSXKX

SEQ ID NO: 7115 - protein, 35 aa, Artificial Sequence
  GFR-binding peptide
  MOD_RES (1)..(2)..(33)..(35): Xaa is C or S
XXVPQALSPISILYKVGRKPKVLKYHYMIVRSXKX

SEQ ID NO: 7116 - protein, 39 aa, Artificial Sequence
  GFR-binding peptide
  MOD_RES (4)..(5)..(39): Xaa is C or S
  MOD_RES (19)..(20)..(21)..(22)..(23): Xaa is A or G
  MOD_RES (24)..(25)..(26)..(27): Xaa is A or G or is absent
PKAXXAPTKLSATSVLYYXXXXXXXXXLRKHRNMVVKAX

SEQ ID NO: 7117 - protein, 36 aa, Artificial Sequence
  GFR-binding peptide
  MOD_RES (1)..(33)..(35): Xaa is C or S
XAPTKLSAISVLYLDDSSNVILKNYQNMVVRSXGXH

SEQ ID NO: 7118 - protein, 37 aa, Artificial Sequence
  GFR-binding peptide
  MOD_RES (4)..(5)..(37): Xaa is C or S
PKPXXAPTQLSATSVLYYDDSSNVILRKHRNMVVRAX

SEQ ID NO: 7119 - protein, 42 aa, Artificial Sequence
  GFR-binding peptide
  MOD_RES (6)..(7)..(41): Xaa is C or S
  MOD_RES (21)..(22)..(23)..(24)..(25): Xaa is A or G
  MOD_RES (26)..(27)..(28)..(29): Xaa is A or G or is absent
TVPKPXXAPTQLSATSVLYYXXXXXXXXXLRKHRNMVVRAXG

SEQ ID NO: 7120 - protein, 32 aa, Artificial Sequence
  GFR-binding peptide
  MOD_RES (32)..(32): Xaa is C or S
APTKLSPISVLYKDDSSNVILKYHYNMVVRSX

SEQ ID NO: 7121 - protein, 41 aa, Artificial Sequence
  GFR-binding peptide
  MOD_RES (5)..(6)..(39)..(41): Xaa is C or S
  MOD_RES (20)..(21)..(22)..(23)..(24): Xaa is A or G
  MOD_RES (25)..(26)..(27)..(28): Xaa is A or G or is absent
SASPXXVSQDLNAISILYFXXXXXXXXXLKKYRMIVKSXKX

SEQ ID NO: 7122 - protein, 42 aa, Artificial Sequence
  GFR-binding peptide
  MOD_RES (4)..(5)..(39)..(41): Xaa is C or S
  MOD_RES (19)..(20)..(21)..(22)..(23): Xaa is A or G
  MOD_RES (24)..(25)..(26)..(27): Xaa is A or G or is absent
PKAXXVPTELSATSMLYYXXXXXXXXXLRKHRDMVVEGXGXR

SEQ ID NO: 7123 - protein, 33 aa, Artificial Sequence
  GFR-binding peptide
  MOD_RES (1)..(32): Xaa is C or S
XVPQALSPISILYKVGRKPKVLKYHYMIVRSXK

SEQ ID NO: 7124 - protein, 35 aa, Artificial Sequence
  GFR-binding peptide
  MOD_RES (35)..(35): Xaa is C or S
TQVQLSAISVLYLEIVRKKPIFLKNYQTLEDHLAX

SEQ ID NO: 7125 - protein, 36 aa, Artificial Sequence
  GFR-binding peptide
  MOD_RES (1)..(2)..(36): Xaa is C or S
  MOD_RES (16)..(17)..(18)..(19)..(20): Xaa is A or G
  MOD_RES (21)..(22)..(23)..(24): Xaa is A or G or is absent
XXAPTKLSPISVLYKXXXXXXXXXLKYHYNMVVKAX

SEQ ID NO: 7126 - protein, 37 aa, Artificial Sequence
  GFR-binding peptide
  MOD_RES (34)..(36): Xaa is C or S
  MOD_RES (14)..(15)..(16)..(17)..(18): Xaa is A or G
  MOD_RES (19)..(20)..(21)..(22): Xaa is A or G or is absent
VPTELSAISMLYLXXXXXXXXXLKNYQDMVVEGXGXR

SEQ ID NO: 7127 - protein, 39 aa, Artificial Sequence
  GFR-binding peptide
  MOD_RES (3)..(4)..(39): Xaa is C or S
  MOD_RES (18)..(19)..(20)..(21)..(22): Xaa is A or G
  MOD_RES (23)..(24)..(25)..(26): Xaa is A or G or is absent
KAXXVPTKLSAISVLYLXXXXXXXXXLKNYQEGMSVAEX

SEQ ID NO: 7128 - protein, 35 aa, Artificial Sequence
  GFR-binding peptide
  MOD_RES (34)..(34): Xaa is C or S
  MOD_RES (14)..(15)..(16)..(17)..(18): Xaa is A or G
  MOD_RES (19)..(20)..(21)..(22): Xaa is A or G or is absent
APTKLNAISVLYFXXXXXXXXXLKKYRNMVVRSXG

SEQ ID NO: 7129 - protein, 41 aa, Artificial Sequence
  GFR-binding peptide
  MOD_RES (4)..(5)..(39)..(41): Xaa is C or S
  MOD_RES (19)..(20)..(21)..(22)..(23): Xaa is A or G
  MOD_RES (24)..(25)..(26)..(27): Xaa is A or G or is absent
PKPXXAPTKLSATSVLYYXXXXXXXXXLRKHRNMVVRSXGX

SEQ ID NO: 7130 - protein, 36 aa, Artificial Sequence
  GFR-binding peptide
  MOD_RES (2)..(3)..(35): Xaa is C or S
PXXAPTQLSAISVLYLDDSSNVILKNYQNMVVRAXG

SEQ ID NO: 7131 - protein, 37 aa, Artificial Sequence
  GFR-binding peptide
  MOD_RES (7)..(7): Xaa is C or S
HVTKPTXAPTKLSAISVLYLDDSSNVILKNYQNMVVR

SEQ ID NO: 7132 - protein, 43 aa, Artificial Sequence
  GFR-binding peptide
  MOD_RES (5)..(42): Xaa is C or S
RNVQXRPTQVQLSAISVLYLEIVRKKPIFLKNYQTLEDHLAXK

SEQ ID NO: 7133 - protein, 32 aa, Artificial Sequence
  GFR-binding peptide
  MOD_RES (14)..(15)..(16)..(17)..(18): Xaa is A or G
  MOD_RES (19)..(20)..(21)..(22): Xaa is A or G or is absent
VPTELSATSMLYYXXXXXXXXXLRKHRDMVVE

SEQ ID NO: 7134 - protein, 31 aa, Artificial Sequence
  GFR-binding peptide
  MOD_RES (1)..(1): Xaa is C or S
XVPTELSPISMLYKDEYDKVVLKYHYEMVVE

SEQ ID NO: 7135 - protein, 36 aa, Artificial Sequence
  GFR-binding peptide
  MOD_RES (2)..(3)..(34)..(36): Xaa is C or S
PXXVPQDLSATSILYYVGRTPKVLRKHRMVVKSXKX

SEQ ID NO: 7136 - protein, 41 aa, Artificial Sequence
  GFR-binding peptide
  MOD_RES (6)..(7): Xaa is C or S
  MOD_RES (21)..(22)..(23)..(24)..(25): Xaa is A or G
  MOD_RES (26)..(27)..(28)..(29): Xaa is A or G or is absent
KVGKAXXVPTKLSAISVLYLXXXXXXXXXLKNYQEGMSVAE

SEQ ID NO: 7137 - protein, 41 aa, Artificial Sequence
  GFR-binding peptide
  MOD_RES (3)..(4)..(38)..(40): Xaa is C or S
  MOD_RES (18)..(19)..(20)..(21)..(22): Xaa is A or G
  MOD_RES (23)..(24)..(25)..(26): Xaa is A or G or is absent
KPXXAPTQLSPISVLYKXXXXXXXXXLKYHYNMVVRAXGXH

SEQ ID NO: 7138 - protein, 34 aa, Artificial Sequence
  GFR-binding peptide
  MOD_RES (1)..(34): Xaa is C or S
XVPTKLSATSVLYYDDMGVPTLRKHREGMSVAEX

SEQ ID NO: 7139 - protein, 38 aa, Artificial Sequence
  GFR-binding peptide
  MOD_RES (36)..(38): Xaa is C or S
PTQVQLSATSVLYYEIVRKKPIFLRKHRTLEDHLAXKX

SEQ ID NO: 7140 - protein, 37 aa, Artificial Sequence
  GFR-binding peptide
  MOD_RES (6)..(7): Xaa is C or S
YVPKPXXAPTKLSATSVLYYDDSSNVILRKHRNMVVR

SEQ ID NO: 7141 - protein, 40 aa, Artificial Sequence
  GFR-binding peptide
  MOD_RES (5)..(6)..(40): Xaa is C or S
  MOD_RES (20)..(21)..(22)..(23)..(24): Xaa is A or G
  MOD_RES (25)..(26)..(27)..(28): Xaa is A or G or is absent
VPKPXXAPTKLSPISVLYKXXXXXXXXXLKYHYNMVVRSX

SEQ ID NO: 7142 - protein, 38 aa, Artificial Sequence
  GFR-binding peptide
  MOD_RES (35)..(37): Xaa is C or S
TQVQLNAISVLYFEIVRKKPIFLKKYRTLEDHLAXKXE

SEQ ID NO: 7143 - protein, 43 aa, Artificial Sequence
  GFR-binding peptide
  MOD_RES (6)..(7)..(41)..(43): Xaa is C or S
  MOD_RES (21)..(22)..(23)..(24)..(25): Xaa is A or G
  MOD_RES (26)..(27)..(28)..(29): Xaa is A or G or is absent
TVPKPXXAPTQLSATSVLYYXXXXXXXXXLRKHRNMVVRAXGX

SEQ ID NO: 7144 - protein, 37 aa, Artificial Sequence
  GFR-binding peptide
  MOD_RES (5)..(6): Xaa is C or S
VPKAXXAPTKLSPISVLYKDSSNNVILKYHYNMVVKA

SEQ ID NO: 7145 - protein, 34 aa, Artificial Sequence
  GFR-binding peptide
  MOD_RES (33)..(33): Xaa is C or S
VPTKLNAISVLYFDDMGVPTLKKYREGMSVAEXG

SEQ ID NO: 7146 - protein, 43 aa, Artificial Sequence
  GFR-binding peptide
  MOD_RES (7)..(41)..(43): Xaa is C or S
  MOD_RES (21)..(22)..(23)..(24)..(25): Xaa is A or G
  MOD_RES (26)..(27)..(28)..(29): Xaa is A or G or is absent
HVTKPTXAPTKLNAISVLYFXXXXXXXXXLKKYRNMVVRSXGX

SEQ ID NO: 7147 - protein, 43 aa, Artificial Sequence
  GFR-binding peptide
  MOD_RES (4)..(41)..(43): Xaa is C or S
  MOD_RES (20)..(21)..(22)..(23)..(24): Xaa is A or G
  MOD_RES (25)..(26)..(27)..(28): Xaa is A or G or is absent
NVQXRPTQVQLNAISVLYFXXXXXXXXXLKKYRTLEDHLAXKX

SEQ ID NO: 7148 - protein, 33 aa, Artificial Sequence
  GFR-binding peptide
  MOD_RES (33)..(33): Xaa is C or S
VPTKLSATSVLYYDDMGVPTLRKHREGMSVAEX

SEQ ID NO: 7149 - protein, 30 aa, Artificial Sequence
  GFR-binding peptide
VSQDLSATSILYYIGKTPKILRKHRMIVKS

SEQ ID NO: 7150 - protein, 40 aa, Artificial Sequence
  GFR-binding peptide
  MOD_RES (3)..(4)..(38)..(40): Xaa is C or S
  MOD_RES (18)..(19)..(20)..(21)..(22): Xaa is A or G
  MOD_RES (23)..(24)..(25)..(26): Xaa is A or G or is absent
KAXXVPTELNAISMLYFXXXXXXXXXLKKYRDMVVEGXGX

SEQ ID NO: 7151 - protein, 37 aa, Artificial Sequence
  GFR-binding peptide
  MOD_RES (1)..(35)..(37): Xaa is C or S
  MOD_RES (15)..(16)..(17)..(18)..(19): Xaa is A or G
  MOD_RES (20)..(21)..(22)..(23): Xaa is A or G or is absent
XAPTKLSAISVLYLXXXXXXXXXLKNYQNMVVRSXGX

SEQ ID NO: 7152 - protein, 36 aa, Artificial Sequence
  GFR-binding peptide
  MOD_RES (1)..(33)..(35): Xaa is C or S
XAPTKLSAISVLYLDSSNNVILKNYQNMVVKAXGXH

SEQ ID NO: 7153 - protein, 38 aa, Artificial Sequence
  GFR-binding peptide
  MOD_RES (2)..(3)..(37): Xaa is C or S
  MOD_RES (17)..(18)..(19)..(20)..(21): Xaa is A or G
  MOD_RES (22)..(23)..(24)..(25): Xaa is A or G or is absent
AXXVPTELSPISMLYKXXXXXXXXXLKYHYEMVVEGXG

SEQ ID NO: 7154 - protein, 40 aa, Artificial Sequence
  GFR-binding peptide
  MOD_RES (3)..(40): Xaa is C or S
VQXRPTQVQLSAISVLYLEIVRKKPIFLKNYQTLEDHLAX

SEQ ID NO: 7155 - protein, 39 aa, Artificial Sequence
  GFR-binding peptide
  MOD_RES (6)..(7): Xaa is C or S
KVGKAXXVPTKLSAISVLYLDDMGVPTLKNYQEGMSVAE

SEQ ID NO: 7156 - protein, 40 aa, Artificial Sequence
  GFR-binding peptide
  MOD_RES (4)..(5)..(38)..(40): Xaa is C or S
  MOD_RES (19)..(20)..(21)..(22)..(23): Xaa is A or G
  MOD_RES (24)..(25)..(26)..(27): Xaa is A or G or is absent
AAPXXVPQALSPISILYKXXXXXXXXXLKYHYMIVRSXKX

SEQ ID NO: 7157 - protein, 38 aa, Artificial Sequence
  GFR-binding peptide
  MOD_RES (5)..(5): Xaa is C or S
  MOD_RES (19)..(20)..(21)..(22)..(23): Xaa is A or G
  MOD_RES (24)..(25)..(26)..(27): Xaa is A or G or is absent
TKPTXAPTKLSPISVLYKXXXXXXXXXLKYHYNMVVRS

SEQ ID NO: 7158 - protein, 35 aa, Artificial Sequence
  GFR-binding peptide
  MOD_RES (32)..(34): Xaa is C or S
VPTELSPISMLYKDEYDKVVLKYHYEMVVEGXGXR

SEQ ID NO: 7159 - protein, 39 aa, Artificial Sequence
  GFR-binding peptide
  MOD_RES (6)..(7)..(39): Xaa is C or S
SIPKAXXVPTELNAISMLYFDEYDKVVLKKYREMVVEGX

SEQ ID NO: 7160 - protein, 40 aa, Artificial Sequence
  GFR-binding peptide
  MOD_RES (3)..(4)..(37)..(39): Xaa is C or S
  MOD_RES (18)..(19)..(20)..(21)..(22): Xaa is A or G
  MOD_RES (23)..(24)..(25)..(26): Xaa is A or G or is absent
SPXXVSQDLSPISILYKXXXXXXXXXLKYHYMIVKSXKXS

SEQ ID NO: 7161 - protein, 38 aa, Artificial Sequence
  GFR-binding peptide
  MOD_RES (2)..(3)..(36)..(38): Xaa is C or S
  MOD_RES (17)..(18)..(19)..(20)..(21): Xaa is A or G
  MOD_RES (22)..(23)..(24)..(25): Xaa is A or G or is absent
PXXVPQDLSAISILYLXXXXXXXXXLKNYQMVVKSXKX

SEQ ID NO: 7162 - protein, 41 aa, Artificial Sequence
  GFR-binding peptide
  MOD_RES (6)..(7)..(38)..(40): Xaa is C or S
ASASPXXVSQDLSATSILYYIGKTPKILRKHRMIVKSXKXS

SEQ ID NO: 7163 - protein, 39 aa, Artificial Sequence
  GFR-binding peptide
  MOD_RES (6)..(7)..(38): Xaa is C or S
ASAAPXXVPQALSATSILYYVGRKPKVLRKHRMIVRSXK

SEQ ID NO: 7164 - protein, 43 aa, Artificial Sequence
  GFR-binding peptide
  MOD_RES (3)..(40)..(42): Xaa is C or S
  MOD_RES (19)..(20)..(21)..(22)..(23): Xaa is A or G
  MOD_RES (24)..(25)..(26)..(27): Xaa is A or G or is absent
VQXRPTQVQLSPISVLYKXXXXXXXXXLKYHYTLEDHLAXKXE

SEQ ID NO: 7165 - protein, 41 aa, Artificial Sequence
  GFR-binding peptide
  MOD_RES (6)..(7): Xaa is C or S
  MOD_RES (21)..(22)..(23)..(24)..(25): Xaa is A or G
  MOD_RES (26)..(27)..(28)..(29): Xaa is A or G or is absent
KVGKAXXVPTKLSATSVLYYXXXXXXXXXLRKHREGMSVAE

SEQ ID NO: 7166 - protein, 36 aa, Artificial Sequence
  GFR-binding peptide
  MOD_RES (1)..(35): Xaa is C or S
  MOD_RES (15)..(16)..(17)..(18)..(19): Xaa is A or G
  MOD_RES (20)..(21)..(22)..(23): Xaa is A or G or is absent
XAPTQLSATSVLYYXXXXXXXXXLRKHRNMVVRAXG

SEQ ID NO: 7167 - protein, 41 aa, Artificial Sequence
  GFR-binding peptide
  MOD_RES (4)..(38)..(40): Xaa is C or S
  MOD_RES (18)..(19)..(20)..(21)..(22): Xaa is A or G
  MOD_RES (23)..(24)..(25)..(26): Xaa is A or G or is absent
KPTXAPTKLSATSVLYYXXXXXXXXXLRKHRNMVVRSXGXH

SEQ ID NO: 7168 - protein, 37 aa, Artificial Sequence
  GFR-binding peptide
  MOD_RES (5)..(6)..(37): Xaa is C or S
SASPXXVSQDLSAISILYLIGKTPKILKNYQMIVKSX

SEQ ID NO: 7169 - protein, 37 aa, Artificial Sequence
  GFR-binding peptide
  MOD_RES (1)..(34)..(36): Xaa is C or S
  MOD_RES (15)..(16)..(17)..(18)..(19): Xaa is A or G
  MOD_RES (20)..(21)..(22)..(23): Xaa is A or G or is absent
XVPQDLSPISILYKXXXXXXXXXLKYHYMVVKSXKXS

SEQ ID NO: 7170 - protein, 37 aa, Artificial Sequence
  GFR-binding peptide
  MOD_RES (2)..(3)..(36): Xaa is C or S
  MOD_RES (17)..(18)..(19)..(20)..(21): Xaa is A or G
  MOD_RES (22)..(23)..(24)..(25): Xaa is A or G or is absent
PXXVPQDLNAISILYFXXXXXXXXXLKKYRMVVKSXK

SEQ ID NO: 7171 - protein, 37 aa, Artificial Sequence
  GFR-binding peptide
  MOD_RES (5)..(6)..(37): Xaa is C or S
SASPXXVSQDLNAISILYFIGKTPKILKKYRMIVKSX

SEQ ID NO: 7172 - protein, 40 aa, Artificial Sequence
  GFR-binding peptide
  MOD_RES (4)..(5)..(37)..(39): Xaa is C or S
PKAXXVPTELSATSMLYYDENEKVVLRKHRDMVVEGXGXR

SEQ ID NO: 7173 - protein, 41 aa, Artificial Sequence
  GFR-binding peptide
  MOD_RES (6)..(7)..(41): Xaa is C or S
  MOD_RES (21)..(22)..(23)..(24)..(25): Xaa is A or G
  MOD_RES (26)..(27)..(28)..(29): Xaa is A or G or is absent
YVPKPXXAPTKLSAISVLYLXXXXXXXXXLKNYQNMVVRSX

SEQ ID NO: 7174 - protein, 40 aa, Artificial Sequence
  GFR-binding peptide
  MOD_RES (4)..(4): Xaa is C or S
  MOD_RES (20)..(21)..(22)..(23)..(24): Xaa is A or G
  MOD_RES (25)..(26)..(27)..(28): Xaa is A or G or is absent
NVQXRPTQVQLSATSVLYYXXXXXXXXXLRKHRTLEDHLA

SEQ ID NO: 7175 - protein, 40 aa, Artificial Sequence
  GFR-binding peptide
  MOD_RES (3)..(40): Xaa is C or S
VQXRPTQVQLSATSVLYYEIVRKKPIFLRKHRTLEDHLAX

SEQ ID NO: 7176 - protein, 36 aa, Artificial Sequence
  GFR-binding peptide
  MOD_RES (33)..(35): Xaa is C or S
  MOD_RES (14)..(15)..(16)..(17)..(18): Xaa is A or G
  MOD_RES (19)..(20)..(21)..(22): Xaa is A or G or is absent
VPQALSAISILYLXXXXXXXXXLKNYQMIVRSXKXS

SEQ ID NO: 7177 - protein, 42 aa, Artificial Sequence
  GFR-binding peptide
  MOD_RES (4)..(5)..(39)..(41): Xaa is C or S
  MOD_RES (19)..(20)..(21)..(22)..(23): Xaa is A or G
  MOD_RES (24)..(25)..(26)..(27): Xaa is A or G or is absent
PKPXXAPTKLNAISVLYFXXXXXXXXXLKKYRNMVVRSXGXH

SEQ ID NO: 7178 - protein, 35 aa, Artificial Sequence
  GFR-binding peptide
  MOD_RES (1)..(2)..(33)..(35): Xaa is C or S
XXVSQDLSATSILYYIGKTPKILRKHRMIVKSXKX

SEQ ID NO: 7179 - protein, 37 aa, Artificial Sequence
  GFR-binding peptide
  MOD_RES (2)..(3)..(36): Xaa is C or S
  MOD_RES (17)..(18)..(19)..(20)..(21): Xaa is A or G
  MOD_RES (22)..(23)..(24)..(25): Xaa is A or G or is absent
PXXVPQDLSAISILYLXXXXXXXXXLKNYQMVVKSXK

SEQ ID NO: 7180 - protein, 40 aa, Artificial Sequence
  GFR-binding peptide
  MOD_RES (6)..(7): Xaa is C or S
  MOD_RES (21)..(22)..(23)..(24)..(25): Xaa is A or G
  MOD_RES (26)..(27)..(28)..(29): Xaa is A or G or is absent
YVPKPXXAPTKLSATSVLYYXXXXXXXXXLRKHRNMVVRS

SEQ ID NO: 7181 - protein, 33 aa, Artificial Sequence
  GFR-binding peptide
  MOD_RES (1)..(1): Xaa is C or S
  MOD_RES (15)..(16)..(17)..(18)..(19): Xaa is A or G
  MOD_RES (20)..(21)..(22)..(23): Xaa is A or G or is absent
XVSQDLSATSILYYXXXXXXXXXLRKHRMIVKS

SEQ ID NO: 7182 - protein, 36 aa, Artificial Sequence
  GFR-binding peptide
  MOD_RES (2)..(3)..(35): Xaa is C or S
PXXAPTQLSPISVLYKDDSSNVILKYHYNMVVRAXG

SEQ ID NO: 7183 - protein, 35 aa, Artificial Sequence
  GFR-binding peptide
  MOD_RES (32)..(34): Xaa is C or S
APTKLSAISVLYLDSSNNVILKNYQNMVVKAXGXH

SEQ ID NO: 7184 - protein, 38 aa, Artificial Sequence
  GFR-binding peptide
  MOD_RES (1)..(2)..(35)..(37): Xaa is C or S
  MOD_RES (16)..(17)..(18)..(19)..(20): Xaa is A or G
  MOD_RES (21)..(22)..(23)..(24): Xaa is A or G or is absent
XXVSQDLSPISILYKXXXXXXXXXLKYHYMIVKSXKXS

SEQ ID NO: 7185 - protein, 43 aa, Artificial Sequence
  GFR-binding peptide
  MOD_RES (6)..(7)..(41)..(43): Xaa is C or S
  MOD_RES (21)..(22)..(23)..(24)..(25): Xaa is A or G
  MOD_RES (26)..(27)..(28)..(29): Xaa is A or G or is absent
KIPKAXXVPTELNAISMLYFXXXXXXXXXLKKYRDMVVEGXGX

SEQ ID NO: 7186 - protein, 31 aa, Artificial Sequence
  GFR-binding peptide
  MOD_RES (1)..(1): Xaa is C or S
XVPQALSATSILYYVGRKPKVLRKHRMIVRS

SEQ ID NO: 7187 - protein, 36 aa, Artificial Sequence
  GFR-binding peptide
  MOD_RES (1)..(2)..(36): Xaa is C or S
  MOD_RES (16)..(17)..(18)..(19)..(20): Xaa is A or G
  MOD_RES (21)..(22)..(23)..(24): Xaa is A or G or is absent
XXAPTQLSAISVLYLXXXXXXXXXLKNYQNMVVRAX

SEQ ID NO: 7188 - protein, 39 aa, Artificial Sequence
  GFR-binding peptide
  MOD_RES (5)..(6): Xaa is C or S
  MOD_RES (20)..(21)..(22)..(23)..(24): Xaa is A or G
  MOD_RES (25)..(26)..(27)..(28): Xaa is A or G or is absent
VPKAXXAPTKLSATSVLYYXXXXXXXXXLRKHRNMVVKA

SEQ ID NO: 7189 - protein, 34 aa, Artificial Sequence
  GFR-binding peptide
  MOD_RES (2)..(3)..(34): Xaa is C or S
PXXVPQALSPISILYKVGRKPKVLKYHYMIVRSX

SEQ ID NO: 7190 - protein, 40 aa, Artificial Sequence
  GFR-binding peptide
  MOD_RES (4)..(4): Xaa is C or S
  MOD_RES (20)..(21)..(22)..(23)..(24): Xaa is A or G
  MOD_RES (25)..(26)..(27)..(28): Xaa is A or G or is absent
NVQXRPTQVQLSAISVLYLXXXXXXXXXLKNYQTLEDHLA

SEQ ID NO: 7191 - protein, 42 aa, Artificial Sequence
  GFR-binding peptide
  MOD_RES (5)..(6)..(39)..(41): Xaa is C or S
  MOD_RES (20)..(21)..(22)..(23)..(24): Xaa is A or G
  MOD_RES (25)..(26)..(27)..(28): Xaa is A or G or is absent
SASPXXVPQDLSPISILYKXXXXXXXXXLKYHYMVVKSXKXS

SEQ ID NO: 7192 - protein, 31 aa, Artificial Sequence
  GFR-binding peptide
APTKLSPISVLYKDSSNNVILKYHYNMVVKA

SEQ ID NO: 7193 - protein, 33 aa, Artificial Sequence
  GFR-binding peptide
  MOD_RES (2)..(3): Xaa is C or S
AXXAPTKLNAISVLYFDSSNNVILKKYRNMVVK

SEQ ID NO: 7194 - protein, 33 aa, Artificial Sequence
  GFR-binding peptide
PTQVQLSAISVLYLEIVRKKPIFLKNYQTLEDH

SEQ ID NO: 7195 - protein, 37 aa, Artificial Sequence
  GFR-binding peptide
  MOD_RES (1)..(2)..(34)..(36): Xaa is C or S
XXVPTELNAISMLYFDEYDKVVLKKYREMVVEGXGXR

SEQ ID NO: 7196 - protein, 37 aa, Artificial Sequence
  GFR-binding peptide
  MOD_RES (1)..(2)..(34)..(36): Xaa is C or S
XXAPTQLSPISVLYKDDSSNVILKYHYNMVVRAXGXH

SEQ ID NO: 7197 - protein, 36 aa, Artificial Sequence
  GFR-binding peptide
  MOD_RES (1)..(2)..(36): Xaa is C or S
  MOD_RES (16)..(17)..(18)..(19)..(20): Xaa is A or G
  MOD_RES (21)..(22)..(23)..(24): Xaa is A or G or is absent
XXAPTQLNAISVLYFXXXXXXXXXLKKYRNMVVRAX

SEQ ID NO: 7198 - protein, 41 aa, Artificial Sequence
  GFR-binding peptide
  MOD_RES (5)..(39)..(41): Xaa is C or S
  MOD_RES (19)..(20)..(21)..(22)..(23): Xaa is A or G
  MOD_RES (24)..(25)..(26)..(27): Xaa is A or G or is absent
TKPTXAPTKLNAISVLYFXXXXXXXXXLKKYRNMVVRSXGX

SEQ ID NO: 7199 - protein, 37 aa, Artificial Sequence
  GFR-binding peptide
  MOD_RES (1)..(35)..(37): Xaa is C or S
  MOD_RES (15)..(16)..(17)..(18)..(19): Xaa is A or G
  MOD_RES (20)..(21)..(22)..(23): Xaa is A or G or is absent
XAPTQLNAISVLYFXXXXXXXXXLKKYRNMVVRAXGX

SEQ ID NO: 7200 - protein, 37 aa, Artificial Sequence
  GFR-binding peptide
  MOD_RES (3)..(4)..(35)..(37): Xaa is C or S
APXXVPQALNAISILYFVGRKPKVLKKYRMIVRSXKX

SEQ ID NO: 7201 - protein, 37 aa, Artificial Sequence
  GFR-binding peptide
  MOD_RES (1)..(35)..(37): Xaa is C or S
  MOD_RES (15)..(16)..(17)..(18)..(19): Xaa is A or G
  MOD_RES (20)..(21)..(22)..(23): Xaa is A or G or is absent
XAPTQLSATSVLYYXXXXXXXXXLRKHRNMVVRAXGX

SEQ ID NO: 7202 - protein, 34 aa, Artificial Sequence
  GFR-binding peptide
  MOD_RES (14)..(15)..(16)..(17)..(18): Xaa is A or G
  MOD_RES (19)..(20)..(21)..(22): Xaa is A or G or is absent
TQVQLSATSVLYYXXXXXXXXXLRKHRTLEDHLA

SEQ ID NO: 7203 - protein, 36 aa, Artificial Sequence
  GFR-binding peptide
  MOD_RES (3)..(4)..(35): Xaa is C or S
SPXXVPQDLSAISILYLVGRTPKVLKNYQMVVKSXK

SEQ ID NO: 7204 - protein, 42 aa, Artificial Sequence
  GFR-binding peptide
  MOD_RES (5)..(6)..(40)..(42): Xaa is C or S
  MOD_RES (20)..(21)..(22)..(23)..(24): Xaa is A or G
  MOD_RES (25)..(26)..(27)..(28): Xaa is A or G or is absent
VPKPXXAPTQLNAISVLYFXXXXXXXXXLKKYRNMVVRAXGX

SEQ ID NO: 7205 - protein, 40 aa, Artificial Sequence
  GFR-binding peptide
  MOD_RES (6)..(7)..(39): Xaa is C or S
SIPKAXXVPTELSPISMLYKDEYDKVVLKYHYEMVVEGXG

SEQ ID NO: 7206 - protein, 37 aa, Artificial Sequence
  GFR-binding peptide
  MOD_RES (4)..(5)..(37): Xaa is C or S
PKAXXVPTELSATSMLYYDEYDKVVLRKHREMVVEGX

SEQ ID NO: 7207 - protein, 36 aa, Artificial Sequence
  GFR-binding peptide
  MOD_RES (2)..(3)..(34)..(36): Xaa is C or S
PXXVPQDLSAISILYLVGRTPKVLKNYQMVVKSXKX

SEQ ID NO: 7208 - protein, 36 aa, Artificial Sequence
  GFR-binding peptide
  MOD_RES (1)..(2)..(36): Xaa is C or S
  MOD_RES (16)..(17)..(18)..(19)..(20): Xaa is A or G
  MOD_RES (21)..(22)..(23)..(24): Xaa is A or G or is absent
XXVPTELSPISMLYKXXXXXXXXXLKYHYEMVVEGX

SEQ ID NO: 7209 - protein, 38 aa, Artificial Sequence
  GFR-binding peptide
  MOD_RES (1)..(35)..(37): Xaa is C or S
  MOD_RES (15)..(16)..(17)..(18)..(19): Xaa is A or G
  MOD_RES (20)..(21)..(22)..(23): Xaa is A or G or is absent
XAPTKLSAISVLYLXXXXXXXXXLKNYQNMVVKAXGXH

SEQ ID NO: 7210 - protein, 39 aa, Artificial Sequence
  GFR-binding peptide
  MOD_RES (5)..(6): Xaa is C or S
  MOD_RES (20)..(21)..(22)..(23)..(24): Xaa is A or G
  MOD_RES (25)..(26)..(27)..(28): Xaa is A or G or is absent
IPKAXXVPTELSAISMLYLXXXXXXXXXLKNYQDMVVEG

SEQ ID NO: 7211 - protein, 34 aa, Artificial Sequence
  GFR-binding peptide
  MOD_RES (14)..(15)..(16)..(17)..(18): Xaa is A or G
  MOD_RES (19)..(20)..(21)..(22): Xaa is A or G or is absent
TQVQLSAISVLYLXXXXXXXXXLKNYQTLEDHLA

SEQ ID NO: 7212 - protein, 40 aa, Artificial Sequence
  GFR-binding peptide
  MOD_RES (1)..(38)..(40): Xaa is C or S
XRPTQVQLSATSVLYYEIVRKKPIFLRKHRTLEDHLAXKX

SEQ ID NO: 7213 - protein, 37 aa, Artificial Sequence
  GFR-binding peptide
  MOD_RES (6)..(7): Xaa is C or S
ASAAPXXVPQALSATSILYYVGRKPKVLRKHRMIVRS

SEQ ID NO: 7214 - protein, 36 aa, Artificial Sequence
  GFR-binding peptide
  MOD_RES (1)..(33)..(35): Xaa is C or S
XVPTELNAISMLYFDENEKVVLKKYRDMVVEGXGXR

SEQ ID NO: 7215 - protein, 32 aa, Artificial Sequence
  GFR-binding peptide
  MOD_RES (14)..(15)..(16)..(17)..(18): Xaa is A or G
  MOD_RES (19)..(20)..(21)..(22): Xaa is A or G or is absent
VPQALSAISILYLXXXXXXXXXLKNYQMIVRS

SEQ ID NO: 7216 - protein, 36 aa, Artificial Sequence
  GFR-binding peptide
  MOD_RES (5)..(6): Xaa is C or S
SASPXXVPQDLSATSILYYVGRTPKVLRKHRMVVKS

SEQ ID NO: 7217 - protein, 35 aa, Artificial Sequence
  GFR-binding peptide
RPTQVQLSAISVLYLEIVRKKPIFLKNYQTLEDHL

SEQ ID NO: 7218 - protein, 36 aa, Artificial Sequence
  GFR-binding peptide
  MOD_RES (3)..(4): Xaa is C or S
KAXXVPTKLSAISVLYLDDMGVPTLKNYQEGMSVAE

SEQ ID NO: 7219 - protein, 41 aa, Artificial Sequence
  GFR-binding peptide
  MOD_RES (4)..(5)..(38)..(40): Xaa is C or S
  MOD_RES (19)..(20)..(21)..(22)..(23): Xaa is A or G
  MOD_RES (24)..(25)..(26)..(27): Xaa is A or G or is absent
ASPXXVPQDLSATSILYYXXXXXXXXXLRKHRMVVKSXKXS

SEQ ID NO: 7220 - protein, 41 aa, Artificial Sequence
  GFR-binding peptide
  MOD_RES (3)..(4)..(38)..(40): Xaa is C or S
  MOD_RES (18)..(19)..(20)..(21)..(22): Xaa is A or G
  MOD_RES (23)..(24)..(25)..(26): Xaa is A or G or is absent
KAXXVPTELSPISMLYKXXXXXXXXXLKYHYEMVVEGXGXR

SEQ ID NO: 7221 - protein, 34 aa, Artificial Sequence
  GFR-binding peptide
  MOD_RES (1)..(2)..(34): Xaa is C or S
XXAPTKLSATSVLYYDDSSNVILRKHRNMVVRSX

SEQ ID NO: 7222 - protein, 40 aa, Artificial Sequence
  GFR-binding peptide
  MOD_RES (4)..(5)..(39): Xaa is C or S
  MOD_RES (19)..(20)..(21)..(22)..(23): Xaa is A or G
  MOD_RES (24)..(25)..(26)..(27): Xaa is A or G or is absent
PKAXXVPTELSATSMLYYXXXXXXXXXLRKHRDMVVEGXG

SEQ ID NO: 7223 - protein, 34 aa, Artificial Sequence
  GFR-binding peptide
  MOD_RES (1)..(2)..(34): Xaa is C or S
XXAPTKLSAISVLYLDSSNNVILKNYQNMVVKAX

SEQ ID NO: 7224 - protein, 37 aa, Artificial Sequence
  GFR-binding peptide
  MOD_RES (3)..(4)..(37): Xaa is C or S
  MOD_RES (18)..(19)..(20)..(21)..(22): Xaa is A or G
  MOD_RES (23)..(24)..(25)..(26): Xaa is A or G or is absent
SPXXVSQDLSPISILYKXXXXXXXXXLKYHYMIVKSX

SEQ ID NO: 7225 - protein, 36 aa, Artificial Sequence
  GFR-binding peptide
  MOD_RES (1)..(36): Xaa is C or S
  MOD_RES (15)..(16)..(17)..(18)..(19): Xaa is A or G
  MOD_RES (20)..(21)..(22)..(23): Xaa is A or G or is absent
XVPTKLSAISVLYLXXXXXXXXXLKNYQEGMSVAEX

SEQ ID NO: 7226 - protein, 40 aa, Artificial Sequence
  GFR-binding peptide
  MOD_RES (5)..(6)..(39): Xaa is C or S
  MOD_RES (20)..(21)..(22)..(23)..(24): Xaa is A or G
  MOD_RES (25)..(26)..(27)..(28): Xaa is A or G or is absent
SASPXXVSQDLSATSILYYXXXXXXXXXLRKHRMIVKSXK

SEQ ID NO: 7227 - protein, 40 aa, Artificial Sequence
  GFR-binding peptide
  MOD_RES (4)..(4): Xaa is C or S
NVQXRPTQVQLNAISVLYFEIVRKKPIFLKKYRTLEDHLA

SEQ ID NO: 7228 - protein, 35 aa, Artificial Sequence
  GFR-binding peptide
  MOD_RES (35)..(35): Xaa is C or S
  MOD_RES (14)..(15)..(16)..(17)..(18): Xaa is A or G
  MOD_RES (19)..(20)..(21)..(22): Xaa is A or G or is absent
TQVQLSATSVLYYXXXXXXXXXLRKHRTLEDHLAX

SEQ ID NO: 7229 - protein, 39 aa, Artificial Sequence
  GFR-binding peptide
  MOD_RES (5)..(6)..(38): Xaa is C or S
VPKAXXAPTKLSPISVLYKDSSNNVILKYHYNMVVKAXG

SEQ ID NO: 7230 - protein, 41 aa, Artificial Sequence
  GFR-binding peptide
  MOD_RES (5)..(6)..(38)..(40): Xaa is C or S
VPKPXXAPTKLSATSVLYYDDSSNVILRKHRNMVVRSXGXH

SEQ ID NO: 7231 - protein, 37 aa, Artificial Sequence
  GFR-binding peptide
  MOD_RES (6)..(7): Xaa is C or S
SIPKAXXVPTELSPISMLYKDEYDKVVLKYHYEMVVE

SEQ ID NO: 7232 - protein, 34 aa, Artificial Sequence
  GFR-binding peptide
  MOD_RES (2)..(34): Xaa is C or S
TXAPTKLSPISVLYKDDSSNVILKYHYNMVVRSX

SEQ ID NO: 7233 - protein, 35 aa, Artificial Sequence
  GFR-binding peptide
  MOD_RES (34)..(34): Xaa is C or S
  MOD_RES (14)..(15)..(16)..(17)..(18): Xaa is A or G
  MOD_RES (19)..(20)..(21)..(22): Xaa is A or G or is absent
APTKLSPISVLYKXXXXXXXXXLKYHYNMVVRSXG

SEQ ID NO: 7234 - protein, 40 aa, Artificial Sequence
  GFR-binding peptide
  MOD_RES (6)..(7)..(40): Xaa is C or S
  MOD_RES (21)..(22)..(23)..(24)..(25): Xaa is A or G
  MOD_RES (26)..(27)..(28)..(29): Xaa is A or G or is absent
ASAAPXXVPQALNAISILYFXXXXXXXXXLKKYRMIVRSX

SEQ ID NO: 7235 - protein, 42 aa, Artificial Sequence
  GFR-binding peptide
  MOD_RES (6)..(7)..(41): Xaa is C or S
  MOD_RES (21)..(22)..(23)..(24)..(25): Xaa is A or G
  MOD_RES (26)..(27)..(28)..(29): Xaa is A or G or is absent
YVPKPXXAPTKLSATSVLYYXXXXXXXXXLRKHRNMVVRSXG

SEQ ID NO: 7236 - protein, 39 aa, Artificial Sequence
  GFR-binding peptide
  MOD_RES (6)..(7): Xaa is C or S
  MOD_RES (21)..(22)..(23)..(24)..(25): Xaa is A or G
  MOD_RES (26)..(27)..(28)..(29): Xaa is A or G or is absent
YVPKPXXAPTKLNAISVLYFXXXXXXXXXLKKYRNMVVR

SEQ ID NO: 7237 - protein, 36 aa, Artificial Sequence
  GFR-binding peptide
  MOD_RES (3)..(4)..(35): Xaa is C or S
SPXXVSQDLSAISILYLIGKTPKILKNYQMIVKSXK

SEQ ID NO: 7238 - protein, 31 aa, Artificial Sequence
  GFR-binding peptide
VPTELSATSMLYYDENEKVVLRKHRDMVVEG

SEQ ID NO: 7239 - protein, 36 aa, Artificial Sequence
  GFR-binding peptide
  MOD_RES (3)..(4): Xaa is C or S
  MOD_RES (18)..(19)..(20)..(21)..(22): Xaa is A or G
  MOD_RES (23)..(24)..(25)..(26): Xaa is A or G or is absent
SPXXVSQDLNAISILYFXXXXXXXXXLKKYRMIVKS

SEQ ID NO: 7240 - protein, 39 aa, Artificial Sequence
  GFR-binding peptide
  MOD_RES (4)..(5)..(39): Xaa is C or S
  MOD_RES (19)..(20)..(21)..(22)..(23): Xaa is A or G
  MOD_RES (24)..(25)..(26)..(27): Xaa is A or G or is absent
PKAXXVPTELSATSMLYYXXXXXXXXXLRKHREMVVEGX

SEQ ID NO: 7241 - protein, 35 aa, Artificial Sequence
  GFR-binding peptide
  MOD_RES (3)..(4): Xaa is C or S
KAXXVPTELSPISMLYKDEYDKVVLKYHYEMVVEG

SEQ ID NO: 7242 - protein, 31 aa, Artificial Sequence
  GFR-binding peptide
VPTELSPISMLYKDEYDKVVLKYHYEMVVEG

SEQ ID NO: 7243 - protein, 35 aa, Artificial Sequence
  GFR-binding peptide
  MOD_RES (1)..(1): Xaa is C or S
  MOD_RES (17)..(18)..(19)..(20)..(21): Xaa is A or G
  MOD_RES (22)..(23)..(24)..(25): Xaa is A or G or is absent
XRPTQVQLSPISVLYKXXXXXXXXXLKYHYTLEDH

SEQ ID NO: 7244 - protein, 36 aa, Artificial Sequence
  GFR-binding peptide
  MOD_RES (2)..(3)..(36): Xaa is C or S
  MOD_RES (17)..(18)..(19)..(20)..(21): Xaa is A or G
  MOD_RES (22)..(23)..(24)..(25): Xaa is A or G or is absent
PXXVPQALSPISILYKXXXXXXXXXLKYHYMIVRSX

SEQ ID NO: 7245 - protein, 33 aa, Artificial Sequence
  GFR-binding peptide
  MOD_RES (14)..(15)..(16)..(17)..(18): Xaa is A or G
  MOD_RES (19)..(20)..(21)..(22): Xaa is A or G or is absent
APTKLSPISVLYKXXXXXXXXXLKYHYNMVVRS

SEQ ID NO: 7246 - protein, 34 aa, Artificial Sequence
  GFR-binding peptide
TQVQLNAISVLYFEIVRKKPIFLKKYRTLEDHLA

SEQ ID NO: 7247 - protein, 40 aa, Artificial Sequence
  GFR-binding peptide
  MOD_RES (5)..(37)..(39): Xaa is C or S
TKPTXAPTKLSPISVLYKDDSSNVILKYHYNMVVRSXGXH

SEQ ID NO: 7248 - protein, 43 aa, Artificial Sequence
  GFR-binding peptide
  MOD_RES (5)..(6)..(40)..(42): Xaa is C or S
  MOD_RES (20)..(21)..(22)..(23)..(24): Xaa is A or G
  MOD_RES (25)..(26)..(27)..(28): Xaa is A or G or is absent
IPKAXXVPTELNAISMLYFXXXXXXXXXLKKYREMVVEGXGXR

SEQ ID NO: 7249 - protein, 34 aa, Artificial Sequence
  GFR-binding peptide
  MOD_RES (1)..(1): Xaa is C or S
  MOD_RES (15)..(16)..(17)..(18)..(19): Xaa is A or G
  MOD_RES (20)..(21)..(22)..(23): Xaa is A or G or is absent
XVPTELSATSMLYYXXXXXXXXXLRKHRDMVVEG

SEQ ID NO: 7250 - protein, 37 aa, Artificial Sequence
  GFR-binding peptide
  MOD_RES (5)..(37): Xaa is C or S
TKPTXAPTKLSPISVLYKDDSSNVILKYHYNMVVRSX

SEQ ID NO: 7251 - protein, 38 aa, Artificial Sequence
  GFR-binding peptide
  MOD_RES (3)..(4)..(37): Xaa is C or S
  MOD_RES (18)..(19)..(20)..(21)..(22): Xaa is A or G
  MOD_RES (23)..(24)..(25)..(26): Xaa is A or G or is absent
SPXXVSQDLSATSILYYXXXXXXXXXLRKHRMIVKSXK

SEQ ID NO: 7252 - protein, 35 aa, Artificial Sequence
  GFR-binding peptide
  MOD_RES (2)..(3)..(35): Xaa is C or S
AXXAPTKLSAISVLYLDSSNNVILKNYQNMVVKAX

SEQ ID NO: 7253 - protein, 38 aa, Artificial Sequence
  GFR-binding peptide
  MOD_RES (1)..(2)..(36)..(38): Xaa is C or S
  MOD_RES (16)..(17)..(18)..(19)..(20): Xaa is A or G
  MOD_RES (21)..(22)..(23)..(24): Xaa is A or G or is absent
XXAPTKLSATSVLYYXXXXXXXXXLRKHRNMVVRSXGX

SEQ ID NO: 7254 - protein, 38 aa, Artificial Sequence
  GFR-binding peptide
  MOD_RES (3)..(4)..(38): Xaa is C or S
  MOD_RES (18)..(19)..(20)..(21)..(22): Xaa is A or G
  MOD_RES (23)..(24)..(25)..(26): Xaa is A or G or is absent
KAXXVPTELSAISMLYLXXXXXXXXXLKNYQDMVVEGX

SEQ ID NO: 7255 - protein, 37 aa, Artificial Sequence
  GFR-binding peptide
  MOD_RES (4)..(5): Xaa is C or S
  MOD_RES (19)..(20)..(21)..(22)..(23): Xaa is A or G
  MOD_RES (24)..(25)..(26)..(27): Xaa is A or G or is absent
PKAXXVPTELSAISMLYLXXXXXXXXXLKNYQDMVVE

SEQ ID NO: 7256 - protein, 40 aa, Artificial Sequence
  GFR-binding peptide
  MOD_RES (5)..(6)..(37)..(39): Xaa is C or S
SASPXXVPQDLNAISILYFVGRTPKVLKKYRMVVKSXKXS

SEQ ID NO: 7257 - protein, 40 aa, Artificial Sequence
  GFR-binding peptide
  MOD_RES (4)..(5)..(39): Xaa is C or S
  MOD_RES (19)..(20)..(21)..(22)..(23): Xaa is A or G
  MOD_RES (24)..(25)..(26)..(27): Xaa is A or G or is absent
PKPXXAPTQLNAISVLYFXXXXXXXXXLKKYRNMVVRAXG

SEQ ID NO: 7258 - protein, 35 aa, Artificial Sequence
  GFR-binding peptide
  MOD_RES (1)..(2): Xaa is C or S
  MOD_RES (16)..(17)..(18)..(19)..(20): Xaa is A or G
  MOD_RES (21)..(22)..(23)..(24): Xaa is A or G or is absent
XXVPTELSAISMLYLXXXXXXXXXLKNYQDMVVEG

SEQ ID NO: 7259 - protein, 30 aa, Artificial Sequence
  GFR-binding peptide
VPQDLSAISILYLVGRTPKVLKNYQMVVKS

SEQ ID NO: 7260 - protein, 42 aa, Artificial Sequence
  GFR-binding peptide
  MOD_RES (4)..(5)..(40)..(42): Xaa is C or S
  MOD_RES (19)..(20)..(21)..(22)..(23): Xaa is A or G
  MOD_RES (24)..(25)..(26)..(27): Xaa is A or G or is absent
GKAXXVPTKLSATSVLYYXXXXXXXXXLRKHREGMSVAEXGX

SEQ ID NO: 7261 - protein, 32 aa, Artificial Sequence
  GFR-binding peptide
  MOD_RES (14)..(15)..(16)..(17)..(18): Xaa is A or G
  MOD_RES (19)..(20)..(21)..(22): Xaa is A or G or is absent
VPTELSPISMLYKXXXXXXXXXLKYHYDMVVE

SEQ ID NO: 7262 - protein, 42 aa, Artificial Sequence
  GFR-binding peptide
  MOD_RES (4)..(5)..(40)..(42): Xaa is C or S
  MOD_RES (19)..(20)..(21)..(22)..(23): Xaa is A or G
  MOD_RES (24)..(25)..(26)..(27): Xaa is A or G or is absent
GKAXXVPTKLSAISVLYLXXXXXXXXXLKNYQEGMSVAEXGX

SEQ ID NO: 7263 - protein, 40 aa, Artificial Sequence
  GFR-binding peptide
  MOD_RES (4)..(5)..(39): Xaa is C or S
  MOD_RES (19)..(20)..(21)..(22)..(23): Xaa is A or G
  MOD_RES (24)..(25)..(26)..(27): Xaa is A or G or is absent
PKAXXAPTKLSATSVLYYXXXXXXXXXLRKHRNMVVKAXG

SEQ ID NO: 7264 - protein, 40 aa, Artificial Sequence
  GFR-binding peptide
  MOD_RES (3)..(4)..(37)..(39): Xaa is C or S
KAXXVPTKLSAISVLYLDDMGVPTLKNYQEGMSVAEXGXR

SEQ ID NO: 7265 - protein, 40 aa, Artificial Sequence
  GFR-binding peptide
  MOD_RES (4)..(5)..(38)..(40): Xaa is C or S
GKAXXVPTKLSATSVLYYDDMGVPTLRKHREGMSVAEXGX

SEQ ID NO: 7266 - protein, 37 aa, Artificial Sequence
  GFR-binding peptide
  MOD_RES (3)..(4): Xaa is C or S
  MOD_RES (18)..(19)..(20)..(21)..(22): Xaa is A or G
  MOD_RES (23)..(24)..(25)..(26): Xaa is A or G or is absent
KAXXVPTELSAISMLYLXXXXXXXXXLKNYQEMVVEG

SEQ ID NO: 7267 - protein, 33 aa, Artificial Sequence
  GFR-binding peptide
  MOD_RES (1)..(2): Xaa is C or S
XXVPTELSPISMLYKDENEKVVLKYHYDMVVEG

SEQ ID NO: 7268 - protein, 38 aa, Artificial Sequence
  GFR-binding peptide
  MOD_RES (2)..(3)..(36)..(38): Xaa is C or S
  MOD_RES (17)..(18)..(19)..(20)..(21): Xaa is A or G
  MOD_RES (22)..(23)..(24)..(25): Xaa is A or G or is absent
PXXVSQDLSATSILYYXXXXXXXXXLRKHRMIVKSXKX

SEQ ID NO: 7269 - protein, 45 aa, Artificial Sequence
  GFR-binding peptide
  MOD_RES (5)..(42)..(44): Xaa is C or S
  MOD_RES (21)..(22)..(23)..(24)..(25): Xaa is A or G
  MOD_RES (26)..(27)..(28)..(29): Xaa is A or G or is absent
RNVQXRPTQVQLNAISVLYFXXXXXXXXXLKKYRTLEDHLAXKXE

SEQ ID NO: 7270 - protein, 37 aa, Artificial Sequence
  GFR-binding peptide
  MOD_RES (2)..(2): Xaa is C or S
QXRPTQVQLNAISVLYFEIVRKKPIFLKKYRTLEDHL

SEQ ID NO: 7271 - protein, 33 aa, Artificial Sequence
  GFR-binding peptide
  MOD_RES (14)..(15)..(16)..(17)..(18): Xaa is A or G
  MOD_RES (19)..(20)..(21)..(22): Xaa is A or G or is absent
APTKLSATSVLYYXXXXXXXXXLRKHRNMVVRS

SEQ ID NO: 7272 - protein, 36 aa, Artificial Sequence
  GFR-binding peptide
  MOD_RES (3)..(4): Xaa is C or S
  MOD_RES (18)..(19)..(20)..(21)..(22): Xaa is A or G
  MOD_RES (23)..(24)..(25)..(26): Xaa is A or G or is absent
KAXXAPTKLSAISVLYLXXXXXXXXXLKNYQNMVVK

SEQ ID NO: 7273 - protein, 40 aa, Artificial Sequence
  GFR-binding peptide
  MOD_RES (4)..(38)..(40): Xaa is C or S
  MOD_RES (18)..(19)..(20)..(21)..(22): Xaa is A or G
  MOD_RES (23)..(24)..(25)..(26): Xaa is A or G or is absent
KPTXAPTKLSATSVLYYXXXXXXXXXLRKHRNMVVRSXGX

SEQ ID NO: 7274 - protein, 38 aa, Artificial Sequence
  GFR-binding peptide
  MOD_RES (6)..(7)..(38): Xaa is C or S
ASASPXXVPQDLSAISILYLVGRTPKVLKNYQMVVKSX

SEQ ID NO: 7275 - protein, 38 aa, Artificial Sequence
  GFR-binding peptide
  MOD_RES (3)..(4)..(37): Xaa is C or S
  MOD_RES (18)..(19)..(20)..(21)..(22): Xaa is A or G
  MOD_RES (23)..(24)..(25)..(26): Xaa is A or G or is absent
APXXVPQALSPISILYKXXXXXXXXXLKYHYMIVRSXK

SEQ ID NO: 7276 - protein, 38 aa, Artificial Sequence
  GFR-binding peptide
  MOD_RES (36)..(38): Xaa is C or S
PTQVQLSAISVLYLEIVRKKPIFLKNYQTLEDHLAXKX

SEQ ID NO: 7277 - protein, 44 aa, Artificial Sequence
  GFR-binding peptide
  MOD_RES (6)..(7)..(41)..(43): Xaa is C or S
  MOD_RES (21)..(22)..(23)..(24)..(25): Xaa is A or G
  MOD_RES (26)..(27)..(28)..(29): Xaa is A or G or is absent
AVPKAXXAPTKLSATSVLYYXXXXXXXXXLRKHRNMVVKAXGXH

SEQ ID NO: 7278 - protein, 41 aa, Artificial Sequence
  GFR-binding peptide
  MOD_RES (4)..(5)..(38)..(40): Xaa is C or S
  MOD_RES (19)..(20)..(21)..(22)..(23): Xaa is A or G
  MOD_RES (24)..(25)..(26)..(27): Xaa is A or G or is absent
ASPXXVSQDLSPISILYKXXXXXXXXXLKYHYMIVKSXKXS

SEQ ID NO: 7279 - protein, 34 aa, Artificial Sequence
  GFR-binding peptide
  MOD_RES (3)..(4): Xaa is C or S
KAXXVPTELNAISMLYFDEYDKVVLKKYREMVVE

SEQ ID NO: 7280 - protein, 36 aa, Artificial Sequence
  GFR-binding peptide
  MOD_RES (1)..(33)..(35): Xaa is C or S
XAPTQLSPISVLYKDDSSNVILKYHYNMVVRAXGXH

SEQ ID NO: 7281 - protein, 39 aa, Artificial Sequence
  GFR-binding peptide
  MOD_RES (5)..(6)..(38): Xaa is C or S
IPKAXXVPTELNAISMLYFDEYDKVVLKKYREMVVEGXG

SEQ ID NO: 7282 - protein, 36 aa, Artificial Sequence
  GFR-binding peptide
  MOD_RES (2)..(3)..(36): Xaa is C or S
AXXVPTKLSAISVLYLDDMGVPTLKNYQEGMSVAEX

SEQ ID NO: 7283 - protein, 37 aa, Artificial Sequence
  GFR-binding peptide
  MOD_RES (1)..(35)..(37): Xaa is C or S
  MOD_RES (15)..(16)..(17)..(18)..(19): Xaa is A or G
  MOD_RES (20)..(21)..(22)..(23): Xaa is A or G or is absent
XVPTELSAISMLYLXXXXXXXXXLKNYQEMVVEGXGX

SEQ ID NO: 7284 - protein, 33 aa, Artificial Sequence
  GFR-binding peptide
  MOD_RES (32)..(32): Xaa is C or S
VPTELSPISMLYKDEYDKVVLKYHYEMVVEGXG

SEQ ID NO: 7285 - protein, 38 aa, Artificial Sequence
  GFR-binding peptide
  MOD_RES (3)..(4)..(36)..(38): Xaa is C or S
KAXXVPTELSATSMLYYDEYDKVVLRKHREMVVEGXGX

SEQ ID NO: 7286 - protein, 34 aa, Artificial Sequence
  GFR-binding peptide
  MOD_RES (1)..(2)..(33): Xaa is C or S
XXVPQDLSATSILYYVGRTPKVLRKHRMVVKSXK

SEQ ID NO: 7287 - protein, 37 aa, Artificial Sequence
  GFR-binding peptide
  MOD_RES (3)..(4): Xaa is C or S
  MOD_RES (18)..(19)..(20)..(21)..(22): Xaa is A or G
  MOD_RES (23)..(24)..(25)..(26): Xaa is A or G or is absent
KAXXVPTELNAISMLYFXXXXXXXXXLKKYREMVVEG

SEQ ID NO: 7288 - protein, 42 aa, Artificial Sequence
  GFR-binding peptide
  MOD_RES (5)..(6)..(40)..(42): Xaa is C or S
  MOD_RES (20)..(21)..(22)..(23)..(24): Xaa is A or G
  MOD_RES (25)..(26)..(27)..(28): Xaa is A or G or is absent
VPKAXXAPTKLNAISVLYFXXXXXXXXXLKKYRNMVVKAXGX

SEQ ID NO: 7289 - protein, 34 aa, Artificial Sequence
  GFR-binding peptide
  MOD_RES (31)..(33): Xaa is C or S
VSQDLNAISILYFIGKTPKILKKYRMIVKSXKXS

SEQ ID NO: 7290 - protein, 39 aa, Artificial Sequence
  GFR-binding peptide
  MOD_RES (4)..(5)..(37)..(39): Xaa is C or S
PKAXXAPTKLSPISVLYKDSSNNVILKYHYNMVVKAXGX

SEQ ID NO: 7291 - protein, 37 aa, Artificial Sequence
  GFR-binding peptide
  MOD_RES (6)..(7): Xaa is C or S
SIPKAXXVPTELSATSMLYYDEYDKVVLRKHREMVVE

(The sequence listing continues in the following parts.)
